United States Patent Application Publication US 2005/0228172 A9 - sequence listing, part 186

SEQ ID NO: 837838 - DNA, 602 bp, Homo sapiens
tatgctcaaaggaaattaaatcaccatctcatactgatgatggcattctcaagttcattgcagcattattaatagtatccaaaatatggtaacaatctgagcgtctgttgacagttggatggataaagaaactgtggtatacaatggaatattatgcagcctcaaaaaagaatgagatcttgctatttgtcacaacgtggatgaggctgcaggacattatgctaagtaaaataaaacagacacagaaagaaaaatacaatatgatctcatttatatgtggattcttcaaaataaatttaaatatacaaaaatagagaataggcatggtgcagtggctcacacctataatcactttaggaggccaaggtgaagggatcacttgagctcaggcgtttgaggtcacagtaagctatgattgtgccactgcactccagcctgggcaacagagcaataccctgtcttttttttttttcttttaaaaaggcaatagagaatacatggtgattaccaggtgtaggggtaggcgatgtgtgtwggtgggaaggaaatggcaagactaggtcagaagataaaaagtagcagatacatagggagaacaattc

SEQ ID NO: 837839 - DNA, 613 bp, Homo sapiens
gtatatatgagttgagcctgtaaagttatgagatgggatttttcttgtggtttgtggaatcagttttagaagctgaggaaacaacggaggtgatttaggctgcccagatggataagttgtaaragaatttatgtgatgctgagatatgtgatagagttgagatgatgtaaatgaagagattttggaaagtagaaagcactacataaagatattccaactcagagtggttaataatcactatgttattcagcacattgactaggaattacattattttatataagccttgtatttcaggttaaatgttatccaagagagcattttaggaagtgatttctatttcatctggagtagtcttctggttttcattatgattttaatattattgacaatgcatatttgttttagctgaggaggatgtacacagtgtaacttgtacctttttccagagctgttgcaatgttctacaggcaagcattaattcaactttgctaatggatataaaggcacagaaaagttgagagtgcttcttgatgtcacacagcaaggcagcagcaggataaggttaggacacagaagccttgaccttcagttatgtgctcacaactcttga

SEQ ID NO: 837840 - DNA, 600 bp, Homo sapiens
attgttaatgataacattgatcacttggttgaggtagcctttgtcaggtgtctccattatcatgtttttttccttgcattcctccttttcatgctaaattcattggaaattagtaactacacccaatccatacttaagaagtggacagaatatttacataaattacatggaatttttctacatgggagatttgtctttttcccttcattcatttattaatttattcaatattttatttatactagtacaaacccatgtgtatttattttatactttgtgtgataatacaatacggctttatttggttgctcaaattgttctaaccttggtgcttgggagttcattcagttgactcctgtgtccttttgacatactgccgtcaatatgggttttcctttctctctctctctctctctctctctctctcctccttttagtacttattttctggcatgtatcccaggctcattgtgtatgttttctgtcccaatcttagaattaacsatttttccatgtagtcctggctccttttattggagaatatgttagaaaccaagatctgggtgataggtgtgttctttgctgtcagggttttatatc

SEQ ID NO: 837841 - DNA, 633 bp, Homo sapiens
tttacatcaaagtgaaccagaaaacagtcaagacataataggaaaactacttagtagaattacctgatgactcataaccaggcatctgcatctagtcaacaggttggcaaacttctgaaaggggctacayagtaaatattttaggttttggggactagacagtctaacagcctaaagtcaattctactatggtagtgtgaaagcagctatagacaataggtaactgaatgagtatcgtcgtgttgtaataaaactttatttacagacaccacaattttagttttatgtaattttaagatattataaaatattgttccactttttatttaatcctttacaaatatgaaaaccattcttagctcacaggctacataaaaacaggccagatcgtcttggggactgtagtttatccatacctactctaggctctataacaaggccttaataagaagccatgaattgctttgaaaaccagaacagttgtttgccaaaggggttataaatttgcttcaaaaccctaggagactttactgtgattcaaccttcaaaggtttgccacaagctacatacagctttctggtcggctgtcaacacattgagtgatactagatatgcaggttcatgagggcaaat

SEQ ID NO: 837842 - DNA, 587 bp, Homo sapiens
tgattggaattacattatatacatttttaacatggaaatccaaatcagataaacgtarctatggaaatcaacttggaaatgctcaatagtttcttctgcaaaaggcttttctttcctttgttattattcaccaatgttttggggggatgaaaaccttctctgtattttcgaccctggacactttcacagtaccaagagacagtggactcatgtcccagctcttcccagcagataactccttagatagactaagaatccaacagcctcttctagtaggcttatttttggttattgagtagcatcaacagaaaactgagagggaaaagagctggaaatgtggggttaaactgccttaaacctcaggtattgtgatcagtttttaaaaaccatttaaggatgccacacatctccagagacttcagaccacggtttccatttaattgcttccatatgaactatgtgtttgcttgctacctaatttttttcttatgtgaagtatgatattttatctaatgattttgttattttccttagatgtagaaacattgtcttcaagtattatagcactattttaaaatatttggttg

SEQ ID NO: 837843 - DNA, 587 bp, Homo sapiens
tgattggaattacattatatacatttttaacatggaaatccaaatcagataaacgtagctatggaaatcaacttggaaatgctcaayagtttcttctgcaaaaggcttttctttcctttgttattattcaccaatgttttggggggatgaaaaccttctctgtattttcgaccctggacactttcacagtaccaagagacagtggactcatgtcccagctcttcccagcagataactccttagatagactaagaatccaacagcctcttctagtaggcttatttttggttattgagtagcatcaacagaaaactgagagggaaaagagctggaaatgtggggttaaactgccttaaacctcaggtattgtgatcagtttttaaaaaccatttaaggatgccacacatctccagagacttcagaccacggtttccatttaattgcttccatatgaactatgtgtttgcttgctacctaatttttttcttatgtgaagtatgatattttatctaatgattttgttattttccttagatgtagaaacattgtcttcaagtattatagcactattttaaaatatttggttg

SEQ ID NO: 837844 - DNA, 586 bp, Homo sapiens
gtattacattttcaaaactgacagagataggaaagaaaaacttatccgggaaggaaaattggatggaacatttaacctttcatattaagtctggcaatgatgactatatgtattcctgccttaatagtctattaatcattaataaataaataaataaataaataaataaaatgggctctttatggccaggagcggtggctcacacctgtaatcccagcactttgggaggcggatgcaggcagatcacctgaggtcaggagtttgagaccagcctggccaacatagtgaaaccctgtctctactaaaaatacaaaagattagctgaggatggtggcatgcacctgtaatcccagctattagggaggctgaggcaggagaatcgcttgaaccttggaggcagaggttgcagtgagccgagatcgtgccattgcactccagcctgggcaacaagagcaaaactccgtctcaaaaaaaaaaaaaagggctctttgttttgatgcactgttatatgagatcccwtatcaatggagcaaatattttgtaagctcttgaaagtggtgctggctgagcacactttgaggctcta

SEQ ID NO: 837845 - DNA, 540 bp, Homo sapiens
ctactcactgcactccagcctgggtgacagagcaagacyatctgtgaaaacagacacacacacacacagtcattattcttcatctactatttgcaggtccactgtgtgacttttaacaagccactgtataatatttcatatactatgcagttactgtaagtaagctattctcctattgctgaacatttgttagattatttcagttttttactatataatgttacaaagatacattcatttttgcccaattctctatttaggaaaaagttgtggaaaggtacttactaggtcaaaaggtatgaatgattttaagattcgagagaattcccaaattgcttacaaatttatactctaccaacagaatgagttttcatctctccgtacccttgccagtgataggcatcatcacttctttgattaaatattattttaatttatatttctgtttttattaccaaagtggaaaatttttcatgtttattagttatgtttattctacaaaattaactgttttaagtcctttgccactttagacaaatc

SEQ ID NO: 837846 - DNA, 609 bp, Homo sapiens
ctatacatttatgatattcaggtgacagatgaaatatcagcccagatgagactcacaaaagacccagytggtccacagattcatcctatgattcctttttcagttccaagatgtataattggaatagacctactaggccactggtagactctctagtgattctgaaccacaggtaagaaatatgatgaaggaaggaacatgatgaagaaagggctataacagttcctggaacttttccttatcaagatagaactgcagaaattagtacaacaatcacagactttaaagacaaagggataggatacctaccacatcctctcttaactcatttgtttacgcaagttggatgaatcttggtgaataactggattgtgtaaactaggtggtctctgtgatagcagctgctattccggatatggtattttcactgaggaaaatcaatacaacctctagcccctggcatgcagctacacatctgataatgcagctactcaccaggcagcagagactagcactgaaccccagagtcacccctgggactggccagctacctactggcaggttgattgtgttggatgccttctattaggcagtgggcagagatttgtc

SEQ ID NO: 837847 - DNA, 601 bp, Homo sapiens
ggaggatcctttgagcccaggagttcaagaccagcctgggcaagatagtgagactctgtctctaccaaaaaaaaaaaacaaaaaaattaatgtgacgtggtggcacccacctgcaagcccagctacttgggaggctgaggcaggaggatcagtgtgcctgggagattgaggttgcagtgagctggggttgcaccactgcactccagcctgggagataaagtgagactttgtcaaaaaaaaaaaaaaaagaaagaaagaaagagaaaagaaaagaaaagaggccaggtggccgggtgctgtggctcacacctgtaatcctagcactttgggaggccgaggcgggtggatcacctgaggtcaggagtttgagaccagcctggacaacatggtgaaaccccatctctactaaaaatacaaaaattagctgggtgtggtgacgggcgcctgtaatcccagctactagggaggctgaggcagaagaattgctggaacccgggaggtggaggttgcagtgagccragatcgtgccattgcactccagcccggggccaacaacagcgaggctccatctcaaaaaaaaaaagaaagaaagaaagaaaga

SEQ ID NO: 837848 - DNA, 602 bp, Homo sapiens
tctgcatctcacccccgcagaggagtggctgtaggtacctccctgtaatccaattgtgagttggagtcttgctttaggctgtctgaataattagcacaaatgtagtcaactatcccctactgtaggggaatttataggcagggcttatagggatttgcaaagcaagtgagaatactagcagattgaaaaatgaaaacaatttgttgggcacaatcgaactacagaaatatcttctttaaattctgactatctttttttcttttttcagtattaagtccatctgagaaactagagccttgggacccagggatgaggaaacttaccgtacagacatgcgggctgaccttcattcaccctgcgggccatggcctctgccatccaactgcagaggcttcagccgaaactctctccagcactgccctaaacagaccaagtgtgagggagggagcatgtaatgaaaagtccacagagaacaagaagccacaagattcggtgctctgragccattctagatggtttcaggggaactagcttcccacctctgacagggataccatggcaaataccactctttgcctaggattataattctttgtgcacaa

SEQ ID NO: 837849 - DNA, 567 bp, Homo sapiens
acttgctccatctctgaactggtcttacccccttaaacctgcctttatatctaggagtttctttattttattttatttttttgagacagagtctcgctccattgcccaggctggactgcagcrgcgtgatctcagctcactgcaacctccacctcctgggttcaagtgattcttgtgcctcagcctcccaagtagctgggattaaaggcacgtgccaccatgactggccaatttttatatttttagtagagatgaggtttcaccatgttggccaggctggtctcaaactcttgacttcaagtgatccgcccgcctcagcctcccaaagtgctgggattacaggtgtgagccaccaggcccagcctatatctaggagtctcttgatgagcattggtcgacagaaagaagtctcttctaaaaattgttaatgcttttatagactactcatagtctgagtcataaaacatcatttgcctttcaatttataccttccaagtgaatatgattattgaggattatctaattattatctacgtttctctctagatataaaaaacaccatagatc

SEQ ID NO: 837850 - DNA, 567 bp, Homo sapiens
acttgctccatctctgaactggtcttacccccttaaacctgcctttatatctaggagtttctttattttattttatttttttgagacagagtctcgctccattgcccaggctggactgcagcggcgtgatctcagctcactgcaacctccacctcctgggttcaagtgattcttgtgcctcagcctcccaagtagctgggattaaaggcacgtgccaccatgactggccaatttttatatttttagtagagatgaggtttcaccatgttggccaggctggtctcaaactcttgacttcaagtgatccgcccgcctcagcctcccaaagtgctgggattacaggtgtgagccaccaggcccagcctatatctaggagtctcttgatgagcattggtcgacagaaagaagtctcttctaaaaattgttaatgcttttatagactactcatagtctgmgtcataaaacatcatttgcctttcaatttataccttccaagtgaatatgattattgaggattatctaattattatctacgtttctctctagatataaaaaacaccatagatc

SEQ ID NO: 837851 - DNA, 567 bp, Homo sapiens
acttgctccatctctgaactggtcttacccccttaaacctgcctttatatctaggagtttctttattttattttatttttttgagacagagtctcgctccattgcccaggctggactgcagcggcgtgatctcagctcactgcaacctccacctcctgggttcaagtgattcttgtgcctcagcctcccaagtagctgggattaaaggcacgtgccaccatgactggccaatttttatatttttagtagagatgaggtttcaccatgttggccaggctggtctcaaactcttgacttcaagtgatccgcccgcctcagcctcccaaagtgctgggattacaggtgtgagccaccaggcccagcctatatctaggagtctcttgatgagcattggtcgacagaaagaagtctcttctaaaaattgttaatgcttttatagactactcatagtctgagtcataaaacatcatttgcctttcaatttataccttccaagtgaatatgattattgaggattatctaattattatctacktttctctctagatataaaaaacaccatagatc

SEQ ID NO: 837852 - DNA, 543 bp, Homo sapiens
attctaatctcaaggccccttaggcttatgaattcaaaaaaaaaaatagaagaaatgaacaaaaacwtaaatcacagtttgttattaagtaatatctgaaatgaattagaaagaaaccataagccttaacaatactccaatcacagttaaattaatttagacagaaaagcaaatagcaattgacttgaaaataagaagtggagccgaaggtggatacaagaaatccaggagggctaagataaatcccaaatccaatgttcatcaatgcctacacattcagtacaacctgatggcattaattctgtggttggggaaatgtgaaagtgaaatcgataataccacagttctaaatgtgcactgttggctgaacttatggtgtggtggggggtggtaaaaattaggcttctaagaaaggatgggactctgccctccaggcaaggagtaaatggccccagcagatggaaaactaaagcaaatgtaatcacctgcattttgaaaataggtgtgtttctgagaatttgtttgaattagttctttgtaaat

SEQ ID NO: 837853 - DNA, 520 bp, Homo sapiens
caaaaaaaaaaatagaagaaatgaacaaaaacttaaatcacagtttgttattaagtaatatctgaaatgaattagaaagaaaccataagccttaacaatactccaatcacagttaaattaatttagacagaaaagcaaatagcaattgacttgaaaataagaagtggagccgaaggtggatacaagaaatccaggagggctaagataaatcccaaatccaatgttcatcaatgcctacacattcagtacaacctgatggcattaattctgtggttggggaaatgtgaaagtgaaatcgataataccacagttctaaatgtgcactgttggctgaacttatggtgtggtggggggtggtaaaaattaggcttctaagaaaggatgggactctgccctccaggcaaggagtaaatggccccagcagatggaaaactaaagcaaatgtaatcacctgcattttgmaaataggtgtgtttctgagaatttgtttgaattagttctttgtaaataaaacaggatt

SEQ ID NO: 837854 - DNA, 600 bp, Homo sapiens
catgttggccaggctggtctygaactcctaacttcaggtgatccacccgtctcggcctcccaaagtgctgggattacaggtgtaagccaccgcacccagccttattttgtatttttgtagagatggagtctggcaaacatataattaccaatttattgctcttctgtttgaaagaagtgttttgactgcagtaaagttctagcctattgtgaaaatcaggctagcccatttctcagatggctgcctggctagacaccctctctgagatggctggaatgattagtagaaaggagtgggcaggaagtaggtggagagtggggattctagatcaggggtcctatggcctgttaagaacgggccattacagcaggaggtgagtggcgggcaagcaagcattaccacctgagctccgtctcccgtcagatcagtggcggcattagattctcctggaagtgcaaatcctactgtgaactgtgcatgcaagggatctaggttacgagctccttgtgagaatctaatgcctgatgatctgagatggaacagtttcatcccaaaaccattccccctaactcctcccccattttttcatggaaaaattgt

SEQ ID NO: 837855 - DNA, 526 bp, Homo sapiens
cccgctcctatgagaatttcatgccatcactaatctgacaggaagcagagctcaggcagtaatgtgagcaatggggagtggctgtaaatacagatgaagcttctcttgcacaccygccactcacctcctggtggtggcttggttcctaacaggccatggaccctggtacaggcccttggactggaggttgagaaccctggcatataggacagtggtcccataagattgtagtggaactgaaaaatccctaccacccagtgacatcatagccatcgtgatgttgtatcacaaagcattactcatgagtttgtggtgatgccggtgtaaacaaacctactgcactgccagtcttataaaagtctagcacatgcaattacgtacagtatataatacttgataattataataaatggccaggtgcggtggctcacgcctgtaaacccaacactttgggaggccgaggcgggcagatcaccggaggtcaggagtttgagaccagcatggccaatgtggtgaaaccctgtca

SEQ ID NO: 837856 - DNA, 526 bp, Homo sapiens
cccgctcctatgagaatttcatgccatcactaatctgacaggaagcagagctcaggcagtaatgtgagcaatggggagtggctgtaaatacagatgaagcttctcttgcacacctgccactcacctcctgstggtggcttggttcctaacaggccatggaccctggtacaggcccttggactggaggttgagaaccctggcatataggacagtggtcccataagattgtagtggaactgaaaaatccctaccacccagtgacatcatagccatcgtgatgttgtatcacaaagcattactcatgagtttgtggtgatgccggtgtaaacaaacctactgcactgccagtcttataaaagtctagcacatgcaattacgtacagtatataatacttgataattataataaatggccaggtgcggtggctcacgcctgtaaacccaacactttgggaggccgaggcgggcagatcaccggaggtcaggagtttgagaccagcatggccaatgtggtgaaaccctgtca

SEQ ID NO: 837857 - DNA, 586 bp, Homo sapiens
ttacgagacaaagtctcactctgtcactcaggcgggagtgcagtggcacaatcatagctcacygaagcctagaactcctgggctcaagtgaccctcctggcctcagcttccccagttgctaggactacaggcacacaccaccatgcccagctaattaaaacaaattttttttttttatagagacagggtctcactatgttggctgggctggtcttaaactcctggcctccccacctcagcctcccaaagctctgggattacaggcatgagccaccttgcctgcctgaaaagagttttgatagtttaaccttaaaccatctaactcttcatggtcaaaccataattggccagcaggacaccagtttgtagctcctgtttttagggatgagtgtaactttatcttccatgtatacctttttcaatgttttattacattagttgcctcttttaaatttgtgacaaaactcttctttttcaaactacttggtagttggtgttgaaatcactacaacaggattattgaagaatacaatttgaaagttgtgttatttattttatgttcaagaaaattaaataaaaacaacta

SEQ ID NO: 837858 - DNA, 552 bp, Homo sapiens
gccattctcacggaacctggatgccctttctccacccctttcagaagctgctagtcatccttcagawcctacctcaagagccacaccctctctggagtcttccccagcttctcttgaaggaatcattccttctttgtgtccctgcagccttttcttcatgcctctgtgttattaacacattgctatgaaaccttccctggccctttagctaaacttttaatatgtcttttctgtgtttaatttttctcttgagtgcttgtcactgtgtcctatgttatatatttcactgattcatcttgtttgttgtctctctaaggacaaggatgcttgtctgtctattcactgatgttctttcagttcttgggaaggagtctggcacattgaagatgctaagtcagtgtgtgttgaatgaatggattctgtcatatttatttgctgctatgtctgtggtcttatcaaatgctgagtccatttggtccttcatgcctagctagtacagtgtcctggtagacagtaatacacagtaaaagtgtattgagtgaacttgggagg

SEQ ID NO: 837859 - DNA, 669 bp, Homo sapiens
tctgagacttaaatatggcaactgagagcaaacggtactactttacaggttctatttccatactaggccccagtggtaataagacatasaaacgatgaaccagagcacaggcagtatgtgagagctccaataaaggtgcaggggactaggggagaacagacaaggggagctaaatgcacaagggggagctcagcagaagacgccatacacattccaggaattttaattcgtagtgctctaattgccatctaaaaaaacttaatgtttattaattgtgcaacaggcctcaaatttccatactccttattttttaaagataatttagaggcagccgagcagaatgaaaaaagaatggacaatttaactcacactattttctctattaagaattttgttttctccaaatgatggcagtttagagtggcatggatttgactgaaatcaaattggtaagatttgatttaatcagtattttctagggaaagtatatacttcatttaaataatgcatattcatcacaattcaggcataaatgaaagcattctattcagaacatacacaaataccattttaacgcaaggatttatttagacttaagaagattacagcaacaacagaacactaagtaatgctttggttattttatcaaagtttaggacacagatagat

SEQ ID NO: 837860 - DNA, 578 bp, Homo sapiens
tcatgtgccagagctgaagcaacacctgacaatcaggggaaatggtgccttggcaacccagagcagtcatgccccctgtgcctgtgctacattggtagcctgtctcctgggaaaattgtrcgttgctgggccagagcagtcacgcttccccaggcctgagctgaaatggcacgttgatccctaagaaattagtgaattggacagttgtgaatccctggacagggctgctatagtaccctgcatctcagggaaacagagcagtggctaagctgagacaccaacccttgcaggccaaaaaactctcatatcctgctttcttggaacaggactagcctagccctctagggactgaggtgctaagaaacttctcttagcaccacttagggagtggaatcatcactgtgctgctcaccttcgcccagggtctaaatgacagctgcagtccgctgttctggagtccttgctgctgctgctcctgctttcacagagtctgggatacttttcagtcccactgtcccagggtctagaatcaccactagatggtgccttatctcctgggacattttttgactctggtt

SEQ ID NO: 837861 - DNA, 518 bp, Homo sapiens
gacacactcaagacagctctgaaaacaaagatatggccttttacaaccatctagattaaaaaaggttatttctgctaggatttgtcacaaagaattacatgttttactcaaactttaaaagcacagttaatctcactctatttttctcatttccaatggagaaaaatttcaatttactgctttgcaatatgaagagtgtgatatttaatttcacagcaaatgagttttctattttcagataatattcattttttgaggtttttcttctaaagacattataaaaccatatcacaacattttcccccataatagtcatgaaatatgcttcctaactttgtgcacatctggggtggagttatcctgagggatgcagtctctatgctttgcagagtgggtactgagattgcccttcagagcacacagcttttttggcagcatccttgctattatactagacattagtcacaacagtgacattcacaagatggaaatacctwtgctcactaaagactggttca

SEQ ID NO: 837862 - DNA, 509 bp, Homo sapiens
ttccatagtccctatgtatgtttaaatatatctacattatatcctatagaattgtaactggaagcttraagttgggggtaacctgcaacttagtccttgtaaactgctggatattctgaaaggtgctttcatacatcaactcatttattatcccagataaccttcaagagaaattatccccattttatatatgagaaaatcaaggccacacaggttaataagtgttccaaaaattacacagtcagcagttggcaaaacagaaactctaactcagatctgtctcattccaaactcatgctctttccataaaaccacagtgacctaggatctaagcttagttccactataattgggctgtaaagcttgggatatattttacctctactggctcagttcctgaatctataaaattagagtgttgatctcggtagcagaaactgctagttgccctcctgatatttacaatcttgtttctttttttcattgtaaaggatcctcaattctcagct

SEQ ID NO: 837863 - DNA, 574 bp, Homo sapiens
ccgtagaactttctgcttaccccatcacagccattgactctgtactttatttcctgtgtgcctgtttcctccagtaaattctaagttctttgaaataagggctatgttttgttcaaaatgggatttataacatccagcaaaataaccagaatgtaatagatatatggtaaatattcattgacttgatgaataatcacaaatggaatgggcacatgtaatatatagaaaaattatttaaattctgattctaggatactggctggcacactgaattgtcagattcctatcttctatgcaactgatatagttcttaccttcttctctactccataggcagacagggatatctgtgggatgtgtacccataaatacacatagacagaagatagatgatagatagaagatagataaatagatagatgataggtatatatatgtgtgtgtatatrtatgtatatatgggtatgtgtgtgtatctgtgcgtgtatatatatacatatatataatgtaggtatgtatacacattatttttatatataatgtgtgcatattagtcggttttcatgctgctgat

SEQ ID NO: 837864 - DNA, 519 bp, Homo sapiens
atctatcatcactttagatattttcagactttatcagcagacttttccttatatatagttgtkccgggtataaatagcagacttctgcttggttgtgtagttactgaaaacagcatttgttttcttatctccatccagaaaagatcagcacttctagaactgaagctttatttcttttgctcttgtgttgctgatcaaactgttcatgttagattgaatacaggtaaatcacatctttggaaataagcatctattttaacattttcacactgtgaataaaataacatagggcacatcacaacacacaattttattccactgtctgaaacatgctttttttgttccgaatgtatttttggtttatctcatattccctttttctcactccccctcctattcctttctactctgtgggtcaaatgagcagagcaaactttttcttcataaaaagttacttcaatactgggccacgcacatcatggacaacatattaattgccataagagcatgggattctgc

SEQ ID NO: 837865 - DNA, 519 bp, Homo sapiens
atctatcatcactttagatattttcagactttatcagcagacttttccttatatatagttgtgccgggtataaatagcagacttctgcttggttgtgtagttactgaaaacagcatttgttttcttatctccatccagaaaagatcagcacttctagaactgaagctttatttcttttgctcttgtgttgctgatcaaactgttcatgttagattgaatacaggtaaatcacatctttggaaataagcatctattttaacattttcacactgtgaataaaataacatagggcacatcacaacacacaattttattccactgtctgaaacatgctttttttgttccgaatgtatttttggtttatctcatattccctttttctcactccccctcctattcctttctactctgtgggtcaaatgagcagagcaaactytttcttcataaaaagttacttcaatactgggccacgcacatcatggacaacatattaattgccataagagcatgggattctgc

SEQ ID NO: 837866 - DNA, 561 bp, Homo sapiens
tctaaaggctgcatgtttctataagaacgcttggcaagcttattattcttgacgactagcatagtatatctttcrcaattttatgtgagattaggtgttcagtatgtttcatacaaactgatttattgtgtctctcatacatgttggatacaggatgaattcaatagtctctagggcgatgaaactctacctctaaactagagtttgagaaactcatataggctggtgctttagttcttttgacaatgtgccacctcctgtaatcttccatgtctgagggtagtgagtgtggaaacagttaccctttacccttcctattcattttaccatcacctcagacacccaagaccgtcacttcaacacttccataggatcatgtgtcaggcagccacttgaggagtggccatgctcatgtcttccaggagttttcacaccattgctctgaaacaccaacggactctttgatcaatgtcctctcttgccttcagtctatatggtgatgtgttttgctgggttgcccttatattgcgccagacaaagaacagtcgatccttgagcaca

SEQ ID NO: 837867 - DNA, 507 bp, Homo sapiens
ttaaaagctttgagatgatgattgttaatgtgagtggtgttatgttaataaataattaaaaatggcttaaatatttttaaaatacctctgtggtttttaggtttgcttgcttgyttaccagcttatttcatttacacatataattttatccagaaaccccatgtatcaaataaataaaagtatagctgctctgtttcaaagggggaggagagcatgaagcccagagctccatataaagagtctcccactggatttcagaggctccactgagaaactttggtttattcagagcacaattaaaaatgatgtgcacagtgactgggaatattatgatgccatagaaagaaatggaatttgtaagaggagtaagttgggcatagaggttaatgaatttggtgcccatactgaggtgacaaacattcaggtaaatatgtccaggaggagacacgtacacacacactcacaaatggttaattctctaaacaagaagtacattgataatcattg

SEQ ID NO: 837868 - DNA, 499 bp, Homo sapiens
aatgtgagtggtgttatgttaataaataattaaaaatggcttaaatatttttaaaatacctctgtggtttttaggtttgcttgcttgtttaccagcttatttcatttacacatataattttatccagaaaccccatgtatcaaataaataaaagtatagctgctctgtttcaaagggggaggagagcatgaagcccagagctccatataaagagtctcccactggatttcagaggctccactgagaaactttggtttattcagagcacaattaaaaatgatgtgcacagtgactgggaatattatgatgccatagaaagaaatggaatttgtaagaggagtaagttgggcatagaggttaatgaatttggtgcccatactgaggtgacaaacattcaggtaaatatgtccaggaggagacacktacacacacactcacaaatggttaattctctaaacaagaagtacattgataatcattgaattatgatgattttcta

SEQ ID NO: 837869 - DNA, 499 bp, Homo sapiens
aatgtgagtggtgttatgttaataaataattaaaaatggcttaaatatttttaaaatacctctgtggtttttaggtttgcttgcttgtttaccagcttatttcatttacacatataattttatccagaaaccccatgtatcaaataaataaaagtatagctgctctgtttcaaagggggaggagagcatgaagcccagagctccatataaagagtctcccactggatttcagaggctccactgagaaactttggtttattcagagcacaattaaaaatgatgtgcacagtgactgggaatattatgatgccatagaaagaaatggaatttgtaagaggagtaagttgggcatagaggttaatgaatttggtgcccatactgaggtgacaaacattcaggtaaatatgtccaggaggagacacgtacacacacactcacaaatggttaattctctaaacaagaagtacrttgataatcattgaattatgatgattttcta

SEQ ID NO: 837870 - DNA, 624 bp, Homo sapiens
catattttcagggtacatgtgacattttgacacattcatacactgtgtaataatcaagtctggggcaattgggatatccattatttcaaatatgtatctttttgtgcagggaacactttggttattctcttctagctattttaaaatatgcagtagattactgttaactattgtcaccctaccgaactatcaaacactagatcttatttcttctatcaaactgtaatttcacacccactaaccagcctattttcattctcccctcccttctatgcttctcagcttctaataaccactaatctactctatctttatgagatccacttttcaactcccatatataaatgagaatatgtaatatttttctgcctacaccagacttattttgtataaaataatgacgtctagttccatccatgttgctgcaaaagacaagacttcattattttttgagataaataatattccattatgtataaatctcacttttttatccattcatccatttatgaaaaattacrttgatttcatatttttctgtcataaatagtgctgcaataatcgtgggagagcacatatatctttgatatacagatttcctttcttttgaatatatactcagtc

SEQ ID NO: 837871 - DNA, 490 bp, Homo sapiens
cagggaaatgctagccttgtagagtgatttaggaagatttttctcttcttcaatttcttggaatacgttgagaggaattcgtattagttcttctttaaaagtttgatagaactcagcagtgaaaccatcaagttctgggctgttctttgtcgggagactattactgattcaatcttattactggttattgatcttttctaattttctatttcttcctttttcaatattggtagattatatgtgtctaaaaatttatccacttcctctgggttttccaatttgttggcatatagatgctcataattgtctcaaatgatcatttgcatttctgtggtatcagctgtaatgtctttttcatttctgattttattttggttttctatgtttatttcttagtgtagctaayaattagtttatcttttcaaaaagcatttcttggtttgttgaccttttgtattttttgtctccattttgtttagttctgctctga

SEQ ID NO: 837872 - DNA, 627 bp, Homo sapiens
gagtgcatctttattataagtatatgtttgagaatcaaattattttagacctaatataatctgccaatcttaaatcaatagtttataatggcaaaatcaaaattttagatacacagttacatattgacaaataattgatacattgtgcagcattgagtccttctattttctttttcttttttttttttgagacggagtcggagtctctctctgtcgcccaggctggagtgccgtggcgccatctcggctgactgcaagctccgcctcctgggttcacgccattcttctgcctcagcctcccaagtagctgggactataggcgcctgccaccacgccgggctaattttttgtattttttttagtagagactgggtttcaccgtgtttgccaggatggtctcgatttcctgacctcgtgatccacccgcttcggcctcctaaagtgctgggattacaggcgtgatcccctgcgcctggcgagtccttctgttttcaacatgtgtgaacataagtcatattagaagaaaaacytcttggtgaatatacttttgattttactaaatcctatttcttgaatcatctgattcgggtgcaatctttattttcctaaaaagtctagcagtttttt

SEQ ID NO: 837873 - DNA, 602 bp, Homo sapiens
tcagatggcacttctggacccatccagggcctgggaaccttgccaccatgaaaggaaggacacaaacaactgactttgccacctactgacttgagagccccaggacctttagtgaatacaggtggagccaggtagtggttacagcaggcattagtacataagtcccagtgctgtactggcttcagttctgacccagaacagtagcagtggtggtagccacaggggtacttgcagctcagagaagagaaagagactctatttggaaaaaaaagtaagggaagagagcaagagtctctgattggtaatccagagaattctggatcttctccaaggctattaagatgatacttctataagtctgcaaggatcacagcattactaggcttgcggcatcccctaataagatatggtttagatcacaacacccaagtccttccaaatacctggaaagcatttccaagaaggacgggtgttcctgggayccaccaacactgggaggctacagtatatacctctctttaatgcccagacacagttgaaaatccacaagcattgcgacgatccaggaaaacatgacctgcaggatttttattggttagggt

SEQ ID NO: 837874 - DNA, 602 bp, Homo sapiens
tcagatggcacttctggacccatccagggcctgggaaccttgccaccatgaaaggaaggacacaaacaactgactttgccacctactgacttgagagccccaggacctttagtgaatacaggtggagccaggtagtggttacagcaggcattagtacataagtcccagtgctgtactggcttcagttctgacccagaacagtagcagtggtggtagccacaggggtacttgcagctcagagaagagaaagagactctatttggaaaaaaaagtaagggaagagagcaagagtctctgattggtaatccagagaattctggatcttctccaaggctattaagatgatacttctataagtctgcaaggatcacagcattactaggcttgcggcatcccctaataagatatggtttagatcacaacacccaagtccttccaaatacctggaaagcatttccaagaaggacgggtgttcctgggatccaccaacactgggaggctacagtatatacctctctttaatgcccagacacagttgaaaatccacaagcattgmgacgatccaggaaaacatgacctgcaggatttttattggttagggt

SEQ ID NO: 837875 - DNA, 590 bp, Homo sapiens
attagtacctgtgatttcattatgaaattctcatagtgtgtttttcagctctatcgggttggttactttttttctctacactggttattttgtctttcagctcctgcaatgttttatcttgatttttgtcttccttgcattgggttacactgtactcctgtagctcaatgaattttgtccctgtctatattctaaattttattcctgtgatttcagccatctcagcctcaacccagtctcaaaccctcaccgcagaggtgatgtggtcatttggaggaaagaaggcactctggctttttgagttgtcagtattcttttgatgattctttcccatatttgtgtgcttatataccttcagtctttaaggtttctgacctttaggcattttttgtttgtttgtttgttttttgttttttttttctatttaatgatcttgagagtttagttgtggtataagatgaattcrgtcaactggcttcatttctggaatattttagggggcaatggtcagctcgcaactcctaaactgtgtgttctaattttggggaacttgtatccagccctcactttgttctctggctccttgaggt

SEQ ID NO: 837876 - DNA, 518 bp, Homo sapiens
tcagatgagaactcatagtacctgattttaacttcctgttactgaaagaggcactgaagagatagaacaaacagtccagaattactgaygccacccctccttgacctcagcaacagtgtggtccagagagcctctctgggtgctgggggaaggagaacacagcaattttaattgaactcagtgctgtcctgttaaagcagaaacaggagcaaacttagctgactcttgcccaccaagggagcatttaaaccagccctagccagaggggaattgcggatcccagcggtttgaacttgagttcccacaaaccttgctaccaagacccaaagtgctcttggtctctaagtaaacttgaaaggcagtgtaggccataaggaatgcaattcttagggaagtcctagggctgaactaggtgcaaagacagtggactagggggcaagcgacatactgagacaccagccaagagagtgctagcatcacccctcccctaaccacaggctgcacagctcacacctcca

SEQ ID NO: 837877 - DNA, 542 bp, Homo sapiens
agttttttcaagtatctaaaaagcctctcaagaaggatggckgcaaataagcccagacagtgaagaatacaataaatacctaatacttcaatacctagacactgaaaaacatctaatagcatcaacaccatccaggaaaacatgacctcaccaaatgaaataaataagtcaccatgtaccaatcatggagaaacagagacatgtgacctttcagaatgagaagtcaaaataaccatgttgaggaaacgcaaataaattcaagataacacagagaaggaattcagaattctattggacaaatttttaaaaagattgaaataattaacataaatcaagcataaattctagagctgaaaaatgcaattggcatactgaagaatgaatgcatcagagttctttaatagcagaatggataaggcagaagaaagaattaatgagcttgaagacaacaatttgaaaatacacagaaaagacaaaaaattgactaaaaacaataaagcattcttacaggatctacaaaatagcctcaaaaggacaaatct

SEQ ID NO: 837878 - DNA, 640 bp, Homo sapiens
tctttctttatcatgtggcacttcatcaataacaatggattgcaggacgaacttaaaggggccaagtgctctctggagctgttcctatttctctaaaatgtattcattgtttaaaagacaatgtaggtaaatattaaaatgtgattcctgggcaagagtggcctctcagtaagaattttagaaaattaactttaggaccaacttcacatgataaacgatatatgacagatcatgtctttactttaaaaaaacagttttaaatagtatacaataacataattcacattagagagttagtagagctcaaatacattaataatctaaagctcatcacaaaatgtaatagagagctgtgctttaaatatgcccacccctacagacacacacacacacacacacacacacacacacacatgacacctcagagaatgaagaccaactctgagaatggcatacttcttgtgcagtatttcagagggtgttagacatccaacatgaaactcaagttactttgtcawcttaaggttgatggaatggtacagaatgagaatgaatctgagagaagatacctaaattcaattccaaaaatgtttcatcaaccctctttatttctgaatatttcctctcactaacctgtctt

SEQ ID NO: 837879 - DNA, 640 bp, Homo sapiens
tctttctttatcatgtggcacttcatcaataacaatggattgcaggacgaacttaaaggggccaagtgctctctggagctgttcctatttctctaaaatgtattcattgtttaaaagacaatgtaggtaaatattaaaatgtgattcctgggcaagagtggcctctcagtaagaattttagaaaattaactttaggaccaacttcacatgataaacgatatatgacagatcatgtctttactttaaaaaaacagttttaaatagtatacaataacataattcacattagagagttagtagagctcaaatacattaataatctaaagctcatcacaaaatgtaatagagagctgtgctttaaatatgcccacccctacagacacacacacacacacacacacacacacacacacatgacacctcagagaatgaagaccaactctgagaatggcatacttcttgtgcagtatttcagagggtgttagacatccaacatgaaactcaagttactttgtcaacttaaggttgatggaatggtacagaatgagaatgaatctgagagaagatacctaaatycaattccaaaaatgtttcatcaaccctctttatttctgaatatttcctctcactaacctgtctt

SEQ ID NO: 837880 - DNA, 605 bp, Homo sapiens
atctggactgattcagtgataaatcagaatgatcagaaaggagcaatggtcttggtacagcacattcttcattacttgattttgttttgttccagccttccatggtctcttgtttcaggcctgaaaaaaataaatagttcatggaaacagtagaaatatttgcataaaacttggtgcttaacactcattaattcttaagttttgtttcacattcgatttattaaggctaacctaataaataagttgtaagttttcttattatacagtaagctaagtacagctaataaggaagacttagaaatttaatttttcttagaagattaaatattggttacaaacttaattcaatacatctcaatttaaatgacaattctttatttatatgactgatttatttaaacatgtcacacacacaaaataaagcataaacatacagagaaaatatatattatcatacttatactagaatttttaatagtagtggcacaattggctgattgtactcctttatttgatttggatttgtttwatattttattagagctataataatttttgttttcaccagccaatactcttatcagactgaaaataaaatagaatat

SEQ ID NO: 837881 - DNA, 529 bp, Homo sapiens
atcacccaaagtccatggtttaaatgagggctcactcttagcactgacattgtatgggtttggacaaatgcattatgrcatgtatccaccaccattacagaaaattttcactgccctaacaatcctctgttctctgcctattcattctttcctccttcctaaaccctgacaaccactgatcattttaccatcttcatatttcttcttttccaaaatgttatacaagtggaatcacatcgtataagtcttttcgggttggcttctctcacttactaatatgcatttaagtctcttctatgtcttttcacggcatgatagctctttccaaaatgctgaataaaatttcattgtttggatgttacacagtttgtcaactcgcctattgaaggacatcttggttgcttccaagttttggcaattataaataagttgctatcaacattcatgtgcaagattttgtgtggacatgagatttcaacttctttgtgtaaatacaaaggagtgtaattgctggatcatatggtaaaaa

SEQ ID NO: 837882 - DNA, 631 bp, Homo sapiens
ctctaaacacatgttcctaatctcattgctggatcttactctccttttatcaaatctgtgtgtgccctaaaggtttattcatgtaattttaacattcattcatccacaactgttttcctctatcattgtggtaatgtcaactcacatatttgtttctcattacatatgtttagttaaattaataatcatagaacaaatcttggatttgtcaaaaatttgataagataaattttacagtggattctattgccacagtttttacacagaaaaatagtaacttctgaaaagttttcttcttgttggcaggaataaacagttcactgttaattttttctgtagctatatctacatgatagttaaatatttcaacatctaaaatattctgccatcttaaatctacagttttattaatagtttttttttgcttttattttaaaatttcaatgttgtcatttatacttctagtagaaaaaaaaagccaaaatactttctactagacttaaccttgcagcattatccactttaaaatggagttggattgcmtggacacagtctaaaaacaaaattatgttgcatcatctaaggagaaataaactcattttcaaggaatgaaaactctagagtttctaga

SEQ ID NO: 837883 - DNA, 628 bp, Homo sapiens; identical to SEQ ID NO: 828774

SEQ ID NO: 837884 - DNA, 528 bp, Homo sapiens
tatctatatatatatatgtatatatatatatatatatatatatatatatatatatcccaaattagctttttgtctgtcatgtatgttgcagatctatttccccagtctgttgacttttgactttgaggcatttttctctcatacaaaattttaatttttatggagtcaaatacaaccttggcgccgatctggttcccgtactgcctggcctgcgtgagcactatttccctcatggctaaggtgggattacagaggcaggagaaacgcgagaaggagcagcagacacacagctacccagcccgccctccaccaacgctgaaatagcccggcgcccacctgcctcagcctcggattctgctcccagaataagcaacagctttacttccacacaggtgtacccacctgtgactcccttggcgctgaacgtctgttggggagctcaggtgtccttgctgtggtcctttcyatgttggggaaagctggtcagctggagaacttcctcccacaactttagtaagactaaatcct

SEQ ID NO: 837885 - DNA, 654 bp, Homo sapiens
gctagaagcacctgtggactctggcagataagtagctgggtttatggtttggcaggctttaagggttatgtctggagggtctagcaataaggtctgatactttcataaatgttctygtattatccactgcttcactttagcttctaggaccaccttcccttggtgtggggtcgaaaacctgtaggtgccgttctaatgttagtttattagctttgcctgctagaaaagtggtagcagcaatagctctaagacatcaaggccaccctgaggccacctggtctatctgcttagaaaattaggctactggccttggaatgcaccccagttttgggacaagattacccaaggcctatgccttgctttttggtcacataaagaaaaattgtttatccaacttggggactcccacggctgcagcagagcccaatttctccttgagagtattgaaggtttgcttgcagttctcattacattctaggagctctaaatctttccctttagagtatcatataaaggcttggctacatgcccaaacctgggcacccataagcagcagtacccagccatctcctaaaaaaagcacacagtcaatttttggacagggacccttgggtgactaaaataacttttttatcttctagggatgttgatcag

SEQ ID NO: 837886 - DNA, 518 bp, Homo sapiens
ttctagggatgttgatcagttccagaggttaagayagattccaaatatttaagtctttcagtcaaaatctgagccctgtgtggtgatgccctatatctgttaccaacttaacagtattattatgagtcttctttagttgggctagcaatgagcaagtcacctacatactgaataattgtgtccctttccaattgtagatttgttaagtccttagctagggcattttcaaataagtgggggctatcccagaacccttcagagataactgtccaggttagttttgaggcagaatgcatatctggatcagtccattcaaaggcaaatatattatgaatctggatgcattgagatccagaaaagtgcatctttcaggtataagaatgtaaaccagcttgcatcccctgggacttggtaagtattggggacaatgaggtctatggagacaactgcatttcttaatgctctaagcgttctgacaaatctgtacttgccattaggctttttatctggtaacatgc

SEQ ID NO: 837887 - DNA, 518 bp, Homo sapiens
ttctagggatgttgatcagttccagaggttaagacagattccaaatatttaagtctttcagtcaaaatctgagccctgtgtggtgatgccctatatctgttaccaasttaacagtattattatgagtcttctttagttgggctagcaatgagcaagtcacctacatactgaataattgtgtccctttccaattgtagatttgttaagtccttagctagggcattttcaaataagtgggggctatcccagaacccttcagagataactgtccaggttagttttgaggcagaatgcatatctggatcagtccattcaaaggcaaatatattatgaatctggatgcattgagatccagaaaagtgcatctttcaggtataagaatgtaaaccagcttgcatcccctgggacttggtaagtattggggacaatgaggtctatggagacaactgcatttcttaatgctctaagcgttctgacaaatctgtacttgccattaggctttttatctggtaacatgc

SEQ ID NO: 837888 - DNA, 595 bp, Homo sapiens
cacagaatcatcctgagaaacttctttgtgatatgtgcattcatctcacagaggtgaaacwctcttttgattgaacagtttggaaacaatctttttatactgtcgtcaagtggatattttgagctgtttgaggcctatggtggaaaaggaaatatcttcacctaaatactacacagaagcattcggagaaacttctttgtgatgtctgcattcagctcacagagttgaacctttcttttgattgagcagttttgaaaccctctttttataggatctgcaagtggatattggaagctatttgagacctattgtggaaaaggaaatatcttcacataaaaactacacagaagcattttcagaaacttttttgtgatgtgtgctttcatctcacagagttgaaactttcttttcattgagcggtttggaaacaccatttttgtagaatctgcaagtgcatattttgagtgctttgtgatctatggtggaaaaggaaatatcttcacataaaaactacacagaagcattctgagaaaattctttgtgatgtgcggatttatctcacagagttgaacctttcttttgattgagcagtttc

SEQ ID NO: 837889 - DNA, 582 bp, Homo sapiens
agaggttagcagcatgagcaagctcacacagtgaggggtggagcttggatttgaatccaggtctgtctaacctcaaagactgaattggkgatgaaaataagttgtcattgttgtttgcctgtcatccaggtgatgtaactcttgtctaggctctgcctatgggggctttgtgacatatctctgcactgatcacccaggtgatgggactcttgactaggctcttctatccttggattgtaaccttgcaggatcttgaactcatatcctttcagggatcataaaagtgagcacatcaaagctgccacgataaagttgtggaaaagtgggcaatattgccaaatgcaaaatatctggactatattttggtctgagatcaccatttgagattcctggaagatagggaatatggagaccaattcccatagggatgttgtataagactccaagccctaagtcaatgatcttaaccctgtggatcagcactctccatgtaatggggcatcttaacccattttgtgcggctataacagaatatcatagactagggaatctataaagaaaagaaatttatttcttagagtt

SEQ ID NO: 837890 - DNA, 553 bp, Homo sapiens
ggccaggctgcttctttaagtgagaccaaattccatccctcctcactggacagggcctctccattagaattttagcaactgcagccagagttctatggacagaactctgatttctccctgggargaagtccccagggaggggggtagctgctgtctccccagttcagccaactgagcctttccagcctcttggctttggagactcctgggggtcagcacaacacacctgctctgccaaagggcagccagactgcttctttaaacagtccctgatcctgttcctcctgactgggtgagacctcacaacaggagtctccagaaaccccctacaggagtgttccagctggcatcaagtcaataccaccttggactggtgctcccagaggaaggatcaggtttccagctttgctgtttcacagacttcactggtgatacctccaggtgcaggagagactgaggtgactagggtccagagtggacccccaaaatccacatgagccctagccctagggaagagtggtctgttaaaaacaaacagaaaacaacaacaaca

SEQ ID NO: 837891 - DNA, 727 bp, Homo sapiens
tccacactgtggcctgaggtgcatcacccacctgagcttcatctgttaggtatgtcagggaaggtaagcagggtgagagaggcctcatcagaggaccccagatctctggcttccccatctgacaagtgcacctctgtgaacaaagacttcagagccagatgacaagaatggcccaagcagtccaccagggaaacctgggcccagtgtacatcaatgcagagcatcaagcacggtgtaacaggtgcacagttgcctattcctgttcagagatgactgcgtcccacacactgtaaaatgaggaaatgcagagaagcagatgtaactgaagaagacagcaggaacaacaaggagggacaaccatgacctaggagggcaccatgccagagacgcctggaccctacgctagggtcagtgcttgttatactcttgggacccagagctttccttctccatcatgtggcatacttggcattatttgttgtttaaaatattgtccttagtttttacctttcctaggagacacaggcagaccctgtgacactacagggtctggcacacagtaggtgcatcacaaacatctgccgacttcacactctgttgccttctcaagccttcttgtcaagtcttcagtgaaaaggaattgctgattgagcaagaattaaayttctagagactcctggatccactgaagtttgagacaaggtgagatttgtttactgccatattc

SEQ ID NO: 837892 - DNA, 617 bp, Homo sapiens
actctcttccctttcactactctgtattgattaggagtgtatgtggggcttgcattgatgtctatttattaatattcataagttgttttaataatgaaccatgtccacagctattggaaaatattgtgcagaccccagagttcccaaacattgagctagacattaagctggatgcatgcattgtatgggacttttgaaaggtcttccttgatgaggatggagtgtgtttcatgaacaaaaggagcaggcacatgaatacttgagtggccagagagagactattgccaatttagtgactggttttcctagccttcctttaagattcatatggacatgtgagtaaatgggtgttaacaagatctgaacggaaagatgagtgtaacttcaggatcattttattggaaacaatacacttgtcctatactattgttttactttttccctccatagaaatatggatataaaattgagccctaacacaatgtaaatgaagacaaaaacccttggagtttsgagagagaaaaggtaaagaaacctggcctcgaataaagtcagaagtagaactattcttttcgctcagcactgtccaactctgtaatgttttgtggaaaaaaaat

SEQ ID NO: 837893 - DNA, 405 bp, Homo sapiens
  misc_feature 371, 372, 373, 374, 375, 376, 377, 378, 379, 380, 381, 382,383, 384, 385, 386, 387, 388, 389, 390, 391, 392, 393, 394,395, 396, 397, 398, 399, 400, 401, 402, 403, 404, 405: n = A,T,C or G
gtcccttttggaaggtccaaaagttagtttgatgtcaatagacttaatttataatgtgaaatttgatattgggcagtatgtcaaatacatcaaaggtgtaaaacacttgatcraaataaaataattataaaataatagtattttagccaaggtaataatgaaaatatttcaaaaactttactctttgataaggaggagatagttgcctaaataattatagacctaacaagggtagcattactaatataaaatctatatttccttttctccttttttctctttctttttatttgcagtttactcaaaagttaaataagaaatctttactattgtgttaatatttacacaaaaatctggttcaaaagagaaannnnnnnnnnnnnnnnnnnnnnnnnnnnnnnnnnn

SEQ ID NO: 837894 - DNA, 623 bp, Homo sapiens
taggccctggaaactacaaatgctttgttggcattattcattgatgggctttgccctgacctcagtggtctagytgaaaatgaagactaaattggaaactatttacgtaactaaaaattggtctctttatggaatcctgtgtttaatctctattatttctgaattaccttgacatcaatttttagtctttctctaacatgctcaaatttatccttgaaatagcttaaatattctctctgtgctctgagatgtaatttgttaccctcttttatctgaaacttgataaaggttttggccatgggggacagatagactaactttttcatttacggagacacggtttaatccaactacccttttaaacttgtgaattttacctgtctcatggaaaaaaaaattaaatcaaagttatatactatttatgcttgtctttacttctatgtatatatgtgtacatgtctttgtattttgtgtttgtggtaacaaattaacttataaataaatgagtactcataaattgaataactaacccaaatgcttttcaagttcacatgactttagtaatatttgataaataaagtagttttaaaattgttggtaaaataaattaaaaatgtcttcag

SEQ ID NO: 837895 - DNA, 387 bp, Homo sapiens
taattagtggaagcagtcatcattactttcttattgactagctttgttgcatcaggcttctaacacattaagttgctgtatttcaaaggggcacaktgtaactagttgtgtcttgtagaatcttaagcgtttatatttggaaaccatctcattggaaataaaatctacctacagattcagtcctattgtgttctgttattattgttgtttacatttgttgtattcctactgaaacattttattgggataatatcagtaactttacatgaaattttcatttcatgatttgctgattgcattaacaagaggtctaagttcttgcagcccatgactgctcatttctttgttgatttacttacattatgcttaaatctgtagattatcccc

SEQ ID NO: 837896 - DNA, 597 bp, Homo sapiens
ctggcatgtttagtcatttttataaaaaaccatttctgatgagcactttaatattttctaatcaaaatcacatatttagctcagtaattcttgttagttttctgacatccagccgtcatttcttacrtttcataaaaggttcattgacagaataagagaacatctttgctgtagcttcctatgtttttgtatctccaaatatcatcctgtgtaaaataaccaggctattttaatcttgactcactaccactttctagcaaatcattcagatcatttcatgggaaacatacctttactgagaaactgaatactgcctttcatagttatttgctactgaaaatatgaatgagctatgtggtctggaacaaatcattacctttcaataactcagtttcctctactgtaaaattaaaaatgatgcataatttataactcataggatcaaacacaaccatgttaggcacacagtaaatgtgctataagtgtttgctctcagtattcctacccatctatggcatttcaggattctattctactaatgctctatttaaacaactgtacttaataggtatgtggtaccttctaaaatgctagaaa

SEQ ID NO: 837897 - DNA, 586 bp, Homo sapiens
ttctttaatgcctaatagaagtcactgtaatggttaattatatgtattaacatggctatggcattcaaatatttggtcaaacacaagcccgaatgtttctgtgaatcctttttgctgttgttgttgytttttttaatttttagattttttctctccctttctatagaaacacacaccctgttagttctgtttctctgtgtaaccctgactcatgcagccaccactccctgaattagaagagaagtagctaaaaatgttggaggcatgtttcagatgtgggaagacaactgctatcccagcttctgagatgacatcctgttttctcacctgtgtgaaactttgtttttaactatcttataaaaagaaatgatgaaagtataaaaaaaaatattattggagattaaagaaaaccaaaaaataaaatagtcaactggctaaaattaaaagcaaaagagatatcaagaaataaggactctggtaaaggaagtgagaaattttacaaaagaaattattgtggtttatagaaatctgtgtgtataaagtagactatctctacttgagatagttcttgagttaaaagagaaag

SEQ ID NO: 837898 - DNA, 535 bp, Homo sapiens
tttaaatttaattattatcttttgtaattcaggatccagcatttgtgaaaatcacagaagatcatatgagaaggcaccattttaatgaaagaacmagaaacctgaaattcaataacaaagcctgaaggctagaaaaggttatgaaatagcccatgataagcacaggtggaaaattgacacaaagagttttctgctatgccaaataaattttgttgtctttgtgtgtgtgtatgctgcgtatcttaaaaccataacattttcactgacattgaatcatcctcctcagtaactgagggaaacttccttgggaacccaccttaaattttaccatctttggcagcttttgaaatgactctatcttcaaattcttgaatttccacattctcttctctgactttacctttgattattttgctctcagtaaatctgcatctcagtcttcctcttctcagttctatcctagtgtaccagcccattaacccctgtttgattttatttggctctcttcctccatggggctacacgtaagcctcat

SEQ ID NO: 837899 - DNA, 574 bp, Homo sapiens
tagcattactcaagggaaaaataatttccaaaagaactgaatatatgaaactgttatcccatgacagaaagttaataggcargcggaaggtgttatttggtggctgtgacaaagcagtatgagagattctaaatttttaagtgttctttttttgtaaattaactttacccgtcagaaatttttcctgtagaggagagctgaagatcggatgtctctcaaaatcagagaaaaaaatgaacccaaaggcagcagggctagttatgtctggcaatcacgaggaacctgaacaagttcagtttattattcactaggaagttagggagtcacagaatgaacagatgtataaatttctagtacaagatattcagcttctattacatgaaagcaggctgaagattttagggtgtttttctcagaggccccatagtgccaaaatgtaaaccaagagaaaactctaaataaattgctttgggattattttagctttcatattataatttaagccaacatttgcgtgtcaaaatctagacactcccaacattaattgcaactcaaccaagccacccatccaaca

SEQ ID NO: 837900 - DNA, 554 bp, Homo sapiens
ccagaaatattatttccctttctaaaactcatttcttttctatttcaacccccatcccacagcagttatcccttagctgtrccgcctttcactcagacttacatatggatctaagggaagaggacctcagtggcctgcagtgtggctctgtcctcagggccctctgctcacaccaacatctgtggagaggtccaggccagtggttgttctgttgtctctgtagacttttcagacccaggagctgtcgcctcttcagtatcattccttgctcggctgcacaccagtgcattgtttctcctcctatggtgtaccaaggtaccaggatctcagtgagactctaatgtttttctgtctagtcacctgcacagtcattcttctggagtcctatgactcttccaaggaaagagaaaaccatttctctgttttcagatcctacaaacaaaattgggagtttcatcaccgcaatctaggatcaattttgggtggtacaggagtggtggtaaatgtgtgtgtgtgtgtgtacacaagtgcatgtatatctgtgtgaacatgtg

SEQ ID NO: 837901 - DNA, 556 bp, Homo sapiens
aatcattcaagagatagaaataaaaggcatctgaattgaaaagaagaaagttaaattgcacctctttgcagatgatataattttatctctagaaaaacctaatgactccaccataaaactctgagacctgataaataaagtcagtaaacttacaggatacaaaaatcatcaaacaagattgagtagcatttctatataccaataatgaactagttcagaaagaaattaagaaggcaatcccatttataagagctacaaaaaatatctaggcataaatttaaccaaggaggtaaaatatccctagaaataaaacaataaaatgctgatgagagaaactgaaaagagtaaagtaaatggaaaaacattccatgctcatggattggaagaattagtattgggaaaatgacaatactatacggacatagaaaattytaaaatttgtatagaaccaaaaaaaaaaaaaaaaaaagaccttcaatagccaaaacaatcctgagaaaaaagaacaaagctggaggcatcatactacttgacttcataatatattctaagagca

SEQ ID NO: 837902 - DNA, 556 bp, Homo sapiens
aatcattcaagagatagaaataaaaggcatctgaattgaaaagaagaaagttaaattgcacctctttgcagatgatataattttatctctagaaaaacctaatgactccaccataaaactctgagacctgataaataaagtcagtaaacttacaggatacaaaaatcatcaaacaagattgagtagcatttctatataccaataatgaactagttcagaaagaaattaagaaggcaatcccatttataagagctacaaaaaatatctaggcataaatttaaccaaggaggtaaaatatccctagaaataaaacaataaaatgctgatgagagaaactgaaaagagtaaagtaaatggaaaaacattccatgctcatggattggaagaattagtattgggaaaatgacaatactatacggacatagaaaattctaaaatttgtatagamccaaaaaaaaaaaaaaaaaaagaccttcaatagccaaaacaatcctgagaaaaaagaacaaagctggaggcatcatactacttgacttcataatatattctaagagca

SEQ ID NO: 837903 - DNA, 554 bp, Homo sapiens
taaattacccagtcttgggtatttgtttatagcaatgcaagaacagactaatacaaccaccatgargctaaatccaatacattttaggttctaaccttttgtaacttctcagtgtgagttcttgaacactctctttgtagccttcagtttctctggcaatatactctcttgagttccctcctgcctctctcaccatatgaccatgtcttttcttgactcatcctcctctacctagccactaaaaattgttcccatagccaggtgccagtgactcacacctataattctaacattttgggaggctgaggcaggaagatcgcttgagcccaggagttcgagaccagcctgggcaacatagcaagaccctgtctctataaaaatagtaataataataataaaattgtcccccaaggctttatcttatgatctggccttgccctacactctttcctcatatgttgtcatccatgcacattgcctacaatgactctcaattcatatcgccagcccagatcattctgtgtggtacaaatttatgtatccaattacctact

SEQ ID NO: 837904 - DNA, 624 bp, Homo sapiens
acttccctctcctgccaccatttccttaattcctgaaaatcactattctgttctccatttctataattttgtcatgtcaagaatgttatagtagtggaatcatacagtatgtaacattttggggattgacttttttactcagcataattctttgtagattcattcggcttgacgcacacacatcattagtttgttcctctttattactgaatggtattccatggcatggatgcatcacactttagacagccattcacccattgaagaacatctgggttgtttccagttctgcctattacaaataaactgtctataaacattcatgtacacgtttttgtattaatatatataatcatttatctggggaaaatgcccaggggtatagttgctgggtcacacagtagttgtgtatttagcttttttaaaaactgccaaaatcttttccagagtagccgtaccattttacacttccaccaataacatataagtgattccatttctctatatccttgccaacatttggtgtgtcattatctcttagccattctggtgggtatgtagtgatatctcattgyggttttaacttgcacttccccagtagctatgatgtcgaacattttatta

SEQ ID NO: 837905 - DNA, 553 bp, Homo sapiens
gagccaccgtgcccggctatttttattttttgagatggagtcttgctctgttacccaggttggagtgcagtggtaggatctyggctccctgcaacctccaacttctgggttcaagagattctcctgcctcagcctcccaagtagctgggactacatgtgcgtgccaccatgcctggctaatttttgtatttttcgtagagacggggtttcaccatattggccaggctggtctcgaactcctgacctcaggtgatccacctgtctctgcctcccaaagtgctgggattacaggcgtgagccactgtctgcagctatagaggttttttgtaaatgctttttatcaagttgagaaagtttcctctctattcttatttttctgagagtgatgaattggtgttgaagcttgtcaaatgtttttttcggtattaatttacatgattatgtgatttttcttcttttccctattaatatggttaattatactgatttattttcaatagttgagacaaccttgcatctctgacataatccacttggtcatgctacgtcattc

SEQ ID NO: 837906 - DNA, 553 bp, Homo sapiens
gagccaccgtgcccggctatttttattttttgagatggagtcttgctctgttacccaggttggagtgcagtggtaggatcttggctcmctgcaacctccaacttctgggttcaagagattctcctgcctcagcctcccaagtagctgggactacatgtgcgtgccaccatgcctggctaatttttgtatttttcgtagagacggggtttcaccatattggccaggctggtctcgaactcctgacctcaggtgatccacctgtctctgcctcccaaagtgctgggattacaggcgtgagccactgtctgcagctatagaggttttttgtaaatgctttttatcaagttgagaaagtttcctctctattcttatttttctgagagtgatgaattggtgttgaagcttgtcaaatgtttttttcggtattaatttacatgattatgtgatttttcttcttttccctattaatatggttaattatactgatttattttcaatagttgagacaaccttgcatctctgacataatccacttggtcatgctacgtcattc

SEQ ID NO: 837907 - DNA, 633 bp, Homo sapiens
caagggtctttaaaagagagagggagatatgactacagaagaatggtcaaagagttacaaagttgctgactgtgaagatggaggaagggaaccataagccaagaaacattaagtagcctctagaaatggaaaaggcaagaaaatagattattgccagctgggcgcggtggctcaagcctttaatcccagcactttgggaggccgaggtgggtagatcacaaggtcaggagttcgagaccagcctggccaagacggtgacaccccatctctaccaaaaatacaaaaaaaaaaaaaaattagccaggcgcagtggcgagcacctgtaatcccagctacccgggaggctgaggcaggagaatcacttgaacccaggaggtggaggttgcagtgagccgagatggtgccactgcactctaacctgggcgacagaccaagactccatctcaaaaaaaaaaagaaaaatagatttttgtctagaacctccataaatgaacacagccctaccaatgtctagattttagcccaycaagacccatttcaaacttccgacctccagaaatgaaagataatgaatgtgtattgtttaagccacttttatgtttgtggtagtttgttatggcagcaacagaaaac

SEQ ID NO: 837908 - DNA, 634 bp, Homo sapiens
acttttctgccttctgctggtggttagagctcattcgattttatcaggcccatgaggataatctgagatagttccttattctaaagtcagctgagtagtaaccctaagttcatctgccaagttccttcacggcagtacctggattggttgattggattaccaatcagtcaaaccaggggacagaaatcttggaggcctctttaggctgggcgcagtggttcatgccagtaatcccagcactttaggaggctgaggagtgcagctcacttgaggccaggagtttgagaccaggctggccaatatggggaaaccctgtctctagtaaaaatataaaaattagccaggcatggtggtgcacgcttgtaatcccagctacttgggaggctgaggtgggaggatcacttgaacctgggaggcagaggttggagtgagctgagatcgagccactgcactccagcctgggtgatagagcgagactttgtctccaaaaaaaagaaatcttggaggcctttttagaagtcygtctactgtgtatgtcatgatcaaacatctagaatgtcaccctagtcttttcagccatgtaactgaggttgaatgtctaggaaaattagtgctgaacagccttaagctgatc

SEQ ID NO: 837909 - DNA, 460 bp, Homo sapiens
atctaagaagacaaagaaggagatagcatattggtaaatgrctcaattcaacaagaaggcccgactattctaaatatatatgtgcccaacactcagatacataaatcaagttcttagagacctatgaaaagacttaaataacgacataataatagttggagacttcaacacctcactgatggtattaaacagatcatcagtgcagaaaactaacaaagatattcaggacctgaactagacacgtgacaaaatgaacctgtcatgtgtctatagtagatagacatctaaagaactctccacctaaaacaacaaaatatacattcttctcatctgcacatagcacatactcaaagaccaaacacacaaatgacataaaacaatattcaacaaattaaaaaattcaaaatcataccatgcacattcttggatcacagtgcaataaaaaaaagattaatattaa

SEQ ID NO: 837910 - DNA, 402 bp, Homo sapiens
tacacactaatattactaagaaaacactggctttctgtgcaaattatattttaaatctggatcttcataagtttaggtaactttcccaaatactcactgtctgtaatttagggaaccagcattcacattcagttgtcttgactcccaagtctatataacagctatgcatgctgttcttcccctttactggccagataagagtcttgtcactcggaattatgacagagtaagagaaaatattagagacttcacaattttctttcaaaatgtctgcaaatgaatatgtaagggaattctccagaatagcatatgaaactgatgacaatcaaaagtgatgaagtcaagcatgttccaaagagaatctaataaaggrcattaaaaaccaccaatgattatgatttt

SEQ ID NO: 837911 - DNA, 609 bp, Homo sapiens
tgtaatttagggaaccagcattcacattcagttgtcttgactcccaagtctatataacagctatgcatgctgttcttcccctttactggccagataagagtcttgtcactcggaattatgacagagtaagagaaaatattagagacttcacaattttctttcaaaatgtctgcaaatgaatatgtaagggaattctccagaatagcatatgaaactgatgacaatcaaaagtgatgaagtcaagcatgttccaaagagaatctaataaaggacattaaaaaccaccaatgattatgattttggaactatgcagaacaggacaaagagtgaaggaggctgtctgaggtgctgaaatacagcatacaaacatgttacagactaagtataaaatcttgtattaattcaggcttccatactgagttcctcaggtaacacataaaatgatcactggtcacaatttggaagaaactaattataaacaatcaaataaataatagaaactaaaaaaaaaaaagccttgccatattgactttaaraaatcccatgcaggccattatgtaataaatcatatgaaaactatataattttaatatagtagtatttttcaat

SEQ ID NO: 837912 - DNA, 263 bp, Homo sapiens
tattttaggaagtagaaatagttacatttattacaaatatctcagacaaagtataagttttggtcacattgtactcatgaagacactttctcagcctattgctttgctcatactgtggtcttccactagacattgccaccacacagcaggaaatcagtctcctaccagtcaccaatatagagccaamagtcactgcagtcactcactgatatggtttgggtctgtgtcccacccaaatctcatgttgaattgtatccctaatt

SEQ ID NO: 837913 - DNA, 625 bp, Homo sapiens
tatgcaaatccaaattcctggctttccttcaacaccaggaccatccgggaacacgaggccactgaggctgaggagggcgcaagtgagggacggctgcccctgtgggtgggagctgccctccctgttcacccagacccttgccccctccaaacccactcatgacaagtacctgcctggctcctgcattcaagttaaacattttaattcgttgtttagaacattcaagatggacagggagtggagatgagagccactagctgagctccagaccggcaggggaggcctgtgggggcaagccgaggactctcacaggcagacaatggatggcccagaaggctttcagcaggaaagacttcattagcagtggggaggacagactcaatggggccaagactgagcctgggtggtcctttggggactcctgccagattccaagagggagaggttcaagctctgagctggggcagcgggcaaggtcctgagtgacactgatsacaatgtgaggccatgctgggaagcaggctcctttctcggccagctccacaccactggcggcccaggaggctgcctggaagaagattctgtgccaagtgtggacacaaaaggaaaagaaaatgtggcagtg

SEQ ID NO: 837914 - DNA, 569 bp, Homo sapiens
ttatctatgtattatctatcatctatctctctgtcaatcatctatcatttatattaattttatttggggtgtattgtttgaagacaaggggatcctgactaatatgcagactacttgattgaacccttgagtcttacagttggagagggaaagggatgtgaacatgttctgctctgatattagaggcgtcattcctgctgtcctccaaaagtcactgtgtgctcctctatctccttatctgtctgggaatttagcccccttaaatattttaattttactttctcatgatgaatgagcttcctttgggaggaaaaaaattacaaaagtctgttttcctcctagcgtattttgtttttgaatttttgaatgtcaaatttttacttgattccgaaataaaagaccaggaaagtttatgcacagtgacaagcctatggcatcagtttcatgaacagagtggcacctatatgttcttactgagggaagagaaaatcaggataagaaagaaggacttgrgtgagtcacagatatgctttgctgtcctgggcaagctatttaaattccctaatctg

SEQ ID NO: 837915 - DNA, 505 bp, Homo sapiens
actgagggtcctggggctttaaccatgccaatgcagtctttttaacattattaacttaagaaaagttgaggccttgtatagattttttaagattatgaaayaaaaggaagtcagaagagccaaatcaggactgtaaggcagctgcctaatgatttaatatagaaacgcttccaaaactgacattgtttgataagaagaatgagcaggcgcattgttgtggtggagaaggactctctggtgaagttttcccaggtgtttttctactaaagctttaactaactttctcaaagcacactcacaataggcagatgtaatcattctttggccctccagaaagtcaataaacaaaatgctttgagaatccccaaaatcttttacaacagccattgcttttactggtacttttgctttgactggaccacttccacctcttggtagccattgctttgattgtgcttcatcttcaggatcatactggtaaatccatgttccatttcctgttata

SEQ ID NO: 837916 - DNA, 505 bp, Homo sapiens
actgagggtcctggggctttaaccatgccaatgcagtctttttaacattattaacttaagaaaagttgaggccttgtatagattttttaagattatgaaataaaaggaagtcagaagagccaaatcaggactgtaaggcagctgcctaatgatttaatatagaaacgcttccaaaactgacattgtttgataagaagaatgagcaggcgcattgttgtggtggagaaggactctctggtgaagttttcccaggtgtttttctactaaagctttaactaactttctcaaagcacactcacaataggcagatgtaatcattctttggccctccagaaagtcaataaacaaaatgctttgagaatccccaaaatcttttacaacagccattgctttkactggtacttttgctttgactggaccacttccacctcttggtagccattgctttgattgtgcttcatcttcaggatcatactggtaaatccatgttccatttcctgttata

SEQ ID NO: 837917 - DNA, 505 bp, Homo sapiens
actgagggtcctggggctttaaccatgccaatgcagtctttttaacattattaacttaagaaaagttgaggccttgtatagattttttaagattatgaaataaaaggaagtcagaagagccaaatcaggactgtaaggcagctgcctaatgatttaatatagaaacgcttccaaaactgacattgtttgataagaagaatgagcaggcgcattgttgtggtggagaaggactctctggtgaagttttcccaggtgtttttctactaaagctttaactaactttctcaaagcacactcacaataggcagatgtaatcattctttggccctccagaaagtcaataaacaaaatgctttgagaatccccaaaatcttttacaacagccattgcttttactggtrcttttgctttgactggaccacttccacctcttggtagccattgctttgattgtgcttcatcttcaggatcatactggtaaatccatgttccatttcctgttata

SEQ ID NO: 837918 - DNA, 616 bp, Homo sapiens
tgatattcaggatgaacatgatggcattagctctttgctattcagtgtttttcccttcagaaaatgttggcaacttttcattcttaaaataactttttcttttggcaatcactgagctgcacacttagtaaccactcagaagccatcaaggaaatgtgagaagattcaggtttaataaggaaaaaaaggcttattattgtcatctttcattacatttcaacccaaaacatggagtggaatttttttatccccattcagtgagggtctttctctacccattgaattttttttttttctacttgaaacacctacctcaatgttcccatgtgtctttcctagacactttctaggaactcttgggagaggttggatatcaatagggtaatgctcatgggaatgatacttatattacagttttgtgttttctacttctagctataggaaaattagaacaaattatgctggccaaggttagacaaaaacaaaacaaaatgaaaaaccccactgagtttgtaagtcttaaagtaacctgccaaaactcacctggccaktagtggtacaacatttatgtgattttggtggatggagtcagtatcatgaattgattacatacata

SEQ ID NO: 837919 - DNA, 607 bp, Homo sapiens
acacaaaatgataattatgtgaggtgatggatgtgataattagcttgatggtaatcgttttacaatgcatacatatatcaaagcatcatgctgtaccttataaatatatacactttttatttgtcaattatacctcaataaagctggaaaaaaataccagacaaaaacttgacaatctcctgtatcctatctacgcctaatattgcatagagttagaatgctttcagaaaggcttagctgggaggaggagtgtagaactcttttaacagcatttccaggattttttagtgactcatagttctaggcattcatgtgaattcccaacttgcatttaaactttacaatcatttaaaaagagaatgccttccaacttttcatgataatgagatgaaaacttcttcatagaaagctttaaaatagcattagttttgcattccttttctcccgtcctcacatattgatatattcaatcacattattagtggaactgcgtcttgaattkcagaggaaaaacagcgaaaaacagtgtgggatgcagaatattggcaccgctgaaaaattaactggagttttgccctcgtttttgggagatgccataataattcag

SEQ ID NO: 837920 - DNA, 558 bp, Homo sapiens
tttagtaggcccaagtcatagtcggtgcttgccggtcaacacacctgctttttccttcctgaaattctcatgcaagctaatctcatcagccaaattgttcaactccagaggtctagagacctgctactcctacaaatcctcctttaaaaattattttaactgatgaataatagtgtatatttatggggtacaatgtgatattttcatagaaatatacaatgtggaatgactaaatcaagtgaattcacatatccattacctaatttatttacatggtggcacatttaaaatttactcttagcaattttgaaatatacaattcattataaactatactcaccatgctgtgtaaaagatatcaaagacttattcctcctgtctaactgaaactttgtatcctttgatcaccatctccccagtcttccatttactctctccctgaccctctggtagccaccattcaattactacttctatgagtttgacatttttagatgtttgtctttctgtgcctggtttatttcacttagcrtaatgttctttgggttcttccatgtt

SEQ ID NO: 837921 - DNA, 310 bp, Homo sapiens
aagggatccacctgcctcagtctcccaaagtacaaggattacaggcatgagccactacamccagtctaactttgttttgtttgtttgtttgttttagagacagagtctcgctctgttgcccaggctggagtgcagtggcgtaatcccagctcaccacagcctcaaactcccagactcaaatgatcctctccccacagcctcctgagtagctaggactacgtgtgtgcgccaccacacccagctaattcttataaaacattttgcagagatggggtggggtcttgctactttgcccaggctggtctcaaac

SEQ ID NO: 837922 - DNA, 582 bp, Homo sapiens
cttcccatgtggctgccttagctgccctcccagacaccagctgacatgggggcctctttcagtccttgtgaaagagcagcaactgtgtggactggacccattcccatccctgtacctagcttctcttcaacaaaagggactgtttatgcacccatggacaaaagctacctacgaccccataagttatgcccagctgcccacaaaaaggagagaaatacacctttatgtccactggaacaatgtctctggaattcagctcaagaaacattcttggtgaaaagttcagttctaacaagatcatgtctacaaggtaccctctggatagatgcccataggtttccacctgatgccaaattccaaacagcttcccatgtttccctgccgtacaccctaagttgcttttcttgggtatccacttggctttgctctccttcctcccctcttgacccttacactggcaytaaggaatacaaaagctgaggaaggcctggaggagaaagggaagttgagtcagaatgccttcatgagcttgggggcagaactggggcctttactttcactaaaagccactgatgatgccca

SEQ ID NO: 837923 - DNA, 561 bp, Homo sapiens
cttggatgagcatcaggggtttgctrttatcctcctggtcaactcctacacagaggccagcttagggcttgccttcttggtgaagcccctgctgttggttgatcccaagtctacagtcagctgctcctctcgcctcccatgtgagttgtgtggggcttgcatcagattatcaaggagtgatccagttcctatatctggttctctcgcttcagtcggccagctgcctgaaggcaagggaccatttctagtctccctctctctggtatataattgatgctttatcaaagttttttcaatgaatggctgaattaaccaagacactaccaaatgctttctttaaatatatttaacaaatagacttattttgtgtggctgcgaaaggagataaatgatgtccaaggatagcattttcagagaagcaaacttcaattcaaccttaaggacgttccagtagccacagctgtccatcagtgaaagggctgcctggggaggtagtgagttctcaatgcacagaggtatacacacaaaggctgggtattttaagggtgtcatttcggtaat

SEQ ID NO: 837924 - DNA, 549 bp, Homo sapiens
ggtttccagtgtctataagcctgcaaaatgagtagagagaataatggtatacacacccattgttcaaaggcacacttagagggagagaaaaaggatatagtgaatcttgtcggggatttctaggttcagttcaattaagattgtcctacataaaagaaactcctccaaatgattgaatttctagctttccagtgatttgagttttctttttcctctgttccctgcaggttgctttagggaccatgccaaaccgatcacttgagatatacgtttatagtgagataagactgtaggctagaagaaggaatacttagcgacttaaatggggggtgctgagcactgaagggaaggagggagaaatgagatggtaacagatgtaacaaatgctgctgcccccagcaaagtcaggaatgaaattccttcctggaaatttggacctgggcaagaatgactcctcagatgtaaatagtgtctatgactttgaattttcatttgactgctggtgtaccagattgaagayataagcttagcaagtcctctttctctcct

SEQ ID NO: 837925 - DNA, 578 bp, Homo sapiens
cacatattatatttgaagacatctccatgtgtatttcgtgtatacatacccatgcaattaagatgtctttgggcatttttctctttaagaataattgaaacaatgaatgcatttacttcaacttcatgaacatttggagattaacaaattacaagtgctatatttcttacatatatacaggttatatcatagatataaaagaccatacttggattttacagtgtgttttagtctcaatcctgccattaactggctaagttaccctaaataaatctcttaatttttctaggcttcatttgccttatctgcttttttttttttctttaaaaatgtagtttctaaaagtctgtaatcttttttgtttagcttggaaaaaactttgtcttgtcaaaactgtctttgcatttccagctcccacttttggtgagtttgtgggaacttttaaaatatattttcacacagctmtcttggtcattactagtcaagttaatttcctgtattcagactgcttttgtattatcttacaatttacttctcaatcatatatatcaaggctactggtagggaaaatgatctct

SEQ ID NO: 837926 - DNA, 529 bp, Homo sapiens
caggtgtatgggaaaaacagtgccttcaaacagtgtttgtagcagtgtacactggcaaaatattttttacaattaggaaagacataatagatccttaaaccttgtcaacactttggcttagtgattttacttctggaaaaatacatataattacatctttttcatgtaaaaaaaattaaacagtagattcttctcaaggttggtggttatgggaggtgacaattgtagcatatcatctcccggcttcaagagtgggcctgtgttatactagtcatgaaacttcagcttcgttgactatgccagttggtccaggggctgaccacacaacccatgacaaagatccaaagggcttttcattctgaaataagcacagtaaatttctttctgccctgtgcaatttctgccttgttctttagatgggaacytacggttatagccacatgggaatcatgagaactgacagcctgagaggctaaatccaaaagacagccagaagcagggaaaaaagagaacagtgataagacagaaa

SEQ ID NO: 837927 - DNA, 631 bp, Homo sapiens
tataaaacagaatggactagattatgtaatctctaaagtactttgtcactagttcaaaaatactccaaaggactctggaggccaaggtgggaggattacttgaggccaggagatggaaaccgtgtctctaaaaacgttagctgggcatggtggctcgtgcatgtagtcctacattatgtaaactccaaagttctttcttgctagctcaaaagtatttcaaaggactcaggaggctgaggcagaaggattgcctgagcccagggttcaaggcttcagtgagctgtgattgtgccactgcgctccagcctaggcatcagagcaaggccctatctctggaaaaaaacaaaaaacaaacgaacaaaacacgccagagcaaaatgtcttagtgttcaatcattctttacacttgttttatttatttttaatttttattttttgtgggtacatagtaagtgtttatgtttatggggtatatgggatatttcaataaaggcatacartgtgtaataatcacatcagggtaaatggagtatccatcacctcaagcatttatcctttgtgttacaaacaatccagtcatactcttgtagttatttttaaacgtacaattacattattctttatgcctgtt

SEQ ID NO: 837928 - DNA, 593 bp, Homo sapiens
gctgtatgcaagtctttcaatagacacatgaatgtttctcccaaagcaagggttttggtgatcaggaaatgaaacttaatataaaacctaaattaaattgaactttttagaaattgccttgagaaaacctggggtgggaaataaggacttgaaactagactggaagataatcttggattccgaggggacccaagatgattgggagcatgactttggggccagcgaagtcattttaacatcatggcattgagacataaatgcccacctgaaatagctggtaatatggggactgaagtactcatgttagtgtgacagcagcagggtcactggattgaataactccagggggcaccattcatccattcctttattccaggaagtgttatggaatacaaggtattacacagaagcagcaatttggaaagaccatcttgagagattcttcataaaaacagaaccccrgtctataaggtacacattgagatcagtgtcactctgtccatgctctcatcccacttctgtgtagatgtcttctcccatttgctattgtgttaagacatcagaatggatcttccaaggtgctaatctctctc

SEQ ID NO: 837929 - DNA, 615 bp, Homo sapiens; identical to SEQ ID NO: 832908

SEQ ID NO: 837930 - DNA, 645 bp, Homo sapiens
caacttgctgttcttatactttaaaaaatatggcattgccttgagttttgttcttttcttccagcttctgaggaagaagttgtgcctaagtggccrttgacgctcttctctctccttccttcagttccgatttgtccctctatcttggctccttccaagcagcctgtaatgtgttcaagctacctccatcttatgctatcaactctcctttaacttagaatattcttttatttctcaccttttctgcttttcttcacagccagattcctcaagcaggtaatctttgatgacattttgtactgagtgcctatttttcacttttcaatccaatgtaatgaggcctgtgcctctaaccctgcaatgagatgtcactggtgaatcctgccaataacctcttgggtactaatcccctggatctatccgaattttctgatcatttcttctaaacttccatttccaaccttacattcctccccttcaatgcctgcattctccacgggtttatctttggccttcatttctttttactttttttgttcgtttgttttggtggggtaatctctttcatgtccatgacttgaactactacctttagactcataattcctataccagtacctctggttagggtcataggcctcaaat

SEQ ID NO: 837931 - DNA, 630 bp, Homo sapiens
atcaccatccaatatatggtactgtttctcccatagccaggattcatcggtccaggtatcaaggggtgaaagtggaagtggcaccactcaccatcaccccaagtgatccactagcaaaatttttgcttcctgtttccattacattatgttctgctggcctagacgtcttagttcctgggggaggaacgctgccaccaggagacacgattccattaaactggaagttaagattgccacctggacactttgggctcctccgacctttaagtcaacaggctaagaagggagttacagtgttggctgtggtgactgacacagactatcaagaagaaatcagtctactactccacaacggaggtaaggaagagtatgcatggaatacaggagatccattagggcatctcttaacattaccatgccctgtgattaaggtcaataggaaactacagcaccccactccaggatggacgacaaatggcccacacccttcaggaatgaaggttagggttcaactccaccaggaaaaaaamcacaacctgcttaggtgcttggtgaaggcaaagggaatacagaatgggtattggaataacgtagtcattaatatcagctatgaccacatgaccagctgca

SEQ ID NO: 837932 - DNA, 524 bp, Homo sapiens
tactatgcagccttaaaaagaacaaaatcrtgtcctttgcacaacatggatgtagccggaggttattatcctaagcgaattaatgcaagaaccaaatactgcatgttctcagtacagtactgagtacacatgaacgtaaagatgacaacgatgcacactgggaagctctagaggaagaggggccaggtgggggttgaaaagcttcctatcaggtactgtgctcactaacttggtgtcaggatccataccctgaatctcagcatcacttaacatacccaggtaataagcctggacatataccccctggatctaaaatgaaagtaaaaattatttaaaaaataaaaaatttatgtttttaaaaaactggcatctaggtaaacttgaagtggaaatgcggatcatagaggtagtattacttgggaaagctttggaagcacacagactggttggaagcgctgcctctgccaaccagcagctgtgtgactgtgtgccaggtgctttacctctctgagtaccaccagaat

SEQ ID NO: 837933 - DNA, 667 bp, Homo sapiens
atactttatccatatttctttaccacaaacttgtccaacctgcagcccaagggctacatgcagcccagtgtggctttsaaggcagcccaacacaaattcattaactttcttaaaatattacaaaaaatttttttagctcatcagctatcgttagtgttagtgtattttatgtgtggcccaagacaattcttcttcttccaatgtggcccagggaagccgaaagtttagatacccctgctttaccacatagcctgtcctgcagaacatcaatttccttcattttctgtatcccaaggaaaattggaaaaggccatctaggtgacgatgtggggacctccaaccttgtaatattctccatagaagctgtgaggtgtcgaggagagaaaactagtgggaatattacagttctaatttggatactggttcctgctccctctcaacttctccttggccatatgtagactccagggcttcttctgaatacatccggctgtccttcttgaaagaaatgagtcctctgtgctcattaggaacccacttctcattccactctcttcccacgtggtttgggtgggggcaagatcgccgatggatgtgtaaatcagtaattagttgtaggttcagtatttaacccaagtacttcaaatcaaagctagtaattttactt

SEQ ID NO: 837934 - DNA, 635 bp, Homo sapiens
atattcaataaaggattaatactcaaaatatattttttaaaattcatataactcaatagtaaaaaaaccaaataacttaactaaaaataggcaaataagctgaataaatatttttccaaagaagacataaraattgatatgtagagaagtgttcaattgtgaatgatattttgttcctgatttggctgtcagcttcgatgttgttggtgtataggaatgctacttatttttgtacattgattttgtatcttgaaacattgctgaagttgtttatcagatcaaagagcttttgggcagagactgtgggcttttccagatatagaattatctgtacactgggatagtttgacttcctctttttctatttggatgttgtattagtcagggttctctacagggacagaactaatagatgcttatataaaggggagtttattaaggagcattgactcacacgatcacagggtgaggcctcacaataggccctctgctagctgaggagcaaggaagccagtgcgagtcccaaaacctcaaaagtagggaagcctacagtgcagccttcagtcagtggttgaaggtccacgagtccaaaagctgaagaacttggagctcgatgtttcaaggcaggaagtatt

SEQ ID NO: 837935 - DNA, 635 bp, Homo sapiens
atattcaataaaggattaatactcaaaatatattttttaaaattcatataactcaatagtaaaaaaaccaaataacttaactaaaaataggcaaataagctgaataaatatttttccaaagaagacataagaattgatatgtagagaagtgttcaattgtgaatgatattttgttcctgatttggctgtcagcttcgatgttgttggtgtataggaatgctacttatttttgtacattgattttgtatcttgaaacattgctgaagttgtttatcagatcaaagagcttttgggcagagactgtgggcttttccagatatagaattatctgtacactgggatagtttgacttcctctttttctatttggatgttgtattagtcagggttctctacagggacagaactaatagatgcttatataaaggggagtttattaaggagcattgactcacacgatcacagggtgaggcctcacaataggccctctgctagctgaggagcaaggaagccagtgcgagtcccaaaacctcaaaagtagggaagcctacagtgcagccttcagtcagtggttgaaggtccacgagtccaaaagctgaagaacttggagmtcgatgtttcaaggcaggaagtatt

SEQ ID NO: 837936 - DNA, 596 bp, Homo sapiens
tggcatgatttcggctcactgcaacctctggctccttgtttcaagagattctcttgcctcagcctcctgagtagctgggattacaggcatgcaccaccatgcctggctaatttttgtatttttagtagagacagaggttttaccatgttggtcaggctggtcttgaactcctgacctcaagcaatccacccacctcggcctcccaaagtgctgggattacaggcgtgggtcaccttgcctggcccacagcatttaaatattaataaacacatagaagatgtgtacaaacctactacccaaattactttagttgatattttaggacactatggccaactacttcagaatacaaattttaatcatgtgcaaatgaaattttcaccaatatagacaggtgatgctccacttattgaatgacacctcaataaacatacagagcatgatctccaacacaacagaattcaactaaaatcaatgacaaaataatatgaaattatcagatgakaaattgagtgacagactttcaaaaatctcattaaatcaacaaaaatcataataaaaataatgtcttttgatctgaaaataatgaaaatata

SEQ ID NO: 837937 - DNA, 600 bp, Homo sapiens
aataaatatcagccaattggcatatataggcaactgtactcaacgatgaaagagcatatattttttcatgyacctaaaaaattataaaaatttacattgtgctaaactagaaaactagggtcaacacatatgagggaaaaaatagaaccatttaagacatactttctgaccacaatggaattaagccagaaatccaaaagacatgtagaaatcccagctgctcggaaaataaattttgaatttcaaaataacccctactcaaagaagataccctgttgtaaattacaaggtgaaaagtattaagtttaaataataatttcaaaataatttaatagtaattattgagtaataataaaaataaagcatgttaagaattgtgggatacttttaaagctgtgcttacaatgatatttgtaactttcaatacaaacattaaaataataggctaaaatcatttacagaatacacacctcaagaaaataaaattaactaaactctaataaaataaaataacagaaataataaagacaaaagaaaaaataataaaattgaacataaattttaaatatagaaaatctaaacagccaaaagttggttcct

SEQ ID NO: 837938 - DNA, 473 bp, Homo sapiens
aaagctttcaacttttcctattgagtgtgatgttagctgtgggtttgtcatatatgacctttgttgcactgaggtagatttcttcaatgcctaatttgttgaaaatttttatcatsaaagtttgaaagtgtgctgaatattgtcaaatgctttttttgtatcttgaaataattatatagttttagttcttcattatgtttatgtgatgtatcacatctattgatttccatatgttgaaccatccttgaatccttgatatgaatcccacttgatcacagtgaatgatctttttaatgtgttgtcaaatttcgtttgctagtattttattgatgatttttgcatatatgtttatcagagatattgacttgtagatttcttttctttctttttatttatttatttttatttttatttttatttttgtagtgtccttgtctggctttgatatcagggtgatgctggcctcataaaat

SEQ ID NO: 837939 - DNA, 495 bp, Homo sapiens
gagttgaacaatgagaacacctggacacaggatggggaacatcacacaccggggcctgttgtggggttgggggatgggggagggacagcattaggagatatacctaatgtaaatgatgagttaatgggtgcagcacaccaacatggcacacgtatacgtatgtaacaaacctgcacattgtgcacatgtaccctagaacttaaagtataataaaaaaattaaattaaaatttttaaaaaaagaaaataatttcaccaaaggcagcaacatgtgtctcagaaggtttcacttacggtaaaatatgaagtggcagtttctgagttcagacacagctgaagaaacctcagtacacaagtgcagaaagaaaccttctttgcctttaggttttctgaaagaaaataaaaagtcaccctgtatttcccccagcattcagggtagtgccatgtgtgaaaagagayagcaatgctctatcagccatgatggccttagtgacag

SEQ ID NO: 837940 - DNA, 637 bp, Homo sapiens
tcttctttacaaaagtgtctgttcttgccctttgcccactttgtaatggggttattggtttttatcttgtaaatttaagttccttattaaaaaaaagttccttatagatgccaggtattaggcctttgtcagatgcatagtttgcaaaagttttctcccattctgtaggttatctgtttactctcttgatagtttctttttctgtgcaatagctcttcagtttaatgagataccatttgttagtttttgcttttgttgcaattgctttcggtgtcttcatcataagatctttgcctgtgtcctgaatggtattgcctaggttgtcttccagggtttttagtttcggattttacatttaagtctttgatccatcttgagttaatttttgtacatggtataaggaatgggtccagtttaaatcttctgtatatggctagccaggtattgcatcactattcattcaatagggaatcctttccccattgcttgtttttgtcaggtttgtcgaakatcagatagttgtaggtgtgtggccttatttctgggctctctattctgttccattcgtctatgtgtctgttttcgtaccagtaccatgctgttttggttatcgtagccctgtaatatagtttaaagt

SEQ ID NO: 837941 - DNA, 566 bp, Homo sapiens
attgaagacaaaggatacaatcatcattgcttgaggaaaactaaattttatatagctgtcctttgttgttatgttaatcaaattataaaataagcgatagtaggagaatagcattgctgtgttataaaattakttttagaattagattagttctgtgacatgagatggatcacagtgagattatacctcatgagtactcaactcttgtaaacactacaatgacatcgttaaatattccatgcttaaaacgcacagcacgttaactcctttatttcaggggttcgcttttatagttagagaaggttttttgtttctttttttttttttaacttttagactatacgcatacaatatattacaggtgcctgtgactcgctctaaaaatgttggaagctgaactgcatcatattcttgagggagaacttaatgtcaagaatttaaatttgcaacacccattaatgtgtatttagagcatttcaacaaagaaatacatttagtgacaaaagttttaaagtattacagaagagtcagaactgaaagataactcatggaattttaatgtacca

SEQ ID NO: 837942 - DNA, 601 bp, Homo sapiens
tccctttcatctcaaatgcagctctgataacagtaccgcttgaagggtactcaggaagtaaataaaagtgaacatcctgctatgagctggaaagcacaggcagaatcctscaccaccctgccagcctaactgtactgcccaaagacaaaggaatctttcctgttacaggtacgtgcaacccacaccaggtaaaatgcattcactaaggctgtttggtctttccttgacacatcactgccattacagactgattcttccaaacagacatttcatgaaggcccttagtaaatataggcttgacatagtagctggcaaagttatgaacaaaatgtattttattctgagacagaacctattttaaatagctcattgacctctataatcatagtgtttggtcaaaaaccatcaaaaccaccacatagagccaaataagatgcttccatttatatgaagtaatttcttctcacagtgcagaaaagagtggtgatgttcacacctatgcacaattctactaaataatcaagttcctaatcattgtgaagactgcacctcagaatcataatcagttgatttggagtttaatttacttttaaagtattag

SEQ ID NO: 837943 - DNA, 489 bp, Homo sapiens
tggatccattattttcatttatttttgacatgcttcttaaatatgggcaatttggatgtatgcattttaattagtaagactagctaatgtataaaattacttttaaaagtaaaataaaacaataaaaaataatttgcaagtattaaaattctcataattgggtaaagttcaaatgaagaaattcagcattttaaatttgaacccttttagaacaatatgttctggtctcagacgttacacgtttcattttttaagagggaaaaagaaaaaatgagaaaaacaagctaacaaatgccacggaattataaattaataatgcttgttatgttctgtggtttttgaacctctaactattccacccaaatagaacatggcacttctcactctagtgtggtctgakataagccatggattcaggtactctcagcggccagacacatcctcaatcaattatggagagatcaacaaccattttgcctttcaaatgag

SEQ ID NO: 837944 - DNA, 611 bp, Homo sapiens
taatgaacagctgagctgggattcaaaacatagatctgtctgagtccaaaagccttcatcttggcagtggaatatagtcaatggctaagagacaagaaacaatggagagcttagaactaacccttyggagatgctaacattcctgggtttggagaggaaatgctggtcaggggctaaataaggcactcaggatgtcagaaagatgtgggacaaaataatgcaaggtggtataatatttctgaaagctgaagaattgacattatctaataatagggaaaaactcaggatgtagtcaagaatcctttatttttggaaatcctaatattgaaagcatagatttcaggtggatgttgaagtctccaatggccaccaaaactgcagggctctaaaaaggtgttaggttttgagaaaaacttaaatgtgacgcagaccttttattcagcaaaaaaaaaaaaaagttgttgcaaaggtaatcactaaaatggacaggcattttaaaatattaaaacaatgaggtttgttgacaggtatctaatagaggaaagaaaaagccagttgagatggcaatattgaaaacggccacctggcacacaacttcggggggtgccatt

SEQ ID NO: 837945 - DNA, 633 bp, Homo sapiens
attctgacatcaactctttgatgcaggcatgacatattgccaccttataggtaaggacactaaacgtcagaatggcgaatggcagggaagaatgaaggtggctttttgagtttggmtgatgctctatcaagatctttctattgtaacttgttgcttgagatcacacaggtaagtagtagcataagacagggagtgtaaccaagattcctggttctcagtttaatatgcttttttatacattacagagaattggaatactgtccaatttctgactttgtgcaaaggaaaaatatttacaatttagtaaagaatgctaatttataattccaaatgaaaaatgatgacttaatgcccagggagattaaatttctctttcttccaaaagttactaattgctacttatgtagcaaatattgagctaaatcctggggtcatagtggtaaacaatatgggcaaggtgattactagtgaatttttaataaattttaattactcaggttattttttctttcattcatttcttttatgatttttacaaaattgtgaacttggttctgattctgtaggattttacttataggcacaaattatacttgtccataattattacctagcacttaaaaaatgatcatt

SEQ ID NO: 837946 - DNA, 633 bp, Homo sapiens
attctgacatcaactctttgatgcaggcatgacatattgccaccttataggtaaggacactaaacgtcagaatggcgaatggcagggaagaatgaaggtggctttttgagtttggctgatgctctatcaagatctttctattgtaacttgttgcttgagatcacacaggtaagtagtagcataagacagggagtgtaaccaagattcctggttctcagtttaatatgcttttttatacattacagagaattggaatactgtccaatttctgactttgtgcaaaggaaaaatatttacaatttagtaaagaatgctaatttataattccaaatgaaaaatgatgacttaatgcccagggagattaaatttctctttcttccaaaagttactaattgctacttatgtagcaaatattgagctaaatcctggggtcatagtggtaaacaatatgggcaaggtgattactagtgaatttttaataaattttaattactcaggttattttttctttcattcatttcttttatgatttttayaaaattgtgaacttggttctgattctgtaggattttacttataggcacaaattatacttgtccataattattacctagcacttaaaaaatgatcatt

SEQ ID NO: 837947 - DNA, 610 bp, Homo sapiens
gtaccccgatcacaagcccaagggctggccccaacacagatgatggtgtctccgtggccagaagacagaagccacgggagacacaggtggctgcactcagccacactcaagaaccagctacggccagcagcactgtccgcctccccagagtgggcctggggctctccattcatccttcagccttcacaccaaccctactgggggcccctaccaccaggcccattttccagattgagaagctaaggataggagacaaatccctcatgatgcaggctccgggggctcaggcccaggcaatgctcaactcccacggtgctccccacgcgcccagctgggcctcatcacacttcagagccctcctcctgtttcaaggctcttcctgggcaacaatgtcagcatagccaggggggcgcccccgattcacagatgagcaaccagaagcccgacaaggtgtgagacctgggactggcagggtctgcctgagcacatgggtgctcccctccacatccctggcccggcrcaggtgggtggcaccacttcctcaccagcacacagacctgggcgggacgcactggccgcctacaatacagcccctctcaggaaagccagg

SEQ ID NO: 837948 - DNA, 503 bp, Homo sapiens
ccctggcctcccctttcactcactccacttccaatccatcaagaaatcctggcagccccacctgcaaagtcrgtccaaatctgaccactctcacctccaatgctgccactgccctaatccaagccccaacttctctcacctggaagctgcatggatccccacagctgccctccagcctgttccctgccagcagcagtgtgggggaagggacctttaggatctcaattagaccccacccctccccaaaccagaatccaccagcagctcctcatcacacccaatcacctgcacctgctgtgagtgaggatcacttgaggccaagagttcaagatcagcctgagtaacaaagtgagacctcatctctacaaaaaatagaaaattagctggctggtgtgcgtctgtagtcccaactacttgggaggctgaggctggaggatcacttgagcccaggagtttgaggctgcagtgagctgtgatcacaccactgcactccagcctgagag

SEQ ID NO: 837949 - DNA, 503 bp, Homo sapiens
ccctggcctcccctttcactcactccacttccaatccatcaagaaatcctggcagccccacctgcaaagtcagtccaaatctgaccactctcacctccaatgctgccactgccctaatccaagccccaacttctctcacctggaagctgcatggatccccacagctgccctccagcctgttccctgccagcagcagtgtgggggaagggacctttaggatctcaattagaccccacccctccccaaaccagaatccaccagcagctcctcatcacacccaatcacctgcacctgctgtgagtgaggatcacttgaggccaagagttcaagatcagcctgagtaacaaagtgagacctcatctctacaaaaaatagaaaattagctggctggtgtgcgtctgtagtcccaamtacttgggaggctgaggctggaggatcacttgagcccaggagtttgaggctgcagtgagctgtgatcacaccactgcactccagcctgagag

SEQ ID NO: 837950 - DNA, 567 bp, Homo sapiens
gatcccccctagacctggcatccctgttgaatttcaatgcccttttaaatcttcttacagacgataaagaagatgactgaaaattgatgggtaatagaaaaaaggagcatcactcgatttctgttttgcttccactttttctgtcagaagatagatactggtatatattgaactgtcaatttttagatctctattatttatctatatcaatagatattgatatgaaagaagtgaaactcaagcagggtgaggcctctaaaatagttttgtgtttaggtctttgataagcagaatttgaggacactaagaggactcacaagtgagatatgttaatatgaagtagatgagtatttgtgagggatgccagagaaaaaaatagctctttcattgattcattcggtcaatacatttattaagtatgttctgtttgccagacatgtataggataaaatggaaaacagaaagacaagaacaatgatatcaatgaaatgacattctactgaaagcctgagacaataaacaaraaaaataagttaatttgagattataggttgtatgaaagaaaat

SEQ ID NO: 837951 - DNA, 623 bp, Homo sapiens
  misc_feature 30: n = A,T,C or G
ttttttccactgcaacttttgctttcactntaatataagtaagctggataacttttacaccttgtctttcctgctgtatctagagactgatcttaaaattgtatatcaagaawgttgataagatggttaattttacgtgtttacttgattgggccacggggagccagatatttggttaaacattattctggccctttggaaggctgaggcgggtgaatcacctgaggtcaggagtttgagaccagcctggccaacatggcaaaaccccatctctactaaaaatgcagaaattagctgagcatggtggcaggcacctgtaatcccggcactttgggaggccaaggtgggcagattacttgaggtcaggagttcaagaccatcctggccaacatggtgaaaccccatctctactaaaaatacaaaaattagctaggcatggtggcaggcacctgtaatcccagctacttgggagcctgaggcaggagaatcacttgaacctgggagacggaggttgcagtgagccaagatcgcaccactacactccagcttgggtgacagagtgagatgccatctcaaaaaaaaaaaaaaagaaaagaaaaaaaaagaaaaagacaattattttg

SEQ ID NO: 837952 - DNA, 626 bp, Homo sapiens
caaactagagcctggcttaatgtgggttctcccagacgcagacctcaaagccagtattccaatgcaagtaakgtgttttgaatgcaattgctggaaatacaggtaagggagcaggaacggagaaagggacagctgttagtaaaaggtgtgtttttcaaatcagttacccttgaagggaacttaattctgtgagattaatcctgctggaaaaccccgtgtgcgacatgcacttcagggttatctcatttgatgagtgaacaagatgaaaggtctacccactaactcccattggctcccagcgcttgttaattccccagcctctctagcaaagcaagctattaataggaacagcaagtcctggtgggcatagagagctgaagggagagtcccagacacaggcacgtggaagttaggctgggatgcctgggggtggtaaattccaaggggatatgggtgtgatatcaacagcctcctctgcatgacttaacttatcaggggctcagtttccacatccataaatgggggcagtaacacttaaatctctcaggactacggagcccatttgaaagcccatcttataagaaagatgactattttaccaacacttacagcacataaatcattcc

SEQ ID NO: 837953 - DNA, 454 bp, Homo sapiens
tctagaggtttaaggtgttttccaacgagaacatgataagatgaaaatagataatcaagactagaaaagaaagaggctcagagcctcaaggacattgtataaccctctcaccctaaattttactccatttctttttaaatggcaacagtgcaaaagcttccttgcatgctagaaagattgatttcccagagtcaaaatttttcagaatcattgcttttgacacttgtctatggagacaacattgtagatgtaacttggagatattatatgaaaatgaatttcatttgtagtaaattatcaaataaaataatctggctttgagatatgctacataattaggccattgacagaattttatgtggacagagaaagkctattttggacttactgatatattttgccaaaatgcttcctattacatgataattggatatattatctggatgtattttac

SEQ ID NO: 837954 - DNA, 575 bp, Homo sapiens
attggatggatggatggatggatggatggattgggatggactgggatggactgggatggatggagtaaatactcatagtagataccttttcacgaatgctcagtaaactgtagctgtggttaaggacttggccttagtcatttgtccgagagcctgtaggctctgtcatggcactaggcagctgcgtaaaaggccaggcctccatcccgacctgtgtattcttgcctgggttgagccagctcggtttgtgtgagtattcttgtacccccttccagaaaggactagctaaaagacacctgctctgagttggccatcagcagggcatcgggggagttgggagccggtaggaactgcagctctgggtgctgtgaagagggccctgagccgcatccaactaaggaagtgaaatgttgctgagctcccaccctcctaggcagaggtctgagccgctgggatgtggacaggtgacctctgaagcgttgttcagctccgccaccatccagtttgagggttgcttggtcccatgttctctccagtcctgtagtgggagagcaragggggtggagcttggatcc

SEQ ID NO: 837955 - DNA, 381 bp, Homo sapiens
agtaaaccggagaaaatcaggaaggagaaaaggtgctgtgcttggaagtgaaattatgacagcaacaagtggagaaatggttatttgacacgttaagatactttaaccgaaaaagtacttgatttttcttgtttatgaccagaaaggggcatcgctgtgatactgggttaggcagtgtggtatagcagatatgtggttaacatcattgctgtgtcatttgtttaatctgtgactttagtcaagttactaagcctctctgaatgtgttttctgaggtatacagttggaatattggcacctacctgaggggcttgttgtgagaactatgttagttaaagtrtaggttgggtgctgaacagagcgccaggcctctcagagaaaa

SEQ ID NO: 837956 - DNA, 624 bp, Homo sapiens
agaaaatttttttctcctcctaacttccatttctcacaccttgttcatcactaacctcgaggaatttttaagcccatatatattaaacctagtggatctaaccatgctttcaccattgcagcatgttataaatatgtctttctctccttaccctaaacccattctttgaggatttggtacagatatttagaatacaccttaagagacaagttaattgcctctctagtcctcaatattcctatctttatttatttatatttatttatttgagacagagtctcactgtcccccaggctggagcgcagtgacaaaattttggctcactgcaacctctgcctctgggattcaagcaattctcctgcctcagtctcctgaatagctgagactacaggtgcatgccaccatgcctagctaatttttgtacttttagtagagacagggtttcgccatgttgtcaggctggtctcgaactcctgacctcaagcgatctacccgcctcagttccgaaagtgctgggattacaggtgtgagccaccacacctggctgatatttctgtctttaaaakgaagagtcagacagttgctctccatgatcgcttccagctttaatactccaggatccca

SEQ ID NO: 837957 - DNA, 633 bp, Homo sapiens
aatactcattacacgctctttgggcactagaacttgtagtagcctttagaataaacaatgtatctatccatgcttggtaagtacatttttttttttttcaraacagcttattgggaaagaacacagctgaaacaagtgtttagaattaccaaaaagcaaaaaggtgattttttttcctaacaaaatgaaaattctggcaagtatataagatgaaaaaatcattttgttttacatactaagagaattgtactttttgaaagtcatcagcataaggaagttaatatcaaattaagaacaaatgtatcattggtccctacagaagaaatacagtatgtatagatgacaagtatgttataactttggtggggtggagggaatgatttctaaaaaggattcaaagaattaacacattttttatgattccaagataagactttgcactttttttacttactgccatatatgtggattttgttgatctaaaataatcaacacacatctttgttgaaatattatctattattctctaaaactgttcataattatccagaataagtgatagtttgtgtttttgcatgtattactgactcttccaaaaagacatgtctcttagatttcactagtattttaggt

SEQ ID NO: 837958 - DNA, 639 bp, Homo sapiens
acaatccccacatttgtatcaaaatcacacatcacatctcaccaggtgattgctgaataatctcagggactgtggagtccatacaaaaggaagccatgattagcttcaaarcatttgtgaagtagacctgcttggctccctttcagccaggtaggctagtacctgttggacttctttgggattagtagactgctccctccagtgacataaaaaaatcataagccagatagggaagttatgagaattaaatgagataattcatgtgaggtgctaaacatggtcccaggcacatatagaaagcaattcataatcaaagctcttgtaattattagttaatggtaggattttaaggaaatatttaagtgccctccttgtggatggcgataatatattgaaaaagttaagctcgtattgttttcttcaacaaaaaaaattggtatattatgtatatataaaacaaatatgcatagaatgtaccccacaaatacttacaaacataatatatgcatatttgttctatgcatagaacgtgtaatgatcaagtcaggatattcagggtatacatcactgaagtatttatcctaccagtgtgttgtgtacatgtcaagtcctttcttctagctattttgaaagatataa

SEQ ID NO: 837959 - DNA, 547 bp, Homo sapiens
agagatgtcctatatattaggcaatgccaattctctaggaagttaatagcgttgcttaaaaagtaagttttgtgggccaggcgccgtggctcacgcctgtaatcttagtactttgggagggcgaggcaggtggatcatttgaggttaggagttcgagaccagcctggccagcatggtgaaaccccatctctactaaaaatacaaaaattagccaggcgtcatggcgcatgcctgtaatcccagctacttggtaggatgaggcaggagaaacgcttgaacccgggaagcggaagttgcagtgagctgagactgtgccactgcactccagcctccctctccagaggaagactccatctcagaaaaaaatgaataagttttgtgaatttaaagtttgtgaaaatgtatagtttctgtattgcatgaattgtcacaatttttttgaagactttacttttgagagcaatgtagtttctcagaaaaacacacgtacagcctcccccactatcarcatctcccatcagagtcacacaatggatgaacctgtatc

SEQ ID NO: 837960 - DNA, 558 bp, Homo sapiens
ggtttccagtgtctataagcctgcaaaatgagtagagagaataatggtatacacacccattgttcaaaggcacacttagagggagagaaaaaggatatagtgaatcttgtcggggatttctaggttcagttcaattaagattgtcctacataaaagaaactcctccaaatgattgaatttctagctttccagtgatttgagttttctttttcctctgttccctgcaggttgctttagggaccatgccaaaccgatcacttgagatatacgtttatagtgagataagactgtaggctagaagaaggaatacttagcgacttaaatggggggtgctgagcactgaagggaaggagggagaaatgagatggtaacagatgtaacaaatgctgctgcccccagcaaagtcaggaatgaaattccttcctggaaatttggacctgggcaagaatgactcctcagatgtaaatagtgtctatgactttgaattttcatttgactgctggtgtaccagattgaagayataagcttagcaagtcctctttctctcctctctttaca

SEQ ID NO: 837961 - DNA, 593 bp, Homo sapiens
aggaatgaagacatgcacatattatatttgaagacatctccatgtgtatttcgtgtatacatacccatgcaattaagatgtctttgggcatttttctctttaagaataattgaaacaatgaatgcatttacttcaacttcatgaacatttggagattaacaaattacaagtgctatatttcttacatatatacaggttatatcatagatataaaagaccatacttggattttacagtgtgttttagtctcaatcctgccattaactggctaagttaccctaaataaatctcttaatttttctaggcttcatttgccttatctgcttttttttttttctttaaaaatgtagtttctaaaagtctgtaatcttttttgtttagcttggaaaaaactttgtcttgtcaaaactgtctttgcatttccagctcccacttttggtgagtttgtgggaacttttaaaatatattttcacacagctmtcttggtcattactagtcaagttaatttcctgtattcagactgcttttgtattatcttacaatttacttctcaatcatatatatcaaggctactggtagggaaaatgatctct

SEQ ID NO: 837962 - DNA, 607 bp, Homo sapiens
cccaggagttccaggctgccatgggctatagttgcaccactgccccccggcctggacaacacagcaagaccttgtttcccmaaaaaaaaataaaaagtataaataacttaaaatcccattatcccatttccaataaatgatcttcataacattcttgagatatttttgtttgtgggggtacacacaggcacaatgcaagcaaatatataatacttttaattattagaccaaactataaaaatgttttgtatcttttttgcttattagtatataatgagcatgattccatgtcatttaataaggctatatcacaaacttaaatagctcagcagcatttcattatttacgtagccagtttcctgccactcaaaatttaggtttacctctctcttttctttggtactacagaaaaatgagaaaaacatctttgtgcatatgtcttcctgcatttattcatttccttagaatgactttttagaaattgaagggccacttttcaatttgagtacatattgacgtatgagcctatggaagagttgcactaccttacctttctatcagcaatttaacatcgtgtgtagattctcacactctctacagtaccagc

SEQ ID NO: 837963 - DNA, 580 bp, Homo sapiens
atatatcatttgtgcattcatttgtgtcaacatcacataaacacacatgcaaacatatgtacataattttacctaaatagaaatatagtgttttaatcttaygttttaagactgattataagtactgagcattattacctgacaataattttagttccacattaaagtttgcaaaactcctgaatgttagctaaaatgcagcccacagatactttctttctaccctccaagacctgcacaacgttttaaaagccaggacattttgcagcttctcctgcgaagaggataatctggtgatattgagtctgtagtcttacaaggatgtgatggaaactgaaaggcaggtgtctcctctacaatgagcaggtgctccccaaacagcttagccattagcttggcctgtttcttgcaaaaagccgatgcaaccacccctcgggttgagttagtgtcccctgaacatcaccattttaataactgtagaactatatgcaagggataaaccaggattgatttcataaatctccttttgataggccttaatgttggttccatattttccgttttgtgaatagagttgcgg

SEQ ID NO: 837964 - DNA, 629 bp, Homo sapiens
aactcttctcagacgatttctttgttctcttgttaacaaaataatgctgccgccatcatgcatttgtsccacacataatgaagccctaatcgtttgtaatgccagatcttagaaacagtggtaggacggggaagtgctgggagctaaaaagggtctctccttggggaaaaattgtgcattgctcgaggatttttaggcgtggaaaagaacagccgtggggctgtatcaatgtatcctactctgaccctgatcttaaaccttgacacattccaggaacaatggattaatgactcttttaaaaataagtaattgggtgatactgacgccaagccctagttatgacaagaaagaagcatttccaacaaatgcaaatactttgtaactcatttggaggcaaaaactgacctgaactgatgggaactgatgggagactatttatagactcaatgtgaatattcatatgctttgctgcagaattagaaatgcgtttgattatgcagtgctgacccagactcagctggggatgctattatgtaacactgggcatgttttgtgggctatatttctcttctaaaattacaaacattttaaattctcaaacatttctgacccaaatggcttctgatccg

SEQ ID NO: 837965 - DNA, 629 bp, Homo sapiens
aactcttctcagacgatttctttgttctcttgttaacaaaataatgctgccgccatcatgcatttgtcccacacataatgaagccctaatcgtttgtaatgccagatcttagaaacagtggtaggacggggaagtgctgggagctaaaaagggtctctccttggggaaaaattgtgcattgctcgaggatttttaggcgtggaaaagaacagccgtggggctgtatcaatgtatcctactctgaccctgatcttaaaccttgacacattccaggaacaatggattaatgactcttttaaaaataagtaattgggtgatactgacgccaagccctagttatgacaagaaagaagcatttccaacaaatgcaaatactttgtaactcatttggaggcaaaaactgacctgaactgatgggaactgatgggagactatttatagactcaatgtgaatattcatatgctttgctgcagaattagaaatgcgtttgattatgcagtgctgacccagactcagctggggatgctattatgtaacactgggcatgttttgygggctatatttctcttctaaaattacaaacattttaaattctcaaacatttctgacccaaatggcttctgatccg

SEQ ID NO: 837966 - DNA, 629 bp, Homo sapiens
aactcttctcagacgatttctttgttctcttgttaacaaaataatgctgccgccatcatgcatttgtcccacacataatgaagccctaatcgtttgtaatgccagatcttagaaacagtggtaggacggggaagtgctgggagctaaaaagggtctctccttggggaaaaattgtgcattgctcgaggatttttaggcgtggaaaagaacagccgtggggctgtatcaatgtatcctactctgaccctgatcttaaaccttgacacattccaggaacaatggattaatgactcttttaaaaataagtaattgggtgatactgacgccaagccctagttatgacaagaaagaagcatttccaacaaatgcaaatactttgtaactcatttggaggcaaaaactgacctgaactgatgggaactgatgggagactatttatagactcaatgtgaatattcatatgctttgctgcagaattagaaatgcgtttgattatgcagtgctgacccagactcagctggggatgctattatgtaacactgggcatgttttgtgggctatatttctcttctaaaattacaaacrttttaaattctcaaacatttctgacccaaatggcttctgatccg

SEQ ID NO: 837967 - DNA, 529 bp, Homo sapiens
tactaattaagtatctactatgtatcagacactgttttgggcattggctatagcctcataaaaactggcaagattcctgccccacagtgagcttttatttggggaggcaatggagacagtaaaaaagaaagtacacaaatgagaaccgtagttgcagatggcggcggtggtgatttctgggaaggatgtagtaaagaggggatgtgacagagagtaactggagtcaggtcacggttgactttacttaagccctcaggtaatgctgctctgaagaagggtcatttgagttggttcctaaaggctaaacatgataagccaaagaatggggaaagagcactccaaacaaggggaacagcaaggacatgggtcctgagactgggttagctgcaaggtgtttgaagaacagaaagcaaaatgtggccattacggtataactaagtaaggagggaagtggcagggagcaaagctgggsacgtaggcaggggctggatcctgaagggcctttgcagagcacagtgaagggtccata

SEQ ID NO: 837968 - DNA, 506 bp, Homo sapiens
gcctcaccagacaccaaacttgctggctccttgatcttggattttccagcctccagaactgtgaaaataaatttatattatttgttaatgacccagtcttaggtcttatttatagaatcccaaagggactgagacagtatagttataaatcaatgtcaagtttcttccattttcttaatatggaggtttgccatttgaggatgcttcattgcttctctgacctgaataaagtaacatatatgattctcattatactattgatatttaagggaacggcttacatccatttcataagaattgtgtctcatgaattatatttgtattccagaaaccaaactttgtctggagcatcccaatttaagatagccatttgktaagttaattgccatgaatgggtgacatttaataaagtatgtgaatacttaggaatggaaggttgcgaattaaaaaataaaattattctcctctttattcagttttgtatatcacttaccaaagcccaccct

SEQ ID NO: 837969 - DNA, 364 bp, Homo sapiens
ttttttttttttggttaatgtccctgtttctgtgttttgatgcaggacctccgggagccggcgggttgccaggacacaacggattggatggacagcctggtcctcagggcccaaaaggagaaaaaggagcaaatggaaaaagaggaaaaatgggtatttttggcaactcttctaattaatttccctgttatttatctccatgattgcatttgggtcgactaaaactgtgtgcagcaggggtaaggtgtttcatctctgcacagtttaaggccggtttaactcttacctagaagccrttgcgttccgggataccaagggtatacttcttggtcccaccttgacagatgtttatttcaaactggag

SEQ ID NO: 837970 - DNA, 618 bp, Homo sapiens
cattcaaaatttagttcaggagcagcgaggagtgatgtttacttgtccctttgcttgagagacctggggtttctcccaccacccagggtgcattatgaggctggagtgggaggaccatctgtayttaattgaggaaggaatagtaacctattgcctgatctgctattggtgacatttgccctgttcactagggaacagctctttaaagggtttcaagaaatagctaccaacagccttaatttaacagctgtgctgaactattgcggaacatccagatgtggagctgtctgtgggaaatacaatccgtccaaaggaggagataatggttccccttgtgggcccagccttcccgagctttcgagaacttagtgtctaccctgtctttgtttaaggcagttatcagcctaattactcatatgcaagccaacagctgttttcccagttgagagtcattttatactatattgcctcctttacacttatttgtcatattaggaaaaatattgaggggcagaagtgtttgcagctgtacatttaaaacatctcatgtagcactaaagtttgatgagatgaactgaacttcatttcattatagtgactttttctttctcttttttc

SEQ ID NO: 837971 - DNA, 629 bp, Homo sapiens
cgacttctgtattaaggggaatgatgaatgttttcacattatgggaaccattttaagcacaaccttaaaatagtgctttagagataggtgaagacatcgagaaatttgtctctacattttaaaccttttctctcccacaaggattttttagtaagaatatgtttgtactagagctaagagaatgtgaaagaaaatttctagccttgagtgttgctgccacctacatggtgggaagactacaaacaaaatctaacacctttcagacaggcatcagctgcagtatgttttctatgaaaatgtactttagaaatccccaaatttgtttatttacttcactatcctgaaggcatgttagtatttgttagtttcgcctcattttctatctcaaatacttgcagacattggagtaaatggttttgcttagactggtgtgaatacactgattatttgaaatagaagccgattcaaagaattcttccttattataaaaaaatcccaagtgcaacttgatccccatagctatstcttagggaaaggatgaaggttcttaatctcactgtactagaggtcctccctctttcctaccctagcagattctaaaatccaaaaaaaaaaaaaaaaaaaggaac

SEQ ID NO: 837972 - DNA, 611 bp, Homo sapiens
ctcattaaatggatttagattagaaaggaggtacagaggaaaagacagacactgccatataggttggcctgtttcccttagctctccttactttccctctccacaaattattttatcgtaagtactttcagactaaatgattttggggaaaggttagatttttattgaaagaaaagctaagtagaaaccaagtcaatgtcttaatctagtctaaaatatgtgttgaatatcaatgttagcaaagaaaatcactcaaaaaaaacttatttttccttttttctaccatggaaataacattacaaattttactaacctatttcttgctcttgccatgctctttgatttccttctttcaaagcgttcctcatcagaagaagttgtgtcactactatgaatggcatgcttctttctcctatttaaagagagtaaaatccttaaaaccattataatagcaaacaactttttaaaacacactgtaatatctacaattagctcagagaaaattcattcagcaaatatttattaagattttttaccctcatacaatttacatsaagtataaaggtagcaagttctgcagagaaaaagaaaaaaaaaggcctgtaatccca

SEQ ID NO: 837973 - DNA, 470 bp, Homo sapiens
atcctaaaaggtttttctttttttttgagatggagttttgctcttgttgcccagactggagtgcaatggcgcgatctcagctcactgcgacctctgcctcccaggctcaggcgattcgcctgcctcagcctcctgagtagctgggactacaagcatgtatcaccatgcttggctaattttgtattttcagtagagacggggtttcaccacattgaccaagctggtcttgaactcctgacttcaggcaatctgcccacctaggcctcccaaagtgctgggattacaggcgtgagccaaaatattattttttaaaaatgatttggcaatagctataacatctaagtacagttaaaataagagtctagctggacgcagaggcacctgcctcyagtcccaaatacttaggaggctaaggcgggaggatggcttgagcccagaagtttgagttcagcctggggcaacatagcaag

SEQ ID NO: 837974 - DNA, 519 bp, Homo sapiens
gttaaacacagaaataccctattccacttctaggtatatactcaaaaaaattgaaaasgccaggcacggtggcccacacctgtaatcccagcactttgggaagccgaggtgggtggatcaccagaggtcaggagttcaagaccagcctggtcaacatggcgaaaccccatctctactaaaaatacaaaaattagctgggcatggttggggggcacctttaatcccagccagtcagaaaagctgaggtgagagaatcccttgaacctgggagggggaggttgcagtgagtcaagattgcaccaatgcactccagcctgggtgacagagggaggctgtctcaaaaataaataaattaaattaataaataaatattcttgccacaataaaacaaaaattttaaaaaattgaaagtaaggagtcaatcaaatacttgtataccaaagtccataccagcattattcaagatagcagaaaggtggaagcaacccaaatggccgtcaacatatgaatggataagca

SEQ ID NO: 837975 - DNA, 623 bp, Homo sapiens
atttatagggtgtaaaattcagaatggattagaaaagcctttctatgttcagcccaacacatcctaaatcaacgtcccctgaatggaccagagcaatctctggctggcctagtggggaggttgtcatggcaactgactggcaagctcagccagtggaatgtgaatgcaaacaatagagtgataagactgtgtacagagcagcatactaaggctgcttctgcccaggtacagtggcacataggtgaaagtgtgaaactgttgctgcattttgtaacttcttaacaatctctggcagctcatttgaaatttaccaagtgccctttcccagatgttggtaaaaacattcctgctgatagataacagaagctatggaaaaatcagcacccagctgataggtgcagaggtatacaaagccctggagggctgttggaataacactactcaaaaattttctgaaggaggttgaagcaggtttaaggtaaatcttatgactcttcagtgccatcttgtgtccttttagatactgacaatttactagaagcccactctcagaccgatcattaggcagcarcagggcagacatggaaaagttagagctggattatattggagcttggtattcc

SEQ ID NO: 837976 - DNA, 616 bp, Homo sapiens
ccttcttaggttagtgggaaggcaatcaggcttgttgaaggggaagctaaacttagaacccagtacttacttgccctcacttaggtaccagaaccttctcttcccactttgtattcctggtggctgagaaaagaagcttcacagacattcagccaaagcctgaacaccgaggtttgtgagatattaagacaggaccaagggagtcctatgggagagttgggatttccaaggagaaggagtgggactttgagtttgtggattttgtagaactttgagatgaaatcttcaggaaaaggggaagagggtattaagagaagaagagaaccaaagaagaaaactcgctcgggccttttgaagaccaggactgtgaagcctcttttctaggcagggaactggatatagtgataccttctcttcctccaacactaaactactcttttgagatcccactgtcaggaaagattgcgaaagacttcaaagtgggcagaaaagatgactgggggccctgttcagcacagctttccaggttatctctgcttttgtcatctttgagctattttatagctctgtaggtggtggaaaaccaataataatayaagttcttgcaaatagaaag

SEQ ID NO: 837977 - DNA, 582 bp, Homo sapiens
cataatttaatttgctacatccttttgttcttggccattgtaaaatagttttgatcctatcatttatattaggttttatgataggtggtaattcacaaatcacccarcatggcattgatctcctcttgctgatggtgggactgtgcctaaagctcccttccctgctctgctggtgcagaacaacatcaggaagtccaagtagtcaaaaccaaagccaaacattgaacatttgcaaccccaatttcaatcataaaattaaccaactctaatggcaaatcagtcttttgttcatcgtagcacaaatgctctagaccacaatttttatttcattaaaaagaaaactggtctcctttggctctctaagatttcaaaataacgattctttgtaattccctagcaattgtagaaaatattcattttacattatttcccgacaatttagaacatttgaggttacattgaaatatttcttatataagagcaaatgaagaggatggatctcatataatcatggccaaataagtatattcttcttggtcatatatttttataaatcattgaggagcagggaatgttgtatgt

SEQ ID NO: 837978 - DNA, 595 bp, Homo sapiens
ttgcatagcatgttcacaacgttccagtttcattcagtgaaaacttctsatgaacttagatgtatattaacatgaatcatttagtaactatattttctgaaaaacagtgtgttaatgagacatcttaaacatatttttgcattggatgcagaagtcttttctgtctggtactattgttgttagaaccctacttttttgtatatagcaaaatgtatgcagggtttctgagtcacacatttattctgttggtggtctggatgtcatcagggtagctttagagatataacccttcttcataaggtcaagagaaaataaacaggagaatttaactccagatggcatcttcctgttttgaggccagatagaaaaatattttgcaaagaactgttgtccttcaaaatatacctatctagattcagattttaaccttgcagggataaaaaatcatatgggacagagctttggagttggcttctttaatcgtactcagttttgaaatagcagaaagaaaatagaatgcagtaattaagagtatcaaatttagagaaagccttcttacactcagatcttctttttcaccctgactgtgtaacct

SEQ ID NO: 837979 - DNA, 584 bp, Homo sapiens
ttcttagccaaggtgttcccctctttcgtgttccttggcttcacactctcacaagaatattggttggaccctggatcccagcctgcctcctggaggcatttctgtggtcttctagtgcctgtgagaatctcatcagtctttcagcccctgcaatggtgagcagagggacaggcaatgggaaaaagactcacgcatgtatctagttgctatgatttttccgaagaaggcttttatgtggaatcaccactacgctgaggggcttgccagagattcatgctgattccttcattcattttgttaggtttgaccactcaggccatgaacagccctggctgtgtaattccaagagacactgatgaatcatgctctttttttttcccaccaaacgttactaattcggctcatatcactgatgaaaaagctccagtttggagctgaatgtatattgaatgccttggatggtcagtgttccagaattagtacatcagtcatctgcccagactttttctctagagwttgtctgttttcagataaagattttggagtctagtccagggttatcagtctacttgtggaaggttttg

SEQ ID NO: 837980 - DNA, 646 bp, Homo sapiens
ctaccataaggtttgagacttcaatatctcactctcaataatgaacagaacamtcagataaaaggtaagaagagaagtagaatacttgaacaacacaataaaccaactagaaccaagagacgttacaaaaaacactctatcaagcaagagaatgcacatttttttgagtgcacattagacacaaggcaaattttccagatagactctatattaggccaccaattgtgtctcagtggattttaaaagatagctgtcattcagaatatcttctttgactacaacaggatgaatttagaaaataataacagaaggaaaactggaatattcaataaaattggaattaaacacagtcttacaagagaagctcagtttctccagagcttaattgtgagcaaccacaggctaccacactaggggtaaagcacaaccaaagtgtgagttactgtcatcaaagctaaggtgccagctactgcagtatggactcaagggcaagtgccacccgggctcaggaatgagtgacataaacattccccacccagtagcttagattgcccaccactaaaggtgacattaccttccgtagtggcaagaaagcagcatggccactccatttcccaaccctatcattcctctagtggctagggat

SEQ ID NO: 837981 - DNA, 646 bp, Homo sapiens
ctaccataaggtttgagacttcaatatctcactctcaataatgaacagaacaatcagataaaaggtaagaagagaagtagaatacttgaacaacacaataaaccaactagaaccaagagacrttacaaaaaacactctatcaagcaagagaatgcacatttttttgagtgcacattagacacaaggcaaattttccagatagactctatattaggccaccaattgtgtctcagtggattttaaaagatagctgtcattcagaatatcttctttgactacaacaggatgaatttagaaaataataacagaaggaaaactggaatattcaataaaattggaattaaacacagtcttacaagagaagctcagtttctccagagcttaattgtgagcaaccacaggctaccacactaggggtaaagcacaaccaaagtgtgagttactgtcatcaaagctaaggtgccagctactgcagtatggactcaagggcaagtgccacccgggctcaggaatgagtgacataaacattccccacccagtagcttagattgcccaccactaaaggtgacattaccttccgtagtggcaagaaagcagcatggccactccatttcccaaccctatcattcctctagtggctagggat

SEQ ID NO: 837982 - DNA, 603 bp, Homo sapiens
aaatacaagtggagagctattcggattttatgttcaatatcccatagtctattaagaactaatgttagttaagtagagattctgctgccctggctgcttagagggacatgtctggacttgaccatatccaaaccaatggggatagagtggtttgaggtgggccaaggagagtcaggatgattatttgtgacttttgaagcacatatgagaaaagaaaccctgtcttatcaaggactggtgatcttagctgtatcttctctcaaaacaccctacaccaaattcaaaaacagggcccatacccaaagatattctattctactttcttttcttgctgacaaagatgaaatattaggcagctcgtcctaagacccttatttgtttgcttgtttgtttttacactgtcttgctctgtcgtccaggctggagtgcagtggtgcgatctcagctcaccgcaacctgtgcctcctgggttcaagtgattctyctgtctcagcctcctgcgtagatgggactacaggcatgcaccaccacgcctggataatttttgtatttttagtaaataggggctttcaccatattgaccaggctggtctcgaaatcctg

SEQ ID NO: 837983 - DNA, 683 bp, Homo sapiens
cttatctaaatgcatatcttctcccccatctcaaatttaaagctcattttgtgaagaatttttgtttgatttatactcytatttgtcaaagatatctaggctagtatatataaataaataactttacattaaagttgctgcatgtattgatattttacaaaacattttaatagacagagttttaaaatgaactcttatatcatcttgcccagagccatctctcctaaattttttgtacatttatgatagtgtaattttacatttgattcgattgaaatgaccttctatccacctctgatcaaaaacagtttatataaatttccaacaccataacctcaataaaataaatgtacatctaaaaactatacaatgggtatagaatacatgtttgtattatctgtatattacattgtaatatatggtttggattatcttttttccacctatttctttaaaagcaatgcagcaatagattcctattctgagtagtcagaactgccctgaaacacattcacacttccacagtcgacggggcttttaataaatgaacaccacttcactttgcaagcagtagtgtgatgtgcctacattttaattatacacatattccaaagttccaagtctctctgtagtgcggtccacatttcatgctggagacacttggccaagactgaattcatatg

SEQ ID NO: 837984 - DNA, 519 bp, Homo sapiens
tgtatatatcctttctgagcttaactgtatatattttttaggtttctgtccttggggaatatcatgggagttatttagtctttatgtaaaattttaattatttaggatwatatgtttgtatgattacaataagacactgcggaagtcagctgtggcttaagtgttaagagaacagagtaacaatatccaggggccaatgtagacattgcttaggatgttggcagtatagcttcattaaccaaatcacatatagcatatgttgtggtctaagaaaggatcagaataaagttcttatagcgaaaggaacatcagatgctgcaaaaactttagcaagtgtaataggagcttgcatagttaagatgttaccttgctgtccctctgagtgtcaataaatatgatgaagttcatttacagtgaagaataaaggaggatacaacaattggaatttctcaaaagaagaggaaggaaaaagtttgaactgaaggcattttattgacattaaagagatggtgaggtgga

SEQ ID NO: 837985 - DNA, 378 bp, Homo sapiens
aattcagcatgaatacgacatcactggaacttgttagtgttatttgaaagatgtggctgaagttttacatagggaatgtgtgcttccatcacaagtaacacagtgtatacaaaactaacaaagcagtttgtggccaagaggtttttgttttctaggatgaataagaagtccatgttcttgaaggaacttgaggaacaatgactacttcaagtccaccctgaaatatggacacgatggaaaagcaaaggtgggtcatccacctgggaatctctagttcaatggttagctcagtaaatcttcccaatttaccatgcagatccatctcccttaaccccataaactggkctaaagaataaacatattgcaatttgggtatta

SEQ ID NO: 837986 - DNA, 547 bp, Homo sapiens
aaaatccatctcttcctctctgtttctatccataattgaggaggaagagcatttgttcagcctactgtctgccaggcatgtgccaggagcttcactcatctcttcaccccagtatattattgctgttgtatggatggagaaaccaagatttgcagagattatcacctgcccaaggctaccttcctgggaagagggagatctggatttgaaccccacctcggtctgagtccaaagcctgtgctcttcccacattgtgctgctggccatccctgaagctgccgctgtaggtggagcatactccctgagacgaaccaagggagtagtggctatatatatatatatatgtacacacacacaaagcaaacaaacaaaaacaaaataagttggcgaggatgtggacaaattgcaacccccgcatgttgttggtggaaatgtaaaatggtacagccattgtggaaaayagtttagtgattcatcaaaaagctaaacattgaattcctaaatgaccctgcaattccactcctatgcatataagaattgaaaacag

SEQ ID NO: 837987 - DNA, 608 bp, Homo sapiens
gccttatgtccacagagaggagtgaatcagaaagccagatgagtccagctctcaggacatgacaaattgcagaatgccgagctgggaggcttgagtacatcatatccttcttattctactgatgagaaaactkgggcctggggatgcccaggaatttgcttacatttcttctcctaatgaattaattctttcatttgttcaacagtgatgccctgagtgtctcccgtgtgtcaggctttgttctaggtgctggggttagaaagaggaagagtgtcacatgaggagaagacacatgtcacaggtcattctaaaagggaaacccaactgagaatgaagagtgtctcagggcagaaaaaggaaggagcaaagacatccaccttggcactagacaatttgggtcctgatttgacagtctttagtaattagcataaccatcagtacatcatggaagcttaccccatgtaccatttcttagctctcctcactgttgtgattgcaaaggtgcttggaaggttacttgatgagcctctttctgctgctccagacccagactgtgagttccatcaaggcagggatctttctcagctctctgttttatccccagaatg

SEQ ID NO: 837988 - DNA, 553 bp, Homo sapiens
ttttatggctttttaatattccatgatgtgtatgtaccacattttctttatttagtccaccattgatgggcacctaggttgattcaatgtatttgctactgtgaaatttcatggcaatgagcatgtaggtgcatgtgtttttttggtataattatctagtttcctttgggtatatacccagtagtgggattgttgggttgaatggtagctctgatttaagtgttttgagaaatttccaaactgctttccacattggctgaacaaatttacattcccaccaacagtgtgtaaacattcccttttctccgcagccttgccagcatctgttgttttttgattttttagtaatagccattctaactggtgtgagacggtatctcattgtggtttaaatttgaatttctctgacgattagtgatgatgagcagtttttcatgtttgttagccacttgtatgtcttcttttgagaagtgtcatttcatgtcttttgtccattttttrgtgggattatttgcttgtcaatttttttaagttccttatagatcctagttat

SEQ ID NO: 837989 - DNA, 521 bp, Homo sapiens
accgtctctactaaaaatacaaaacttagccaggcatggtggcacgcacctgtaataccagctacgcaggaggctgaggcaggagaaccacttgaacccaggaggcggaggttgcagtgagctgagatcgcgccattgtactccagcctgggcgacagagcaaagctccgtctcaaaaaaaaaaaaaaaaaaaaaaaaagaggccggggcatggtggttcacacctgtaatcccaacactttgggaggccgaggagagtggatcacctgaggtcaggagttccagaccaacctggccaacatgatgaaaccctgtctctactaaaaatacaaaaattagctggccatggtggtaggcccctgtaatgccacagctacttgggaggctgaggcaggagaatcactygaaccagggaggcagaggttgcagtgagccaagatcacgccactgcactccagcctgggggacagaatgacactccatctcaaaaaaaaaaaaaaaaggagagagagagaaaaaga

SEQ ID NO: 837990 - DNA, 660 bp, Homo sapiens
agtcacccaggctggagtgcagtggcactatctcagcttactgcaacctccgcctcctgggttcaagcagttcttgtgcctcagcctcctgagtagctgggactacaggtgcaygccaccatgcctggctgatttgtattttagtaaaaacggggtttcagcatgctgcccaggctggtctcgagctcctgagctcaggcaatctgcccacctcggcctcccagagtgctaagattacaggcgcgagctatcccacctggcctattattcttgatttctagttttattccattcttatctgaggagatacttgatacgatttcaatttttaaaaatttgttgacacttgttttgtgtcctaacttgatctatcctggagaatgttctatatgctgatgaaaagaatgtgttcacagtggggtgctggtgcccactttaatcactcctatttaacacagtactgcaagtcctaaccagaccaatcaggcaagagggaaaaaaagaaaaggcatccaaattagaaaagaggaagtcaaactgtccccctttgctgatgatatgatcttatatttagaaaaacctagactccaccaaaaaacttagttctgctaaataaattcagtaaagttgcaggacaaaatcaacacacataaatcaata

SEQ ID NO: 837991 - DNA, 548 bp, Homo sapiens
atctgactccctgatgcctgttgaccaactcctatataaacccctaactttagttggttggggagagagatttgagacttgtctctcatctcctggctgacatcwcccacaataaagcctttcttccttggcaatactcgttgtctcagtgattggctttctgtgggtgagaggaactggacctaggtcaaacccctggcattcagcaacaaaattctggtgtcctgacttggattgcattgcttgtgacttggcagccacaggctgggagagttttgaaaacccttctagcagatgcccagccatatttggccagaggtttcagtctctctctctttggccccaactgcagtcctgattgcctaggaagaatattctttgaaatttgacatctgcatctggacaggtgagtgtcctttgtgggtactagacagtaggagctgctcctgtcaaattgggaaattctgaagaatttccatttgttgcaggttaaacaagcccaacccactaatgtgagagtggaaagcactctatttcagttcagacac

SEQ ID NO: 837992 - DNA, 424 bp, Homo sapiens
ggaatccagggggattaacggcggagaaaagggaacagctggatgctctcccacccctcctgctgcccacygcccaccctggggtgtcaggtttccctgtaagttggtcatcagggaattctggtattttcaattactagccgggcacgctgacagggggatggggtcagtggtgccctgtgacccctgcaaggagatggagccccagggagtaagcacaaaagaggcttgtggccgagaggggcagggggaggccggccaggcggggcctgcttgtctggagcaggtggtcaggggccctgctgccctcagtgaaccccagaggggagttcagccccttccttggctgagacttggggaaggagccttccctctgtgtgcctccgtttccttctcagggcatgcaggggttgtacggggtggt

SEQ ID NO: 837993 - DNA, 642 bp, Homo sapiens
ctttctgcaacatgagctcctaggatatgctgatggtagagcttcctaagtggctgaccctgttaattacagggggcctcaaaggctggggatacccagccaggctgtgcgtatggatggagcatatggactgcctgccccatctctgtagaaggcatgggtctggtcaacattgggccctgaggatgcagagatacaattattcaggttctgttacttcctggcctgggatagagcagagtaagtcacttacctctcaatgcctcgctttcctttcatctataaaacaggatgacaacaggacctacctcgtatcgttgtgaggattcagtgttaagggcttagcacggtgcctggcacacagttagcacttgacaaatgtgagccgttttggggattagagtgaatagagaatgatctctgtgttttaggcgcctacctgtgccagcaacctgggaggcaccttgcatagcttagctgaaatcctcacagctaaatcctcctgtaaggagagggcgaagctrtccatgaggaagatgcaatcagacatgagctgagtgacttgtccaaggttgcatgctggtgagcggccaggcttgactcaaagccaggttcggctgcctgattccaaagcacagaccc

SEQ ID NO: 837994 - DNA, 642 bp, Homo sapiens
ctttctgcaacatgagctcctaggatatgctgatggtagagcttcctaagtggctgaccctgttaattacagggggcctcaaaggctggggatacccagccaggctgtgcgtatggatggagcatatggactgcctgccccatctctgtagaaggcatgggtctggtcaacattgggccctgaggatgcagagatacaattattcaggttctgttacttcctggcctgggatagagcagagtaagtcacttacctctcaatgcctcgctttcctttcatctataaaacaggatgacaacaggacctacctcgtatcgttgtgaggattcagtgttaagggcttagcacggtgcctggcacacagttagcacttgacaaatgtgagccgttttggggattagagtgaatagagaatgatctctgtgttttaggcgcctacctgtgccagcaacctgggaggcaccttgcatagcttagctgaaatcctcacagctaaatcctcctgtaaggagagggcgaagctatccatgaggaagatgcaatcagacatgagctgagtgacttgtccaaggttgcatgctggtgagcrgccaggcttgactcaaagccaggttcggctgcctgattccaaagcacagaccc

SEQ ID NO: 837995 - DNA, 626 bp, Homo sapiens
aatacccctcccaacaatgacagaatatccatattcttttcagatgcctgtggaacatawagtaagatagagcatattcctgggccataaaataaatctcaacaattttaaaagaattgaaatcataaacattgtgtattatggacttaattatgtcccccctcccccgtgccaaaattcatatgttgaagccctaaccccttagtgtgattttttgaagacggagcctataaaaaggtaattacggttaaatgaagtgaatatggtgaggtgaataaggttacatgaggtgaatatggtggagccctaattcaaaatggcttatgtcttgatgagaagagtaagagacaccagggatatacactcacagagcaaaggccatgtgagggcatagtgagaagatctgccagcaccttgatcttggacgtgtggcctccaaaactgtgaaaaaaaaaataatttctgtggtttaagtcaactagcctatggtactttgttgcggccatgctagaaatcaataatagaaagaaacaggaaaatctccaaacacttgttaactaaacaacacagagttagctctctatatctatgggttctgcatccatggattcaaccaaccacagata

SEQ ID NO: 837996 - DNA, 539 bp, Homo sapiens
tcttttgcatttctcacataatcttatatggatcctcgtaagattttacttaattgtaccatttgagttttcttattatattaatagttgktttctgagttacctttcattaacaactctttattttctaattttaacctttgatcaaagaaaagacaatgttaaaaattgactgtctaaaatgtgaacaatgttaaaaacactaggatttttaactgctgagtccaagtatagtgtctgccccagaggctcagtccgatggacgtgccttccctttgatatttgtttgccagtctgtttgggtttgttagtatatccatgttgtttgttttttgaacttggccttttatgattttgtaaataagtaaaaaaagaaacaagtatgctactttaaaataaaatctggcttactaacttaattttctaaaaattaaagaaaaaccacacagatgctttaaactaaatagtagttgatataccctgtctaatgaagggtgtgtaagtaaatctttgtgtcaaaccagccttttaatatggtt

SEQ ID NO: 837997 - DNA, 566 bp, Homo sapiens
atctacttaactacactgctattgttggacattgaggctattactttccacactttagatggctgaataggaacagctccagtctacagctcccagcgtgagtgacrcagaagacgggtgatttctgcatttccatctgaggtactgggttcatctcactagggagtgccagacagtgggcgcaagacagtggatgcagcacaccgtgcacgagctgaagcagggcgaggcattgcctcactcaggaagcacaaggggtcagggagttccctttccgagtcaaagaaaggggtgacagacggcacctggaaaatcgggtcactcccaccctaatactgtgcttttctgacgggcttaaaaaacggtgcaccaggagattatatcccgcacctggctcggagggtcctacgcccacggagtctcgctgattgctagcacagcagtctgagatcaaactgcaaggcagcagcgaggctgggggaggggtgcccaccattgcccaggcttgcttaggtaaacaaagcagccgggaagctcgaattgggtggagcccaccacagctcaag

SEQ ID NO: 837998 - DNA, 577 bp, Homo sapiens
cgtgttgccactgctggctccggcagccttcttttattctcttatgtggccccacccacatcctgctgattggtagagcckagtggcctattttgtcagggcgctgattggtgcgtttacaatccctgagctagatacaaaagttctccacctccccatccgattagttagatacagagtttggacacacaggttctccaaggacacacaggttctccaaggccccaccttagcagctagatacagagtgtcgattggtgcactcacaaagcttgagctaaacacagggtgctgactggtgtgtttacaaaccttgagctagatacagattgccgattggtgtatttacaatccctgaggtagacataaaggttctccacgtccccaccagagcagctagatacagggtgtcggttggtgcattcacaaaccttgagctaaacacagggtgctgattggtgtgtttacaatccctgagctagatataaagactctccacgtccctaccagactcaggaggccagctggcttcacccagtggatcccgcacaggggctgcaggtggagctgcctgcca

SEQ ID NO: 837999 - DNA, 511 bp, Homo sapiens
caaatcaccgtctctccagaacttgccctggtgtgtggcagtccactacaaaaacaccaccacracaatcaatgggtgccaagaaagggcttctcccatatccttcatttggaacaagattaatatttgggattacacaggaaactcaatatatactgtaaaatatttttttcctcaaaatgctttttaatgtcaactccccatggctggtgaaaagttagttttgcaaaagaataaatcttatcacttgttttgactctcagctaacagagagctgtgtgacacggtccgaatgttctcttactcttgtgggaggctcgggccatcaaaatttcattagcctcacagcagttctagcaccttcttaacttgaactgttggcctctttatcaataaataaatggaatctaatcccttttagtgactaaattcttctttgaaattgtagctagaacatcaggcactctgcttgcataattttacaatgttgaataacattttttttttttct

SEQ ID NO: 838000 - DNA, 496 bp, Homo sapiens
caataataaaacctatttcatacaattgctaaaagtgagttaatatacatgtggcatgcttacaagggtgtctgaaaactggtagtgattatttttaagtaaagctgtgaaaactgtacaataagcagtaaaaaaaagtttttaaaatttttgtccagatatatttagtacattctttcccaaaggttgatcccaatatgcagtgaaattgaatgacaagtcgattctaatttcaagttcttccttcagaagggactatttccaggtccccagtaaagccggagagaattcttaaattggtttcttgggaccttccctgctcagtgatgccctaatttacacttcataatttgcagcctgcacgtgaggcattcttgaacagtctgaactgaaaagaaatccttatcataattaatttttaaggcagcagggacttggttgcgaggttactcaaagcyaacaacagaagaaggaatgtcaatgtgacaacaggtca

SEQ ID NO: 838001 - DNA, 622 bp, Homo sapiens
ctgattgtcagttctaaacacagaagtgcagacsaagagactttggctattatctttgtacctccctcactgttgcaagcccctcctcctatgggctgaattgacttccaagaaatttaaagaacgggtgacctttcttccctcttcacatccccttcatctttttctttttccactttggggtgcaggatattaatgattaggacattcaaaagaaagtaaatatatggggaaaattagaaagtgactaaaatgtatggtcaggtaaaggtacaagcatagaaaagacctgaaaaaaaaacttaagtttagaatgtaggctgattcttggcacagagattacctacaaaaatctttaaagaccgaaaagaataaaaacaatttaaaaaagcaaaccatgggaaagaagaagaacgtgattttgttttagcacattattatatataaatgtccagttttcaacaacaacaaaaaatcaacaaggcatacaaagaaatgggaaagtatgggcaattcaaagggtaaaaatatcaacagaaactcttcttgaaaaagacctgatagcagttccactggacagaaaaacaactaaaagatattcaaaaaggctgggcgcagtggc

SEQ ID NO: 838002 - DNA, 622 bp, Homo sapiens
ctgattgtcagttctaaacacagaagtgcagacgaagagactttggctattatctttgtacctccctcactgttgcaagcccctcctcctatgggctgaattgacttccaagaaatttaaagaacgggtgacctttcttccctcttcacatccccttcatctttttctttttccactttggggtgcaggatattaatgattaggacattcaaaagaaagtaaatatatggggaaaattagaaagtgactaaaatgtatggtcaggtaaaggtacaagcatagaaaagacctgaaaaaaaaacttaagtttagaatgtaggctgattcttggcacagagattacctacaaaaatctttaaagaccgaaaagaataaaaacaatttaaaaaagcaaaccatgggaaagaagaagaacgtgattttgttttagcacattattatatataaatgtccagttttcaacaacaacaaaaaatcaacaaggcatacaaagaaatgggaaagtaygggcaattcaaagggtaaaaatatcaacagaaactcttcttgaaaaagacctgatagcagttccactggacagaaaaacaactaaaagatattcaaaaaggctgggcgcagtggc

SEQ ID NO: 838003 - DNA, 599 bp, Homo sapiens
ctgaagcagtggttttaatgtctctttttcattgctgattttatttatttgggacttctcttttttttattagtttgactaacaatttgtcrattttatcttttcaaaaagccaacttttcattttgttgatcttttgggttgttttcttcatttcaatttcatttatttctgttctgctctttattattttttctctctactaattttgggttctgtgtgctcttgcttttctaattctttaaaatgcattgttaggttgtttatttgaagtttatatactttttaaattggaggcactttatagctggaaactttgctcttagttgtgcttttgctgtatcctgtaaattttgatatgttgtgtttctattttcatactatcaagaagaatttaaattttattcttacttttttcattgactcactggtcattcaagaacataatgattaatatccatgtgtttgcataatttccaaaattctttgttactaatttctaattttattccagtgtggtacaagaagttacttgatatgttttcaactttcttgaattatttaaccttgctttgtgacctacatatggtctatccttga

SEQ ID NO: 838004 - DNA, 501 bp, Homo sapiens
tgataagtaaggatttactactgccatactattgcatgttttctggttcttttgtaactcttttcttcatttcttcctttcttactgtcttcctttgtggttaagtgattttctctagtaatatgtcttaatttgttgctttttatttttagtgaagctacaggattttgcactgttattgccatgaggcttacagagaacatcttatagatataacaagtttatttgaaagagatgacaacttatattagatcatacaaagaataggacaaatgaagaagagtgggaaaaaatctctatactttaactccctcttccctcattttgaattttgttatctccatttatgtttttaattgcttatctcttaacggattgctgtgggtattattgtctttgataggtttgtcttttaggtttcatagtagaattataggtggattgcacactacagctycagtattagagtattctgggtttgtctgtgtacttaattttacc

SEQ ID NO: 838005 - DNA, 593 bp, Homo sapiens
cccagttcccaagagctgggggcccatcatgccatgtgggatcccacgagaaagctcccaggttaggagatggaaggagcgagaggaaaacgtgagcaagagcctttattgtgtttcctgagggaaggaccaygcaaggcagagtaaactgccatagggttggctagtttgaattgttttcagcaggctgtgggtcccaggggttagtccactacctggccctgggtgatgagggcacagtgacctgcagtgtgagagctcaggtgtggggtgtgggctctggattggttggttggcctatggaaggtgcattcacaggtgagtcatttaccatctctaggaactggctcaccctaggagaggcagtgtcagtgtctgttataggaaaggtgtcccgatacagaccccaagagagggttcttgaatctcacgcaagaaagaattcacagccagtctgtagagtgaagtgaaagcaagtttattgagaaagtaaaggaatagggccagatgcggtggctcatgcctgtaatcccagcgctgtgggaggccgaggcagagggatcaccaggtcagttcaagaccagcctggccaa

SEQ ID NO: 838006 - DNA, 600 bp, Homo sapiens
atttatttatttatttatttatttatttatttatttatttwtttttgcttgtgtggcctaagcttttggtgtgatatccaaaaaatcactgtcaaggccaatatctagaaaactttctcctatgttctcttccataatttctggttttatatttaggtcttttatctatttcagcttgatttttgtgtatgatataagggttcagtttcattcttttgcatttggaaatcagttttcctggcaacatttatcaaagagatacctcattgtatcctcttggtgtctttgccataaattgattgactatgtatatttcaatgtatttctgcactctgtattctgttctaccagactgtgtgtcagtgctatactattttgataactatagctttgctatattattttattttatttttgagacagggtctcacactgtcacccaggctggagtgcagtggcataatcttggcttattacagccttgacctcctggtctcaagtgatcctcccacctcagtctcctgagtagttgggactacagacatgcaccaccatgcccaactagtttttattttatttttaatttattttattttattt

SEQ ID NO: 838007 - DNA, 576 bp, Homo sapiens
tgccccatctctcttctgtgttatggcccctggccctgctcccctccacagcatgtctctcctctaggttggcaagctttatattaataacataaaacctttgtcacacatgagatggaatgcaaatcatcttacatatattatcacatttaattaacaacattatgaggtaggtactattattaccactgtctatctagacgggaaaattaggacttggggaagtcaagaaacttataaacaaacagcaggctggagtttgagccccagcaggctgactcagtacctgtgcacataaacaccagaccatcttgtcttgtctatatatggttagtacttcaccttatgcctttgtttcctctgtcctctgagtcagcctggcctccatgtttctgactctagactgatcacttaatatttggtttttaattattttctctgtcacagatgctataaagggaaggccaaatgccgcttgcctggcttctctcttctcctaagaaaagccagtcagggggccatctgcagggcaatcagtcctggtcrggaagaggaaagcgcccaggcctgtccctt

SEQ ID NO: 838008 - DNA, 603 bp, Homo sapiens
aaagtcatttatgtcttgacatttattatataaagatgaaaagtgaagtctctgattttaggaagttcagagtctagctrtgaaggaagacaagcatgtaaacaagtaactgtaatataaggtgacaagtgcgggaatagaaatatgcatgcagcactctaggaatgcaaaacagattaattttacctgaggtggctagaaaagcttcagggagggtagttgatatttgagctagaaacttgataagaggaagtgggaaatttcaggtacacagcaggaaaagcaaagataagagccgtttacagatacctgccaggacattaggggaccctcagctgctatcccttttctctatctgggaatctgcagctaagggttatgtagcctttgcttttgaactgtcaaaatgcaaagcatctaattataccccccttattctagacagcaactgttgagttcagactctaagaactcctatccacctgcctgtctgaaagaaaccaccttcagattccacagtaatttcccttctgaaggagaggcctaaggtgattccatggtgcttttatggtgcctctctccctaaagaaaagaaaaaaatta

SEQ ID NO: 838009 - DNA, 588 bp, Homo sapiens
ccaggctggtcttgaactgacctggtgatccctctgcctcggcctcccacagcgctgggattacaggcatgagccaccgcatctggccctattcctttactttctcaataaacttgctttcacttcactctacagactggctgtgaattctttcttgcgtgagattcaagaaccctctcttggggtctgtatcgggacacctttcctataacagacactgacactgcctctcctagggtgagccagttcctagagatggtaaatgactcacctgtgaatgcaccttccataggccaaccaaccaatccagagcccacaccccacacctgagctctcacactgcaggtcactgtgccctcatcacccagggccaggtagtggactaacccctgggacccacagcctgctgaaaacaattcaaactagccaaccctatggcagtttactctgccttgcrtggtccttccctcaggaaacacaataaaggctcttgctcacgttttcctctcgctccttccatctcctaacctgggagctttctcgtgggatcccacatggcatgatgggcccccagctcttgggaactgg

SEQ ID NO: 838010 - DNA, 581 bp, Homo sapiens
tgccccatctctcttctgtgttatggcccctggccctgctcccctccacagcatgtctctcctctaggttggcaagctttatattaataacataaaacctttgtcacacatgagatggaatgcaaatcatcttacatatattatcacatttaattaacaacattatgaggtaggtactattattaccactgtctatctagacgggaaaattaggacttggggaagtcaagaaacttataaacaaacagcaggctggagtttgagccccagcaggctgactcagtacctgtgcacataaacaccagaccatcttgtcttgtctatatatggttagtacttcaccttatgcctttgtttcctctgtcctctgagtcagcctggcctccatgtttctgactctagactgatcacttaatatttggtttttaattattttctctgtcacagatgctataaagggaaggccaaatgccgcttgcctggcttctctcttctcctaagaaaagccagtcagggggccatctgcagggcaatcagtcctggtcrggaagaggaaagcgcccaggcctgtcccttggagg

SEQ ID NO: 838011 - DNA, 492 bp, Homo sapiens
ggtaaaattaagtacacagacaaacccagaatactctaatactgragctgtagtgtgcaatccacctataattctactatgaaacctaaaagacaaacctatcaaagacaataatacccacagcaatccgttaagagataagcaattaaaaacataaatggagataacaaaattcaaaatgagggaagagggagttaaagtatagagattttttcccactcttcttcatttgtcctattctttgtatgatctaatataagttgtcatctctttcaaataaacttgttatatctataagatgttctctgtaagcctcatggcaataacagtgcaaaatcctgtagcttcactaaaaataaaaagcaacaaattaagacatattactagagaaaatcacttaaccacaaaggaagacagtaagaaaggaagaaatgaagaaaagagttacaaaagaaccagaaaacatgcaatagtatggcagtagtaaatcct

SEQ ID NO: 838012 - DNA, 643 bp, Homo sapiens
atagcacaatccccacatttgtatcaaaatcacacatcacatctcaccaggtgattgctgaataatctcagggactgtggagtccatacaaaaggaagccatgattagcttcaaarcatttgtgaagtagacctgcttggctccctttcagccaggtaggctagtacctgttggacttctttgggattagtagactgctccctccagtgacataaaaaaatcataagccagatagggaagttatgagaattaaatgagataattcatgtgaggtgctaaacatggtcccaggcacatatagaaagcaattcataatcaaagctcttgtaattattagttaatggtaggattttaaggaaatatttaagtgccctccttgtggatggcgataatatattgaaaaagttaagctcgtattgttttcttcaacaaaaaaaattggatattatgtatatataaaacaaatatgcatagaatgtaccccacaaatacttacaaacataatatatgcatatttgttctatgcatagaacgtgtaatgatcaagtcaggatattcagggtatacatcactgaagtatttatcctaccagtgtgttgtgtacatgtcaagtcctttcttctagctattttgaaagatataa

SEQ ID NO: 838013 - DNA, 518 bp, Homo sapiens
gttttgtgtttagtattttaaaattattttgcctgtttcttcactcaccctgggcagtactgcggatcagcctgtctctgtctgaaaaaagagtgaaatgttaaagtcaagaaaggggttacagactaggctgasggactgtgtttgctgaaaaatattccagggggagctgattccttctctggtgtgtgaacctgaggcaacttgctagtggtgaaaaaggggtggggggctggcctgacactaatttctccattccctgagctgaggagaaagtaacccaatgttagcgttagcgttatggctggggagtaaaaccattcagagaaaacactgtcattttcctctaatttgcaaattgcagctattcatgttggattgaatagctgagggaaaaagagcccctagttttcacctgcgtttatggagaagaggctggtagtctgaggaatgcaccaacttgtagcttgggatgcatgcaagctagataaaacagttggtttgtatgtgtcctggtt

SEQ ID NO: 838014 - DNA, 610 bp, Homo sapiens
atacttgtagccagttgaaggagtcggagctgactttcgattgtctccctttaaggagtaggtaagtactttttgtgatgttagacaaggcattaaacatatttatgaacagaaaggagagagtatatgcatggaatagtcaagggttgggaggtagtgaacagcagttgtttaggtctgctcatcagtatatttcacatctaataatagcattccaacttttccttgtagaattgtccttcccattcatagtgccctaagttgcctaaacatataaacttgagaaaattaaggatgggacagttgggggctgtgatcattattgtaaatctcggggaactgaggcattttctacactgggatttgtttatattgagccattttttgggctttttaaaaaaaattcattttcgacaagttatagttgtgtgtgtatctatatatatatatgcaactataacttgtatatgttacatatatagttttgtaaaccatatatataactatayatacagttttgtaaaccatatatataactatatatacagttttgtaaaccatatatataactatatatagttttgtaaaccatatatataactatatatac

SEQ ID NO: 838015 - DNA, 610 bp, Homo sapiens
atacttgtagccagttgaaggagtcggagctgactttcgattgtctccctttaaggagtaggtaagtactttttgtgatgttagacaaggcattaaacatatttatgaacagaaaggagagagtatatgcatggaatagtcaagggttgggaggtagtgaacagcagttgtttaggtctgctcatcagtatatttcacatctaataatagcattccaacttttccttgtagaattgtccttcccattcatagtgccctaagttgcctaaacatataaacttgagaaaattaaggatgggacagttgggggctgtgatcattattgtaaatctcggggaactgaggcattttctacactgggatttgtttatattgagccattttttgggctttttaaaaaaaattcattttcgacaagttatagttgtgtgtgtatctatatatatatatgcaactataacttgtatatgttacatatatagttttgtaaaccatatatataactatatatacagttttgtaaaccatatatataactatayatacagttttgtaaaccatatatataactatatatagttttgtaaaccatatatataactatatatac

SEQ ID NO: 838016 - DNA, 625 bp, Homo sapiens
tactatattagtaaaagtactagtactttattggtcccaacaataggaatactcttaatgcttayttgtgtcaaaagaaagtaactgacagacacctcactcaaaagtcttcagtgtatataattattaattcttatggaatgatactatgcaagataaattcccttcatgaaggtcaaatgatcatttaaaatattaaaggaaagtccaggcctcccagttgtcattttactgcctgttgataacactctttctgttaatgtttcttttagtggctatgaatgtgaataatttacaaattataactagggagaatatgcaaaagaacaatagtgtctcccgaagttaaattagaaaatagctgagttgattgtgtaactctcctaaaacaattaatgcagtgttctattaaatcgcttttcattttagaatgtctaaaatgggaagaaaattgaaacagatatgaaatcttaagtaactcaattttatgtaaatttatgtatgaaacaaaaagcagaatggcaatgaaatcttctgggctttaatttgatttgaggtctgatacatattttgaccatctttctttcatgcaaaatacgaaaatactccagatagaacaagtcat

SEQ ID NO: 838017 - DNA, 605 bp, Homo sapiens
tgctgcaggtttttatcatgaagatacgctgaattttatcaatgctttttcttcatctattgagatgatcatatgttttttgtccttaattctacgtgacgaatcacatttgttaattttcatatgttgcaccatccttaccttcctggaataaaacccagtctcaccctgaaaccaaagccagacaaaaatacaacaaaaaaacgaaaagtacaaactcatatgcctgataaatatcgatgcaaaaatcttcccccaaatactagcaaaccaaattgaacagcatatcaaaaggaaatacaccatgattaggtaggttttaacaccctgtatctctattaattttctagactctaactattttccttatgctttctgttcctctcaacattacaggcacactggcttttaatttcctgagtgtgctatgtcccctcctgcagtctttgcacaatctgatctctgttttgaagaattgtaaytttttcaatactctgactttgatcaccgtttttatctcttatgtctaagtaagaatataacccatggtaagtgatcactagatatttagtgaatgaaagaaaaaatcatcaaataaaaaatga

SEQ ID NO: 838018 - DNA, 598 bp, Homo sapiens
ggactatatatggtctcagaaataaagttgtggatgacttactttgcttatttgtatctttgaaattcttgacattttaattagagttataagttatcaattatcatgaatataggtagatattacccatccatatacataatataataaaacgttgtaaactcgtgtgcattttatttgtaattcctatggatagctgaaaaaacatacaattgcacatggtaagaaatttagtgacattcataaaagtaactaaaattgctactacttctgtaaaagcagctttgctaaaacaaatttaatttataaaatgaaagaactacaatgactcaaactgtgtaatttagaattattttcaaaggaatttatgtaaagtcataatgtgaagtcatgttaataaaaacataattagggatttttctaatataaaaacatcatatatatactatatacacactacggaagaaacaaatattttattaattaagaaagtattttgtcattcatcataatataaytctccattaaaagaatagacaattaatgtaaaatgataattaaatcccatcacctctgttattctgccaactttcagata

SEQ ID NO: 838019 - DNA, 546 bp, Homo sapiens; identical to SEQ ID NO: 819138

SEQ ID NO: 838020 - DNA, 602 bp, Homo sapiens
tggcccaggatgaaaggggggtagtgtatgaaagtgtattaatgacacacgattatctatcaactttttaaaaagtgggccaggtgcggtggttcatccagtaatcccagcactttgggaggccaaggtgggtggatcgcctgaggtcaggagttcgagaccaacctggccaacacgatgaaacccccgtctctactaaaaatacaaaagttagccaggcgtggtggtgggcacctgtaatcccagctacttgggaggctgagggaggagaatcgcttgaacccgggaagcggaggttccagtaagccaagatcacaccactgcactccagcctgggcgacagagcgagactccatctcaaagaaaaggaaccaggaggcaaggtaagcatcaatagcctgtggcagtaagtggaataaaatattttgtatgaaagagccatgtgtggtcatacgagaaagggcatgagtccagtataatacagtgcttaagaacrtaggctggggagtcacacagacctgggttcaaatcttggctcagacctcagataacttaccaacaggtaagagttactgatcattgaccacacaccaggcactgag

SEQ ID NO: 838021 - DNA, 339 bp, Homo sapiens; identical to SEQ ID NO: 834288

SEQ ID NO: 838022 - DNA, 648 bp, Homo sapiens
aaaccaatgacaaggtaagtgtgtcacatctacaaccaagtaagcaagggtaatgatagctctgagagctacacctgmcatttgaaccagaactcactttgaatactaaacaaagttcacaatgttctaagaaacacacacaaagggccttaacatatattttcttatttatattatttctttatattagccaaccacttacactgaaaaagattacatagaagaaaagaaaaagatagggcaacccacagctttcctttcagtcctttactttctgtgtttctgtacactctcaaaggtagagagtgttacagatggtgcaaatatcaagaagtgaaattaaagcagttgagttaaatttgtacagtgttatccttgtttgtactaaattcataaacatgtatgagctacaaaatacaaattgtgtaatgtaacttcagtgattttaaaactgccattgcacaagataaagatgatggtaaaactcatgctaatgatttcaaatataatttttctttgcctatagtgatattaaatagcaaataaaaaacataatgacaacttgagagacggatcatagaagaatggaaaaatctttctatttattaccattaacagcagctttttgccctgcttttctaacagaga

SEQ ID NO: 838023 - DNA, 571 bp, Homo sapiens
  misc_feature 205: n = A,T,C or G
attgttttagaaacctaagtttacaccacaattattagagcwtgcaaaaaatcttacaccagtgtgctgaagttcttattcttacataagtagatggtttaagtttgttgttattcatattcagtagaatgtttggggtagtaaatgagacttgtttgagacttatttttctgaagaaaaatacaagcatatgctagtacttcanaagtctgaatatctgaaactctgtgcagtgtttttgttatcattcaggtttagaattttttcttccccctaacaaaggaaagcttgaggtaaaaaaaaaaaaaaaagttcctgatactccgtggagaagtggtgtttgtattctctgttcagtttgcaaagtcatatatccatacttcttgttgaatttcttttattttccataactgctgaccttttctagaaaaaaaaacagctgatagctttgaatgaaagatatatagactggcatttacatcatgtccatcattcgttaaatgaatttttattctggacactacattaggctctaaaataaaaaagcaatcaggatagtttttattatatc

SEQ ID NO: 838024 - DNA, 567 bp, Homo sapiens
aaatatgtagctaaataagtgtgcaggacatatatcatatatcccccaaataaaaaataagctaatataagaaaactagwctcaaaattagaagtaaaattcattttgtttgctatttttcaaggggttaatcatttccaaattaaaaaaaaaatgtatgacagctctgagcaatcttttaaatcctctttatcagatgcataaaaatgtatgtaccaccaccaagtatctatgcatctccacaacaatcaatgttacagttatatacaatctaaatgtggaaagaaaattacaaattgttatgattcatacgaaataagctgtttcttcttcatgtgattttcccttctttctgaaataagcacagttttttaaccttgtttccaatggacagatttgtgtgattttgatgatgaaagaaactgatttgctcttccaataatacattcaattgatctctattgacatattttggccacataataagacgtttggtatgcaatattcgacatgttccctgccccctctggatcttacagtatagcactcattcaccagggtgagcac

SEQ ID NO: 838025 - DNA, 451 bp, Homo sapiens
aaaaaaaaaaacaacaaaaaawaaacagcttaaacgcagagctgtgttaactgctgacaggttggagagaagaaaaaggtacctggggaagaacctctcattcttatgcaaatggattcctccaagaggaagagacttaaggtggggaatgcaggccagcctgccacctggggcctttaggccatagccaccattcacccattcatcctgtggtcacctgcagctgttggggtgtggtggtgcctggtttcctctaccctcataagaagtccaaggaaaaaaaggcttagaagcaaaagggtaaaagatcttttggtccgcatatcactcaccttttctcatgccccatgtttgggcaccaaaatgatgcagaactttgctccttcattcagctaaaatcaggttcttatcacatgaccaggaaagataaggcacacggacacactgaagg

SEQ ID NO: 838026 - DNA, 644 bp, Homo sapiens
atattttattcaatttgttcattttgtcaaaatataatgtattgtttaaagaaaaataataataacgtagtgtatagttagcaaaaacgtataaacatgacaatgacacaaaaaacagagaggacacaaaaataatttatgtaaacttaatctacatccaaaattcaatatcactttaaggtagaccgttgagggaagtcagggaccctgaacggagggactggctgaaatatcgggggtgaatttcgcccgataatagactgtgataaattaaagatgcatgctataaataatataactactaaaatagcaaagagttatagctaatacataaggaaatattgtaataacaagggataaaaaattctcaaattacccaaatgatggaatataaagaggatatgaagaagcaagatcatatgagacatagcaacaaacagtatgatgaaaaatttaaacctaatcaaacagtaatcatatgaaaaatggtataaataccacaattaaaaagtakaagttatatgattggatataaaacaacaaccaactaactggatgttgccagcaagaaaaatgatacaaatataatcaatgaaaaataaatgaaataaaaataaaaataatggaaaagcatatataaattt

SEQ ID NO: 838027 - DNA, 644 bp, Homo sapiens
atattttattcaatttgttcattttgtcaaaatataatgtattgtttaaagaaaaataataataacgtagtgtatagttagcaaaaacgtataaacatgacaatgacacaaaaaacagagaggacacaaaaataatttatgtaaacttaatctacatccaaaattcaatatcactttaaggtagaccgttgagggaagtcagggaccctgaacggagggactggctgaaatatcgggggtgaatttcgcccgataatagactgtgataaattaaagatgcatgctataaataatataactactaaaatagcaaagagttatagctaatacataaggaaatattgtaataacaagggataaaaaattctcaaattacccaaatgatggaatataaagaggatatgaagaagcaagatcatatgagacatagcaacaaacagtatgatgaaaaatttaaacctaatcaaacagtaatcatatgaaaaatggtataaataccacaattaaaaagtataagttatatgattggatataaaacaacaaccaactaactggatgttgccagcaagaaaaatgatacaaatataatcaatgaaaaatmaatgaaataaaaataaaaataatggaaaagcatatataaattt

SEQ ID NO: 838028 - DNA, 570 bp, Homo sapiens
gtatttgacagaattagagaaacagaaccaataggatgtatgtatccatctctatctgtatcatctrtctatctgtctgtgtgcctgtctgtctacctacctatctctacacctgtattatatctaacaatatctcgatctattaatatctatcaaataaaaaattggctcatgcaattatgaaggatggcaggttctaaaagcaagctggagacccaggaaagaagatggtattgttctaagtccatggttagcagccttgagaccaggaagagctgatgattcagtttgaatctgaaggctggaacaaaccaatatcccagcttgaagacaggcagataggaggaattatctcttattccagggagggtcaacattttttgcctattcagatcttcagcctggatggggcccacacacattagggagagtaactgttctctcagtccattgattgaaatgttaatctcatccagaaatattctcacaggcacaccgagaataatgtttaaccagataactggatgattcatgtcccagtaaagttgacacatacaattagccatcact

SEQ ID NO: 838029 - DNA, 603 bp, Homo sapiens
aatcaatgttatttctgtaaaccaatgataaaaccttgtggacaacttttatggattttgtaattaaccctttcctgacttgtcacttctttaaaaacttgagcctctcctttggcaacttgtgtgtcctaaacagctatcctcaaacttgacccaaacaaactctctatggtaattttgcctcagcttcctcctttatattcatacccaccacccatattagatccccactgtatgtgttttctttctactagtagtgctaatttaatagatacctagaaatatcactggttataagggtaagaaaatgtagaaatggattattatccataagaagtttttccatattttaaaaattatgtatacttatgaaaaaaatgccagaaaaaatgcagaacacaaactcaaattactctaatatgttttcacttgacaattttctcgtatattcttaagtcttttttctacttaaaattgttatttttttaaygtgaaatgctatgttgttttacctttaagatagcataagcctttctccttgttttcacacagatttcatgaatatttagtagctctatagtagtagctctcatatattaaatg

SEQ ID NO: 838030 - DNA, 618 bp, Homo sapiens
cacctacaggatctagaaaatagcctcaaaggccaaatctaagagttattggccttcaagttattgaaagtttattcacagggttaataacagagaacttcccaaatctatagaaagatatcaatatccaagtacaagaaggttatagaacaccgagcagagttagcccaaagaacactattttaaggcatttaataataaaactcccaaaggtcaagggtaaagaactgatcctcaaagcgtcaagaggaaagaaaaacaaataacatgcaatggaactttgatacatctggcaacagacttttcagtggaaaccttacaaaccaggagagagtgtaatgacatatttacagtgctaaaggaaaaaaaaaaaaaactttagaatagtatatctggttaaaatatccttcgaacatcaaggagaaataaagactttcctaaacaaaagctgagggatttcatcaacaccagacctgtcctacaagaaatgctaaagagagtatttcaatcagaaagaaaaggacattaatgascaataagtactcaccattaggaacaaaactcactggtaatagtaagtacacagaaaaacacagtattataacactttaactgtgg

SEQ ID NO: 838031 - DNA, 651 bp, Homo sapiens
taaaataatttttacaagaagcaaataaaaaagagggaaaataaaataaatgggcttccccaagtgcagatggatgatttctgcaagtctcttcaaagargacagctgataacgaactgtgtcccaagcctcctctcgctggaaacaggagggaattctgtggcttacacgcaaccatatgttgaggatgtgaatattgcttcgcacattctagcagtttcaaaatgcatgagggcttttttccctttaagaatcaataactcatcaagaaaaaagaaagctatatgcacaaaaatgttaattaacaacattatcaatactagcaagaagaaattacaagcaagctctatgtgcaacattctggaaattaagtaaattatggtgcatggacgatgatgaagataatgcattcaatgaaattataattagaaagattttgtaggtacatagaaaatatttaagctaaagtgccaaatgagagaaaaatgaccaaattatatgtgcattgtgattgcaactgtatcagtataactgtgtagatgggcacaggctggaagaggaaaataaaaaatgataatacataatagttgtatagaattcgttggattaattgtaattaatcactatttttaaaaattatttttgaaaagg

SEQ ID NO: 838032 - DNA, 597 bp, Homo sapiens
ggcgcatcaaacaagtacaatacacttgctacctgccataacacatgttggggttcaatcagactggtggaaaaaatattagagrtagttatataaatagacacaaatcttcttggaaggccgagaagtttgcataactttggtaatagatatggttgaaggcaacctgatctttacctttagttaaacaaattaaagtagtcataaaggaaggcagagtagcttacctagctagcttgtttactcatataatcttaagactcacctttgatgtaccacaggtgcttaagtgctttttactcaggactaccccaggaagtccacaatgtcaattaccctctaagggtattgactcaagcttttgttaattaatcatactgaataaatgcgagtctgactagctgatcagggccatagtcacaactgtttacagaactcaacagggagtctgtaagccactcagacgccctcagctggactggcagagaagaatatctgtgtgtcaatgtactttattcatctgtccccgggtcaggggtctgcaagggacagactccctgcagctggtgccccctccagaggagcgctgccgcaaat

SEQ ID NO: 838033 - DNA, 582 bp, Homo sapiens
gatccatagcctttgatgatgataattttcacctaggcatgtttttttcccttcagggaatgtctagtttgcttaagggactctcattcctggctgctgttacaaggagaaatatagctgtgggtaatatgtatgtctatgtgtataagtgtggacatacacatacactcactcttacacaaacacacacacatgaatgctgtgaagcttatacaggaaagtaagagtgctctggcttcactgctgtctgtgatttctccttgaccctgatttacttcaaggagtctgctaattacaactctaaatctaaattgatatgattatacaggcttttcttgatttaattaatttaattacatctatcagttctttctgtgaaaagattagccaaattttcttaactctataatcccacttaatttttacaagataaattttttgcatagtgtttgtctttacrtaaatagaacaattcaactttccttcttatttctttaactttaaatagcatctcatgaatctccatcaatgtaggtacttcatccctccttctcacctcctagcttcctccagtcttctggg

SEQ ID NO: 838034 - DNA, 609 bp, Homo sapiens
caggagtcccatagacaacatcctggatggagcctgtagcctcctgatggtggttggaggctgtgcgcacagcatggagcccgagccagcccctggggatgagggctgcaccagggcccactcagccaccctccaccctgtgttctttccttgccttgcctcccctctgcactccttccttgtgcctcctcctcactccccaccagcctcacctctctctcgctctctctctttctttctcttttaataaatggaaatggtttatgggctcttctagaaattgcacctgccttctggttataactggggagagagagaggaagagacacagagaagagacagagaggcctccttcagcagatctgggtatgcccatgggacctcctggcctggacatcctggtggtgctttcaggcctgccacagaagtgaccctgagttggctctggctctaatgtctgagagtgccttcttcccctctccccctgtgactgcctgcaggacagcgcaattcctctgccattgtgtaagcagcccccacagatgatactccatgctagggmattaactacttgttgaaaagcacttgtgtgttcccctggctgaggct

SEQ ID NO: 838035 - DNA, 643 bp, Homo sapiens
accccagaagcctaagccctcrcccctgtgccccggctggtcattcgttcctccagatctttgcagcactaagaagatgctgcctggtgacatttcctgaattgtttcccacgggtcttgtctttcaggctaggacaagttgtttaacctttcacgtgcgtctgtctctcttgcttccctcaattggactgttagctcctgagggggatgagggggtcctgctttataattccttgtgtgtcccacggagccaagcctggtgatgtcttcagtacttgacacttcagatctcagaaaatacctgctcatcgattattggattgaataggttaaggaggagaaccgtctcatgggcagacctggcctgcagccaagacagaagctggatgcgcctccctccggactcttgaccccaccaaatacgacgcccatatatgtcaactgtggcattggtgtttgtcccccacacccctaaaccacaagccaataaattgcagggcactcagacatcaggatgtgtccttcacttgccaccagacctgagctggctacaggccaatgacagcatagggctggccctgcccgcctcccatctggcagcaaggatccagttccagattgtgacctgtggttgagtctggca

SEQ ID NO: 838036 - DNA, 583 bp, Homo sapiens
agggctgggtgaataaatacacaactggctactcagaatgggataaccatgggagaggacttttaatgccaaagaaactcaccacgttgcctttgactttgaaaagtgatctgtgcttartctggcatttcgccaattggaccatgagcaatggggtcccagtcctcattacccagtgcctcctttgcttcaggccagggctgaataggtacttaggacattcctaagaaggactgtgcaggaggaggctagcccagctgcctggctagcctcagcacacacattccctggaacagcagcctcgcttactgccagaccccacaggggtttctgcaggggctggacaaacgggcacatggggatgaaaagggtagagtccccagagtcagtcaatgtcagtgaattggcagccgctgctcacagagctgtctggattctttgcagcccagagagcacctttcaccacccagatggggaggccttgccaaccctgagcccctcagggaggtcatacgtgtgattctcagacaccagagggagcagttttccagagagtgaagaaatgggatccgggaagcttggt

SEQ ID NO: 838037 - DNA, 602 bp, Homo sapiens
tctgactctagcacagttttggacaagcctcccccttttgacgtggaattgtgatagcagtgagatcgtcgagcagaaccaggacacaaaactggatttgaacacctcctaagaattgtcttcttactcatcaatagtgaaagaaaattggttctggcacctcgccaacctggcatgcagagcctggcttgtggccctgagaatgtacctgttggacaggccccacagtagaaagagccttgagtgttgaaacactgcacaagtgtggagcaaggcccgggctggaagctgcactcgtctctgtccagcgtgcaggcagggctgttgggtgaaaacatccacccagcatcacagacgcagctgtacttgggctggcaggatgacaacagcgtgaataaagacaatcatgaaaatcagcaagaaaagcctttgaacatttcatcaagcccctaactgtttatcctctaacgttcatttccataaggccaatccactggcttstctttttcttcccatatgattaagcatttagaccagaccatgcaaaaagggaaacatctttatttcagagtaaaagcaagctataatttctcccaaagatg

SEQ ID NO: 838038 - DNA, 392 bp, Homo sapiens
gtcattttgtagaggatagccatttatacatgctcccttgagatattgggcctgtcatttatcttctcctaccatgactaatagagtaactgcaaatgtttcacaattccatgcttgccaccacrgtgagtgacagggaatcacagcctactagctagattctgctgcctctgctcatagtgttgatgcagatggtgctaatgttagtgaatgctgttacccatggcctggaaatatgtgcaaacccttaaagccacccttctatgtgagtagccgccctttcagttgacaccacagaggctctgtgtgaacccatgcttgagataaacttcaatggaaatcaacatttcaaatgttaactttatcaagtgtgctgtgtttaagggaaaaat

SEQ ID NO: 838039 - DNA, 665 bp, Homo sapiens
caaatcaattaatgtaaacaaaatgagtcatagttggaaaatgatttcgaagaggtgggtagtcattgtaggaggggtcagagcctgacaatcctcagtggcaggcaagaaagaggaatgayggcatcaccttcacagaggaccctggccatggtgttctgtctgtgaaatcagaccttcaccatgggcactgccctatgtctggaaagatgagaaaatacctccaaccttcagccaacttattcttcctcaaaaaggagagccttctaaagaggcaaaaacagtagttgaaattgtgaacagtgagggtccacccagcacttttttagaaatttgagggtaaactgttgcttgaaattatccaacttttcaaagaggtaaagttatttagtagagaggcttttaagttgccctgaaaggctgtattgctaccatgtgggatgtaaaattggatggggttagagatgagtgcaggcaattcaacgcattggtaggggtggaagttctcagcagaaatcaccatctgggtttttgctcccatctcaacctagttgaggtctagagtgattaagctggagacttctgaggagagagaaatgaactaaagataaatacaactgatttaattttagccatagcagaacagaacaaagaagcaaccacat

SEQ ID NO: 838040 - DNA, 613 bp, Homo sapiens
atggaagggagggaggaaagaagcaaggaaggaagagagggaaagaaaggttctagagaacgcttcaaaacttagaattgaacagtgggagaagtaggtaagaaggatgatctggatctacaacacaggtagtcctttttgatgtgtgtcttagttaattcgggctgctataacaaaaatactacagactgggtggcttaaacaacaaacatttatttcccatcattcaggaaggtgaaagtcccagatcaagacatcatcagatttggtgtctgatgagggctgtcttcctggttcatagacagcagtcttcttattgtgtcttcacatgtggaaggggcaatagagctgtctggggtctctttgataattgcactaatcccatacatgagggctctgtgttcatgatctattacctttcaaattttctacctccaagtagtatcttattgagaattagatattggggattaagtttcaacatatgaattttggagggacacatgcattcattccacagcatayggtcaaccatcaggacaacacagggctagctattgatctatatttgatcgtttttgtaacatttatgtccttggaaaaatagccatga

SEQ ID NO: 838041 - DNA, 609 bp, Homo sapiens
ataaagaagattatcactgaaatgagtatcacttttaaataatackttgtaccttaatattaagtttacacagcactatctacagtattagtttatataatctccacaaatcaatgtgaggaaaattatcatcttcattttacatatgagaaaatccaagactgaagaagttaaagagtttgcccaagattacacaactagtaaatgtcaactggaattgttctccatatgttcagagttcaaacttcctgctctcctccctctactagagtcttccaattcctgtactccatagacacacttactcattagttttttacattagctacctatctttttctttttatgctattttacattatcgcttgacttttgattttcaggtgaccaaaggaccatggatcctcaacaaatctctaaaagtccaaggttgactctaaattgaagaagatggtgtgttttcaaacgaaaattatatcagaatacatgtatctctgggcttaatgacaaaagaagagattcagttatgtcttttattcctttgtaagatttatatcaaacccttcttattctttgaaatccatcctattcatcccaaatcatagtgag

SEQ ID NO: 838042 - DNA, 631 bp, Homo sapiens
gccatcatggctattcttgtgttgtcaatatttgaagaggataacartgacagttgagggaacaaggggccactgtagaccctgaactgaactggagggaaagtaccctgtgagtcactcacaattggaaccaccaggaagggcttcggtcaggaacatgaatatcaactagaaatataccgtagctagaaaactgatcattaaacttgaaccctggttcagaattagatttaaccatataaaattgcagatatttggccatttctaaactacaaaacaatttccatatgagtcatcccaacattaacccgcataacattgagtgcatagttctcatttccttcctcagtgtgttaacattatggttccaattctattctgtttgaaaatttactttcacatgacaaaccataacaattttagtaataatagaatgtcagctatgacataccttacatttaatcttgtaaggtgtctatctatttaggaagtctttactcttacaagtgtgtatctatttagaaatcccttctcagtaacccctgcctctctaaagcattttagagccatgctccctcattgatgaaatataaagccattctagatgggaaaacccattttgaataaaatg

SEQ ID NO: 838043 - DNA, 631 bp, Homo sapiens
gccatcatggctattcttgtgttgtcaatatttgaagaggataacagtgacagttgagggaacaaggggccactgtagaccctgaactgaactggagggaaagtaccctgtgagtcactcacaattggaaccaccaggaagggcttcggtcaggaacatgaatatcaactagaaatataccgtagctagaaaactgatcattaaacttgaaccctggttcagaattagatttaaccatataaaattgcagatatttggccatttctaaactacaaaacaatttccatatgagtcatcccaacattaacccgcataacattgagtgcatagttctcatttccttcctcagtgtgttaacattatggttccaattctattctgtttgaaaatttactttcacatgacaaaccataacaattttagtaataatagaatgtcagctatgacataccttacatttaatcttgtaaggtgtctatctatttaggaagtctttactcttacaagtgtgtatctatttagaaatcccttctcagtaacccctgcctctctaaagcattttagagccatgctccctcattgatgaaatataaagccattytagatgggaaaacccattttgaataaaatg

SEQ ID NO: 838044 - DNA, 635 bp, Homo sapiens
atttctgtacaaaatagatcccatggcaaccaaaatcttcaatctaagacggaggctgtttttcagcagcttgcacattctgccccagttgtaaagggctgggtgaaaaatcaaaacagatttattaagtgtccagtatgtgctgggccccatgctaaacactgcaaggaatccaagatatgtataactcaaggagcttaggatatagttgcttaaatcagtgatgaaccttaacatgtcatctgtgctaagtgaatacagggacaaaacaaaatcattggccagggacaaatcaaaggtcaccaagtaggtcaatccaagccaacatacatctagaaagcaagctcagggcaaactgagggtatgagccagagaaacattcattatcaaccaaacaccaatgaaatacccaccctctcccagcactgtgctaggcatcaaggaaacaccatgagtaggacacagtctctgctctttagggtatggacggctgggtacaaataatkatcgccacatgcttactacacagagggcatcagatgaggaactctcagctccatcaagattggtcagggaagccttcctgaaaaaggagaaattgaaagcagatcttgaaggagaaacaggagtttgcc

SEQ ID NO: 838045 - DNA, 549 bp, Homo sapiens
aggcaaataaatccggaacttagtgggtaagagtgagaggtgtctgtattggtgtcctgtggctgctgtaacaaatgaccacaaacttggtggcttaaaacaacagaaatttattctttcatcattcaggatgccggaaatctgaagtcagtttcactgtgccaaaattaaggagttagcaggatgtgctcccttctgaggagtgaatatggtccttaactccttcaggttctggtggcttctggcattccttggctgtggctgcatcactccagtctctacttctgtggtcacatcattgcattctcatctgtatcaaatcaccctgtcttcttcttacaaagatgtaaagtgattacatttagggttccccctggtaattcagaataacctttccctcttaaggtcttaatttaatcacattggtgaatttttttttttccttataacattcacaggttccagggattaggatgaggatatgttgtgsgcgtcattatttaacctactgcagtgaagggccggatcctataggtctttataatccaa

SEQ ID NO: 838046 - DNA, 549 bp, Homo sapiens
aggcaaataaatccggaacttagtgggtaagagtgagaggtgtctgtattggtgtcctgtggctgctgtaacaaatgaccacaaacttggtggcttaaaacaacagaaatttattctttcatcattcaggatgccggaaatctgaagtcagtttcactgtgccaaaattaaggagttagcaggatgtgctcccttctgaggagtgaatatggtccttaactccttcaggttctggtggcttctggcattccttggctgtggctgcatcactccagtctctacttctgtggtcacatcattgcattctcatctgtatcaaatcaccctgtcttcttcttacaaagatgtaaagtgattacatttagggttccccctggtaattcagaataacctttccctcttaaggtcttaatttaatcacattggtgaatttttttttttccttataacattcacaggttccagggattaggatgaggatatgttgtgggcgtcattatttaacctactgcagtgaagggcyggatcctataggtctttataatccaa

SEQ ID NO: 838047 - DNA, 588 bp, Homo sapiens
tcctctaaaagcagaatttgggaaatatttcctttaaaaggcaaaatagtaaatatttcagggtttgccagcacatattatatctgtttcctctgttgcatactccatgaagcagctgaaagargtcaagaatcgaagaggttctaagagaggagaggctttattttatagtataatatgaattctaatcatcataattatttgctccgttacctgccacagtgagaattgttaattgttattttaggcgttttcctcaggtgttcagttattgtccgagggcatgagtaacacacagtgatgctagcggtaaaatgtgtgtgtgcccagaaaggaagcaggtccttccccttagcgtagaggaagggccacgtgcaccgaatgcacacaggccccgtgcctgacattcccaccaccttactaatgcccggtcctcatgtttactcttcgtttaggtcaaggaagctgatccgctgagtaatggctcagtcatgatttttaacacctctgccttaccacatctgtaccaaatcaagcagctgcaagccctggctaattacagcattggtgtttcctgcatgaatgaaa

SEQ ID NO: 838048 - DNA, 575 bp, Homo sapiens
attttataatgttattttcttataactttgagagaaaattacagaattgttaaagaattatcattttgtaccgattaatgccacatatttaatactttttcagtaccccaaacttttaraaatgtttttacttgttaggtgcaacataaacagctacacgtaaaaatactattaaatttatatgctataaataacagtatcagcaatgattcctacaaacactaccctgccaaaaaaaaaaaaaagagacccaaatgcacactaacgggagcttaagtctccacaagagcttccccagcctttctagaggacggtgaaaacaggctgagagcccgaggctcaaaaaaacagctcaaaggggctggaggccagtctgaaagctgaggctgcacatgggatgctacgcacagctcaggaaagaggttggcaagcaggagccggaaggagcaccccagcccgcaggccaggagcgcccgcaggccccctcagccccggagcacgctcaaggccctccctcgggttcccagtaccccgggtttccagacctacggccaccaggggaggctcggcctcgg

SEQ ID NO: 838049 - DNA, 544 bp, Homo sapiens
cccaccaaaaataaaaattttcttattactgactcattccaagtccttcatgcccaactcagcagtataagaagaaggtgatgacacagcagggctcaaggtcacttttcttggccaggcgcggtggctcacacctgtaatcttggcactttgggaggtcgagacaggaggatcacctgaggtcaggagtttgagacaagcctggccaacatggcaaaaacctgtctctactaaaaatacaaaaattagctgggcatggtggcacattcccgtaatcccagctactcaggaggttgaagcaggagaacagcttgaacctgggaggcggaggttacagtgagccaaggtagcaccacagcactccagcctgggtgacagagagagaccctgtctcaaaataaataacttttcttactgwctgctctgtcagagactatgctgcaaatttggctgatagtctttaaaaagctgattgaggttcgaaaaaaaaaaaccaccccaaaaattagccagatgtgttggcatgcatctgtagtcccagcta

SEQ ID NO: 838050 - DNA, 627 bp, Homo sapiens
gataactttttctcagaagatgttgtgattcattaaaatttagctgagaacttctagaattagatgtttccatctgaagctttttttgggggasaaagagtagtaaatggttaaaaatctgaattctgaactctggttatagtaaatttagctgtggtatttgcatttggggttaatacagaaaagcattcatttcccttcttaccaaaaggatgaaatctaatgaaagagcaaccacctaaggaaataggaaatggtggagatagcaaatcttcttccagagtatcagctaaagcgagtcactgacggggtagtatagagagaaggtgagttgaggatggcttcacatttaagaaaaaacatctttcagcataactgagacaaatatctgtttgtgttcaattcaaactttacattttttctgaaggaaggatatctttctacccaaaagaaagtagaatcacagaggcagcacagagatgcctcaaaaacagaaagctgacactattagaatttactaattattctcctttctgccctcattcttaacatgcttcttcctgccctcatatttaactctgcccaattttgcttcctttagttaagtgtttcccccatttctgtatt

SEQ ID NO: 838051 - DNA, 559 bp, Homo sapiens
aagacggttgatttctgcatttctaactgaggtactgggttcatctcactggggcttgtcggacagtgggcccagcccacggagcatgagccgaagcagggtggggcatcacctcacctgggaagcacaaggggttggagaattccctttcctagccaagggaagccatgacagatggtacctggaaattcagggtactcccaccctaattctgcacttttccaatggtgttagcaaacggcacaccaggagattatatcccgtgcctggcttggagagtcccacacccatggagcctcactcactgctagcacaacagtctgagatcgaactgcaaggcagcagcgaggctgggggaggggcgtccgccattgctgaggcttgagtaggtaaagaaagcagccaggaagctcgaactgggtggagcccaccacagctcaaggaggcctgcctaactctgtagactccacctctggyggcagggcatagctgaacaaaaggcagcagaaacttctgcagacttaaacgtccctgacagctttaaagagagcagtggttc

SEQ ID NO: 838052 - DNA, 602 bp, Homo sapiens
accttggctggtgtcctactttagcaaggaacaaagcaagggaggaatgggtgaaaggatctggttgaagctgcacggttaatatgagaaacagcaaaatttcccaggttgacagcaactttggtttatcattaagcaactgcatgtgacacactgaaggtcaggcactcacagagcagtgctttaagggtgtggaatcttccatgggtgaacaaaaacctattttcttcatcctgatctattatttctcaccatgtgaactatttatcagaaaattggctctctaactatcaaatatatgatggttattgataagacaagaagacaagactaaaagaaaaaaatcaggcatccagaaaagcgctcctcccctaatctcttccattattgtagaatagattgctcaatctgccgtgctcttgagattggctttgattcagcctcctttggagacctgctattcatgtcacaaatatgggtttgatgtrtagcagatgagggtttttcaaaacacatgttcagtgaagagggtggtcacagcttaagtgaaatcaacacaggttcttggcctggctcagacaaaaggacctgggaggaaggat

SEQ ID NO: 838053 - DNA, 602 bp, Homo sapiens
accttggctggtgtcctactttagcaaggaacaaagcaagggaggaatgggtgaaaggatctggttgaagctgcacggttaatatgagaaacagcaaaatttcccaggttgacagcaactttggtttatcattaagcaactgcatgtgacacactgaaggtcaggcactcacagagcagtgctttaagggtgtggaatcttccatgggtgaacaaaaacctattttcttcatcctgatctattatttctcaccatgtgaactatttatcagaaaattggctctctaactatcaaatatatgatggttattgataagacaagaagacaagactaaaagaaaaaaatcaggcatccagaaaagcgctcctcccctaatctcttccattattgtagaatagattgctcaatctgccgtgctcttgagattggctttgattcagcctcctttggagacctgctattcatgtcacaaatatgggtttgatgtgtagcagatgagggtttttcaaaacacatgttcagtgaagagggkggtcacagcttaagtgaaatcaacacaggttcttggcctggctcagacaaaaggacctgggaggaaggat

SEQ ID NO: 838054 - DNA, 510 bp, Homo sapiens
ccacattcctgttcaattctcccattgggcctgtgcagaagacagatggatcttggagaatgatggtggattattgtaagcttaaccaagtggtgactccaattgcagctcctgtamcagatgtaccaatttgtttgaacaaattaacacatcttctggtacctagtatgcagccactgacttgacaaatgcccttttctccattcctgttcctaagacccaccagaaacaatttgccttcagctggcaaggccagcaatatacctttactgtcttacctcaagggtatatcaactctggctttgtgtcataatcttatttggagagaacttgatcactttttgcttccatgagatatcacaccagtgcattacattgatgacactatactgattggattcagtgagcaagaagtagcaaacacaccggacttattggtgagacatttgcataccagaggatgagaaataaatctgactaaaactcagagaccttctatctcagtaaaat

SEQ ID NO: 838055 - DNA, 339 bp, Homo sapiens
actctgtgacatgaattcacacatcasaaagaagttttccagaaatcttctgtctagtttttatgttaagatacttcctttttcaccacaggcctcaaatatctccaaatatccatttgcagattctacaaaaaaactttccaaactgatcaatcaaaagaaatgttcaacactgtgagatgaaggcacacatcacaaagaagtttctcagaaatcttctgtctagtttttatgtgaagatatttcgtatttcaccacaggccataaagggctcacaaatatccctttgcagattgtacaaaaagactgtttccaagatgctcagccaaaataatgatt

SEQ ID NO: 838056 - DNA, 506 bp, Homo sapiens
catttaattcctgaagacagcaggcgctcaagggaatgacccaccctcatcctcaatcttcagaaaaacttttgctgacccctcaaacatcaaggcctaraaatatccttatttgctgccttggattggtcatcttccataaagtacttattgatgaggagaaacgttcatttgagattcagccacagagtagtgtttcagaccaaggaagatgtacagggtggacatgtccagcctcttcctctgaactgatttatctctcatcatctttgtgccctgagggaacaggaagccctctcaccacctcctccatctcctagttgatctatgtcacaaaagtacaattaacaaattaatgtatctgttttaagcagaaacatttctgtcagctcagtcaagaaatgaagtaaagttaagtgatagaactgaagttctgaataacaagaatagttttgttgggttcaacatgaggttataacaaagtagaagtaatggagaaactacaa

SEQ ID NO: 838057 - DNA, 562 bp, Homo sapiens
taattagttgccacaaaagcccctaaaggtgggaactggttgtgcatgtgtggatcactgtgtgtattctaatggtgcttaacacattgtctattactgccttaatgagcatctgggctcactagaacccacaagctaagcaggtgttaatatttccaaagctaaccaaaacccctggcacagcaatgaggtgcaagctctccttgtatctgcctccttgcacctgggctgcaagtgacttgaactcagttagactggagctcttcagtaagggtttctcatttggggttttccccgaatagctccactttgggaatctaggtattgtaaaaatagaacaccggggggatttgaatttaccattacacaaagagttcttggggagttttttgtttttgtttttgttttttcccttgccaaaatgttctttccctcagaagatccacaaggtgaggattcttagcagaggtgagcagtcatggggatcacgggctccatagtctcacacagcccccggtactgggcaggcacaacccacacaaraaacacttgccattctctc

SEQ ID NO: 838058 - DNA, 546 bp, Homo sapiens
caatctaaatctttatagatacagttgaagtcctcactttcaacccatttatctccttcccttcctttctatccagaagtgatgatcctgaaactggtatgtgccttttaccaatggttttataawttcaaaatatatactgttgttcagtgtttttataaacacatatatagtttatatatatccatcatgtgccttttatacctattttgcagtattttcaaatctatctatattgatacatgtacatctactttgttcatttgtatgacattccaatatatgaatatcaccacgatttatttaaccagtttcctactgattagcactttccattttccatgtttgctgtttagatgacaaattgctctcccacgtgatggtgccatttatattcccgccagagctcaatgaggctccacatttacccacatccttgccaatactgtgcttggttttaggtttttaacatttttgccagttcgatagggatgaaatgccatctcatggttatgctgatttgcgtttccttgattactaatgagg

SEQ ID NO: 838059 - DNA, 555 bp, Homo sapiens
gaatccaggagtttgaggctacagtgagctgagatcacatcattgcacaccagcctgggagacagagcaagactccatctctgaaaaataaaaataaaaaggaggagggctggagagggtggaacaggctaagagtgaaaggaaagttcacgttgaagtagcactcagcttctgcaacagtccagacttctggcctagcaaggccatcctaagagctgacacattagtgtagacaaaatggcagacaccattttaggcatttcaactgatttaatcccatcaacatccctattcaacaggtcttgctataatcctcactttacagattagtacattgaggcacagagaggttaaatcacttgcccaaggtcacacagctagcaaatggcagagctgggatttgcacccaggcagcctggctccagagctcatgttcttagccactacctccgctcagyatgagaaacacggcagacaatgctcagcttcaggggccatctttgagaatcctggggaaacagagggaagcagaagactgcagagagacatgatgtg

SEQ ID NO: 838060 - DNA, 623 bp, Homo sapiens
ggttatttatgaatgcagctcaatggcctgcaaatagaagtatttgcacagtgaggtgtcctaaggtaatggggaacacggactgctcattgctagaaacaaacagctgtgrccctaacagaaggagcagaccagggcttccaagttccctgccagggcagaggaaagccgagcacttccatttgtccacagagagtgtcagggagggatgcacaggccacacagcgcccaggcggggctgggtcccctttgcagctggcagtgctctctactctgctcccagccacctggtgtttgggcatcttgactctgggctgtatgtggtgtctcccgcgagcctttgtaattagtactgcggcaaacagagaaggtgccctgagcaggtttatcacttggctttatttccagtgcttccttacccggggtgcccataccctggaatcaccaggggagctttaaaaaagactgatgcccgagtcccaccctcagagattctgatgtaatgggacaggggtaaggtctgggcatctggatttttcaaagttctccagataattccaatgtgcggccaaagccaagaaatgctgcctaaactcaaagctgaacagttcagggataccaag

SEQ ID NO: 838061 - DNA, 563 bp, Homo sapiens
gtccacttcaccagcccagctgccaatggctccctctgcccagggcatcagtagacagggccccagcatctgtcaggcagagggggtctctgtcctgcctcactgggcctgtcaggtggagggggtctckgtcctgcctcactgggcctgtcaggtggagggggtctcggtcctgcctcactgggttgtcaggcaaagggggtctctgtcctgtctcactggggttgtcaggcggagggagtctcagtcctgattctgggtctgtcaggtggagggggtctctgtcctgcctcactgggcctgtcaggtggagggggtcttgggcctgcctctgggcctggctggagcctcccttttctggaagccccatccccctgagtctcccatgcctccagctctgtgggtttccacctccctcaccgctgctccttcccaggcctggctgcgtccctgagtttggtctcaggcacctttctctccttccttggcggcctcttcggttaattaccaccttgatgccagcgagtcctgcccaacttctccctttaactctgacctctgac

SEQ ID NO: 838062 - DNA, 602 bp, Homo sapiens
ctgtccctgatactgacctgccaggcagctggcgttccgttcggggttgtctctggccttggctttgcttttgcgtcttatggagcgattgaagatggaatttctcttaattgggatgtggcaatgaggctctttgtcttggatatcctggtcagcttgagaagtctcctctttttctgggagtaactcaggtttcaccttggctggttcattatcagtgttccattgatcacttgctgatttcctccgggtcttttccaaatcttcagattccctggtctccatggaaatagagccagatgtttctcagcagaacgactggaggtcaatgactttcccaagcttcactggtttgagtgctttagaatagatagaaaacaattttcagttagtcatcaggctaagtattctattcagactgtggaactccactcccattcgaatttgatgaaacgtgggataatctgcacatcctggtatccacgtcttcgccactgaaaattacagyttaatctctgcaatttggaggcattcacgtatcattttataattgccgtttgtttacattattcctaagaggcacttttagggggaaatgttta

SEQ ID NO: 838063 - DNA, 535 bp, Homo sapiens
ggaatcgcccattgccaccaatggctcatgtacagcatggcgagtcttcaagtgctgatgctgggcaatgtcccrtttccacactgttccttgtatgtatttctatgaaaatgtacaagttgcatgttcagtaagcctggggcagcttgtcaggtgtttattgaagctagcttgggttgttctgtgagagtgtctaaacacagggacaagcactgggtaaaacaggaactgaagaaacgtggcccgactctaatcaagcctgcagctctaaccaggaatttacaggaaacaccggggagagaggaacaggttaaacaacaccatgcaggcacagtcataaaatccaaacaggataaatgccccaatttctcaaggggaaaactgcaaagagaaaaacaagaaagaaaggaagcaattaaaagagactgaagaaatatcaatggattgcattatacagactctatctgaatctcttttaaaacacactgtggggagggggtgtttgagccaatatttgatcatgttaagagattat

SEQ ID NO: 838064 - DNA, 535 bp, Homo sapiens
ggaatcgcccattgccaccaatggctcatgtacagcatggcgagtcttcaagtgctgatgctgggcaatgtcccatttccacactgttccttgtatgtatttctatgaaaatgtacaagttgcatgttcagtaagcctggggcagcttgtcaggtgtttattgaagctagcttgggttgttctgtgagagtgtctaaacacagggacaagcactgggtaaaacaggaactgaagaaacgtggcccgactctaatcaagcctgcagctctaaccaggaatttacaggaaacaccggggagagaggaacaggttaaacaacaccatgcaggcacagtcataaaatccaaacaggataaatgccccaatttctcaaggggaaaactgcaaagagaaaaacaagaaagaaaggaagcaattaaaagagactraagaaatatcaatggattgcattatacagactctatctgaatctcttttaaaacacactgtggggagggggtgtttgagccaatatttgatcatgttaagagattat

SEQ ID NO: 838065 - DNA, 643 bp, Homo sapiens
tgttagaagcactgtcattgaagtcatctgtaaccacaatgctaaatccaatggtcaatttatattattcatcatacttgacctataagcagcgtttgacacagataatcacttcctccttgttgataaacttcactagtagctgcagatgtcatattttcattatttttcttcgatctcactggttgctccttcttaatatgtttcggtcattgccttctcttgccctttatggacaagaaattctgatgtagaatacctcaaaagtcaatccatggtcttttaccatttttatctgtaatcatcaacttcttgatctcatctagtcttttagctttgtataccatcttatgtattaattcctaatttcatatttatagtcctgacttctttcattatcaccagactcatctatccatctactttcttgacatctccacttagatatttattgaaacctaaatttcaaaaggaagccacagcttttcctcttccaccaccctccccaaaatctgtttctccagcagcttcccacatctcacaaatcctaactccctcctttctattttctcagcctggtgrcctcaaaatcatccttcatctattaggaagtaccaagaaatcctgttggtttcaacattga

SEQ ID NO: 838066 - DNA, 651 bp, Homo sapiens
ggttgataaacttggagaaagccaaatgcttcaaagaattcccacttactaggaaaggcaaatgattgattgagwggtaagtgattgatgaagcatctaaattcttcttagtctgtgataggccctatttttcagtcttcatgaaaatcatataaggtatcccattattatcccatttcatagaaggaaaaatggagataaaaaatgctccaagggcacacgacaagaaattgtcagatggagtttgaactcagacattaagctgtcttcaactgctctattcacagaatattttcagattcatttctccaacatgttttagagctaccacaaatggacatatgtgactgctttaagggcacagtgtttgactagaccataattctacaatttatgttattgcttttaagaacaatgatacaaattcctcctttcctaaccacatttccaagtcccttacaattcatcaaatatcttgggaaagtgtataatcaccttctacagttgggtgattcacagtatatatatttgaatccatatttccaataaggtagacagttcctttctaagaagtgtttgtacaacatcctttgaaagattagtataagcctctttaggatgaaaccaaattgcatatttacagtaactcca

SEQ ID NO: 838067 - DNA, 651 bp, Homo sapiens
ggttgataaacttggagaaagccaaatgcttcaaagaattcccacttactaggaaaggcaaatgattgattgagtggtaagtgattgatgaagcatctaaattcttcttaktctgtgataggccctatttttcagtcttcatgaaaatcatataaggtatcccattattatcccatttcatagaaggaaaaatggagataaaaaatgctccaagggcacacgacaagaaattgtcagatggagtttgaactcagacattaagctgtcttcaactgctctattcacagaatattttcagattcatttctccaacatgttttagagctaccacaaatggacatatgtgactgctttaagggcacagtgtttgactagaccataattctacaatttatgttattgcttttaagaacaatgatacaaattcctcctttcctaaccacatttccaagtcccttacaattcatcaaatatcttgggaaagtgtataatcaccttctacagttgggtgattcacagtatatatatttgaatccatatttccaataaggtagacagttcctttctaagaagtgtttgtacaacatcctttgaaagattagtataagcctctttaggatgaaaccaaattgcatatttacagtaactcca

SEQ ID NO: 838068 - DNA, 626 bp, Homo sapiens
acagtagtcctggatttcaataataataatcatgattcttactattattctattctaagaactaataagaattttagttttgttctaatagatctgtattatctattacaacttatcagataagaagaaatactccatagatgattacagatgtcttccaagaaaatcagactattatcatagtgctatagcactatagcaatacaggaaatatttctgagcaagtaataattacataaatacatgtggctttgtgcttactgccattagctaccacactattagaatatggttagttacaagaaagaaaagggaattaattggttttgagatagcagtatgagggaactcttgacaacattttaacaaccacaacaatgaaggaatgaaatctggattatggattctgcttccctctctgcattgaactttgtttttaaattctgtaaccaatcattctcttgcttgtaggatattattgctataaatgttgaactcctgccgtcagccagtcaaaatgtatctrccatctctcaccttttaggtcttgccatttatcagttacttttgctggctggtggggtttagttgaatacattgttttccctatatattcacctgcataa

SEQ ID NO: 838069 - DNA, 640 bp, Homo sapiens
cgctgcatgctgtccccagctctcactgctcatcagaacaggcacgcagtgatcctcaggcaccgagctgtgcatggaatcatcttttccaagagggggcagtggcccctttggttcaagggaaagtgaacacccaaaaatcaggaaggaggctttataaatagctgtttttgtactctgaatgtgactcttgtgcctgctgttcctgccaacagatttgtgttggctcgatgtgtttcagcttcaaggcgcgaggtattccctggcttgtttccatacttgggacaagactggtgttcatggcactcagaaaaatctagggtggtgaatgatgggaagactggaggccagagaccaggaagagtgggcagaaagatggagaacaggaaaggggagatctcaagaaggggctcagaaaaaaaaaggctgaggaaggagggagaaacttgagtaggatgtattttattgtataactatggaatcctcttaataacctctgaagacacttcttgagtcatttccatgtgtgagaarttaactgtaaaatcacagatgacatactgtttgcaactaagaggtcttcagggttcagggacttattatagccaggggatcacaggttccaaagagttcttccaaa

SEQ ID NO: 838070 - DNA, 629 bp, Homo sapiens
tcagcaatgagatctggattaggccacaggaatatgaagcaagagtcggagttcaaatattaggtacatggattaaaatcttattgaagygtttccagcaagggtggcattgtctgattccctgaatagctaaccagtggtactgcttgatcccatttacatgaaaacaagctctattcacaaacctattccaaacccacattgtggttcaagtaaaatgcacatgattacaacaaatggtgatatgtttatgttcttaaatcattcatatattcagatatttacattcaaacattcaaaaacctgtaggcagtgggggaaataacttatttcccagaagagacagtctgttagttcacaactaaatttagtagctcaactagattataaaataaagaggcaaactgtgaaagctagtcattatttcaccattcagcatttttgacaatgaaaaatagtttcatggttcagcagttcctaaataacttgtaaaatgtcaactttgaaataaacagaaggaaaaattgaggtgcagccatacctgcaaaaggatgctattgacaaacatcaaaatattagaatatttaaccacaggtgtagaaaaaaaacctgcctattaagttcctcag

SEQ ID NO: 838071 - DNA, 585 bp, Homo sapiens
gtccagggcttttttttgttgtaggttatgactgacttaatttcagaagttgatgttggtctatgcaaggtttccatctcttcctgattcgatcttgggagactgtgtgcttccaggaatgtatccatttcctctagattttctaatttgtatgcatagagttgttcatagtagtctctgaggatctcttatatttctgtggcatcagttgtaatgtcacctttgttgtttctgattgtgcttatttgtatcttttatttctttttctttgttaagatagctagggggtctatccttttttttttttttttttttttttgagaaccaactcttggtttcattgatcttttgtatggattttctatttcttaatctgggtggtggttagaagggtgtttgcctgataatagttaaggcatgtatttattccgtgtggtttactgtgtcttatttcacaatacaacatgtcttttgttttttwaaaaaaaaaaagccatttcagtagtaccggagagagaaaaagagggagccccagcctgaatgagagtggaaaatggtgagcaaatacggggtcattccagagaa

SEQ ID NO: 838072 - DNA, 669 bp, Homo sapiens
agagatctgctgtacgtgctcaactttatggcatrgtaagacagatgacattcagtaaatgatgagcagctcaggttccatggttacttggtggcccattgtcaagcattcagcctctactaatgcccagtagcaagccaggagccgtttctcaaaaggagagtattatctgtggtagatggcagacctttgccctgaaattccaaaggactaccctgcaattttccaatagggtctaccagagactccaagtagcatcctatctgccatttctacctttcaactactattgtatctgcttgatcatatggctcaagtagcagagcaacttgcacatcagcctggacttactggggagctttcttttgctctgaaccccactcaaaactaccagcttttggaggcatcacgctatctgacttcaaactatactacaaggctacagtaaccaaaacagtatggtactggtacgaaaacagagatatagaccaatggaacagaacagagccctcagaaataataccacacatttacaactatctgatagttgacaaacctgacaaaaacaagcaatggggaaaggattccctatttaataaatggtgctgggaaaactggctagtcatatgtagaaagctgaaactggatcccttccttacaccttataca

SEQ ID NO: 838073 - DNA, 669 bp, Homo sapiens
agagatctgctgtacgtgctcaactttatggcatggtaagacagatgacattcagtaaatgatgagcagctcaggttccatggttacttggtggcccattgtcaagcattcagcctctactaatgcccagtagcaagccaggagccgtttctcaaaaggagagtattatctgtggtagatggcagacctttgccctgaaattccaaaggactaccctgcaattttccaatagggtctaccagagactccaagtagcatcctatctgccatttctacctttcaactactattgtatctgcttgatcatatggctcaagtagcagagcaacttgcacatcagcctggacttactggggagctttcttttgctctgaaccccactcaaaactaccagcttttggaggcatcacgctatctgacttcaaactatactacaaggctacagtaaccaaaacagtatggtactggtacgaaaacagagatatagaccaatggaacagaacagagccctcagaaataataccacacatttacaactatctgatmgttgacaaacctgacaaaaacaagcaatggggaaaggattccctatttaataaatggtgctgggaaaactggctagtcatatgtagaaagctgaaactggatcccttccttacaccttataca

SEQ ID NO: 838074 - DNA, 622 bp, Homo sapiens
accaccacacctgactaagttttggcatttttagtagagacaaggtttcgccatgttggtcacgctggtcttgaactcaagtgatccgttagcttcagcctcccaaagcactgggtttactggcgtgggccaccrtgcttggccaattctaattatgctttctcagaactaaagaaataaccacagggtgtatttgaggaccttctgtgagatggacctgagctcaaactccattgatcatctgactcaataaacttctactgtgactagtaggccacagtgatgttttgggtctccaggaattaatgtcagtttagagccagtgcccaggagcccctaaaagttctgattattcccctttcctcaatgaacagttaccctgataactgtatgtccctttggggaagggtgggagaaagattagctgtacaaatttttggcaatgtaccagggctcttcctcaaggggaattggctaccctttcacccgaggtgttctgagtctgtaaactggctaaagtagaaaaacagattaaggaacatgtgtctctgtttttctgattcagattagacttttgtttacttgacctagaacttttctgcttatacacatcaaatatata

SEQ ID NO: 838075 - DNA, 581 bp, Homo sapiens
gcactaaccccttcatgaaaatggatccccataacttaatcacttcccaaaggcctcacctcttaatactattacatttagcattatgttccaacacacaaattttggggggacaccaacattctgatgatagcacctttcctaaaagaagaggtaaatcttggagtgttgtttactctttttatgaatattctgtaatttaataattttgttgtaaaataaaatttatgttgtactcacataaaatcagtacatcttgttatatgataggggaataagagagagaagaaaacgatattttcagatacacacagaaacacatatgttcataacaaagtactcatgacaattacagtcttcatttttataactgtttacatgagttttataactagttacttgatttttataacttgtcacaggattgtagctgatataactggtacatgtaactrccttcttccattacccattttgtatggttttggttctatatctggtagattgacccaaacctttttttctgaaaggtctgtcattagtagtcctgtctgaattgagttgtgatagttttccattga

SEQ ID NO: 838076 - DNA, 481 bp, Homo sapiens
cctatcctagctcccaccagctgcagcctggtaagttaaagattatcatagtrgttagacatatgctttgagcttaaaggaaattcacataaccgccagtgctatacatgtttccaatgacgcatgctcccccaccttcaccgtttcaccccgtaccatctgcttcttagatcaaaaagattgtactcaataaattttcaggaaaccagtgttctgggccttctgcagccttcactctagcagatggccccctggacctgcttttactcttaacttgtcttttctcattcctttgtcactgccggactttgggtacccatggctgggggttgggactgatctccccaacaggtctgatggtttaaaaacagaaatatccccgcacaagctctctctttgcctgccatcatccatgtaagatgtgacttgcttctccttgcctaccatcatgattgtgaggccttcccagccatgtggaact

SEQ ID NO: 838077 - DNA, 648 bp, Homo sapiens
atcttagtaaggctgaaatagctaagatgacagacatacaattcacaattttttgaataggaatgaagatsatcaagattccagggaaagttgaagtccgaggaatctaagtattacaatgaaatgatgcagaagctgaaacaataaatggccattaaaagaaggaacaaaactgatctgatacagctaaaaaacatactacaagaatttcataatgcaatcacaagtagaccacagcagaatagaccaagctaaggaaagaatctcaaagctcaagactggttatccaaactaattcagtgagaaagaaataaagaaaaaagtataaaacagaatgaacaaaacctccgagaaatatgaaattatgtaaagagaccaaatctatgattcattggtatccttgaaatacagggagagaaaacaagcaacttggaagacatatttgtggataatgttcacaaaagtttccccagccttgctagagaggccaacattcaaattcaggagatgcagaaaactcctacaagatcctatacaagataactatccccaagacacatagtcttcagattctccaaggtcaatgtgcaagaaaacatagtaaaggcaactagagagaaggggcaggtcacctacaaaaggaacctc

SEQ ID NO: 838078 - DNA, 604 bp, Homo sapiens
aacacggcctatcactctaagagcagaaagaggattcaagaatttaaagatttcaacaacaaagggggaatttaagagttccaagattttctcctcagatactcaaaaattccaattagscagaatacgccattctctgagtacatcattaatcagtttgaacgtgttttccattatttccaactttacagtgctggtttaaagcaggtattatttcagagcaaagattatttcattgttttgggaacatcataaaacatgctatttacatggaagataacatgggggtaggcccagtagcatgatttattctaacataaaacacacacgtgtgcacacacaaacacacacacactgacatatcttccattcaagaaaagtttaatttatagttttttaaggttttagcagttcaggtttccttttatgatagcatggttaccaaatatgctttgttttttcatttctaaaaaaaagtcacagatttattatgttcagctccttactaaatgagctgaagggagatttataaagcaaataaatggaaagatttacagtttcttcctcacagcagctaaaaattatggaaaagctcattgacctt

SEQ ID NO: 838079 - DNA, 604 bp, Homo sapiens
aacacggcctatcactctaagagcagaaagaggattcaagaatttaaagatttcaacaacaaagggggaatttaagagttccaagattttctcctcagatactcaaaaattccaattaggcagaatacgccattctctgagtacatcattaatcagtttgaacgtgttttccattatttccaactttacagtgctggtttaaagcaggtattatttcagagcaaagattatttcattgttttgggaacatcataaaacatgctatttacatggaagataacatgggggtaggcccagtagcatgatttattctaacataaaacacacacgtgtgcacacacaaacacacacacactgacatatcttccattcaagaaaagtttaatttatagttttttaaggttttagcagttcaggtttccttttatgatagcatggttaccaaatatgctttgttttttcatttctaaaaraaagtcacagatttattatgttcagctccttactaaatgagctgaagggagatttataaagcaaataaatggaaagatttacagtttcttcctcacagcagctaaaaattatggaaaagctcattgacctt

SEQ ID NO: 838080 - DNA, 604 bp, Homo sapiens
aacacggcctatcactctaagagcagaaagaggattcaagaatttaaagatttcaacaacaaagggggaatttaagagttccaagattttctcctcagatactcaaaaattccaattaggcagaatacgccattctctgagtacatcattaatcagtttgaacgtgttttccattatttccaactttacagtgctggtttaaagcaggtattatttcagagcaaagattatttcattgttttgggaacatcataaaacatgctatttacatggaagataacatgggggtaggcccagtagcatgatttattctaacataaaacacacacgtgtgcacacacaaacacacacacactgacatatcttccattcaagaaaagtttaatttatagttttttaaggttttagcagttcaggtttccttttatgatagcatggttaccaaatatgctttgttttttcatttctaaaaaaaagtcacagatttattatgttcagctccttactaaatgagctgaagggagatttataaagcaaatraatggaaagatttacagtttcttcctcacagcagctaaaaattatggaaaagctcattgacctt

SEQ ID NO: 838081 - DNA, 485 bp, Homo sapiens
cctataactatctgatctttcacaaacgtgacaaaaacaagcaatggaggaaggattcccacttcaataaatggtgctggataactgggaagccatgggcagaagaatgaagctagatyccctccttacaccatatataaaaattaactcaagattaattaaagacttaaatgtaaaacccaaatctataaaaacccgcaaggcaacgtaggcaacaccattctggacataggaatgggcaaaggtttcataatgaagacaccaaaagcaactgcaataaaaacaaaaattgacaaactgaatctaataaaactaaagtgctcaacatcactgatcattaaagaaatgcaaatcaaaaccacaatgagataccatctcatgtcagtcaaaatggctatcattaaaaagtccaaaaaacaacagatgctggcgaggttgtggagaaaaaggaatgcttatacagggttagtagaagttaaatcagt

SEQ ID NO: 838082 - DNA, 642 bp, Homo sapiens
gcgttggttaattgtatgtgttaacattaggggtgttttaaattatattaatacttaaatcagaactttgagtaaacagattaccctccataatgtaggtgggcctcattcaatcagttgaaggcctgaataacacaataaaaaaaattaaaaaaataaaaaacagtgttctactgcaagaggaaattccccagcatgctgtcttctcactttatctgcaacactggctttcctgggtctcaagcctgccagcccaccctttatatttgaacttgccagcctttggaacgtgatacatatttgtatctcttaaaaaagagagaatataaatgtgtctgtatagaaagagagagagacacacatacacacatacattatatacatatatatatacacacatatgttgtattaatccattttcacactgatgataaaacatacctgagactgggtaatttataaagaaaaagaggtttaatagactcacagttccatgtggctggggaggcctcacaatcatggcagaaggtgaaaggcatgtcttacatggcagcagkcaagagagaatgagagaaaagcaaaagagaaaacccctataaaatcatcagatctcatgagacttattcactaccatgagaacag

SEQ ID NO: 838083 - DNA, 651 bp, Homo sapiens
cacaatcctcaataagaactatattggataacattccaataaacacctacacacacaaacagaagtgttctgtaygctaaattgtacatgatggtactgtgcacatgtacttaaatttgctattcataaaacaatactcccattattttgtactgtattcttaaaatttctgggttaaccaccgaataaatttaaaactttgaaaataatttgctaaagaatatgctttgaagggatattgttgggctaaagaatatgctcatattaaattttactatatggcataaaattactcatgaaattctccccaacaattagtaaatgtttgcttctctacaatctttttataatttttactttcaatattgagataattgtaggcttacaggaaagttgcataaatattaaaagacagttcccatactccccctgatctagcttcatttaatgttaacgtcttacatagtttaattattgaaaccaggaaaccaacactgttaaaatttggtacttaaaaaactacagactttaattcaaatttcaccagttttccttcgtgtgtgtgtgtgtgtgtgtgtgtgtttgtgttttcattctagcaaggatcctgtgttgcatttagtttctgttcttccttagactcttctaaca

SEQ ID NO: 838084 - DNA, 580 bp, Homo sapiens
atatattcagattcaatcttttcttttcttttctttttttgagacggggttttgctcttgttgcccaggctggagtgcaatggtgygatcttggctcactgcaacctccgcctccctggttcaagcaattctcctgcctcagcctcccaagcagctgggattacaggtgcccgccaccatgcctggctaatttttttgtatttttaatagaaatagggtttcaccatgttggctaggctggtctcaaactcctgacctcaggtcatctgcccgccttggcctcccaaagtgctgggattacaggcatgaaccattgcacccagcctcagtattttccttttaagaaaaatctttttagagacgggggtctcactctgttgctcagactggtctggaacttctgggctcaagcaatacactggtctcagcctctagctgggattacaggcacaagccaccatacccagctagatttaataatttctggatgtaagaaggtaaaacataatttcctctatatatgcacgatcacacccttgttgggatctggggcagcagcccacagtcaaacacattgaca

SEQ ID NO: 838085 - DNA, 580 bp, Homo sapiens
atatattcagattcaatcttttcttttcttttctttttttgagacggggttttgctcttgttgcccaggctggagtgcaatggtgcgatcttggctcactgcaacctccgcctccctggttcaagcaattctcctgcctcagcctcccaagcagctgggattacaggtgcccgccaccatgcctggctaatttttttgtatttttaatagaaatagggtttcaccatgttggctaggctggtctcaaactcctgacctcaggtcatctgcccgccttggcctcccaaagtgctgggattacaggcatgaaccattgcacccagcctcagtattttccttttaagaaaaatctttttagagacgggggtctcactctgttgctcagactggtctggaacttctgggctcaagcaatacactggtctcagcctctagctgggattacaggcacaagccaccatacccagctagatttaatawtttctggatgtaagaaggtaaaacataatttcctctatatatgcacgatcacacccttgttgggatctggggcagcagcccacagtcaaacacattgaca

SEQ ID NO: 838086 - DNA, 576 bp, Homo sapiens
tgattaatagatttcttcctatatagttgagctccttatatattctagttattaattctttgtcagagggacagtttgcaaatattttctcccattctgtgggttgtctcttcactttgttgattgtttcctttgctgggcagaaggctttcgacttggtgtgatctcatttgtccatttttgtttggttgcctgtgcttgtggtgtattactcgagaaatctttgcccagtccattatcctggatagttcctccagtgttttcttttagtagtttcatagtttgaggtcttaaatctaagcctttaatccattttgatttgatttttatatatggcaagaaatagggggtctagtttcattcttctgtatatggatatccagttttgccagcatcatttattaaagagactgtcttctccccaatgtgggttcttggtacctttgtcaaaaatgagttctgtagatgtgtgtgttgtttctgggtkgtctatttggttccattggtctatgtgcctgtttttatgccagtaccatgctgttttggttactaaagctctgtagcataatttgaagc

SEQ ID NO: 838087 - DNA, 382 bp, Homo sapiens
gagaacatctttttaaaaattattttacaaaatctttctcacagagataatatytattttgacacggtctaatgaaacgtctgaattccaagggttaaaaaaagaaaatatttaggcaaaaaaaatcagttgatatcatgttaatactggacttctcatcggttgttctagatggtggaagactatgcagcaatgtcacaggggtccggatgaaaaggactgtgtccctgtaattccacacccagactgtctcccatctttacctgtagcctttcctcaaaaagtacttgaggaagtattctagcgcaacaaaaaatgaattagagtaaataattcagaaggaagaaatagtaactaataaataacatgcagccaacacact

SEQ ID NO: 838088 - DNA, 382 bp, Homo sapiens
gagaacatctttttaaaaattattttacaaaatctttctcacagagataatatttattttgacacggtctaatgaaacgtctgaattccaagggttaaaaaaagaaaatatttaggcaaaaaaaatcagttgatatcatgttaatactggacttctcatcggttgttctagatggtggaagactatgcagcaatgtcacaggggtccggatgaaaaggactgtgtccctgtaattccacacccagactgtctcccatctttacctgtagcctttcctcaaaaagtacttgaggaagtattctagcrcaacaaaaaatgaattagagtaaataattcagaaggaagaaatagtaactaataaataacatgcagccaacacact

SEQ ID NO: 838089 - DNA, 662 bp, Homo sapiens
cccagctcaagagttttctgggtgttcctgacttgcattgtgtctccagtgttgtgaaggttctttccctgaggaaagcccaggcccagagcatcctggaagtcctgaagataactcagcactgtgcagaatcccttgggcagccccactgcttccatccacctttcatacttttcctgttggaacttctgacctgtcagaaagattttaccaagtaagtacaaaggacaggtccagaaggaaaacagcaaagatcattgtaaataaatcctgattatcttctctgattaatagcagcatcatttctatgtaggatacaaatgtacgtttttggttaattcattctctcattccaaggaaagatgggttatatccttttaatatgtaactgccgggaacatatttattcctcctggtgagttgatgagctttactttccagatggtgagaattgcattcctcatatactcatgcatcatttggctcctggaagctgtgagctaaatataaggcttacagaaaagatattaatctgagtacctcaaaaggtggttcttaggattaactcaataaataccttttgagcrtctagtgtgctagaatgtcttctgggtgttatgcagcagtagacaaggcagattttatattatattgaggagaga

SEQ ID NO: 838090 - DNA, 620 bp, Homo sapiens
atgacggactctgccttccttccaccctctgctgtgtgacgtgggcaggccagtgccctctctctgaggaggttgcctttccagaatatcaaggctgactttggagccatgcaggtgggttcaaatcctggttagtctcttactaagctgtgagatcctggctaatccctgtggtcctgagccccacagacaccgagaagggccacatccatttggaaactgattagacagtcttgggagggaagacaggcaggaggacggtagtgaggtccccgtcactggaggtataggttcccggctgggcagcagcttggggcataggctacggctgggaatgggtgggtccctccaacgctgacagcctgtgacacacacagaggagggacctggtgcccctcacacctgcagatctgaaagcagaactagggagccgcaggggcagagagaggacagccttcccccagcctcttccagcaagggtaggctgggcctgcgcagacagcctctcccagggasggtcaggagtgatactaagggtggacttccggcccgtcctgtacctggcatcccaccatcagtgcccagtagaaaggatccacagccccttgtgatggtgagga

SEQ ID NO: 838091 - DNA, 591 bp, Homo sapiens
agctactcgggaggccgaggcaggagaatcacttgaaccygggaggtggaggttgcagtgagccgagatcatgccattgcactccagcttaggtaacagagcaagagtctgcctcaaaaataaaaataaaaatataagaaaataattattattcagatgaattgaacaggcaagaccattttaacaagtaggattagtatataggaagacacagaggcataggaaatgtgccttcaggcagccataaattattctgcatggagatagggctggaaatgtgatgaggggagcttggtaagaagtgaacctggagggctgggcgcggtggctcacgcctgtaattccagcactttgggaggctgaggcaggtggatcatgagatccggagatcgagaccatcctggccaatatagtgaaacaacttctctactaaagatacaaaaatgagttgggtgtggtggtgtgagcctgtaatcccagctactagggaggctgaggcaggataattgcttgaacccgggaggtggagattgcagtgagccgagattgttccactgcactccagcctggagacagagcgagactccatct

SEQ ID NO: 838092 - DNA, 596 bp, Homo sapiens
caaataggagcagctcccgtctgcagttcccagtgtgagtgacacagaagacaggtgattcctgcatttccaactgaggtactgggttcatctcactggggcttgtcagacagtgggtgcagcccacggagcagggtggggcatcgcctcacccaggaagcacagagggttggggaattccctttcctagcaaagggaagctgtgacagacggcacctggaaaatcgggacactcccaccctaatactgcacttttccaatggccttagcaaacggcacaccaggacattatatcccatgcctggcttggaaggtcccacgcccacggagctttgctccctgctagcacagcagtctgagatccaactgcaaggcagcagcaaggctgggggaggggcatcctccattgctgaggcttgagtaggtaaacaaagcagctgggaagctcaaactgggtggagcccacctcagctcaaggaggcctgcctgcctctgtagactccacctctgggggrcagggcatagctgaacaaaaggcagcagaaacttctacagacttaaacatccctgtctgacagctttgaagagagcagtgc

SEQ ID NO: 838093 - DNA, 544 bp, Homo sapiens; identical to SEQ ID NO: 812776

SEQ ID NO: 838094 - DNA, 489 bp, Homo sapiens
tcaaaggcagaacacagtgacaacatccctgtgggtgcgtaacacagtaaagagtgtccacatgagggaaagatgtcaaaggctgaagaggagggtgcagtggccacagtggtaccctactcagatatcccctcaacctaacctgctatgaggaacagaactgcttgacagcctccatctatcgcaccttggaatccatggcaaccacccctggccttgctgcctctgggcttctcccagcaagctaccaagcagggcagaagtactagaatggggattgctccaaaggacaataggagggtagtagggtggggtgggagattccctgcgcatcaaatcttgtcttgacatctgtgtctcagaagacccaaactaacacaaaaaacatctgtgttaagagwactgatatcaaaagctcttggggcaaaatgttttaacatctgaaagatgttataaaatggttaacttcattaaacaaaggtcatttca

SEQ ID NO: 838095 - DNA, 635 bp, Homo sapiens
tgttatttgctctggtacttcttggcatgtatgtgagaaaaaaattatttytccaaaaaagctacttcccttgtttaaatgtcatcttgtattagcccagacagtaatattgtggggtataaccccctaatcatcgtggagtaaagaatatttaaacaactgatttaatcttccccaaatttttttttttttttttttttttttttggcttcttagggtaaagaaatgagaaatacaacttacaggaacttaaataggtaatgtcaatgtgtgaagagagtcatgaacagccagtaagactgttcaggctcttatgaactacgtaagatatgccttccccaaaaggtgttaatgttcagttaaaagaataaaaatatgaggcaagaggatggtttgagcccaggagtttgaggctgcagtgatagtactacagtactctagcctcggtgacagagtgagactctgtctttagaaatatcaagaaaagaaaaagaaaaacattgtgctggctccaaaaaactgactttgagctacatatgacctatgggctgtatactgttggatctttaatagcttctagagaagaagttcaagatctaagtagggccttggctaaattttaatttcttccttag

SEQ ID NO: 838096 - DNA, 635 bp, Homo sapiens
tgttatttgctctggtacttcttggcatgtatgtgagaaaaaaattatttttccaaaaaagctacttcccttgtttaaatgtcatcttgtattagcmcagacagtaatattgtggggtataaccccctaatcatcgtggagtaaagaatatttaaacaactgatttaatcttccccaaatttttttttttttttttttttttttttggcttcttagggtaaagaaatgagaaatacaacttacaggaacttaaataggtaatgtcaatgtgtgaagagagtcatgaacagccagtaagactgttcaggctcttatgaactacgtaagatatgccttccccaaaaggtgttaatgttcagttaaaagaataaaaatatgaggcaagaggatggtttgagcccaggagtttgaggctgcagtgatagtactacagtactctagcctcggtgacagagtgagactctgtctttagaaatatcaagaaaagaaaaagaaaaacattgtgctggctccaaaaaactgactttgagctacatatgacctatgggctgtatactgttggatctttaatagcttctagagaagaagttcaagatctaagtagggccttggctaaattttaatttcttccttag

SEQ ID NO: 838097 - DNA, 635 bp, Homo sapiens
tgttatttgctctggtacttcttggcatgtatgtgagaaaaaaattatttttccaaaaaagctacttcccttgtttaaatgtcatcttgtattagcccagacagtaatattgtggggtataaccmcctaatcatcgtggagtaaagaatatttaaacaactgatttaatcttccccaaatttttttttttttttttttttttttttggcttcttagggtaaagaaatgagaaatacaacttacaggaacttaaataggtaatgtcaatgtgtgaagagagtcatgaacagccagtaagactgttcaggctcttatgaactacgtaagatatgccttccccaaaaggtgttaatgttcagttaaaagaataaaaatatgaggcaagaggatggtttgagcccaggagtttgaggctgcagtgatagtactacagtactctagcctcggtgacagagtgagactctgtctttagaaatatcaagaaaagaaaaagaaaaacattgtgctggctccaaaaaactgactttgagctacatatgacctatgggctgtatactgttggatctttaatagcttctagagaagaagttcaagatctaagtagggccttggctaaattttaatttcttccttag

SEQ ID NO: 838098 - DNA, 570 bp, Homo sapiens
ggcttggctaatactgcaaagtttgggatccacagtctacaaaaccccacagctcctaagaattctctmacctgccttctactcttaggctccgctagattgcaaattacctgctttctttctgatcccgggctccgttccgacccctgttggatagtaaatcgcaagtaacgtacctgctgtcggcagatctgagctttcttcttggacaccttctacccacagccctccaggtgccagtgtagggcatctgttcccttggcacacctgactgccgtggggtgtcccagcagaaggtcatcaacctactgaagcaacacgcagcctaggtctctggtgggaaacttctggaggtctcgagccaacgcctccccaaagatggtgggagagttcttgaacccttggggaagcccggtccaagtgtactgagtagtgacacctgactctggatcttcccactgaaaggcaaacagcttctgcctctcaggggctaatctgataggaaagaaagcgtctttcaggtccaagcaggtgaaccagctgtcctcagctggcagcaaccccaacaat

SEQ ID NO: 838099 - DNA, 621 bp, Homo sapiens
ggacatatattctctctctaaagaatgcaggtgacttaacaacgtttcccccagaactttactgaaacagcgctggaacaagcagcgatagttaaccaggtagtctggaactgccatagtattcactgcaagtaaagggaaactgaaattaatgaagcagacaaacctctccccaggtcatggcaccagaaatgttgatggctgatgtaataccttggttcttatcttcttagtttaaaagaatttaaacaagagacacacagcaaaagaagtacagcataatttattgcaaaaaaaaaagagaatattttgaaaattaagtgcagaatagacggtacagtctgagaaagagattccagggcagcctgctcataaaagtgagacagcattaattattgctggagaaaccctctttatgggagttttgcatgattatttcataagaaggtggaaagaagtgttatagtaagcatgttctgactggtcttctggktacacatgtgcagtagctgtacatatttgtgcatacattgcatgcctcactagcatcttaaatctccacccaggaatgtgttttttactattaaaatgaacaaaggtcagcttgaggacagataaaat

SEQ ID NO: 838100 - DNA, 621 bp, Homo sapiens
ggacatatattctctctctaaagaatgcaggtgacttaacaacgtttcccccagaactttactgaaacagcgctggaacaagcagcgatagttaaccaggtagtctggaactgccatagtattcactgcaagtaaagggaaactgaaattaatgaagcagacaaacctctccccaggtcatggcaccagaaatgttgatggctgatgtaataccttggttcttatcttcttagtttaaaagaatttaaacaagagacacacagcaaaagaagtacagcataatttattgcaaaaaaaaaagagaatattttgaaaattaagtgcagaatagacggtacagtctgagaaagagattccagggcagcctgctcataaaagtgagacagcattaattattgctggagaaaccctctttatgggagttttgcatgattatttcataagaaggtggaaagaagtgttatagtaagcatgttctgactggtcttctgggtayacatgtgcagtagctgtacatatttgtgcatacattgcatgcctcactagcatcttaaatctccacccaggaatgtgttttttactattaaaatgaacaaaggtcagcttgaggacagataaaat

SEQ ID NO: 838101 - DNA, 565 bp, Homo sapiens
ggcgctggcccggtgagctcggcccctcccgcgtcccccgcgcccacccactgggccagcgagatccgcagccatctcaggcttcccctgtcaccccggccctgagaagcgggtgtgcgccccttagttctccgagcctgccgggagccacctcctcccctgcccctgggggggtgggccatgcccgcagaaccctgggcagaggcgaaggaaccgggaaatgtccctttctccacactgaccttggggtgtgctgggtcctctctactccctcccaccctgcccgcgctgttccctggggcccgcagtttcagcaaagttccctgccgcgccgggaagccgtcctgttgcccactctcacccttcctccttttctagcccattctctctccccacctccgacacgaccctctctcctcccggctgtccccggagcccctctctgcttccccagctcagccccctctctgacggcttctccctcccacccccaagcgaatctccgggttcccacggggtgctccsgatccctggggctaggtcaaccagacaaaattattttaaa

SEQ ID NO: 838102 - DNA, 565 bp, Homo sapiens
ggcgctggcccggtgagctcggcccctcccgcgtcccccgcgcccacccactgggccagcgagatccgcagccatctcaggcttcccctgtcaccccggccctgagaagcgggtgtgcgccccttagttctccgagcctgccgggagccacctcctcccctgcccctgggggggtgggccatgcccgcagaaccctgggcagaggcgaaggaaccgggaaatgtccctttctccacactgaccttggggtgtgctgggtcctctctactccctcccaccctgcccgcgctgttccctggggcccgcagtttcagcaaagttccctgccgcgccgggaagccgtcctgttgcccactctcacccttcctccttttctagcccattctctctccccacctccgacacgaccctctctcctcccggctgtccccggagcccctctctgcttccccagctcagccccctctctgacggcttctccctcccacccccaagcgaatctccgggttcccacggggtgctccggatcccyggggctaggtcaaccagacaaaattattttaaa

SEQ ID NO: 838103 - DNA, 600 bp, Homo sapiens
acacagtggaaatagatggagtcaaatcatattcgtgacattcaaacaatatcacttttgaagattttaataaatataccttccttagcaatctgttactgatatagttagattttcagaaattttgttttaggaaaaattgagaatttcagaccttaaaatggattaatcaaatactcacttttggaggggtcagggaagataggagaaaatttccaatacattgttcagcagtctggggacgtgttagtcaatatctgtagtgactcagaatacagaagtgaggtggtgttttgagtatgctttatctctgtgcacaatggttccccttcttacaggttctgtttccagagaacaggaaatattctgtgctttctagattaactcacacttccaggtaggacttggtatctgaattgaatatatcccagctgagcagtctacagcgaactctgatgctgtcattggttgtgttttgttttgtttycagtaaaagaaacttacttagctgagttcaggtctctgacaaatgatcagtagctatttggaagtgcctaatggtctaacatctaaaactttgtattatgcataaaattttta

SEQ ID NO: 838104 - DNA, 548 bp, Homo sapiens
atttaagtgtgtacaaatccagaaatcataaagtgtaaaaaattggagaatgctagtattcccatttctaattattatactgtgtagtttgcagtggtgtygtctctgggtatgttactatgttagtatagccttaattttaagaaaaactctgtttttctgtttggctttttagttgtcctaatgctttgtagtactttggagtacaaaatccaaggagctatcttctttcttattccaacattttaaaggtgataaagtgaaatattgcactggcttttcctaatagtgctcaccttgagagacatgtattatgatggcattttatgtttctaatggaatttgcacccatatctctgtgaagtgaatgtgtatttatcccttgactgtattttgctttctgttattagtgtcctctctatcttgggtgtattatttttccgtttcattccatctatacaatgagaacagcagtaaagccatatgttgacattgaagggggtcacagaattaacatgaaaatgtttattatatctaattttaaattt

SEQ ID NO: 838105 - DNA, 558 bp, Homo sapiens
aaatagattagtatatatgagcaatgaacaatttgtaataaaattaagaatacaatgctattcaaaatagcatcacaaggaataaaatactaaggaataaatttgacaaaagaaatgcaagatttatacactgaaaattacaaaactttgaggaagctaaagaagatataaaggccgggtggggtggtttacgcctgtaatcccagcactttgggaggctgaggtgggtggatcacgaggtcaggagattgagaccatcctggctaacatggtaaaaccccgtctctactaaaaaatacaaaaaattagccaggcgtggtggcacgcacctgtaatcccagctactcaggaggctgaggcaggagaatggcgtgaacccaggaggcggagcttgcagtgagccgagatcgtgccactgcacaccagcctgggcaacagaaygagactctgtctcaaaaaaaaagaagatctaaataaatggagaaacattccatatttatggaatgggagattcagtattgttaatatgacaattctccccagcctgatctatacatt

SEQ ID NO: 838106 - DNA, 555 bp, Homo sapiens
ctataaatgagcataatggatccaattcggggacaaaaatgttataaaactgatttatggtgatggtggtaccacttggtaaagttactaaaaatcattaaatggtatgtttggaataggtgaatatgtaaaatatacctcaataaagttgctaaaaaaaaaaccctaaattttaaaataaattattaaaagctaacttatctttgattttagatctaatgtacattatctgctcaagttcaaaccttacttatttttatattttatttttagagacaggattgccctctgtcatcaaggctggaatgcagtgggtgatcatggttcacggtagccttgacctcctgggctcaaggggtcctcccacctcagcttcccaagtagctggactacaggcacatatcacactcgactaatttcttttttatttttttgcagtaacaggggtcctgatatgttgcccagaatggtctcaaactcttggactcaagcaatcctaccaccacggsctcccaaagtgctgggattacaggcatgagccactgtgcctggcca

SEQ ID NO: 838107 - DNA, 496 bp, Homo sapiens
atagtatatccagtgaaaatatctttcaaacaaggagaaataaagactttcctagacaatcaaaagctgagggatttcatcaacaccagacctctcctgcaaaaaatgctgaagggagtacttcagtcataaagaaagggatatcagtgagcaataggtaatcacctaaaagtataaaagtcattggtaatagtaagtacacagaaaaaaacacaggatattacaacactgtgagtgtagtatgtatattactcttatccctagcagaatgactaaaggatgaacgagtaacaacaaaacaacaaaaagaactacaacaacttttcgagacatagacagtacaataacgtataaatagaaacaaaaaagttaargagcagggggacaaagttaagatgtagagtatttgtcagttttctttttgcttatttgcttgtttatttgtttaagcaaacagttttaagttgttattagcttaaaataatgggttataaga

SEQ ID NO: 838108 - DNA, 496 bp, Homo sapiens
atagtatatccagtgaaaatatctttcaaacaaggagaaataaagactttcctagacaatcaaaagctgagggatttcatcaacaccagacctctcctgcaaaaaatgctgaagggagtacttcagtcataaagaaagggatatcagtgagcaataggtaatcacctaaaagtataaaagtcattggtaatagtaagtacacagaaaaaaacacaggatattacaacactgtgagtgtagtatgtatattactcttatccctagcagaatgactaaaggatgaacgagtaacaacaaaacaacaaaaagaactacaacaacttttcgagacatagacagtacaataacgtataaatagaaacaaaaaagttaaagagcagggggacaaagttaagrtgtagagtatttgtcagttttctttttgcttatttgcttgtttatttgtttaagcaaacagttttaagttgttattagcttaaaataatgggttataaga

SEQ ID NO: 838109 - DNA, 622 bp, Homo sapiens
acagcatcctattttttttttcaataaatgtagacataagtcaaatgttttttttccttttcactcccaggtttccacctggatcattcagtactttgaggagtgccagaggcactttaractcctcacaaaggctgccggagcagtcccctgaggctgtgcaagtcagactgtgggtgattctgggactagcatacttgccttccaagcatcaccaaagatgcaaaccaacaggaagccctggggaacattgactcttccacctctgaaaggctgatgtgcctttcacacatcagatatagtcttagctagagaaaactggtatgttggctgcaactccaggcaggcttgtctcctagttgtttacatgacacattaagaatgaaatatgagggatcattacccatcctcatttgagagctggaaatgttagaaaccccatttagaatctccttcagggaggtggatgttttcctctcattcttaatcattgttcttactatcaactaatataaaaccaataaactttactcttcttgcttaaggggacacttgttattatggcaaattactggatccatattatgtatcttcccttctcctttcccttcctggggcctct

SEQ ID NO: 838110 - DNA, 561 bp, Homo sapiens
ataaaagggatacaatacatggtccgtgactgcaaaaccatattaaagttcctgttcattgacgtcatggttcacatatggtgcatatgtataattggaaatctcagaattgcattttcatgaaagaagatgaagataccaaatgccttactaagagtatttatttgtttgtcagttatttgcatggaaatgtggtaaagagagagcaatgcctgggactgggtgttagcattagtaagtcagagaaaaaccttctttgtaagaagttatatacgaagttgtcaactttaatttagcataaattaataactgaagactgaaacaaaacacagatggcatagagtcaatctggagtcttctagaatcctttattaaaagaaaaaacccatgagagaaaagtaaagattggaggtctcaaatcacagtaattgtattactcaaatcacaaattcctccttaactcgacacttaactcgatggaattttcatgatgtcaaagcatgtagatagttggataattagaaaygagaataaagaacagcttaatgaataacagaatct

SEQ ID NO: 838111 - DNA, 643 bp, Homo sapiens
agcccatttctgctggcaccacagggatccattgggagggtggccagaggagcagggggtaaaactccacagagagaaggaattttctagctgaactttgtgacaawttgaacagggtgagaaggaaagtacatgcatatgaaagtattttgaagccgtaattcgtgcctcgggggaggacacgaatcaggtgtgcagactacaaaggcgggggaagaactaaagcccttttctctcgcagctgagaggaggatagcctcgggcaagttttcaagcctgtctcgccctctgcctggaaatactctgggctgttgagaagagggcacggtggaagtaaggcccttcggtgtgtgtgggagcagggtgaggcctgtgactgccagcttaaccccacttccctgacaacctgcatgactcagcagagacagccgtaatcctcctaggtacacacctccagtgacctgggaatcttacccccatcccccacagcagccacagcaagacccacccaaggagagtctgagctcagacatgcctagccccgcccccacctgatggtccttacctatccacctggtagcagaatacaagaggcatttaatcttgggagttctagggccccacccactgctggtccctctcc

SEQ ID NO: 838112 - DNA, 551 bp, Homo sapiens
tgacacggatgtgttttgagaaatgcatcattaggcrgttttgtggctgtgcaaacatcacagtgtgcttgcacaaacctagacagtagagcctgctacacacctaggctgtgtggtctggcctactgctcccaggctacaaacctgtacagcatgttactgtgctgaatgccgtaggcaactgtaacacaatgctaagtatgtgtatatctcaacatagaaaaggtacagtaaaaatatggtataaaagataaaaaaatgatacacctgtatagggcacttaccatgaatggagcctgcagtactggaagttgctctgggtgagccagtgagtgaatggtgagtgaatgtgaggcttaggacattattgtacactactgtagactttataaacactgtacactatggccacactaaatgtgttaaaaatatttttctttcttcaataataaattaacattagctaactaattttactttataaactgattttttaaaactttgactcttgtaacacttaatttaaaacacaagtacattgtacagctgaa

SEQ ID NO: 838113 - DNA, 598 bp, Homo sapiens
ccctaaaatctcattttaattgactactgctttaaaagtcctatctccaaatatagtcacattctgaggtagtggaggttagggcttcaatatgtgaatcgcagyggtgggacacaattcaggccataacaacctataactagtagggatagtgaatcggaaatcagaaacctcccaacaaccttctagatgacatcactggtgaattctacccaatttttttttttaattaacaccaacacttctcaaactcttctaaaatgtaaaagagggagaagcacttccaaactcattctatgaggccagacttaccctaatcctaaagccagacaaagacattatagataagaaaacttgccacttgccattggctagtaacaagatcccccctcctacagtgtcaatggagaccacatgaaaagtgtggacttccacttctataggcaaaaatgaaacaccctttctcctggctggagaggttttagaagaggtctaatgaagagtcatgatgttcaccattgcccagcagcaatgaaatcacccccattgcagtatcagtagagaccatatgggaagctgaacttccacagacactgcc

SEQ ID NO: 838114 - DNA, 494 bp, Homo sapiens
aaggacctcttcaaggagaactacaaaccactgctcaatgaaataaaagaggacacaaacgaatggaagaatattccatgctcatggataggaagaatcaatagcgtgaaaatggccacccaaagtaatttrtagattcaatgccatccccatcaagctaccaatgactttcttcacagaattggaaaaaccgactttaaatttcatatggaaccaaaaaagagcccacattgccaagacaatcttaagccaaaagaacaaagctggaggcatcatgctacctgacttcaaactatactacaaggctatagtaaccaaacagcatggtactggtaccaaaacagatatatagaccaatggaacagaacagaggcctcagaaataacaccacacatctacaatcacctgatctttgacaaacctgacaaaaacaagaaatggggaaaggatttcctatttaataaatggtgctgggaaaactggctagctatatg

SEQ ID NO: 838115 - DNA, 567 bp, Homo sapiens
taatattttaatattcgaggctgcctagtgattccrtaatggctaaacccagttaaactcccattgatgatgctgattactctaggatctaattttctcctctggcttcatctaaaatcatgtttctcaacagctatcctttattgttttttaatcttactgcctggatattagtgaatctctagagttccaaaaactacatttgagtgttttaacaagtcagcccaacaatatatgtggtgagctcattaaacttaggttagagttcagactattcacctggaatattaatattcatcaatactcttaaaatcataggccaacttgacagcatatatgccagcatcagggttaccaacacctctgcccttcatgcaacagtagcacccgggatgagaccagtgtgtgcagagccagctcctggccccgggctctgtaattagcacccttagctgataccctccaagcagaaggaaaacgacacacacgaagtacgtcagtgaattgtcttaagtttttcccttatgaagtttttaaaaagcaataaacatctaactctaaattgtc

SEQ ID NO: 838116 - DNA, 484 bp, Homo sapiens
tttggaacatggtatgtagtaggcacccaataagtggtttctattaaaacaaacaaaaatgattctattttaggagggattatattgttgaagcacagtgatacaacaagctattgcctgttactagaaatagactctcagttcatacagtaatgtaattaaactccttttcaataagagtccatatgaacttttcttccaaaaaaaaataagaaatggaaaagagagggtggcattattttctttttccttgttcaaattctgacttaatcacttactagtagtatgaccttggacaagtttctgtagctaatattaactaccatgtaaagttttaagtagtggagctgtgaattcttgggaaagctacatastatctctgagcatcaatttcttcatctgacttgttcaaggtcacacagttattaagtgatggagccagcagttgaacccaggcagtctgaagctaaagcctactacacat

SEQ ID NO: 838117 - DNA, 603 bp, Homo sapiens
caaagacacaacaaataagaaaaccacaggcagatatccctgatgaagatagatgcaaaaatcttcaacaaawtgctagcaaaccaaatccagcagcacatcttaaagttaattcactataatcaagtgggctttatttctggaatgtaagatttgttcaacatatgcaaatctataagtataatttgtcacacaaacagaattaaaaaccatatgatcatctcagtagacatacaaaaagctgtcaataaaatccaacatcctttgataataaaaaccctcaacaaactagacatcaaaggaacatacctcaaaatattaagagccatctatgagaaattcacagctaacatcatactgaatggacagaaatttgaagcattctccttaagaactggaataagataaggatacccactcttaacactcctattcaaaacagtactggaagtcacagccagatcaggcaacagaaagaaataaatagcatccaataggaaaagaaaaggcccagctattgttctttactcacaatattattctatatctagaaaaccctaaagactctgccagaaggctcccagacctgataaaaacctttag

SEQ ID NO: 838118 - DNA, 546 bp, Homo sapiens
agttttgcaagggttttgatgggaaatttgtaggcacccagcttatagttctatttggctccttctgacatatttttgcttcytactcttaaaatacctataaagggcacccatttctcttcaattaaaaaagtaaatagactacattggcatggttaaattcccagggcccttagttttttattgatagactaagtggccggtatcattgcttacaaaagtgtctggaccttgatggagtttatgttagaaaacaaagcttatattttttatttttattgttgaattcaaattttccataaacttttgaagtcccctcatatgctaagggctttaatggaaaagcagacaatatgcaagaacagatggttaatctaagaagcaagattgacactttaagaatcagaaggaaatgctagaaataaacactgtaacagaagacttttaaaaatttatttgctaggctaatcagtaggctagacatggctgaagaaagtcagtgagcttgaaaagatgtcaaactgaaatgcaaagagaaaaaagaaa

SEQ ID NO: 838119 - DNA, 546 bp, Homo sapiens
agttttgcaagggttttgatgggaaatttgtaggcacccagcttatagttctatttggctccttctgacatatttttgcttcctactcttaaaatacctatwaagggcacccatttctcttcaattaaaaaagtaaatagactacattggcatggttaaattcccagggcccttagttttttattgatagactaagtggccggtatcattgcttacaaaagtgtctggaccttgatggagtttatgttagaaaacaaagcttatattttttatttttattgttgaattcaaattttccataaacttttgaagtcccctcatatgctaagggctttaatggaaaagcagacaatatgcaagaacagatggttaatctaagaagcaagattgacactttaagaatcagaaggaaatgctagaaataaacactgtaacagaagacttttaaaaatttatttgctaggctaatcagtaggctagacatggctgaagaaagtcagtgagcttgaaaagatgtcaaactgaaatgcaaagagaaaaaagaaa

SEQ ID NO: 838120 - DNA, 463 bp, Homo sapiens
gatgatcacttctattttcttgatgaggtaggatgtaaggtaacatgctgagaataagagggataaagagggttgtggatagggtttttgaggaagcagtaaaagacacacttgctcaycaaaaaaatgtctctgctgagcctgtccctgatttctcaaacaaatagctaggattgcgacataatgggatttcatgctgttctcctgttctggtgcaactctatgaacatttaaagtagttctgtttaaaagctcttttaggagcacagctacacactagcagacaataagagatgcaagcagaactcaactctgaacttgtgaaacgcagatttacagcctaccctagagattctgattcattaggtttggggtgaggtccaggaatttttcataagtaccacagatgattttgcacgctgtgataaacactgctctgagtggctcccaaacagaagctgtt

SEQ ID NO: 838121 - DNA, 260 bp, Homo sapiens
aaaatctcctggaatgaataagcagttatagcaaggttgcagagtacattcttaatataaaagagtcagtcgtctgtatactcacaatgaataaraacaatttgaaatttaaaataatacatttacattaacactcaaaaaaataaaagtctaacaaaatatgcactagctgtacatgaagaaaactataaaatttttatacaataaaccaaagatccagaaaaatggagaaatatttcaagtaataaacaggaagaatc

SEQ ID NO: 838122 - DNA, 548 bp, Homo sapiens
aaatactaatttcactttttttaaaaaagggtgctgtatataaagctggactatgtgacaggctcagaaaattttattgttctctttgaatctggtatttgggggtcccagtatttataagaaaaagctgaagagaaatgaatagtagtttctgaggaaaagaattagggctggactcaggagcactttgagtgctggactccaatgagtatctgccagacctttttttttttttttttttttttaaacaacaaactattggactgataaggtgaatttcactcttagggatatgctgagttatcaaacaggataaaatgcaatacagtctcaagaagtgttaaaaggtaaattgaggcacaataaaattttaaaattgagtttatttgagcaaacaaaattaatgaattgggcagctccaaatcagaagttacttgtggggtccatcatgggaatccragggaaaggcttttataggatgaatatggaagtaaagtaaagaaaatatttgatagattactattatacagttaccttatttggtcttt

SEQ ID NO: 838123 - DNA, 613 bp, Homo sapiens
catcagatttaatatcacccaaagagtaagaagatgcctgcacaagactgtccatgtgtgggtaatttaacagctaagaatcatcgtcatcctgcagtgaaagctgtccttggagctcccatcttatacttttcttttgattccacagcccagctaaaattagtattagcaaatattgctggtgccctgccttaaatggagaaatatggagttatctgtgtagaagttataaaattatagggaagaaaagcccagccatttcaaaatcaccagttattttatcatttgacagatactttctactaggatgttgaaatgtcttctgagcttaaatagcatccacttttaagattcgtagaaagtcagatagcaaatattttgggttttgtggtccatacatcctctatcacaatgacatgactatgccatattagtgaaaaagcagccataaacaatacataaatgaatgagaacagctgtaattctagtaaaactttatttacaaaagcaggtaccaggttggatttgactcctgcgctatagtttctgartcctatactagagaatttggtaactggaatgtttaaagacattggatttttatcactattat

SEQ ID NO: 838124 - DNA, 581 bp, Homo sapiens
accttatactttgttataagcaatagggtataacatcagaaaggcttgacagagcagartcctggggcatctttctgctgtgtccttcagtagcttggcaaatttgggaaacaaccctgcattctcacatgtcagtttcctcataagaaatgggactactcaatcctcaagttccctcctaaactgaaaattcatttttttctcattttttaaagtatgtctattggagaattacttctatgttcttttaatggtccttacaggtactacagaatattggagaaaatgctcccttagaattatatccatacagaatactcagcaccttctaaattccctgatcctctcttcctcttggagaattgtccatttgtgagcagaccccactgtcaaagagcagctgattcctgttggtttagggaagcgtctagtgtgacttgtgttcagcaaccccttgtctcttttccagagcaccctgggaatataacttgccaaatcgctttcaccctaaaattggcatgaaatgtgcccattcgggcttcagagaggcttaactaataaagcaggaggttgctgaggaa

SEQ ID NO: 838125 - DNA, 559 bp, Homo sapiens
tatttatgttgctgaattcaccatcgtggggatcacaggaagaggaaaactttttccagtagctcaggagctgcttatgtcgctgaattcaccatgacggggatcataggaagaggaaaactttttccagtagcctgtagttgcaaaagataataagctttccaacctgtgatcacctggagcaaacggagaggaaaggagataaacgaggagtgttgcgtgcggagtggagggaggctccctttctcctcccatcaccaactcctccttctcaggccaggcttttaatcaggctccccgcgtgcagtcagagagggcaaagccagctcccgtctcagcctcccgtaggaagatctcccggcctcacctgagcgccccgcagccctgggtacctctgctcccgcccagggtcctatggcccctcctcccagcacccaacactgggaccccacctgtacccaggctggcctccctsccccgcagcttcctttgcagccgccgtccgcgggtctccaggcgtggccacacctcccggggccccgcaagggttaaggcagca

SEQ ID NO: 838126 - DNA, 580 bp, Homo sapiens
tgctaccacacctggctaattttcgtgttttttagtagagacggggtttcaccatattggctgggctggtctcgaactcctgaccttgtgatccacccacctcaggctcccaaaatgagattacaggcgtgagcaaaatccttttatatctgccattgtaaaaggtagaaatgggacggatcttcattttcttctcgttttttcagttttgctaccttatgtttatcagttattttaaattccttttctaaaattgcatgttcatgttgctttcttgccttatcttttaggctcttgggcttttaaaaaatttagtgatttgcaagtattcttttaaaaattgaagtataatagacatacagaagcatcattgatgaaaatcccatagcttaatgaagtttcacaaagtgaacatagctgtgtagccaccactcacactcatcttcccacctgagaagacctgttcatgccccgtctttgacaccgctccctgccctggaggtgaccaccagcytgaattctaccactgtggatttgctttgtctatttttgaactttatacaaaccaaatcatacatag

SEQ ID NO: 838127 - DNA, 609 bp, Homo sapiens
aatactctaaagaaaataaaataaggcctaaatctaagaaaacacttatgagatctatatgctgaaaattataagagtctgataaataaaaagccctaataaataacaraaaccacattcttggtttggaagattcaacacagtaaaggtgtcaatttttcaaaatttatttataggtctaattcagttctagtaaaaatcccagtaaggttttttttgtagatatagacaggttattctaaattttatatgaaaggaaaatgtcccaatagccaaaacaacagagaaagaagaaaaaggtaggatgaatcacttttcctaatgttaaggcttattatagagctatggtaatcaacacaatataatactggcaagaagacagacaaatatgtcaatgaaacaaaacagagactggaaatagacctataaaaatatgttcaattatttctgacaaagatgcaaaagcaattcaatggcaaagggacagttttttcaacatacaatgatggagatatcagatatcaaagggcaaaaagaatagggaaccacaacctcacactttatataaaattaaatcaaaatgaaacatgaacttttatgtaaaactta

SEQ ID NO: 838128 - DNA, 576 bp, Homo sapiens
accactctcccatgctctcatcataataatttcatttcctcatttaatctattctcagttactaattcagaaaacatttaatggtgagccccatatcttaaacctaagtgggcacaggagagtgagaaagcaaaaccccagtgcagcatcaagcagacttttagttacagctgctctagctggaggggattctgtatggtgagaaactgaaaataaaactaaaggaattctgagtagtgctgagtagatatttttttctcttgccttcaaaatcgctacaaaaaaagtcactgaaagaatactctggcacacaaaggcagcttcaaaaggcataactgcaaattagtagaaattgtatttgggatacttttatagatttgtgatgtaaataagaatatttgaaaatatagagccacataattattgctggtgtgtacttacttatttaaccacatgactaagctcagctggcaccatcatagaggtgagctgtccaggtgagccctgactgaatcaccactctgtagaatcacattgtcttgtaacacctggatccragctgccatcatgggacca

SEQ ID NO: 838129 - DNA, 572 bp, Homo sapiens
ctggatgagatcctggaacagaaaaaggatattasgtaaaaactaaggaaatctgagtcaaacatgaagtttagttaataataatgtatcaatatttattcattaattctaacaaattgccatactaatatacgttaaaaataaaataaactagatacagagtgttttagaaactgtatgtaatatcttcactttttctgaaatctaaaactgttctggaaaaaattaattgcaaaatagttaatacaatttatttaattattttctgcaaacaaagataggatccatagacacatacaaggataaatgtgaaagtttaagaaagaagcacagataagggggctgacaggaagggagaaatggcagagtgggatggctgagtgggggaatggggaacgtggacccagatgcagccacttttgtaagatgtactgcgttggctcttagtgtgcttttgctcttggaacctacaatatgtttcgaatttagaaacttttgtattataaaagtaattaggatatgttcctgtagaaaattgtaaaaatcagcaaagtagaaaaaaaaagagaatg

SEQ ID NO: 838130 - DNA, 596 bp, Homo sapiens
tcaccaaaggaactaaaggtaccagggacaagtcctggagaaactgaaatatgtgacctttcagacagagaattcaaaatagctgtgttgaggaaactcaaagaaattcaagataacacagagaaggaattcagaattctatcagataaatttaacaaaggattacaatgcttaaaaatatcaagcagaaattctggagctgaaaaatgcaactgacactgaagaatgcatcagtctcctttcatagcagaattgatcaagcagaagaaagaattagtgagctggaaaacaggcaatttgaaaatacacagaggagacaaaaaaagaataaaaaacaatgaagctcacctacaggatatgaaaaaaaatagcctcaaaagggcaaaactgacagttactcaccttaaagagaaggcaggaaagagataggggtggaaagtttattgagagtaataataacagcaaactttccaaatatagaaacaaatatctayattaaagtataagaaggttgtagtacaccaagcagatttaagaagacatttaaagggcatttaataatcaaactccccaaagtcaaggataacgaaaggatc

SEQ ID NO: 838131 - DNA, 484 bp, Homo sapiens
agagataattgaataatggggatgatttcccccattctgatctcrtgatgatgagttagttctcacaagatctgatggttttataaggggttcccccttttctgagcactaattcacctccttgctgctaccatgtgaagaaggacatgtttgcttcccctcgtaccatgattatcaacttcctgaggcctccccagacatgctgaactgtgattcaattaacatctttcctttataaattacccagtctcgggtatgcctttattagcagcagtgtgagaacggactaaaacagtaaattcgtactgcagagagtggggtgctgctataaagatacatggaaatgtgaaaatgactttggaactgggtaacaggcagagattgggacagtttggaggtctcagaagaagacaggaaattgtgggaaagtttggaacttcctagagacttggaagtctcagaaggcaggaagatgtgggaaagt

SEQ ID NO: 838132 - DNA, 565 bp, Homo sapiens
ctgttttcttttcttgaacctctgatgtactattgagaatctatttggatccacaggagaggagtgaaagtttgtgtttaatatttgaggtatgctgattctggaccctcatttctgtaggatatttatgcaaaagtaacagattacagaaccagttcagaatgagcttaatgattttctggttttaggttagatgatagtttggaggacaaaatggattttgtcatttacaggctattactgagatacaactattttatccatgatattggccaatgattccatttatctcataaattgaaaggcatagaaaaccggcattttaatacactgatcacgagagaataaactataaagactttcctcaatcttaaaaatgtgaatcagggtttctagattcatattgaagttgataatgtatgtttgtaacctttccttccatggccctctccaaaaactaawgtaggaattgaaaagctatactatgataacagtgaagagaatgacaggggtgcctatatgtacatgagaaattttgtcaaataacttgaaaacagagcagata

SEQ ID NO: 838133 - DNA, 617 bp, Homo sapiens
agtcatgagccggtggggcctttttggttttttgggtttttttgacatggagtctcactgtcacccaggccagagtgcagtgtcctgatctcggctcactgcaacttytgcctcccaggttcaagctattctcctgcctcagcctcccatgtagttaggactataggaacgtgccaccacacctggctatttttttctatttttaatagagacagggttttaccttgttaaccaggatagtctcgatctcctgacctcatgatctgccctcctcggcctcgtaaagtgctgggattacaggtgtgagccaccgtgcctggacacaatactgtattctaaaggccatctatctacctagagtgaattatgtttcttttctaaaaggtggaggctttaaaaatctttttcactatttatttagcctaaaccctttagtacttccttgggtcctgtatctgtccattggtagtcatgttcaattatccattaaaaatattacaaattggaatctaaaagcaaattatactttctttttctgtgttatctcttgtgggtatattgggttgtggacatactgactctagaggctgggatcctctagagaaaccatatttaag

SEQ ID NO: 838134 - DNA, 596 bp, Homo sapiens
ctcactctgtcacccaggctggagtgcagtggtgcaatgttggctcactgcaacctccacctcctgggttcaagcaattctggtgtctcagcctcccaagcatctgggattataggtgcctgccaccaaatctcgttaatttttgtatttttagtagagatgatgtttcaccatgttggccaggctggtcttgaactcctgacctcaagtgatccacctgcttggcctcccaaagttctgggattacaggcatgaggcaccatgcctctagccccaggtggctacaatccctccttaatggattccggtcttctttacagtactggttagctcctttattagtcccccttttgctcatgtgttttctactaatatttggaccttgtatactcaatacaataacttgaattgtttcctcttacctagaagctattaaagtccaaatggtgctgcaaatggaagcacacatggatatgtcgttcttctgaggacccttagattgaccccaggaggaaacctagttgctgttctccacacaacgcscctctccagcaggaagtatttagaagagtcattgttcaacaccccctaacagc

SEQ ID NO: 838135 - DNA, 439 bp, Homo sapiens
aaaatctctctatataagatgcaaacacttttattttttctgaaatgatctttttgtgaaaaaattaaaaaggttgctcaccagttgctaaaattaaatgcggaaatttccktagtggaattgatacatttgaatgctggcttcggggatcccaaatgtgattgcttctatcggtgcctgtaaaggagtctgtaattatggaagcagtcttaggctgtaggtaagatctggagccagggtggacctttgtatgttcagcaatgaggggatatttttgatgagctggaatatccaattgaacagctgtaacaaagtttctgagaatcttttcctcatggttgtttatagtttgcttccagcacacccagatctgacactttctggccttaaagttgcataaaacaccctgtcagttgtaggcagtaagacagggtcttgg

SEQ ID NO: 838136 - DNA, 633 bp, Homo sapiens
gcctagagaaaaacttttccttctttataattttcctgcttctattctgtttcacctaaatcccagagctgaaatcagcaatttaattgtcttcctttctcttcttccgtaagggtttgcagaatacagagctaacaagattacatggggcttagggggtcatgctgccaacaacataaggaggtctactactactgcctttattcaccatttttctgtgggcactagctgatgcacttggacaaaagagaaaaaggtatacatgcagaaagagagaaattggcttatcatgtgcatatgatatgcttatatgctatacaatatgctatttattacaaatgataaggtaatacagtgaggtggcttgacatagaattaatatacaaaaataaccgtagagaaaaacaacaaggtagaaaatagaatggaagcaaatgcttcattcatagtcaggataagtgagaataataaagatgaactacctctgccagatattgcatattttaaaycatattatggtttaaatatactgaatatagtttaatatatttaaactatatttaagtagtatagaattgatactgtgtagactgagaaatcagtagtacagaatagaaatggaaaattggcgtc

SEQ ID NO: 838137 - DNA, 436 bp, Homo sapiens
tcaatcaatcatctatctccctacccrtcacctatctttttccatctatttatctatacatgggcacatgcatgtaaacatagataagtatgtattttggaaagttttacttgcaaaggaatcctacattgggttccccctaaagcatatggcatgtcttgtgcatatctgcacgttccctggagcaaaatacgttccttctaagttctgtaatctgtcttgactgcaagaagaggatcctgaggcttttttcctaatagtttttgtatttaatggtgatgatgatatttaatttagcccgccatagtagtctgcaagggatgtccagactttttcttctgcccctgttttggggactcctgagggtcccttacccactggtctggctacttccacaaaccggtcattaatctttgagcaaatgagagtcaaactg

SEQ ID NO: 838138 - DNA, 436 bp, Homo sapiens
tcaatcaatcatctatctccctacccatcacctatctttttccatctatttatctatacatgggcacatgcatgtaaacatagataagtatgtattttggaaagttttacttgcaaaggaatcctacattgggttccccctaaagcatatggcatgtcttgtgcatatctgcacgttccctggagcaaaatacgttccttctaagttctgtaatctgtcttgactgcaagaagaggatcctgaggcttttttcctaatagtttttgtatttaatggtgatgatgatatttaatttagcccgccatagtagtctgcaagggatgtccaractttttcttctgcccctgttttggggactcctgagggtcccttacccactggtctggctacttccacaaaccggtcattaatctttgagcaaatgagagtcaaactg

SEQ ID NO: 838139 - DNA, 612 bp, Homo sapiens
cagtgactaagacagaagccagtccaagggaaggtaatccatgttcccctcacctcccaccctaggagctgtttaaaaagaaccaagtgtgaaattgtagttctgcacacttggaatatagcaaacccaaytcctgttgctcattcatttccaagagggagggacataaggactggaaaggttttactggcaacccttcagttggttattactaataaaatccccaaacagaagcacaattttacctgcatctaataataaacattaatcacagataattaccaataataagtagttaaccattgatcgcaaacttgctataaggtagctattattcccattttatggatgaggagactggtacatataggctaaattatttgtccaatatgcagccaaaactgataaaactagatttcaaaccgaggactaactccaaagcccattctactagttttagatccgtgaacttggacaaaccactatccaatgacatgaaggatgctacaaagttattctccatccctatcagacctatcaataaacaaacaaaagaaaattaattggaaatgcagcatgtgagattgtcagcatagatttcctggataatta

SEQ ID NO: 838140 - DNA, 551 bp, Homo sapiens
aggcatcagccaccgtgcccaacctcaaaggatattttaaaggatagaaataaacagccatatgaagagatacagacagggcggtctggaagggcccagagcaggagcttctatctccatagagttggggttacatcaccctccaggcacatggatgagttcttcaccttctgtcagcctccacacgttcagctctcagaagcttcccgaaccctgtcctttgggccttttatggagaactccattggctgtccatgactgaagcatggacaactgtgataatgtgattgggcaaaaagggtctgatctaagcccagcaaggccagtccagattctttgggcctttgtgcagcattcctttctccagggtatggggcaaggacccactctggaatgaggatcctacaacccacaatcagattagartcctgccttgggcagctgaaaagaggacaggagaaggtcaaagagaggaaaggctgttttttgaggcctgaggcgccccaacatgacaacgaaagactgtaaccatggtcatgtgagttatgagc

SEQ ID NO: 838141 - DNA, 553 bp, Homo sapiens
gtcaggaatactgacaaggctcagaggggccagcttgtttcattccaccgtatctagggtatcagctgggagaccctaagcataagagatggaatcatctgaaggatcttttatttacatacaggctttccaygtggcttgggcttcctcacaacatggtggcctagggcaagtgggtgggcgtaggggagaagaaacaagtagaagctgtagagctttttatgagccagcctcagaaatcctgcctcattacttttgctgcattctgtggttggagaaattacacatatagaaaacatggacaccacctttctattgcttcccataaaaaaaaaaaaaaggagtaaaactgatctggattcaaatcctagctcagtcatttctttgctgtgtgaattaggaaagttgactagagctctttgaacagtaataatagaatgttttaggtgtaataatttatcttttgcacataataaaatggaggcttaaagagcttcttggctccctgctggaataacatcttcagctgacaaagcatagcatgcatatctta

SEQ ID NO: 838142 - DNA, 499 bp, Homo sapiens
accaggccccactttcaacactggggattacaactggacgtttggagatttgggtggggacacaaatccaaagcatatcacctagctgcttgggaggctgaggtgggaggattgcatgakcccaggagtttgaggctgtagcgagccatgattgcaccagtgcactccagcttgggtgacagagtgagaccctgtttccaaaaaaaaaaaaaaaaaagaaagaaagaaaaataaaacaaagaaatattaagagtacaggagctgagcatgagatcaaggtcataacaagctaagaaagtcagagtgagtgtgtgatggtcatagcatgcccacagctttccttattttgtttatgtgcatgtcctcttgaactgagcaggtttaatgggaaaatgcaaggaaggatagtcccagtgcttcttactctggggtcttggactggcttcatggaaggactccatgggcagctcctgtaattgtctgcagtattttgtgtaca

SEQ ID NO: 838143 - DNA, 577 bp, Homo sapiens
actcacactgttctgtctcattgcctgggatcctccattggaggtgcactaccttgtcatcttaagagcctttgagataagtgttgtcaacaattcaacatgtggttggcatgacactaaatattcagatacatgcatctccattactgggattgtataaagatagtatcactatcctaaccaaattaaagaaaacctacccaagatgagattcacatgcttcttattttctgaaactgaaggtacctcatgtctccagaagtgccatgaattccaggccccaagcctagaaaaggaagcaaaagtgtagaaagaaaaaatggccttgaaattagagtgggaaacaagaaacaagcaaggagtaggaaagaagagcggaaaaggagatgctggcagtggtgacagcaaagagaactatggtgcccattttctacagggaagcaatgatttgttcctcatgagccatgaatcctttctccctggactcaccttattccactttgtctcagggcctggaatcccacctttagggatgagctmctttgcacacttaacagccttttagcagtcactgttt

SEQ ID NO: 838144 - DNA, 668 bp, Homo sapiens
aaaatggtggctgcagctccagccaacgcactccagtttcatttagaaaagagagagggaaacagaaaagggtaggatctgcatmtcatgaaaacaaaactttctgagaaatcttcagccttggtgttttggtcagaactgtgacacatgactatctctagcagcaaagaaagctggaaaatatgatttttcagtgaggacctttctaccacatcacctccctgctcccctgaaaacaaaacaaaacaaaacaaaaacaaaatttctcttaataaggaaaagaaaatggatgtttgataggcaaccagaggtgtttgccatgtcagctatgacaagattgaatccgagaaagaaccaagttggagccaggaggtcttaagcctgacatgactagaagatgcgtagacaataggcccccatgtttagtatgaaattgccctgccctgtgtctcgttctcaagactgagtgccaggaaaccaggtttacaaacatgtggtcttcaggacttcacctaccctccatctctgaaaacaaaaggctgcaatgaagatcgtgttttatagattgggcgtcacttttaatctctacatgtattagtcagttttcatcctgctgatgaagacatacccaagactgggtaatttataaaggaaaagaggtttaatgg

SEQ ID NO: 838145 - DNA, 636 bp, Homo sapiens
  misc_feature 1, 2, 3, 4, 5, 6, 7, 8, 9, 10, 11, 12, 13, 14, 15, 16, 17,18, 19, 20, 21, 22, 23, 24, 25, 26, 27: n = A,T,C or G
nnnnnnnnnnnnnnnnnnnnnnnnnnnatctattagaagaagtttggtagccactctccagggttcttaacatttctatagaaattaattaaccgccaggtggggggatcacatgagaccaggagttccagacagcctggccaacatggagaaacccagtctctacaaaaatacaaaaattagccgggtctgttggcacatgcctgtaatcccagctactcaggaggctagagcaagagaatcacttgggcccgagaggaggagattgcgttgagtggagagagcaccactgcactccagcatgggcgacagtgtgagaccctgtctcaaaaacacacacaaaaaatttattaacgatgaaggccatggagccactctaagaacagctgctatactctgttgctgccacaactgtgagagggatttctgggactctggatctcccatcaagatctggaataagaagtccagccacatgattcagaagaatgaattactggaaggacctgagcataccctcttccatcctggacagatattaggttcaatttatatraagtaaccggcctattttctcaagagcagatccactctaccaagtgatgacataagaatgactcagagctttataaatct

SEQ ID NO: 838146 - DNA, 666 bp, Homo sapiens
taggaaacagtaggctgtgatttagttgtgccttttcataaaggtgtgctgttacagtagaacatrgcaggaggagaaaatgtaatgctccctatgaacagtatgtatgatcaattatttcccattattgttgagaattagatagcagtttttagatagcaggggttatcattttcactttgactaggtcatacaatgtacacattattatctgaacaacattggcaatgtaatcaccacacaggtatttatttgctttttatgtaagacctgatcataaatgtgaaactagtggaaaaaagaatatatgttaaaaatattttgaagtatatagtagaaatacacccaccagcaggaaaccttcacatatttatatttgaaaattgtgttaaagatattcagtacaatcctagaccctagagagaacagtggctttgacatgtgacataataaccatagttgatctatattgaaatttaaaatgtttccaggatttctttgatataggtgactttcatttaacgtatgtgaacagcaggaaaaaaatgtatatacttagggtcatttgaaaccaccctcccaaatccattacttaaacatttctggagtaaaataatatttatttcctgaggtatatttgatagtttaactcaggtcccactatta

SEQ ID NO: 838147 - DNA, 629 bp, Homo sapiens
acgtggcttgaggcattacacattttcagataagcttttgagatctgcatgccagtctcatatactctgacttcagaatagacccaaccagcgaaagataataattagccccctctacacaatagtgyatacatagagggctacttctcatcctatacttttctctttccttcatcaatctgccaaacttcactataatctaaagataatggtggaatatatgtatcgtttaaaaaaaactagagagattttaactgttcctgttttatattgtgctaattaaacgcaaagacttggcaatcatggtcataggttataaggttatattaagatatatatactaacaggcactgctattgggaactgaacagatgttgctctttcagaagaggaagggcacatcagtcaccttgggacacttcaaaaaataaggctcaatattacagaatagcagtaggaaggaaactggtgacagaaaaacacttctttgcatatatattattttggactgcattcttatttaattttagtgttaatttccacttttctttctttatacaagttgcttttgattatttcaaggaaggaacctgagatcctccatggttaacaataagaagcagttttcc

SEQ ID NO: 838148 - DNA, 602 bp, Homo sapiens
gagttttttgattagacaaataatatcgattgcaaagttgtttgtgtatagatgcagaccagctgtgtcactcagaaagtctgagaattttcagtgyttctgagatgtaacaatctagtggacagaacactagcatggaatctaacctctggtaatggcatgtggagagagtttaggttcacattaaaaaatgatttcataataactttaaggcactttccaggaatgttgtgaacgtatgtgtggtgatttaaaatatattcatgaattctttgacactgtcttccaaagttggagtttaattctcctagttttgaatgggggctagacttttcatttctagtgaaaagaaaaaggctgaattaacagtgggcaactagagagatgaggtcataaaagacatcgtggcttcctagttgctttctctcttagatcactcattggaggaaggcagttgacatggagtgaggtcacccaagaagtcctgtggagaggcccatgtggggaagaactgatgctacctgccagtggccacgcacatgaacttggaagcagatcatccagccctagtcaagccttcaaatgactgcagctctgaatga

SEQ ID NO: 838149 - DNA, 567 bp, Homo sapiens
ttggcaagttgacttagatgaatatcaatttcttttgcataaagcgaaattggaaaagcacatttgctgagctttatttggatgtatctagtaaaagcattgcttcatcgccttcttcagtttaaagtatttgtttgaaagagccagctttttctagataaatgatgcatatgaaaaagaagcaggattaaattgctttataaacattcatatcttgaacactagcattcccttgctgcctcgtgttcttttatcttctcattcttattctgaacagcagcagtacattggagctattctgccacaaattttaccagaggaatttaacaaatttatagtttaacaaaaagtgaattaatttggtctctttttaaaacatttatcttagatgattcttttaaatgcttttagtggtctgctttcagctaaaaaaaaatctaacttgtatttgcttttatgctaaggaaacacatggtttacttttaacttctttaatatttagattttttaacttccttsatacttaagtaagttgtaactttctttggtcaagtttttttttttttt

SEQ ID NO: 838150 - DNA, 579 bp, Homo sapiens
ggattatatttattgatttacataagttgaaccagcctcatatcccagggatgaagctgacttgatcgtggaggacaagccttttgatgtcttgctggattcagtttgccagtatttttttgaggattttcrcatcaatgttcatcagggatattggcctgaaattttctttttttgttgtgtctctgccaggttttgatatcaagatgatgctggcatcataaaacgagtgagggaggagtacttctttttctattgtttggaacagtttcacaaggaatggtaccagctgctctttttacctctggtaaaattcgactgtgaatctgtctggtctggggctttttttggttggtaggctattaattactgcctcaatttcagaccttgttattggtctattcagggactcgacttctttctggtttagatttgggagggtgtacgcttccaggaatttattcatttcttctagattttctagtttatttgcataaaggtgtttatagtattctctgatggtagtttgtatgtctgtgggatcagtggtgatatcccctttatcattttttattgtat

SEQ ID NO: 838151 - DNA, 663 bp, Homo sapiens
aaaatgcaaaagtaaaacatcatatcttccccagaacttatcagattaggtagcatgtctctccccaaaatgtatatctttaaaacatgtatataaaccaattaacatgtaaagaatcaaatacttactggtaacccctgcaatcctgcatcaccaggaggcccaggttttcctggttcaccctgcaaaaaaagcttttatcacatgattgaacctgtatgagctgctgtatttcttttaagaaacagaggagcacagacgttttaagtaaaaggattgtcccaacagctgactttacatgcacttttataaagtgacttaatttagggtgggggagtagggtgggaaataggacataattcaaccaaaatgcacagtctctctcaacttactttcatcaacagggcaattttactgagttcctgaaaccaagcaaataattatactattctagtaagtatttcatatttgacacttgattcaaaaattaaaggaagggaaaaagccaaagctagctaaataaatcttttggtgatttagtaatggaaatgccacactcagytggccagggcagagacagccccactcactcttggagtaaattacacagcctacctttgttccaggcattccagggatcccatcacggccatccacacctgg

SEQ ID NO: 838152 - DNA, 537 bp, Homo sapiens
tttattgatttttagcatattgatggaattgtgcaaccatcaccccaatcaagtttagaatatttccatcacctaaaaaaagaatcttataccccacctcccacctgcagtcatccatcatttcctcttaattccttcagttttagacaaccactaatccactttatgtctctatagatttgccaattctggaagtttcatataaatggaatcatacaatatgtgagctttttgttttttaaaaataaatagttaattttttaagagatatggtgtctctcaatcacccaggttggggtgcagtggcgcaatcgtagctcacagcaaccttgaactcctgggctcatgcagtcctcctgcctaagcctcccgagtggctgggactgaaggggtgcatcaccacacctggctaactttwaatttttttttgtagagatggggtcttgctatgttgaccaggctggtcttgaactcccggcttcaagagatccttctgcctcagcttcccaaaatgttgggattacagacatgagctac

SEQ ID NO: 838153 - DNA, 582 bp, Homo sapiens
  misc_feature 1, 2, 3, 4, 5, 6, 7, 8, 9, 10, 11, 12, 13, 14, 15, 16, 17: n = A,T,C or G
nnnnnnnnnnnnnnnnngcaacttatgtctacatttatacatttcaacaatataattttcagtgattatttrttttcatctctaatgattagaagctctccacgatatgtcataaaataataaatgttgacaatggtggaaagcctttacatgtcccttgttgaaatgaaatagtatgacatattgttgttttcttccaactctattagtaaagagattcacaattttattataaaccataaaagattccatgcctgctaagggtgagtcaggcatggagcggtgaggggtgtgtgagcaagtgtggggtctggccattgcacagtcagacacgccaactgctgcaatgtggtgggcagctccaggttccagaatgggtgacagctctctatgacgctacagctagaccaagtgcaatgcaagcagcttcaatgacttgcaccagggaacatggtggtgcccagaagcttggagatttcaggaaccacagggccccaaaaaggaattcagagccctaactcacggaactcccaagtctcagctctccaaagggctgtagctcttctgtcctcttcacccaca

SEQ ID NO: 838154 - DNA, 561 bp, Homo sapiens
agtacgcatattaggttcaactacataaaatagccatttttgaagattacagatagttgatggtgacaattccatgtgtttaaactctctaaaatatcataccaacatcagaattaactagaatggtgtcactttctagctgtttatttctagaaaaaaaaagttcagatacctgtatcctattcttgtccctaaacagatgctaacataattgtacagctgtaactctgtaactcctatgctgtgatattaagaaagtcttaattttaaaaagacaaaattagaaagtttataaaattgcatgcaaaattcaagcttcaaagtttgctttttctcagttccttgaaatcttccagtggacttgtcttccatcctatcatagctattcctattcttagctatacctgaggcattcactcccatctttctaattcattccctttaatatcccaactcctacaatacttccatccaattgggatttccaatccattgactttaaatctcacccactgaatakgcctccttctctccttgctcggcttaaattccatggacatc

SEQ ID NO: 838155 - DNA, 600 bp, Homo sapiens
tctttcaataaacagttattataataattattataattcatgtttatagaattatatactaaatactacaccaccatgtacaatacatattagaatcatatactagatttactatccttttcagctttatccaaatatttgatcaacttgccactaatctcctcatcttatatattatcaaaatgttgaactagttagtacagggttaatgagaactgttgaactgacatcctttaaaatatctccttccaaaggggcatgtgcccattaacttttggcctttgtaataaccaccaaagaagttcgcttcttcaatgtcctattctctagttccatgtctccattttgcctacaggaatattttgtgaaactttgttaaatatctattgaaatccagatgcactatgttataagaatttttctgacctttgagaatggcaagctaacaaataagataaaataaaataaatcaaacacgtctgttcttactgagcctaagctarccaccttcttataattaaatgttacatttttagccttcaaatttttttgtttgttgttgttgttgtgtttttgagacacagtcttgctctgtcagcc

SEQ ID NO: 838156 - DNA, 293 bp, Homo sapiens
tatgtgacaaacatctgtacagtaatcctcccttacccaggaggaatatgttccaaaaaccccagtagatgcctgaaatcacagatggtactgaattctttatatactctattttttcctatacatacatacytacgataaagtttaatttataaattagacacagtaagagattaacaacaataataatacaattaacaattataacaatatactgcaatgaaagttgtgtgaatgtggtctctctctctctctgaatatcttattgtactaccttggcctatttttgtact

SEQ ID NO: 838157 - DNA, 568 bp, Homo sapiens
taattcagtggccacaatatcattagtgatgcagcttcattcatctttcctttctgctttaccccatgggtcagtggctccctcaggccagaatatgactgcagtggcttaggcatcaccccgcactgagccacctgtagaggaaaaagcctgaaaggttcctatggtgtgtcccatttgtaagagtgaggagaacactctcagaagccttcctgtagacacccatcaagtctggttgcccagattatgtacctttctcttgcctaaaccagaaaccagctaggggaatgacattgtcttacatcaatcaaggtctaccccctggggcatgagcctggccttccttgaagcatgtgactactgataattgaaccaagtttgggttccatcagcaaggaggaaaggagacaaacaactgttgaggaggtgaccaacactgtctgccacagtagtgcaatagtggtctttctgaactacaggatgatagttcttttttttragacagggtctcactctgtcacccaggctggagtgcagtggcaccttctccagacctcccaagcttaag

SEQ ID NO: 838158 - DNA, 444 bp, Homo sapiens
ttagagagcaagaatttttgtttatttctttctcttcctcctttcctttcttcctcttttacttcrttcactactgtattccacataaaatatatttggcatatagtaggtgttcaatatgttgaaggaatgaaagaatttatagacttgagttgcaatataaaatgtatttttttttactgtgagttatggcaaaaaaagttttgaaagccgcttctaaataatgcagatgtcagtgctttgtatgaccctggaataaaaactgaaatgacttagtgatttcaaaggcatatttgttttcctgaacaatctataaactgtctcattaagttgtctcagttatttgcttcacttcggcaacagaacctcagcctttacatgtgtttaaagcctcttgaggcaaaggatttggaaaatatggttacatggagaatagaagataat

SEQ ID NO: 838159 - DNA, 444 bp, Homo sapiens
ttagagagcaagaatttttgtttatttctttctcttcctcctttcctttcttcctcttttacttcgttcactactgtattccacataaaatatatttggcatatagtaggtgttcaatatgttgaaggaatgaaagaatttatagacttgagttgcaatataaaatgtatttttttttactgtgagttatggcaaaaaaagttttgaaagccgcttctaaataatgcagatgtcagtgctttgtatgaccctggaataaaaactgaaatgacttagtgatttcaaaggcatatttgttttcctgaacaatctataaactgtctcattaagttgtctcagttatttgcttcacttcggcaacagaasctcagcctttacatgtgtttaaagcctcttgaggcaaaggatttggaaaatatggttacatggagaatagaagataat

SEQ ID NO: 838160 - DNA, 507 bp, Homo sapiens
aaagcacttggaaagtatctaaaattatttttcactcaacgctatatatttctctgtctaactatgacagtgctgccrttcagataaaagtatttatggtggtgtcagttcatatcaagcacattgggacagtgagaaaatgtaatctagatggaagaaaatttcatctgattctcaagagtccatgctctactgtaatgcattagaaattactatcagaatgttgtaacctgcacatcatcccatctcatgagacattcattattataatagaagtgcctgaggctttttttattctaatactgtctttgtaaggcaactgtataaacagatggttagtgtaaatacagtttagtgcttcctaataattatttccagaaaaataatgttggcagaacagaaataattttgacacctgtttatgtctacataaaatgaatgttgacatagatattcaaaagggacttcaaccatttttcaaacatagtatatctttgttcttattgc

SEQ ID NO: 838161 - DNA, 613 bp, Homo sapiens
aatttatagatgcttttaatttttcttgctwtttaaatttctaaatactgcttgtatgcattttaatttgcttattgatctatctcattattcttgctttagtctgcattattatttatcttattgctaatactgatatgcctgtagcatctttttcccaatcctacttttaaacaatcatgtcaatggcaagtgatgattacttgctgtctttataatcctcatgcttgtatatttttctttgttctagctattgcctcctacaatgttgaatatacatactgataatgggcctccccctgattatgaaggagatacgtctctcaatactcattcagagttacgtttattgaaaacatttttactttatgattattaggttaaataatttttggcatattccaaatatcctaaggacttctgtctaagcattttttaaaagtaacaggcatcaaattgtatcatttttaacagagtgagacaattcttttttcccataatttagcaattgattcaaccatccattgatttttttagtgtaacaaagttattttttatttctagaggcttccatttcagttttatttccaagtgtttttctcacaccttgtgg

SEQ ID NO: 838162 - DNA, 599 bp, Homo sapiens
tgcaaatataaattgtttatttgaagctttgctctttttagatttatgtgtttattgctaaaaatttccctcttactgctacatttgctatattccatagcttttggtgtgttatgtatctactttcatttgtttcaagaaagatttatttgccttcctactttcttcactaacccagtggtcattcagaagcatatggtttaacttacatatgtttatatagtttccaagattcctcttactaatttctagctttattccatttggtcagaaaaggtatttgatattgtttcaattaaaaaatgtttttgtgtggcctaacatatggtttatactgtattgtctgtgtacttactattcccaagtgagtggtgatttcttgttgttcatcagtgtccttttcttccagactgaaaaactccctttagcatttcttataacacaagtctggtgtttacagtatttcccagctttgattgtctgagaaagtgttcattttttcttcatgtttgaaagacaactttgctggacatarcattctagattgaaagatttttttttttttcattcaccactttgaaatgtcatcccactctctc

SEQ ID NO: 838163 - DNA, 625 bp, Homo sapiens
ggtttccactgagatgtctgctgccagacatataggaactcctttatatgttktttgcttcttttgcttgctgattttagaatcctttctttcatccttgagctttgagattttgattaacataagccttttactcttaattggatttagtcttcttggtgttctatgaccttcttgtacctcaatattcatatctttcaccacaattggaaagttctttattgttatttctttcagtaaaatttccactatggtctctctgtctctacatcctttttatggccaataactcttatatttgcccttttgaagtggttttctaaatcttgttggcattcttcattttttcaattcgtattttcttttttctcctctgactgtattttcatatagcctgcttcaagctcattaattctttcttctgcttgatcaattctgctgttgataggtactgatgtattttcagaatgtcaattaaatatttcatttttagtttttctgtttgacttttttattattttaatcatttaaaaaatttctctgaaagaaatttgaattccttctctctgttatcttgaagttcatagagcttcctcaagacagctattttaaattcttactctgt

SEQ ID NO: 838164 - DNA, 625 bp, Homo sapiens
ggtttccactgagatgtctgctgccagacatataggaactcctttatatgttgtytgcttcttttgcttgctgattttagaatcctttctttcatccttgagctttgagattttgattaacataagccttttactcttaattggatttagtcttcttggtgttctatgaccttcttgtacctcaatattcatatctttcaccacaattggaaagttctttattgttatttctttcagtaaaatttccactatggtctctctgtctctacatcctttttatggccaataactcttatatttgcccttttgaagtggttttctaaatcttgttggcattcttcattttttcaattcgtattttcttttttctcctctgactgtattttcatatagcctgcttcaagctcattaattctttcttctgcttgatcaattctgctgttgataggtactgatgtattttcagaatgtcaattaaatatttcatttttagtttttctgtttgacttttttattattttaatcatttaaaaaatttctctgaaagaaatttgaattccttctctctgttatcttgaagttcatagagcttcctcaagacagctattttaaattcttactctgt

SEQ ID NO: 838165 - DNA, 620 bp, Homo sapiens
ttgtcttattattttccccagtgctgaattatttgaacttctaaggcctttttatgtgggtgtagaaagataaaatacatcaaactgaaccttttaataaaatttcaatgaagtgataaatcagatagctattgcaaacaatgtagaagtacacttgtgccattaaatgatgcaagaagctcatctagcataaatgagttgtttggaaatcaaagaaacatccctctgtttaatatttcctgcaaattgatccttcaaactctattttttagcaaaataacttgttgtctttgaattgggatatttgcaggtatttatcagcaataaccatgttttcaattacactaaagtctcaaagtttgaaagtacaaacctgttattgtgtatttattgacttttattttaaagtttaatttgtaccagtgaagaactccagtgccttctatattagaaagtaatattaatactttttttgagaacatacatatcagataactgaaatcaataagktgacaatattcttataaaacaaagattgatagaactatgtcatacatgctcaccttttcaaagggggtaagtttgagcttctgcattcccttggtgttttcaagattgtt

SEQ ID NO: 838166 - DNA, 607 bp, Homo sapiens
ccaaaagtccaagtccaaagtcttatctgagacaagacaaatctcttctgtctgtgagcctgtaaaattaaaagcaagtttgttacttcctagatacaaaggggggatggtccgcttcctcttgaatgctttgctacttagaaatttcttctgccagataccttaaatcatctcttacaagttcaaatttccacagatctctagagcaggggcaaaatgctgccagtctctttgcatagcaagagtgacctttactccagttctcaacaagttcctcatctccatgagaccaactcagcccagacttcattgtccatatcactgtcagcattttggtcaaagccattcaacaagtctctaggaagttccaaacattcccacatcttacctgtcttctgagccctccaagtctctgggaagttccaaactttcccacatttttctatcttcttctgagccctccaaattgtcccaacctctgcttgttacccagttstaaagttgcttccatattttcaggcatctttataacagcaccctactcccagtaccaattaactttattagtctgttctcatgctgctatgaagaaatacctaagactgga

SEQ ID NO: 838167 - DNA, 546 bp, Homo sapiens
aattacttctcatgatctccacytgtcaatactgccttagtggggattaaatttccacatgggatttggaaggtagaaatataaacaatagcaaatgtgatacctctttgaatcagctttctgtatttttggagttttctagctaatctttcataaaataactgaggtagaagagctgttaaggtcttgacatattcctggcttatgtaattggtttcaatggagaattagtaaactatggcatttcaaacttaattggacccaatgtaataataaaagattcactttaaacttggtactgtagtgctctaatttctttctttacttactagttttatgctgttgatttttttatgtattatttatataaagttttatataagcatattcataaaatgctaaatgcacaaaagttgccaccaaaacaaatctataaatatttattaaatagtacataatagtatttaccaatcatatgtaatatttcaaatatagaacaaaataatgagcagacatggtttccctatatcctctaatttccagaaa

SEQ ID NO: 838168 - DNA, 629 bp, Homo sapiens
gtggttcatccaataagtcaaaatttcttaatataaaactgcccacatagttataacaagggtatggtaaagagtgtggactacaaggtaactgaaatcggagaccattaaaagattttaaggatatttctcagaaggggcatctaccactttgtttttctaataaaacatataaacaaatatatatgcatatgtatacacacactcatgcacatacacacacgttcttcgtaaaaattaaaattgtctaaacatatatatgtgtgtatgcatgtacatgtctctctgtgtatgtttatctgtatctacatagatatgtgtgtacatatgcatctataatttctctatatatctatatctctacataaagaaactatagatatataaaatgatatgtagagatatattgtgagaaactcttagaaattttctcctaaagaatatgaactcaaataattaaagctacattttgttttctctaaaacttgctgcagagctggtcaagttyacaagatacctagtaattctaaccttttcaacttacaaatgaactaagagatgatctgagatgttaatttaatttactcccatgcatattgaaaagtagtaaataaggacaaaaacttgaa

SEQ ID NO: 838169 - DNA, 599 bp, Homo sapiens
acatatgcagtagcaaagtcttgcaattcttttggtttgtaagctacaatgtcatgagttatagtgtgtcccggccccttggagcatggtgaaatttcaccctagttatgggtctagtggcgacaaagtgtggttatggtaagtcttgagagaaatgagcatccattttcaaggctcttgccccaggtgaggttatcacaggatttccaagcaaggtaggcaacaaagaggaacctaattctctagataaggaagactcaaaatcacatgggaattcccaattttcagctttctctggatccaaccagatgccgacattctaagtttaaggatttcatcattttctaatcaatgtcttcaacttcacattgggaaacttgacaagactgtggatttaacttttggaattcagcagtccatgcaactaaatggttgctttttattttcagcaatattagcactgtggctacaagaaaaaggaaatcctttcaaagctgtcacggaagttctctagttctcagatagtcacttaagmtaaaagttgaagaatctgagcatgtcattttcttttttgtaagtactcaagtgcatttaaaaaa

SEQ ID NO: 838170 - DNA, 579 bp, Homo sapiens
acataaagtgcaaaatcccattctggatcaattaaatgcccctgccacgcattcatgccttctcctttcatccctctcattcctgctmttagacttttaagaatttatataatggagcccccaaatcctcagttattcaatccctcatgtatgtcattaaagttttttccaccaacatcttcccctcagccttccctcctgtttcccagccttggtcatttgagcattggtttgagtctccatcccaggaaggacagggaaggaaaatgaggtcaacctggacacatctcatctccaagactatgtttaacagctctggcaggagattttaacacaggaaattgcataaaatatgtttcagggattatttttggatttcagtgacccatgttcttcctggcactgatcatcagagctaactgaaaactagtgttgataaaaaaaaaaaaaaaaaaaaaaagcctgtgggttaaaacggtagccacaagcactccaaaaggcagccacggtgtgaagaagagtacaaagtcttaattcaacttctggctttccttcttagtaactgcgtgagctgtttta

SEQ ID NO: 838171 - DNA, 480 bp, Homo sapiens
ctccagcctattctcaacccccaactctatctcttcaaattcctctcagaggagactgagaaggaaagaactgtttctcytgagtgaaggagggcatcctttacctaccctattgggtctgttgtttctttttctcttctgtggtccacctcccagaagtgatgctggctgtttctgccatctcccaccatggctgtggagaagctactgaaggaaaatatcttctacagcttcttctccttccagacccagactgccacagcttgcagttcagtctattacattcatttcttaacttctccaggttcccacggtcaccctggggtggggcaaatgctttcatatgattaccattacaggggctgcaaagcaatgctccattgagctgtcaatgtctgacggaagctttagtgagtcaattcttcaagattttttccactcttgattgcagtccctaatcttgtgactcagacgtgagtc

SEQ ID NO: 838172 - DNA, 641 bp, Homo sapiens
acatatctttttaaaatttaattcctaagtatttcatattttaataccattataaatggtacttttactattttaacttctgatggttgtttgcttgaacataaatatgtaattgattacctattacataaacaggtaattgtaaaagataccttgcatctaaaaccttaataaacttacttattatttattgtctcttttttgtagataccctctaattttctacgtagactaaaagttgttaagatgtcaattctgcctaacagcacctataaattcaacacaatctgaatcaaaattccagcaggtatttttatatgaaaattaacaaaatgatcctaaaatttatatgaaaatgaaaaggatctagaacatataattcttaaacccccaaaacaacccaaataaaaatgggcaacatatttggacagacacatcaccaaagatatacggaaggcaaataatcacaagaaaagaaaattcattgcattagagatcagagaagtataaattaatataacaatgagatatcattacaaacctattagaatggytaatgggtttctggctaaaaagactgacaataccaagattaggtgaggatatggaacaactggaactcctatacactgttcacagaa

SEQ ID NO: 838173 - DNA, 596 bp, Homo sapiens
gaggtcaggagattgagaccatcctggctaacacagtgaaacacagcctctactaaaaatccaaaaaaaaaaaaaaaaattarcagggcgtggtggtgggtgcctgtagtcccacctactcgggaggctgaggcaggagaatcacttgaacccaggaggcagaacttgcagtgagctgagaccgcaccactgcactccagcctgggtgacagagcgacactctgtctgaaaaaaaaaaaaattttctgtctaaaatttacttaaaatagctactatatattaatcagaagaactttctgaagaaaaaagcaacttcttagcccattcaaaagattgtgagcttggtagaatgtaatatcttcagtgcagagtgttttgttaccttaatccccatttatatagaacagtgacaaacacataatttatgctatgtgaatgagtgcataaaaggttgaatgaataaatgaataaatgaggataatgtaaagatggatttttactaaaatgtattctagcccttatgtaatattaatttagaaattgtgcattttcaaatgcactcatacaaaccaaaaaatagcacttatacaattcaa

SEQ ID NO: 838174 - DNA, 573 bp, Homo sapiens
tgtgtgagttgatctgggaattatccattrtgaaggcagataacagattttcttgaaaggcaaataattatcatggaccaaattcatacacaggccacacaagacttaaagcttttagaattagaaaagaattctgggccaggcatggtggctcatgcctgtaatcccagcaatttgggaggctgagatgagaggattacttgaagccaggagtttgaaaccagcctgggcaataaagcaagaccccatctctaaacaaaaaaaaaaaaaaaaaaaaaaaaaagaagaattctattgcctagttcttaattctgtaccttaacctagtgtaattctccaacattactgaatagtaaaatataaaaggttatgatcaagaaaaattaaataagaagtatatatttagatatacttagtatgcagctatctatgttgatacataaatatgacagatatcattatgtacacagctataggtttttatatctatatacttacatattcaacatatatatgcaccaaaaagatgcataggagaatgtccacagctgcactattcaaaatagcccaaaa

SEQ ID NO: 838175 - DNA, 632 bp, Homo sapiens
gtacagccctcccacttttcctctcctttgtgcctgctattttctgaagggatagacaaaggcttaraaaaagcctctactacctgcaggcagcatgaacctctgagcacctgctcagaggttttctttacctctttctattttctttacctctttctgctttgtctcccttattaagtgggctacacttgggcactgtctcctcattagcctcagtggggtgaaaagtcatattgtacttcctcactggaaaaggaaaaaaaaaaaaaaaaaagaaggtacacaggctcctggcctcagcacctaggatcagatcgttactatctactttccatctctttctaattcccttctttttctccacgtccctaggatcatttaaattataaatttcaaatgtgagaaaagaaaggagcaagagaggagtagatgcagggagaccagagagctagtatgaaggcagaaaatgaatcctcttccttttaattaacattatcctcatataatggttctcaattaatagaaagttgttggaaattcgatgttattccatgttaagtgatgttaagtcatgaagcagatagagttatcatttagctagtaacagaagtgtcaaatgacagatcacacca

SEQ ID NO: 838176 - DNA, 477 bp, Homo sapiens
ctccagatgattacattatctaactgtctgagccactttcaggtrtcggtgtcttcccatctaaagtcctaggaatgagagagcagagataaatccttcccattgtgtcctacctaagtttctctcccacagaaacagtgatcataacaaaatggcggtagttttaagctgctaaacctgggatagtttatttttcagcaatagtaactggaacaataactatgtctacatttggtgcagcagttgatcaacatcatctaagagacaggctcgttctgcctttcctctttgccatcctctgtgtgttggtgatgtcacgtctctttgaaacgagatgaaacctacaactctaaacctttcatttatatagtacagtgctccaagaaggtaggaagaaagcaggggattttaccttgcgctacaatttttagaaacattttaaaataaaattttaatttccaaataaattatatacat

SEQ ID NO: 838177 - DNA, 561 bp, Homo sapiens
tttcaactacataacaaccatctacaaaaaacctatagttaacgtcattcttaatgttgacagtagttctctgtaagatcaggaattaggcaagaatgttactctcgtgactcatttaaacatagtactaaaagttatcctagtataataaggcaaaaaaataaagcatgtagatcagaagtgaaaaaataaaactatccttatttgtatatcacatgactgtttacatagaaaatcccagactgggcgtggtggctcatgcctgtaatcccaacactatgggaggccgaggcaggcggatcacttgaggtcaggagttcaaaaccagcctggccaacatggcgaaaccctgtttctactaaaactacaaaaattagctgggagtggtgttgtgcgcctgtagtcccagctattctgggggctgaggcaggcgaatygcttgaccctgggaggcggaggttgcagtgagcggagatctcgccgttgtactccagcctgggcaacagtgtgagactccatctcaaaagaaaaaaaaaaaacccaaggaatcttaaaataaaa

SEQ ID NO: 838178 - DNA, 608 bp, Homo sapiens
atcatttacaaatacttcaaaaagtaaaaaagtcagtctaccaaaacatgtgcagtgcttgcatgctaaaactacaccttgcttattattattattttttaatttaacctaaataaatggagagacataccacatttgtggataggaagattcaacatagtaaatatatcaattattctcaatttcatatgtaacatattgaaattccaatcaatatctcaacaagacttttacagacaaaggggaacagttttcaaaaatttatatggacaggcaaaagaactagaatagctaagaccatttttataaataagagtaaattgggaggaatcactctacttgatttcaaaatcatacagttacagtaatcaaggctgtacgatactggcaaagggaaagacacatagatggatggaatagaatactcagaaataatcctatgtaaatatacccaacttatttttgacaaaggaattaaaragagtcaatggagaaaaaatagtcttctcaacaaacattgataaaacaaatggacactactgacaaaagaaaaaataaacccaacctaaacctcacaccttatataaaaattaactctatatggttca

SEQ ID NO: 838179 - DNA, 548 bp, Homo sapiens
tagacctcactgtctttcaaatcctttttgacaccaatgttaagtggttctaggacaaatcacagcatctacwcagaatgtattattttagagatttaaatggacacataagccgtaaagggagttcttcatgttgcttttcactagtcacatttttgactagcactggggttaatatctcagttttaaccttttttgcactccaagcagaaaatgccttagattggaggaatgggtattatgaggggggctgtcactttccaccatcagcagcagatctggggaaggagtcacgcattatttgcagaataatggacctttctgattcacacaccctctagtcagctggtctgctcaccagggaaagcagatcaatgcagatttgggaaatcaaggaaaaacaagatggtgacactggaaagaaaatgaataaatgacaagtaaaaagagaaaagaaaggatattccaatattggcaccatgcttctccgcatatgtaatgccttcagtgcaccctccaagaaaggtatggatatctctcctttacac

SEQ ID NO: 838180 - DNA, 668 bp, Homo sapiens
tgtactaaaaaaaccacacaggatcctactttaaaaaggtttggcctaattgtctagcacagggtttctcaacgtgggcaatgcagcattgacatttggggccaggacacttccttgtctcatataagcattgtaggatttttgcagcacttctggcttccatccactagatgtcagtagcacctctcagttatgggatctaaaactccaggtcttcgcaagggtccccaggaaggaaaaattcacccaccgacccctacctcccacccaccaggtgagaaccactagtctagcaaatttattcatgccagcaaggcagtgtgcgataattcagggggaaggcagaacagaaaaaagtaagtaactgggatgaattacaactcgggtaatacaaacaaaagcagcaataaaactaaaaatgtttcatctgcaattttacagaagttctccagaccatattataaattaaatgtcaagtcagagtgagaattaaggttattcctatatctctcgatcacccccagtccaaagcctcactcctccaatcagttgaaagaaacaaccacagaaggatgtcaactggggtccctgggtgcattttaggagaytgtctatacactcctgatattggtggcaaaatgatatccatttggcaattatctgggaca

SEQ ID NO: 838181 - DNA, 623 bp, Homo sapiens
tttgtgtaagaaatgaatttatataaaatacaacaaactggacaaaagtctgtaaaaatagctaaagtcaaaaataatttttgatttatttatttgtggggaaatttctgtattcttttgtagcaattaatgtcatggaaagacagtatccattgaaaatctagtttaggaattaaagtaagattagaaattagtctttaaaattgttttttgcctttgtagatcacatcaataggaatatgaaaacattattggcttcactaaaatatagtcttatatttaaggagccatttaagaaaaacacaattcaaaattatgaattaggactttaaacattgcaaaaatgctccctgcttatacttcacccagttttcaacttatatgatgtaaattttggaggaagagctcatataattccttgctttccattcaaattttctgttcctattttctatgctcaaatgcagaaggtacagtaatgatacctgaatcatcattcatccagtaaaatccccgctcttcattcattcaatcaatactyttaattcattccatttaatcaccagtacccattttgtattcttccttctcaacataagcatctattctcatgtctttttgtt

SEQ ID NO: 838182 - DNA, 614 bp, Homo sapiens
tcataatagaacttttgcagggaacagtttctttccaatgacaatgcttttaacagcctccaaacattcttcctctgygtgcactccacctccaatcaaaaactgaaattccaaatcaagtctgaaatactttttagcaaacagctcaattcttaatctcctgaaaatcaaggaaccagatctttagtgaaaatacattcagagcagcagcctctaaacaaggttatctttactttctttcctcaaatcacactgctgtgcctattcacataattaaggacaaagtgatgctaggtgaggatacattcaaatgaagtcatgcctgtaatctgtaggaaacgggtactaggtatagcctgataaaatccctaggagagccactttggtgctcctggtttgtggttagatacagcagagcaaccctggcagtttactctttttacatgcagcattttattggtgcatttgtttaattgaacacatcagtccagcattgtctgaagcgtacatcatatctttgggtgaggcaagttcaggagtcttcccctggaaaaaaacaatgtacatgtgtgtgtattttaatcttgaaaaatcactgtcaaataaatattaaa

SEQ ID NO: 838183 - DNA, 562 bp, Homo sapiens
attaaaaagatcatttcatgacaaagtgagatgagcaacgtagaaatgattccatagcttctctagatcattccatttagggcttttttccaactgaatccarcataattcatagaagcactaagatttgcctttcgaaggtctggaataattcagcaattaacatcatacactcttattacctgatgcattagatccaaattgcaacaaataccaatgctagcaatttgtttttcctataacttgcttactttaagcagcattatcttggaaatctttcttcttaaattcggttctaagaaaaaatattcacaaataatttatttcaaaataatctctccttactttttttaaagagtagaattatgtagaaaaaaatcagtaacatcactttataaaaagaaacaaaattctgactcagaatgcttaaaacaatttttctctgataggtttttttttctgactgaataaaacaaagctcatagtaattgtaacaacattagcactctttcaagagtggagattagtcactgaaatcttgtgttctacaatgtcaaaattt

SEQ ID NO: 838184 - DNA, 583 bp, Homo sapiens
ttatatatggttgccatatttctataaagtggatatacctttgacaaaatgtcatcgaaatattcttggtcaccctgctttttacactaatgagatttctattagtcaggataaagttaagctctgctgtggtaacaaataaacccctaaatctcagtggcttgacatatcacatccacacaaaagctgacatgacttaggaagtcctccttcctcttgaagctgagttatctggagtatggccttggctgttattgtgtcgggggcagagagatggaaaaggacctggcttttacctgtttcagcccagaggtgatacatgtcactttctctctccctatccattaactggaattggtcacatggcttcaattcactgcaaaggtgctgcagaaatatcacagagcatgcagatagctggaaagcaccaactgtctgccacaggcattaaaataaacataatgaagctattttgaataygcttcaaaagatttcaaactgtaggcatgtgacttgtgctaaaccattcagaaatcggtggcatcctcactacttcataacagagtcaatattcattatgtgt

SEQ ID NO: 838185 - DNA, 690 bp, Homo sapiens
gttggttttctttgacaaaatctggcgacctgtgccaacaagacctgccaggcagtgtcagattgaggaccatggaaacttttaatgattaaaggtattgkttaagaaacttggaaaggccaccattgcctacattctctttttgacgaggtcgtcatgctgtccttgtaactccttgccccagtaattgaccacaattaatagggtcagaaatgggcccctgatcccaagtcaatcataggtactgggacagtggcccatgaagtggtctggcccaaaatgctgtcctgtcctgcatggtgtctaaccactccaatcctcacttgtggagaatgtggccttcagatctacccagggattccaaagatggtagacagtatggagctgagaaccacactaaagtaagcagagaaagagatcagtggatctctcggacacccagtcttggactcagtggatgtgctggggtgggagcaatggatatcagccgctgaaagagtgagaagatgacctggtatccccatgcaatgaacacaggctgcacacccactagagctactgaatgcccccaaatattccagttctttctgatccctagctgtgtgcagaaggacttcttctcatttccctgggtattattaaaacagtgcctattaactgaggcaagctcagtcttggctccttgtagcc

SEQ ID NO: 838186 - DNA, 317 bp, Homo sapiens
ttttggctttccttctactcttttttcttctccttgatttacttttttaaaaaaattatggtcgtcttattgactaaatcttcaaatagatagatttcattatacactcttcttggacaatcttatctgcattaatatctgttttatatatattatatatacagataccatatatatatatatatctgtatctcatatatacagatagttcttgctttgcctggtgccgtgttaactgaaacaggtgcatattggaaccatgtctttgttttgtgcggttwaccataaaaccatgcaaagtaaggacacatttccta

SEQ ID NO: 838187 - DNA, 440 bp, Homo sapiens
tatatatacagataccatatatatatatatatctgtatctcatatatacagatagttcttgctttgcctggtgccgtgttaactgaaacaggtgcatattggaaccatgtctttgttttgtgcggtttaccataaaaccatgcaaagtaaggacacatttcctacatgtacaatatttagttaataagataccatgaaaaatgaggactatcttcattaattatatactccatctttattctgatccctacacctgaatacatagttttctaccagttatctccactggttttccaaaggtctttttcaaatttatwtgtccaaatataactttttcagcctccatcgccagtcctcctggccatattctctatcacaagtaattagttaatcaacagaaaattattagtgtatattattcccaggcactatgctagata

SEQ ID NO: 838188 - DNA, 492 bp, Homo sapiens
accacacatggaaaagctcagaggaaggaagaaagaaacatgggcatttccaggaattgatattactctattgtgatgagtataatgaaagccagaggaagactagcataraaaaaaaatctggagaaatgaatagggaatggtttaacagggttttttttcccaagtcagtatcagtagatcattctcattcctccctatctctcactctatgataagcattctattaccaaatatcatctctatctccttgatagtagtccaacttattgatatattttctcattcccatttcttcactcatatttccaaccagtattatctctactgcattactcttttattatctggcatctcattccctcatctctgttttttcccatatcttaaactctagctatacattgtcctgtgatggatgaatggataaattaactctggtacacccataaaatgagtattactcagcaattaaaagaaacaaaatacatg

SEQ ID NO: 838189 - DNA, 500 bp, Homo sapiens
agcaacacatggcaacaatgacaaaccttgtatgaaatggagtaataaatctgatttccagagttggcatgctataaaacaataaattaatatatacaaaataatattttaatttttagcattatactactaaaatgtccagttttgaataaaaacttgtgagacacacaagaaacaggaaagaatggtccatacagagagagagaaaaaaaaggtggcaatagaaactgttccttggaacatcagatgttggacttaccagacaaatattttagcagctattttaaataggtttaaagaactaaaggaaaccatgtcttaagagctaagagaaagttgcaaatgatgtctccacatagggaatagttaatgaagaaataaagaaattataaataaaaacaaagccccaaaaycctggagttgaaaattacaataacttaaatgcaaacgtcactagaaagggaattttaactggtagaagaaagagtcagtgatcttga

SEQ ID NO: 838190 - DNA, 467 bp, Homo sapiens
cctaatatgtacatagtagaatatcattgtgactctgatttgaattttccaaatggttaattatgttgtacatattttcatgtacttatttttaatccacatatcctcctttaaaaaatatcttttcaatctkttgcctatttttaaattgaattgtttgttttcttgctgttgggttctgagagtttaaaaatacatctttatatattatggccacaagccatgtaagatatgtagtttgcatatgctttctccaagtctacaacctatttgctcctttagaagaaatgtgtttggacatacaaactttttaattttaggccaggtgcagtggttcatgcctgtaatcccagcactttgggaggctgaggcgggtggatcacctgagtttaggagttcgagaccagcctggcccacatggtgaaaccctgcctctactgaaaaatacaaaaattagccggtcgtgt

SEQ ID NO: 838191 - DNA, 521 bp, Homo sapiens
aaacaaataaataaataaaaactgatataaaatatcaatacaataataagaaataatacaaataaaaacagtatagtataacaactatttatatggtatttatattgcattagattatacataatctagaaaggatttaaagtatacaggaggatatacataggttatatgcaaatatttactatactattttatatcaaggacttctacatccatgaattttgtatgtgagcatgtcctggaaccaattcccctgtgaataccaaaagataactattagtacaatttttgtcaccctatttatgccaatgaaaattagaagcccatattatttaattcaaacattattggaatgagaaaggtaagcacagaagccacaaatctcagttascgatttaataaaaaatattgaacaaatgcaaaactgttgatgtcactggtaagaaaaattaagcactcatctgcttcttacaagtaacttactaaatgtgggaacaatgacagcacctaaccatcaagtt

SEQ ID NO: 838192 - DNA, 637 bp, Homo sapiens
aactagtttactgtagcaaaaagagtatatgctttggaattagggagaactaaatttaaatctgtattccaaaaatatattatttataagatcttaagcaatgatttaacctacctatacctaaatttaatctgtaaaaagattaagtaaaaagtaaaaaggggctacttcgcaaacaaagatgagataaatgaaggatactggcacgtaaaagaatctaaaaatgtggatattttttgtttcactttgaatttataagcaaaaggaaatctgaactgagagagaagctgtaaagatctaaaacttttttaaataaaggaaatgtttaaagatttttaaaatgccaacaacaattttgaagaaaactaagaagtcacataaccaacataattattttaatttaaaatatttcctggtgaacttttttctcactatgaacatgtttttacatgtttgcaataatttgtcttataaaactttcattttatttctttcatttaacataagtgctttgcaargttattatttaatttcacaaattagttttcataaatacataacatttcactgaataatagtattaaagtttatataacagtttgcctatcattacacagttaaggtttttaattatttg

SEQ ID NO: 838193 - DNA, 493 bp, Homo sapiens
actaaccttgtaaggactataagggattctttttccttgagacggagtttcactcttgttgcccatgctgsagtgcaatggcacaatctcagttcactgcaacttccacctcttgggttcaagtcattcccctgcctcagcctcttgagtagctgggactacaggcatgtaccatacacctggctaattttgtatttttagtagagatggggtttcactatgttggccaagctggtctagaactcctacctcagatgatccgcccaccttggcctcccaaagtgctgggattacaggtgtaaaccaccacacctggccaggactataggagattctgttgaagggggattgaatatacatgttcgagctctgttcccttttaaaaccacactaaattggtaggaaactgattttttaaaagaaaaaccaaaggatcttagaagaaaacataggggcaaatcttcatgactctggatttggtgatggtttctta

SEQ ID NO: 838194 - DNA, 508 bp, Homo sapiens
gtttatttttcccatggggaaaataaaagtgcttttccctatgcactcacttctcccagtgagtgcttagtcctcactgagtctgrgacccatgagagcaggggttttttctctcttatagctcccctaccctggttcccaccctgccttctgtgcctgcacagaactgccctgtggagacgcagtggcaatgcctaggacacagtgatgttcaatgaatgtctcttggtggattacgtaagaggagcagaacccccttcttcctccctggatctatgtcaggctgttttgtttatctgtgttctcctgctatcacacccacttcagagacaatggaacccagacctaggggaaggaagggttcaccccaggtcagctatagcccatcagcagcaaagtgaaggccagaacccagctggggacatgctctgctggagctgtggccctgctgaacatgggcaggctcctctgcttacctcttgagggctgtcctccagctatgaaggag

SEQ ID NO: 838195 - DNA, 508 bp, Homo sapiens
gtttatttttcccatggggaaaataaaagtgcttttccctatgcactcacttctcccagtgagtgcttagtcctcactgagtctgggacccatgagagcaggggttttttctctcttatagctcccctaccctggttcccaccctgccttctgtgcctgcacagaactgccctgtggagacgcagtggcaatgcctaggacacagtgatgttcaatgaatgtctcttggtggattacgtaagaggagcagaacccccttcttcctccctggatctatgtcaggctgttttgtttatctgtgttctcctgctatcacacccacttcagagacaatggaacccagacctaggggaaggaagggttcaccccaggtcarctatagcccatcagcagcaaagtgaaggccagaacccagctggggacatgctctgctggagctgtggccctgctgaacatgggcaggctcctctgcttacctcttgagggctgtcctccagctatgaaggag

SEQ ID NO: 838196 - DNA, 587 bp, Homo sapiens
  misc_feature 1, 2, 3, 4, 5, 6, 7, 8, 9, 10, 11, 12, 13, 14, 15, 16, 17,18, 19, 20, 21, 22, 23, 24, 25, 26, 27, 28, 29, 30, 31,32, 33, 34, 35, 36, 37, 38, 39, 40, 41: n = A,T,C or G
nnnnnnnnnnnnnnnnnnnnnnnnnnnnnnnnnnnnnnnnngtaaattgccagtgtgaatataacgtggtgcagccacttgggaagaacagtatggcggttccttgggaaaagtaagcatgattcmtaacttgcacttgtgggtatacgtcccagataattgaaagtggggctagaatggatattcaatacccatgtacacaatagcgttattcacaacagccaaaaggtagaaacaacccaagtgtccatcagtgcacgaatggatatccatacaatggactggaattctggtttgtgcataatggaggcattaggctaagtgagatgagccggccatgaaaggacaaatcctgtgtgattccacttgcatgagggactgagagttgtcaaattcgtagagaccaaaagcaaaatagaggttaccaggaggagaagtgggagttcgtgtttaatggggacagagtttcagtttggaagatgaaatggttctatgggtggatggtgaggtgttggcacaacactgagaaggtgcttaacatgatggaactgtacactaaaaagtggtaaattttgtattatgtgtat

SEQ ID NO: 838197 - DNA, 507 bp, Homo sapiens
taactcatcctggtattcccaagggcagcatcttttgtggcaaaggcaagaacccactgctcacccttgggaggcatcgcagagtcrggacgtggcatggccttgagtccctaaacagccccacagtgctcccagcgtagccttggtttcctagggggactcgcacgtggcaatgccagggtcacacctctcaggatcgtgattaaaaggtgatgtttggtcgtgattaaaaggtggtagtggctcactcctgtaatcccaggactttgggaggccaaggcaggcagatcacgaggtcaggagtttgagaccagcctggccaacatagtgaaaccccatctctactaaaaatacaaaaaaaaaaaaaagaatgagccaggcatggtggcgcatgcctgtagtcccagctactcgggaggctgagtcaggagaatcgctcgaaccagggaggcagaggttgcagtgagccgagatcgccccactgcactccagcctgggcaatggagc

SEQ ID NO: 838198 - DNA, 507 bp, Homo sapiens
taactcatcctggtattcccaagggcagcatcttttgtggcaaaggcaagaacccactgctcacccttgggaggcatcgcagagtcgggacgtggcatggccttgagtccctaaacagccccacagtgctcccagcgtagccttggtttcctagggggactcgcacgtggcaatgccagggtcacacctctcaggatcgtgattaaaaggtgatgtttggtcgtgattaaaaggtggtagtggctcactcctgtaatcccaggactttgggaggccaaggcaggcagatcacgaggtcaggagtttgagaccagcctggccaacatagtgaaaccccatctctactaaaaatacaaaaaaaaaaaaaagaatgagccaggcatggtggcgcaygcctgtagtcccagctactcgggaggctgagtcaggagaatcgctcgaaccagggaggcagaggttgcagtgagccgagatcgccccactgcactccagcctgggcaatggagc

SEQ ID NO: 838199 - DNA, 595 bp, Homo sapiens
tccaggcatgcatcaccacacctaatttttgtattttttttctagaaatggagtttcaccatgttgccctggctggtctcaaacacttgggctccagagatctgagcacctaggcctcccaaagtgctgggattacagacatgtgccactgtgcccggcctgtgaaataatttgatgacaacaattgcttctactttttaaaaagtcatgaggactccacgtgacaatgccaggttcacctgagggtaggccacatgtggtataaatagtgcagaaatgggagtggtgggaaaagcaaatctgctggcagggagaagctgcagcctcagatgggcccattaggtgtttgcctgggatggggtgctgaggcctggctacacttagggaaactggcattggcaataccttatcccagaaactgctggccttcattgcccgggtccaatcctattgttaacacctgatagaggatggatattaagattcaagcaggaggccgggcacagtggctcacgcctataatcccracactttgggaagctgaggtggggggatcatctgaggtcaggagtttgagaccagcctggtcaacatg

SEQ ID NO: 838200 - DNA, 420 bp, Homo sapiens
aaaaaagaaaaagaattgctttttttaaaaaatkgaaagttcagaactgcaagcagtagctcctcctagagcaaggtggtgaagggctcaagttggagtgcttctgagacacacacggatgacacagaggcctgggggatctcctttagaggctggatgtactgagcacctgcctgcctcccttcccttccctgtcagggccaatgccgtgttcttgcatgtgtccagagagcctggcagtctctccagtgcctgcgtttgtggctgtggctgcaggggtggcagacctctgggaaggagggagcccgtgggtctgtgccggctggtgggtgtcccacaggggtcttgatctgggactggccagactgcgaagccccttccagagcacaagccggaggggtctcctctgatccctccttc

SEQ ID NO: 838201 - DNA, 599 bp, Homo sapiens
gagtagctgtgctgtgcctggggatcccttcctcccccggtcaatttggactctccaaagcccacagactggaatagctaagttgcccaaacagcaaagatggcagttcacccctccccgtaggagctctgtgccagggaagtgcagcacttctactggtggctggctggaattccaagcctgtgggtgttatcctgtgaggtgccatgaaattggggcccttagaccatcagtgcttgacttctgggttcagcctttttcctaggggcaggtacatgaatttaatctcccactgttgtattctcaacgcaccaagatgtagcagtctctcactgtctgagataacacccggagttctttgcctcacgtccaagataatataggagcacagagacaaggctgatttagtaagcaaaagcagaaagctctctgccagcaaaaaggggagcccgaatgagttgccccctatgaggctrgggtccattgttttacggatagggaaaaggaaagaatgtgcttagtttgcaggctgtcttggagaatacatgactcgccttggcctgggaccaattagaaaacttggcatggggcttgacgga

SEQ ID NO: 838202 - DNA, 599 bp, Homo sapiens
gagtagctgtgctgtgcctggggatcccttcctcccccggtcaatttggactctccaaagcccacagactggaatagctaagttgcccaaacagcaaagatggcagttcacccctccccgtaggagctctgtgccagggaagtgcagcacttctactggtggctggctggaattccaagcctgtgggtgttatcctgtgaggtgccatgaaattggggcccttagaccatcagtgcttgacttctgggttcagcctttttcctaggggcaggtacatgaatttaatctcccactgttgtattctcaacgcaccaagatgtagcagtctctcactgtctgagataacacccggagttctttgcctcacgtccaagataatataggagcacagagacaaggctgatttagtaagcaaaagcagaaagctctctgccagcaaaaaggggagcccgaatgagttgccccctatgaggctagggtccattgttttacggayagggaaaaggaaagaatgtgcttagtttgcaggctgtcttggagaatacatgactcgccttggcctgggaccaattagaaaacttggcatggggcttgacgga

SEQ ID NO: 838203 - DNA, 620 bp, Homo sapiens
aactttgaatgctcttcctagaaaactacatatacaaaattttrtttataataggcaacaaacagataaagaacctgaacccgtgaggcgcagtgcctcatgcttgtaatcccagcactttaggatgccaaggcgggcggattgcttgagctcaagaattggagaccagtctgggcaacagggtgaaaccccatctctacaaaaaaaatacaaaaattagccgggtttgttgggggtgtgcctgtagtcccagctactcgggatgctgaggtgagaggattgcttgagcccgggaggttgaggctacagtgagctgtgttcatgccactgtactctagactggatgacaaaacaagaccgtctcaaaaaacaaacaaacaaacaaaaaacaacttaatcagcaggttttgatggggacagaggagagagaataagaacaatgagtgtaataaagtttggaattgggatgtgtaaataataaagaggatagaaacatgatggacaaacatgtaagtaaataacgttgcccactctgacaccagtacatccacatatacctctcctttctaggggagagaggaaacttgcctatttgcagtgcacctgctttttatatataa

SEQ ID NO: 838204 - DNA, 673 bp, Homo sapiens
ggttatactgcccaaagcaatttacagattcaatgctatttctatccaactattatatcaatgacattcttcacagaactatyatgaactattttaaaatttatgtgaaaccaaaaagtagcttgaatagccaaggcaattctaagcaaaaagaacaaagctggaagcatcactttactcaacttcaaactatactacgtggctacagtaacccaaacagcatggtagtggtacaaaaacaggcacatagaccaatgaaataaaacagaaagcccagaaataagaccacacatctgtgaccatctgatcttcaacaaagctgacaaaacaacaatggggaaaagactccctattcaataaacggtcctgggataactggttagctatatgcagaaggtacaagtaggaccccttccttagaccatacacaaaaattaactcaagataaagacttaaatgtaaaatctgaacctatgaaatccccggaagacaacctacgcaataccattctgaactaagtaatgggcaatgatttcatgatgaagatgcaaaagcaattgcaacaaaagcaaaaattgacaagttggatctaattaaactaaagagcttctgcacaacaaaataaactatcagcagattacacagacaactcacagaatgggagaaaattttt

SEQ ID NO: 838205 - DNA, 667 bp, Homo sapiens
ctctcagatccagaaggccgagctctgacttagattttacctccttcctgatcaytttcctccctcaaattagcaatcagcagagaaccagttgcttcaggttccagaaaccaagatctaaaaattggggtcagatgtattaaaatggtataacctggagaataatgcttttccttattaaaaaaaaagttttcctatttattttacaaagaaaacttggtttttagactcagctatagaaaagatatattttggttttatttctagacttcaaattaaaaacagaaattctatattttcagatttcagtagaaatagaaattgcttattatccttgtttctgttttcattcctttatatttagcattttcagttgctctgaggatatttcactaaaacagcaaaatgattactgaaccacaagtgtgtagtggaatattgtttcatgcctatgcttttccttttacataaaaatgtacctttagaaaattagaacaaacaattgtgtcaactaagaaagtgtaggctatgctattggaaatatttgagaaagtatcatgagtgttacattggtactctgctagaggaaggtgaaacaattggcattcacatcaactctctcttcacatttccaaattctggccacattatattgtatttaagagca

SEQ ID NO: 838206 - DNA, 592 bp, Homo sapiens
caaaaagaaagctggggtagctcaragaattaataacaaaattattagagataaagaggggcattatataataaagggaccaattctccatgaaaataacaatttttaatgtgtacacacctaacagagcatccaaatatgtgggggcaaaaatggacagaactgcaaggagaaataaatctgctgttagaggcttcacacatttctctcaataattgacagatctaacaggcagaaaatccttaggattttctgaacaatagtcaacagaagagtaaacatacttcttaagctgacatggagcactgaccaaggtagaccatattctggtccatcacacctcaacaaacttaagtatgctcttagacacaatgggattaaactacaaatcagttaacagaaagatagccggataatctccaaatatttgggggtttaacatgtgggtcaaagaagaaatctcaagagaaattaaaaatattttgaagacagtgaaaatacaacttgatgggatgtggtaaaagcacttgagagaaatgtatagcattgaatgcagttagtaatgaagaaagatctaaaacctaagctttca

SEQ ID NO: 838207 - DNA, 539 bp, Homo sapiens
ttgctctacattttgtaacatgctcttaagtttttgagaaaatgatatacagaaggatttgtaacttctttgctattcactcaaatgaatccattttgtgttttagtagcttcagatcacttcaacagccaatgcaaataatcaagacagaagcagtgcaacctcttggagttggcctatttccagtggtacagccaaacgcaatggcattatttacccaaattgttgggcaaccagcatgcactggaagcagatgccagcagacgccttcccggacgccaagtcctaggagttggcttaggcccttagctcaggatggaggcagcacccactgcattgacacaatgctgtggggtgatccagtcctcagcaaccacagggaggatccagccactggggcagactgcacttcagggacatcagargcggaaacctgggctggggaggtgcttccaaaggaaacacctggaagagggagaaaggataaaagaaccaccatctagattaggaaagcaaggcagttcctgccacccagaata

SEQ ID NO: 838208 - DNA, 598 bp, Homo sapiens
cagtgaaatagacagctgcagtccaagccacagtggaatttctagtgtcctctgcccttctggggcaggttaggtccgggtggagcagggagacggcttcaggcctttctaatttaaaaggacaagcaccaggggctgggatgcctttccgtttcacacccgcggcttcccacttcaggagtgttcctgtgcttcccaccttggcctgtcttcagacgggcacctggacgtggggcttggagatccaactagtccccaagttcacccaagacagtttgttcccaggagctcatttaacactaggctgtttgcaagtcaaagtgcgtcccgtgcaaacaacatcccaagagcactgagcgtggccagctgacccacgaagtctatgacccatccctgtaccttgaagtcctgaaagctctggacctaccaccatgttgccacgagcacacactctagatctgaactgctcattcggtggacgctgggragtggggaccctgtgtccaccagtgttccttcagcacacagccactgagtgcctgctcggggccaggtccttatttagggaaaccagagagatgcctcgtatacctcaaag

SEQ ID NO: 838209 - DNA, 625 bp, Homo sapiens
ccattccttggactgtgtaagcctggttgacttgccttcgagtgccattgggttgagccacgtggtataattaaaaactatatcaggtctctgtcctcagtycctggcacagagctcctaaaacccttggcatttcctgcatgacaggagtgtcttctgttacccaacacagccccttgccaccattcctgagttcatgctaatgagatgattcagggtggagctccgagatggctttaggatggggactagtcaccccatgtaattagatcaaacatgtaattagagggcggcaccttcagccccatcccctgacctctggggaggggagaagggttagagattaacagcaacgtggggagcttccgggttggtgaacacactgatgggaaggtgatgtacccagccagggcctgggagctctgggtcacacccctccctccaccagctcactgcccagggcatctctcccattcgcctgtccctgtcttctctccttcctgaggagctggtaaacgtaagcgaagtatcttcctgagttctgtcagtcattctagcaaatgattaaacctaagcgggaaacccctgaatttgtagccaagggggacagaagtttgggtagcct

SEQ ID NO: 838210 - DNA, 633 bp, Homo sapiens
tccaaaataaagctttacatctaaagagaagttttgaatagtgattttgttatgtatctagtatttgggccaaaaatagtaacatatgttaaaattacaaacaacaacaacaaaaaatatatttcagagcagagytgaggaaaagataagatgtaaagcaattgagaaataaggagataattcaatgtgattactagcatcttagtataacgtaaacagtaatttctaagagctctgttggaaaaaaatgtatagcagaattgattacaaggaaatatctataagaaaattgaagttatggaaattgatttttaaaacatcaatttaacctttccaagaaaaataatgaaagataaacaatagggcactgatggaggataaagggaaaaaaaatctatcacatcttcaatacttaatcatagagcttgtaaatcataaaggtgtaagcccaaaattcatctgtcttgcttttaacaatttaagtagctttgttcccattttacagacaagatcattaaagtctaaagagatttctgagtgaaaaaaagctagtgcagtttttcaatgtagtaatttttacttctacctctaatttgaattttatttaaaaatttgttatcaaaatataattgt

SEQ ID NO: 838211 - DNA, 504 bp, Homo sapiens
gttattgtgctatttgtataaaaataaatgatctatcccctccgccagaatgatagcacagaccagtaaaatagagcacttcttgtttttcaaatatgtatttattcaaaaggttttaaattaaataaataatatagttatacccacattcgtatataaattcaatgtactctgcccagtaggaatttcatgaaatttaatgagataatcacagagtggcatgaaaatacaaaaggccaagaataaccagtatattttggaagagaaggaagaatttgcaacaataagccctatatataatatcagagcttatcataaagttataataattacaagcatggtagtgacagagggataaataaaaagaacaatggaacataatggagagccctgcatatatggaagcttgccatgtgacagaaatggcattataatacatagccagaytattttaaaatatttaaacttttgttcttattatggaaaaaaaacttactcttcaac

SEQ ID NO: 838212 - DNA, 631 bp, Homo sapiens
agtgctgcagctgtccactttcgggtgatgcctgaatatcgtgcagaaccatctgtgaaccaggccctagtcttctcttcctatgtcarctgataatggggaactctccttaaggccattggtgtaggctgggagagagaaggcagggtagtaggagtggagaccatgggcatttgagccacttcctcatgtaacttatttgagttcaggacctactcaagcctgatcacatatataccacttccatttgatgatgaaatgcttctgtgcatgacccagtatatggctagatgggtcataaagcacccagttcatgataggcagtggaggtctcatggtgaattgatgacttatagtcaaacattcagtttccaccaaagcccagtaatagtcaaagagctgtctctcaaaaggaaagcagttatctgcagaagatggcagggccttgctcctaaagcctagaggcctcctctgtgattcacctatgggggccttccaaaggctccaaacagcatctctatctgccactgacacctcaagcatcattggatctgctggctcatatggcccaagtggcagagcaacttgcacagcagactggacctgttgcagggccttcttctgttctgga

SEQ ID NO: 838213 - DNA, 607 bp, Homo sapiens
gataaaagtgggcagaggaacgtggaagaactagactggcttaagcttccggcctccatctttctcccgtgctgggtgcttcctgcccttgaacatcagacttcaagttcttcatctttgagactctcggamcttcaactgaagactgaaggctgcatttttggcttttctacttttgaggttttgagacttagactggcatccttgctcctcatccttgctcataatgtgggacttcagcttgtgatcatatgagtcaatactctttagtaaactcccctttatatatccatcgatcctattagttctgtccctttagataaccctgggtaatacatatttatttttgaataattcaacttggtgcacaaattgacagttgtagtaatgaaatcacactgaaaacattactatctgcctgagtctagtccttaaattgatagttctataaatacaggagcagtattaaatattgctcatgtgatgaggctgccatcttaagactaaattgtattcttccctagattttaaaaatactagaaaactgtcattatttctatgccaaccactagtctccccattacctagagcaggatttctaaaatat

SEQ ID NO: 838214 - DNA, 572 bp, Homo sapiens
tatttttgatatcattgcaataaaattgttttaattytcttttctggttattgattgctagtgtgtgaaaaccaaactgttattttcatgttgactttatattctataactttactaaattaattctattaattaacacttttgaaaagtcttaagattatctatatgtaagatcttgtcatctgcaaactgaaaattttacttctttctttgtaatttggatggctttgttgttttcagagacccaggaaagctgatgatgtagatgaagttcaaaggcagtctgctgaataaattttcttttgctcaggaagcccatcttttggttctattcaggcctgccattgattgagtaaggcccactcacattatggagagcaatctacttactcagggttcactaatttaaatgttaatctcatccaaaaacactgtccccattgacatgcaatattaaccatcacagcagagagtattgaaacctactactattatagtagcactgtctatttctcctttcaacctgtcagtgttttaattcatatatttaggagctctgatgtttggtgcac

SEQ ID NO: 838215 - DNA, 645 bp, Homo sapiens
gatcctaaaaaaaaaccttgaaaggcagtctaggccataaggactgaaacttctaggtaaatcctagttctatgctgggcttgtagagccagtggaattsggggcacatgacttaatgagacgccagccagaatggctcaaagagtgcttgcatcacccttcttcccaccacaggtagcacagcttgcagctttgaaagagacctctaccttccatttgaggagaggagaggagaggtaagagtaaagaggactttgtcttgcaacttggataccagcttagccacaaaagagtagggcactggtcagagtcatgagacccccatttcaagttgtagcttctggacatttctagacagaccctgagccagaaaggaacctgctgccttgaagggaagaacccattctcagcagaatacattatttgctgactaaagagcccatgggtcctgaataatcaacagcagtacccaggcagtacacgctatgggccttgggcgagactctgagacatgctggcttcaagtgtgacccagcatattcataagtgtggtggctatgagaagagactctttatgcttgagaagaggagagaaaagaataaaaggaactttaccttatagcttaagaaacagctcggccacag

SEQ ID NO: 838216 - DNA, 644 bp, Homo sapiens
tacgaagcatgcatgcttgtagtatatcttcatataytggaaaatattgctatatttttacagtaagataaattactcttatgcataacctgtcagtttattataagcaggaggacttttactttgtgctaaattacacagtgtgccactagagtgcgctataacattttctttgattaaaacattttttctgaaatcgattctgaactactcttagcaaaaattttcatttactgctgaattaatattgtaaaacatatttgagaaaattattataataaaacaaattttcaacttttctattaagtatattaagttttttacacttttgtgatttctgtatatgcttgaagattctaaaaagtactagaaacactcattgcaataaccattattaattccagcaagaaataaagcactgttttttgcattatctagttcactgaagaaaaacaatgtatataattggtagcagggcccaaactcaaggagaataaatatatcggaaaatgccttgtagtattgtgtacttcggttttattcaaaagactgatgtcatgtagaaatatacctattttgattatattagtgtaattaaagttgaaaggacttttaaaggggggacacaaaataagaaaaaaaaa

SEQ ID NO: 838217 - DNA, 600 bp, Homo sapiens
ggaggagtttgttattacccaccttctgaagcctatctctgtcaattagtcaaacgcattctctgtccagtattgtgccctasctggcgaggaattgtaatcctttggaggagaagaggcattctagttttgggaattttaagccttttttcactggtttctcctcattttcgtagatttatctacctttggtcttagatgttggtgaccttcagatggggtctctaagtggacgtcctttttgttgttgatgctatttctttctgtttgttggttttccttttaacagtcaggctcctctgcctcaggtctgctggaatttgctggaggtccactacagaccctgtttgcctaggtatcaccagaggagggtgcagaacagcaaagattgctggccaaataggaagagctctggtctgcagctcccagagagatcgacagagaaggtgagtgatttcttcatttccaacagaggtacccagttcatctcactgggactggttgaacagtggatgcagcccacagaaggtgagccaaagcaggttggggtgttacctcacccaggaagtgcaaagggcctgggaattccctctccaagcc

SEQ ID NO: 838218 - DNA, 597 bp, Homo sapiens
ctgacattgctgaggcttgagtaggtagttttaccctcacagtgtaaataaagcttccaggaagttcaaactaggcagagcccactgcagctcagcaaggctgctgtggccagactgcttctctagattyctcctctctgggcagggcatctctgaaaaaaagggagcagccccagttaggggcttatagataaaacccccatctccctgggacggagcacctggggggaagggtggcttcatcagacttatacgtccctgcttgacagctctgaagagagcagaagatctcccagcatagcattcgagctctgctaagtatcagactgcctcctcaagttggtgcctgacacccgtgtctcctgtttgggagacacctcccagtaggggctgacaggcacctcatacaggatagctctggctggcatctggcaggtgtccctctgggaggaagcttccagaggaaggaacaaatgaaaatgttatagcctttctcataaagccacaggaaacccttattaagtacatcgacttaaacccagaatccccgaaggaacaagcagtcataaaagatcgtttatttacccaagccacccc

SEQ ID NO: 838219 - DNA, 597 bp, Homo sapiens
ctgacattgctgaggcttgagtaggtagttttaccctcacagtgtaaataaagcttccaggaagttcaaactaggcagagcccactgcagctcagcaaggctgctgtggccagactgcttctctagattcctcctctctgggcagggcatctctgaaaaaaagggagcagccccagttaggggcttatagataaaacccccatctccctgggacggagcacctggggggaagggtggcttcatcagacttatacgtccctgcttgacagctctgaagagagcagaagatctcccagcatagcattcgagctctgctaagtatcagactgcctcctcaagttggtgcctgacacccgtgtctcctgtttgggagacacctcccagtaggggctgacaggcacctcatacaggatagctctggctggcatctggcaggtgtccctctgggaggaagcttccagagraaggaacaaatgaaaatgttatagcctttctcataaagccacaggaaacccttattaagtacatcgacttaaacccagaatccccgaaggaacaagcagtcataaaagatcgtttatttacccaagccacccc

SEQ ID NO: 838220 - DNA, 614 bp, Homo sapiens
gggccagtatcagcgcctgagggacagtctgtgcgaggctgcttagcccagaagggggctgcgtggcagggggcgggcttcccctccctggacactttatcacactctgcctgtttgggcaggggctggaccaggcacttggcacatcttgcatcctttgatcctcactttcattctctgagctggttgtttatgtccattttatacataagggaactgaggccgggcgcagtggctcacgccttgggaggccgaggcaggtggatcacatgagggcaggagttcaagaccagcctggccaacatgggaaaaccccatctctactaaaaacataaaagttagccgggtgtggtggcaggcacctgtagtcccagctactcgggaggctgaggcacgagaattgtggagtttgctgtgagccaaaatcgagccactgcactccagcctgggtgacagagagagtctgtctcaaaaaacaaaaacaaaaamaaaaaacaaaaaaaaacgaaaaaaaaaccaagaggctcagttagtgaggtatagaggtttagaggtctcagggcaggttgatgatgaagctgaaaatctgacccaggcaggcttggctggagaag

SEQ ID NO: 838221 - DNA, 551 bp, Homo sapiens
aattgaaggatcctcagacgtagacatccaagggaaataattagtgcttaaaatgttaattgtgctcagatatgcctgtgctgtggcggcagcttgccagtgagcaggcataggtargtcaccttctgccctcaagcagcccccatcaggcaggctggtctccccagggacccagtgtgggcagcccaaggccaagaccctggcagcttttctgatggtggacactggcttaatgatagtgagacgttctgtgaaccccccagcctcctgcctgaccggcccaccgtccccgggcactggcaggcagcatcagagagtggttacagcaaggacatggaatcagacagctcgggcctggacccaccactctgccagcctacctgggcagcagtgtggatgagggtgacccacttaacctctttgagactcagtgagtgccctcatgccaaacagggatagtaaaacctatcgtgctgaagcccccacgggagcgggatcatttctctgtccagcctttaacacccctcagcatggggcctgcggcaccagct

SEQ ID NO: 838222 - DNA, 551 bp, Homo sapiens
aattgaaggatcctcagacgtagacatccaagggaaataattagtgcttaaaatgttaattgtgctcagatatgcctgtgctgtggcggcagcttgccagtgagcaggcataggtaggtcaccttctgccctcaagcagcccccatcaggcaggctggtctccccagggacccagtgtgggcagcccaaggccaagaccctggcagcttttctgatggtggacactggcttaatgatagtgagacgttctgtgaaccccccagcctcctgcctgaccggcccaccgtccccgggcactggcaggcagcatcagagagtggttacagcaaggacatggaatcagacagctcgggcctggacccaccactctgccagcctacctgggcagcagtgtggatgagggtgacccacttaacctctttgagactcagtgagtgccctcatgccaaacagggatagtaaaacctatcstgctgaagcccccacgggagcgggatcatttctctgtccagcctttaacacccctcagcatggggcctgcggcaccagct

SEQ ID NO: 838223 - DNA, 647 bp, Homo sapiens
acccacttaacctctttgagactcagtgagtgccctcatgccaaacagggatagtaaaacctatcgtgctgaagcccccaygggagcgggatcatttctctgtccagcctttaacacccctcagcatggggcctgcggcaccagctcccaaatgaacaatgacagaatgagtgttttccctccaacggcgccaggaggggtcagggatcggggtagcatcgtggtgtttcccccttctgggcagcggaggggccctgcttggccagccattcagaccccaccaaccctgcacctaggattggatgagatttcctgcccaggggttggagtgagatttgctgccacagctgcctgagccccaggacgaaggggaggctccgcctagcgggtattggacgccccagctgcctgagcccgggagccctgggatgaagtaggggctgcccatgccaaccgcagttcccccaacctgcccgccgcctagggggaagcaccaccccctgcccggggagaggaattcactcccacagggattctcctgctcattactcgacccacgcgtgagccaggcttcgctctctgccaagatgacacgtctaagaggcttagtcttctttatgctgtggatcctgaggaaatccacttag

SEQ ID NO: 838224 - DNA, 523 bp, Homo sapiens
ttgaaaacttcattgcatctgcaaatgtgctgtatcaatgaatatattaaattatttccaaaaatacatccatataaagaatatactatttaagcacatttattgaatatataagagaatatattaatgaagactgtacatatatatattagaataaataacataagcttgtaaacaaagaattgaccattcattgaattggccgtttggcaattgtcttgctttctttaaaggaaatatttccccataatcttattatatacattgaatctggagacatgtttctcaagccattaagcctcaatttttagtaagttgtagaaaaggttatatttgacaaaaaaaatcacaaatccccaccatgaagctatggcatataaatgatagttctgtgacctaggcatgattctaagtactttatacacattagctcacttaattctcataataactctcctaggtttgacattattgttgttattactattattattgttaytactgctgttcacagatgaacgta

SEQ ID NO: 838225 - DNA, 503 bp, Homo sapiens
ggagggtgtgtgtgtccagaaatttattcatttcttctagattttctagtttatttgcatagaggtgtttattgcattttctgatggtagtttgtattgatgtgggattagtggtgrtatcccctttatcattttttattgcatgtatttgattcttttctcttttcttctttattagtctggctagcagtcagactattttgttgatcttttttgttgatcttttttgttgatctattttgttgatcttttcaaaaaaccagcttctggattcactgattttttgaagggtttttcatgtctctatctcaacatatgaaaaaaagctcatcatcactggtcattacagaaatgcaaatcaaaaccacaatgagataccatcttatgccagttagaatggcaatcattaaaaagtcaggaaacaacagatgctagagacgatgtggagaaataggaacgcttttacactgttagtgggagggtaaattagttcaaccattgtg

SEQ ID NO: 838226 - DNA, 561 bp, Homo sapiens
ttatctctttaagaaagaaagtatactccaaggaatacagtgatgggtcagagtattgaacataactcatatagatgcgttatataattttgacccaaggcaaaaataaaattaggaatattttagagagcctctgatttccacagaacaaggaagcaagagaggctaataaaacaattttagtcacaatgcaggtgcgaaaggccgtgatgtaatggcagctgctcctcaggacagcatacttttcattatgctagaaacatactctgctacatagtaattctagtaaaatgtggcattcccacagcatcagtgaaaggcttgaaccttgggaaaatgtccttggactccaagccagagacagaaacacctggaactagaggagatgacttgttcacagggcagcatggtgccgcagctcctcacaagagctctgattcttaaaatacaactwctgcaagccagaaggccagccatatttcctccactttcttcccccacccccctacaccacagagagcatttattgcagaagagatgacctgggggtaaggaattttc

SEQ ID NO: 838227 - DNA, 602 bp, Homo sapiens
tgctagcatactatatagtatcatgtcttctacactcctaagacgtaatgttttagaaagatcattgaacatttctagctactctcttttttaaccttgctctcttttaaccctatttccttcatcagtactttacagatcatgaactaactgtggaaatctgacttttaaactgacctgcccttcccatcattctcttcagctcacatgtattttcctaactattggaaattaaagtctgatgtatagacatctggtagaatttgcaagtcaaaaggggggaggtagttatttttaaaatataagcgatttcaatatattttgaaatatgcagtttttacatgcacgatttcaatattgaaagtttcagggactccttaagatattctttgttttgaaatatttacatattatctattaccataaaatatgttaatgtgattaagccacaaagccatacaataattacwgtatcaattaacatcttaaagtttgcatgtagaatttatagttaataaagtgctattagtataaagtaaaatgtctgtagctataatcttttaattattttttaaaaattatagtcattttagaaaaggaaa

SEQ ID NO: 838228 - DNA, 572 bp, Homo sapiens
atagtgtaacatagtttcaaagttaacctctgagacattcattaacaaccagttctagagctgttagtgtctagagctcaagccttctggccacatctgccctcattttcttattgttctgccttctgaaacacttgtccggatcactgactactttttgtagcaccacttccaaattaggcagtgctctggaagggaagctacttcaaacaataaaattgataaatggccagagtctgctattttggtccttattttcattttctccactcagcaactgtccctttcatggttacacttttatttgaaatttgactttgtactacaagtggagatagaaaagcagttgataacttgcaatagataacacctctgaaatcaggaggttaccaaatattaaaaggactttgacttgattaaaaaaaaatgaaaacaatctaggggtgtccctccaatccatggtatacaattcygtggtaataaatcctagtacagtggaggatggatatccctgtatatttctgcacagcactctcccttctgcacatctcatggaaaagacatttgccagt

SEQ ID NO: 838229 - DNA, 639 bp, Homo sapiens
ttactactcttgtcacgtaacacttcaaacttgcactggtggtttgcatgcaattgacatgtaaaagcacatctgattgcttggatygtagctgaagtcaagtcctggtgctttttttggcctttgccgctgtctagcatggtcctcagtagatgtttgcattatggaatatgaaaccaggagcccactgagtgtcctacaggctgttagttccggagttgctgtaccaggtgatttcttggatacttcttggttctaacttcagtttcatgtttattgaagactggccagacacttagtcctttaaagctgctccactcaatctgaacctacctttaacgcactgtatttcccatgcctgcctccactctgtatctcccaccagatagcaatcaactccctgaaaagacaaaaactgtgtcacggtgtcttcagagctgagcctgctaactggtgtgtcgtaagcactaaaatacacttttattgaataaatgccgttgacaaatggaagttaggtaagccttctaattcccattttgtttcacctatgtatatattaagaccactgtatattaaaagtctaatacaaaaatctactatgttaaatgataatataataatctattccatcaatataag

SEQ ID NO: 838230 - DNA, 586 bp, Homo sapiens
agtatagcaggcaaatctgaggatccgtcaccacaaatgcggaagaaagaagattccaggggcactcaaagaagagcctggtacctcagtgaaaagtacagaaaagacgcagaatgcagccccrtatggaacaataggaatcagagcagcctcaacctcacgtatttctcgcagagcttgtacaaatctacgggcaatttcttgcccagttttcattctttttcccaggtaatttgggaatataaaaaggaaaatgcgcctctcttgactatgctctgtttttctaactctctgagttttttattccttgtatttgagctagaatgagaggatgttgatttacacatgtccgtaatgtttttgttttgttttaagctgtgaaaaggggatgatctccatctgtttgtgctgctataaccaaatacctgaaccttggtaatttataaatagtaggaatttatttctcacagtcctggagactgggagtctgagatcaaggcttggcaaggtcagaacctggtgaaactgctctctgcttccaaggtggcaccatgacaagcgctgtgtcctcagaggggacgagtgc

SEQ ID NO: 838231 - DNA, 579 bp, Homo sapiens
ggagaggatcaggagcccggaccccctgagacatgccttggacttaggaaaggtgaacagctggtgaaaactcacgggcctcatgtggctaagaagcgtggcactgtggcttctcccagtccaccttcagtggagaggcttcaggaactgccctcggtggcccctcatgctgagcattccaggcacagcaagcagcctgagttgttggagcagcaagcagttatcctcctggagcccggcatggcagagtgaagcacgccttccaggagagggacccgctgacagcattccagagttttcagaacattttaccattaaagccaacagcaaaccacacagggcctttcagccacattaccaattttactcaatggtaactcaaaacttctagtgagagtttgggattttccttgggaacccaattccactgaaccaaagtagttgaagaaacactttttagcaaatagtcycttatttgattaaagatggctacaaatactccaagaaatgtgcccagtggagggcttagttgagggatcccatccttataaccaaatttttgggaggaaaaaaagggaa

SEQ ID NO: 838232 - DNA, 637 bp, Homo sapiens
ccaccactttgggaggcagaggcaagggaattgcttgaatccaggagtttgagatccgcctgggcaacacaatgaaaacctatctctacgacaaatctaaaaaaattagctgagtgcagtrgcgtgcacctgtggtcccagctactgtggaggttgaggcgggaggattgcttgaacccaggagactgggactgcaggaagctgtgtttgcatcacttcactccagcctgggcaaagagtgagacctcatctccagagctgggtgttaggtgtgctccgtgctgtggtggtgataggtgtgctcactgctgtggtggtgtggctgctccctggtcctctccatgtatagagctggggaagacacacacacacacacacacacacacacacacctatatttatttctatgtctatatgttttgaaaactgtgagttcacactgataccttcaattgaaattcaacaacacaggactcattctgacattttccccttctaactttgtaaatcattcctttcattgagagaaagcagactcctattattcctaatgtatatacatattataatattcacatgtaagtaaacaatcctccttcactacgactcacctcccaatgccctaaatttggctctg

SEQ ID NO: 838233 - DNA, 576 bp, Homo sapiens
ttttcttcatcagcagcgagactggcatccctgtagctttgagaaaccatgctagtgtagatgccagctcmctccagcgggcctgactgggagaacttgggctggggttctggtctggggctcctaggcctgatgggaagagagttcagcccagctttcctgtacttcagctcgtatgcagacgatggccattgttgaaatgagagactcaaaggaagctggaacctgaacttttttgttgtctcgtggacacctgtgttcagtttcgggttctacctcttgctgtctgtgtgttcttaggtgactcacttaaacctttctgagtctcattgtcttcatttataaaataaaagacgtaacattgatgtcagatattgtcctgagcattaaatgggagaataagcaagcctcttctgcattcccctggcttccagtgggtggaggccagagaagctgctaaacatcctgccaggtgcaggacagcccccatcgcaaagaattgtctggcccctgatgtcagtaatgcagtattgaggatccttggtgtgggggaaacagaataaactcagaagcttg

SEQ ID NO: 838234 - DNA, 632 bp, Homo sapiens
tgtgcgcctacaagtcctttgcgtttccacttctgatctgccaagactgcagtgcttagttgggtagatttctttcccccgctaagctcacttttgtgatcaagagcyctctgctgagtcctttctgtatctgtgacagtttccagccagagctgcccagtatttttaggtacttgaaactagattaaaaaaatattcacttccttctgggtggctcaggaagtcaaaaagcagttttcatttttttttgtttagtagcacttagctttgagtagtcaggtcacctgggggtcttactggggccttgatgaccttaaaggctagatctaaggacctatgaagcactcccgcttgaaaggaggaagaagaaaacacacaaccatttgtaggaggaatagtggagatagaccaacccagaaactgtatttcagaataaattcattcctttgtgcttcaaggcccctcatactgatatgatgtcaccaaagctgctccagggctgtgacctgctagtcatggccctggggcacatccctttgctctccttctcagcatactgcagcagcagaggtagggtgttagggggtgtgcagattcatccctttctctagattatgagttcttgggatagg

SEQ ID NO: 838235 - DNA, 417 bp, Homo sapiens
cacaatcctcaaagcataacggttctggaggaagctgagcattcctacttgggaagggagggtargaatcaagattgattgaagtgagtcatcctaactcccctgctgagaggttcccatccccaggaactctgcctgtctgcacggattcattcctcacacactgtcgagcatcttgtgtgccaggtgctgcagatgaaaatatcgcatagttttgcaagtgagaaaaccaagactcagagagttcccaagataacacagcaagtgatgcagctgagattttaacccaggcagtctggctgcagagaagctggagtacttagccattatagaaacttcaacaacaatcaaaacgcagttcctgggccgggcgtggtggctcatgcctgtaatcccagcactttgggaggccgagac

SEQ ID NO: 838236 - DNA, 614 bp, Homo sapiens
acctaaaaccgattgtatatcaatcgtttgcctgtgagctgtgtaacatacacatgtcttgccttccaggagtttgtgatctagtgaaatgtrtaaaaatatacatgtcaaaggagtggcttaagtaccgttagagtttagagggggcaaacaattttttcttcctgtaagactttatgtctgaagcgggatttgagttgaggaataaaggtgatacataatagtaattcgtgataaaaataatattgaatgacaaattcaaatgcaatatttgttttattaaatctaagcaacttaggttggatataaaaaataagggtggaagatacaaaataatccaattacagcagatgcctttttatagctatattttgtttcatgctaattgaaaaattagaagcagaaaaactctgttaattagtactttctttagtttttttatatttagttttacctcctctatgagtcagcatttatgtttatccatatgaagagattgccaaaaaatcgtgacttaaacatacagggattgattttctcacttaaggcaaatcccaaggcatagcagctccatgatgtcactggggtttctttctagccctttaaccacccac

SEQ ID NO: 838237 - DNA, 683 bp, Homo sapiens
atggacaaaacacatgggagacaggatccattcgggctgcagttctacagctgyggattctacactgcacctgactttcaagaaactattgctttttctggctgggtgtggtggctcacgcctgtaatctcagcactttgggaggctgaggtaggtggatcacacgaggagtttgagaccagcttggccaacatggtgaaaccccatctctgctataaatataaaattagccgggtgtggtggctgtaatcccagctactcggaggttgaggcaggagaatcgcttgaacccaggaggcggaggttgcagtgagccgagactgcgccactgcactccagcctgggcaacaagacccaaaaaactcggtctcaaaaaaaacaaaatgaaactactgtttttcgagttttggtgtagtagcaacaaatacccataattatctgaaaaggctacaacaacaaccctcccttccagctacatagctgcatgaggccagatttttttttttatacttcaaccaaaacaacatatccctggccaggcatggtggctcgcgtctttaatcccagcactttgggaggccgaggtgggcagatcacgaggtcaggagatcgacaccatcctggctaacacggtgaaaccccgtctccactaaaaatacaaaataattagccaggtgtggtgg

SEQ ID NO: 838238 - DNA, 643 bp, Homo sapiens
aattgtagttctgtaagtagtggctgtttcttaacatctatttctatatcctgtagcactctctgtacttcctactggttctgttacagtaaataatcctttacactaaacattctctgctcaaattactgcatgatttctctttcctgactggacccagatttatataatcctgaaaaccagaaagactacacacaagccaccgaaataaagacagcagttgagcaataaaattaactaaaatacaacagatactgatacttggctaaagcatccacaacctcctcaatttaacttaaattactatatcccacaaacattctctcatccttttaactttaacttctaagtattggggggcggggaggatatcttcgcttcttggcaaaattttaaacacctgtcaccacattttctgtgttaagagagctgtcacaatgatcagagaggggaagttagacgccagccctgactaagagtactgagggtggcagttaccaattctgccatcttcaagttcctgcctaggacaatatatcatacaaacttttagacagraggatgccttagtggcttcatctactgcagtcggcttgaaaagaacttgttaactgaagcacatgttctttctggtgcccttgct

SEQ ID NO: 838239 - DNA, 600 bp, Homo sapiens
tatatatatagcttcagaaaccttaaatgatctgtagaaataacctgataaactagctacagaggctaaataggtagtacagtttacacaattaacagtgtgtatttacagcccccttgsatctaaaggaatcaaagaacattcactatataattacctggtatcccaccaccaccttcttctcttgttaaagattctgacttttaccattcattccatgtacttgttattcaacagaattctgactgacatttttaatatgcacgaatatattgtttctgtttatacataagtctgaaagcattcataccaaactgttaaaaaaccattaccccagcaaaccatgaggagcagacacagatgatgggggcctgcttgtttaactccatttaatttagtaatttaaatcttatttctgaatatacaataatttttcaataaaaagattaataaccacatacaatattgtaagccacaacatttccttctagatgacacaaagggatctaaattcatcccctgaataggtttcctacgttaaatatactagcataggccatagatccagacaccaaactccagataccacgtatcatttct

SEQ ID NO: 838240 - DNA, 591 bp, Homo sapiens
ataatgtgaagttgtaagagctttccctgtaaatttatgaaaactcaatctagattcttttctgctttggaagcaatatstgttttagagttggatctaactctggcactcattaggtgacattcgcttaatcagtggcgtattttcaggtgctggctgggcagtgtcatttcaccagaagtgttcatgtgtgcagattgttatggtctcatgaagcttggcttctgtgggctctgtgtctccacacatagacatgtagtttgtgggaagcttttgttaaaacatgagtttctgctgattgttggcaactttggggagaaagggtggattgacttaactttaacacattgtgtcatcatgaacatatattcttacagatgaaattgttggatacctggaccagaaagattagacacatttgggcttaggtctcagtccactttttgaataactatgtgaacttgggcaagtcaataaaaattttagaacctcagtttcctcatttgttatatgcacacagtatatgcaagtaactatgcaagaatcttgcatagttatttgaggtttaattaagaacatgcataaaacatc

SEQ ID NO: 838241 - DNA, 641 bp, Homo sapiens
tccctgtcccctcaggaaaaagtcaaaatccttcagcataacacrtaaacctatatcactactctcagattcagacagtaagctccagcctactgaatgacttactttttattccctgatcccatcacctccttggcctcaccagcattgcccttgcacatgatgctttgtcgtctaggtacatcaaccctccatgctgaacaggtgcaccagcagaaggctttctgcatgaccttgttaatgacacagcatctccggcaccctggctcttggtgagtaatttgatgtgcattcatcacctttgcgtaatttgatttcagtaacattggtcatggtctagttttgatgtgtgaatgctactaagccttgaggaggatctgcaggtatggttatctgatttggagagtggcagatctactaggaaacattacaggactaatgggcaagatctgagtgttaacagtgattaggcctaaggctagactattacccaactgtatgactcccgaaaggacttaaactttctgggccttattgggcttcttatttaggcctatttttatttatttattttatttttttgaaacagagtctcgctctgtcgcccaaggtggaacatagtggcatgatcatggctcact

SEQ ID NO: 838242 - DNA, 626 bp, Homo sapiens
tccaaagtcaacacatcaatcctccccagccacagcgcagaaaccagcccaccccacataattcttcyggtccaggagagaagctcagataccttcacagaatgggacatttcttaaagtccacttgaaaatctgtttaaaacaattctaaagcatcagctaatgcattttctacagaatattttagaaaaggcagtatctggaatttaatattcagctatgtataccttggcaagatgagatacaatccctaaagcacatttctttgccatttttatttacagcacagacaacacagattcatgtcagctttctctgtaactgtaaatgggggtgaagaacctcctttttaaaatatgtgactatatacatatttttaattataaatatctaatataatttaaaaaccaaactaaaccaaaccagaggttaaattgtattaggtttcataccacaatgaaatctgtaattacaaataaataagtctctggaaaaatacataaataaataaatacatacatacatgccattttagaaatctaaaacctaaaatggaagattgttcagctaatcattaccataattcagttaacataaggtaaactaaaaaagggaccataggtctt

SEQ ID NO: 838243 - DNA, 560 bp, Homo sapiens
acttttttttttttttttgagacggagtctcgctctgtcacccaagctggagtgcagtggcgtgatctcggctcacccttctaagctccgcctcccgggttcacacygttctcctgcctctgcctcccaagtagctgggactacaggcatgtgccaccacagctggctaattttttgtgtttttattagagacggggttttaccgtgttagccaggatggtctcgatctcctgacctcgtgatccgcctgcctcagcctcccaaagtcaatcacatgtcttataaaggacttatatctaaagcatatgaagagcttttgaaatttaataataaggaaacagactaccaatttaaagatgggtaaaagacatgagcacaagataaaaaataggtaaaatatatacagcaaaaaagatatacagatggcaaataagcatctgagaagatattcaacatcattgatcattagggaaatgtaaatgagaactacaatgagatgtcattacatactttttaaaatgtctgaagttaaaatgactgtaccaagttctggtgacaat

SEQ ID NO: 838244 - DNA, 510 bp, Homo sapiens
gttcatccacacagtggagctcaaagcatctttgggatgattaaatgaaataatacgagacactatttgtaaggtgcttgaaacctagaaatrataaactgagtgctcactatggttaagcattcttccaaggacttcacatgttttaaaatatgaggtaggcactattaacatttctagttcacagagaggaaggaggcttggagaggttaaggtatttgcccatcgttgcacagctagtaggtggtaacgctgggattcacccctggctgactgactagagagactgggctcttcaccatcatgtcaccatacatgctgtctcaaaaatgtgtcattgccactcccctccactccccccaatttcatattaatttggctttttttgagttgatttgtcggggcatcaacatttatgaagaaaggtgagatatagtggagaggcggtaggataaggggaattgcagactgccatagaagctgcaaagtccatttcttctttgaagattg

SEQ ID NO: 838245 - DNA, 629 bp, Homo sapiens
caacatttttggcaccaaggaccagtttcgtggaagacagtttttcccatggaccgggggcaggagrggatggtttggggatgattcaagcacattccatttatcgtgcactttatttctattattattagattgtaatatacaatgaaataattctacaactcaccatcatgtagaatcagtgggagccctgagcttatttttctgcaactggatggtcccatccgggggtgctgggagatagtgacagatcatcaggcattagactctcataaggaggttgcaacctagatcccttgcatgcacagttcacaataggcttcctatgagaatctaacactgccgctgatctgacaggaggcggagctcaggtttacggtaatgtaagcaatggggagtggctgtaaatacagaagcagcaccgctcccttccccaccgctcacctccttctgggtagcctggttcctaacaggccatggaccagtcagtacccatccatggccaaggggttggggacttgtttagactagataattcctaagttcctttccatttctccaagcttccaattctgacactataaattctgaccaggagtgaaataaaccaggcacagaaagacaaactt

SEQ ID NO: 838246 - DNA, 638 bp, Homo sapiens
tcattgcaattggaccagcagcagggatttccagaatccctgagagcgttatttatgarctgtgcttctcaattctgttttttcaaatgaattagggaagtgatttgaatcataaaataacaaaaacaaattgactgcccaagagaaagaaaatgagcaagaatataaaatttctttgtaattctaaatgttctgtagtggtttcagttagataataaattcatttatatcaggaaaccgccccccaactcagatagatggatgtttgtgctgtgcaccagagttaggacatcagccttgtagaacaacatggtgttgaaattaggatgcctcgttgtggttctgtagaatgttgatgtctctgagtatggatctccatttgacacaaaattttacaaagtttgtggctggcatctctttctgggccttacgctctatttcttccatgccccagtctctaactctgtgcttggtctttcctcacagactgaatcactttggaacatatcaacagatcatttaaaggtacaaaatgaatatttgtatgcaatttttaaaaagacagccagttgtgatcaaactccttaccatcagtaggacacacatgagagttctgagaataagaggaagagagttca

SEQ ID NO: 838247 - DNA, 526 bp, Homo sapiens
aaaataacacagggatgccagcacccctagttattttccgatgagcattagtcctagagcgtcctctatggtcctaatgcttattcytttccagggtgcgtaaccacccatggacctctgcttatcagattagttacgctcaccaacgtagcagtcctgcacctgttttcccgcctttcttgaccacaaagaaagggctctgggctgctggattctagtggtcctttaccagtgtgcccaacattgcctttgcgctcagaggtgagttctagagctgggctgggttcctgagtatttcctaacaacccagttcccccatcaagatgcattcccacaaacaacagttcttatgcaaattcatttcagagagggtgtggataatcttttgagtcaggattgagacagagtttttttattctgtaagtactttaaggcttggctgagtgcaaacagctcccacgtttgagcagacccaattattaggcaattttcctaactctgcttctacaagagtttccctcaatta

SEQ ID NO: 838248 - DNA, 510 bp, Homo sapiens
ctcttttaaatttcatcctgctggtttcagcccactgtttcaagttattttagaatcttgactttgaaatattagcttttcatcccaacagtggtgccttctgcaaatttggcaagtgtagtgggcactgaccactactaggctgaccagggtctaggagcacagaactagagatacttcctcagcaagctctgcagcaatcggataaccaactggggtgaaggagcacagcagttacatgaatccacctgactgggcagtctctgagatcgatattttcctactagcctcttcaatcgtgagacaatcaatgtctaactggaaacaaggaacactatgtatggcccaaggaattttcctagtggccttctgagtaaataagtaacaaattattgttgatatttttatcattttcgcckcatcttgttctttgtgaagataccacttatttttctaggtgttctcaagcaaggtgttctcaaatccatggtttgatgttatattctagaa

SEQ ID NO: 838249 - DNA, 651 bp, Homo sapiens
acacactggggcctgtcggggaatggagagctatgggagggatagcattaggagaaatacctaatgtagatratgggttgacgggtgcagcaaaccaccatggcacgtgtgtacctatgtaacaaacctgcatgttctgcacatgtaccccagtacttaaagtataattaaaaaaaagaaaaagagagaaaatcccaacagattttttaatagaagttgaaaagctgattataaattttatgttgaaattgaaatgacctcgaatagccaaaactatctttaagagggaacaaagttggaatacttatgtttccagagattcagacttaccataaggttaaatcagtgaggtatcaatataaagatagacagacagatcgatggaaccaatagacacagtcatatttgatcaaaatattttcagcaatgtacaacatattttcaacaatattaccatgaaatacaacagcaaagaaagtatttttaacgaatggtattgggataactttatattcttatttttaaaataataaaaagtaattgaacctcccatgatacacaaaaattaatttgatgtgtattaaaaacattaaacataaggaaatctataaatcatacagaagaaaacataagagaatgtctttgtaacct

SEQ ID NO: 838250 - DNA, 637 bp, Homo sapiens
atatatatatatacattttttgatgttttcttagttttattctaatgtagcttttttggctttgaaattataaatacattacttttggtaatatttttgtttcagatttacatttaaatatttggaagttacagtgataaaatattttaattttagatagctacttagttggtgcatctatatttatcttagtcccaatgatttattatacaatgtaccatcattatgctacctatatgctttctatctacttttgcaaattttaggtacctttaatctctcttaactcacacgtaaaccagtgctacactcttatttgtagttttagtttacctttgaatacctgataaggcaattttgatttcattacttccctttctagaatttttttaatagacagggtgtctctctatcacctaagctggagtgcagtggcataatcatagctaactgcaacctggaacttctgggctcaaggggtcttcctacttcagtatcctgagtagttaggattacaggtgtgygccaccatgctcagctgatttttaaaaaaattttagtagagactgggttatgttgcctaggctggtgtcaaactcctattctccagtaatcctcctgcccctgcctcccaaag

SEQ ID NO: 838251 - DNA, 552 bp, Homo sapiens
gaataatgccacaatgaacatgggagtgcaggtatctctttgacatactgattttaattcttttrgataaatatccagaagtggtactgctagattactggctaattgtatttttagttttttgagaaacctgcacaatgttcaccataacaattttacaattgcattctcaccaacagtgtatcagggttcccttttcttcacatcctcaccaacacttgttaactttcatctttttgctaggagccattctaacaggtgtgaagtgataccttgttttgcaactttaatttgcttgtccctggtgattagtgatggtaagcattttttaataaactttggtcacttgtatgttgccttttttttttcttttttttttggagatggagttttgctcttattgcccaggctggagtgcaatggtgccatcttggctcactgcaacctccacctccttggttcaggtgattctcctgcctcagcctcctgagtagctgggattacaggcatgtgcaccatgcctggctaattttctatttttagtagggacag

SEQ ID NO: 838252 - DNA, 620 bp, Homo sapiens
tatatgaatatgcattgtttatgaaatatatacagtctacattatatttcaaatccttctgtaatgttctatgtcasgataatgtcttcagagctgccattatacacatcctaattaagagacagacattttatttcagaagagtatgcaatacaaggcattattagatgtatttatagaagaatgaagattaagaatattaatgtgttttctaagcaatatttatctgtgtttatcaaattgtaggtaattgcaaaaataaatctattctgcttattcgatctcaagaaacagcacacattttttttgcgatgtaaataatcaccattgtgattgtctggaagactccattagaaaattttcactgcttttgacaccttcttatatgttattcacagcagaggaaacgtaggggactcttcattggcaggtatctaacatcagaccaaaagagaacagtttctcttatcctgcatttgcaacatgagagttgatcataacttatgaaaatgtgtctgacaaaggtctctatatttagtactgaagagtagggaaaaggaaaagaaagaaccttttcatattaaaatatatgtttaaaagccttaacccaatggatgctg

SEQ ID NO: 838253 - DNA, 540 bp, Homo sapiens
caaaatttaaatgtgtatagttttaacatcaatgaaatccagaagagatagttgaagraaaggtttctgaggtttttaggatggaaggaagcataggtaaaagatcataaaactgtcagcagctttttaaatatatagagtgttacataaacacatatctgtccataagtagtgatgccataaaattgtctatccttcacctcaaatacacaaagtgtaatttattttttctttaacggatttggtcttccttatgtgatgagtattgggatatcatactttattttggtccatttgcgtctaatctcacattagtctataatgctgtagattcaagtatccctttaggcagtgctgactttcttggttaaaaatcctgtctctcaaccagtacctctctacctccttaccctaaagtggcatctgagggaagggttgacttcctaacctcttagtgctgagataagatccctgcattgtgatgccctgcgacaaatgtgaattccttttctttttttctcctatattcctgcagttgct

SEQ ID NO: 838254 - DNA, 631 bp, Homo sapiens
tcaataaaggattaatactcaaaatatattttttaaaattcatataactcaatagtaaaaaaaccaaataacttaactaaaaataggcaaataagctgaataaatatttttccaaagaagacataaraattgatatgtagagaagtgttcaattgtgaatgatattttgttcctgatttggctgtcagcttcgatgttgttggtgtataggaatgctacttatttttgtacattgattttgtatcttgaaacattgctgaagttgtttatcagatcaaagagcttttgggcagagactgtgggcttttccagatatagaattatctgtacactgggatagtttgacttcctctttttctatttggatgttgtattagtcagggttctctacagggacagaactaatagatgcttatataaaggggagtttattaaggagcattgactcacacgatcacagggtgaggcctcacaataggccctctgctagctgaggagcaaggaagccagtgcgagtcccaaaacctcaaaagtagggaagcctacagtgcagccttcagtcagtggttgaaggtccacgagtccaaaagctgaagaacttggagctcgatgtttcaaggcaggaagtatt

SEQ ID NO: 838255 - DNA, 631 bp, Homo sapiens
tcaataaaggattaatactcaaaatatattttttaaaattcatataactcaatagtaaaaaaaccaaataacttaactaaaaataggcaaataagctgaataaatatttttccaaagaagacataagaattgatatgtagagaagtgttcaattgtgaatgatattttgttcctgatttggctgtcagcttcgatgttgttggtgtataggaatgctacttatttttgtacattgattttgtatcttgaaacattgctgaagttgtttatcagatcaaagagcttttgggcagagactgtgggcttttccagatatagaattatctgtacactgggatagtttgacttcctctttttctatttggatgttgtattagtcagggttctctacagggacagaactaatagatgcttatataaaggggagtttattaaggagcattgactcacacgatcacagggtgaggcctcacaataggccctctgctagctgaggagcaaggaagccagtgcgagtcccaaaacctcaaaagtagggaagcctacagtgcagccttcagtcagtggttgaaggtccacgagtccaaaagctgaagaacttggagmtcgatgtttcaaggcaggaagtatt

SEQ ID NO: 838256 - DNA, 592 bp, Homo sapiens
atgatttcggctcactgcaacctctggctccttgtttcaagagattctcttgcctcagcctcctgagtagctgggattacaggcatgcaccaccatgcctggctaatttttgtatttttagtagagacagaggttttaccatgttggtcaggctggtcttgaactcctgacctcaagcaatccacccacctcggcctcccaaagtgctgggattacaggcgtgggtcaccttgcctggcccacagcatttaaatattaataaacacatagaagatgtgtacaaacctactacccaaattactttagttgatattttaggacactatggccaactacttcagaatacaaattttaatcatgtgcaaatgaaattttcaccaatatagacaggtgatgctccacttattgaatgacacctcaataaacatacagagcatgatctccaacacaacagaattcaactaaaatcaatgacaaaataatatgaaattatcagatgakaaattgagtgacagactttcaaaaatctcattaaatcaacaaaaatcataataaaaataatgtcttttgatctgaaaataatgaaaatata

SEQ ID NO: 838257 - DNA, 474 bp, Homo sapiens
aaagctttcaacttttcctattgagtgtgatgttagctgtgggtttgtcatatatgacctttgttgcactgaggtagatttcttcaatgcctaatttgttgaaaatttttatcatsaaagtttgaaagtgtgctgaatattgtcaaatgctttttttgtatcttgaaataattatatagttttagttcttcattatgtttatgtgatgtatcacatctattgatttccatatgttgaaccatccttgaatccttgatatgaatcccacttgatcacagtgaatgatctttttaatgtgttgtcaaatttcgtttgctagtattttattgatgatttttgcatatatgtttatcagagatattgacttgtagatttcttttctttctttttatttatttatttttatttttatttttatttttgtagtgtccttgtctggctttgatatcagggtgatgctggcctcataaaatg

SEQ ID NO: 838258 - DNA, 502 bp, Homo sapiens
gagttgaacaatgagaacacctggacacaggatggggaacatcacacaccggggcctgttgtggggttgggggatgggggagggacagcattaggagatatacctaatgtaaatgatgagttaatgggtgcagcacaccaacatggcacacgtatacgtatgtaacaaacctgcacattgtgcacatgtaccctagaacttaaagtataataaaaaaattaaattaaaatttttaaaaaaagaaaataatttcaccaaaggcagcaacatgtgtctcagaaggtttcacttacggtaaaatatgaagtggcagtttctgagttcagacacagctgaagaaacctcagtacacaagtgcagaaagaaaccttctttgcctttaggttttctgaaagaaaataaaaagtcaccctgtatttcccccagcattcagggtagtgccatgtgtgaaaagagayagcaatgctctatcagccatgatggccttagtgacagaatcctg

SEQ ID NO: 838259 - DNA, 602 bp, Homo sapiens
tgaataaatatcagccaattggcatatataggcaactgtactcaacgatgaaagagcatatattttttcatgyacctaaaaaattataaaaatttacattgtgctaaactagaaaactagggtcaacacatatgagggaaaaaatagaaccatttaagacatactttctgaccacaatggaattaagccagaaatccaaaagacatgtagaaatcccagctgctcggaaaataaattttgaatttcaaaataacccctactcaaagaagataccctgttgtaaattacaaggtgaaaagtattaagtttaaataataatttcaaaataatttaatagtaattattgagtaataataaaaataaagcatgttaagaattgtgggatacttttaaagctgtgcttacaatgatatttgtaactttcaatacaaacattaaaataataggctaaaatcatttacagaatacacacctcaagaaaataaaattaactaaactctaataaaataaaataacagaaataataaagacaaaagaaaaaataataaaattgaacataaattttaaatatagaaaatctaaacagccaaaagttggttcct

SEQ ID NO: 838260 - DNA, 613 bp, Homo sapiens
gaattaaagcagataaaatacttttgaaaaaggagagtaatgtcagagaaacctgtctacctaattttaagacatactgtctagctaaaacaatcaaggccgtgaaataaatacatatatccgtggaacagaaaaggaacaaaaattcaaataaattagaaatagactcgtataatatgccaaactgatttgtgacaaaggttcaaaagcaattcaaccgagccctttcaaaaactgatgtggaaaatttagacagctataggtttttttaaaaaatgaaccttgaccttatattcacatgttatacaaacaacccagaatgaatcatgagctcatgaatcatgagggtagaacataaaactctaagaattaggggaaaaaatgagaaaatatttggtatctaaggctgagcaaagagtttgtggacacaacaccaaaagcatgatccataagagaaaacattgataaatttacaagacacatcatagacaaaaattaatatccagaatataaagcatggtgtattagtcagggttctctagagggacagaactartaggatagacgtatatatgaaggggagtttattaaggagtactgactcacacgatca

SEQ ID NO: 838261 - DNA, 648 bp, Homo sapiens
atactttatccatatttctttaccacaaacttgtccaacctgcagcccaagggctacatgcagcccagtgtggctttsaaggcagcccaacacaaattcattaactttcttaaaatattacaaaaaatttttttagctcatcagctatcgttagtgttagtgtattttatgtgtggcccaagacaattcttcttcttccaatgtggcccagggaagccgaaagtttagatacccctgctttaccacatagcctgtcctgcagaacatcaatttccttcattttctgtatcccaaggaaaattggaaaaggccatctaggtgacgatgtggggacctccaaccttgtaatattctccatagaagctgtgaggtgtcgaggagagaaaactagtgggaatattacagttctaatttggatactggttcctgctccctctcaacttctccttggccatatgtagactccagggcttcttctgaatacatccggctgtccttcttgaaagaaatgagtcctctgtgctcattaggaacccacttctcattccactctcttcccacgtggtttgggtgggggcaagatcgccgatggatgtgtaaatcagtaattagttgtaggttcagtatttaacccaagtacttcaaatc

SEQ ID NO: 838262 - DNA, 562 bp, Homo sapiens
aatgcttgcccttaacataggatttcagaacactgctcctggggtctgaaagtttgtccctcacataggattccagaactctcctgctgtggtctgaaagtttgtaccgyacataggattccagaacactgctgctgtggtcggaatgtttttctgtcacataggattccagaacactgcagctgggttctgaatgtttgtccctcacataggatttccgaacaatggcaagaaggtctgattgttgggtccctcacataggattcctgaacactgctgctgggctctgaatgtctgtccctcacattcgattgcagaacactactgctatggtctgaacgtttgtctgtcacataggattccagaacgatcctgctgtggtctgaatgtttgtctgtcacataggattccagaacactgcggctggggtctgaatgtccctgacataggattccagaacattgctatgagagtctgaatggttgtctttcacatagcattccagaacactgctacgagggtctgaatgttggtccctcacacaggattccagaaccctcct

SEQ ID NO: 838263 - DNA, 635 bp, Homo sapiens
tcctggctgtgctttccagggaacagaactaaatatcacaatttgaatttcctcattgcaatctgaatcaatgactccagtgtgtatttgtaccccttttaaacttaaactagaccttcctaaaagtaatcccattgtccctgctcgcaacggtccacagactcctgttgggaccttttgcggggttccccaggcagaaggctcacagcttttgtgcagcatagatctactgcagcactatgggctgtggtggggaaagataacgtatgggggtgagggaatggcctgagatggaaatgccctggtttagaacagggcctgggatgggcccctcagggagtttcccaaaatcgggttcccttctttatgaaacttagagtgacactgattagcccaaagttttccttttttacattttggacatatttcaggatcagcagttttgttttttcccctatctggtggcctgactcggtgattttttttttacattctttttagtatgaccatgcttcccacagttaaaacaagctccaggaaatagagtrtttcctttatccactctcagtcctgccatcgcctgtgccaacaaagtagctttatgtagattatctctgatatcatcaaaggccttg

SEQ ID NO: 838264 - DNA, 536 bp, Homo sapiens
gagggtgtcaaattataaaggatgagttgggatggcagtgctaagagttggggatgaagtgagggttataggagggtggcatcagggttgagatggggtttgaattcaggacagagataaatgcatttggtgggatgatctgatagttaagagtaaggactcaggaaccaggatttctaggttcaagtcacagctttaccacttattagctattgaccttaaataagctacgtaacctcagtctgctttagtttcctcatatgtaagatgagaataaacaagaatccttgcctcatagggttgttgtgaggtttaaataagcaaatgtatgtaaagcatttgggctggtgcctggcacatggtaattgctatgtaagtgtttgttattctattgttattggagttagactaagggttggggctgggttagttgcagggtaagggtaactctagttcatgattccacccattactgaaggttctgcctcaccrtcagagggggtctggggatagaaagtgcccagattatccctccc

SEQ ID NO: 838265 - DNA, 347 bp, Homo sapiens
aggggaaagaaggctcatgcatcatccttcagggaaacgacaagtattgcctacatcacttcccttcacatcctattccagatcttagtctcatggccaccctggctataaraaaggctgggaaatgtagtctttagtttgaacagctatgtgcccagatgatgattgagggttctattcctacagaggagagggaaatggatattagcagacaacttgcatcctctgcccagtgtctgcatttttcccttcctgtaagcttgcagttgaaatcctcaaacataagtgcaaactatagataacaaataaaatcaaattaatcttatactattaaataatgcatatgt

SEQ ID NO: 838266 - DNA, 511 bp, Homo sapiens
gttctgtgtctctgggctaccacttctcaggctcgaatctcctctctctcctcacagcccactggccttttgagtctaaggccccacccaattgcatgggaagagtcacagaatcacagactcctggagtgggggagatcatttcattacagaccagaaaggttctgtgacttactccagatggtacacacagtttgaagttgtttgtggacggcaacttatagaccccgggcaatctagtgtcatggatcggaggtgggctctgattcagacaacctgaatccatatcaaggttccatccctgggggactgaatagccttgaacaagtctgtggacctcatccacagtctagggatagtaatggtgcatagctcatgaggttgttgggaggagaaatgagctcattcctgcatcgtgtttggcacacaataracactcattaaccattagctggaaatattattattattctcatcttgtggacattcccttaacatgcttgatacccca

SEQ ID NO: 838267 - DNA, 654 bp, Homo sapiens
caagcgatgtcacctaaaaaacaaggatttatcgtttaagtcttcttaattagaagagaatgtctacattatttaccaattaactcstcgctcctcctcaggggcagtgctttagccccagggctctataatcacatacaaaatatttccactattatgatgctcattcaaaaataaataaatatcagcacccccacagatgtttccttatttgctgaaggaaaaagaagataaacacagttattgtgattcacaatatttgtgtaaaaggcaccacactagagccttcccaagtactcccaacaataatattttgagaactttaattttttatcttgggtggctccatgccacttggattcagctcggggctccccctcagtgttaacacctacagtaagtcagaggaggcttgcaggatgacccggtgcttccaggaattgcctgtgccctccagaggcaggcggccgatttccctttggcagcaggtgtcagggaggtctacagcacctgatcacctttccagatcagcttggagggtgctaaaagcaggggttctccaacttgagtcaccgtcagaatcacctggaaggcctgtgaaacagatggctcaggctcaccccgcagtggctgactcatctgtgttggggcctg

SEQ ID NO: 838268 - DNA, 621 bp, Homo sapiens
ctaacactataaaacaatgccaagagcaaatgaaggaaaacaaaaatctaaaggggcacccctgcccatcgttttgattcttcaaaagtttctgaaaacatatgagaaacactgtgcgcagtctcagacgtccgtgtgtccagccatcaaaagtgacctgaaaagcagcattgacagtgaccaggtgctcaggaaggtgagtgtatggtcttgttttcttattcttctctgaaatgaactggctagggtttactcccaagccacatgggtactcggtccttgtgtaacctcccaaggggttctttctgcccgctgcacaaataaagaccacagcattgtagtaaaaaagagtttgattgacaccaggccagccacgccatgtaaaagatgaagttatcactcaaatcaaactctctgaaaattcaggattgaggtttttaagggtaatttggtgggtagggggtcacaaggtggggaatgctgatttgtcgggttgaagatgaaatcatagggagttgaagctgtcctcttgcactgagtcagytcctgggtagggtccacaagaccagatgagccatcttacccatctgagtggcaccagctggtgctttggaacacagg

SEQ ID NO: 838269 - DNA, 589 bp, Homo sapiens
tgtggatgcccacattgcatctacaccacctggaaatcaacaggtagacaagcctagcctacattctcctcctcaaggaagtgcccacaaaagatgtggsttactggctacataaaaagacaggacattggggaccacataccttttgggacatagtgaaaattgaggactaccactatgatataaagatatagtactcatctatcagcaatgtcctacctgtgcacagcaacacctcaggccctttccacacaatactgaacagataggccagggctgcagccaagtgcaacagtggcaggtagactacataggacctttgcctctatgtaatggctgccaaggaacccagtaatggctcagcccaagtcccaaaacctcaaaagtaaggaagtcaacattgtggcctcacagctgtggctgaaggcccgagagcccctggcaaaccactgatgtaagtccaagagtccaaaagctgaagaacttggagtcttgagagcaggaagcatccagcatgggagaaagataaaggcaagaagactcagcaagtcagcttcttccaccttcttctgcttgcttttctagccat

SEQ ID NO: 838270 - DNA, 499 bp, Homo sapiens
agcaccatttattaaataggggatcctctccccattgcttgtttttgtgtcaggtttgttgaagatcagatagttgtagatgtgtggtgttatttctgaggtgtctyttctttctcttccattggtctatatatcagttttggtaccagtaccatgctgctatggttactgtagcctttagtatagtttgaagtcaggtagtgtgatgcctccagcgtgttcttttggcttaggattgtcttggctatatgggctcctttttggttccatatgaaatttaaagtaattttttctaagtctgtgaagaatgtcaatggtagttttatgggaatagcattgaatctgtaaattactctggctttgcctactttttaacgggtttgtttttctcttgtaaatttgtttaagttccttatagatgctggatattagacctttgtcagatatacagtttacaaatattttctcccattctgtaggttgtctgtttactctattc

SEQ ID NO: 838271 - DNA, 499 bp, Homo sapiens
agcaccatttattaaataggggatcctctccccattgcttgtttttgtgtcaggtttgttgaagatcagatagttgtagatgtgtggtgttatttctgaggtgtctcttctttctcttccattggtctatatatcagttttggtaccagtaccatgctgctatggttactgtagcctttagtatagtttgaagtcaggtagtgtgatgcctccagcgtgttcttttggcttaggattgtcttggctatatgggctcctttttggttccatatgaaatttaaagtaattttttctaagtctgtgaagaatgtcaatggtagttttatgggaatagcattgaatctgtaaattactctggctttgcctactttttaaygggtttgtttttctcttgtaaatttgtttaagttccttatagatgctggatattagacctttgtcagatatacagtttacaaatattttctcccattctgtaggttgtctgtttactctattc

SEQ ID NO: 838272 - DNA, 578 bp, Homo sapiens
ctgttgttttcctgactttttaatgatcgccattataactggcgtgagatggtatctcattgtggttttgatttgcatttctctgatgaccagtgatgatgagcattttttcatgtgtctattggctgcatagatgtctgcttttgaaaagtgtctgttcatatgctttgcccactttttgatggggttgtttgtttttttcttgtaaatttatttgagttctttgtagattcttgatattagccctttgtcagatgggtagattgcaaaaattttctcccattctgtaggttgcctgttcactctaatggtagtttcttttgctgtgcagaagctctttagtttaattagatcccatttgtcaattttggcttttgttgccattgcttttggtgttttagacatgaagtccttgcctatgcctatgtcctgaatggtattgcctaggttttcttctaggggttttatggttttaggcctaacatttaaatctttgatccatcttgaattaacttttgtataaggtgtaaggaagggatccagtttcagytttctacctatggctagccagttttccc

SEQ ID NO: 838273 - DNA, 617 bp, Homo sapiens
cctgatggtccttccctacccaccctggtagtggaagacaaagggcatataatcttgggagttctagggccctgctcaccacaggtccctctccataataccacagctgatgctctctggaaagcgccacctcccggcaggaggccaacgaccactaaaataaagcattaaaccaccaaagctaagaaccctcacaaagtccactgcatcccccaccacctccaccaggacaggcactggtatccacggctgagagacccacagatggttcacatcacaggactctgtgcagacaacccccagtaccagaccagagccaggtagacttcctgggtggctagacccagaagagagacaacaatcactgcagtttggctcacaggaagccacatccataggaagagggggagagtactacatcaagagaacacgcagagggacaaaagaatctgaacaacagccttcaaccctagaccttccgtctgacggagmctacccaaatgagaagaaaccagaaaaccaactctggtaacaggacacaacaaggctcttagtacccccaaaagatcacactaggtcgccagcaatggatccaaaccaagaagaaatccctgatt

SEQ ID NO: 838274 - DNA, 539 bp, Homo sapiens
tgcttctataaattaaatcaattttcttttcttaagagatggggtctcactctgtcacccaggctggagtgcagtggtgcaatcatagctcactgcagcctcaaactcctagggtcaagtgatcctcctacttcagccccctaagtagctggaactaccataccctgctaaaaatcagttttcttaacaagtatgataaaatgttttatttacaaactaggttactcttaggcatactttctgcttcagtttccctataacatgaaagtccttaagattatagttcaagtacaattttagtactattattcatttgtaatttaaaaacttaaaaattttgaaaataagaaaatacaaagaacaacttaattaccactgttcacatctggatatatatacttccacttatttagatttttttttaatatggacaaaataattattcttgtttttgtaaaatgtatctatgttcrtaaaaaataattcaaacaatacaagaagcacaaagatggaaatatatatcacttccactttgcaat

SEQ ID NO: 838275 - DNA, 610 bp, Homo sapiens
atgctaaggtttggggtatggatcccatcacccatgtagtgaacctaatacctgataggtagtttttcaaccaatgacctgtcctttcctctcccatctagtagtccacagtgtctstcgttcccatattaatgtccatgtatgctcaatgtttagctctcatttataaatgagaatatgtggcacttggtttttgttcctgttaattcacttaggattatggccttcagctgcatccacactgctacaaagaacatgatttctttatttacagatgcatagtattccatggtatacaggtaccacattttctttatcaaattcaccattgataggcacatgagtggattccatgtcattgctgttgtgaatagtgcggtgatgaacacaggagtgcatgtgtctttttggtagaatgatttatattcctttgggtatatacccagtaatgggattgctggattaaagggtgactctattttcagttctttgagaagtctccagactgctttccacagtggctggactaatttacactcccaacaacagtatataagcataaccttttctctgcagcctcaccagcatctgttgttttctgactttttaa

SEQ ID NO: 838276 - DNA, 510 bp, Homo sapiens
cacccaaagttacccatccaataaattaggaagctgggattcaaacttagttgtgtttgactccaagccttggacttttcaaaaattactgcatgctatctccacaactgacttaaacttcagactataagtgctatagcagagctgtcaatgaagaattagtgaagcattcataactagtgcatcctcctcaatacctagtagaggggctattcttaattataattgctgttgattattgagatgacatgtaccaattaatcttattgttggtgttatatttctaaagacattatttctaagacttttttctgacagcaatgatgaggaaactggtaatagactgactctattaccatataataatggtaggagataccatgtatatttaattgtgcttatatgggtattgatgatataatgttgcaaaatgactacggayattataattacatgaaaaataatactaagttgaagaataattccatgacagtaaatcagtctaaaata

SEQ ID NO: 838277 - DNA, 513 bp, Homo sapiens
ctctacacaaaatacaaacattagctggatgcggtagtacatgcttgtagtcccagctgcttgggaggctgaagtgggaagattgcttgagcttgggacatcaaggctgcagtgagccattatcatgccacagtactccagcctgggtgacagagcaagatgctgtctggaaaaaaaaaaacaacaaaactcacattaaaattatttgattgataaaatgcaagggataacattatagcaggtcattttaaaaatggcagtcatggctgggcacagtgactcatgcctgtaatcctagcactttgggaggcccaggagggcagatcatctgaggtcaggagtttgagaccagcctggccaatatggtgaaacccgtatctactgaaaatacagaaattagccaggtgtggtggtgggtgcctgtaatcccakctactcaagaggctgaagcagggtaatcactggaacctgggaggcagaggctgcagtgagccgagatcacaccactgcact

SEQ ID NO: 838278 - DNA, 447 bp, Homo sapiens
ttgtcaggggtccagcagttgcaggaaggaagtgggtgtggctataaaagggcaacatgaggaattcttgtgatgatggacctgttctgtattttgactatagagttggatacatgagcccttacccaataaaactgcaaagaactgaatacacacaaacacacacacacacacacacacacacacacaaacacacacacacacacacaaacacaagtaaaactgaagaaatctgaacatcatgaggtgatgatcttgggttgtacctaaagatcatgagttgtatcagtgtcaatgttggctgatgttgtattggttgtggcattacacyatagttctacaaaatgttaccactggggaaaactgggttattttgaaataaaaaggctaactataattaattataaaattcaaatctaaaactgaggagccagctgggcacggcgg

SEQ ID NO: 838279 - DNA, 694 bp, Homo sapiens
gattgtatgatagttctattcttagtttatgaggatcctccatactgttttttatagtggatataataatttgtattcctaccaacrgtgtataagtgtttccttttctctgcatccttgccaacaattgctatcatttgtctttttgataatagccattctaactggagtaaagtaatatctcattgttatttctatgtgcatttctatcatgattagaaatattgagcatttttccatataactgttgtccttttatatgtcttcttttgataaatgtctattcaggtcttttgctcaatttttaatggtacaatttgttatttgttattgagttgtttacatttcttatatattctagatgttaactacttgttaaacatatagtttgcaaatattttctcccatcctgtacgttatctcttcactgtgttgactgttgccctttctatgcagaagctttttagtttgatgtcatcacatttatctatttttgcttacattgcctgtgctttcaacgtctgtttttccccagtccaatgtcatgaagcatttccactatgttttcttctagtagtttcatagtttctagtcttactttaatttactttctttaatctattttgactttacttttgtatatgatgagtaataggggcctagctttcttcttctacatgtgaatattcaattt

SEQ ID NO: 838280 - DNA, 642 bp, Homo sapiens
tcactaccgtgtgtctagctctgggtttgtgaatgcaccagtcgatactgtatctagctactctggtggggccttggagaaactttatgtctagctcaaggattgtaaatacaccaattggcactctgtatctagctcaaggtttgtaaacacaccaatcagcaccctgtgtctagctcagggtttgtgaatgcaccaatcgacactctgtatctagctactctggtggggccttggagaacctttgtgtccacactctctatctagctaatctggtggggacgtggagaacctttgtgtctagctccgggattgtaaacgcaccaatcagcgctctgtcaaaacagaccactgggctctaccaatcagcaggatgtgggtggggccagataagagaataaaagcaggctgcccgagctagcagtggcaacccgctagggtatccttccctactgtggaagctttgttctttcgttctttgcaataaatcctgctgctgctcactgtttgggtccacactgcctttatgagctgttawactcaccccgaaggtctgcagcttcactgctgaggccagcgagaccacgaacccaccgggaggaacgaacaactccagacgcgccgccttaagagctgtaacac

SEQ ID NO: 838281 - DNA, 405 bp, Homo sapiens
gagggtgatagtgaaatgaaagagttccccaattcccctttcaggacatgtgacagaggtgtggctcccctgttggatcactcagaccccttgagggagggggagcatgcagaaggacaagtgcagaggccgggtgagcactttgggctggttctaggggtgggtgcctgcaaccttggggttacaaagctcctacagctttgccacctgcggatggcttgagagttaaccagctcagttaaccctctgccttttcacaagggcaaagggccagtacaacaactttctgtaacccaarctcttgtccagtgtcctggaaagattaggtcacacatggactcaaaggatgaaggcaaagttttattgagtggtggaggtggctttcagtgagatgaatggggagcc

SEQ ID NO: 838282 - DNA, 542 bp, Homo sapiens
aagccatgtaggtactgttggtgagagaagggaactgacatggtgtgcaaaagggagtgatgaggactgtggagaactgcagagacccgctttgggtgagagggtagatgtcatgtctcttaggtccagccagtgttccctgtaggatgtccagaactgcctttttagaagttggaaatctgtattttaatgtaaaatatcctgcttttatttttatgttttaaaatattagttcaatgttaagcatgatgcttgccaaaccaagcatatctatattctaaattaagtcttccggcttcaagtttgcaacttctcacctataccaagggcctatgagcagtcaatcatcaatcacaattacccaacagagttgacctgcaactctgcgactcccaacccagacaaaacattcgcctcatctggagagcattttgcaacaagcagggcytgaatcccacctgcagtgattctgattcaatcagtcttgggttggtctctgacttccgtaagctttcaaaattcctcagatgattccaatacgc

SEQ ID NO: 838283 - DNA, 542 bp, Homo sapiens
aagccatgtaggtactgttggtgagagaagggaactgacatggtgtgcaaaagggagtgatgaggactgtggagaactgcagagacccgctttgggtgagagggtagatgtcatgtctcttaggtccagccagtgttccctgtaggatgtccagaactgcctttttagaagttggaaatctgtattttaatgtaaaatatcctgcttttatttttatgttttaaaatattagttcaatgttaagcatgatgcttgccaaaccaagcatatctatattctaaattaagtcttccggcttcaagtttgcaacttctcacctataccaagggcctatgagcagtcaatcatcaatcacaattacccaacagagttgacctgcaactctgcgactcccaacccagacaaaacattcgcctcatctggagagcattttgcaacaagcagggcctgaatcccacytgcagtgattctgattcaatcagtcttgggttggtctctgacttccgtaagctttcaaaattcctcagatgattccaatacgc

SEQ ID NO: 838284 - DNA, 643 bp, Homo sapiens
cttgtgcagtgtttaaagggtaagstggggaaaacctgggtctattgctggtcagctcctagctctgctgttcctcattgttgagcacaggaaggcaaggcttaatccaccttcccgaaagaccaccaggagacacagtctcattacacagtgcaggcagctctggtagagggaccaacccaattccagaaaatcctcaggggctcagaaccatcctcccctttcctctagagatggaaaaagtccaccagggcagggaccctgaatcacttgtccccctgccttcagaggaagcccggaagccctcccaggctctcaccatgctgcccaggtcatgggtaggggaaatgtgggaacagcaggagggaaatagagaataaatggcgtaaactaaatttgtctgatgttccagcagagaaaatcttgtgatgaagccgacaagcattaaaaaaaaatttttgcatacaacaacaaaacattttgatcccagtgcctgttaaccttttctttcatccaccaaggaaaaaccaagacagaagtctttaaggcatctcaccttttcacttgtgataatttaggggacgtgcaggataaaatcattggtgaacaaatgtatagttcctttccacatatattgcatctt

SEQ ID NO: 838285 - DNA, 571 bp, Homo sapiens
aacttttatttggaaaggtttcatagacagcctagttcaatttttttgcacgtaatctaacaatctgagtaactctgagtaacacctttgtgtttttttgtactttttttttttttttttttttgctgkggggtatcattagaccatgaagtactgttttaagtacatgtttcttgccttctttatctgaaaaataaaaagctgttgttaatatataagaacagcactcattaaagaacaaaaagtgtatatatactatttgttaaaacaattgtattatttagatataagctaatgaaaatgtcatatacaaatgtaatttccaaaacatttgtcaatgaatagcaaattggaacacaaatgcagaccttcttactctcatggccagagtaccagaaacattaataaatcaggagtcagacaacttgagttcttggcccaattttctatttagtagcagaaagaacttgagaaataaggattatgagtcacttaaactctgggtttcctaatcttttgaaactatattatgagcttcatgtgggcagggattttatttgttttgtttatt

SEQ ID NO: 838286 - DNA, 497 bp, Homo sapiens
aaggaattttgcatctgtatttataagtaataccggtatatagatttayggtttttaaatcatgtctttgtctggatttcgtatcaggatgccagtgggttgggaaatgactgaaaacatttttgtagggttggtattatttctttcttcaaaatttaatcgtatttaccagtaaagtaatctgaacatggacttttctttgtgggaaaattgttaattactaatttaaattttatcaagttatgtaactatcactataaataagtttcaatacatttttatcactgcattgtcattcctgtgtcacattactgttaatccctatgtactgtcttgcctctaccctctgctacaggaaaatgctaatatctgtctttaaagcttgctcttttctgaatattttatgtaagtggaatcacacagtatatggtctcttctgtctgactcctttcactaaacaaaatttttttgagattcatccatctcatagcatctgt

SEQ ID NO: 838287 - DNA, 644 bp, Homo sapiens
tgtttcaatgatgaaaaaatccaaagaaaaaacctagaaagaaaaatcaatagctttgtacaaatatagtatgacaattgagaacaactggttttgctgttaaatgtrtcttaaactaggaaactcagggttttgtcaaatggtatcagaatgagaaacagacttaattttctttttgggtccaatggctacatatgttcttcaacagttggaaagccactgtatccaggtgaagtaattttgctcaggaattaattgaagatcacggaggtactgtgaaaccaagatatagaagagtcagtttcaaatggtcttttttagtgaacaacaacagcaaaatctgacaactaccaaaaaaattgagatggctgtagcctgtggtagggagagcaaacaggatggatgagcaaaaccacagtagtttgagttttatgtgaaggtgatgataaataaggaatattaatctctattttcagagaagccctctcatctcatgtttgttcatgggtacattgttgttcccaaagactgcccgttattactttgttattacaatcatgtagtgtatacagtggtagtactactatgtgcactgtgtttttgtgcataataggcttttaatttgttctttcaataaatattca

SEQ ID NO: 838288 - DNA, 646 bp, Homo sapiens
gggcacagagcagcctctgtctccctgggtaggcagagccctatctgggctgagagaaccagggagaaagcagggcaagacgcggtggcatcctgcccagccacacaattactgtcgctcaggcttactcggaaatgtatgtttttaaaagcttagacatatcctggagcccaaagggactttgctccaatgcttgtaagaagttagaggaattttcaaaggcatctgaacccctcagagtctctatggacaagagccagccttagaggggagtgtgtgtgcacatgtgtgtatgtgtgtttgtaagtgtatgtttttctgtagacgtggtgtgtgtggggtgtgtgtgtgtgtgtgtgtgtgtgtgtgtgtgtgtgtgtgcatgtttatgagtccaggactgaggttcggaaatcctgggttttttcaccccattactggatgacttggaacctgttcctttgcctccctgatcctgcctttcttcatcagagaaatcaggggtgctagtgctgtcagagggtacactgagctcgtacacttgctactagtactaaaaaccccactgccctgttcattgagaggcarcattgtgattacacgaggcacatgtgtccccagcttcttgtggcaggaccccccgtgg

SEQ ID NO: 838289 - DNA, 621 bp, Homo sapiens
tctgcaggcctccacagtgaggcacttggtactcaggtcctccaggccactgtcagggctgggcaggcacctggtcaccatcagagaaagagctgggagccaggggtcccctcaggcacttccatagcaccctattaaatgcttccgggagggaatctcattttggactttggacacacactagctgtgtgaccttggccaagccacttaaccttcctgagcctccacttcctgacctgcaaaaagagtataataatagctgctagccttcagcattatggggagaattagacataagaatgtattttctgttccaaaaggctggtcgaggcagggtccccctctgccgccccccagccctcccacctactgcccggccacttccagccgcccagcctaggttccttccacacaagatgaaaacagtctggtctggaggccaccaatggcatcactcccagctgcagccacctctgccccaggagcccaggtgggtgaagggcaggtggtgacttgaaggggaaattgtcctgcacgttgtcctcagaacctcgaggaagctggtgacrcaccagagtgtggacattaatgtaatcgttgggtaattcaatcactttatag

SEQ ID NO: 838290 - DNA, 615 bp, Homo sapiens
ctcctggcagggtgcaataacttaaaaaggattttgatttatatgactgctgttctcatgatttaagcagcatcctatggataaaaccccacagccagcatcccagcmtccacccccaactcgtctttactagagggaccctcccagcatcacctcacctggccggaggggaggccacctgtgggcccccaggcctagtgacagacaggccttcccatgtatgcagacactcctttgggccagggcggcatccttgcttcatcatgtaggctctgttgtggcggccccaggccccttccgcttctcttgcagaaatcctatcctcttctccagaaggttcctcttctgtttgaggcccctgcctcccaggcggatgctgcccctggcaggaaggcatgctgcttggtgacacaggcaccaaggtgtggcccactagtttatctgagacaagggcatgacatggtcccaggtatggcccacggttaatctgagccatagtggatattctctccgtctgcgttacactcagggctccacgcgtttcaactctttctgtctatactcaagcagctgctttcctagaacctacggcaggaggtatgggaaggttgggag

SEQ ID NO: 838291 - DNA, 615 bp, Homo sapiens
ctcctggcagggtgcaataacttaaaaaggattttgatttatatgactgctgttctcatgatttaagcagcatcctatggataaaaccccacagccagcatcccagcctccacccccaactcgtctttactagagggaccctcccagcatcacctcacctggccggaggggaggccacctgtgggcccccaggcctagtgacagacaggccttcccatgtatgcagacactcctttgggccagggcggcatccttgcttcatcatgtaggctctgttgtggcggccccaggccccttccgcttctcttgcagaaatcctatcctcttctccagaaggttcctcttctgtttgaggcccctgcctcccaggcggatgctgcccctggcaggaaggcatgctgcttggtgacacaggcaccaaggtgtggcccactagtttatctgagacaagggcatgacatggtcccaggtatggcccacggttaatctgagccatagtggatattctctccgtctgcgttacactcagggctccacrcgtttcaactctttctgtctatactcaagcagctgctttcctagaacctacggcaggaggtatgggaaggttgggag

SEQ ID NO: 838292 - DNA, 621 bp, Homo sapiens
tcaatgacccatagtcaaacattcagtttccaccaaagcccagtaacaggccaagtgctgtctctcaaaaggagagtagctatctgcaggagatgacagggmcttgatccaaaatcctagaggcttccactgtgattcgcctatggagcttcccaaaggctaacacctcaagcaccactggatctgatgggtcatatggcccaagtggcagagcagcttgcacagcagcctggacctgttgcagagcttctgctgttctggaccccactcaaaactgtcaggctttcaggtcacttaataaatgggccagaataacacacccaaatgaggaatgtgttgcctccaaaatccaaataggcccacaagatgttgtgcctcttttttggttgtaggaggggccaaatgctgcaacttatcctttatcttagaaggaatatcttgacaggcctcacaccactggactccaagaaattttactgaggtagaagttccctgaattttagtcaaatttacttcccatcctttggcacataaatgtcttaccaataagtccagtgtgtttgctgcttcttgctcactggatccaatcagcatgatgtcatcaatataatggaccagtgt

SEQ ID NO: 838293 - DNA, 531 bp, Homo sapiens
cttaagatcgaaatcacgtttgagtcaactggcccaagtgttcaacatctaacattaagagacagcagggctcagtgactctacccccrtcttgtgatgttggtttcacatgattacccaccttccctggcatcatctccacactggcgagtgactagcgtatggaaaattcaatgaaaacatccccctctgcagcagttgctgtccctccattgcttgctcttgtgtgctctctctctctctccctctctctcttctttcctctctcactctctcatctcaacaattggtgtcttcttttataaacagggatagcaatagccccatgcccacttgggaaggaagccccctccccaggggcagtagcacaagaggaggcacctcctgggggctccagagtgttttctctgggacagcaatgcaagggaagactcagaggaaacacacacagagctggagtcatgggtgggctccgatcccagcctatctggaaatttgctctgtctccttacggagtttcacttggcaaaa

SEQ ID NO: 838294 - DNA, 618 bp, Homo sapiens
ctagagctgctgcacagaatgccttctctcctctgggagatgattgtgaagaaggatttattggatcacagaaatatcagtgttaacataggaaatcccaygttcccattacaatggctctacataataaaacagagaaggatgcttcataatagtcatttccactcagataatcactttaattatagtgctatgaggtcattctccccagtgcagctgccagatgcctctttcttataagtaactgcctgctggagtcaggagtcataatgggtgaggggaaaacagactcccagctaggggtccacagcaggacacagatgggccaagctagggtgtctggggccaccaaggagcttggaggtggggaagaagataatacaaggcactgaggcagcccagggacccagtgaacactggctcaggatctgggtctcgggagccaggaaccaggcagggtataggatccagcattcacggtgtttctcagtagcaagacctgaagcaagggccgtagcaagttcaagtgggtgctagactttattatatagagtgaacaagtgcagcctccagtttagtatctagcacatagtaggtactcaataaatattcactgaa

SEQ ID NO: 838295 - DNA, 618 bp, Homo sapiens
ctagagctgctgcacagaatgccttctctcctctgggagatgattgtgaagaaggatttattggatcacagaaatatcagtgttaacataggaaatcccacgttcccattacaatggctctacataataaaacagagaaggatgcttcataatagtcatttccactcagataatcactttaattatagtgctatgaggtcattctccccagtgcagctgccagatgcctctttcttataagtaactgcctgctggagtcaggagtcataatgggtgaggggaaaacagactcccagctaggggtccacagcaggacacagatgggccaagctagggtgtctggggccaccaaggagcttggaggtggggaagaagataatacaaggcactgaggcagcccagggacccagtgaacactggctcaggatctgggtctcgggagccaggaaccaggcagggtataggatccagcattcacggtgtttctcagtagcaagacctgaagcaagggccrtagcaagttcaagtgggtgctagactttattatatagagtgaacaagtgcagcctccagtttagtatctagcacatagtaggtactcaataaatattcactgaa

SEQ ID NO: 838296 - DNA, 618 bp, Homo sapiens
ctagagctgctgcacagaatgccttctctcctctgggagatgattgtgaagaaggatttattggatcacagaaatatcagtgttaacataggaaatcccacgttcccattacaatggctctacataataaaacagagaaggatgcttcataatagtcatttccactcagataatcactttaattatagtgctatgaggtcattctccccagtgcagctgccagatgcctctttcttataagtaactgcctgctggagtcaggagtcataatgggtgaggggaaaacagactcccagctaggggtccacagcaggacacagatgggccaagctagggtgtctggggccaccaaggagcttggaggtggggaagaagataatacaaggcactgaggcagcccagggacccagtgaacactggctcaggatctgggtctcgggagccaggaaccaggcagggtataggatccagcattcacggtgtttctcagtagcaagacctgaagcaagggccgtagcaagttcaagtgggtgctagactttattatatagartgaacaagtgcagcctccagtttagtatctagcacatagtaggtactcaataaatattcactgaa

SEQ ID NO: 838297 - DNA, 586 bp, Homo sapiens
tgaaactgctcccaagtcccacctttatagaacaatttcctaaacttcctactgccttcaggggaacacttgtatctgcataatgttaataatatcayctaggaagaataaaagctcagtggtgcaatgagttggagaatgccaggttacacagagtccaacaggtgtctttgattgcttgcttctgctgctttttctttcttttcaaattgtagatgtttcctgagttattaataagctgctgagaagtgtggatctcaaagaaggtcgcagagcacacagcacctcccaaacttggttgttcttcaaacacagtttgcagtcacagccatgacccatggggagccccttgcccagggttcaaagcaaggcaaaggcaggatcaagtttccttgaggatggagggttgagggtcatggacccagggcagaaaataatgtgggatgagggagatggtggagaagtctaagtagcctggtcagtctaccctcatctcacctccaccctcaacctccttcaccaaaagctgctgcctctccagctcctgagttcctgtgagtcaaaagccctgagaaaggccaataaa

SEQ ID NO: 838298 - DNA, 534 bp, Homo sapiens
tgagattgcgccactgcactctagactggtgacagagtgagacttcatkaaaaaaaaaaaaaaagtcaccatgccccccacgtccagcccagatacattccactggctgtcgggagtaggtggaggaggcttttaaaggcaatgaagtgtaataatagctcttcatttagtgcttagtatgtacaagatacgtgcttcatatgctggcctgaccttagtgcatattatctcactgaatcctcataataaccatgcgtggggtgtattatttcatcttgtagtaaataaggagacctggctcccaggggtcaggggctccagcacactagttttctcttcctcaaatcagtcaagctctttccacttcagggcctttgtgtctgccgactcctctctccagaacacttctccctgatcttcaaatgcctggctctttcttatccagatgccagctcctcagaagtctgctctggtcatcgcacctgctctcctgtccccagcctgctccctcacttcgccatgttactccttcac

SEQ ID NO: 838299 - DNA, 516 bp, Homo sapiens
aggaaagaaggcattctgtgcagcagctctaggaaacatcaggtccccaatgtcctagacatcctaccctctttggccaggccattaagctgtgaaaaaacacactcagtaacttggataatgtcatagagtggtccttcccacagcagagtcaatgtaaagacctatgggagggcttcaggaatgactcctcagacaggagccctgggaagggcttctccaagagagaaagtgcactccagaggcaagagcactggccaagtcctgacctgataccggatgagctgtgtgatcatgggcacatcacgtctctgagccttggtgttcttcctgtgagatgggccaataacaccaggcacctcataggatggatgtgaagactgcatgatagagtagatagaaggcagttaaagcaacacctggtgctatggtttggatgtggtttgaccctgcaaaagctcatgttgaaatttsgttcccaaggtggcagtgatgggaggtgggacctagtggggg

SEQ ID NO: 838300 - DNA, 455 bp, Homo sapiens
ccccgagtcttccatctacattcttaattacattttacattttacataattttagtaaaatatcaaaaccaggaattcaacattggtacaatgtgtgtgyataccacttttatttgtcgtatttcatgtagatttaatggaatcaccaaggcagtgatgatacagaaagaactattccatcaccacaaagatctctcttgaagtatccctttatagtcaacccaacttgtgtccctaccattcattacccctagcaactactcatctgatgtccatctctacattttgtcattttgggaatgacatatagatggaatcatgtattatgtactttttcagattgtctttttactcagcataacaccctttagctcaacttgtccagccagtggcacacatgcagcccaggacggctttgaatgtggcccaccacaaatttgtaagctttttaaaaa

SEQ ID NO: 838301 - DNA, 582 bp, Homo sapiens
tcactgtagcctccacctcccaggctcaggtgatcctcctaccttagcctcccaagtaactgggactccaggtgtgtgccaccacacccggctamttttatttatttatttattttagagacggggtttgacatgttgccctagctggtcttgaactccaggactgaagcaatcagcccacctcaggctcccaaagtgctgggattaccagcataagctaccatgcccagcaggactgcttttttttttttgagatggaggagtctcactctgtcaccaggctggagtgcagtgatgtgatctcggctcactgcaaactccgcttcctgggttcaagcgattcttctgccttagcttcccgagtagctggactacaggcatgcgccaccacacccagctaatttttgtatttttagtagagacgggcttcaccatgttggccaaggtggtctcgatctcctgacctcatgatccacctgcctcggcctcccaaagtgctgggattacaggcgtgagccaccgcgcctggccaggattgctttttattcccattttatggatgtggaaactgaggcacaggga

SEQ ID NO: 838302 - DNA, 595 bp, Homo sapiens
ctcaatcccaacaaggaccctgagacactgtgtaaaacacacttcagattcacccaccaagggcaaggaaggtgggacatttatccccataaattgaaggtcactcctgawtcattaattcctcagggcccattcccgagaatggctgcaggtagagaggctaaggaagcggtgggctcggccagagctgtccacaggtgaccccaacatgggccatagcaccactcgctacagcctgctacagtcaagcacaaatgcaaatgaattaagaagaagaagaaaaaaatcacagcctctgtgtgggagaagtaggtggggaatttgggaagtggccaaagtccaaaactacatggtaacacttgatcacacagaaggaactcccactcaatggcaagacagaaacataactttcccaaatgcgtaatgaaccagaaaaaggggaaggccaaaggagaagtgagaatgctgggggtgtagcggaggaagacagagaccctcagaaaaggtagacggtgctgacagctttcccggcttgatcctccccagggggccagactgaagccagagacagaaataaatttctcaggaaaaggaa

SEQ ID NO: 838303 - DNA, 640 bp, Homo sapiens
gttttcttctctctctctttttttttttttttttcattttgaracagaatttcactcttgttgcccaggctggagtgcaatggtgaaatctcagttcactgcaacctctgcctcccaggttcaagcgattctcctgcctcagcctcccgagtagctgggattacaggtacctgccaccacgcccagctaatttttgtatttttagtggaaacgggatttcgccatgttggccaggctggtctcaaactcctgacctcaggtgatccgcccacctcagcttcccgaagtgctgggattacaggtgtgagccactgcgctcagtcctctttttaaaatgagtactaatcctggctgtttacaaaagtacaaaattgccatagattcaaatgaatctagtactttattgcattttcttggttccattaaaacaaatcttcctgtcccaaacatttggtgtaactgtgtgttttctaatcctcaatgaaacctctaatggagggaaagatttggagcagagcaattaaaaactccctcctctcttttttcactctagaaagacgtgctcggcacttctgccattcttctagtgtctttaataacagatatagcaattttttaacacctagcaaaaactaggtca

SEQ ID NO: 838304 - DNA, 616 bp, Homo sapiens
gctggccgccagccctcatttatcagcctgtttttccttacccttggaagacctgggatcttcatgggagacagcatggtggagaggaggaggctgggttttgctgtcttgtccttcccagtaactggttctgtatttgctctatcctttgtttttgttttttcaatcacgtagtcatttgctaaggatttattgaattctagttatggactaggcaaaaagctagttgtgaggagaagaaaatgaacaagacaaagtccctgccttccctgggagacacgccagaaaactgtgatggtgagtgctagatggtgccttgacacaaggagggaggccttggtgtataggttgaagaagtctcttctagaaagagttgtgaaggatgagtaggaattctctaagcagttagggaatgaggaggagaggagaaaggagagatttgtgtcttatgtatccatctacccaattcccccattcctgccaccatgcagrcattatgaattgattgggaactgtttcccagtgagctcacccttggcttcacagtctttctccagacgtggctccaggcagcctctcacacaatcgtcctcagacttgagtgagcaaacaagtc

SEQ ID NO: 838305 - DNA, 639 bp, Homo sapiens
caccaggtggccgagctggcatcgctttgaagcttgaggaggasttggtagatggaggtgcaggatctggatgtggagctctggcaggcacagagccagccacacaggacccgggcaggacccagctgcccggacaagtggaggcaagtgctggcctgtgagagtgaatcagcgtggggactgaaggctcagaccccagggcaggcacaggcggtgggcaggaggttctgtagctagtgctgcagtcggcagaacaatgctcccaagatgtcccctttctaatccccggaacctgtgcatatgctttctgacatggccagaggggcttgcagttgtgactaagttaagggcttcgatgggatatgatgtgatcgtctagctgagcccaacatcatcacgggggccttaaaatcagatcattatgcggctgtggccagagggaggcgtgactgtggaagaaggtcagggagatgacacattgctggctttgaaggcagaggaaggggccacaagccaaggaatgtgggagccttgggaactagaaaaggcaaggaaaggattctcctccagagtcctcagaagaaaccagcccttctcacaccttgattttagcccagcaagacctggtgggcaccgtga

SEQ ID NO: 838306 - DNA, 539 bp, Homo sapiens
caatacagagaggggcacagggctgtgtgcaggcacagcagggagatgaacctgtgtacaatcagggagggcttctgggaggaggtgacataaactagaagctcagaggatggacaggcaccttctgggacaggagcaagcacacatcacagtgctcagctcaccttcattgcggcacagccctgacacatgggtggctgctgtccactggcctgcctgcctcccctggcctggaagccctcatgggcgggggctgtgcccgagggatttgtctccctagggccaggtgctgaggagaccagagctgatgctggccctgtgctgatgtgtgctcagccagtccttgccgggagacaggcatggctctcacacaccatggggccacacacaccctgtgccagctctgccctggggcacagggctttctttgggctaattttatgaatatggaattaaagcgtacaggcacrcacactttgcatcctcatggatcctgccacactgtcttttcggggacttacaaacccccgcccgtgcct

SEQ ID NO: 838307 - DNA, 450 bp, Homo sapiens
tggatcctgccacactgtcttttcsgggacttacaaacccccgcccgtgccttacagtgtgtcccctccctcaggttctcactttataggtcatgcctcggtttaagagcaggtccaggcctccctactgccccgcccaagtgttacttgttagaaaatcatgccggatcacaggcgggcacttccttcctaacctacttaagggctggctgctgattataaccatgaaccgaggacgctgctctctggagccggccccattctcaccacggccatcactgcctgggcttggcaagggagctctgcaggtccagacagggcggccctctgttcaatcccccattaagcaaagatgcactgggcactctctccttgccaagagctaggccagcaccgggccgatgttgggcagccaccgccccgtccccaaacagtcaccagacagttctg

SEQ ID NO: 838308 - DNA, 640 bp, Homo sapiens
ctctgcacagcctggctccagacctctctagagacagtaaagtcactttctccacagccaaagtcccaagaggaggcacttgccgttttgatccaagaagggaawtgcccttcaaatcctggcgtgaccttgcctggaatcttcacagccactcttggaggtagatattcttttgcccatttggcagagttggaagcttattgaggtttagtgaccagcccaaagccacaccgtgaggagtggcagagcaaggattcaagcccaagtctgcctttcttcagctacccatttccaaagaaagctgcgactaaccgatttgcagcccactgcccctgcccactgcaagtcacacctacagactccacccaccacagactccacccacagcagattctcctgcttcaggctccactcaccagactccacccactgcagactccacctaccacaggctccacgcactaagactccacccactgcagactccacccgctgcagactccacccaccacaggctctactaagactccacccaccagaggctccacccccagcagactccacccactgcagtgccaccactgcagccttccttcctctcagccttgcctgggatccacccacttttcctctggcccca

SEQ ID NO: 838309 - DNA, 641 bp, Homo sapiens
actgtatgcctaagggctggggatctcacaactggagagagccagatgaagcccagcccaccacttcctgggcaagccatgcccctctcccatccatggaaggggttggtttaggaacgtgcactcagggtgctcccactgaggggaagcacaggagggtctcagcctagcgcctgtccaagaccagagctcaatcctgggtgctgctgttgttcttctgattttccgctagaggacagcggcgggtcagggccgtcctctccaggctgacactaactgggcctgtaaatgtcaggggagctgtagaggttggtgctctgtctacacacgaggagggacttgctcaaagctaccagggagagctgcccccggctcccaggacccatcacacgcttgttcacaatgggcacttgtggagagacacaccacagacaggtattgcaaacttgtcgggggagcctaaaggactgcaaacttgtgggaggagtcggggcccccgtgtcaggggctgctgaagactgaggccctaggagccccctgtgcaaggtgtgctgtccttgggctgggccrgggactctgggcccctgaagagggacacctcttttgtctataaactttctcagaaacaccatcctccatac

SEQ ID NO: 838310 - DNA, 595 bp, Homo sapiens
tccgcacgtttgcagctctttctttgccataagtggtcttcagggcagctgcaaatcctgccaaagggatgggtgggggtcccacttggggagattttytgggcctcccccgttcccccttgccttatttctaaattcccagcttgaagcggaattaaattaccactcacagacctggatgctgcgtaaattatgtatgtttgtgtgattcgctgtgtgtgtgtgcacacgcgcgcgcgccgtgaggatgcccacagtatattatgtattcagacacggactccagtaggccccagcgcgcgagcgcgcacacactggcactcacactggcgcgcacacacatgcaacttcaggttccgtgtgctgtgcggagcgggaggggtcgtgaagactcaggggccatctcctaccccagatgttcgcacatctgtccccgagcgctgcttggagtgtgtgtacgtgtgtgcgcgacacccgcttggacccactcccgctctgccacctgcctgccgcgctctctgcagaaccccctcccatcccaatccccagcagtgctgcgtcacttccagagaagcccagaggcgcggagttcggg

SEQ ID NO: 838311 - DNA, 595 bp, Homo sapiens
tccgcacgtttgcagctctttctttgccataagtggtcttcagggcagctgcaaatcctgccaaagggatgggtgggggtcccacttggggagattttctgggcctcccccgttcccccttgccttatttytaaattcccagcttgaagcggaattaaattaccactcacagacctggatgctgcgtaaattatgtatgtttgtgtgattcgctgtgtgtgtgtgcacacgcgcgcgcgccgtgaggatgcccacagtatattatgtattcagacacggactccagtaggccccagcgcgcgagcgcgcacacactggcactcacactggcgcgcacacacatgcaacttcaggttccgtgtgctgtgcggagcgggaggggtcgtgaagactcaggggccatctcctaccccagatgttcgcacatctgtccccgagcgctgcttggagtgtgtgtacgtgtgtgcgcgacacccgcttggacccactcccgctctgccacctgcctgccgcgctctctgcagaaccccctcccatcccaatccccagcagtgctgcgtcacttccagagaagcccagaggcgcggagttcggg

SEQ ID NO: 838312 - DNA, 550 bp, Homo sapiens
gaaaaattagccaggcatgatggcacattgttgtcattccagctacttgggaaggctgaggctggagaatcacttgaacctgggaggcggaggttgcagtgagctgagatygtgccattgtactccaccctgggcgtcaagagtgaaactccgtctaaagaaaaaaaagaaagaaagaaagaaagaaaaggcagattggtgagatgcgtttcaaaatttcctttccagtccctatactaaaaacggaaagaaccgacacatgagaaatatgaccagagcatactgtgcccaagagtgtcatcacagcactctgggaggccgatgtgggaggatcgctggagccttaaagtttgacatcacctcgacatgtgagatgacacctgcaataataataatcatagaagtttaaaaatagattatgtgtgacagagcatggaaaacaaagcgagagtgcatccgtactaaaaacaagatgattgatagacaggcaggcaggcaggcaaatatagaatgagccaggtgcagtgtctcacgcctgtaatagcagcag

SEQ ID NO: 838313 - DNA, 550 bp, Homo sapiens
gaaaaattagccaggcatgatggcacattgttgtcattccagctacttgggaaggctgaggctggagaatcacttgaacctgggaggcggaggttgcagtgagctgagatcgtgccattgtactccaccctggrcgtcaagagtgaaactccgtctaaagaaaaaaaagaaagaaagaaagaaagaaaaggcagattggtgagatgcgtttcaaaatttcctttccagtccctatactaaaaacggaaagaaccgacacatgagaaatatgaccagagcatactgtgcccaagagtgtcatcacagcactctgggaggccgatgtgggaggatcgctggagccttaaagtttgacatcacctcgacatgtgagatgacacctgcaataataataatcatagaagtttaaaaatagattatgtgtgacagagcatggaaaacaaagcgagagtgcatccgtactaaaaacaagatgattgatagacaggcaggcaggcaggcaaatatagaatgagccaggtgcagtgtctcacgcctgtaatagcagcag

SEQ ID NO: 838314 - DNA, 560 bp, Homo sapiens
cattactacatttagcaatataattcctcttattaagaaatattactttctaaaacatatcaccatgaaaacaaatgtcaatcaacaggttgaaagtaaatttcttgttaatacatataacagaagaaaaaagatcaaaacctagaaaaaaacacacaaagagttcataaataagatgcatacctaaacagaaagaaacaaggagtaaatagcaaggggaatacaaaagaataagcttataagaggatgaagaggcagggagagatggctcacacctgtaatcccagcactttggaaggccaaggcaggaggatagcttgagcccaggagtttgagacaagcctgggcaacatagtgagacctcgactctacaaaaaatttaaaagaaaattatcaggtgcagtggttcacacctgtagttctagttgctcaagagactgaggatctcctgaggctctaattgcaccattgcagtaaagcctgggagacaggrtgagatcttgtctcaaaaaataagaggatggccaatatctcctacctggaaaaattaacataatgta

SEQ ID NO: 838315 - DNA, 447 bp, Homo sapiens
atagattcaatgctatccccatcaagctaccactgactttcttcacagaattagaaaaaattactttaaagttcatatggaaccaaaaaagagcctgtatagccaagacatttctaatcaaaaagaacaaagctggaggcatcatgctacctgacttcaaactattctgcaagactgcagtaaccaaaacagcatggtactggtcccaaaacagatatatagaccaatggaaatgaacagaggcctcagaaataatgccacacgtctacaaccatctgatctttgacaaacctgacaaaaacaagcaatggggaaaggattccctaatcaataaatggtgtcgggaaaaactggctrgtcatatgcagaaaactgaaactggaccccttccttacatcttatacaaaaattaactcaagataaagacttaaatgtaaggcctaaaac

SEQ ID NO: 838316 - DNA, 601 bp, Homo sapiens
gcaatgccagaccatgagtctaattaattcagagttgttccagggcacaagatagccagtaatgtccaaatggggagccttgtggtggtggcagccaggattcctaaggccaggtgctccttcacctctctgggagagccaagctgtccatccgctggatccccaggatgctgggctcaagtgtcagctgggtttacctctttggaacagaagtaatggacgaccactccattggggtatcttgcaaatgcactgcagggaagaaaatggcttgggagtgaggactgcttctaagtgaccacttctctggcagcggcacctcctacagaagaggcacattgctggggggccattccaaaagcagcccacccaaacctcaaagaacagcctgcctgaggggctctggatttctgtagccatcatctctgtcaaataaccaaacagaggatgaggtgcacacagttaagagtgcatggggtatttttttattatgcaaaacacamggcatattaaagatgggcagtgcaccagcccaaagctcagccctggcttcctgagagccaacaatgttcatcagaacaggtttcaggctaattctgaa

SEQ ID NO: 838317 - DNA, 538 bp, Homo sapiens
ggagctcccttcagcatcattttggatattaacttgcttttatgttggatcctcaatttcctggttccaacttcttcctttttgttggtttattctttcattytggtgagacgtatcctctagtacctcactctcaccgtgtggtctacagatcagcagcactgatgtcacttgagagcttgtcagagtgctcaggcctcactctagacctgctgaaccagaatttgcattgtaacaggttcccaggtgatccatggcactttaatatctagaaagcactgttctggtagctcatgagaaaggctaaaaaaaatttgagtccttgcatttctgtatatgcctatacactactctcacttttgactagcggattgattgggaaaaaaacttctaagttgtaaataattttctgtaagaaatttcaagacatttttccattgtctcctaacttccaatgttgctgttaataagttcaatcccattatgatttttagtccttggtgtgtgacctttttatttccagatttctaaaatttaa

SEQ ID NO: 838318 - DNA, 496 bp, Homo sapiens
taaacatgttgtttactccgcacatcattttccccatagagggagaaactgaagttcaaagaggctaaggagcttgtctgaggttacagggctggcaaatgacagagcaagggattgaagctggtataactccagagcccgtgctcttcaccacttgaatgaggccaataatttcacaaatattaagccattatgttttcgttgctcccaaaacctttcagctgccacttctaggtgtgagtcaggaggctgaagatgccagggcaggcaagggcaggccattaacctcgttagcaagacagcaggggagacagctcgccccagttcccatccccctccagcgtatcaacagcaggcctagccgatgagacacagagacttctagaacggaggcagagtcaggaagaggaagggragaagcacctgctcaccggagacagggagactgcagaagatgagctcttgtgggaatggtgagatagtgtggggcagagac

SEQ ID NO: 838319 - DNA, 587 bp, Homo sapiens
aagaaatgcctcctctgtgaatctctttccakatatcccatttagattccttttctgcttcataacttgcgacatcttatttcctagtccccagacctctggacagttgtgtaaggaggaggttacaaataggctgggaggaattacaatttcccacttaacataaaaaaattcaggttcacttttggattaaactcagcttctcttaggaaatgctcattttggagctctctctaccccacccttggagccgagatggcagctaagcatgcgggaccctcagtggtcttgggagggttgtagtccaggatctatgtggggtgttctgaccaggcctttggactcctgcttgtatgcacagccaaagccacagctgacgggaccgctgttgcgttccacgctggccaggtcggggcaggccctggctcaagctgaccatccccagcttctgcctcacctcacgccacccatggcagcttcaggcaggcctcttgctgtcagctgagctacctccacacccccagtgggagcttgggaacacttctggatccttctgtcacacaagggggcctaggaagatgagaggg

SEQ ID NO: 838320 - DNA, 624 bp, Homo sapiens
cacttcccttcgttgggtaacatggcaaataacagtacttctcatctgggcataagcccccaattagctgcattagaatcacctggacttattaaaaatgcacattcctgggccctgcacatggagattcagattcaatggctttgaagtggtaccctgaaatttacattttaaaatttaatcttgttggctgggcaaagtggctcacgcctgtaatcccagcactttgggaggccgaggtgggcggatcacctcaggtcaggcgtttgagaccagcctggccaacatgacgaaaccccgtctctactaaaactacaaaaataagccaggtatggtggtgggtggcagtaatcctaactactcgggaggctgaggcacgacagtggcttgtacctgggaggcagaggttgcagtgagctgagattgcaccactgcacttcagcctgggcgacagagcgagactcagtctcaaaaaataataatgaaataaaataaaataaaataaaatwaaattaaattttatttgtttttatgaaacattcatgtagttccaaagctaaaacgacgaaaagtctagtttctatcattgtccattttatcctctcttctcccttctgctatggg

SEQ ID NO: 838321 - DNA, 625 bp, Homo sapiens
gagggatccaacctcatgatctaatcacctcccaaagtccccacctactaataccatcacattaggaattaggatctcaatgtatgaattttgggaaggaggagcaaacattcaattcataacaatattgtgactaggaatgcaatgtattataaaacctaagcaaattactaaatttctatatgtttaacatacaaaacagtggatggtatgaggcaagacataatcaggtagcataaagaataccatagggttatggtaaaggtgacatttgtgtgggctccagtattggggaaagactccacagatgttttgagacctaagtttggccttgagtgaggggtaagatttggagtgtaggaaagagagtggcaggactgtattgaagctgaaagtgtacactgatgacctggtttgttctgccttgctccattttggtgagagagagagggattcttttgcattttaatttctaacaaggaccttcaggcctggtttgggtgtgggaagactggtgtttacttcccctggcaagtaagcagaactggggagctctgggttttctgcagcagaggaycaggtgagaggaaagatgtcttatggagaggagacactgagcactaac

SEQ ID NO: 838322 - DNA, 634 bp, Homo sapiens
gtcagtaaatgtttactgactctttatcttattcctcaattggttcagaggttaatcagcaaagacggggctaattcctaggcttcctaaaagaccccaacaacctgtattagcacagttaacctacagggcaatccaattgggaaagcgttatcaatgtccctataaacaaccggaaactctgcccaggcaacagagccaaagcctgaactctcatttcctagctcaagatcctatacttttttcttaaaaaaagatcatccaactggctttgtgaccccctccagttactattccaaaattctattttacaaattcacagggatcagtgatcattttgtctttttcaagacaggaaattcatgtttcccataaggagtgatgtaggcctgacccagataaaaccaagtgggctgtctctggatcttactttcccctagattcacagagccaggagcaaatgctgagaaggaagtgtgccttagcacagggtacattggattcctgagtcttccttaattaaaaggggatttagggaatttatttttatcaagatcctcagatgattcagaaaacaaatttttttgagataaatgatcaygttactgggaataacaggagatattattagggg

SEQ ID NO: 838323 - DNA, 524 bp, Homo sapiens
aaagacatgatctcgttctttcctgagttaatgtcctgttatgtatgtatataagcacatattcagggaccaagaaatacttgtgagatagcttagtcattagacaatgctaaagataaacctataactttttatgttacctccctaactagattataacctcctctagtgttatagtcacatcttctacatttttgcagtgcatacacacatacacacacaaacacacaggtatagaaacataattctatcctaaaatttactcaagaaatcctggtagttgatttgatgatgtatctctgtatacttaattctacaaaagcaatcaagcatgaatctgaggttagaaacacatactttggagccagaacttggactgctgggtttccagctaagtcactagtaaccacctgcaaagctggcttggtttatcatcagccacagattcagactagccaaccctgaatattaaatcaatggaatgccaaatsttgcatccagagcaaactgaacacccaaatata

SEQ ID NO: 838324 - DNA, 564 bp, Homo sapiens
tgccaaagttgactagttttatgctacccatgtaaattagatgttttcatttatattctcaaggctgacatgactatctgggtgtgtctcatgcccttgatataatcctcccaactttcgttcagcagacgttacttgagcccctgctataaggcaggcagtgttctaggcattggaaatataataataaacaacagagataagtccttgtcatcataaaatacagtgcagtttaatgatatacgtactacacaaacaataccacaaaaagcaaagcattattaaaattaataaccaataatgtgttagggtgttaaaaaataataacaccaataatgtgtctgagaattattaaggaaaggcgtagggaacaggaggtatattttagattgtgtgtaaatccctttgtgaggaggtgttatttgggctgagacctcagtgatgatgcagaaccatccatgagaacatctgaagaacatcttcttccaaacagaagtagcartaagtgaaagttcctaagatagatacaagcttggcaggcccaagtctgagttgacatattaa

SEQ ID NO: 838325 - DNA, 598 bp, Homo sapiens
ttctaatagaattaatttggttgtagtaacttttgaaaataaatgtaaatggtgaaatcggccatgtggtttgtgcattttaatggtggagaggtcctgggagaaggaggggagacaactatctggactgatagataaaaatgcaaaagtggtataaattttgtgcaaggaggctcacagcatttttggcactcgggtaaaacacagttctctgttaaatcttcagtttctaccatcaaactttcagatttgtaccattttactgagttttcctataatttaaccctgatattgaaaaggctgggatgttagtatgtatcaactgcctatatctaaacaacacaaaatgttaataagttttaataagttatgaaatcttctacaactgcaaaataatctttctggtttcctgcttaaaacagagtttaaattctgcttaactatcgcaagacagtttgcagaagtaagttcccttaatcttcaaatttacttttcttgttggcaatattatatacatgctttagtgaaatacytaaatttccaataattatgccctttaagggatctaaaatagccagatattaagagtattggtatt

SEQ ID NO: 838326 - DNA, 517 bp, Homo sapiens
agaggcatcttggggtgagaacagtgctgtctacttccgctgcataccactcattccaagtgctttaccgtattaactcattgaagcctcacaactaccctatgaggtagatggatttttttcagggaaggaaactgaggcacagagaggcaactgggattcaaacgttgtgctgccactgctgcggcagtgcttgtccaaggctgcagggagtcttggatgagtgccaggagctccagctgctccagctgggaccctgcagaggggtccagagggacctggccccagcccagcccacagagcccccactagcctaccctagaaaggagccctgagaaaggaaaatctggcctccttatctcctgggggaaaggaatgcactctscctcctgccaggataacgggctgttttaacgggaagtctccaccctggctgtgggttcctcccagccaccacttattccttctggctgtctctgcctctggcatcccacttcccatgcttcaactcctgacc

SEQ ID NO: 838327 - DNA, 663 bp, Homo sapiens
atagctgcaactgcagaaaacaaaactgtacataaggggaactactgcctatgaaatatctagaataggcaaattcagagaggcagaaagtatcatagaacagaagttastgggggcggagtttctgtttggggtgatgacaaagttttggacgcaaatggttaggataattgcacaacagtgtgaatgtaactaatgccaccgaattgtacagttaaaaacggttaaaatggcaaagtgtgtgctatggatattttaccacaataaaaaacaaaacaaaacaaacaaacaaacaatcaaacaaaacctcaagccatttctttccacagcaccctccccagggatcctcagagatggcaccctgcatccttgcttaaggcctgggctcctccctgccgtacagatgtgggaatagaggacaaagggggcttcctggccaaggatggtggaaggtgaggacagagccacaggccctgcctactagttgtggcctccctcggagtgcagcggcatgatcacggctcactgcagcctccacctcccatggctcaagtgatcctcccacttcagcctcccgactagctgggactacaggctgacgccaccatgcccagctaaatttgtacattttttgtagagacaaggtctctgtttgttgccaca

SEQ ID NO: 838328 - DNA, 581 bp, Homo sapiens
ccagcagcgggggggcacaggcaggatgtgtcrgcccacccctcagcggtcacccatcgcttcctcggaactcccagctgctcagggctgaggcgggcgaggctcagaagtgtggaagggccctccccagctggtgactgcatgtggcaggcatccatacccggaacgcccagccagggagtcgggccagcccatccctcctgctcacagagtcacagagtgggagcagactcgggggtcgaagctgggcagcgctcgctcgcacttccttctgcaaacttgaccaggtcccacggcctcttcagcccatggctcctttctctgatccccaagccaaagccagcaaatgagaataatccagtagagacagctgggttttgggatcagggtaggggctcagagccaggggtctgggattctggtcagtcagtttttcttcatcagaatcaatctcagaacaagagggaggcctaaggcatgcctgctgctggccaggggtgatggggaccactgcccacagaaagccttctaacaagggctggatccaaacaatcaaggaacaaggatgcctaaagcattag

SEQ ID NO: 838329 - DNA, 636 bp, Homo sapiens
tcttttcacaatatcaatgagaagacaagcccaggaatgaatttaagaagatgtagaaaatcccatatgaggaaatcattcaaagcactacggaggatacaaaggtttgtgaaatgggaagrcgtatcttttttcttcctaggtgaaaagagtaaacatggtaaataatatcaaattgttcataagttaacataaacacttcagagaactctcctccctctaattctagataagctaattctgaaatttatatggaaagtggtccagcaggacaaacgagaagaatgcagaaaaagcaatgaggaagattagccttaccaacaataaaggatattataaaggcttatgaattgaaacattttggttctggcttatgaacagtcacactagtggaacagatgagcaggtctagggatagacccatggaacttaattagtgtgtgattatgataaaggaatggtaagtgtgatcaagaaaagctgaacttttcaacaaatggtgttggggaaactggatagccatctgaaaaaacaaaagttttgtccatacctcacattctgcctcaagataagctccaaatatatgaggatttgtttttcatttttgttttttttgtttttgtttttgagacaaga

SEQ ID NO: 838330 - DNA, 622 bp, Homo sapiens
ttttaagaactttttcctttgcattcacaacttggcttactggcacaagagacctagcttttcagcctctcttggctttcaacgtatcttcctcactaagcttaatcatttctagcttttgacttaaagtgagaggtgtgcaaattttcctttcacttgcacacttagaggccactgcagggttaactggcttaatttcaatattgtagtgtctcaggaaatggggtcacagtagaggcagagaaatgagggaacagccagttggtggagcagttggaacacacacaacacttatcgattaagttcactctcttatgtgggtgcagtttgtggtgccccaaaacaattacaatagtaacatcaaagatcaccgatcacaaatcaccacaacaggtaatactgaaaaggtctgaaatattgaaagaattatcaaaatatgacacagagatagaaagtgagtgcacgctgctggaaacatgatgctgacagacgctcaacacagggttgccataaaccttcaattaaaaaaaaaacactgtaatttgcaaagtgtagtaaagtgaagtgcaataaaatgaggtatgcctgtccrtctatcatatgacccagcaatatcactcca

SEQ ID NO: 838331 - DNA, 617 bp, Homo sapiens; identical to SEQ ID NO: 820954

SEQ ID NO: 838332 - DNA, 649 bp, Homo sapiens
agggaccacaccgtttgaggctggacacatgtgcaacactggaacctgtctttctaataagcttaccaagtaatcctgatggaaatcttcaccctaagtcaccacctckacaactaggggtctcagagatgaaagccagggcagagggagactcttacctaccccttgggagacggagaaagacacaagaatcctaaaagcagctgtggctccagcatctgggaagggaatgggacagaaagtgcctccaagatggactctgtcctactcttctttcaatccccagaccttaacactgggcatggcacgtagtcggtgtttagtaagtgcctgctgagcagcttgtttcactcatggcaccatccctggcagggaaagaaatagcagcagagtcaccaatgcatgtaacctgcctgcagcaagaagtgccccagacaggaggctgcaaagctttagagcagggccttcagcctaatccaggtaggtgggtggaaaccaaacacagcctgctccagagctacagggcaagtgctggcgtagaagccaaaatatgttatttccttgtgcggtttcatgagactaggcaaatcagcacagaacctggaaggatcccaagtgtaccactcttcctctctgtattaagtgtcct

SEQ ID NO: 838333 - DNA, 649 bp, Homo sapiens
agggaccacaccgtttgaggctggacacatgtgcaacactggaacctgtctttctaataagcttaccaagtaatcctgatggaaatcttcaccctaagtcaccacctctacaactaggsgtctcagagatgaaagccagggcagagggagactcttacctaccccttgggagacggagaaagacacaagaatcctaaaagcagctgtggctccagcatctgggaagggaatgggacagaaagtgcctccaagatggactctgtcctactcttctttcaatccccagaccttaacactgggcatggcacgtagtcggtgtttagtaagtgcctgctgagcagcttgtttcactcatggcaccatccctggcagggaaagaaatagcagcagagtcaccaatgcatgtaacctgcctgcagcaagaagtgccccagacaggaggctgcaaagctttagagcagggccttcagcctaatccaggtaggtgggtggaaaccaaacacagcctgctccagagctacagggcaagtgctggcgtagaagccaaaatatgttatttccttgtgcggtttcatgagactaggcaaatcagcacagaacctggaaggatcccaagtgtaccactcttcctctctgtattaagtgtcct

SEQ ID NO: 838334 - DNA, 600 bp, Homo sapiens
tggcaggtgggtgaagaggggagtccgggcttggacctggcgcctgcacgttgcaggaccgcccgccgtttctggccgaggagcaactcgagttcttagctttggaggagagaaacggtggggaatkggaaaggagctagaaaaaacgaggggcgcaagggggcggccagcgggtgagaagcctcgaggtgaggcggataggtgcgcccaagggctcccacagtttccgaagacccttagattgcattcgccagtggagaaaaatgaggccctccgcgaagcgtccctcgaggtcacccagtgacgtaatattggacgaggactagggcttctgatccccatcaccggccgaattaacctcttttcttctgtatgtccatagctgtttgttcccaccgagctgtgctttaggaagctggccagccgggcctcctttaggtgcgctgcagcctttttcaaagcgagtgaatgtggcccggcccctacagttcgccaggcccgctgtaaaagggttagatttcagtctatagacgatcagtgggaaggcctttcctaggaggtaaccagaacagagagctgtaaactccgtgaatgcaagag

SEQ ID NO: 838335 - DNA, 530 bp, Homo sapiens
atccactgcagtgagaccctgccaataaaagggttagactaaacaatactattttaggatatttagagataggaagcaaatgttaatcattttcacactatactaaatatctcctcaatcctctattttaaggaatatataaagacttttaaaattcttgatttaaaatattggccaagcgcactggctcatgcctgtaatcccaacaatttgggaggctgagacaggtggatcacctgaggttaggagttcaagaccagcctggccaacatggtgaaaccccatctctactaaaaataccaaaattagccaagcagggtggtgggcacctgtaatcccatctacttgtgaggctgacgcaagagaatcacttgaacccaggaggcagaggttgcagtgagccaaaatcgtgccactgcactccagcctgggcgacagagtgagactccatctcaaaaaaawaataataataaaataaaatactaagtttggccgggcgcgggggttcatgcctgttatcacagcacttt

SEQ ID NO: 838336 - DNA, 442 bp, Homo sapiens
tagacttgtaggttgtttccagtcttttgctatagcaagtaatgctgcagtgcayatcttgtacgtgtattgttttgtacttgtttgaatatatctatataaattcctagaaaaggaattttctgtgtttatgagtagattatctgatatatattgcagaactgtacttcagaaaggttgaatcaacttacattcctgccaataatatatgatattgcttattttcccatattcttaccaacagagtgttattaaacgttacctagcaacgtttttcaaaaattgaaaaatgatgactgagtgttgttttaaattgcactttttttttttttttgagactgagttttgctcttgttgcgtaggctggactgcagtggcacagtctcaactcactgcaacctctgcctcctgggttcaagcaattctcctgcctcagcctccc

SEQ ID NO: 838337 - DNA, 529 bp, Homo sapiens
ggatttcaggcatagtacaaaagaaagaatgtaacatatctcagtaacttttttgaattgattacatattgaaatgacagtatttcaagtwtgttagactgaattaaatatataattaaaattgatttcattgcatttttttttttacttcttttggtgtttctattagaaaatttaaaatgataaatgtggctcacatagtatttttactgaatatcactagcctggaggtttaatttcttttgtgtgtgtgtggaagctctatagtgatgggaaaaaataaccctcttttgttggctccttcctatcagataaccaattcaggagaatttgtgttcccattagattctccacacaaaaagccctacgaaggtcttatactggggagggttcaagaaaaaactgctctaccattgaggtaggaaaggtgatttttcaaaattgtatacatgtattaatttttacgcttttaaaaatgattagtaatcattgactttttaaaatgtttatgtttttgaaactctgaaaa

SEQ ID NO: 838338 - DNA, 511 bp, Homo sapiens
aatacttaaattgttaatttctttcattgattgtaaaatttgtgttaaaatcagatacagaaagagaacaaaaatcartgcagctgtggcttatgtatagaaaattgttttttaaaatatagtttactttcttgttctgtttaattaggaatgcagatgtaaacgtgctccccattccagaccacaaattaattgtcagcgtgccctgtactcttcactcacataagccaccgcttgctggtatgtttttataaaatagaattgttatcacttttgtcaaatttgaaaaaaagtgtacatttagtatttaaacggcctacagattcggaaattaagtcagacgtaggttgttaatgaatattctaaaactttatagcagaattcatagcagaatttgcctatctctatgaaatagagaatagattagttttatgttactcagcttttccagttataccatttttcagattccccttgctatcagttgcttcccatcactgggctgacacaa

SEQ ID NO: 838339 - DNA, 514 bp, Homo sapiens
tgtgtattttagtagagacagggtttcaccatgttggccaggttggtctcgaactcctgacctgaagtgatctgcccgcctcagccacccaaagtgctgggattacaggcatgagccaccacatctggcctaatttttttttttttttagagacaggatctcactatgttgtccaggctggtctcaaactccaggagtcaagcaatcctcccaacttggcctcccaaactctaggattgcaggtgtgagctactgtgcctggtccagaaatgcatactcttgatcccaccccaaacctactgaatcagaatctgtactttttatagtgtattaacataaactacatatttaaagttttcataagtgttgacatctgtatctgtaaaaccatcatcacaatcaagctaatgaacatatccatcaccaccaagagtttgcttatagccctttgccatccattckcaccccccacaccacaccaatctccaggaaagcactgatcaatcacctttct

SEQ ID NO: 838340 - DNA, 579 bp, Homo sapiens
ataatgggatcctggcttaggccacatgcccactcccgcagaccagtcactgaggccaggtagtgtggttggcccagcttaagtcacctgttccacagggctgagaagagcacacttgttaacattgtcatggtgccaccggcagtgtggagcctgctctgacaaccttaaagctttttgaaaacaggaaagccaaataaatattccagttgataagttatgtgctgtctgaagaggcaatataactagagctaccatataatttatgacccaaacctggaccctttgagagtaaaaggtgatgcgattaataataacatcatatataaaccagggttgtcctaggcaagttaggcctacagttgaatcaagcgttaccttcttattaccttcatatccagagaagttggccacacacagatgccttgtacaaggttttcagagggaaattttttaaaaaakaaaagaaaaaagaagtctgcttcaggttttcaatggtgtgtgctgagcaggaacaactttcacatgattgctactctccagccactgtgtagccccagcagggagaggacggggtgc

SEQ ID NO: 838341 - DNA, 607 bp, Homo sapiens
aagacacctattacacagataatcccatatgaaataaattaaacccgttttacagatggattaattgttttgtccttgttctgttgacttccagaccttgttatctctcctgttttcctggatcatattgtctctcaaatatcaatagcacagtttttggctgtgttgttttcaaacagcctacttttggggaaccacgaggacgtagtggcaggactaaaggtcaaggtcacttcagtgttctcccaaatcccgctggcataggctctttccttgtctgctttgtctgcaggattcagcaccaagagctctcaagagcaaatccacaggcagctaaatcaagaaggtggctctcttccctcctctttgctcccctcttcctgcagagatgcaagatggctttgaaatgtccctatcttccttcccttctgattgccttacttgttcagatgcttccatcctgaacattttctagagtcccctgcctagtcgccctggaaagtacccagggaagccacttacggccyatccatcaaagcacagtgcgtgtctcctttctcagacagaggacgtaatcatccatgcccacagaggagagcgtgtgccc

SEQ ID NO: 838342 - DNA, 602 bp, Homo sapiens
aatattgattcttccaattcatgagcatgggatgtttttccatttgtttgtgtcatctatgacatcattcagcagtgttttgtagttttccttctagagatctttcacctccayggttagaggcattcctgggtattttgtgtgggtgtggatgtagctattgtaaatgttattgcattcttgatttggcttttggcttgaatgttatttgtgtatagaaatgctactgatttttgtacattgattttgcatcctgaaactttacagaagtcatttatcatttccagggaccttcgggtggaatctttagggttttctaggtgtagagtcacatcacgagtgaagagagacagctggacttcttttccatttggaagacttttatttctttctcctgcctaattgctctggctaggacttcctctcttgtcttttaacttagtttatggtgtccttttataattttaatgcaatccagttagattacattaagagtttcccttagggtttttgtgttttttcactatacattttaaatttttggcttttcatactcaggatgttaaccatctagatatatttatactgtggtatgcagtagg

SEQ ID NO: 838343 - DNA, 602 bp, Homo sapiens
aatattgattcttccaattcatgagcatgggatgtttttccatttgtttgtgtcatctatgacatcattcagcagtgttttgtagttttccttctagagatctttcacctccacggttagakgcattcctgggtattttgtgtgggtgtggatgtagctattgtaaatgttattgcattcttgatttggcttttggcttgaatgttatttgtgtatagaaatgctactgatttttgtacattgattttgcatcctgaaactttacagaagtcatttatcatttccagggaccttcgggtggaatctttagggttttctaggtgtagagtcacatcacgagtgaagagagacagctggacttcttttccatttggaagacttttatttctttctcctgcctaattgctctggctaggacttcctctcttgtcttttaacttagtttatggtgtccttttataattttaatgcaatccagttagattacattaagagtttcccttagggtttttgtgttttttcactatacattttaaatttttggcttttcatactcaggatgttaaccatctagatatatttatactgtggtatgcagtagg

SEQ ID NO: 838344 - DNA, 563 bp, Homo sapiens
tcttctttcttagagaaaggatacactgtcatctggctggggtggcttaactatgttcactaaggttctcaagactgctaaactgttatttttgcaaaaacacaataactttaaaaattggctgtaagcatgcctgcttaagcactctaaatgcaaacaattactgcttatataacagtgactcataccctatggtgtcacctaaaacctgactattctccaaagctttctagttatagatggaaattctcatacttaaaaacttgtaacttacaagccatcacaggtgcaaagctattttccagagcaaaagcatatcaactccgtctggcaacaagacatgcagtaacaattatgcaccatccttttagttcaaatatacttttgcccgaggcattagccattattctagtgtgtatttgctatgtttacacttagttttgagrtactttatgaacatttactccagtgtctcaaataaatgcaaaaacaataaagcttgtaaaaaaaaatactagattgaagaagcggacaatcacaaatgaaacaaaagtagaaatatg

SEQ ID NO: 838345 - DNA, 408 bp, Homo sapiens
tgagtcaccggagcaaggctatggggatcctgatccactgtttgcgtcctctgtagagcaacaggacattttcttattcccaggcccctgtgtgctgaaaacgggccgccaaaggagcctctgccttcagccaggcttggaagaacaccaggaaagcaaaaggtggtggtggggaccttctccatgtttatgggtctatgctgaaaatcccagtacagatatgaggaaagagccctcttatgggcaatggaaaagcttagattggttcaaataacacagtgaagcctactgatttaagatgatgctttgaatagaacacttaaaatttaggtctttccttagcctctgagttgyataaaccacatgatgtggggactttgatgtcctccagtttctttctgatttgaa

SEQ ID NO: 838346 - DNA, 614 bp, Homo sapiens
ctaacaagagagctagcctgtcctttgaagttttaaaggcaagcaacagctttttctctctagctataaaagtcctggaaggcatcttcttccaagagaaggctgtttcatctacatcaaaaatctgttgttagtatagccaccttcatcagtgatcttagctagatctcctggataacttgctatagcttctatatcagcccttgttgctttcattttggacttgtatgttatggagatgttttagttccttaagccttatgaaccaacctctgctttcaacttttcttctgcagattgctcatctgtttcagcctccatagaactgaagagaggtagcaccttcctttgtattaggctttggcttaaggaaatgttgtggctggtttgatcttccatccagaccactaaactttctccatctcagcaataaggttgtttcacttcttatcatttgtgtgttcccaggaatggcacttttaattttcttcaggaactttttctttgcattcacagtttggatgtttggtrcaagaggcccagttttggcctatcttggctttcagcataccttcttctatctatggcagtatagccttattaattgtatttct

SEQ ID NO: 838347 - DNA, 620 bp, Homo sapiens
ccaagttgattgaaaaaaaaatactactcaccagctcagggtatgaaaaaaaaatactactcaccagctcagggtatagatgcaaaaccaaagagtctgccctctgtgagcttactctagtaagcaacttcactgggagggtgggttatcagtaagagcatcagcaatgaacaaaggtcggtggtatgtgtgtgctttaacaaggtgtgtttgagcaggggtgaacaaacaattactatccaccatctgtttttgcaaataaagttttaatgagggcctgtggtggttcacacctgtaattgcagcactctgggaggcagaggtgggaggatcacttgagaccagccttagcaagatggtgagaccctatgtctacaaaacatttaaaaactagctgggtgtgctaacagcacatgcctgtagtctcagctactcaggaggctgaagcaagaggattgctcgagtccaagaattcaaggaggcaatgagctataatcatgccactgcactccagcctgggcaataaagtgagacaaccgtgtcttaaaaaacaacaaaaaaagttttaattgaacacagccacatccactgtatatgtaycatctatgactgcttttgag

SEQ ID NO: 838348 - DNA, 318 bp, Homo sapiens
agtggattcccattgagaaagcttcaaatagagcatttccttgcaaataacagtttactttcacaaaaataggtgacctagctcatgatcataattagccttctggaattgaatgacaattgctaatgcgcgaatataattctctcctttcacttcctatactggtagggagtttctactcttcttcctcagaatgtgcattttaatagtaaaaatgccacattttgttgattattacmtgacatacatgcttacgtaacatcataaaaagggcaagtattgtgcagatgaaatagagtgaattttcacaagggattc

SEQ ID NO: 838349 - DNA, 578 bp, Homo sapiens
agaccttaagaccctgggagaccccatgtcatatcaaacacatcaaaatgcacctcacttccatacagatgtgcatttcttgttgtttaaaaatgtgaaagaattattgtaattctgaactcaatatgagaaaaaatggttcattgtattcttgggaatctttattatgctgtatttatatataactatgtaagggttgacttcaattatagttgactagcagacatgtgtctctctgtagctattttattaaatattccttttaattttgcaattttctttaaaaattttggagctataacttttgggttttttaaaaaagaattaaaccatttattgaataattcctatatattagacatgtgctaaatgctttacttaaaaagtttgaattaaatacttttccacaacaaaagaaagaaatactttttcacagccaccacaacagtgctattttcacctccaytttccagattaagaaactaagagaacaatcaggtgacttgcctaaggtcacagtatttataatggcagagccaagactcgaatccagttctaaccaacaccaaagtcactgc

SEQ ID NO: 838350 - DNA, 487 bp, Homo sapiens
acatcaaagaaagctggacaaattaaaaatcaatgactgtctttgacctaatacatatgtgagtttgcagggcaagctgtcaccctgaaatgtgaagagacagcacatacagagagtaacaggtgagatctgcctacctgacatgcaagacactgaagccaaagatgctggaatcagaaactccttgtaatagcacatacaatatgtccaacttttaaccaaaaattataagacatgtaaaaaggcaagaaagaaattctaaagagaaaaagcaaggcagactcatatatgacacaaatattggaaatatcagacaggaaatttaaaatggctataattaatatgccaagggatttaatgaattagtrggtaacattcaagaacaggtgggtaatataagcagcaagaggaaaactccaggaataagttttaaaatgctagaaatcaacaacacagtcacaaaaagaatgccttcaataaggttatc

SEQ ID NO: 838351 - DNA, 517 bp, Homo sapiens
caatgatctatccacatttagggcctgacagattgaatgactgccccctggaacggactgtgttagagcttccatgacaaagagttcacttgtcaaaggtttattcttccttcttaaaaaaaaaraggggggtaggttggccagtaggcagaggggtgtcatgtgagcagggaaacacccgctccagcatgaaatatgaaacatcagtcacaaaggtcgggagggcacagcttggttaccaaggctccaggtggattaaatcacgtgcgtcccaagggaggacagggaggcagacaataaaataatatcggaacagagcaccccatgtcccaaggtttgaagacaagccttgttaattcgggaaactgcagggttaaattagtccatgccctggtgacaagcaacactacatattgtgccagcgagataaatttcccctcgcctgctctgatacactggccactgacaggacactgctgtgagtagttcattaaagtgtccaactcctaggaaattt

SEQ ID NO: 838352 - DNA, 495 bp, Homo sapiens
tccccaaggtgacatcacttgacacttgacaccttagatagagttatccctccagggaagggtgggactgaaagtatggccagcctattctgggactcggagactgtttttaaataaagtcytcaggatgcgttgttcttgagtgttttgatcagagatgcgaggtcatggtgagagatggaaagattattagagaatactaattaccaatatagttgtatgaatccacaaatcaggatgaaacccccgatgtctctagaattacggctaacaacagtagaacttactgaattttggagattttcatcaacacacagaaattgtagattaggtgtaggcccaaacgctcccctctttacacactcatggaaaacttttaattcctttttttcactctatgaacaaaatggccatttgcttcaaatgctttcccacatctcttctggccatggacttgcactgcagcacacacctgagaacctggatattgtaccc

SEQ ID NO: 838353 - DNA, 624 bp, Homo sapiens
gaacattaaaataacatcgaagcatcagataaaatgcyatgggattctagggattcttccctgggttctttcttttgaaagttgttttccctcttgattacagtctcaaaagtaaatttcgttgtgttaatttttgatgatttttcatttgctttattgtgaatggaaagtataatatgtacagagttgaattattttgtgtgtttttttttaatttaaaaaagtaccctaagaaaggaacaggtgaaaaaaaacatgtagggaaatattttaggtcagtggtcatctccttacctatataaggatacagaaacttaaatgtactaaagtgctcactcaaagaaacacatctgtttcaactactttgctttgtagcaaattaccaccgacgtatagtagtttaaacaacttgtttatgattttgtgtgccagcaattcaggaaggattcagcgtagtggttctcactcagtatctctcttgctgttggagttagatatcagctgacattgcagtcatctgaaagtgccactgagctagaaatctaagatggcacaggtggctggcagctagtgctggctgtggtctgggagctcagctgggtctatgggctgcagcacctgcat

SEQ ID NO: 838354 - DNA, 561 bp, Homo sapiens
tggttctttttatgttttctatctctttgttgaattttttattttgttcacgtattgtttttctgatattgtttatttgcttgtatgtcttctcttgcagcttactgagcttctttgcaactattmctttgaattctttacaggggatttcatagatctccatttatttggggtcagctactggagttttgttttgctcctttggtgttatgtttccttgattcttcatgttccttgacatcttggattgctatcttcacatttgaaaaacagttctttcttctagtctttactgagactgctttaggagagaaagaccttaactcaagaaagcccagccagacattttggggtttttgcagggcttttctatggatgcaccctccccgctcctttttttccctcttggagaggaagtcttaggattgtgtgccttctcttaatcctgcaaaattgagccaggtgtggagaactttctgtttattttcctcatggcagtgcttgaaagtgttcaaggttgcactccttcttccgatctcacaagttgagctagctgctgct

SEQ ID NO: 838355 - DNA, 503 bp, Homo sapiens
aatctaaatgttaaactagatggacgctcaatattttatggtctcagyattgtcgttaacacccattgtacatgtacgcgtacatgaagggcagtttcatggtctatagctgtttggtttgttatcagcacaaacagtaatgtcctgaaaatcagcttcaaaacagctggcaattgactgactggggtttagcaccgcctaaattcatatgacgtttatttgctctttgacacaaatagtgtacctgaacttctcatcaaggaagttggtataggcacctttctgtgtgcttgtgggcctagtaatgtagaagaaccttaaaatggattttttaaagagagttgttcctcccattctttcgggagatgtggttttggatactagtactgaggaaagttccccaagattagttaagatgaaacgtcttagctcactttcatctgagaagacggtggatgagcaaggtggaaccaatttctgtcatagtaattatgacaaatacg

SEQ ID NO: 838356 - DNA, 605 bp, Homo sapiens
ctatgaattgtacctttttttttttctttgagacagagactcgctgtgtcacccaggctggagtgcaatggcgcactcaacatccacctcctgggttcaagtgattctcctaccctagccttctgagtagctgggattacaggcgcccgccaccacacccggctaatttttgtatttttagtagagacagggtttcaccatgttggtcaggctagtctcaaactcctgaccttgttatctgcctacctcagccttccagagtgctgggattacaggcgtgagctactgcagccggctgaattgtactttttgtgtcaagtctatggactcttcaccaagtcctaggtcctgaagattttcgcctctgttttcttctgaaagttttatgttttacaaaataatcacttttttaccttatatttttgataaagcactaatattggtaacagagcaactgccagtgctacgattttcgttttgtttgcttgtattttgatgtattaatattatgcgtaatctgtccttctttgkaaaaatcttttaagaatccatttgtgcgtttgtgagtgctatcgcaattcagatgagatctgtaaatctactta

SEQ ID NO: 838357 - DNA, 645 bp, Homo sapiens
tatctttactgtgtatctatcccattcaagtgcaagctcatgagtttattgcctaaaacagtgccagcacacagtaggcattctaataytcattgaatgaataaacattcctaacttattatctgaagtattctcacttgactgaaaaacatttgcacatgacaattcagtacccttatcaaatcaccccatgcctctactaaaagtgcacaattattacatgttggaatgcaggcttgggggcttagaggagaaataaagtggaataagggactgaagtagctgaatggcaggcaaactacatttacagctaaaggtcaatattaacacaatttccattcagctccattttgctaacaagattttatatcttggataagcatacaaaggtaaaaaatagaggagataacagataggtacagggcaggaaagccccaggcaactgaaagaagtataatgaaattacaggaatttaatttatgtgggctaaaattctagacacagcatcttaaagtaactgaaacacgaaggcacagtaagcaaagaataaggaatacagactttgcagaaataaaagagcttacctgctttagaacttcaactaaaactaaacaaaaaatgaagtctactgctaagtccctcctt

SEQ ID NO: 838358 - DNA, 502 bp, Homo sapiens
tatattaagtgatatatgtagtatatatcttttgtataatatatatacttatatgttatttttaaagtaaattsaattaagaaaatatatactgaaagaacatataaaaattaatttacacttcaaagattgttcagttgacaatgtaacccacccaccatcacactccatccttgggccaaaaaaggtgaaaagaaaaacagaaggaaaaaagtgttaacattaaactgatttgctttatctggaacgagttagattataaactagtagaccaaaatctcagcctttaatagtcatcctgatgagttaaccaaccttcgcaggaaaggtggaaatgttttcactcctgatttttatttttttattgttgtttgtttgtttgtttgttttagacggattctcactttgtcacccaggctggagtgcagtggcccgatctcggctcactgcaacctccacctcccgggttcaagtaattctcctgcctcagcttcctgagtaa

SEQ ID NO: 838359 - DNA, 470 bp, Homo sapiens
tgtgtatattaaaattaattaaaattaaaaattcakttacgcagttgtagtagcaacacttagagtgttcaatagccatatgtggctagaagctaccatattagtgcaggtacagaacatttccatttgtgcagatagtttaattggctgctgtaaatgattaaatctacctcccaccagatccaattgctagaggccatgggatatccagagaggagagaaatcatgaggcatagcaaaggaaagtgactaaggtcacttttttaacccctagccagggttaaaaaagaggaaatccatcctgggctttgtgttcagccaatcagagcagcaaagatgagagagctgcagctcatcctattggattccattactgtggctttgcatcaaggcttaagagtcaagatgcacattgcataaagtcacagatggttctcaaaagatactacttttggtttctactacctggc

SEQ ID NO: 838360 - DNA, 572 bp, Homo sapiens
acagcaagctgtgatcctgccactatgctccagcctgggcaacatagtgagaccctgtctcagaaaaaaaaaaaaattaaaaagaataaaacagagtcattaaaaaaacaagcgccaaggtggagtgtttgcctagctaggtagtggaatggtgtgggcttctgacaaagctgagggaggtgttctttgagacctcagtcattgggacaagctgcccctgggtaatgattttctactcctgtggaaacctgccactaaaatattttgtctgctatttaggacatggggaatgaggagagaagatttgggtttcttttccccctgctctagagtagttacttttccttcaccactgcctatagctttttacctggcactgcggggactctcagctgatgtaaaaacttaagagggtagatcttgtgtgtttttaccatagtaagagattaattaattttaaaaactytgaatctatataagaaatgccagaaagttcttagttttcagaatactatcattacccagttattaactctaggactgcaggattcaccatgctttcacaagctttg

SEQ ID NO: 838361 - DNA, 572 bp, Homo sapiens
acagcaagctgtgatcctgccactatgctccagcctgggcaacatagtgagaccctgtctcagaaaaaaaaaaaaattaaaaagaataaaacagagtcattaaaaaaacaagcgccaaggtggagtgtttgcctagctaggtagtggaatggtgtgggcttctgacaaagctgagggaggtgttctttgagacctcagtcattgggacaagctgcccctgggtaatgattttctactcctgtggaaacctgccactaaaatattttgtctgctatttaggacatggggaatgaggagagaagatttgggtttcttttccccctgctctagagtagttacttttccttcaccactgcctatagctttttacctggcactgcggggactctcagctgatgtaaaaacttaagagggtagatcttgtgtgtttttaccatagtaagagattaattaattttaaaaactctgaatctatataagaaatgccagaaagttyttagttttcagaatactatcattacccagttattaactctaggactgcaggattcaccatgctttcacaagctttg

SEQ ID NO: 838362 - DNA, 611 bp, Homo sapiens
cagggttttctttctggtttcactaattactttttttttcctggctgtaatctgtaaggcacaatcccagtgaatgatttatttaatttgagggaagttttttaattttagaaaccctataaatatcagtttaatgatacaaagtaaacctaacactaatctttaaatgtgacgaggcaaatgaaaagaatgctaattctaaggggaacggggtcaaacccatgtatgtttgaactcttattttccttatctgaacaaaacaaaaaacaaaacacaaatataaatctagttatctcataaaaatattctataggctgggtgtggtggctcatgcctgtaatcccagcactttgggaggccgaggcaggtggatcacctgaggtcacgagttcaagaccagcctgcccaacatggcaaaaccttgtctctactaaaaatacaaaaattagccagttgtggtggtgcacgcctgtaatcccaattactcggggaggctgaggcaggagaatctcttgaacccagaaggcagaggttgcagtaagcygagatcacgccattgcactccagcctgggcaacacagccagactccatctcaaaaaatatatatata

SEQ ID NO: 838363 - DNA, 318 bp, Homo sapiens
atttttgtatttttagtggagacaaggtttcgccatgttggccaggctggtcttaaagtcctgatctcaagtgatctgcccacctcagcctcccaaagtgctgggattacaggcgtgagctaccacacctggcctaaattgtgcacttttaaatgattaagtttatgtaaattttacctcaaatttttttaaaaaagaaagctcctggagagctccaagaagatgaaattaatagaatacctaatgtgttttaaacrcattaaaaagagatcttaataattgggccaaggtttgagaatgacttagtattagtacaca

SEQ ID NO: 838364 - DNA, 563 bp, Homo sapiens
tttgtttacctaagcaagcctgggcaatggtgggcacccctcccccagcctcactgccgcctttcagtttgatctcagactgctgtgcgagcaatcagcgagactctgtsggcataggaccctccgagccaggtgcaggatataatctcctggtgcaccgttccttaagcccgtcggaaaagtgcagtattagggtgggagtgacccgattttccaggtgccgtctgttacccctttctttgattaggaaagggaactccctgaccccttgcgcttcctgagtgaggcaatgccatgctctgcttcggctcatgcacgctgcgctgcccccactgtcctgtgcccactgtctggcactccctagtgagatgaacctggtacctcaggtggaaatgcagaaattagctgtcttctgcatcgctcaggccgggagctgtagactggagctgttcctattcggccatcttggctgccccacctatgtaacatattacatataatttatttatatataatttacttgtattatatatgtaatatattgtatctattctataatatat

SEQ ID NO: 838365 - DNA, 649 bp, Homo sapiens
aaatgagaaatgcacatgtgtgtatgtgtgtgtgctctaatacattatttctgcaactcaacaaattctcttgcataccttctgggtaactgtatcccatagcctaataggcaaagaaatggaaatttactaaatggcctgaaactgtaggcataataattgacttatctctaagaaataactgaggcactggataatctagtttctgtatgtttcctgatttgaggccacctacagattaatttctgtatttgtgtctttaaggtcaaatgtgggtgtagagattatggaaaaattcaatacaattagtgtctccaaatgcaacagtaagtactcctgtgtttggtgggtggtgcctagttctagacccatttaaagggtttcttctttctactggatttgttcactgtttcagtcctatcagcactctgttcatctggcttatctaaggttggccaagacaccagttacctaggtgagtgaataattcaatcactggaatatcataagcctattttagtaactgtaactctcatcatcagtctatttgtcagtcagtgaattccctgcccattttatacaacaacctttaaacgttaactctttcccaattctatacccasttctttacctcaccacaacacctctc

SEQ ID NO: 838366 - DNA, 648 bp, Homo sapiens
gctgacttttcacatacttgggttccgtggggctgaatgcaggacttaagcatatgctgatttttgtagatgtggtgggggtcctggaaccaatctcccacatatactgagggatgactgtaaatatattttcccacctgggttctctccctcaaccttggctgaagaatcagaaatgttacttcctaggatatttatttcttcaaattaaaaaagtctttttctttttaagagttttgtggataatcgtgataaaaacataaatgaggagttaccataggagaagacatcacataggtaacacagttgttcactattctgttagtttctattatggtctaattaattatagacccctttttaaaatttaatgcacatacacaattacaaaaacaggagacattaaaatgaattcctttataacattaatacatggttttaatcctaattttaatgtagcatcaaattttttttggtaaccaaatttacaaggtagccgggtctcaatctcttttgttatcctcagccttacctgagaaaggtatgggagaatagaggtttggtcagattaaatttcttaaagacaaatcttactcttgtgccaaaaataggtctgatrggatcctcagtaataataattgcaatgat

SEQ ID NO: 838367 - DNA, 504 bp, Homo sapiens
atttaagcttggctgtatcaactgtgatctgaacacaaatctttccatttgttcaattctgtgctctctctctcctctagttctctcctgtwtttcaaatcaggccataatgaaaaatcatcttcttttataaataagtttattatatatataccaaggtaaagttaatctcagatgattagttccttaattctatgaatgaatactgtaaattatagacattttatttttaaaaagatttttctctcacaaacctaatggaagtagttttatatgaatttttcaacataggtaatgagtaataaaatgatttttatttaatgtcacaatttaacatcatcacaatttatttaagaattcatcaagaagtatcttgcttaagaaagcaagactgcttaactctccatttaaattatattacaattttagaatttctaagaggtatatttacttcaccttctggattgggatcaatatctgagtcaatttaatgacaaatgtata

SEQ ID NO: 838368 - DNA, 573 bp, Homo sapiens
aattaggtgtctcaagacaacataaattccacctggactcagcctacacctcattttaaggtttattgcctgycatatcccattttcgtatacttatttatctgttagccatggctctttcagttgaaatcttaaaaattctactcaaactatttaagggaaatttattattattattattttgggagatgctctgtcacccaggctggagtgtagtggcatgatctctgttcactgcaacctccgcctcccattttcaattgattctcctgcatcagcgtcccaagtagctgggattataggcatctgacaccatgcccggctattttttttctttgtatttttagtagggatggggtttcaccatgctggccagctggtctcaaacccctgacatcatgtgatctgcctgccttggtctcccatagtgctgggattacaagcatgagccaccacgccctgcctaagggaaaattatttttagctcatttaactaaaagttcaggactaacaatttctgttagtccatttaatataaattgttttatgtgtggataagattgcgggggggtg

SEQ ID NO: 838369 - DNA, 569 bp, Homo sapiens
tgctctggctggaaaagaaaatgttaatccacttcctccgtgcagcctgttgggccgcatcttgcaaaactgagaggattttttgcctatggtcccatgaaactgaaaaaagatgattttcctttgtgatayggtttggcccccccgggctatggtgcaagaagcagggtcgctagggccactcagggagaaggaacccagaaacctagcatgctggtgaaaggtgagaatttcttaccagtcagccttctagcctctctctctgtgcaaactggttgaaggaatggtaaaaatcactgtttgtctcctgtaaagttttgattcatgggaaaaaggatttgtgaggctagtgttagcctgtagcaaatctgatgtgctttaccgtatgaatttatctttctgctttgttctgtcataaaaaaggtaccctagaataaaatgtggatctaggacccctgtaagcctgctgttcaagccagcccagcaagctggtcagttacaaactttgctgtatgtccctgaaacaaacaaacaaacaaacaaactggatgaggtttccctctcctctt

SEQ ID NO: 838370 - DNA, 564 bp, Homo sapiens
tagtttgcaaatattttgtcccattctgttggttgtctgtttactctgttgatagtttctttggctgtgcagacactctttcgttttcttagatcccatttgtcaatttttgtttttgttgcaaatgcttttgagagcttagtcataaattctttgcagaggccaatgtccaaatatttcctaggttttcttctaagattcttatccttgaggttttgcattttaatctttaatatatcttgaattgatttttatatggtgaaatagggggatacagttactttcttctgaatatggctagccagctatgccagcaccatttattgaatagggagtcctttccccattgctcattttttattgaatttgttgaatttgaaggtctgatggctgtaggtgtgtggctttctttctgggttctctattctgttccttggtctatgtgtctgtttttgtaccagtactgtgctatttttgttattgcagtctgatagtatagtttgaagttgggtaatgtgatgcctctggatttgttctwtttgcttaggattgctttggaaattt

SEQ ID NO: 838371 - DNA, 592 bp, Homo sapiens
gcaaaatattggaaataccatagatatctgttgatgtgaggtcttagtgttttgtgttartataacagaatatcacagcctgggtaatttacaagtaatagaagtttatttggctcacaattctgaaggctagcaagtccaagattaaggatctgcatctgatgaagaatttcttgctgcattgtaagacggtggaagacattgcatggtgacacagcatgtgagagagagaagagagagagaaagagaaagagagagagcgccaaactcattcttttataaggaaccactcccatggtaactaacccattcccataacagcaataatccattcatgagggcatctgttcatcacctctgaaagattctacttctcaacactgttgcattagggattaagtttctaatatatgaactttggaagacacattcaaaccatagcctatgagaatagataaataattgtgaaatggtcataaaaaggaacactatacagtagtgaaaattagtgagccagagctacatattttaacatgactgaatccaaaaacatagtgttgaataaaatgaagcaacttaatgtggtactata

SEQ ID NO: 838372 - DNA, 632 bp, Homo sapiens
agtctacttctgtgacttggataggctcaagcacttgtaagtaaatcatagaacattcagctattcattttttaataaacatcaagccagaatcagtatcctttctcaatagagctgtttttagagtatctcaaaattccttgatacttccaaggacaccaacatcatctaatttgtgaattgcaaagattatctccctttcagtcattacggggaatataataaaaataaccataattatgcccaatgaatgatagacaattccatgggtagcatggtttggaattgaacctggattttagttgtctctggcactcattagctatgtgactttgacaaattacttacattattttttttagttaaacaagataacacataatttataagctactgtgtgaaaaacatctaacccaatatctagcacataatacatatttcttctccttagggccctgagataaaagattctataaccttggtgcaatcctagagccctcaggttttcaggttattctcttgagggttaaactgagtttataagaacataggagagtggtaattttcctatytgctcctgagatctccaacggaattaacaggaactcctgaaactgttttctttctcaaat

SEQ ID NO: 838373 - DNA, 656 bp, Homo sapiens
tggattcttaacgccaaaataattctagtttcttgccttttgrttagtgatatttagaaagcatcttaaatagtgatagctccccaaatatcaaaatatatattcgattacatcatgcatggacatgtacagagttgctgttatgcactgctcaatgacaactctctgatatgttttattttgactacagccaaaattacatttaagcctcagcagacacattttggttaattatctagcttcaaactaattaaaaaaattctaatttattagacattaagtatctgtgccataacacatggtattttcaaaacgactagtttaaaatcctcaactgtagtcagagatgtctcagtaattgatagaacgagtacagtgaaaattagatagtagaaggcctgaacaacagtaccaactaatttgacctaattggcatttataggtcagagagcaaaaacccaacgacagaaaaatacacattttctagtgcccatatactattcaccaagatagatgatattatatgacacaaaaattatcaaaaaaattataagaatgaaattgcataatatatggattcagatcacaatggaatgaaaatagaaattaacagaaaatagttttaaaggatcctcgaatatttagaaatttcaaaa

SEQ ID NO: 838374 - DNA, 608 bp, Homo sapiens
tcaatccaatcaacacttaatattaaccatcacaataactcaaagtcaaarcaatcaaatatttaccaacaagatgttgcaaaaataaattgttttataactatacattagaataatttgaaaaagtaataagggcaaactaaagatgtacacaaaaactttcattactgatatggtttggctgtgaccccacccaaaatattatcttgaattttaatcccttattgtaacccacacctgataggggaaggaacttgtgggaggtgattagatcatggggacagttctcccatgctgttctcatgatagtaggttctcatgagatctgatagttttctaaatggcttttcccctttttgctttgcacttctgtctcctgccaccatgagaagaaggacgtgtttgctttcccttctgccatgattgtaagtttcctgagccatgcagaactgtgagtccattaaacctgtttcctttataaattacccagtctcgggcagttctttatagcagcgtgacaatagactaatgcaatttccatctgtaatagagtaacagagatcagagttactctactaccttaatcaaccagaaaaataatgttaagt

SEQ ID NO: 838375 - DNA, 554 bp, Homo sapiens
ccaccttggcctctcaaagtgttgggattatgtttatgttagccaccacgttcagctaatatatagtttaaaaggcaaaatagttgaaatctcaaggcctgcagatattcttattcctcttttgatctagtgaaaatgttcttgttgtatggcagatacagctttgaattaacgaaagcctaaaattggctagagtaaaattttcaagtttctttgtgcatccagatcactctcctccatatttgccatcaatcatttatgagaaagaacaggcctaagaaacagatgtcccttctctgtgttcagtctagccactgttgtatgtattgcagcaaaggattatggcctctcaataagcagctgaagatggaggttgtttgctctgttggtgaggcttcctgaccactgcagtttatctaatcagcttctgtcttcatctagtttgttayagttgaggcttccaaattctggaatcacctttatattgtgaagcagagatagggaaccatagtttagcatgtttctcatacacctcatttaagatgaagcgtatg

SEQ ID NO: 838376 - DNA, 618 bp, Homo sapiens
aacaccttggctaatctgggcccttcacatttccatatcaaatttaggatcagctcgtcaatttctgcaaaaatgcccactgggattttgataggaattgcactaaatctatctactaatttagagagaatcaccaccttaaccacattaagtcttctaatccatgaagtttgaatgtttccatttatttaggtctttaattttactcagcaatgttttgtagttttcagtgtacaattctttcagttattcctgagtattcttttggtgtcattgtaagtggagttaatttcttaatctctttttcagagtgttcattatagtatatggaaatataattaatttttgtgaaatcaattggtcttgtattctgcaactttgatgaacacattagttgtagtaacttttttgtggaatccttaggattttctatatacagggtcacatcctctgtgaataaaggcagttttatcctctccggtctagatgtctttcatttatttcttgcctgactgtaccagctagaacttccattccagtgttgtataaaattgtgagagcasacatcctagccttgttcccaatctcaggaagaaagcattcacacttgccatttaa

SEQ ID NO: 838377 - DNA, 601 bp, Homo sapiens
catgaagggtccccaattttttttggcaccaggaaccggtttcttggaagacaatttttacaatttttccaaggacttggcgaaggttgttcagaggcattagaggctcatgacgagtgctcaccctagatccctaggttccacgctcctatgagaatctaatgcagccactgatctgacaggaggcagagttcagacagtaaggcccgctgcctctcctgctgctcacctcctgctgtgtggcctgggtcctaacaggacctgtcagcagtagaatagataaagaagttgtggtatatttatacagtggaaacttatactgtaataagaatgaatgaactccagttacagacaacatcatgaatgaatttcacaaacataatattgtatgaaagttggccagacacaaaataatgttacaatattgtttgagtctatttatttaaagttaaaacattggcaccaatagaagtcaacataatggttactcttatcgatgaggctagttactagaagggggacgtagtgacttcaagggtttgggtcaggtttcctttgtgaacatttatcaagctgtagagwtccaatttatgcacttttc

SEQ ID NO: 838378 - DNA, 630 bp, Homo sapiens
ttggcattagtgaagccaaacatctagtagttcggtgtagtcactgaaagtgtgacacgttcatgatggattctgaacagaaggtaacagactacacaactctccaagtggttggcatttagatcagtacttctcattctatttgtgatgaagagctatcctttatgtttgttttaatttccaatccattgcacactttgtggaatgcaataaaaataaagcattacaaaaaggaagtgaaaaagtaaagcaaaatataaagaaaatgaactcaattatttataactagatttgacaaacaatcacactgatcacatgctcagatatagcggcaatgtcaaagtgctgtaaaagtttctaaatgctcacacgtgacttctgttcttatcgtggactcatgacaagccattctcagaccagttgaggtcagaaggcttcactgtgatggtcatatccagagaacttgatggaggccatatcacttgttactttcctttcyagaagcacactcaggcagtacaaaaatgtcagagcttctcaagttctgggtcattatgcttggaaacttctgaaatctcagcaatttgcacaaatgctgctgattaaaagtaaactgaagcattcagaact

SEQ ID NO: 838379 - DNA, 502 bp, Homo sapiens
gcaaagcttcagtgttttccctttaaaactcaggtgaacaggagagtttaagagaagattytgagcttgtggaagtagcacagttttacagataagaaaatgttttccaggataaaggtaaatactaaatacttcaaggagttttttttttagatttcaacttaagaaagactgatttgtgttcatccccaaaacacatttgtctgcccaaaggggaaaacgacctgacctaccttaattaaaatgggttcagtgcatccctgtgcttgtatttaatgatttactaataagtgagttacaacatcttttttacttcagattaagacagtttgtttcgtcatgttaccttaaggcagtctctttcctccatcagcctgttgttgcaatgtggaaatgaggggtgttagatctttttgtttattaggaaaagctggaaatccctaattttttgaatgcctgtaaattgttgtaaattcctcttcatttcttccaccgtctctct

SEQ ID NO: 838380 - DNA, 544 bp, Homo sapiens
taatactgtgcttttccaacggtcttagcaaacggcacaccaggagattatattctgygcctggctcagagggtcctgtgcccacggagcctcgctcattgctagcacagcagtctgagatcgaactgcaaggtggcagcgaggctggggaaggggcacccaccaatgctgaggcttgagtaggtaaacaaagcagccgagaagcttaaactgggtggagcccaccgcagctcaaggaggcctgcctgcctctgtagactccacctctgggggcagggcatacctgaacaaaaggcagcagaaacctctgcaggcttaaatgtccctgtctgacagctttgaagagagtagtggttctcctagcatggagtttgagatctgagaatgaacagactgcctcctcaagaggtccctgacccctgagtagcctaactgggatgcatccccccaataggggcagactgacaacccacacagctgggtaccgctctgagacgaagcttccagaggaacgatcaggcagcaacatttgctgttcagcaat

SEQ ID NO: 838381 - DNA, 565 bp, Homo sapiens
ggcatggtagctcatgcctgtaatcccagcattttgggaggccaaggttggaggatcatttgagcccacacgtttgagaactatggaaacgttctcaagtttcctgggaaacacggtgaaacttcatctctacagaaaaatacagaaattagccaggcatggtggcacatacctgtagtcccagctactcaggtggcagaggcaggatgatcacctgagctcaggaagctgaggctgcaataagccaagatcaagccactgcactccagcctgggcaacagagtgagaccctaaagaaaaagactaaaaaatacacaaaagatcaaacagaaagttagttctttgagaagataaacaaaatcaacaaaacgttagtgaaactcagaaaaaaagaaaaaaagagactcaaatttgaaaaaatcataaacggaagaggatatgtcacaatggacaccatagaaatayaaaggatcattagagagtactatgaacaacaatatgccaataaatttgaaaatttaaaggaaatgaataaattcctggacacatacaacctataaagatt

SEQ ID NO: 838382 - DNA, 481 bp, Homo sapiens
attatctcgacattgacttgaactacttaataacttttaaaaaatagttttattttccagagacagagaactattcttttagtggtaatctcttggtagttcagttgttagaagtcactgtaaaataacaccaacaaacatggtttttaccaatcttgtgccatctggaatttatggataaaaattgtggttggggacatatctttggctttagataaaacaacactgtcaagttgagtacttcccacttctttgtagtttgttgttcataggattttgaattatggctaaaataagtttgtcttctttaaggaaggaaaagtaaattgagttttcaaatgtgaagatttattccatttataaaaatgttcatttggagcaagaattttctctaccatttttttactttcrtctcttttaacattcattgatcctattgaattttgcttcttattagtttaacacattaatttttcattaa

SEQ ID NO: 838383 - DNA, 654 bp, Homo sapiens
tatggggaaaggacacaggtcaattgtcaactccctgttaaaaggacaggcaagagaagttgacatgctgtgaccaaattgtactatagatgagattttaagaagcagttatcttagaaaataaagattgctggagcctagagtagtcctgatcatttagtgtaccagctgatattttctgataaataaataaattgcctataattaattatcacattttccagaatgggcacctgttctcttaagccaaggaagtgtgtgtatgtgagagatccatttgattcatgtagcgtgtcaatctgaaaaggataagataggttacttcatcagcctggtgtcctggaatgattttttttttttttttaattttattttttgagacagagtctcgctctgtcacccaggctggagtgcattggcatgatctcggctcactgcaacatccgcctcctagattcaagtgattctcatgcctaggcctcccaagtagctgggattacaggcgcgtaccaacacgccaggctaatttttgtatttttagtagagrtggagtttcaccatgttagccaggctggtctcgaactcctgacctcaggtgatccacccaccttgccctcccaaagtgctaggattacaggcgtgagccactgcgcc

SEQ ID NO: 838384 - DNA, 590 bp, Homo sapiens
agaaaactgaggtggttttaagaaaatgacatgttccttttgcactaagtttttattctaacttttaattttaattgtttttttttttgagacaggktctcactctgttgcccaggctggagtgtagtggtgagaacatggctcactgtagcctgtatatcctggcctcaagtgatcttctggcctcaccctccagagtagctgggactacaggtgtgcaccaccatgcctggctgattttttttattttttgtatagacagggtctcccatgttgcccaagctcctgggctcaagtagtcctctcgcctcagccttctaaaatgctgggattacaggcgagactaccaggcccagccttattttaagtttttttgtttgtttgtttgtttttgtttttgtgacagagtctcgctctgttgcccagactggagtacagtggcgtgatctcagctcactgcaagctcttgcctcccgagttcacgccattctcctgcctcagccttccaagtagctgggactgcaggcgcccaccaccacgtctggctaattttttgtatttttagtagaaaggggatttcaccatgttag

SEQ ID NO: 838385 - DNA, 578 bp, Homo sapiens
ggctgaaccctgcaaagccacaggggcagagctgcacaaggccttgggaactcatcccttgcaccagtgtgccctggatgtgggacatgcagtcaaaggagattattttggagcattaagatttgatcactgccctgctggggtctgaacttgcatggggcctgtagtccctttcatttgactgagttctctttttttggaatgggaatgtttacgcaatgcctatacctcctttgtacagaaaactatacaagggagtaactacttgcttttttattttacttggaagtaaccagcttgttttttattttacaggcttattggtggaagagatttgacttatgtcagatgagattatgaactgtagacttttgagttaagctggaatgagttaagattttgggagaccattgagaaggcatgattatgttttgcagtgtgagaaggacatgaaatttgggggacccagargcagaatactacagtttggatatttgtcccacacaaatctcatgttgaaatgtaatccccaatgttggaagtggggcttgttgcgaggtgtttgggaaatgggggtg

SEQ ID NO: 838386 - DNA, 641 bp, Homo sapiens
ctaacggtcatctgagctttcagatagtagtaatctttttttgctggtaaagyatcttggctcacattaatagctgctgacccatcagggtgatatttgctgaaggctgggctggctgtggcagtttcttcaaataagacaacaatgaagtttgctgcatggattaattcttcctttcacaaaagatttctctgtagcatgcaatcgtgtttgatagcattttaccaacagtagaacttcatttaatatttgagtcagtcctcttaaactgctccactgctttgtcaaataaatttatgttatattctaagtcctttgttatcatatcagcagtgtttacagcatcttccccgggaacagatttcatgttaagaaaccactttatttgctcatccatcagaagcaactcctcatccattcaagttttttcctgggcttataataattcaattacatcttcagggtccagttctaattctaattctcttgttctttttaccatttctgcagttcctcctccactgaaattttgacccctcgaagtcatccatgagggttggaattaacttcttcctaactcttgttaaggttgatattttgacctcttcccatgaatcatgaatgttgtgaatggcatctgg

SEQ ID NO: 838387 - DNA, 616 bp, Homo sapiens
ggtgatcattgaagggtcaggagatggcagatgctggagaggatgtggagaggtaggaatgcttttacactgttggtgggagtgtaaattagttcaaccattgtggaagacagtgtggtgattcctcaaggatctagaaccaggaataccatttgacccagcaatcccattactgggtatatacccaaaggattataaattattctactataaagacacatttacatgtatgtttattgcagtaatattcacaatagcaaagacttggaaccaacccaaatacccatcaatgatagactggataaagaaaatatgccacatatacaccatggaatactatgcagccatgaaaaaggatgggttcatgtcctttgcagggacatggatatagctggaaatcatcattctcagcaaactaacataggaagagaaaaccaaacactgcatgttctcactcataagtgggagttgaactgttagaatacatggacacagggtggggaacatcactcaccagggcctaccagggggtggagagcaaggggagggatagcattaggagaaatacctaatrtagatgacgagttaatggatgcagaaaaccaccatggcatgt

SEQ ID NO: 838388 - DNA, 642 bp, Homo sapiens
acttcaactataaaattccaaattagtaatgtcattattgagcactaattctagagaacacacaaatttcacgtccccctaatcaggctgcaatytaaaacatcacgataatgcttggtaagggagagaatgatgtgccatttaatctaggaacgatcattaaactttttaatttgtatttctggaacctacaccagcatttgtggaggagtttaggtagagtgaaaggatatatatttgatgaatgagaagtcctagcgtgctccaaatacataagattgtaagaataaagagatgcagcataagaaaacataaaattgagccaactgaaaaagaacaaaaatatgtaagtacaaaaattattaggcgcaggatgctgcagatttttcatgttctccagctctcatatgacttggaagactgccaatgtcctcaaatcatagatggaaaataatgaaggcttcatatttagaaaacatgaaaaaaaaaaaaaaccccaaaggttgaaaagtacaagtgggatataacttagggaaaaaaggattgtgtaatagttaccatctctaaaaaatggaatgtttcagtcaattaataagtaaaaactgacatgcaaagcacaagatagactaaataagtaatgtt

SEQ ID NO: 838389 - DNA, 584 bp, Homo sapiens
gctaatggccttatgcttatttaaacacatgaagagtaggtttgctaggcaaactgcatttcagatggccatttcctggagtcagcactctttcagacaagtcaaagtgatactcctgatttttcccaacggaaagaggaaagaacagagacctctggctgcctaaagagacactgggcatttagaaacttctgctcttagtttcctaatggttattttttaagttgatagtgttcatgtataaagaaagaaattttaagtctacatgagaatgaggcccttacatttgtttatagaaaaattgtggctgcttgcaacccataccatttacttaataggaaggttaagagaaatggattgagtatcatgaggctaaagtgagccaatgttagctacttctgataggcaaaatcatggtgggattttgcacagatgtatgctgctgagattcgagagccctaacatctttcaytttttaggaagaacattttagagtagattggtagttctttctagagttggcttcattagatcttaatcctggtttataaacacacacacacacaccccagagcttttgtagc

SEQ ID NO: 838390 - DNA, 372 bp, Homo sapiens
ctcactttgcacactattaagaaccttttaaaaactggttataaaagtaatatgtttattgaaaaaaaktggaaaaatacacaaataacgcaagggagaaaataacccatagaacaacacaatggatagtgttatgtaggacatagatcatctaggatcaaacactagctacccaatgtattacctgagtgatctttgacaacttaatctctctttgctctcgttttctcactgtcaaaatagagatcaaaatagttcattctgtgaattattttgatgagtgaataaaataattatgtaaaggttttattgcattccttggcacttagtaaacttcaatgtagtttttctttcttccaaattttatataca

SEQ ID NO: 838391 - DNA, 549 bp, Homo sapiens
agcaatccgtctctggattgggaggaagaacatgttcctaaacacatttgctcactgctagggaggcggcgctcttctgagggaagccactccctcttcccacagsctgctcctggctttattgctcctctcagtcactgtcactgccgtcacctcctcatcaaaatctacccccttctccctctcttgttctctcccctcagccctgcctatcttattaacactttccaaacacgtctctaatccactcctctccctctccccagctccaggacaccctcacagctgcgtctgtggactgcttcagtatcctccctgctgaccctgtggcccacagctcaccagcttctgtccttccttctaatccgtacaccaagatgtcccaaaatgttctttgtgaagagtaaatctaacagtgccttccgacggctgaagaccatttgtgactctccacggcctgttctcagcccaggcttctgttcccctagcaacaccaaactatcaccttctgagcactcaacaaaaaccctgctaagtgctttcatgaaa

SEQ ID NO: 838392 - DNA, 636 bp, Homo sapiens
atagatctgacatttcagggcctttgtgtggaggtcagggctccctctgtcactaacttgcagactggcaggttggccacacacacctcccactcacatcctaccctccaagggctccagcagaagagactgtgctcctgcaagctctgtgagaaaagtcatctgatcggcctggcttggatcctgggagatcatctctgagccagtgcctagctgaaggaaggaagtgtgttcctgagtcacatgcttacacttgcatatctgaagcacctggaatagattccccacatgagtgttaccggaaaggggtcccaatccagaccccaggagagggttcctggacctcgtgcaagaaagaattcaagatgaatccatagagtaaattgaaagcaagtttattaagaaagtaaaggaagaaagaatggctacttcacaggcagaacagcggcatgggccactcagctgcttctatttcttgttacttcttgattacatgctaaataaggagtgggttattaatgagttttctgggaaagaggtgggcaattcccggaactgagggtccctccatttttagaccatatarggtaacttcctgatcttgccatagcatctgtaaactgtcttggagctggt

SEQ ID NO: 838393 - DNA, 538 bp, Homo sapiens
tcctgcaagctctgtgagaaaagtcatctgatcggcctggcttggatcctgggagatcatctctgagccagtgcctagctgaaggaaggaagtgtgttcctgagtcacatgcttacacttgcatatctgaagcacctggaatagattccccacatgagtgttaccggaaaggggtcccaatccagaccccaggagagggttcctggacctcgtgcaagaaagaattcaagatgaatccatagagtaaattgaaagcaagtttattaagaaagtaaaggaagaaagaatggctacttcacaggcagaacagcggcatgggccactcagctgcttctatttcttgttacttcttgattacatgctaaataaggagtgggttattaatgagttttctgggaaagaggtgggcaattcccggaactgagggtccctccatttttagaccatatagggtaacttcctgatcttgccatagcatctgtaaactgtcwtggagctggtgggagtgtctttagcatgctaatgcattataattagt

SEQ ID NO: 838394 - DNA, 564 bp, Homo sapiens
ggatgttataatattgtctttacagtaaaaaaaaaattcagagtaaaatagatgatgagtcactgcctgacaattgtcrctgtataagaaagtcccctttgcagggacaatgacaggtggttaaatgtaagcacagatgccaggtccatctcacttatcccactttatttattaatgtcgaccttccagaaattaaaattaatctagtcagcaaattaaactctgattttatttgattgccaacaagtaatcagtaaatattgaaagatgccaagacatgagctttgagagtgcagtatagatgggagggttggggaggactgcagacgggagggatctgagctcacaaagatcacagtttcctaatgttcacgcgtggggcatttgtgatcttggcttctcaatgtcggcagatgttagaagaatttgaagatttcttgtataagttcagaaagcacctgaggtcctgctgaccctactgcgcccctccacaaagcccccaagctctgcgtgaccaccgtccacatggctggagccacacaacatccctcagggatgcagctc

SEQ ID NO: 838395 - DNA, 251 bp, Homo sapiens
agaacttttcatcaagctatactgaacctctgtacctcttcaacattaactcccaattcccccttcctcctagcyctggcaacaccattctaatttctgcctctgtacatctgactgctctaggtcatcatggaagtggaatcatgcagtgtttgtcttttgtgactggtgtattgcactcagcagaatgtccccaagctgtacccatgtgtagcatgtggcagcatgccttcctctttaaggctgaataa

SEQ ID NO: 838396 - DNA, 251 bp, Homo sapiens
agaacttttcatcaagctatactgaacctctgtacctcttcaacattaactcccaattcccccttcctcctagccctggcaacaccattctaatttctgcctctgtacatctgactgctctaggtcatcatggaagtggaatcatgcagtgtttgtcttttgtgactggtgtattscactcagcagaatgtccccaagctgtacccatgtgtagcatgtggcagcatgccttcctctttaaggctgaataa

SEQ ID NO: 838397 - DNA, 609 bp, Homo sapiens
ggccaggtctgagcgactgtcctccctttgtacagcactgagatgtccagggttcttgggtgtgacttacagaacctagtgatgggcacagagatctgtggacaggagccactccctcaagcacagaggagccgccaaaaggcagtgcctgggagtcagtcctccaagtcggccaagagcaggtgacacactgtatccttcctcctgatacgcacatcctcccagcccatgttcactggttcataattattgaaaagctattttaattgtaaggccaccgcctgtcttgctaaactgtgatgtttcagccagccaccccacccatcatggagatgaacaaattggagaaaggatggtctgttgctctgttgggtcaccatgggtgcaagactttgtacataaattgatttgctttgctcccttccatttttgcttgcaaagtcgggcctgtagtctgaataccctcttgtggcaatgggttgatcgttcatttggtccccaggcctggactcttaaaaagataggarttaggtagagggcatcaagcagccattggcttcctcattctgggcctccttttgctgagggtgatgtcatcagcgagcttct

SEQ ID NO: 838398 - DNA, 546 bp, Homo sapiens
ctgggttagggtggtgggcggaatgtctgggttttttctgatagagaccttcttccatcctggctagctggcgccttgcgtttcaaaaccatgagttcygtgagaagaactctgctactcccctaggaagcagaagaggctgctcttgttttgattgtaagtttccagcagcccctccattcctgatcggggactctgtgaagactaaatgagcaccagtgcatggttagtgctcaatacacttgatttttcccaatttccccttcttcctccttgccctgcctgaggtttggctattttgttctgtggctgcctcatttctaaggtcaccagatcccataggtggtgagtggatgtgagaagatacttcctccccattaaccctgtcctggttttgttttctgtcctctctgtgactcgctaatggtgctaaatcgctacttttccaacaacaagaatgccaaagcctctccctgtgcaaagtactctgggatttgaggttgagatggcaggtcacacggggaaccacagatttctctcctggcc

SEQ ID NO: 838399 - DNA, 607 bp, Homo sapiens
acccatgtaccgccgttttgttttgtttagagtcttagcttactacaggcttgacctcccaggctcaagcgatcctctcacctcagcatcccaagtagctgggaccacacgcatgcaccaccacatccagctaatttttgtatttttgtagagacagggttttgccctgttgcccaggctggtctcagacttctgggctcaggcgatcctcctgcctcaacctcccaaagtgatgggattataggcatgagccaccacgtccggccataccactattttagagggtctggggtggcccatgagcccctcaagaataggggcttatttttaaaaaattcaatttataactgtgaggcctagctggtacctagagccagcaggtggtcaataaaagtttgcaaaatgaatgctggggtgaaactaaccatctcttaacacaacactacctgatatagggggccatcagccacatgtgagcatatacacttgtttaaattaattaaaattaaattaatttaaaaatcgagctccttggtaacactaggctcaytgtaagcgctcaacagccgtgactggctagcggttcctgcgtcggagagtgcagact

SEQ ID NO: 838400 - DNA, 652 bp, Homo sapiens
ctcttacttagacatgttcataaaaaactcatctgtaatgaaattattactggctggatgacaattgacagaatgacaccactccatttgtttggacaggaccagtaataaaaccagtaaaccaagatgatgaaaattgtgtctatgtcagtggcttctcataggcataaaactgaactaaaaatggttgtaacactcaggttaatactctagagtgtttaaaaacagaagccctcacattttcagctttctggacatgtcagtaacctactgacattaatgctgccttataattttaagaaataagtatctttagacagaatctgaccctatgcctgaccaatctaaacatttgcctttttaaacagtacattatactggtccccagaggacatgatttcaaagatgtatgacttttgaggactagatttgtgactctggaaaagacttgaccctggttttctgttaaaccatgattttatacattcattttggttctaaaattgtagatgttgttaggcaagcatacattgtagttgttttagtgagaatcattcttaaaggcatagagtttagtttttaatataggttatagggatgagttttagactctgactawattgtagtttagattatactatatgttaggtta

SEQ ID NO: 838401 - DNA, 603 bp, Homo sapiens
aattgtatggcacagtgtattcttaagaatatgtcacaaatttttgaaatcctcatgtgatgcagcatttttcttggcctctttgccagctggggacctctggccagcaacaatgcccctgccttggtctcacttgggcacacaacctgccactggaggtgccctgcccactcatccaccggggctgagtctgacttgtacactagcttatcccacagctgggccaggagtgcctcaccctacttatgttatttcttgtacctgtgttggtggatctcgagctcttgtcccatgtccaagaagaatgaggatatgctgacaattcaaggatgaggagggtggaaaagaattttactgagcaacagaacagctctcagtggagagaggtggtctcctgcccccacagttggatagtttctctccgtgtggctgagttcgaggcttttatgggctcagaatagggcagtgtgtgctgattggtttgkgagtatgaaaagaaagactaaagcaaagacaccactcaaaggtggggacagcagtatagaaaaccaattaggaaaggaaagggtaggtatatgaaaaataggtgaggggtgggaatca

SEQ ID NO: 838402 - DNA, 638 bp, Homo sapiens
actcatttaattctcacacctctcatgtcagaaattgatgaacttaatttaaggaagatagtagtaagaaggtraattaacttctcaattaccagaggtttcactggtccatagcagtcttaataatagttactgttaggacctcatggctttagatactgattaaagctttcaaaaggaataaattactactcaaatatatttaaagagcaaaatcctctagagaaaaaaagaaatgaagctccttaatagtcagaaatttctatctaattttaaaattaattctattctgcaatgtaagattttttctcttttctaatttttatgaataaacaacaattatacatatgtatgggatccatgtgatattttgatacatgcatccaatgtttaatgatcaaatgtttataataacccaaaaatagaaaattctgaggacaatatactagaaaaaaaatgaacctaaatcagtgcctctgcaggaataattcattaaccacttacacttattattagctcttatggcaagttgtaaactagaacactgaaaaataaaagattgacatggaaaggactggtaaagtaaaaagaaccatttttctggtaacttgcctcctcacaccgagaaaccaaaattg

SEQ ID NO: 838403 - DNA, 575 bp, Homo sapiens
agcaacacatatataccctctaaacaaatttatttttggtttaacttttaaataagtatttgacaatgtggtaaatatgcaagttagaaaaggcatattaagacacaccaggrgttaacttgactgttggtgacagacttctaggaaagaagacaatgggacagtttttcaagtccttcaaatttgaatactctcacattataacagctagtacaccctttctagaataagactcttacctgttgtggtcattatagtccaaattctgattaaattctgatttttaaattgctcttgctctgaccagcagctgcatttttctgaaagtctcagtgctgctggataacttagcactgtcatttttatatcaaaattttctcttgctagctgaagagaaacaattctttaaaatagaaatgagtctgcttttaacaagccctaaaaccatccctgttcttactgggtttgtggtattgctgtaagagaatgtttattattcttctgcacaaataaattttatttatgtccaaattttccactatatcatctccttaatttctgtgccactttattta

SEQ ID NO: 838404 - DNA, 638 bp, Homo sapiens
cacgtccatgacccaaacacctcccatgaagccccatgtccaacactgggkatcacatctcagcatgagatttggaggggacaaatattcaaaccatatcagataatttaatccatttacatttaaagaaattactggaaaagaagaacttcatgcagaacagaaacaagtactacattttctcacttatatatgggagataaaaagataaattgagctcatagaagtagaaagtataattgtggttattagagactggaaatggtggagggaggggatgatagggagaggttagttaatggctacaaatttgtagctagttggcaggaataaattttagtgttctgtagcaccatagggtaaacatagctgacaataatttagtgtatatgtttaagaagttagaagagaggatttttaatatttgtaacacaaaatgataaatgttccaggtaataagttaattgtcattacatgttgtacacatgtatacacatattactctggaccacataattatgtacaattcttgcatgtcaactaaaaattaaaaaattaaagtgacttacttacaatgtcaaaaaaaagatgtctgtcattttgctatttgttttctatgtgtcttacagcttttcttt

SEQ ID NO: 838405 - DNA, 580 bp, Homo sapiens
ttaaccaggaaagctgctatattggcctcccctgggaagtgaatctatacgttgaatgttccctgaatgaagttaattagtgttttaactgtggtttcagtcatcttccagtctctcttaatttgaaactgattcttatagccacctatccttctgcttcccatcagaagttggattcaggtctgttaccttcttaagtgacccttttaacaattattagaggcttacattttccagacccttccagattaacaatatcaacatcaagaatcaaagtacaaattgtagacctagactgactaatttcctgtcttaatatagcttaatagttgggaatttaaaagttaggaactcagaaaatattagtgatgtaccccatttctgatggaaatgtggaggtttgtcattggcactgttttggctggattacgctacttcatgcttagagatatgttaaagtgtgtacggctgtttgacggctcasacatcttttatcttttttttctttttccaaaaaaatttccaaagttagtaaaggctaaataatgactatttcctatatccataaggaactcgtgaa

SEQ ID NO: 838406 - DNA, 472 bp, Homo sapiens
attcatatatctctatttctttggggtcagccactggagctttattattattattttggtggtatatttccttgattttttatgttctttgaagccttgccttgttgccttctcatttgaagaaggagtaaacttctcaagtcttcgattactggcattgcgagagaacaatcttcaccattcagcctggctagagatctggaggtgtctcagatcatttcagttgatgtatccccttactgttcttattccctcttgggggatagtgtcaggattgtatgccttcccttgatcccataaaaccaggccaggtagtgagaactttccatttacttctcctagtgtaatgccaaaggtycttgccttagccatgccaaagaattggtgtggcagctgcccgcagcgagtgatagagacatggaccgaaagagagaaaaagacataggctttattgggcagagtgaaaatacaa

SEQ ID NO: 838407 - DNA, 528 bp, Homo sapiens
gtcgtgggtgggcacaagggcaggccggggcaggtgctctcaagggtgaggctgccgtctcacgactgamggctttatataggattcacgaatactcaggaattttccctagggaagttcattctcaacctcaccattctgttctggcagggcatgttaggatcttatgtctttgtaaagctttagaatctctcatggaaataatagcagttttatagttgagaataaacagtcgggcgccgcggctcacgcatgtaatggcagcactttgggaggcagaggcaggcagatcacttgaggtcaggagtttgagaccaacctgacaacagaaagctctatcaggcaactgcccataatccaatttgggtatagcctcggggccttaaagagaatgcagtgtctttgtcagttaagcctttacaattaagaagtggttaattggtttttaaccaattagcctgtacaattaagaagtggttaattggctttaagtatttttttccgccaaaaaaaaaaaaaaagtgtgat

SEQ ID NO: 838408 - DNA, 544 bp, Homo sapiens
tgggacttcatctatatgataaaaacataacaagaacttgttattggcttccaatacccttatttttatttttatttygagatgaagtctcgctctgtcacccaggttggagtgcagtggtgcaattttggctcactgcaacctcagcctcgtgggttcaagtgattctcgtgcctcagtctcccaagtagctaggattaggggcacacaccaccaaacccagctgatttttgtatttttagtagagacgaggtttcaccatgttggccaggctagtctcgaactcctgaccttaagtgatccccacctgcgaccctgccccagccccacaaagtgctgggattacaggcgtgagctactgcactctgcccaaccccccttatcttaagcatttctttctgtctacttcaactctttaggaaaacctcaactctttcaaccaattgtcaatcagaaaatctttaaattcacctatgacctgtaagccctccctgccacccccgataaagatgtcccacccttctggactgaaccaatgtgtacc

SEQ ID NO: 838409 - DNA, 544 bp, Homo sapiens
tgggacttcatctatatgataaaaacataacaagaacttgttattggcttccaatacccttatttttatttttatttcgagatgaagtctcgctctgtcacccaggttggagtgcagtggtgcaattttggctcactgcaacctcagcctcgtgggttcaagtgattctcgtgcctcagtctcccaagtagctaggattaggggcacacaccaccaaacccagctgatttttgtatttttagtagagacgaggtttcaccatgttggccaggctagtctcgaactcctgaccttaagtgatccccacctgcgaccctgccccagccccacaaagtgctgggattacaggcgtgagctactgcactctgcccaaccccccttatcttaagcatttctttctgtctacttcaactctttaggaaaacctcaactctttcaaccaattgtcaatcagaaaatctttaaattcacctatgacctgtaagccctccctgccacccccsataaagatgtcccacccttctggactgaaccaatgtgtacc

SEQ ID NO: 838410 - DNA, 633 bp, Homo sapiens
aaatttaatcctatgattctctcccctttggagtacgtaatgtatgaaatcatccatggaattccagcaaattcagaatctgtttggagaagatggttaaataaaaagaaccattgtgtacggtatctatagagtacaaaaagcctttgactgaatggaaataagaacagagttggaagctctgagtaagaaaggaattaaagaaatatatatgggtgccaggaaatacatcaatttttttttatgatcctcactgaaagaaaaaagtctgttcatttttgttgctgttgttgcatctaaacaggactaccttttctcagctacctaaacgaaatatctaaaagcctggagagcagcataatgtcactaacgtcattttataaggtagcattatgcatggagttatgatgatgggaagatgttttatgttatgccattataaattaaaaatgcacaaagcaatgacacatgtgttatactttccatctgtggcacctgcttcgcaagtttcagttgcacctattatgttattctttacattcaaatgaaatctgaggagaaataaaaataagacagtcttgctcctaactmgcttcctgtactggatagagtagaagaccgttccacctcctt

SEQ ID NO: 838411 - DNA, 566 bp, Homo sapiens
agtcccaagtttgctcatctttgaaatgagaggattgagcagtttcctttctagcgtttcacctctaaaaccaatagaccatttccctcttaaaaatgaggataaaagtcaactattactctctattgctgctccacttctactggcctcttggatgtctctggttaaactcccagatgtctgcaataaattctgtgcacactgaatcaaaaaaaaaaaaaaaaagcctttttcccttttttttttttttttttttttttttaaaggagtgctctaggtgttgactggactgaaattgcccaaaattaaaaacaaaaccaacccccttcccacacaccacccaaacaaaaaccttctatatgtatctggaagccactttactacttcctgatttttagactcaacagttacatttttaaagagacactgcactgtggaatataaacgtgtgaaatctaaatacaaaatataatgaagccccttgaaccaagtcatgcaatgaraaaattttagggcagccaggcacttttgacttttgaactctatttctagctgtactgctgtta

SEQ ID NO: 838412 - DNA, 388 bp, Homo sapiens
tgaacaagggaggggaaggggttcttatcctaacgcagctaatctctactgctgtgtctttcacctattggctagggttggaccacacagtctaagctaattctgattggctattttaaacagagcaggggtatgagctggagtggcagggtgagtagtttggtgggaaggagttacagaacaggtaactaaaggtgactcaggtcagagcaggtgattaggagtgactcagaatggagcaggtgacctggggtgactcaggatggagctaggtgatagaggctaggagggggttgtttactgaaactaggggcaaggagacataaagaatgaggaagttaaactttaaaatgaagaacaaagamcaggggagctgaacatactgata

SEQ ID NO: 838413 - DNA, 608 bp, Homo sapiens
gtctcatcctgttcttcagcatctcccatcaagatctccagtggcctcacaaattacaaccagtctctaaaagctgaatgtcaacctgcccttcaaaggccctgtgtcccagtgccaaaaggcagtagtttaaagaaacagggaacagtcttgctggggcctacttcttgttggaaggagtgtacaaaatctgaccttgccagtgggtggcctctatccagccctcaaggcatcctccaggcagttctcttgtggagcactagtcagtggctctggaggcaggattcccagtggtgcagccacaaagcttcacctgggcctggcccctgaggacaatattaaaggatctgtgttgggagtgcaattagttctgtatggaaaagaaggctgattcttcactctctggcaaggtcaaggccaggagaacagacggaaggagagggcaactcttggtctctggagagacagacatccttgcagagatctytcatccatgggatcaccattggggacctagacaaacctcatttttacatcacaagaggttattgggtccctggtatgtattgagaactgaactcatacaaaaatgagtacagcacaggttc

SEQ ID NO: 838414 - DNA, 557 bp, Homo sapiens
  misc_feature 134: n = A,T,C or G
agtctgttgttttctgatgttcttaaccaccaaattatttctcaactgtttctggaatttaacttatctttatcagcacattgtcagctctgtgaatttgagcacacactgtgtctaaagtcatcactggcctnctaatgatcttcctagaggtgtggatcactcgccttttggttaaatggacactactgtgggaaattagttgattcatataaatgtacatacttgtcggcaatataacaataattacttaatttcaaaatctattgtctaccataaaaagtaaacttgaggctgttcttgtgaatatcagtgattccacgtaaatacaacccacagctgctttatcaagttagatacttaaaaaattacagtctgaaaacatggaggcaatatatattgcctaattcaacacttatttgagtctataacrtgagttaatagatgtttacacttttcatgaagaaaaaattcagtcattattcccaattcattcctgattcaaggacaggcattgaaatccctttgtgtatgttctcagtgggaaaagtagttct

SEQ ID NO: 838415 - DNA, 546 bp, Homo sapiens
agtctattgccaactggaatgctttagattttcaacagcagattgagggcatgtcctagggacccgaggaagaagagtttgcaaagaatacatttttatttgctagaaaacaaccaccttgttcactgaatcataacaaagtcagggatctgaatttttctaccctactgaaaaaaaactgcctttgccactcccttcaaaatactgtggaatcatagcagtggccttaagggatgttcattgttgttctggttttgatgaactggaaagtttgatgtggagcctattttcagaaatcttatgtgtaaacttgacattgctaagggtgcagggttgttaaaattttgagaatagcagctacctaccgggagtcaccaaagaagccttggggaggtccagcaacctacaaagaccctccctgtcacctgttggcatggactgaatctcagcctttagaggttatttatttggatctttcaactttgttttttaagaaactcatactctaatgcaamcaccactaagaaagcacacttttggaactgc

SEQ ID NO: 838416 - DNA, 581 bp, Homo sapiens
gaccatcctgggcaagtaatcctcccacctctacaaaaaaataaaaaatagccgrgtgcaatggtacacacctggagtcccagctacttgggaggctgaagtgagaggttcacttgagcccaggaggttgaggctgcactgagttgtgatagcagcgctgcactcagcctgggcaacagagtgagaccctgtctcaaaaaaaattactattttctatttcatttttcttgctttttattatttattccttctagtttctttaggtttgctatgttgctttttccatctgtgaatcaaatgctgagcttgtttatttttaaaccttttatttctttactaagtactgttttaattaaatcacacagtttgacatgttgcattttttattgtaattcgtttctagatatttcttagtttctttatgatttcctttttattccaagggttctttaacatatactataagaaggtcgggtgcggtggctcacgcctttaatcccaatattttgggaggccgagccaggcggatcacgaggtcagatcgagaccatcctggctaacatggtgaaaacctgtctcta

SEQ ID NO: 838417 - DNA, 589 bp, Homo sapiens
aaaccaatacttcttggtaatatgtgttgtgttgaggagtgggagaggaggattattgagaagcatgaggaagctttctgggatagtgagtacatttgccatgatgacagtgataatagtgtctcagatgtatacatatggcaacacttttaaaatgtgctctttatatatgtgcagtttattgtatttcagttatacctcaataaagttgttaacttgtggaatatcaccacacctttctgaccttggcctgtttcttaatgtatctatcaagattttgataaagacgtattattacctttgcttaggaaaacataatataaaaatagaggtaaagcttacatacaagatttatcagaattgaaaaaatgacatgaagtggtattgtcgatcctaattagaatgttattctaatctcagtgaagaacatggacacctttgatgtgtagacactaaatcttctacatttttcttctacyttcaatcttgacagatgattttctcttttccttccttgaaaaactagaaaatcatcaaaatgaacttctcttctgcctacctgtaattggccaatcagacaatcaatcaa

SEQ ID NO: 838418 - DNA, 589 bp, Homo sapiens
aaaccaatacttcttggtaatatgtgttgtgttgaggagtgggagaggaggattattgagaagcatgaggaagctttctgggatagtgagtacatttgccatgatgacagtgataatagtgtctcagatgtatacatatggcaacacttttaaaatgtgctctttatatatgtgcagtttattgtatttcagttatacctcaataaagttgttaacttgtggaatatcaccacacctttctgaccttggcctgtttcttaatgtatctatcaagattttgataaagacgtattattacctttgcttaggaaaacataatataaaaatagaggtaaagcttacatacaagatttatcagaattgaaaaaatgacatgaagtggtattgtcgatcctaattagaatgttattctaatctcagtgaagaacatggacacctttgatgtgtagacactaaatcttctacatttttcttctactttcaatcttgacagatgattttcycttttccttccttgaaaaactagaaaatcatcaaaatgaacttctcttctgcctacctgtaattggccaatcagacaatcaatcaa

SEQ ID NO: 838419 - DNA, 594 bp, Homo sapiens
gcctaaactaatattcttaaaagctaaaatgytatgtgacaaaaagcagacccttttttacatatgaccaagtgtcaacaaatttgcaatactgcaagtcattctgtctttaatagatcttgttctcttattagtacagtcgtcccttggtatgtgtggggaatgggttccaacatatcctgcagataccaaaatctatcttgctccagtcccttgatataaaatggtgtagcatttgcatataacttgtgcatatcctcccatatactttaaaccatcagtagattgcttataatacctattacaattgaaatgctacgtaaatagttgttatactatattgcatagggaataatgacacatagaaagtctgtacatgttcagtacaggcacagtttttttcctggatatttttgatttgctgttggttgaattcacagatgcagaacccacagacagagggctgacaatgtattcttatttactatcctttaaaaactcttcaaatatttcttaaaatagtttgtaacttttgataattctcttttattacttctgattttaatctattttaattaaaattaaattatgata

SEQ ID NO: 838420 - DNA, 553 bp, Homo sapiens
aaaaagctttgttaacccctcaaatttccccattttcctttgtaataattcttcccacataccccaacttctgacaaaaactgatccatttccgtgtctatagtttggtattttccagaatgctattttcatagaatcacagttaatagtttttgggaattggcttcattcacatatcataatatatttcaaatttgtccactttgttgtgtctgctagcagtttgtttctttctattgtgaggtagtatgccatagttgatatgccatagtttatttagccattcacttgttaatggacagttcagttattttcagcttatgtttactataaataaatatttgctataaatatttacctatttttttttcattaagcaacatattcatttttcctagataaatccctgggaatggaaatgctyttaagtgagtatttaacttcgtaagacattaccaacctgttttccagagttaatgtacattttgcattctcaatagaaaatgtttaagagtgccagttgctccgcctcctcacaaatacactgatattg

SEQ ID NO: 838421 - DNA, 539 bp, Homo sapiens
actatcatttgcatatgtaacaatctgaaataaaattataggatataygtgcaccacacctgcatttggaagcatggtatatatgtgtaaggaattgtatatctttggaagcctgtcacttagcttaatttagtttttccaatttttaaatatttttcattaattagttgtgatttctctatacattatacctcttttgtaactgtgggaatgtctaagtatatttctgaaatttatattttaacaatttggctcataattacacttgtctttgccaagtactgtggtagatgctagagataaaattaaggagaaatgattcctcaaaatgcttatacacctcctagtttatttatattgtgttagagaacaaatgcttatattttgaaatgttaaaaaggcacagcataaggaaagagataatcaaaattgataatctgaatggtttgggattttgtgttttctatctggtaaagttgacctcatttacatgcgaattcctatattttgcacatgaaactgaaggtagagagtcagaa

SEQ ID NO: 838422 - DNA, 539 bp, Homo sapiens
actatcatttgcatatgtaacaatctgaaataaaattataggatatatgtgcaccacacctgcatttggaagcatggtatatatgtgtaakgaattgtatatctttggaagcctgtcacttagcttaatttagtttttccaatttttaaatatttttcattaattagttgtgatttctctatacattatacctcttttgtaactgtgggaatgtctaagtatatttctgaaatttatattttaacaatttggctcataattacacttgtctttgccaagtactgtggtagatgctagagataaaattaaggagaaatgattcctcaaaatgcttatacacctcctagtttatttatattgtgttagagaacaaatgcttatattttgaaatgttaaaaaggcacagcataaggaaagagataatcaaaattgataatctgaatggtttgggattttgtgttttctatctggtaaagttgacctcatttacatgcgaattcctatattttgcacatgaaactgaaggtagagagtcagaa

SEQ ID NO: 838423 - DNA, 539 bp, Homo sapiens
actatcatttgcatatgtaacaatctgaaataaaattataggatatatgtgcaccacacctgcatttggaagcatggtatatatgtgtaaggaattgtatatctttggaagcctgtcacttagcttaatttagtttttccaatttttaaatatttttcattaattagttgtgatttctctatacattatacctcttttgtaactgtgggaatgtctaagtatatttctgaaatttatattttaacaatttggctcataattacacttgtctttgccaagtactgtggtagatgctagagataaaattaaggagaaatgattcctcaaaatgcttatacacctcctagtttatttatattgtgttagagaacaaatgcttatattttgaaatgttaaaaaggcacagcataaggaaagagataatcaaaattgataatctgaatggtttgggattttgtgttttctatctggtaaagttgacctcatttacrtgcgaattcctatattttgcacatgaaactgaaggtagagagtcagaa

SEQ ID NO: 838424 - DNA, 599 bp, Homo sapiens
agttgatggatgcagcaaaccaccatggcacgtgtatacctatgtaacaaacctgcactttctgcacatgtttcccagaacttaargtatgatataataaaaaaagtaagtgaatataaagccttgctttgtgtcatatttgctaatattcatttggctgaagcagcttataagaccaagccaaaccaaaatcaacaatgtaggtaaatattttttacctataatgggaggtactgtagtcacatggcaaagtatacttatgtataattccttagaagggaggaacaatgagtatacaaagtatacttgtgtatatttccttagaaaggaggaacaatgacaaaaaattgtgaaaaattcttccaagtaagtattattacatgagtcaatattccaaaatacataaagaaaactaatgttaaaatggatagaaaatgaaatcaacagttgctagataagttcactccaaataaaataaaaatgattaaataatctgaaaaaaattgattgtataataaatatatttataactcttaaaaagataagtaaaagccatatgcagagaataaaagtttcaagaacaagtagaattaacacct

SEQ ID NO: 838425 - DNA, 564 bp, Homo sapiens
gaaataaaagtgagtcacttggaagtgaaggactggcccgactgggaggagttaattacacatkacacaagggaaacgcaaacccaaacttcatattggtctgagtgagaggagttagttaattatagttgaaacaggggaaactcaaacccaaactttatactgagagctttgagcgcccttgtcattaataactaggctaacaaatatatgaacatatctacaggctcctagctttttgtctttgagcccagagttgaaaataaatccttggcagtgatccatttgcttccatctctgtgtaccaacttcatttgtcagagttcccaagccaaagtgatctccaaatcaaaaggcaataccccaggtcaaaaagctgcaatcacaaaaagctacttttagctccagaattttctcctctttccccgtttccccagatccctccagtttttctttttgtctctgtccatttctctttttttttttcccatttctccactctctgtttcctaacacatggttttaaattgagattaaagagaacaaaaaggaaggctgcaatgt

SEQ ID NO: 838426 - DNA, 634 bp, Homo sapiens
ggaaggacatagttaatcatatttataaaaatatgcaaggacaacaaaactagacttycataataaattgaaaaaagaaaaaggagatttttaaactcaagatgacgcctctaaaattacaaaagctccaaacatttacccaaaaaaagttttcaaggatacaggtaaggaacacatctgtttactaagtcaaaatgactcattcaactattgtatagcatgaattgtgtcctgttgtaacttttttctaacacttaataccaaagctccagctacaatttcttttcaccagagaatgttttatggactttattatattgactaaactaattcatttttagaatgatgtagcattgattcctcaaatgtatttttacagtttttgttgtttatgttttaatacaggaatgaagaaccaaaaagactgtacgaagaaaagtattatatcttcctcaactagaaataaattattgctaatgtcattccccttacaagaagaaatttatcataaaaagaatagaacagacgtatagtatgatataccactacattttatgcaaatactagccgattccctaagtaggattataatgtagagagtactgggaaatacaagtttattccacaatcttga

SEQ ID NO: 838427 - DNA, 680 bp, Homo sapiens
catattttaaatgatcaatatcaaatatcttaagtatgagttttaaattatcttgctcccatcccatcataaaatggtgaatatatacttatacagcaacacagaagttgacttaagaggtaasgggtaaaaggcacaaaattgtcctcagaacatctttcaatatgttattttctattagtcatgtatagttgatacattaaggcggtggtgtgtacatctatcactggttttccagggctctggggtgcatatgagaatgacttactatttaaaactagaatatcctagaagcactttaaaaataactctcatcatggagagtaacagccaatatcaacattgagaggtttcggcttacattgaggggtttagactatagccttcacaatggactgtagagtataaaactgttggatttcaaataaataaagatctaatactggttccgctggaaaagtaaaaaatataattacctggctccctgtcccaaccaagaatcatgatggctcactttaaaacataggttagcttaccttcctaggtatgaatgtttaattctaccaccttcttgacttgttgctcttaaaataataataacaatattaataataataaattattatagaactattttgtgtgatttttcaatgcaactttccttttctgaacattattta

SEQ ID NO: 838428 - DNA, 509 bp, Homo sapiens
gctgagtaaataaggctgagacytactggactgtattcccagaaggttacacattctaagtcaccagataagataggaggtcagcacaaggtaaggtcacaaaaaccttgctgataaaagaatgctgtaaagaagctggccaaaacccaccaaaaccaagatggccatgaaagtgacctctggtcatcctcactgctcattacacactaattataaggcattaattagcatgctaaaagacactcctgccagcaccacggcagcttacaaatgccatggcaacatcagcaagttaccccatatggtctaaaaaggagaggaaccctcagttccaggaattgcccaccccttcccgggaaaactcacaaataacaccccttatttagcatataatcaagaaataaccataaaaaatagccaaacagcagccctcagaactgccctgcctatggagtagccattctttattcctttactttcttaataaacttgctatcactttactctat

SEQ ID NO: 838429 - DNA, 509 bp, Homo sapiens
gctgagtaaataaggctgagacctactggactgtattcccagaaggttacacattctaagtcaccagataagataggaggtcagcacaaggtaaggtcacaaaaaccttgctgataaaagratgctgtaaagaagctggccaaaacccaccaaaaccaagatggccatgaaagtgacctctggtcatcctcactgctcattacacactaattataaggcattaattagcatgctaaaagacactcctgccagcaccacggcagcttacaaatgccatggcaacatcagcaagttaccccatatggtctaaaaaggagaggaaccctcagttccaggaattgcccaccccttcccgggaaaactcacaaataacaccccttatttagcatataatcaagaaataaccataaaaaatagccaaacagcagccctcagaactgccctgcctatggagtagccattctttattcctttactttcttaataaacttgctatcactttactctat

SEQ ID NO: 838430 - DNA, 509 bp, Homo sapiens
gctgagtaaataaggctgagacctactggactgtattcccagaaggttacacattctaagtcaccagataagataggaggtcagcacaaggtaaggtcacaaaaaccttgctgataaaagaatgctgtaaagamgctggccaaaacccaccaaaaccaagatggccatgaaagtgacctctggtcatcctcactgctcattacacactaattataaggcattaattagcatgctaaaagacactcctgccagcaccacggcagcttacaaatgccatggcaacatcagcaagttaccccatatggtctaaaaaggagaggaaccctcagttccaggaattgcccaccccttcccgggaaaactcacaaataacaccccttatttagcatataatcaagaaataaccataaaaaatagccaaacagcagccctcagaactgccctgcctatggagtagccattctttattcctttactttcttaataaacttgctatcactttactctat

SEQ ID NO: 838431 - DNA, 525 bp, Homo sapiens
aaaatacccaaggaagagagcatgaggctatgtggttgcatgagaaaagcagcttcaccaaatctaccaattagctccccagggaattatttaatcycatctttcatttaattgaagaccagaacattattatctctggcatgtgaagaaggtatcctaaagaaaatttacaatagtattaatttatcgttgattcaaagataacttgagcttcctaaattacagttccgttgtatttgggtatcacatcaaatcaagtccagtgcacctgtctttgagaatgaagagatatgacgttaggaagccttaatttgaaacgctgggtgcatttttcattgttttcactttagccatttttgcctggaagttgctggtggtacagtgttttatacaatacagtctttacatcaagttttagaaaacatgccaagatttacaaagcaggatagccatgctctcaaatgttacttctgaagttattttcttgacactttgagataagctaaaacttcactcctgtagcgg

SEQ ID NO: 838432 - DNA, 658 bp, Homo sapiens
ataaatgaatgaatatagcaaagcattccatgatgttctcttgaattcatttattctttggaatttggttatttttttttgttttttggtgcagtggttatgtactactaggggtatgatatgggttcttcaataaatctcttcaaattataataaagatttagcgctaaccttctgctcactatctccctctaagtactacagatggatgtgattagcatgcaatttatcatcttgatggaattcatgtcttacaggcctatggctttcaaaattgaagtatctagatttatgttattttgtcaaataggaaatggttttactctattgagattcctacacttaaaaatttatatagaccttaaaaaaatcctaaagaagagtttgaaaagtatggttaggcattcttctagccatatagactatagaggagaataagtttaaggaaatcatcaagtaaagtcaaaaacatagtaaaaatggtaacataccaccttcatgtaagataaaaccagataagattttaaaaagaagcrtttatgctatgcttaggaagccaatcctgttgaaaaaactgatattgcagccatatctgtctgtgagtagttgtaacaatgctgtaggtaacatttctgagagcatgatacagtgtaggggg

SEQ ID NO: 838433 - DNA, 632 bp, Homo sapiens
aatttaaaaagatttaaatcttacagtgtatgttttctgaccacaatagaattaaagatcaataaccaaaagatagttggaaaaaagcccaagtatttasaaattaagggacatactactaaataactcacaggtcaaggaaaattttaaaatattttgaattaaaggctgatagcatcttaaaatttgtggaatgcagctaaagccatgcttaaagggaaatttatagctattatagggcaaaagaagtcagacacaaggcgatatattgtgggattccagtagatgtaaagtacaaaaacagacaaaaaacaaatgctcttggaagtcaggatagtggttcccctggggcaggtgtagcccttttaaggacattatattagtctgctagcactgcaataacaaaatattagtctaggtggcttaaataacagacatgtattttctcccggttctggaggctgaaactctaagatcaaggtgcaggtagggttggttatttctggcctccctcctttgcttcagatgtctgccttcttgctccatcttcacatggcctgtgacctgttgacacacatccttggtgtctctttctcttcttattaggacaccagtgctattggattaggatc

SEQ ID NO: 838434 - DNA, 773 bp, Homo sapiens
gatccttcaggagggcagccagcagtggggagaaaacaccacagagagaaggaagtctccagctgaactttgtaacagtttgaacccatggaggagcctccyggccagaacctggtggggagggtgtgaatcctgcctgcagactccacaagttggggaagaactaaagcccttctcttttgcagctgggaggtgggtagtctagggcaagatctcagccctgattgcccactgcctggaaacagactctgtgctgttaggtgggggcacagtgggagtgagatcagccctttggattgcatgggagctgggtgaggcctgtgactgccggctttcccccacttccctgacaacctgtgttattcagtagaggcagccataatcctcctaggtacacaactccactgacctgggaacctcacccccattccccacagcaaccacagcaagacctgcccaaggagagtctaagttcagacacacttaccctgccaccacctgaagctcattccctacccgccctggtagctgaagacaaagggcatatacattcttaggaattctatggccctgcccaccaccgattcctccccatactagcacagctgatgctctctggaaagcgccacctcctggcaggaggccaaccagcacaaaaacagggcatgaaatcaccaaaactaagaaccctcacagagtccatttcaccccctgccacctccactggaataggtgctggtatccacagctgagagacccatagatggttcaca

SEQ ID NO: 838435 - DNA, 605 bp, Homo sapiens
tccctgccaccggggccactttattcatgcgcccattgggcaagcatgaggtggctggcaatagggctgactgatatccacagaacagtcatcctagctatgtaattattaaaatcctccccagctgaggtcaccctttggtgagcatttgtatgggacacaaatatttttatattttttgcacattcaaagtaatctatgtatatacatctccaaatttcatttgtcaccaattttccaatcatgtttcttctaagtccctgatcctccaaccaaaccatctgttacggcccatgaattagtatgtaatctcacatatggccatttcttcttctcctgcaaagtcacaaccaggtgtactgcctgaagttctgcccactgggaggatttcccttcaccactgtcttttagggataccatagagagaggctgtagttctgcattccatttgcacaaggcccaggagcaggccaaaagctgtctcttaaaaggagagtagytatctgtggatgatggcaggaccttgctcccagtgttctgtagtccctaaaatgtctgattattttcctttctctggtgcacatttatactggtaaaaatccata

SEQ ID NO: 838436 - DNA, 530 bp, Homo sapiens
tctgatgatagtttctgttgctgcacagaagctctttagtttaattgggtcccatttgtcaattttkgcttttgttgcaattgcttttggtgattttgttgtgaaatctttgactgtgcctatgtgcggaatggtattgcctagattttcttctaggatttttacagttttggattttacatttaagtcttcagtccatcttgagttgagttttgtatgaggtgtaaggaaggggtccagattcaattttctgcatgtggctagccagtgttcccaacaccgtttattaaatagggaatcctttcaatggaatagaatagagatcttagaaataagaccacaaatctacaactttctgatctttgacatttgtttatttttattcagcttacatgttcaaacatcatagcataacttttctcaataatttctatttaaactaaaaattttccagtgttttctgaaaatgtttgttgtttgtgttatgaaaagcttgggataaatatgaaatacataacattttaaaaaaa

SEQ ID NO: 838437 - DNA, 543 bp, Homo sapiens
cagcaatgttggtttctcccttgccccatatgcctccggtgacatacattcacgccatctgctctggtatatgccagtgccaggcgtgaccgcattgtcaccacctggcattcgccccgtccctgtctgcacgtgtcctggaaagcggtatcggcttgcaggagccccagggctttcagaagcgggccagttcactgctgtttcaaaggaggagggaggcagagggctcacgattcagtgaattttccactgacagcagccttgagggccatgggatcattctctgctgcagccaggccctgcctgcctcagcaaatgtggtgagcccctcctttctcacccggagtggtccaaaatggcatctgaagaggagtcctgagaacccagcaggcgccctgaagctccccgtccatcggcggaagttggctcaaggaggtcctgaatacgggattcctgggggcttkgcccggggacacccgcggccccttgtcacaggcgccccgaaactgtaccccggatccagccgcagccgtcgcagcgcgc

SEQ ID NO: 838438 - DNA, 641 bp, Homo sapiens
tgcctttttcagatgagatatgtgcacccaggaatcaaaaccctttaacttaacagtacaaggattaattaatagcacctgatgaaagtccctttaaagggggggtcgagggagtctttcaatggatatctcttycagtacatgtaattatcaggctggagttggtgatgctggagttcatggtttgactggaagctgtaaaaagatgctaaaatcttgcagggatcagtttttacagctttgataagtatcagcaataagtctaagtcagagacttaatttagaatttgattttgaggatgtatatcaaagatgttaaaaggccaaaacatttgatcaaaacagaatcacaggtcattgtaaaataatagttattaatttaaccaaagtgataatcaagactttaaaagcactacagaaagttatacagaagtaaaaactttccttcttaaagctgaatgttcctaagtaatcaaaaaactaacaacataggaattatattgataaaatataaaatcttgcttcttaggcctgttatcaaaaacaccaaggaaaaccacctgcagagtgaagtgtgattgcttctccttatgggaaacccatttagagaaccttaaagtcaaccctgatgaaaagggcac

SEQ ID NO: 838439 - DNA, 647 bp, Homo sapiens
agtcctttggggacactctggctttcttttccccctgttccagcaccctctgagctcatgtgttctaataggtacaaaatggcaaagcctcaatgaccctgggctcctcgacgtcataccaacctttattgcacatctacagagagcaaaaaaatgtttttgccactgagattctgggactattttgtaactgtattataatctagtctatcctgaccaaaacatctagtttaagatagagttttgaccttaattcaattgcaatcatatgatttgcaattgtaatcaaatatctatacagctgacataaatgaaaattgaatctgaacttttggattctaaaactgttgtaagttcattaaatatcattttatctaaacacactgatccttctaagaaattaatttttggattcttggtgatgtttttaaatattacgaaatcaagtcaatattcataaattcacaaggctataatattaatttactttttatcttagaccctgtaactctttttacagttaaagcaatggagtgctgtcactgaatattwgttctctgcaaagtctgtaagtactttccaatgagaaccatctatagaatttttggagaaactggtaaaatttgttaacgtttatttcattctcc

SEQ ID NO: 838440 - DNA, 612 bp, Homo sapiens
tgagatttatgcctctagataaataggtagacatatgtagatagccagctttcttttgaccattattagtgttactgcacaaaagtgtcttgctgctggatgtgctagaagccaatatwatgacattgagtttttgagaaaagaaaagctttatattgcaagttgactcacaagaaaataagagtgtcaagctcaaatctgtctccctgtgctggcttcaagacaatatttattttaggaaaagttcagggggtagattctgagatcagtaggtgattggtggaaggaaagggaggtctggaaagtccttaggcatgcgcagttatctcttcatgctagatcacaggtctcatgtgcaaatcagggggagttagtatgaaacatatggtggaaatttaggctgtgatgtcagcaagctcattctgtgcaaactccagtaggccatcttggttccaactgatttcagccagtttttttttcttgatatcagaagccaagggagtttcagcgtttcagcaagttgcttcttatctgatatcctgccagctcaagagtttctgttagttactggtttcttactctttggtgcacagtttcagtttcagcttttca

SEQ ID NO: 838441 - DNA, 510 bp, Homo sapiens
gatccctcagatccagttttctccctagggcttcaaggcaaagcttggaattgaggttgggacaaaaaaatgtgtgtcagggrggttgcatggactccttatagctgaatgctaaggtgaagctgtggaattgagtcctcttctaataagggagagaaaaagataagttgtgacatacccagataaccggtgtctatagttatgcttgctagaatttaggtgtattgtgcttagctttgattacttcccttggtcttactttccgaaaaagaaacctctgggtgatgggcaccctgtttattccaattacctggcaggatttgcaagataattgctcagaactagaatattgatccagattttttacattacccatccctcttgttctatctgagctgcagctggagattcctggttggttcacgggaacaagcatgtttagtctaacaatgtaggccaaaacttaaaaacaaccagtgaatttagattttaatgagaaatgtatattaa

SEQ ID NO: 838442 - DNA, 638 bp, Homo sapiens
ccttaggtggatcctccaaactgggaaaagttaatttcccaaaccttaaactggttggcttaggatcgggctcaggggaaggaaacccagaagcctgacatgcyggcaaaacggtaaatttttttttttttttttttttttaaccagtcgaggttttggcctccctctctccatgcaaagtgatataaggcctctggattttttagctatccttacctctcctcttgtttcattttgatacatgttttctaatgacccagtttgtctcttctcgccttcaggccatcaaactccaaaaggtcatgcaaccagagcctcaaaaaattgccctttctgctagggacccttagataggcctctgagggagctctgactgccattttccccaaaacagcgccgcctgtcagcagaaagcagttaagactggtctttgtttttatccttacccttattccaattggcagttacatgtacttctttaaagcgattaatgagactgccaagtaaaaagggctccctggagaatcttcagccagcctgagcactgggagaatggggtgaagacttgggaattcacaccatttgctggggagaggagcctggcctctcttgttcttgggtggtaacctgggatttgg

SEQ ID NO: 838443 - DNA, 638 bp, Homo sapiens
ccttaggtggatcctccaaactgggaaaagttaatttcccaaaccttaaactggttggcttaggatcgggctcaggggaaggaaacccagaagcctgacatgctggcaaaacggtaawtttttttttttttttttttttttaaccagtcgaggttttggcctccctctctccatgcaaagtgatataaggcctctggattttttagctatccttacctctcctcttgtttcattttgatacatgttttctaatgacccagtttgtctcttctcgccttcaggccatcaaactccaaaaggtcatgcaaccagagcctcaaaaaattgccctttctgctagggacccttagataggcctctgagggagctctgactgccattttccccaaaacagcgccgcctgtcagcagaaagcagttaagactggtctttgtttttatccttacccttattccaattggcagttacatgtacttctttaaagcgattaatgagactgccaagtaaaaagggctccctggagaatcttcagccagcctgagcactgggagaatggggtgaagacttgggaattcacaccatttgctggggagaggagcctggcctctcttgttcttgggtggtaacctgggatttgg

SEQ ID NO: 838444 - DNA, 588 bp, Homo sapiens
gggtctgtcaagtgtacatggccagcagctatctgcctgcagggtgcctgtccccagtcccctggctgccttcaccctctacaggaaaccctcctaggatcctccctagggctcccgattcagtttagtgagtcaggtggggtttcggaactagcagttttaataagcttccctagagattctgaagcgtacccagggctaagaaccgcaaccctgaattacagacaggttccaacagcacatcccaagaaaaggaggaagcagggttctggtgccagctttgtcaagcgtcacacccctctgagcctcagttctttccctatcaaagggagacacccacctacagccattccaaccacctttctttaaaataaaataaatactgacaataaaagtaaacttccctcgagtcactgagttttcccacacagacatctgccctgtcttcctgggtgtactaaacrtcctgtcttcttgagtgtaccaaacctaactgctttgtgctgtgcctcaggctgcccttggctgatgttttacccacagggcaagctcctttaactccatcagggagagcctaggagtgacagg

SEQ ID NO: 838445 - DNA, 656 bp, Homo sapiens
aagtagtagataaattatatttgaaaataactaactgctaactgaatttttaacttgcatttttacaacatgaatgtaaaaatgcaagtttaaaaattatgtacctgatacatatctagatgtagatgaaaaaaatctggcctagtttaattgttattatagccactatttctatgatcaactgttaactacaaactttcacctaattttcttttaagaacatatattatttttcatagtttatttcctaacattcacatcaaagaagagaaaacaattatacatagcatcagggagtgatcagatataatttgttcaacaatgggacctggctacctgcctgtagaagagcagatggaattctacaaatgactttcactgtagggtcccttgacacacattatgagccaaataaatagtgtgacacccaatccaatgagtatccctgaacactactgatgtacacttttatgaggatacaaattgcacactgatgagcaatacctggtatgtggaaacctcgtttagaccactggccacttagacacctgtgtcctgaaagcacaaattaccttgtaactgctattggaaaagctactgcctacmttttaagtagaattgattcacaaaagtacaaaacagtctcatttcaagtt

SEQ ID NO: 838446 - DNA, 559 bp, Homo sapiens
gtgtgggctgagttcaggatcctagacaacagaagctacaccactggtgcttggacatgagctacatatgtgttctaaccatgatatcacctatggtctttatcatccaaaggtggtagaggyggtggcagtgtaaccggcaaaagggtctgcatgctcgccacttataaaaagaaaccgagatgacaagactgagatgtgattaaaaagagagtgaaattttattatccatgccagcagagggaggagtgggtgcaattcttatcaaaaatttccactcttcaatttgtggaggaaacccaggagttttaaaagagagggtttgaagttcagacgaggcaagggggctaggatgtgtcaggtgatgtgacccactccgatggcttgtcttgaattattgtttcatttggtaatgggactagcaccattgcagctggaggtgcctggtccatacaaggagccagccccagaagcttctaagaaaatatatgatcagataagtgagcatggtgtgtgcctaacaagcatgtaggtaaataggtgtgcataagcatagaat

SEQ ID NO: 838447 - DNA, 559 bp, Homo sapiens
gtgtgggctgagttcaggatcctagacaacagaagctacaccactggtgcttggacatgagctacatatgtgttctaaccatgatatcacctatggtctttatcatccaaaggtggtagaggtggtggcagtgtaaccggcaaaagggtctgcatgctcgccacttataaaaagaaaccgagatgacaagactgagatgtgattaaaaagagagtgaaattttattatccatgccagcagagggaggagtgggtgcaattcttatcaaaaatttccactcttcaatttgtggaggaaacccaggagttttaaaagagagggtttgaagttcagacgaggcaagggggctaggatgtgtcaggtgatgtgacccactccgatggcttgtcttgaattattgtttcatttggtaatgggactagcaccattgcagctggaggtgcctggtccatacaaggagycagccccagaagcttctaagaaaatatatgatcagataagtgagcatggtgtgtgcctaacaagcatgtaggtaaataggtgtgcataagcatagaat

SEQ ID NO: 838448 - DNA, 609 bp, Homo sapiens
aaattctgatatggttcagtgtccgttatcagtaataattataattgtttatattaaattattgtgtgccacggargtaacaagtttccttgtcaattgtgtctttggctatggctgccctgaaacttttgtcattcatggacgattgttgtcttgttttggtcctccttagaaggtggttttataatcagcaataaaactctaacaggtgcacataactcagattgctgctatataatcgtagagcagggttattatgggtagtactgcatctaccccagagaatgaaatccagagaagtccttctcctgcttgccaggcactctcagaactcaaccttgttctggagcagacaccattgccatcaatgtgccgtaggcacattccttctgagaagaagctattgttttcagaggccagcagtaatgagtaaagaaaactggacaatgatttccatttcaatattcttttaatctagcacccaacataaagattttccttgtgctttttaagtgccaggtgttaaagaatccttaatctggttgattcatgaaagctgattagataattcaaaaattattgaaatgtgtccataaaagtcacactaca

SEQ ID NO: 838449 - DNA, 553 bp, Homo sapiens
acagcctgagaggagcagggaatggtgagtgactgctaatggatatggcactttttttggggggtgatgaaaatgttctggtcagacaatggcaattacaaaactgtatacacacgaaaaaccaaagaatcacacactttaaaagggaggatttagctcggcatggtggcatgcgcctgtactcccagttactcgggaggctgaagcaggactgcttagagcccaggacttcaaggctgcagcgagctatgatcgctccactgcactccaacaaggatgacagtgcgagacccgttttctaaataataataataataataataataataataaataacccaaggtacccagttcacatgcaaaaccactggtaaacataaattatctccaagtaatctagaaagaaaatgagcacataagaygtcttctaaaaacacacatatatttctttacatgttacatttaacgtaaaaatcagctatgcagaagttacatgaacattttatgttggaaaggtaaatgactattattaatacagaatggttaagtacat

SEQ ID NO: 838450 - DNA, 531 bp, Homo sapiens
taaaggaaaattttgtatgtaaatttcacagaaagagcaagatatgtttttggtgagaaagtttgtaaagaagacataaaaatgtgatttttcttaaaagaaaaaatttatctagtttaaaggttatttaaatgtttcaaaatgaagaaataaagaaaaagtaatgtaaagttaagtggatataaaaataaatttaaaaaaagagtaatataagccaggcacagtggctaatgcctataatcccagcacttttagaggccaaggtaagaagattgcttgaggccaggagttcaagaccagcctgggcaacatagactctgtctcaataaataaataagtaaataaataaatatcttgtatggttaaactaagattaagtgaatttattataagggcttttaaaattgatccttagtatsaaaagtatactagtacaaaaccaaaatttggttttctattttaaataagatttgtatgtagtgttaataagagatagtaaaaggtgtatttcaacttctgagtaaattgcaa

SEQ ID NO: 838451 - DNA, 588 bp, Homo sapiens
gaattagttccagagagttaatgaataggttgtttggttaaaatgtatagacttttaatctggctcattctttgatgtsttttagttggtttggttcatggggaccttggcttaggagcatacttcaaatacttggtattatcctcctaatataatagtactctgttttctctcagaaacagaatgtttaaatgtttgcatgaagccatctttagaatgttgaatggtctctgtttgataaaacaaaaacttaaatgagtaattatgaggacattgtaacctgtgaatgacgtgttgagactggaaacacaaaatgatgaagattgagtagcacaaaggccctaagtttgattacatcatcactttagtgagactctaaccaaaagagaggaactgttaaacaaaataatggcaggccattgttttagagttaggtactctgcctggcccccaacaggtgagaccaaaccaaaatggaatcattcatgctaagtttcataatcaaactgaaactttaagtatgcagatagatcccagacagatcagattattttgttcctcctgaaaacagaagattctaacataatg

SEQ ID NO: 838452 - DNA, 240 bp, Homo sapiens
cctacgataagccccagtgtgtggatattatattacatttagaaaaacttaaaaccttgaccaaaaaggtgtcagaacagaaaaactaagtcaytaaacttgcaggatacaaaatcaacatacaaatattactgctacttccatagactatcagtgaataatctgaaaggggaataaaggaacaatatcatttatactagttacaaaaaatttaaaagatgttggaataaatgtaatcaa

SEQ ID NO: 838453 - DNA, 549 bp, Homo sapiens
tagccaaaacgatatggtactgacatgaaaatagatacatagaccaaagaaacagaatagagaacttagaaatagatctgcacatttacarcgaactcatttttgacaaagtcagcaataatatatatcggggaagggacagtctccttaatggtgttgggaaaactagatctccttatggagagcaattaaactagacttttatctttccctatgcacaaaaatcaaatggatacattaaagacttaaatgtaagaccacaaactatgaaactactggaagaaatcattaagaaaacacttcaggacatcaattgttctgagcaaagatttttgtggtaagacctcaaaagcacaggcaacaaaagtgaaagtagacaaatgagattatactaagctaatcaaacttctgcacagcaaaggaaacaatcaacagagtgaagaaacgtcctccagaagatgagaaaatatttgcaaattgtctgacaagaaatcaataaccaggatatataaggacctcaaacaactcaatagcgactccccaaaaaaa

SEQ ID NO: 838454 - DNA, 549 bp, Homo sapiens
tagccaaaacgatatggtactgacatgaaaatagatacatagaccaaagaaacagaatagagaacttagaaatagatctgcacatttacagcgaactcatttttgacaaagtcagcaataatatatatyggggaagggacagtctccttaatggtgttgggaaaactagatctccttatggagagcaattaaactagacttttatctttccctatgcacaaaaatcaaatggatacattaaagacttaaatgtaagaccacaaactatgaaactactggaagaaatcattaagaaaacacttcaggacatcaattgttctgagcaaagatttttgtggtaagacctcaaaagcacaggcaacaaaagtgaaagtagacaaatgagattatactaagctaatcaaacttctgcacagcaaaggaaacaatcaacagagtgaagaaacgtcctccagaagatgagaaaatatttgcaaattgtctgacaagaaatcaataaccaggatatataaggacctcaaacaactcaatagcgactccccaaaaaaa

SEQ ID NO: 838455 - DNA, 594 bp, Homo sapiens
ttatttgatttttgtatgaaaaaaagcttggttatagaaatcagcatactattttttkttttattctggagagagatattctggtgactgaaaatatggtcaggtgtcagatataaatgtgcaattgccttcttgctatactgttggtctcagtagattcactttatagccgctggcaatatcaaaggttcctttttcgtttgtttaagcgctaatttctatcaaggtgtcatggatttttaaaattagtatttcattacaaatgtcttaatgttggttaactaatttttgccaggaccattattgatcaagctaataaattgaacagccatttgggaaaaagaaaaaaaaatgttcactcaagaactttgtcaatttataaactgaatcgtctgccttttagttaagttgtaagtgcagtgctagtcttatagaatgacttagagagtgttccctcctcttctattttttggaagagtttgagaaggattagtgttaattcctctttaaatattgagtagaattcactagtgaaaccatttaatcccaggccttgtggggaggtttttaatgactattttattttctctgttt

SEQ ID NO: 838456 - DNA, 636 bp, Homo sapiens
agctctcccttcttttctgtggctcccaggcatccaaaatatatgagtttccatagtgctcaagtcaggggaawcagaagctagttcttcaagtattcttttgaaaaagtaaaaataaattgtcgtatgtttcctcattctttccctttcaagggagaaactgtatgttgggtgttttcttccaattgcaccaagttctgcttgcttgaagggatagcttttgagagtaaaatgcaacagatattcttagacatttcaatgcagctttcattgattttgcacttatctggggtactattacttttaactgtcttttgagttttcataatgtctttttggattatatattgttgttaatttggtgtctctgtaggaaatctataagcacggttttgtttctcactgccaccaaaaatcccaataccagtataaaattattgttgtcttagtccactcaggttgctataacaaaatactataaactgggccacttataaacaacagaaatttatttgtccagttttggaggctggaagtcaaacatcaaagtactggcagattttgtatccgatgaaggcccattgcctgaataatagttggtgccttcttgctatgtcctcacataatggaagggtc

SEQ ID NO: 838457 - DNA, 585 bp, Homo sapiens
catcgaaaaccagtcaatttcgagcaactgccatcgtgtaggagagcctaagcgtggcctggatgagattccagaacagaaaaatgacattatgtaaarattacactttgggaggccgaggcgggcggatcacgaggtcaggagatcgggaccatcctggctaacatggtgaaaccccgtctctactaaaaatacaaaaaaaaattagcagggcgtggtggcgggcgcctgtagtcccagctactccggaggctgaggcaggagaatggcgtgaacccaagaggcggagcttgcagtgagccgagatcgggccactgcactcgagcttgggcgacagtgcgagactctgtctcgacaaaaaaaaaaaaaaaaaaaaaaaaaaaaaaaaaaaaaaaaaaattaaggaaatccaaataaagtatgaactttagtcaatcataatatatcaatatcagtcattaattgtgacacatacgccacagtaatataagatgtattaaaaaggaatctgcatgtgatgtatacagggacactttttactcccctttgccattgttctaaatctaaagtaaatataaaattaaa

SEQ ID NO: 838458 - DNA, 655 bp, Homo sapiens
taaaatgaaagtattagttggatgcatgttttttacttttcttttttttctttttatttgtcaagctgcactccatttataactgcttgtgctttgattcaattaagtttgacaagattaatgtctttggggttcagagaggccgagttgtgactacatactgcagctggggcataaaatataaagattgctaataaaaagccagggcttagagaaaaatgtcattccatgtcaatgctttcaggttaggttgggaaacagcaatgatcttgtttacatgactttgtatctgtgttcatagtgatagcatgaaaaagagactgacagagagagagaggaagagagagatacacacattgtactcaaagacagagagacggtacaggatcacatgaataagtctttagagtatgcatattatactctaggccatatggcataacctgagattaaaatggtcctttcaaactaacggtggggaacccagcaaaacaaatatgttttctatacaatatatcatctattctgggaggtgatggtacatggtgaagcaagaaatgcacctaaaatagtctttcaggtgaagaagaggtaggacaccattccagacagatgctgcagcctaagcaagggatccragctaaaagtaaataaa

SEQ ID NO: 838459 - DNA, 637 bp, Homo sapiens
gtgcccttttcatcagggttgactttaaggttctctaaatgggtttcccataaggagaagcaatcacacttcactctgcaggtggttttccttggtgtttttgataacaggcctaagaagcaagattttatattttatcaatataattcctatgttgttagttttttgattacttaggaacattcagctttaagaaggaaagtttttacttctgtataactttctgtagtgcttttaaagtcttgattatcactttggttaaattaataactattattttacaatgacctgtgattctgttttgatcaaatgttttggccttttaacatctttgatatacatcctcaaaatcaaattctaaattaagtctctgacttagacttattgctgatacttatcaaagctgtaaaaactgatccctgcaagattttagcatctttttacagcttccagtcaaaccatgaactccagcatcaccaactccagcctgataattacatgtactgraagagatatccattgaaagactccctcgaccccccctttaaagggactttcatcaggtgctattaattaatccttgtactgttaagttaaagggttttgattcctgggtgcacatatctcatctgaaaaa

SEQ ID NO: 838460 - DNA, 633 bp, Homo sapiens
aaatcacaaggattcctttacaccaaggacagacactcagagagccaaattatgaatgaaytcccattcacaattgctacaaagagaataaaatacctagaaatacagtttacaagggatgtgaaggacctcttcaaggagaactacaaaccactgctcaaggaaataggacacaaatgagtggaaaaacatcccatcctcatggataggaagaatcaatatcgtgaaaatggccatattgcccagagtaatttatagattcaatgctattcccatcaaactaccattgacattcttcacagaattagaaaaaaaactactttaaatttcatatggaattaaagaagaccccatatagccaagacaatcctaagcaaaaagaacaaagctggagtcatcatgctacctgacttcaaactatactacaaggctacagtaaacaaaacagtatggtactgcttccaaaacagacatatagagcaatggaacagaacagagacctcagaaataacatcacaaatctacaaccacctgatcttcggcaaacctgacaaaaacaagaaatgtgggaaggattccctatttaataaatggtgctgggaaaactgtctagccataggcagaaaacagaaa

SEQ ID NO: 838461 - DNA, 636 bp, Homo sapiens
ttccagacacatttggcgacacagatgggactatcaccaagtggtgagtaccatcagacmcctttcacttgctattctgtcctatttttccttggaatttgggggctaaatactgagcacctgttggacagttaaaagtgactagcgcagccaccagactacagacacgaatgtcaggctttctgggaaagggctctctaacaacccccaattcttcggagttggcagcattggttcatgtggaaccagcttccacttttcatgtacttctgggctgagctgagggttgacagagaggaaatccattcagctcggggtcccggcaacaagttggttgaccctgtggccatgagtggaactctcaaagtcatgtcgcccaagccagactcgcccatctatcctatctatcctgacccgtgcctcatgggtcctaacacctgtcggacaaacttcctcccaactctcttctctgaggttagtcccacttctaaaaaccactccctgtctctggtgcttttctagtttctcctgtaagaatgacttctagtataaacttcaggactccattaccttctttaggcacccgggttcaccaataggaaagacataatttttgcccaaagccccattgggtgg

SEQ ID NO: 838462 - DNA, 564 bp, Homo sapiens
acggcagagcaatggggatggaagagcgaaagcatgaggagaagcgtctccgaaagggatagagatatgataaatgagaattcccgaaagagagaaaaaatttagagaggaggggttataatagatatatatacaatatatatatatatatatatagacatatacacatatatatatatactataccgacattctaagagctgagatgtattctgaatcttcagacacagagtgatcattaagtggctagcatagttttaaaaagaaagaaaaaagaaggccgggcatggtggctcacgcctgtaatcccagaactttgggaggcagaggtgggtagatcacttgaggtcaggagttcgagaccagcctggccaacatggcgaaaccccgtctctactaaaaatacaaaaattagccagccatggtggtgcgtgcctgtaatcccagctactcgggaggctgaggcaggagaatcacttgtactggggagttagaggtggcagtgagccaarattgcaccactgcactccagcctgggtgacatagcaagactccgtttcatag

SEQ ID NO: 838463 - DNA, 477 bp, Homo sapiens
atatgagacaaagaagacttacttaaaaaaagaaggaaaatagaaatgtgctaaatgagtaggcagaatgctacttgcaaaatagtcacatataggaggaatatgaatatattttcagataagcaaggtaccgagaagtttatgataatcatcatttctaagaagatatactccaccataaactgtgaggtaaaacaaacgaacagagactacagggcccaagaatgtgactggttttagtctattttcgtgctatgaagaaacacctgaagctggatgatttattgttttttaaagttgtctatttggttcacaattatgcaggctgtatagtaagcatggtgccagcatctgcttctggtgagggcttcaagttgcttccactcatggtagatggggaagragagccagcatttgcaaagatcacatgttgagataggaagcaagagagataggggagatgccaggctctttgta

SEQ ID NO: 838464 - DNA, 491 bp, Homo sapiens
acatttttactgtatcatttttatgtttagatttttttttaggggggagggtggagtttcgctcttgttgcccaagctggagtgcaatggcatgatcttagctcactgcaacctccacctcccaggttcaagagattctccgacctcagcctcctggtcttacaggtgcacgccaccatgcccgactaattttttgtattttagtagagacagggtttcaccaggttggccaggctggtctcgaactcccgacctcagttgatccacctgcctcggcctcccaaaatggtgggattacaggtgtgagccaccacgcccatccatttttagatatttttagatacacaaataatgtgttacawtagcctaaagttttcagtacagtaacatgctgtacaggtttgtagtctaggagcaatgggctatagcctatagtctaggtgtgttgtaggctgtaccatctaggtttgtgaaagtatactgtatgatat

SEQ ID NO: 838465 - DNA, 583 bp, Homo sapiens
tgcgttatggctgtcctgttttcccaacatggatccagagagagagattgtatgagagaaaaagagtgcagaactaggatggagtctggtggaaataattcatagaatatcaagtctaaaggtttccaaagttattgcatctttcaaattatgtttggcatataaatctaaagctgactaacttcatttaagaagtaatgtcatttttatgtggttacagaaattccaggaatatattatgtttgaaatacataatttccgtaaattccaggaatatgttatgtttgaaatacacaaaggattactgtgagtcttaagagtttttgtttgttggttggttggttggttggtttgttttccagccaggtgtggtggctgacacctgtaattctagcactattgggggccgaggtgggcgaatcacctgaggtcgggagttcgagaccagcctagccaatgtggcaaaacccygtctctactaaaaatacaaaaattagcagggcatggtggcacacacctgtaatcccagctactcaggagtctgaggcaggagaataccttgaacctgggaggtggaggtagc

SEQ ID NO: 838466 - DNA, 635 bp, Homo sapiens
caaaatataataaattatttctcttgagatacaactcagaaattatgaaatttgcttgagaacagatttaattaacagtacaatataaacagtaatatataaaatamacaaagcttctgttatctacaaaactgctaaattgtgttttgtttcttcaaggctgataaatttcaaaatcatgttttgccttaaagcatatgatcacaaataaattttcacagtaaaaataacaagtttgcaccacagtatcacgaagacatatagaaaagcttagtcatttaaggcaaatcatatgttaactctattctattttattctgagttcacaactcacgttgggaagattctgtgtatttctgtatttcctttattttttggctgaaattttaatgaactctaatcagccaaggatggatcaacataacagtttttaaatctctggaaattacataattaatgactgtgtgcacctcttgctaaatcttttctctggtccctaccaattgtttagaagaatgatgggagtgtggcaggaaccctgagacttctttgtggcagaggtaggcagtgcctgctaaagtctgagggaagaatctgagagtctaaagaaagttgtctcaaatccagacccagcat

SEQ ID NO: 838467 - DNA, 597 bp, Homo sapiens
atgattacacttctaagtcaacactcaaaaaaatgtgtatacttgtgtactaagagacatgtaaaagagtattcacagtagaatcacttgtaatgtcaaaaaccaaaagtcyaaccatggtacaatggatatataaattgtgatatattcatacaataattttaaaaatccattgctaaatgcaacaacatggatcaatctcacaacataatgttgagcaaaagaagacagaaacaaaagggaacacgctttatgaatcaaaaacaatgaaaacgaatctatggtaacataatacagaatagtggttccttcttcaagaggtgataaatgactgggagagagcaagaaagagtttctggggaggtagctatattctctatcttgacctggaaagagatttcacagatatatacattttgtaaaacttcatcaagctttacactttgatgtgtcttgttgtatgtgtgttgtattttgattttaacattttaccaaaagacaaagaatgaactatagctatatttattaacatggataaatctgaaaaatatgatgagttaaaggagcaagtctcaaaataatatatacagtatgatt

SEQ ID NO: 838468 - DNA, 513 bp, Homo sapiens
aaggtggaaaaaaattgaatcaggaagaaaaaaaacaattttaatatattatctagcacatacaacctaatagtattaccattccccaaagggatgataacttgacgcttttttttaaatgaaactaatatataccttttgttcattgatacctaccatgtatgaaggtagaatttttagtgtcccgggttcaggtcggtgtgtaaaagggccttcaagcgcacctcgtttaagcatatgcaataacaattttgcatacaggttccgattcttcctccccattattcctgcacctgttcctgaaggttcgcacagctttctaatccaaagagcacacctctgccgttctataaatacagaagaactattagaaattttrttttttataaaatgaaacattcaattacaaagacctataatagcacctgctttagtctaaaagaaggaccaacaaaccttttctgttaaaggccagagagtatatactttaggcttcacaggccatatgatctc

SEQ ID NO: 838469 - DNA, 552 bp, Homo sapiens
ttgatataatatggacttaaccttgtctcagactgtaagtttggatcaagaatgctccaggtgccttaaatactaacaccagtgaatatctaagccatattcttatcggsaaaggcaggaattcaagactactaatccaattgaactagtacattcaattcaccagtcacatcacaagccctagtattccattggccaaagcaagttacatattaagttcagtagcaataagacaaggaagtatacctttcctgtggagttctaggggtagtggtagtaaatatttctggattttcaaagcaactgtagacaaggagacaattatttattttctataagctaaccatgaaacctaattattaaaatttattttctcagtttttgtgcaaaaagccaatgtggaaatctggaattacatacattatttcctttagcaattatatttcttactattaattttctgaaatcagaaacaaataaatttttagccatacttgggtctgaatgactctctgatattccctgcggatcagacaatgactgatacacttt

SEQ ID NO: 838470 - DNA, 644 bp, Homo sapiens
acaaaacattcttcataaaagatatatttaaaatataaggataaaaatattgaaagtaaaaagaaaaggtatatttacacttaccaaaagaaagatgctataaactttaaggaagaaatattactatatatcgagatcatttgtgactataaaataataaattcaacatgaaaataggtaaaaattatacactagtaatagcttcaatatatatttaaaagtagacataaaactccacacacatagttgattttccaactcgtctcttagtaattgatgcaataagatcaagacaggaaggaatttttttaaatttatagagcatttactatgatagacaatatagtggtccatagaacaagtcttgacaagtatccaaggattaaaatattagaaagcatggtttctgactacagtgacatatatatatatatatataaagtatgttttctgaccactgtgggaggtaggtacaaaacaataacagagaaaatcacaaaatgtccaaatgtttgaaaatttatgaaaaatcacaacagaaattataaaataatttgaattgartattcatgaaggaatgtcctcccaaatcttataggttcatctaaagctattcttaaaagcaaatatgtagcattaagtaa

SEQ ID NO: 838471 - DNA, 494 bp, Homo sapiens
atattttatttttcctttgaaattttttttaagatggaatayggttttaaaattttaatttttcttttttgttgaaatgcacttctaatgttttttagatctaaaacaatgatttgattaatattaatacagctgtgggtttttattttttttgtattttaaaatttgtattctacatcacaacactagaaaaaaaaatctgtccctctgccggactagtgttagtttgatgattatactaatattaactgcttcacttgagtaagcaaagaggaagtaaaataccagtcagaccagctgttaattcacagagtgttgtactacgcttattaaaaatacccaaaagatgtacctttgtggttcagtcttttgaattagaatcagaatattaatcatgcctcaggcctaaattaaacattggaaggccccttaagaattttcaccaaattttcttggatttttctttattgggtcttcctggactctgtttagct

SEQ ID NO: 838472 - DNA, 500 bp, Homo sapiens
ctgcccccattctcctgactcagcccacctctgtccctagggtcttcctgattaatgtgtctggtcctctgcctccctttccccaggccataaactctagtcttgtctcaggggccaagagaagcccctttccccaggagggcttcactgtctccctgtagtgaccttggagcacttatcctggcctctgccccagaaatgggcccacctccctaagcaatgacgcctatttctgctcctccttcagggcccacaaagcgccccaggacgcattgggaacctgggtccccctggagagatggtcactgggaagggggtgaatggacaagtatttcaactgagggatgaaagttggttttctgacaactttgattggggagacataaaagaatgagatgtgaggaataccaggattttctgakggggcaaataggtttttgacatcaatctctttgcagggggagccaggagattcaggatctccagggatccagggtgag

SEQ ID NO: 838473 - DNA, 500 bp, Homo sapiens
ctgcccccattctcctgactcagcccacctctgtccctagggtcttcctgattaatgtgtctggtcctctgcctccctttccccaggccataaactctagtcttgtctcaggggccaagagaagcccctttccccaggagggcttcactgtctccctgtagtgaccttggagcacttatcctggcctctgccccagaaatgggcccacctccctaagcaatgacgcctatttctgctcctccttcagggcccacaaagcgccccaggacgcattgggaacctgggtccccctggagagatggtcactgggaagggggtgaatggacaagtatttcaactgagggatgaaagttggttttctgacaactttgattggggagacataaaagaatgagatgtgaggaataccaggattttctgatggggcaaataggtttttgacmtcaatctctttgcagggggagccaggagattcaggatctccagggatccagggtgag

SEQ ID NO: 838474 - DNA, 500 bp, Homo sapiens
ctgcccccattctcctgactcagcccacctctgtccctagggtcttcctgattaatgtgtctggtcctctgcctccctttccccaggccataaactctagtcttgtctcaggggccaagagaagcccctttccccaggagggcttcactgtctccctgtagtgaccttggagcacttatcctggcctctgccccagaaatgggcccacctccctaagcaatgacgcctatttctgctcctccttcagggcccacaaagcgccccaggacgcattgggaacctgggtccccctggagagatggtcactgggaagggggtgaatggacaagtatttcaactgagggatgaaagttggttttctgacaactttgattggggagacataaaagaatgagatgtgaggaataccaggattttctgatggggcaaataggtttttgacatcaatctctttgcagggggagccaggasattcaggatctccagggatccagggtgag

SEQ ID NO: 838475 - DNA, 638 bp, Homo sapiens
aatagggagaaggtatttatggagaagaccttaatttggagagtggagcattttgaaaaaaaygaagtggcttactaagacgaatgcttattccaggaaaataagaatgcagaagaaataaaaaggggaaaatgactacattcctccttcccagctatacctccgcatcccttcacaacctggaacttcagtcctggacccccgtctccacatacggcttgcatattgtcatattgtaagaattcataagaaaatactcaactcattactcttctttctgaaaacttttctttgtcattcattttcatttctcattccagatacactttttaatacctttattgttttgacaggctggtagacaaatatgaataagtgggttgtcattgttcttttgttcttactgaatttgctctattttactctgaactaagttgctgtgatgttctctgtcagccaggggtcctaagaagcagaccattttcatgcattcttgtgacaatggacataaacccaacccctaaagggcctatttcctcccgggcaccccagaggtgcacactggactgtttccgctgaagaaaagccggggcccatctgctaaagggcctgacgagggaatagccctacgtggcttg

SEQ ID NO: 838476 - DNA, 493 bp, Homo sapiens
gaatcaatatcgtgaaaatggacacactgcccaaagtaacttatagattcaatgctatccccatcaagctaccactgactttcttcacagaattggaaaaaactactttaagttcatatggaacaaaaaaagagaaggcattgccaagacaatcctaagcaaaaagaacaaagctggaggcatcatgctaccagacttcaaactatactacaaggctacagtaaccacaacagcatggtactggtaccaaaacagatagatagaccaatggaacagagcaaagaccgcagaaataacaccacatatctacaatcatctgatctttgatatgcctgacaaaaacaagcaatggggaaaggattccctatttaataaatggtgctgggaaaactggctagccatatgtagaaagcygaaactggatcccttccttatactatacaaaaattaactcaagatggattaaaggcttaaatgtgagacctaacaccat

SEQ ID NO: 838477 - DNA, 604 bp, Homo sapiens
aaatgggcaaagaactggtatatacattttcaaagaaaatgtacaaatagccaacaagtacataaaaagagagttaacatcattagtcattcaggaaataaaaatcaaaatcacagtgagatattattacactacttcgcaacgatattttttttgagacagagtctcactctgtcaaccaggttggagtgcagtggcacaatctcacctcactgcagcctcctcctcccaggttcaagcaattctcctgcctcagcctccggactagctggggctacaggcacataccacaacgcccggctaatttttttttttttttttttttttccagatttttagtagagacagggtttcattgtgttggccaggctggtctcgaacttctgacctcaggtgatcagcccacctcagccttctaaagtactgctattacaggtatgagccagcactcatggccttcttcgcaactattaggatgactgtaataaaaaataaatacataaatacattaaaaaatatatatatagaragagagagagagagagtagggggaggaaaaagggttagccaagatgtggataaagttaaagacacttacattggt

SEQ ID NO: 838478 - DNA, 618 bp, Homo sapiens
tgggtctgttctgtccgctggtcccaggattgccctctggagtgccacctctggttgtactgtgggctggggtctgggagtgtgtgcatgtttgggtgcgtaaatctgcatatattcatctgtgcatctgagtgtctgtgtctgtgattatgtctctgtgtagctgtctcagggtggctctgtgtttttctctatctttgtatgcatttgggtgtcctttctttctgaatgagtgtgtgttggttgtgcaaatctgtgtttgtgtttctgattgggtaatgtgtgtctctggcatgtgtgccccctgtgggagtgtctgtgtatacctggcttctgtatctttgtgtatgtgttgaggtgtgtgcgtgtgaatttgcttctcctttgggtgtccctgattgtgtttgtatttgtgtgtttatgttttgtgtagtgtgtgtgttctatgtctgattctctgcctgtgggtctgtgccagtgtgtgtgtgtgtgtgtgtgtatgtgagcacgtgtgcrcacacgtgggtgtccactgtgtgtagagtcagccctgtggggctgtgtctcatggttctgtgtgtgtatctgtgtcctcctggtgtgtgtgtttatgtgcct

SEQ ID NO: 838479 - DNA, 474 bp, Homo sapiens
ctgcattagggtggtttggaggatccatgttcatygccaaccctcctctagggagagggttccctgacactcaacatctggatctgcccatggcagatcgagccactacggcatcttgcctataccccaggctctgatgccacctcactgactgtgccaacccgagtgattagccctctttgtgtggactcatggttgttcactggtttggctctaagaccctagctgctgatggggagagggatatatgacacattgtgagatccagaatatttgcaggtttctaagaaaaagcacaactattccagatactgaggaccaaagagcatattctcctctaggtgttcatagagaggcttcatagggaagccacatcctcaacaatatccctgcaacagatggggatcagtgttcaaaaccatgctttgtataatgtgtatcatgtccctcaaccaaagcacaaagcattaaaag

SEQ ID NO: 838480 - DNA, 587 bp, Homo sapiens
gggggaccagagaaatgctttcttccttggcttgaagatgatgtcatcaaccttcagggccctcrgaatcccttaaataataaaacagtcagagcacatgaataccgggatgctttcagcactgcatatgtcaagccctgaggctcccagaatccctggagacgtatttgtgtgtctacacttcccacctgcactagcggtgaccacacacacagtccggtgaccacacacacagtccgctgaatctgccggtcaaggtatctatcttcaactgccctcttccagagggagctcccacaaaaaggaccagaattaaaaggaggaggaagaatatcatcggagctgctgagtgtgaaaagaccagctctcttgcaggatgcaaatgaaggcctctctttttaagggtgcctgcaggaaatctctctgtcagtgctagctgggaatattcatgtcattgttgggtaggactgactgccttttttttcttctttttccaagcatgactcagtgttttaatttttttttttactttcaattatcatagtcagactgtttcccaggtatagttatgctatcaatttaaacca

SEQ ID NO: 838481 - DNA, 603 bp, Homo sapiens
ctgaagttaaagcctgatgtacatgccacatgagaggtaagtttctaaagctcatacctcaaaaatcgcctttgtgatgttgtgcatcaagtcaatctgtaagacagtagttacaatattagtgaagacagtgggttaaaacatttgttgttcaaacatggagcaaatatcattcatgagttaggtgcctttagttgaactatggtcccattagggttcatacattaaagcaaaaattgaggtggaaagacactctgtgccttacaggataaagaggcttaatgtggcaaccaaaaaaattttagtacataagagaatttaaatgttaactatcacatacaaatcacatgcaaatacagttaccacttattttagttacctattctcaatatacagaaaaatgccacaaatctaggaggccattcgtttcaaatgaccggaatccttagacctcacaccaacaagccaccatgtgctggggatggtatcgcctgactaaatgtagccttgcagtccattcttgtaagtattagagagaaaaagagagagagcgtcrtctctggaaagtgtgaagtcagggaattccctactaggaagcatttc

SEQ ID NO: 838482 - DNA, 613 bp, Homo sapiens
atattactgcaatccacctgtggaccatttcacagcaaaagatcctaaaaggagcatctatgttctacctacttgacattctagaaacttagaaaggggagaggggcaggaaaataaaagaactacatttctgacagcaatgaaatagtttattttcttcaaatattttaaggtacgaacgtcagaaagaaaaatgcggcatttaaccctggaacctcaaatatcactgattatattcaaaggagcagaggcactgttttccatctgattcctcagttcctcacacacacaaccatccccctcaccccatgatctgaacagcggaatgaggaactcaccctaaaattagtgctgaaaatatgagggtaacatcgagccaccaaaagaatgcacttaacacatttgcaaagcaattctggtgtatccacattttcaagaattgactgcaggctggtcattacaagcttaaaaataaaagttacaaaccgtgaacattcaacaaaatagggagaaaacaagcaaattaggttcattatttacgaagtgcctacataaaaamctgagtatgagaccaagaaaaatagattctgtagttttagttaaaaaaaaaaaa

SEQ ID NO: 838483 - DNA, 601 bp, Homo sapiens
ggagagtaaaggcatgttgtaaccaggatgagcttaaggggcagaagaggccctactgcatcttacctaagctgaaaattcatgcagactctattttatcattaactacaatgccttagtctgaatgagaggaggagagagaatacagagaggagatttagggacccaaagactagtttttacttcttcacaaatctgaaaactccttaacgtattttcagttttaatatgttcatgtgttcattcatctattcaacaaagactttttgattgcttgttctgtgccaagacaatatgctctacccaggttatattcattttttactgaaaaaaaaaatgcattgcacccctactagtgccaggccctgttccaagccctcatgatagagaagcaaaaatattaagttcctactttcactgagcttacattatatgaagaggaaaataatagtaagcaagaaaccaggttgggcgtggtggttcacacctgtaatcctaccactttgggaggccaaggcaggaggakacccttgagcccaggaattcgagaccagcctgggcaacatagggagactctgtctcagaaaaaataaataaatta

SEQ ID NO: 838484 - DNA, 437 bp, Homo sapiens
actctgcactgatcacccaggtgatgggactcttgtctgggctctgcctagaggggtattgtgacatatctctgcagtgatcacgcaggtgatgtaactcttttctatatctgcctactggtggcattgtgacatatttctgcactgatcacgcaggtgatggactcttgtcttggatctgcctatgggggcatagtgacatatctctgcactgatcactcatgtgatgtaacgcttgtctaagctgtgcctaaaggggaattgtgtcagatatctccgctgatcaccaaggtgatgtaacaattttctgggawttgtctacagggggctttgtgacatatctttacactgatcagccaggagatgtaacacttgtctaggctccgcttaaaggggctttgtcacatatctctgcattgatcacccaggtgatgtaa

SEQ ID NO: 838485 - DNA, 497 bp, Homo sapiens
atcaaatggaatcgaatggaatcatcatcaaatggaatctaatggaatcattgaacggaattgaatggaatcgtcatcgaatgaattgagtgcaatcatcgaatggtctcgaaaggaataatcttcaaatggaaaggaatggaatcatctcatagaatcgaatggaattatcaacgaatggactcgaatggaatcaacatcaaacggaattatcgaatggaatcgaagagaatcatcgaatggccacgaatggaatcatctaatggaatggaatggaataatccatggacccgaatgcaatcatcatcgaatagaatcgaatgsaatcatcgaatggactcgaatggaataatcattgaacggaatcgaatggaatcttcgtcgaatggaaacgcatggaatcatcaacgaatggaaatgaaaggagtcatcatctaatggaatcgcacggaatcatcatcaaatggaatcgaatggaatcatcatcgaatggaatc

SEQ ID NO: 838486 - DNA, 497 bp, Homo sapiens
atcaaatggaatcgaatggaatcatcatcaaatggaatctaatggaatcattgaacggaattgaatggaatcgtcatcgaatgaattgagtgcaatcatcgaatggtctcgaaaggaataatcttcaaatggaaaggaatggaatcatctcatagaatcgaatggaattatcaacgaatggactcgaatggaatcaacatcaaacggaattatcgaatggaatcgaagagaatcatcgaatggccacgaatggaatcatctaatggaatggaatggaataatccatggacccgaatgcaatcatcatcgaatagaatcgaatgcaatcatcgaatggacwcgaatggaataatcattgaacggaatcgaatggaatcttcgtcgaatggaaacgcatggaatcatcaacgaatggaaatgaaaggagtcatcatctaatggaatcgcacggaatcatcatcaaatggaatcgaatggaatcatcatcgaatggaatc

SEQ ID NO: 838487 - DNA, 497 bp, Homo sapiens
atcaaatggaatcgaatggaatcatcatcaaatggaatctaatggaatcattgaacggaattgaatggaatcgtcatcgaatgaattgagtgcaatcatcgaatggtctcgaaaggaataatcttcaaatggaaaggaatggaatcatctcatagaatcgaatggaattatcaacgaatggactcgaatggaatcaacatcaaacggaattatcgaatggaatcgaagagaatcatcgaatggccacgaatggaatcatctaatggaatggaatggaataatccatggacccgaatgcaatcatcatcgaatagaatcgaatgcaatcatcgaatggactcgaatggaataatcattgaacggaatcgaatggaatcwtcgtcgaatggaaacgcatggaatcatcaacgaatggaaatgaaaggagtcatcatctaatggaatcgcacggaatcatcatcaaatggaatcgaatggaatcatcatcgaatggaatc

SEQ ID NO: 838488 - DNA, 497 bp, Homo sapiens
atcaaatggaatcgaatggaatcatcatcaaatggaatctaatggaatcattgaacggaattgaatggaatcgtcatcgaatgaattgagtgcaatcatcgaatggtctcgaaaggaataatcttcaaatggaaaggaatggaatcatctcatagaatcgaatggaattatcaacgaatggactcgaatggaatcaacatcaaacggaattatcgaatggaatcgaagagaatcatcgaatggccacgaatggaatcatctaatggaatggaatggaataatccatggacccgaatgcaatcatcatcgaatagaatcgaatgcaatcatcgaatggactcgaatggaataatcattgaacggaatcgaatggaatcttcgtcgaatggaaacgcatggaatcatcawcgaatggaaatgaaaggagtcatcatctaatggaatcgcacggaatcatcatcaaatggaatcgaatggaatcatcatcgaatggaatc

SEQ ID NO: 838489 - DNA, 633 bp, Homo sapiens
taatgaaatagaatggaataatccatggactcgaatgcaatcatcatcaaatggaatcgaatggaatcgtcgaatggactcgagtggaatwaacattcaacggaatcgaatggaatcgtcaccggatggaaacgaatggaatcatcatcgaatggaatcgaatggaatcatcaaatggaatcagatggaatcatcatcaaatggaatcaaatagaattatggaatgaaatccaatgtgatcatcatcgaatggactcaaacggaatcatcatccaatggaaactaatggaatcaacatcgaatggaatcgaatggaaacgccatcgaattgaaacgaatggaattatcatgaaattgaaatggatggactcatcatcgaatggattcgaatggaatcaccgaatgaaattgatagaaatcatcatcaaatggaatcgaatggaatcattgaatggaatcgaatggaatcatcatcagatggaaatgaatggaatcatcattgaatggaatcgaatggattctttgaatggaatctgatggaatcatcgaatggtcttgaatggaatcattgaatggactcgaatggaatctttattgaatggaattgaatggaatcatcgaatggtcacgaat

SEQ ID NO: 838490 - DNA, 354 bp, Homo sapiens
gaataatccatggactcgaatgcaatcatcawcaaatggaatcgaatggaatcgtcgaatggactcgagtggaataaacattcaacggaatcgaatggaatcgtcaccggatggaaacgaatggaatcatcatcgaatggaatcgaatggaatcatcaaatggaatcagatggaatcatcatcaaatggaatcaaatagaattatggaatgaaatccaatgtgatcatcatcgaatggactccaacggaatcatcatccaatggaaactaatggaatcaacatcgaatggaatcgaatggaaacgccatcgaattgaaacgaatggaattatcatgaaattgaaatggatggac

SEQ ID NO: 838491 - DNA, 671 bp, Homo sapiens
atggaatcatcaaatggaatcagatggaatcatcatcaaatggaatcaaatagaattatggaatgaaatccaatgtgatcatcatcgaatggactcmaacggaatcatcatccaatggaaactaatggaatcaacatcgaatggaatcgaatggaaacgccatcgaattgaaacgaatggaattatcatgaaattgaaatggatggactcatcatcgaatggattcgaatggaatcaccgaatgaaattgatagaaatcatcatcaaatggaatcgaatggaatcattgaatggaatcgaatggaatcatcatcagatggaaatgaatggaatcatcattgaatggaatcgaatggattctttgaatggaatctgatggaatcatcgaatggtcttgaatggaatcattgaatggactcgaatggaatctttattgaatggaattgaatggaatcatcgaatggtcacgaatggaatcattatcaaatggaatcgaatggaatcaccgaatagaatcgaatggaacaatcatcgaatggactcaaatggaattatcctcaaatggaatcaaatggaattatcgaatgcaatcgaatggaattatcgaatgcaatcgaatagaatcatcgaatggactcgaatggtatcatcgaatggaacggaatggaata

SEQ ID NO: 838492 - DNA, 635 bp, Homo sapiens
ggtacatattattttcctggtcactatcatgcctttaagagtttatttcatatggctccaccttcattcccctattaccgcctscccaccaaaatctgcagaagcacggcatgaaaagcaccagtctccatgcccttcatggtctctaactttgagaaatttgttgaaaggcagtccagaagtggcagtataagcattaagtgctgactggatactgaggactctgcaaggcacaaggaaggtagaaaagcataaaatgtttcatgtcttcaagactctcaccatgctctgagggaaatgaggattacagaggaaacaacccgaggataacctgatactgagctttgtaacctcaagttcgttcaaagttgagccctaagtaataagcaaaacagactaagtgccagccatggtagaaagacgccttacctgtgtcagtctcaatcctcacacaatcctgtaaacaaagttttattacccccattttagagtcgaggaagctatagatcaggaagttaaataatttgctcaagtctcccagctagaaagagccagagctgagatttgaatacagaactacctgtgaccccaaaatatttccactagactgcagccactgtgcttacagttgcgta

SEQ ID NO: 838493 - DNA, 603 bp, Homo sapiens
agagaaaatcccaggaccatgtggcttctctgaataattgtatcaaatacttaatgaataatgattaccaatcctcctcaaattctgccaaaaaaattaagagagaacaattccaaactcattctatgaggctagcattatcctaataccaaaaccagaaaaagacacacaaaaaaaactgtagaccaatatgtctgatgaatactgatgcaaaaaccctaaacaaaataatagcaaaccaaattcaagcacacgttgatcacaccatgatcaagagggatttataaatgaaatgaaagaatagttcaaaatataaaaattaaccaatgtaataaccaaattaagaaaatggacaaaaaccaaatgatcatctcaatcaatgcagaaaagacatttgataaaattcaacatgctttcatgataaatacactcaacaaactaggaatagaaggaaactacctcaacataataaaagccatatatgaaatgcccacagctaacatcatattcratgagaaaagactaaaagcttttactctaagatcaggaacaaggcaaagatgcccactcttgccacgactattcgatacattgctacaagtt

SEQ ID NO: 838494 - DNA, 559 bp, Homo sapiens
gtggccagatctgacttttytaaagaagttggaaatctggacttatttgtgatattacttaacagctaaatccatgtaattgtttaataaagccatgtacaggccgatattatagaggttaagtcaaacacatctgcaggccagatgagacttatggtccaacagtttgccagctctgatctagatgatacgtgtttctggtgaaaaggtctctatgttctctcctctggatgcttactttaaaaactaatgagactttatattttagctatttttcagtaaacttggcggagagttaacatcagacaaaataacttggcagagaaaacatgggatatgaagtcagaagacaaatcaagtccctccttcaccctttagagttgtatggccttaggcaagtggcttaacttcgtagaacctgaagttgttatcagtatgaaatacggatgattccaacccttctagcttgtaaggtgattatgttatttgaataaaattgtgtaaatggaagcactttgtaaactctaaagcaccaaatagctctcaggaatgatgattg

SEQ ID NO: 838495 - DNA, 526 bp, Homo sapiens
tatggaaaatccctgtatttgttcctcttgttatccatttttcagttccctttctaatgagtttgttctccttataattttcttgtatctctgacccttcaatttgacttcattttgtgttcaagccaggaaaacctaccaatttgaacttgaaagagacagaactcacttagcacaattttcattctttacgttgtcgttgtaccacgttaaaatgttttcccttcaaataattatatggcatagcactttgaaatatgaccatttgcggaaacccaatttcagaaaatcaaacacagctcacgaaggtgctgactggataacaaattcaatccaggatcatagatgcctctaaagagatagttgccagatgttcttttggatatgggagaagataaagaattaggaaagaagaggcaaaggagagaacaatcatgaattaagcagggactttttaggggaaaarctagaaggggaatttttaattccaaataatttcctatctgtcaaactggccaactgatat

SEQ ID NO: 838496 - DNA, 568 bp, Homo sapiens
tctgttcagaaatcctctgtgatttcctattgccttcaggacagtctaaattcttggaccaagtccttccattgtctagccttgctctacctgtmtagaattctcttcactcaactcaagctatggtgatgttcctcaggcttttaccttgtatcctttgctagcctttgcatccttactgttacctctatactaaaaaattcagtctgcacaaatgatatcttttccctaaaaccatctttgattctttagttttgagcaatttctttattctttgaatttcataaagtgtaatgtgtttcataacacatatacatttgtaatctctaaaatatataattttttacctctagttctgttactgattcaggcaaattttcgttcttttttttttttttgagacagagtctcactctgtcacccaggctgcacgatttttgctcactgcaacctccatctcccgggttcaagtgattctcctgcctcaacctccctattagctgggattacaggtgcctgccaccacgcccagataatttttgtatttttagtagagacaaggtttcac

SEQ ID NO: 838497 - DNA, 513 bp, Homo sapiens; identical to SEQ ID NO: 833607

SEQ ID NO: 838498 - DNA, 635 bp, Homo sapiens
aggaggattatttcaccaatgaggcaaatccaggagtcattaaaattgggctatccacttgaactcatggacgatcctaaagagctcaacctccactaggcttccccrtagagtaattggaatataaacaatctctgaactcattcatccattcaacaagtattaagagttctctctatgtgacgagcattgggctgggcttggggaaacaagagtcagcacaaatagtcatggtccttaaagtggactcctgttgtttgcctgtccagcatctcttctgctaacagaaccactcttttctcttgagaaaatattcttcctattttcagactgtgtgttttagcttgggctagtttccaattcttggctttgagtttgggcacttggccaggcacgaccaatcattgtgttgtgtcctctctatccacagtgattggtttaggaatggtcatgtggctccagttgggtaaatgattatcagcaatgagtttttgactggaattagagtcatacatcacttctcaatggggctcattgagaatacactctgagaaatgtgtccttaggagatttcatcattgtgtgaacgtcatacagtgtactcacacaaacctagatgggatagcctactacac

SEQ ID NO: 838499 - DNA, 614 bp, Homo sapiens
ttgcctttagggcagtgcattctccctggtcccagctaggtccagagatgctgtccaggagccaggacttggagtcaaaaatctcaggaatatacctggtgccttattctactgtggctgagttggcacccaagccacacgacagagtccttctgacttttctttcccctttccataagcaaagcagcatctccccaaggccaccactgccttaggcctatggtgagtactgcctaaccaccaccagtgttcactcaaggcccacgtgttctttagtcagcttttggtgattgcctccaggcctaggaccctcccttaaggaaagtggggttccctctggcctaggactgttctggaaatgctgtccaagaaccaaggcctggaatcagggactgcaagagcctgcttggtcctctaccctactgtggctgagctggtacctaaggtggaagacaaagtcccctttactcttctctctccttttcccaaacagaaggagtctctccstgtagccaccaaagctgggaatgtgctggatctcacctgaagctagtacatctctgagtcctactcaaggcccacagaaagtactgcctgggtgtcattgctgatta

SEQ ID NO: 838500 - DNA, 597 bp, Homo sapiens
aggtgtcttgaagaggcaacaaaaagaggaaccaggaatactactacatataatagagataattttttctataatcttttttggatagatttttctcttatgtccyttgaattaaaacaatcaattccctaaatttttcatctttgtgtttccaaaagcacctctagcctttttttccattattgacctccattttcttatgtaagcagaagtcttcacactgcaattctacccagtattctggtcagtatattagaagcccaggaacctggcagtgatggcaaagaactctcctttagagggtggagagagggtcaaaaatcatgaacacatatcttcaatatttttgcttctatagcatcaaagtaatatcacattatcaaaaagacaaagagttcttgtttgaggaccaatttatcccaagtcagggctgatccctattcagtcctctgaagagtaacaagtatgaaaataaatggtatactagaagacagtttcaggtctaggtacacagtgactcaatgaacatgctcctctttccgtctggaacactattttcccatgtttgttgacttagcaaactccaaaacatgcttg

SEQ ID NO: 838501 - DNA, 640 bp, Homo sapiens
cattcagtatgcctgtgtgtctgtatgtgtgtctgtgcatggttatatgtgtgtattgcagaataatgagcctggtgtgatgtttataatctaaaattgaattattaaaatattaaacrtaatatcaaacacattacatgtagagtactaacatttttctctatggtaataaaagatgaaggtacacacacacacacatatatatatacacatgcacacacacacacaaatttaaagagtgtgttacagacatttccttcttttagttagagatgtaaacctacaggcaatggccaaaaaggaaatagaaaaatgttaactaaaaatcttaatcatctataagtggattgataactcctgagtaaaaagagacaacttatacttaattattagaattatgcagtcttccaaattaaagaataatttctgtttgggaaaatagttacttctctataaaaaaaatagcgtgttcatacagcatccataataaaatgactattctgttaaaacaaaaggggagtttcatgtggtggaaatattttttctctgagttttaatgaaattttcaaaattgaattttggatattaaataatgagctgtagtacatcatagtatacaatgattctcaaatattaacgt

SEQ ID NO: 838502 - DNA, 682 bp, Homo sapiens
gcgatcttgtgagctctgggttttatagcaatgaatgaaacagacaaatttctgactttattgagcttatatgttaatagctaagtggggattcaggagacaaggaataatttttttaagtaatttgttggagggtaagaagtgctaaaaagagaaatgaagtactacagagagaaaaggatggggaatcctattataaggattaagatactcagaacactattttagaagagtgacctcttgaagactgagggattgagttacactactatctgagggaaaggacactccaacaaataattcaaataattcaaaaacatggttgcctttgccataaaaccctaaaccctaaagctgcaacatgtctacatcagagaaaaaaatgatatctttctactgagtgtaatttatactctgagataaatatgcttattttgagaaataagcaggcatgggaatgtttaaggaacagtgttgagaccagggtagctgagtagagtatgaacatatatttagcaagagtggtgggaaaggtcagaaagatagtcctatgatagaggrgtaatcacattaagcaaggctctgtttattcagaacttctcttgctagttctcttcctctgaaaggagcatttatatttgaacttttgttttttactatgaatttcacatgcttatttagg

SEQ ID NO: 838503 - DNA, 620 bp, Homo sapiens
gctgcacccagtaactcatcatttagcattaggtgttaatagaaccttgtgagtgcatagacgaactatcyaaggaaggaaatttattgttagccattttgactcttaccactaatcaacaagtaactatcattcttaaatatatacaaaaagaactcttcccaagagttgtatattttctctgatttattgtatatgacttattgttagtctccctcctagaaaggagtgggtaagtcattgaggtaattaaggtaattctcttgaaaatatatttctaacacagctatcaaaaacagtgaacaacaaagtgaaaaataataatatggctgaaattctaatgatcagttcgctcttcaagatgctgttgaagggttatttgtaattactatttatggcaaatgaaatggattttatcttgtttggtgcatttatctggaaagataacagttggtgtttattcaaatcacttctcacaacagataaaaccaaatagagtttcctaaaacatcctgaaattttatccaaagtcttgctgctctttaccaataatttggcatataaggttccaaggttaatatgaggacagtttctctcatcctccagttcttttttatatt

SEQ ID NO: 838504 - DNA, 643 bp, Homo sapiens
gtggatttttggagtataaattccattcatccataaactttgttatataatttttatcaagatgtaattccatccaatagtacaaaatatggccagagctgataaaagtgggtcttagacaaacctagaccaayaatgcaatatgtgacacttttgagacctttttactgcttctgaaaaacaatattgttgattaaattggattacatactcactgttttcttcctttctgtgattatcaatattaatgtttttaagtctaaaactaatgttaccgggaacaggtttttgttttagctacttctttattgtagcacattggtagaggagagagaatcatgttttatgtttttaacccttctcagtcaactgttttgaactataggagcagcagcaaaaaactgggaaatttgtggttcatattactcataattctacatgaaaatgcaaaaacatatcttcttacatgacttcaaatagcgatttaataattgagcagaaaccagtaaaacaatgaccacttgcttaattattatttctcaggatctggtcaggcatgatacatctctatacattacttgaggaacaaaatatttagttcgattacatgtgagctaaatatttgtatttaactgaagaatta

SEQ ID NO: 838505 - DNA, 622 bp, Homo sapiens
gcctcacccatgctgggcttcctttggtgatcttgcatgcctgctccagtcccattaggtcggtttcttcaggtcgcatgagccaaaaaccgttgaattttttcctctacaaccctattttacagcttcccctgagtactcaaggttttctctaggacttctcagatacgttctttttttaaggcttaaagactaataaaaaataaagaactactaaatcaggagtacaaaaataatgctttatgttaagtgttttgacagatgaacattttaacacaaaattttacaatggacccttttcttctcctagacctatctgcctctccctgtggcaatgggtgcaatctcttttagaagattaaggctgaagtctaaaaacacaatcctttgtgaaagttgaggctgggttcacaaggtcccaatcccattccccttcctcctcctccagggcataaagagacactgccctttatgcattccctacttcttttcatctcctaatagttctcawcttttctacctttggacatctgggcatcaactaatgctgtctccaatgtacttacggttcagccaggagcacagagagcctgagctattccgactgtcttcttgagaatag

SEQ ID NO: 838506 - DNA, 508 bp, Homo sapiens
ggatgtagtggaaaccctggaaggcttgcctcctatgtccccttccctcatttctcctcccctccccttccttcttcctttcttccctccaccgttgcctgcattcactataaaaagtaaataggaagtgagcacataattacatgttgctcctttagattctgaattagtgggatattttttgggatctctcaaaccacaacatgaaacagtttttcaccactcccacctctaatattccgtctttttatgttttgtgaattggcgagtgtttctaattgaacaagcaaaacttaagtatacaagaaatgtacatttatttaatcttttaaaaatctttttcttgatgccttgcataaaaaacaaaaaggtgctttttctttctgccccatcagaactgtggttatttttgggtgtgtgatatcctttcacacaccatraatctccactagatgtcagtgtgtcactaaatgaaaacagtttagcatgctctccagacttgttcttg

SEQ ID NO: 838507 - DNA, 419 bp, Homo sapiens
gcaggagtggtggtgtgtgcctgtagtccagctaactcaggaggctgaagcaggaggatcacttgagcacagcagttagaggctgcagtgagctgtgttcaggccactgcactccagcttgggtgacagagcgagacctgtctcaaaaaaaaaaaaaaaagatgataagggaggcttctgagtaaagaacagctctactccacctgccgtggagctgagagaccgccatgtgtgcctgcccacactcctacccaggacagcctaaaccatccacacagggaggcrggatcagaatgtggctgtaacttggggcaccgacgccgcctgggtgtcctggacacagcctggagaaagtctagagacagggctgtcacatctagaacaatggtttctgatgagcttgggagcaccctgtccaa

SEQ ID NO: 838508 - DNA, 655 bp, Homo sapiens
gatagggttttaatattaattttattatttactgaattttaaactattctacagtttattttttgtttttatgagataaaatttacatataataaaatatgcatagatctgaaatgtatcactagagagtttctggcaaatgtgaatacccttgttctcaatacctaaggtagctgaagagcaagtccatccccacatcgcgggttttccctgttcttgcggtcaactcctgcaaggggaaacgttttgatttctgacactacagatccatttattttctgttttgaactttatataaatggaatcaaacattacagaccttttttttcaaaaggggctttgatatttttgagattaattcatactatttaatgtataaaattagatcaacatattgtcatttattcgattcgtagactgactctgatatgaaacctcaaagttttcatgtacttatggagagagagagaaggagaaagattttatatctgagtcagtccattaagtaaataaatgagaatattttgatttattttccygttgatgtactttaaatttgtttccattttatgaatattataggcaaagctgtttcaaatatattagtgtaggttttcctatattgtttcatttttgttaagaaaatatgaagtat

SEQ ID NO: 838509 - DNA, 664 bp, Homo sapiens
tgctacagtttaaataattcaaacatatgagtaygtttgcattcatgtttgtcatcatctagtcatatataaaacatggatttcaacatttttaacactgaagaaacaatgaaacctcgggaaagtggtgaatttatgctttccaatcacagaattcaagaatgtgctatttctgcagtagcaaaagatgataaattttccttcagtccattccgggaaacaaggaagcaaatttctctgtcccaatataaatgttgtcttttatttaatagggttaaattcacaactgatagctctataaaatgtacttcattctagaaatgttacctataacttacattttacttatagcagatgagcagaaatgcttcaatcatggcattgtgacctaaataacatacaggtgagcatgcttgtctgaaaaggattccagcagggttgcctttgcatagtgctcctttgaaaaaaaatatgtgaagccctttgtttaaacaatatcaataatcatatttacttttaagatggcacaatctgaataggattaaaagaaatactagcttctgcagataatttatatgtatgtcttttccctctgttcttaaaatatgaacatatttacacataatatcaccaccatctccttccttccccaaaaaataataaa

SEQ ID NO: 838510 - DNA, 614 bp, Homo sapiens
aggtccacccccatgattcaatcacccccaccaggctcctcctctaacacgtggagattacaatttgacatgagatttcagtggggacacagatccaaacataccaagccatttaaacatagttaagatattatatttctgacccaaagatcttatagtttctgaaaggatgaaacataagcatataactcttctcccagagagatttttaaaaaacttttgtacagacattgcatgagtttttgttaaatgccttgacagggagtgctatggaagctcaggccaggaggtctgtactctgtggataagttgccaagaaggtttcttggaaaagatggggcttgagataggccttggcggccccattcagtttgccttggtggagagaaaacagtgatcctctactgtagtgatgctgcagtgtagggctgtgaatgtaggcatgcttaagccaggtcttgtgagcacattagacagaatatttcagtaggctaataygagagatgatattgaaaagaaataaggggcagagtgcagagggctttaaataccaaacctaagtttttatttgggttaagttacttaatctctgattttctgttttctacttttga

SEQ ID NO: 838511 - DNA, 581 bp, Homo sapiens
ttacagataagagctaatgtagtgacccaaatcactagggtagtaagtggtagaacctaagtattttcaatctggacctttaaaataattttcctgacagcaatttagacagtattttggtataatttgtataatacttagtagtgagaaattctgtgtggggaatttggacttggtacttgcagcttttcagtgtgaggtgatgagatcttaaaagcaattagaagaaaaggggttagtttgagagaaattgctaaagaaacagcagtaggacttgaatgatgtcatatgggggaaagttataagacatgtataaaatagctctctagcctgatttgggagaatcagcacatcatgaacagaaatagcgaagtcaggagggcaagccaaataggtgaacattcagtttggtttagatatattaaggatgaagagagagtaagacaagttattctcratagagaacagagccgttcaggttatagtttaagggaaattttcttttaacctatatttattgagggtttactatttgcagggtatcatgctaaaacacagatatgtgtaaaggcataatgatt

SEQ ID NO: 838512 - DNA, 637 bp, Homo sapiens
atgtaccatgctgttttagttactgtagccttattgtatagtttgaggtcaggtaatgtgaggcctctggctttgttctttttgcttagcaytgctttgactatttgagcctttttttgtttctatatgaattttaaaatagttttttcaaattctgtgaaaaatgacattggtagcttgagaggactcgcaatgtgtctgtaaattgctttggacagtatggccattttaacaatattaattcttccaatccatgagcatgaaatttttttcagtttatttgtgtcatctataatttctttcagcagtatttgattgttgtccttgtagagctctttcacctctttggttacatgtattcctaggtattttatgtatatttatttaagctattttaaatgggattgtgttcttgatttggctcgcagcttaaacattattgatatatagaaatgctactaatttttatacattgattttgtatcctgaaacttcattgaaatcatttgtcagtaccagcagctttttgacagagtctttagggtttttttagctctagaatcatatcatgagcaaagagagataatttgactccttctcctatttggatatcttatttctttctcttgcctgattt

SEQ ID NO: 838513 - DNA, 604 bp, Homo sapiens
tgtgggaccgcaactgaggtggaggctggctttattgagctacataaaggcctttaaaattcatatactggccgggcacagtggctcacacctgtgatgctagcactttggaggcccaggtgggcagattgcttgagcccaagagttcgagaccagtgtgggcaacatggtgaaaacccatctctacaaaaaaaaaaaaaaaaattagatactgagaagaagagggtaaagaggggaagaaaagtgggcttggtgtgtgggaaagggagttgaggctctagaaagcaggaaccgtagggcaagggaaacctgtagataaatgatccatcaaaaaagaattggcctggcaaagtgactcacgcctataaactggtactatgggaggcccacgaggaggattgtttgaggccaggagttcaagaccagcctggccaacataacaagaccctgtctctactaaaaaaaaaaaaaaaaaaaaaaaaagacagagactatttggaggtggagtttggggagaagaaggttcagcaagagtcactaagagcagctgcctttgcaaaatcaggcaagyatgagcgggaagacatggcgtcatggacactgc

SEQ ID NO: 838514 - DNA, 600 bp, Homo sapiens; identical to SEQ ID NO: 836381

SEQ ID NO: 838515 - DNA, 512 bp, Homo sapiens
agacaacatgctttaatcctcagtggatgttggggtgtcaaatycatattatcttacttgtgttttagttcagacttgaggaaatgctcttagggcgggttaaacaaaaatccctctgacttcataggcgactcacttgcttcgtggagctttgcaatttggacattgcccatctctctgcaagcattaacagcaggcaagagccctgtgaactcgatgtgtctacaagcctcgaggagatttaatgagccagtcaattcaaggcccctttgccagcctggccttatatgtctgcccattttaaattcagccttcttctcctttctcaacacttcagatccttttattttaattttcccttaatacatataaaacaatgcaaagaaattcctggaaaccatgtgcctctcctccaaccagacttggagagagtgagtcactcagcctcgttccttgcctgcctgccggcaagacacactgctcaggcagggcttttgtttcctctggttatg

SEQ ID NO: 838516 - DNA, 432 bp, Homo sapiens
ttataaatatgaagatatgatatacacttataaatatgaaatgtccccttatcattgtattggggtctatgtttatatcctcttgctgacttgaaccttttaacgttatataatgagctgcaaatatatgttgtaaatatgtgtgcacccacactggagcacccagatatacaaagcaaatattaaagctaaagagagacatagaccccaatacaatgataccaggacacttcaacaccctactttcagcattggacacatcaaccagacagaaaattgacaaagaaacattggacttaacctgcgctacagaccaaatgaacctaatagatatttacagaacattttatgcaatagctgcagaatatgcaytcttctcttcagcccatggatcattctcaagcatagaccttatgataggccacaaaagaa

SEQ ID NO: 838517 - DNA, 566 bp, Homo sapiens
catcttaaagaactatgaaagccagagtaaaccaaacccaaaatcagtagaagaaaagaaataataaagatcagagcagaaataaatgaaatttaaacaaagaaaacaatacaaaaatcaatgaaatgaaaagttgggtttttgaaaagataaacaaaatagacaaagctttagccatactaagaaagaaagagagaatacccaaataaataatactgaagatgaaaaaggatacattataactgatactgtagaacttcaaaagattatcagaggctattaggaacaactataagccagtacattggaaaatctagaagaaatggataaattcctagacataaaaaacctaccaagattgaacaatgaagaaatccaaaacctgcacagaccaataaaaagtaatgagatcaaaactgaaacaagaaaaatctccagtaaagaaaagcccaggacctgatggcttcactgctgagttgtaccaaatatttaaagaacaactaatrtcaatcctactgaaactactccaaaaaataggagagaagggaaaacttcctaactcattc

SEQ ID NO: 838518 - DNA, 309 bp, Homo sapiens
aaaataacttgtccttgagaccatcatcctagtctaggctctgtctctgtaatacagtgtatggataccgtctgggtgataaaaattaaagggtggcaggggattttagtaagagtccaaaacttaattkatatatatagcagtggttcccaaagcaggctgtttcccagaattacctaacgatcttttcaaaaagatatttcctagcatctattgaattagaatttctaggattggatcccaaaaacctgattttaaagctgttaggtgattttaagatgcaaccagttttgagagcccattgatatg

SEQ ID NO: 838519 - DNA, 619 bp, Homo sapiens
ctcttaatgactttcctagctgtgatagttgtgggattgagtattaggctgtatccttaatgctaagctgttcatttatatatgtaaaggtaaatattttttctagcaccctttttcctttagagtgcaggaagtaaatcagagtgaatttcaggattactttacctgattaaaaaaaatcgtttgaagttggcttcttttataaaatttgagtatattctaaatatgttttggattgaaattcaatgctttatacagttggtttagaattttccccattctgttaaaagtccacttgacaaagaaacagaagaattagtctactactggtcagagtcaaagtggctcctgagtctggttgcagcaggaatgaataataggagaaagcatgctagccatatccctggcatccctcttcttacccatatcaatgcaaaacatggccctccagaagaaggctcatttgtaaattctctaaaaactgcatctgctratgaaaagtgatggatggggactgattgagcccagactatacctctagaggattccatcttgagacatatgttcggatttactccataaactcaccagagggggcacaagcttagggaaagcttta

SEQ ID NO: 838520 - DNA, 623 bp, Homo sapiens
cattttttttagactcgtcagttctatttttagcaatttcaagtgggaaatatttagaattatagcacagctcctattaaagagaggtataaaagtatgaaaattatccagaatttaaaaaaaaaaagggttgtgacatagtacattttatatcatcaagccactactattagaagaatatggtattggaacaggaagagacaaaatggaaaaacaaagtagtactcagaaatagatccagccaaagggaatgtactaaatatgacattttaattcattcattaaaaaactgaatatataatgattatcttttcataaagttagactttcctaacttaaactaaaaaaattctagatagattacagattcaactatacaaaaatgaaaccaaataagtgatgaatctatagcagtttgagttatggggcattcttaacccaaacactaattccagatgactttaaggagaaaaatgggcctggggcagttgctcacacctgtaatgccagcactttgggaggtcaaggctggcagatcacttgaggccaggagttcaagaccagcctggccaaagtggcaaaaccacatctytactaaaaatacaaaaattagccaggcgtgt

SEQ ID NO: 838521 - DNA, 636 bp, Homo sapiens
atttgggaatgtcttaatttttccgttttttgaaggatactttttctagatataaatttcttggttgacttttggcagggcgcggtggctgatgcctgtaatcctagcactttgggaggccgaggcgggcggatcacgaggtcaggatatcgagaccctcctggccaacacggtgaaaccccgtctctactaaaaatacaaaaagttagctgggcgtggtggcgggcgcctgtagtcccagctactccggaggctgaggcaggagaatggcgtgaacctgggaggcggagcttgcagtgagccgagatctcaccactgcactccagcctgggtgacagagcaagactccatctcaataaatagataaataaataaattttttggttgacttttaaaaaattgttagcactttgagtatatcatcccactgtcttctggcctccatggtttctgatgagagaatagctgttaatcatattgaagaccctttttatataagtagcttgtctcaccaatttcaagtatttcaaaggtttgattatatgtttacgtayagatctctttgaatttaccttacatggagttttctaagattcttagatgtgtagattaaatcaaatttgaaaagtttttttc

SEQ ID NO: 838522 - DNA, 636 bp, Homo sapiens
atttgggaatgtcttaatttttccgttttttgaaggatactttttctagatataaatttcttggttgacttttggcagggcgcggtggctgatgcctgtaatcctagcactttgggaggccgaggcgggcggatcacgaggtcaggatatcgagaccctcctggccaacacggtgaaaccccgtctctactaaaaatacaaaaagttagctgggcgtggtggcgggcgcctgtagtcccagctactccggaggctgaggcaggagaatggcgtgaacctgggaggcggagcttgcagtgagccgagatctcaccactgcactccagcctgggtgacagagcaagactccatctcaataaatagataaataaataaattttttggttgacttttaaaaaattgttagcactttgagtatatcatcccactgtcttctggcctccatggtttctgatgagagaatagctgttaatcatattgaagaccctttttatataagtagcttgtctcaccaatttcaagtatttcaaaggtttgattatatgtttacgtacagatctctttgaatttaycttacatggagttttctaagattcttagatgtgtagattaaatcaaatttgaaaagtttttttc

SEQ ID NO: 838523 - DNA, 653 bp, Homo sapiens
ctaatacctgggtactatgaaacaataagtacaacaaaccccagtgacacttgtttacctatgtaacaaaccttcacatgtatccccaacccaaaataaaagtttaaaaaaaaagaaayattaaaaataaataaatttgaaaaaaatactaacataatcttaatataccttagaaatccaacattttggttttatgcatcatgttttagacaattttttcacaattaaaagcagcccaagataatcatcagactcagtttttgatacattgcttgcacaatttggtatgttcatgagctgtattttagcaacaaacaaatcaatttcacatttggaagctttcacatttgagttaactgaactctgtagcctcattaatccttaatcttaagaaacaaacaaaacaaaacataaaatggtaaacaaccttcaacttaccatgtacatgtgttgcactatttgagaggaaaactctagtatacttagcttttcatttggggctcaatgtgccccattctacttttctattcttccacaacatgaactttcataggcattactaagaaaaagttaaaccacatgatttgctaatttaaacatatttaaacatttaataattaaattaccatatacatagcttaatatattttgta

SEQ ID NO: 838524 - DNA, 513 bp, Homo sapiens
cttcttcagtataaacagttcatttccttttccaatagtttattgacagataaggagagggcttgagaaatgtctactgaattasaatataatatacacagtaattaggctataatatatacaattaaactagccaggcagtcagactgcttgcttttcccatagtgcccttctaagggaatgtcttcatcataaatggccgtgttgataccatgcagtcctgcttcctggggccaaacctaattggactatggatggacacctgtctcaatgtggattaatgcatagattgaccacagcctgtgaaacggcttagtgaaaattctgccttgaaacagttctagggagtgagtcctccagttggtagctggagcagtagctggaagaaatagacacaaggaaggttaagatgaggaggaggtacaagcagaggagtcagaagcagcaggaaggaacagtaaagtgaagctaagtcaccaggatgtgagttctaaaggaagaatcaatagatcc

SEQ ID NO: 838525 - DNA, 352 bp, Homo sapiens
ttaggtgcaccaaggaggaacagagkattccagaggcaagaggcagcagggacagcagtcataggacaggtgatacagaggggcactagcataagctgaggcctgtggatgcggagaggcaatactgtgagtctgagttttgcagatacgatggtgctgcccaggctcaggaagctagtgcctgtctaaggaaggacagagcaggctcatgggctggactgcctggccattgtcaaagctgcccaatgtcacatgtggttgtcccctagttgctatgctatggtagataagacaaaaggatgggggctggtctctgcccctacaaacaagtaccatcagtaatgctagctct

SEQ ID NO: 838526 - DNA, 645 bp, Homo sapiens
ctcaagggagcatgagaagggagggatccggtcccggggggctgagtgtgccccctccctgtctcagatgtccatcccttctttttaaatcaagtcccacattaacaggccttacccggcactgtggagattgcacgtggggccctgggctgtttccctcagctgcatttcttactcttctcctgctcttctctgcaccaaagcaggtgttgttcccctagttcctgtgactgtcagctgctggataagtttgcctgatggcaggtgctggtctgagtttgcctgatggcaggtgctggtctgagtttgcctgatggcaggtgctggtctgagtttgcctgatggcaggtgctggtctgagtttgcctgatgggaggtgctggtctgagttagccagatggcaggtgctggtctgagtttgcctgatgggaggtgctggtctgagtttgcctgatggcaggtgctggtctgagtttgcctgatgggaggtgctggtctgagtttgcctgatggcaggtgctggtctgagtttgcctgatgggaggtgctgctctgagtttgcctgatggsaggtgctggtctgagtttgcctgatgggaggtgctggtctgagtttgcctgatggcaggtgctggtctgagtttg

SEQ ID NO: 838527 - DNA, 517 bp, Homo sapiens
ttaatgtctgttcacgattaaaaaaacctcttaggatactaagaatagaagaaagtttctcaatttgataaagagcatctatgaatacctaaagataacatcatactttaaatatttttaaaatttaagctaaaatcaggaacaagcatggatgtcctttctcaccacttatatgcagcattatcctggatttccaaccactgtaacaaggcaagaaaagaaatttaaaaaattaaaaggcaaaatgattgcaaagaagtatgatttttaattcacaaacgatatgattatgtatatagtaaatctaaaggaatgtacaaaaagccttactatatatggtcacttagaagtagtttactagtcgtatacaaagtcattgtacaaaaatcaattgtatttccgtgtaaaagcaacaattaactggaaaatgaagtaaaagtactactcacaataacatcaaaaacccaaatagacttagtgattaatttaacaaaaygtgcaagacgtctacaccaaa

SEQ ID NO: 838528 - DNA, 554 bp, Homo sapiens
ctgtgagggctgaagagaaagagctctttcatgctgtagcgccagcctctcctgctctgcctggcagggctgctgcaggtccggcaggttccagaaaggaaatgattccctggtgtttccacttygaaaggcatttttgatccatagaaaatttcttttaaagcagtaagcttttaggcctgtcagacccaacccccatttttattgcaaatatattcaagcacctggtttacaattctgaggtgaaattcctggataatatgactcactcacacccataatttttaagaaaaattaatataatgtcataactgaaatataaagaagaatgagacaaagtatttgctgattacttccaacgcaggcacccgcctctgggcaacagaaagaagtgatcaggggctgacacctgccccaagaagctcaggttgggccacccctccaatgcagttgaagtcagaggagtgggattggtgactcagataacatgagctgctgcgggtggtgtgattttccaaaatgatacacaactcttggaattctgaagaaaataa

SEQ ID NO: 838529 - DNA, 554 bp, Homo sapiens
ctgtgagggctgaagagaaagagctctttcatgctgtagcgccagcctctcctgctctgcctggcagggctgctgcaggtccggcaggttccagaaaggaaatgattccctggtgtttccacttcgaaaggcatttttgatccatagaaaatttcttttaaagcagtaagcttttaggcctgtcagacccaacccccatttttattgcaaatatattcaagcacctggtttacaattctgaggtgaaattcctggataatatgactcactcacacccataatttttaagaaaaattaatataatgtcataactgaaatataaagaagaatgagacaaagtatttgctgattacttccaacgcaggcacccgcctctgggcaacagaaagaagtgatcaggggctgacacctgccccaagaagctcaggttgggccacccctccaatgcagttgaagtcagaggagtgggattggtgactcagataacatgagctgctgcgggtggtgtgattttccaaaatgatacacwactcttggaattctgaagaaaataa

SEQ ID NO: 838530 - DNA, 607 bp, Homo sapiens
tataaagatggtgtgaataatatcaacaaaatcttgcatgagcatgctgacagctwacattaaaaaatgttgaaaccaactttttcagtcttgatcacatttgtaccaattggttgctgaagggggtacttattttaacacttcattccctcattctccaagtgcttccttctcaaagttccatagtcctcttccccagaaagaggaggaccattttcctctccagcttccatgtttcaaactccaagcaagctcagaacacccataattaacttactggcccaaatcaactaattattccagaagatttacttttttacaactgaagcaatgaacttggatcttccttgcctgtctcctctactctccttcctgcctcaggtttgctgtcttacacagcgggaaggccttattagctagctggatacctaagggagtttacatttcccttttactcttgttttcaccctagttcttacatagaagtgcctagaacttctcaaagtatttgaaaaatttcaagggcaaacccagaaatttttagaaattcacaatcttacagaaaaaataaatttattttgaaattgtaagtcaagttatgtatgca

SEQ ID NO: 838531 - DNA, 581 bp, Homo sapiens
aatttaaacaaaatatatatacattcaggttataaaaggcgctgttacaaaataataagaaaaacacacataaccaaataaaaatatgggcaaaagacttgaasaggtacttcactaaagacaataaccaaggtggccgaataggaacagcttaagcctgcagctcccagcaagaccgatgcagaaggtggttaatttctgcatttccaactgagatacccagttcatcgcattggcaatggttaggccgtgggtccatcccacagagggtgagcagacgcagggtggggtgtcacttcacttgggaaatgcagcaagctgggtacctccctcctcaagccaaaggaagccatgagggactctgctatcaggctgggttactatgcttttcctatggcttttgcaatctgcagatcagatcctcttgtgtgcctacaccaccaggaccctgggtttcaagcacaaaaccaggtggctgtttgggcagacaccaagctagtggcaggagtatttttttcataccccagtggcacctggaaccccagcaagacagaaccattcacttccctggaaaaagggct

SEQ ID NO: 838532 - DNA, 644 bp, Homo sapiens
taaatgtatgtcctggaatcattttggtagtgtttcagtagtgtcaactgtattttcctacctgttcagattattaccgtgaaccttttcctgcagttcattttatttatttatttttctgaaagtcgcctataaaatacactaaaacttattctgactccctcagcagttctttttaaacacaaattaataaattccaaaaaaattaccacctaaaaaaagaaagaaaatatatacaacatgagagacacagtcactttctacaaaaacaagtattgctgccattaccttaataagtactaactgcagttttaaaccctaagagaaaagacagaagagcagacaatggcaagcctccatttcttgtaacaggaaagcagtcaggatctacctatgttccccaaaagtcatatgtaagaatgctcatggcagtaccagaaacaacccaaatgctctttatacaatgggtaaaaacatggaggtagagttgtacaatgaaatgtgacacagcaatagaacatacacaayaacaagcgtattgttgagtacaaaaaagccagaaacaatgttcagtttccattacacatgaataaaaaaacaggctaaacaaatatatagtgtcggaagtcagagtggtgcttatc

SEQ ID NO: 838533 - DNA, 523 bp, Homo sapiens
ctatgcctatgtcttgaatggtattgcttaggttttcttctagggcttttatggttttaggtcttacagttaggtctttaatccatcttgagttaatttatatataaggtgtaaggaggggatccagtttcagttttctgcatatggctagccagttatcccagcaccatttattgaatagagagtgctttctccattgcttttgtcacttttgtcaaagatcagatggttgtaggtgtcaggcatatttatgagctctctaatctgttccactgggctatgtgtctgttttggtaccagtaccatgctgttttggtttctgtagccttgtagtatagttttaagtcaggtagtgtgatgcctccagctctgctcttttttattgccttggctattcaggttctttttggtcccatatgattttaaaatagtttcttaaaggttaatttcartgtggaatctgaaaccatattagtgaacttttcatactctcttatattaaaattcattaatctaccttcaa

SEQ ID NO: 838534 - DNA, 577 bp, Homo sapiens
tctcattaaaaatagtacttytttataacattaattctggcagcatcttctttgtagtgtcaatataaaataggatgggttgtccatagagtctttgcctgattaaaatagactgtgatccttattttttattaatagaggaaactttacagaaagaagaaaatatattgaaataaaccatgtcaagcacctaaatcaggatgtgtctcatggtagtgaacaataaatgctgtccttcttccttctaccattaaagctaaattcagcaagactaagcctagagctttcagcatggcaagtaagtccctacagatttgatccctgcccacatctgaaatctgcaactctctctgtgaaactttacattgcagcaatataatctgccagtagttcttggataaatggttttatgctgtttctcatttatttgtctttactcatctgattcccctgctgggaatgctcttggctcatctaactccttcccgtcctgcctgactcagagcgggtgtcaccttctctggaaacacctccaatccttctcagcttggatcagctgttccaccttggaactccc

SEQ ID NO: 838535 - DNA, 642 bp, Homo sapiens
attctctttgtgatcaataaaacatcatttgtttctttaattgtacattttattcattcattcattcattcattcatactttcactcattattctaccaaacggatgcacttgaaccctgtctaaagaatttgtgtgaaccatatgtgaaagactctgatatcaacattctctattgactagtatttctccataaacagaataatgagaattagcattcaaaattgtcttaggagccttctagaattctgaagtgccttctgaaataggaaagattaaactatattcaatcaatgtttaatgtgatatatgaaagcacaaagtgcaagatgacatgagggatgcaaggatatctaaagcaataaaatgcagaggaagaagctgggttcacaagagtagagaagtaactgcaagttacaaataaaagtgaggtgagttgtcctggtagtgagttatctggatgctcagagagagctaagctggccagggaacacattatagaggaagtgagacttaagcaaaatcttaaggagtgatagaatttatttaactgaatagggaagagaggaattttagatggasgggttgatgcaaagcacctgtggcatgggaggaatgaacagatgagactgcagtaacaatt

SEQ ID NO: 838536 - DNA, 547 bp, Homo sapiens
cctccctggcctctgagaatggaggagtttattgtaaaccaccaggctgggtgcagcagagtcagaagaatgactcacaggcagggttgcaaccaccagggggaggagcagcgcggccctcccagcaggggcgtatgattaaagtgaggaagggcatgagtgcgcggcccacagaagagtcatggtttagattagtggacggattggcacaaaatctggaattattattttccaatagagagagaaaaggggcttgtaggaactgttcactgaaccaggcagagaaaaatatttttcaaggtgtttttttaaatggtttcagtcttttagacacaattacaagtacttttatagaaatgtctgtgtaactaagacaacacacacatttttaaagtggtttatttacacagaatgtagatttcttcatgtgaaaagaaattccaacaattgactgcagcctttttgaactccagagactgaggccagggtgtctacayttcggtgacctctctcagttcctatcctgggctttgctgttccatgctca

SEQ ID NO: 838537 - DNA, 590 bp, Homo sapiens
cacctgcattttgccagaaaataagccatctacaaaaatgtgacatgaaaagaacaagaaatgtgatgacaagcaccagaataatggccaggccagaagcaggtcatctcctccctcagaactggcyccagcctgggatttgcccactctgctcagctggctcctgcttggggaggactcccttgatgacctgtgtgggcagctctcgtggggcatcccagccaggattccacacattgtcaaggtgagacagggccctgggtcctctgctgtggcacaggtgtggacccagcaagctttgtgtggatgggcaaatttataaagctggacaaggtaatatttgaattttttaagtaacttacaaatattttaaattttaacattttatatttgttacataaaatgagacataaaaattagaagcataaaaatcaactttgggaggccatggtgggaggatcacttgagcccaagagtctgagaccagcctgggcaaaatactaggaccccatctctacaaaaattaaaaaacaaattagtcagggtagtggcgcgagcctatagtcttagctgcttggaaggttgaggtg

SEQ ID NO: 838538 - DNA, 551 bp, Homo sapiens
ttcaaactcctgacctcaggtggtctgcttgcctcagcctcccaaagtaagtgctgggattacacgcatgagccaccatgcacagcctgttttktttgtttgtttgtttgtttgtttgagatggagtctcactctgtcgcccaggctggagtgcagtggcgcaatctcgacgcactgcaagctccgcctcctgggttcacgccattctcctgcctcagcctccagagtagctgggactacaggcgcctgccaccacgcccagctaattttttgtatttttagtagagatggggtttcaccgtgttggccaggatggtctcgatctcctgaccttgtgatccacccacctcggcctcccaaagtgctgggattacaggcatgagccaccgtgtccggccctgtttcttatttttagtaaagatggggtcttgttatgttacccaggctggtctcgaatgcctgggctcaagccatctcccatcttggcttcccaaagtgttgggcttacaggcatgagccaccatgcccagcctcattccttttcatggctg

SEQ ID NO: 838539 - DNA, 551 bp, Homo sapiens
ttcaaactcctgacctcaggtggtctgcttgcctcagcctcccaaagtaagtgctgggattacacgcatgagccaccatgcacagcctgttttgtttgtttgtttgtttgtttgtttgagatggagtctcactctgtcgcccaggctggagtgcagtggcgcaatctcgacgcactgcaagctccgcctcctgggttcacgccattctcctgcctcagcctccagagtagctgggactacaggcgcctgccaccacgcccagctaattttttgtatttttagtagagatggggtttcaccgtgttggccaggatggtctcgatctcctgaccttgtgatccacccacctcggcctcccaaagtgctgggattacaggcatgagccaccgtgtccggccctgtttcttatttttagtaaagatggggtcttgttatgttacccaggctggtctcgaatgcctgggctcaagccatctcccatcttggcttcccaaagtgttgggcttacaggcatragccaccatgcccagcctcattccttttcatggctg

SEQ ID NO: 838540 - DNA, 493 bp, Homo sapiens
tgccctgtcctggctcccgggatccttcctctsgtggtctgcacaggccacggcgctcagggtgccgcagcggcaaagtgggcagtggtcgcccgtgttccagggaaggaggagggtgagggcgcctgacctcagagacccccagaaggtatctgtgggggcacagatgaccaggagccctggagttagttccatttgctggctgtgaccttggaaagccagcaatgattcaggaccggctgcacaatttgtgcaaaatgaaaatgtggggcctcttgtccaaaaagtattacgaatttcaaaacagccacagcagagcaccacgccgagcaagggcccttctcagtacagaccctgagcctcccgagagtgtgagtgctggggaaatctggggaaagaggccaaggctgtccagagccgagcccctccctggggattgtgtctggggcccgcaaactccccaggcggagggaagagccagtcctccggagac

SEQ ID NO: 838541 - DNA, 498 bp, Homo sapiens
tgagaaccatcttaatgcctctacatttatcagctaagacagaaaattcgaatacatagagatactaaagaatcagaactttctagtccaaaggagtggttgtaatgtggtggctttctttggaytgcagtcgcagcactctagctgaaagctgtgggtcttctccctagaaaattcatgtatctgtgtagggtttcaggggagtgtttggacatccggaatcccaagagtgggcctaccagtggcccatgcactgcaggttaacagcttttgttgtggaatatcaaagattatgtaaaaattttggaaattaaattttttttttgaagaattgtttgctgtatcacatgtactttttgccaggacgtacggaactttgaagcagcctcctctgctgttctggcctttaagagtctctgtcttgggagttcagaagtgcctctttaggcttgatgctgcggcgggtttgcgtggcggcagaagcatacatctgcttct

SEQ ID NO: 838542 - DNA, 557 bp, Homo sapiens
ggaagataggacagtaaggatcctggagatgccgatctgtggctcctacaagccaggattggctgtgtgtgcttggaaatcacaagctgcagcacttaacctggatgcattaaaatattttaccttttttttttctgtcctgagatggaggtcacactctgtcacccaggctggagtgcatagggcatgatcacatctcactgtaacctgaaactcccggacttaagcgatcctcccgcctcagcctcccaaagtgttgggattacatgtgtgagccactgcacctagcccttttttactatttgaacatttgactctagcctttccctgctgccaagacaaggtctaggagaggccacagacgtgagctccagggtaggctggttaactattcaggtggatcacggtaaatggaaacccagctttaatctagtggttctgccccggaagtccagtgtgcgttcacaggtggccggcaatgtcacctgaacattctgcatagattttccytggaaaagagctagagaaagtggtgtccctgccaccccacacaaatc

SEQ ID NO: 838543 - DNA, 481 bp, Homo sapiens
tgagagtggagaaagatggggtgagtgtgggtggagctgtacatttttatttttacctctcacaccccactggaccccaggtagctgcaaggtggggacttggattaagttttggcctgggcgagctgtggccttgggcaggctttccaggaggcctggcttagtttggtcactcacctgacagaacagcaagtgtgatggcagagaatgttccttctacaactggcctggcttcctgtgataatcctgtagaggttatttttgtataacatcagctttgacaaggagcaaaagcacagtgaaaacaaaccttatccaaaggagcagcataaataccctctgtcagtttgttcaagagcaagcgaactgcccctctgctctgttctttagcaggtgcatacacttgccagtgaaaagtccrtggtttagctaatgcaggtgttggtgtcatcttacacatttgccttgctaattgctcata

SEQ ID NO: 838544 - DNA, 598 bp, Homo sapiens
gagggctgcttaccctccttgactctttttctcaactttcagatgatgagctgtgagggaattgttaagactgtaactctagttggagtttcatgtgactccttggagggcagggacatttaaatcaccwgggaagcttagtaaagcatcatccattcttatccaggatgtgcatcagaatcactcatgaagtttttaaaacttaatttcacataaacattgctccattccagaaaattctgatgccacggttttgaggcagggcttagagatttttctttctaaatttacctgattattcctaatggattgacagaccaaatgacatagatctccttgcttgtgtctccaataccaagtgaaacggatgtatctagttattatctcactattaagtttacctgaacaaccacaagtaccaaagaggataaatcttgacagaaaaaagaaacccacaggctccctcttctaggccctgattttttactggaaacttgggtaacgtttcaaattgcaacagccagagccaaagacaatctatactcaagctcagagagtttaatttatccactctgacaaaagctttaatagcagaagt

SEQ ID NO: 838545 - DNA, 598 bp, Homo sapiens
gagggctgcttaccctccttgactctttttctcaactttcagatgatgagctgtgagggaattgttaagactgtaactctagttggagtttcatgtgactccttggagggcagggacatttaaatcacctgggaagcttagtaaagcatcatccattcttatccaggatgtgcatcagaatcactcatgaagtttttaaaacttaatttcacataaacattgctccattccagaaaattctgatgccacggttttgaggcagggcttagagatttttctttctaaatttacctgattattcctaatggattgacagaccaaatgacatagatctccttgcttgtgtctccaataccaagtgaaacggatgtatctagttattatctcactattaagtttacctgaacaaccacaagtaccaaagaggataaatcttgacagaaaaaagaaacccacaggctccctcttctaggccctgattttttactggaaacttgggtaacgtttcaaattgcaacagccagagccaaaracaatctatactcaagctcagagagtttaatttatccactctgacaaaagctttaatagcagaagt

SEQ ID NO: 838546 - DNA, 602 bp, Homo sapiens
aaggacttttggatgaggagattatcctggattttccagatgaacccaatctaatcacatgggttyttaaaagtggagaccctttccccgctatggtcagagaaatctgtaacagtggaagaagagtcagagatgtaacattgctggctttgaagatggagtaagggaaccaagagccaaggaatgcagacagcctccaggagctggaaacagcaaagatatagattctcccctatagcctccagaaagtaacacagccctgcggacacctttttagcccagggagacccatattggacttctgacctccagaactgtaagataataaatttgtattgtttaagacaccacgtttgtggcaacttgtacagcagcaacagaaaatgaatatgccttccttcattgaagggtagagaagagggagccactcaggggactgaggggcagccagtgagaaagggggaaaaggaagttgagtgcagtggctcatgcctgtaatcccagtgcttggctaggccgaggcagaaggatcgatcccttgagccaggagtttcaggctacaatgaattatgactgtaccactgcactccagcttgagcaac

SEQ ID NO: 838547 - DNA, 602 bp, Homo sapiens
aaggacttttggatgaggagattatcctggattttccagatgaacccaatctaatcacatgggttcttaaaagtggagaccctttccccgctatggtcagagaaatctgtaacagtggaagaagagtcagagatgtaacattgctggctttgaagatggagtaagggaaccaagagccaaggaatgcagacagcctccaggagctggaaacagcaaagatatagattctcccctatagcctccagaaagtaacacagccctgcggacacctttttagcccagggagacccatattggacttctgacctccagaactgtaagataataaatttgtattgtttaagacaccacgtttgtggcaacttgtacagcagcaacagaaaatgaatatgccttccttcattgaagggtagagaagagggagccactcaggggactgaggggcagccagtgagaaagggggaaaaggaagttkagtgcagtggctcatgcctgtaatcccagtgcttggctaggccgaggcagaaggatcgatcccttgagccaggagtttcaggctacaatgaattatgactgtaccactgcactccagcttgagcaac

SEQ ID NO: 838548 - DNA, 570 bp, Homo sapiens
caaccaaaaccataaacaaaacaggaagacagtaatagcctggagaagttatttgcaaaatatttgataagcaaactaartatctgtagtaaacaagagctcatgtaagttgatcgataaagcaacaggaaaaagagaaaagtaataaatagtgaattaaaaggaacaactgcaagtggccattaaacatgtgaagagttgctcaacttcacaacaagtcctgaaatgcaattagaacaacaataacctacaatgtttccctgttcagcttagccaaattttttgaaaatttctcactcccactgctgggaaatgtgcggggaaatggggaccttcctgcactattgccaagaccagaattcctaacaagcttttcaaaagtaatctaggagtatttattaaaattaaacattctcataccctttgacccagcaatcttatttctggaaacctctcctacagaaacaaaagtgctaacgcatagggacataagtattaagaatatttattgtatcatagtttgtatatagaagaatttggaacatctggaatattcttaaagaattatgc

SEQ ID NO: 838549 - DNA, 570 bp, Homo sapiens
caaccaaaaccataaacaaaacaggaagacagtaatagcctggagaagttatttgcaaaatatttgataagcaaactaagtatctgtagtaaacaagagctcatgtaagttgatcgataaagcaacaggaaaaagagaaaagtaataaatagtgaattaaaaggaacaactgcaagtggccattaaacatgtgaagagttgctcaacttcacaacaagtcctgaaatgcaattagaacaacaataacctacaatgtttccctgttcagcttagccaaattttttgaaaatttctcactcccactgctgggaaatgtgcggggaaatggggaccttcctgcactattgccaagaccagaattcctaacaagcttttcaaaagtaatctaggagtatttattaaaattaaacattctcataccctttgacccagcaatcttatttctggaaacctctcctacagaaacaaaagtgctaaygcatagggacataagtattaagaatatttattgtatcatagtttgtatatagaagaatttggaacatctggaatattcttaaagaattatgc

SEQ ID NO: 838550 - DNA, 526 bp, Homo sapiens
tgtttttttagagatagggccttctctgtcacccaggctggagtgcagtggtgacatcatggctcactgaagcctcaaactcctggagtcaagcaatgcttctacctccacctcccgagtagctgtgactacaggcaggtgccaccacagaaggacagaccatctaaggaaaacttaaaaagacagcacaaggacaggctggacagccaccagacctggctaattttttattttttgttttattttttgtagagaccagacctcactatgttgcccaggctggtctcgaacatctggccccaacaatcctctcacctcggcctcccaaagcactgggattataggcatgagccatcaccccaggcctatttgctgtcttgattctcttttctgctccctccagccccacagatggcccaagaccccaaatgggcagtcaagcttccccactaagttgagtttctttactggrcaactcaagatgtcttggtgagatcctgtcttgaaacaatgccaggaaagtaca

SEQ ID NO: 838551 - DNA, 599 bp, Homo sapiens
tggatccttgttacttatgtgaatttctgtagctggcttgaattgatccacagaaaatgggtctttattttctatctcatggtgaggctgcacattttccaaacttttatactctgtcacctcgtgtatgctttgctgcttagaaatttcttctgccagatactttaaaacatctctttcaagttcagagttccacagatctctagggcagaggcaaaaaactgccagtctctttgctaaagcatagcaagagtgacccttacgccagttcccagtcagtttctcatctccatctgagacaaccacagcctggacttcactgtctatatcactatctgcattttggtcatagccattcaaaaagtctctagaaagttccaaactttcccacatttttctgtcttcttctgagccctccaaactgttccaatatctgcctgttacccagttccaaagttgcttccatatctttgggtatctttatagcagcaycccaatctctgtggtaccaatatactatatttgttctaacactgttatgaagagatacctgagactaggtaatttataaagaaaagaggtttaattgactcatagtt

SEQ ID NO: 838552 - DNA, 576 bp, Homo sapiens
caaggaggaaatggcctaacaagggactacatttctctgccatgtaaccagttcttaccagtggaatttgagtaaaaataatgtatatcacttccaaatcaaggtggttaagtaaaggtgcctatttccaaaccatctctactggttttttttttgtctgctgaaagtagagaaatttgtgacactagagaatagtacatcacaatatggaaaaatcctgcatccatgaaacactatgtggaggaaaaccacttgccaaacatcaataactgcatttgactgctacatgagtgacgaatagacgtttattgtgtaaaataattgaaatttgtcaatttatttgatatagcagcttaaatgcaagtcccaaagagaatttagttaagggctaaagtttggcatcataatttgcatatggttacaactacagaattattggttttatagaactatgtgactcaagtgcctagtcatgaatacctaatttcccaggatgaaccctcactgctcagtgacatttgtagtgccaaacagttgagaaagctgttcataaraacaggatacatagaaagtctg

SEQ ID NO: 838553 - DNA, 491 bp, Homo sapiens
gaatatgaatttgtgagccaattaaacattggcatatgtcttctgtgaaatagtcttaggattaggcaatttttgtttagtagcctacattgatataagttggatcatataatattaactgttatatggcattattattattattaagaaatctaggctgggcatggtggctcatgcctgtaatcccagcactttgtgaggctgaggcaggcagattacgaggtcaggagatcgagaccatcctggctaacacagtgaaatgccgtctctactaaaaatacaaaaaattagctgggcatggtagtgggcgcctgtagtcccagctactagggaggctgaggcaacagaatgaacctgggaggcagaggttacagtgaaccaagatcatgccactgcactccagcctgggcgactgagcgagactccgtctcaaaaaaaaaaaaaraaatatataattttttttttaaaaaagaaatagagcaatgagatga

SEQ ID NO: 838554 - DNA, 652 bp, Homo sapiens
tttataatttcacataggaggttacctttggtaaagttcaaaagccgaaaatatcagctgtcctggctaaaatctggtaattaaaaatttaaaagaatttttaaaagctctgcagttaaaaccatttaattaaagctgataattgggatatatgggtaaagatattgttttaaagccccttccttccctctgtaaaaactcctcagtcagtagaattctgcccaattctccatttacctctatctgtccctccttcctcttacatctaatctttttgacttttaagtggaccagaaacttatttacattataaaaggacttttagacatgatttgtaatagttagacaggagatataactttttggggttgctaatgccagttatgggggggatactcagctcttggcacatttaaatcagaaaagcatgcttttggtaacctagaaggtacagaaatgtccttacacccttactgagagataagactcctatgggaaatgagctgattacagaatgagctgattggccttgggttggacactagcstcaggggaatatccttgcaatgagatgcatggtgaaagcattacatagtctggtcccctagtgttcctctcattttggggatccaggatttgatgtaaaaatggg

SEQ ID NO: 838555 - DNA, 587 bp, Homo sapiens
tctgcatccacccatgaactactatcttaccagaataggaatagtactgwttaagtgatgggccttttgtgtaacgtacacagttacattaaaaaataacaaacaaaacctttattgctacaattacaagcataaaaaagataaacccaaaggagtttattgcagcaagagtctcagtagggatgtgatctgtcaaccagtacaaaaaaatgtgatgagactatcccgggattacgttcatgatgataaggaggagttgagtattgatttatattctttttgttgcttcatacttctacaggctttctaattttcccatgtgttatattactttatacaaaaagaaaagtataatcctcaaaaatgaaacaaaactcttcaaaatttaagtataatagcacaaaaaatatccacgtgcaaaggaagtcttctgtttttaaagaggaaagagtttgacttgctgagagagaaggtgagtggatctacaaaaagaatgaagatagttggaaaaagaaggacaaggaaagacgtggaacacagtggtcatgaggtggaaggccaaaaaaaaaaaaaaaaaaggaaaacag

SEQ ID NO: 838556 - DNA, 554 bp, Homo sapiens
agcttgatagtcttaattcaactccatttctttttataaaataatagaacaactgcttatacagtgatggaataaatgagcaatcatgaaattctaggtggtaagacagtctcaattttgttgctttaaaaatccgcatggttgaaaattttggacatttgccttgaattttgaaaaggaaagagctgttcttgacctctgcttgataaaggtttcagacagacgtggaatattcatggtccttgtcctccgctggtacccatgggggtgttgtaatctagaatctgaaagaaagggtatgaggagcatttaaaagccttttccaaattgagtttcttcctggaaattaacaaccatgagggcaaaggtgtatttggatgggctgggcgcaaaacaaggcttttcccactcacaaatctattcctcaggcttcctgatctgcaaagagagaggaagaaaagagagaatgcatgagcaagaaagcccccatatgttgtttatagggcaggccaggaagaggagaaactgttacckgaaagggatccctatccaga

SEQ ID NO: 838557 - DNA, 614 bp, Homo sapiens
tgacaggtggagctaggggagtacactgtccatcccggaaccaagccaactccacccccaaccggagagatcctccttcatttttcccccacacatgagtgcaatagtcctaaatcagaggacaacaccggacatctgtctcaccaagctcatgcaactatatcaagaacatcctgtgtgatgcccctggggtttaaaagctagcactgttcatgtagtttcaaagtggtctacaatgccaggtcccatggaattgaaatctatcccatagcccgttgagaaaaacagtaactggaatcactgtgcttcagtctctggggattcatcgtggcctcctagtctttgttgccattaattgttttatgacattgtttaaattaagtcacttaactttcagcttcttcagctattgcaagctttccgggataacagagcacgtgttcttcttctcagagcatctcccatgcttagcacaggtgactcactagtgaaggccagttgtaacttctgtgtyatccttgggccccaactcccccccaatcactttctgccttcccacacttatataagttcagacctgctgtttcatcttaaatctggatggcacacagcac

SEQ ID NO: 838558 - DNA, 542 bp, Homo sapiens
tatattcaaatgctcagtaaagttaggaaaagatcaacttcatcattcatcagaaaaatgtaaatcaaacttcagaaaagaagctatatcctgatgataatgatttaaaataataacaatacaaaagatggttattaccacacgttgactgggaagaagagcaaatagccaggcgcggtggctcatgcctgtaatcccagcactttgggaggctgaagcgggcggatcacctgaggtcaggagttcgagaccagcttggccaacatggtgaaaccccatctctatgaaaaatacaaaaattagacgggcgtggtggcaagtgcctgtagtcccagctcaggcggctgaggcaggagaatctcttgaacctgggggacagaggttgcagtgagccgagatcacaccactgcactccaggctgggcgatagagtgagactctgtctgaaaaaaacaaaacgaaacgaaacaaaacaaaaacctcttgtgctctcattgggagtgtaatcagcacaactacyttgtaaatgaatgaattgctacc

SEQ ID NO: 838559 - DNA, 597 bp, Homo sapiens
tctatcaggaattaagatcagaaacaattcacaatcatatgggataaataagagtasacatgtagtgttcatcccagtgatagtaatactcccactctccatcctaatatagctcaaaggaacttgggcaatctagacatttcacaaaaacaattaattagtctactgtatagagtgtcacataaattgaactagaggagttaaagtggcaagtacattggatgacttgttaagtcacttcagaaaatgaaatataaaaaaaaaatgaagtttcgggggctcatgacattagcaaagtgtaagtattccatggtctgtgtcatgattaaacattcctacaaatgtataaaaaattatttgactttatactttcctgtaataagaaagaaacaatgcttagaatacctctttttgttctggaaatagcatattttactcttgggattttgttccaacctatttatctagtgataaggaaagcttccagcttggagtggagtccaaagcaaaactagacctgtaagagaaacaggctgctgtaatacagtcctaaaacgtcatccatatgacctggcaggtcttaccatattagagtat

SEQ ID NO: 838560 - DNA, 523 bp, Homo sapiens
tgaggttatataaccatattttttgtaaatatttctgtgccaatacattagcactatagatgacttgtacagatttctacaaaataataattattgctaatttgagaagaaattaaaattctgtgtagtcttctaaactcttttaaaactgtaatctcttaaactttaagtaaattaaatctccagttaaaaactttccagcaaagtacagatgcagatgacttattgctgaatcctaacaaagttaaaatagctaactatatgtaaattccaaacaataagaaatctggccagatgaggtggctcactcctgcaatcctaacactttggaaggcgaaggagggaggatcgcttgagcccaggagttcagagctagagtgccctagtgggatgatagcttctatccatagtgatccagcctgaacgacagagtgagaccttgtctctaaaaaataaataagtaagacaactrtttgaatttattttatgagctgaatattatcttgacatgtttggtaagagt

SEQ ID NO: 838561 - DNA, 494 bp, Homo sapiens
tttttttaccatctaatatcggatcctattcaacagagtatcatgtactttttgcactctccaatgttacaaacataattggtgactaaagatgttttattttcactcagaaaagacgactttccaaataacttcaaaagcatacacatgtattttttttgccagaaattaatttttatagaaagcaaatggatcattatcaaaggtaccaatctatgacagtgaaatgacattatcacatttaaataaacaaaacagaattagtactttttttttcacagaaatgagattatttcagtttctcttcatttttagcccacacaggtttaagaggagttttgtctcactgagcacattaattagcaaattttgttaattatatattattcaataattacacactgttaaataattaaagattattcatagtgacaaaacctccaayacctgacacagaaaggtaattgaatgccttaaacaacttttgctgaaat

SEQ ID NO: 838562 - DNA, 493 bp, Homo sapiens
atatttttcagaatgttcactgtcagcatatagaaatgctactaatttttgtatgtggacttttatatctgtcaagtttactgtatttgtttatcagttctagtagttttttgtggattctttaggttttcccaaatataagatcacgtcatcagcaaacaagggtaatttgacttatacctttccactggggatgccctttatttctttatcttttccaatagctgtagagaggactttcagtactatgtggaataacagggtgaaagtgggtatactagtcctctttcagattttagagtaaatgtttccgttttctcccattcaatgcaatagtagctgtgggtccatcatatatggcttttattatgctaaggtatgctccttctayacctagttttttggggtttttatcatgaagcagtgttgaattttatcaagtgcttttcagtattaattataatgatcatatggcttttgtcctttattcttt

SEQ ID NO: 838563 - DNA, 624 bp, Homo sapiens
ttccttcttttttcttcttcttccatcttccctcttttcttcccgtatttttttaagtcaggaacttgcttggtcacccagactggaatgcattggcatgatcatagttcatgccagcctccaattactggsgtaaagctatcctccaatttcagcctcctgagtagctacaactacaggtatgtgccattatgcctagctaatttttttgtagccatggggtctcaatattttggcttcttattcttgtttgtaataagaatacaatataatatccactctcttagcaaacatgtataccgtataatattgttaactataggcactataccatgtatgtgatctctaggacttattcatctcatgaaactaaaactttttaccccctaactaatgtttctttattttctcctctcccccaggccctgacaaccactattcctctgtctgcttctatgagtccgtctgttttaaatttgtcaaataagtgttaatagtgtcgtgtagtatgtgtccttctgtatctagcttatttctcttagtataatgtcttccaggcttattcatgcagtcacatatagcaggatttacctctttttaaaagatgaataatattccatttta

SEQ ID NO: 838564 - DNA, 624 bp, Homo sapiens
ttccttcttttttcttcttcttccatcttccctcttttcttcccgtatttttttaagtcaggaacttgcttggtcacccagactggaatgcattggcatgatcatagttcatgccagcctccaattactggcstaaagctatcctccaatttcagcctcctgagtagctacaactacaggtatgtgccattatgcctagctaatttttttgtagccatggggtctcaatattttggcttcttattcttgtttgtaataagaatacaatataatatccactctcttagcaaacatgtataccgtataatattgttaactataggcactataccatgtatgtgatctctaggacttattcatctcatgaaactaaaactttttaccccctaactaatgtttctttattttctcctctcccccaggccctgacaaccactattcctctgtctgcttctatgagtccgtctgttttaaatttgtcaaataagtgttaatagtgtcgtgtagtatgtgtccttctgtatctagcttatttctcttagtataatgtcttccaggcttattcatgcagtcacatatagcaggatttacctctttttaaaagatgaataatattccatttta

SEQ ID NO: 838565 - DNA, 551 bp, Homo sapiens
tggagaatttaatctgttacaatatagtgttattgctggtaaaagagaattgattttggtcattctrttacttttatatatatatatattatgggtttttcttctttcttaactccattctgcatcctctttttaaaaaatggcaaataatttatttctaaatatttttgacatatatttccccaactttttgaggaataatgggcaaataaaaatcatatatatttaaggtgtacaacatgataatttgataaatgttttataaaatgtatcattgtgaaatgtacatgtattgtgaaatgaaactattgtgaaatggttactattatcaagctaattaacctatccaccacctcacatagttaccttttttgtacgtggtgagaacatttaaatctattcttgtagaaaatttcaagtatataatacatattattagttatagtcaccctactatacattcaatatgtggagcttatttatccttcatgatagccttccttatcaggcctgctgttgaacccctccagtaatttttaaatttcaggtat

SEQ ID NO: 838566 - DNA, 551 bp, Homo sapiens
tggagaatttaatctgttacaatatagtgttattgctggtaaaagagaattgattttggtcattctattacttttwtatatatatatattatgggtttttcttctttcttaactccattctgcatcctctttttaaaaaatggcaaataatttatttctaaatatttttgacatatatttccccaactttttgaggaataatgggcaaataaaaatcatatatatttaaggtgtacaacatgataatttgataaatgttttataaaatgtatcattgtgaaatgtacatgtattgtgaaatgaaactattgtgaaatggttactattatcaagctaattaacctatccaccacctcacatagttaccttttttgtacgtggtgagaacatttaaatctattcttgtagaaaatttcaagtatataatacatattattagttatagtcaccctactatacattcaatatgtggagcttatttatccttcatgatagccttccttatcaggcctgctgttgaacccctccagtaatttttaaatttcaggtat

SEQ ID NO: 838567 - DNA, 517 bp, Homo sapiens
tcagatctcagattaaatactttcttttaaatgaaggcattctctaaccatcmaaaaaatagaatgtttttcattcatactcattgttttctagcatcactctgtttgtttggttgttatttcaacagcccttccacattttgtaatggtcacttcttgtttctttgtttatttctatctgcatcactggaatgtatgtaccaagagagcaaggattatgtctggtttttttttttttccagcttgtaagtcatcagcacatgccacagtggctgcttcatgatattagatttcctcctttcacagtgtatgtgccacctcagcttcaacatgtcaaattaaacctttcaacaatggttctgcatgtacatgtcgggtgcttagcaaggtaatggggcagaacaattacctccaagaccgtggtgctgtataggaaaatggtttagagcaacagttctggaccaggctgcttggatttcaacttcagttatgctactttcctgctatgtgatgttag

SEQ ID NO: 838568 - DNA, 517 bp, Homo sapiens
tcagatctcagattaaatactttcttttaaatgaaggcattctctaaccatcaaaaaaatagaatgtttttcwttcatactcattgttttctagcatcactctgtttgtttggttgttatttcaacagcccttccacattttgtaatggtcacttcttgtttctttgtttatttctatctgcatcactggaatgtatgtaccaagagagcaaggattatgtctggtttttttttttttccagcttgtaagtcatcagcacatgccacagtggctgcttcatgatattagatttcctcctttcacagtgtatgtgccacctcagcttcaacatgtcaaattaaacctttcaacaatggttctgcatgtacatgtcgggtgcttagcaaggtaatggggcagaacaattacctccaagaccgtggtgctgtataggaaaatggtttagagcaacagttctggaccaggctgcttggatttcaacttcagttatgctactttcctgctatgtgatgttag

SEQ ID NO: 838569 - DNA, 612 bp, Homo sapiens
aattgatttgtttgagcttcttatatattctagttattaatccttatcagatggttaatttgcaaatatttcctctcattctgtagattgcctcttcactcttttgattgcttctgttgctgtgcagaagctttataacacaatgtgacaaactcccatttgttcatttttgctttggttgcctgtggttttgagatattactcaagcaatatttgcccagaccaatgtcctggctagtttcctcaatgttttcttttagtagtttcatagttttaggtcttagatttaagtctttaatccattgtgatttgaattttgaatatagcaagagatagagacatagtttcattcttcccatataaatatccagttttctcagtatcaggtattaaataaactgtcctttccaaatgcatgttcttgacaccattgtcaaaaatgaattcatggtatatttatggatttatttttgggttctctgttcttacctattggtccatgtgactgtttttcttttgttgytgttgttttgttgtgttttctttgccgttagcaatctgtaggttactataacactgttgtgtaatttgaaatcaggaaatgtgagtttt

SEQ ID NO: 838570 - DNA, 387 bp, Homo sapiens
agtaatgatgttaaccaaagcagggaggggattgaatgtcatctagaaaaactgaaaggaaataaaaattcatcagttttytacaatacaaagaatagtctattttttagcagtatttttttctcctagagtggtgaaaggatgtgtgtcaagactgtaacatttaacaaaaacagttcttgggaatatacaaccatgttttttatgactcttctcactcatctaccttggatcagcaatatggtacaatgattaagagtgtaggccctcattggcgagaatatggagaaattgaaaccctgaggcaatgctgatagaaatgtaaaatggtacagccactgtagaaaacagtatgacagttccccaaaatattaaaatagaacatga

SEQ ID NO: 838571 - DNA, 387 bp, Homo sapiens
agtaatgatgttaaccaaagcagggaggggattgaatgtcatctagaaaaactgaaaggaaataaaaattcatcagttttctacaayacaaagaatagtctattttttagcagtatttttttctcctagagtggtgaaaggatgtgtgtcaagactgtaacatttaacaaaaacagttcttgggaatatacaaccatgttttttatgactcttctcactcatctaccttggatcagcaatatggtacaatgattaagagtgtaggccctcattggcgagaatatggagaaattgaaaccctgaggcaatgctgatagaaatgtaaaatggtacagccactgtagaaaacagtatgacagttccccaaaatattaaaatagaacatga

SEQ ID NO: 838572 - DNA, 507 bp, Homo sapiens
tgggattacaatcatgagccaccacaccctgcccaaaataactctttaaattttgctattactgataataatcaagtaacagaaaaaaatgtaaactgaaaaataattttaaaaaacatgttctaatttttcaaaaataagtgatattttacataacattcaaaagcacaaagtatctccagtgaaaaacatgccattcccatctttcttgccctagtcatccagttttcttatagcacaaaaaaaacattgtttttactatgttgtccttagaatttatgatactttttatcttacagaattgtgtgtgtatagctgaatttattaacctttgatgggtcctgttctttatcattcataaaaatgtattctaaataccaagaggataaaaaattaaataaaatcccatgttyctttcagtacatttgtagttttttaattttttaattttaatttttgtgagtacatagtagagatatatatatatatatatatatatatatattt

SEQ ID NO: 838573 - DNA, 507 bp, Homo sapiens
tgggattacaatcatgagccaccacaccctgcccaaaataactctttaaattttgctattactgataataatcaagtaacagaaaaaaatgtaaactgaaaaataattttaaaaaacatgttctaatttttcaaaaataagtgatattttacataacattcaaaagcacaaagtatctccagtgaaaaacatgccattcccatctttcttgccctagtcatccagttttcttatagcacaaaaaaaacattgtttttactatgttgtccttagaatttatgatactttttatcttacagaattgtgtgtgtatagctgaatttattaacctttgatgggtcctgttctttatcattcataaaaatgtattctaaataccaagaggataaaaaattaaataaaatcccatgtttctttcagtacatttgtagttttttaattttttaattttaatttttgtgagtacatagtakagatatatatatatatatatatatatatatattt

SEQ ID NO: 838574 - DNA, 507 bp, Homo sapiens
tgggattacaatcatgagccaccacaccctgcccaaaataactctttaaattttgctattactgataataatcaagtaacagaaaaaaatgtaaactgaaaaataattttaaaaaacatgttctaatttttcaaaaataagtgatattttacataacattcaaaagcacaaagtatctccagtgaaaaacatgccattcccatctttcttgccctagtcatccagttttcttatagcacaaaaaaaacattgtttttactatgttgtccttagaatttatgatactttttatcttacagaattgtgtgtgtatagctgaatttattaacctttgatgggtcctgttctttatcattcataaaaatgtattctaaataccaagaggataaaaaattaaataaaatcccatgtttctttcagtacatttgtagttttttaattttttaattttaatttttgtgagtacatagtagakatatatatatatatatatatatatatatattt

SEQ ID NO: 838575 - DNA, 607 bp, Homo sapiens
gggtgtaaattcttcctctgctagaagcgtgtgcaatgtgggaagcccagcacacagaaagagcttaattcatgctgctgatttaatagattttttttcatggatgtgccagaaagccccattcatgtaaacactacaattgcaaaagtttatgccagacagaagcctgcatttgttggggattaaaagaaagggcacttgactttgtagcccaaagacccaggttttccaggtgcagtcctggcattgagttgtcatgtcatcccaggcaaatcatggacttgttctgggcctctgtttctttcttcaacatgaaggaatttgttaaagaaatttctaaaattcttctgttaatgagtaatgacgataatatcagtagtcacaagcatttactgagcactgactagctgccaaccactgtgttgtttgctttgtttatataaccccattcacttttaaaatcatcttatgagggaaagaaaccattatcacccacataaggtatgactgcttatatagaaaatrcccaaaatccataaacaaatgattaagaacaattaaatttagtgaagatataaaatttacatacatcaaacagctagaaagt

SEQ ID NO: 838576 - DNA, 608 bp, Homo sapiens
cacgcatgaaccttgaggacattgtgctagatggaataagccagccacaaaaggacaaatacattgcgatttcacttacatgaggggcccagaatgggcaaattcaaatacagaaagagcaatggttaacaaaaggagggagttggtgttcagtgggtatggtttccttttgggaagatgaagaagttctggagatggacggtggtaggggatatgcgacaatgtgagtgcacttaatgccggttataacaaggggagtgcgtgtgcacacggctctgggagttctcgtgcagcactcagagctcagcgtgggcgagggcgtcacccctctgggggcgtccatggggccttggagaagggaggctccagggcaccagagcagtctacccggagaggccgggccgagagcttgttcacccccagccctcttagggaactttcacatgcttctcccactaggcctaggcacccctccctaccctccctaccctcctggttccctgaccctcagtgactgtgtccttcaagactgaactccagagtccccacccgaggacccgcagtgcccagcccccrcgagctcggttggtgtatgcccaccccgaggc

SEQ ID NO: 838577 - DNA, 586 bp, Homo sapiens
taaccactatagtcagtaagtgacaggtgttcacgtcctctggctttccagcccagcaccaatctgcttcaaaggccatcccagaatatgaagattacatgtttcccatatcaggtattattaccccaggcctgtgggaatgacttgcagaggtttgggggtgtcaccaagctctattaatccttgaccactacctcaaaatgtaagtgttcacaaaaggcatgaatcacattttctcattatctctaaagcacattggggtacctttccctctactgtactctccttacgcaaacacaggacgcataagcaattcagccatgcatgaagagtgcaggagaaagtcaaggacaatagaaggtgccatgtcaatagagatgatggaggggacaagtgggtgtgtggctcgttgtctgagccaatgtggtcatttactgacatccattctttaatttcctccttcaatragaactcggcaatatcatcagttccaactgttattgtccagtgtgtcagggaagtagaccttgccccaggactggctaacgacccttttcctaggtggtccttcacatatagagtggaa

SEQ ID NO: 838578 - DNA, 586 bp, Homo sapiens
taaccactatagtcagtaagtgacaggtgttcacgtcctctggctttccagcccagcaccaatctgcttcaaaggccatcccagaatatgaagattacatgtttcccatatcaggtattattaccccaggcctgtgggaatgacttgcagaggtttgggggtgtcaccaagctctattaatccttgaccactacctcaaaatgtaagtgttcacaaaaggcatgaatcacattttctcattatctctaaagcacattggggtacctttccctctactgtactctccttacgcaaacacaggacgcataagcaattcagccatgcatgaagagtgcaggagaaagtcaaggacaatagaaggtgccatgtcaatagagatgatggaggggacaagtgggtgtgtggctcgttgtctgagccaatgtggtcatttactgacatccattctttaatttcctccttcaataagaactcggcaatatcatcagttccaactgttawtgtccagtgtgtcagggaagtagaccttgccccaggactggctaacgacccttttcctaggtggtccttcacatatagagtggaa

SEQ ID NO: 838579 - DNA, 581 bp, Homo sapiens
aggatttcgatcaccaaaataaaacatggttgagcagctggtgcarataactcaggatcctgtggtcattacagtcaagctgagtgctcaccacacactgacaagtaaatggtgtaacattcaaagaaattattctcattgctgcccagttagagtccaattccctttccttttggaggatatatcctgggctgggatgccttctcaacaggcaagacacaaagatgtagcctgtaaaatctgatgtgcctacatgctggcacccaccatggttcatcaactaactaactaaactccctttgtaattcagcacctcttcctgagattttagtcttcatacagaaatctgtttcatcttcatgcttagctaattttgagatgggggaaaataaaaacaaacagacaaaaaaaccctaaatataagtcttatcaagtaagtcacttaagatgtaatgtggtaggtttcaaaaagtagaaaaatactctgatgtctgtttcatgagcacttgaagctggttgcagactggatgtgccaaggtgaaaatagccagcaggaattctgagttggatactgttgttgt

SEQ ID NO: 838580 - DNA, 527 bp, Homo sapiens
cggactgcagtggtgctatctgggttcactgcaagctgcacctcctgggttcatgccattctcctgcctcagcctcccgagtagctgggactacaggcrcctgccaccgcgcccagctaatttttttgtatttttagtagagacgaggtttcaccgtgttagccaggatggtctcgatctcctgacctcgtgatctgcccacttcggcctcaaaatagactttcttaaattacatctaccactctcttaaagggtcttaatgaaaccagtgcagacatgtttgatttgatataagattttttggtagcatgtacttcacatatagaagcctgcacagaacaagacattttgcataataatatttaattagtggatgtttgcttcgaaaagccttatgtgacccgtgaagcaatcaaaataattatgggcacaaattgcatatgcaaaattgagaccctgtaggtgtcctcatccactctgcttatacctcagggaattgttggatcctggaaaaagggctgtctgca

SEQ ID NO: 838581 - DNA, 619 bp, Homo sapiens
acctgatggtctttctctacccaccctggtagccaaagacaaatgatgtaatctcttgggagctctatggccctgtccaccacctgatcctcccaatacaaccacagctgatgggctcttgaaagtgccatctcctggctggaggccatccaacataaaaccagcgcatttaacaaaaatgcaaccaaggaccctcacggagtccacttcactccctactacctccactggaataggtgctggtatccatgactgaaagacccgaagacagatcacatcatagtactctttgcagacactccccgctaccagcctggagcctggcagctccactgggtggttagatccagaagagaagtaacaatcactgcagtttggctctcaggaagccccatccctaggggtaaggggagagcaccacatcaagggatcaccctgtgggacaaaagaatctgaacaacatcccttgggtcccagatcttccctctgacatagtctactcaaatgagaagaaaccagcaaaacaactctgttaatatgaygaaacaagctcctttatcacctgcaaaagatcacactagcttgccagtaatggatccaaccaagacaaaaatctctg

SEQ ID NO: 838582 - DNA, 534 bp, Homo sapiens
tgagttactgtctagtgttgtttacttacaacctgaaggaagggactccttttaacrtttcttgcagggtaggtctagtggtaatgaattccttcagcttttgtttatttagggatatcttagtttctcccttgattttgaaggatagttttaccagatacagaattcttggctgggcgtggtggctcacacctgtaatcccagcactctgggagcctgagacaagctgatcacttgagctcaggagttcgagaccagccggggcaacatggcaaaactccatctctacaaaaaatagaaaaattagctgaatgtgatggctcatgcatgtagtcccagctgctcaggaggctgaggtgggaggatcccttgactacaggaggtagtgtagtactgcagtgggctgaaatcacaccactgcactctagcctgggtgacagagtgagaccctgtctcaaaaaaaagaaagaaatcttggttgacaggtttttctttcatcactttaaatatatcattctattgccttctaactgc

SEQ ID NO: 838583 - DNA, 541 bp, Homo sapiens
ccaaagtaacctttcttgttcattgcagggttcacatttaaggagatgcctggctgtaggaagcttgtctggcttaggagaggggaagtcttactgttcatagtaatttggatttaggccaggtwgggtgttgtttgtagaattcatgggcagcactctgagtttgtcttttctaagtttccagtaagtccaggcagctatggccccttgaattgtcttagtattagtatcattgcccctgaagaggactttgtcggaagctctcctaagaaacaagcagatggagtcaggactcccttaagctgctcagggcttgccacaccattgtgttgcattcagcctgtcgtctgataagcccacttctacatccccagctgaccaagacctttggcctcagctaacattttccattgacagtctgcccaaacccttaagaccctatgctaacatagggtcagcagccttccaagccttaaaaatccccatcaacaaggtatctgtgggccagggtccaaagccttcgctgggggtcattcccacc

SEQ ID NO: 838584 - DNA, 564 bp, Homo sapiens
atgcccagacccctagccataaggtaactttccaaaaggttcatgtatttcttaatccatccagaatattgagataattagcacagctgagaggttgagaaaggctgggagaaaaaaataaaaacagagagagagagagagagagagaggaaatggaccctattacctactccatggacttaatcagaaattttgggatacttcacctgtggaccttcccacagctggatcacaggcaccccaaatgctcactgtgtctcactcctcatcccacaggcaagctcttcaaatgcatttttgcagagagtgcaagcctcccaagtggatggctggcttgactctgcaggattgggagaaggcacagaaatttcagcacttcagagcactgctttaggaaaaacaagcgggaggctcttagcatctgtcctgaatttctaagattaagagaagacaaaggctcttctctcaataataataataattattattrttacttccaaggagtaccaggtgtgagaacattcaaaggaaaggtctcctatagcctcagtttccaaaattgga

SEQ ID NO: 838585 - DNA, 645 bp, Homo sapiens
atcttaatctccagtgctaggatcaaggcagcattaagtcttggagatataataatacttaatttgcttacaatgatattcaaataaggaaatggtgatactttcactgataactgaagacttggaaatgaataagtttggctacagagcatgtgacaactcctctgaaagatgacagccatctttttaatgtttttcctgccaatatatcgatgccattccctcactgacaggtagagtttttcttctcttcttgaatctgggctggccttactgacttgtttaattaacagaaagtggcagaagatacttcagaatctaggatatcaaagctgtacagcttctgttcttgtctcttaaaaatcaatatttgggagaagccagcgcatttattcatccttcttttgctcttcaatttttcttacatgcctctcttccttttggcattaactttctgtctgagatcatacttcagtgatagtttattggtgataaagtctgtttgaggtgtgtttctttggtttctgaaaatgyattcattcctgcagtataatttaactttctataaaatcattggttgaaaagtattctcctataacttcctggaatttttttaaaaggatcccattgattctactgagaagt

SEQ ID NO: 838586 - DNA, 553 bp, Homo sapiens
ctgaggttgaagagcacaatacctgaaatttaaaaattactggaggggttcaacagcaggcctgataaggaaggctatcatgaaggataaataagctccacatattgaatgtatagtagggtgactataactaataatatgtattatatacttgaaattttctacaagaatagatttaaatgttctcaccacgtacaaaaaaggtaactatgtgaggtggtggataggttaattagcttgataatagtaaccatttcacaatagtttcatttcacaatacatgtacatttcacaatgatacattttataaaacatttatcaaattatcatgttgtacaccttaaatatatatgatttttatttgcccattattcctcaaaaagttggggaaatatatgtcaaaaatatttagaaataaattatttgccattttttaaaaagaggatgcagaatggagttaagaaagaagaaaaacccataatatatatatatawaaaagtaatagaatgaccaaaatcaattctcttttaccagcaataacactatattgtaa

SEQ ID NO: 838587 - DNA, 553 bp, Homo sapiens
ctgaggttgaagagcacaatacctgaaatttaaaaattactggaggggttcaacagcaggcctgataaggaaggctatcatgaaggataaataagctccacatattgaatgtatagtagggtgactataactaataatatgtattatatacttgaaattttctacaagaatagatttaaatgttctcaccacgtacaaaaaaggtaactatgtgaggtggtggataggttaattagcttgataatagtaaccatttcacaatagtttcatttcacaatacatgtacatttcacaatgatacattttataaaacatttatcaaattatcatgttgtacaccttaaatatatatgatttttatttgcccattattcctcaaaaagttggggaaatatatgtcaaaaatatttagaaataaattatttgccattttttaaaaagaggatgcagaatggagttaagaaagaagaaaaacccataatatatatatatataaaagtaayagaatgaccaaaatcaattctcttttaccagcaataacactatattgtaa

SEQ ID NO: 838588 - DNA, 641 bp, Homo sapiens
  misc_feature 120: n = A,T,C or G
aatagtaattctacatatgtttttccaaaacagttaatgaggaacactgcagaactctttctatgaggcctgcacgtgccctgataacaaaacataagagattacaagaggctgggcacngcgtggctcacgcctgtaatcccagcactttgggaggccaaggtgggcagatcacgaggtcaggagattgagactatcctgtctaacatggtgaaaccccgtctctacttaaaaaaaaaaaaaaaaaatacaaaaaatgagccgggcatggtggcaggcgcctgtagtcccagctacttgggaggctgaggcaggagaatggcgtgaatccgggaggtggagcttgcagtgagccaagatggcgccactgcactccagcctggacgacaaagcgagactctgtctcaaaaaaagaaaaaaaaaaaaagagattataagaagcaaaaaccacaaaccattatctctccaagcataatgcttggagatttttacatctccaagcatagatgtaaaaattcttactacatacttggaaaatacaatttttaaatrttttcaaagaataataggtcatgaccaagtgggattttctcaggaatgcacgtttacttttgcagtcataaataaataatatcattcac

SEQ ID NO: 838589 - DNA, 631 bp, Homo sapiens
gcacaatgaaaaaatcaataataattagaaaatgcaaatcaaaataattgtacaatagctaccactacatatatactcaaatgactaaaaaataaaattaaattaaaagctgaaaataccaactgctgggaagaaggtagagtagctggaagattgatatattggtggtaggattataaaagaatgcagccattttgaaaaatagtttggtaatttattataaagtaaaacatccacttaccacataacccagaaatcccatatttacccaaataaaataataacctatatttacacaaaatctgtatgtaaatatttatagagacttaatgcatagtaactccaaactggaaacaactcaaatgtgtgttacttgtgaaatgaatgaacaaagtgaggtatgtttataccatggattattactcagtaaccaaaaagggagaactacctaatactaacaataatatagatgaactacctaatactaacaataatatagatgaatctcaaatacattatgctaagtaaaagatgtcrgactcaaaatactaaatactagatgatttcatttatatgacatactggaaaagacaaaaccattgagataaaaaccaatcagtgatcaccaaaa

SEQ ID NO: 838590 - DNA, 653 bp, Homo sapiens
atttatatatatttatcacaggatttctccagaataatataagcattatgacggtacagaacttgttggatttgtttactgttatttactcagtactgatcattgcctagaacatataggttctcaataaatatttgtggaaaaaagaggaagaaggaagaaaggagggcaggatggaaaaaaggaaaaggaaagagagaataaacttgtcttgctaattaaaattactaaaatgagtgctccactcttaagtgcttgcatttcatgtttcaaaactgccttttactgctaacctgcaaataaaccctgtagtttctacacagttttcagcctactgagtaagaaaacaatcagtaagtattgttgattggctaatgaaatagctttgagattcactagtcacaataagataatgctaattattttgtggagtgaattagcttgaaaataacataaggaaatactatacagaatattccatctggcttcttctaacttcctccaaaggtagtttcatatcaggcattttcaaattatgatgtattgatgaattaatgggtgccctcaccctcccttatkagaaagtggtaaattaagcatgaaatttcttctctgaaaccacactgggcaaaagactagactagctaagcaag

SEQ ID NO: 838591 - DNA, 583 bp, Homo sapiens
agtccccacctccaacatcggggattacaatttaacatgagatttggtggagacatatattcaaactatataagctctatatcccattttagcaaagtgcctatctgtttttagaataaatttagcataaacaaggaagggtggctgagtgaccatgccaaatcatgaccttagacattcagaaaacttatctgcatcatcagtaagatatggtctgtgtctggataaagtgtaagagctaatttcagtgtttctgagacactgggtcttcttagtgactaccggcttttattcaggcttggtctctgacttcccatgatatgcacctataaatttattttgggacgtaacaccaatgaacataggaacagcttaatgcaaatcttttttgagtctcccctaccttcctacccacaccaatgcagttataattaaacaagattagagccaaggcatttaaaataaaggtmaattaatgttagtacaggatcactcaaaatggtgcagacttttaaccctttattccacttaggctgagtagacattttccagtgaaggaagctctgctattttatatataggt

SEQ ID NO: 838592 - DNA, 423 bp, Homo sapiens
cttgaatgaattcatatgacaaaacacaatgacagatgaaatgacagtttatacttcattattagggaaaaacaaaagtttatcaaaataaaatatttcagaagacaaatgctaatgtgtttttacagtagcttctagtcacaccagattactaggtggaaaatctggagaaaagatctttgagggaaacaagttgtgagaatgagagaggagacagtcttgcttattaacggaattttagaaattgattgtctgttcacaaggcctaatgctaccttctgtcactgagacacttacagcttctggtcactctgcttatagtcaatcaccaatggacctttttaggattcctgcctagtcgcaataggtgtttacaaactattcagttaatagtgtrattacaattagattcatcagaaagaa

SEQ ID NO: 838593 - DNA, 600 bp, Homo sapiens
taaaattctgggttggttttttttcctctacatccagtctcatgagaaattctaagagttctaagttacatacttgtcattgctaatgtgtcttgaaatgagctgaaggggaattggcaccaaaatcaagattgagtgttagctaaatgattaagaaagaatatactgagcttagagtgctttgtgcttttattttagagcagatactgctccttctctcctggccaggttcagtattatttcttccgtcctagccagcctcacaccaacactaagcattgcttaagtatttgccatgtttaagctggaaaggaaatgtgtttcttcacctttggaaagatcgaggtgctagttttcattcttgttgatggtgtttagtatttgctgcagctgtacacaaattcctcaaacttcatgagcataaattgtttgcctttagctttctcaagtttggaatctgcttcttagcctcatttctcaacattgaaatttgtataaaccttaacagcaccagtctggaagtcagttatactcatttagtcaaacagccattattaagaacctattatgtagatgartatggtctttatctttgagact

SEQ ID NO: 838594 - DNA, 481 bp, Homo sapiens
ctggagaccctttcaggaggtttgcaaggccaaactattctcagagtaccaagaagttatttgccttttccactcattctctcacgagtatccastggaattttccagaagcaatatgacatgtgctgacattattgttctgacagctaatggaatatgttatgtgtattcttgtgttttctagaattttccaaggtaagttctatgggtcttcaataacttttaaaagtgtaaaggtgtcttcagaccaaaaaaactgagaactcttgtgcagagtgagagatacaagacagcttgcctacttaaaaacaaaaacaaaaaaagaagtaatggttcttcattttccttcatatttcctaccaaccaacccactctataactaaaattttctaacatatttgaagaaaagatgtgaaaggaactataaataggtaatagatttaattagctaaagtgctctagagaaatatcttgagacaaa

SEQ ID NO: 838595 - DNA, 467 bp, Homo sapiens
cccagccaaaaataaactttctaaattaactgagaccyttcttagatttttacggttcccaccacgaagcctggctaattttaaaattttctgtagagatgggggtgttggcgggttgggccgagggaagagggaggtctcactatgttcctaggcctggttgtgaactcataggctcaagcaatccccccatctctgccatgcagccaatacaagatttttttaaagttcctcggagaggtgaggaggctgaggtgcatgttcaccgactcctgtccctctttggttgaaggttgctcgtggggacacttcggattggtctggggtagaggagcagagaaagccctcaggcagagacccaggacagcctctgcacaaatgggcactgtctggagtgtacagaggacaggagaggccctgaagggtgtccaatgccacctcaccaatgtcacacccaccttcaccat

SEQ ID NO: 838596 - DNA, 462 bp, Homo sapiens
aagagaagtctcacaaagctaatagaacagataatatatccataaagaaaaaactagaaaacccgtaaaaactaaagcaaaactcmcatttactgttgaaatattattagaattctcattaaaactggatataaaaaaggaatttgcaataagatagctactattcaatatagttctagtcaggcaataataaaagtaataggaagaagcagtataaatattggcaaggagaagactagatgacaaaattttaaactacaaaattcagagaattaacaggaaaactgtaacaagaaactatcaaaatttagtatggtggttgatccaaatataacttagaaaatcaatagctttactgtatatacactgataacaaggtagagaaaagttcaaaaggatctccttcataatagcaaataaaactattaagaacatttgaagtaatctcataatgaaatagga

SEQ ID NO: 838597 - DNA, 403 bp, Homo sapiens
tttactttattattacttttaaattttgagcaggcccttggtgtggttagattcaggccacaagttttgactagacttctgtgattatggtttcaacgtcaatttcattttcaaactttttgcaatatttcgcatatttgttccatggttataatactcactggccatttggggacctgagtggtagtctattccattgtttacttctcaaagtctatggaatgctgttaagatcagatccatgtatatgcagcttgagggtgaggctgaaatttcaaagacaacttatggggtcactttcatgaaagttttcctcttttatccttcttcygctttatggttctgcaatcctttcctttactttgcccttgtcagaaagctgggattttatttgccctagtct

SEQ ID NO: 838598 - DNA, 651 bp, Homo sapiens
tcaaacaacaaatttattcaaaagtcattctaactcataatggcattatttgaaacactatagtttataagtatacataaaaatagttacaccatgtaaaaattccttaccctacggtattatgtactttgcacagtgacctctgctccactttgtatttcccatccaactaagaataggaggggagaaaactatgccaaaaaagttgactcaggaaacaattccaaaatctcacgcacttgaaaatatgtgtagctagtacggaattgaggaaaatctgaatgaaaatgatgtagaatcaaaacataaattacacaagactcccctgaaccatgccagtagccgtacctttagagctggctagagatgctgcttagttgagccctgtgctttagatggcctgcatattataaacacatattcagaaaaattcattaaagacacagggggacacctaccatcggtatcttgtgctcaaggctaacagagctcaatataaaatcccaaatattaatccttataactaacactattcagggcgaaaaaagacagctgcatccaaatgtcatgaaggtttatgggttatgctgctgcctacagtacagactgaaagtgcttagtttaacaamaaaaaaatcaaattaattaact

SEQ ID NO: 838599 - DNA, 513 bp, Homo sapiens
ttggcagttaactagaaccattctctaagggtaaacgctttagtacaagccataatagcaggatatagtgctcaaaccagcacacttcctccattaaggaggaaaatgcaactgtcgcatagcctctccygagatccatttctcagggagccaggcaggtcttacaagtctaggaagtcaagggaaatcacaggcagaggactaaagctgcatgggtgagcgtgactaatcccacttagttcctctagtcccctggctgaaggtcacacacgaaaccatgggcagcatgttcaacaaggtgctagtacccaggaaccacggaggaaaaacagcagcagggacacccccactatctccctctccactctgggtcacactaaaaaagggatgccattttcttgcttcttgcttccctttctagatgggtaagagatcatcttcagcttgcacccctctgaagtacattgtgaagcacaagaactcctttgaccctgaaacgttaaagaataaagc

SEQ ID NO: 838600 - DNA, 529 bp, Homo sapiens
aataaaaccacattacaatagtccccacgtcatcatgagaaatgactgcagtggatgcctgaaaccacagatggtagtgaaccctatatatatgttgtttttctctttccttattaagtcaaacattttcaccttttcacttcaaggaagtgctttgcagcatctctttggcatatctgaattgccagcattactactcccgcactttagggccattattaagtaaaataagagttacttgaacataagcactgcaaaacctccactccacagtcagtcacataagaagatgtctaccagatgacacatacatcatggatatgctggacaaagggatgactcatgtccagagtgggacggagcaggacctcacaagatttcatcatgctactaagaatggcayacaatttaaaactcatggccaggtgctgtggcttgcgtctgtaatcctagcattttgggaggccaatgcaggtggatcacttgaggtcaggagtttgagaccagcctggccaacatggtgaaaccc

SEQ ID NO: 838601 - DNA, 584 bp, Homo sapiens
gcaacataacagaattctaccaaaacacagaygaccacacagagaaaaaaaagaaataatttataaaccaactaggtaacagttgaaaatatgacaggaacaaaatcatacatatcaatataagtttgaatgtaaatggatcaaacgacccaattaaaacatatagatggtggaatggataaaaaatgtgatccaacaatatgctgcttatatgaaactcaccttattggaaaagacatatatactgaaagtaaaggggtggaaaaagacattccatggaaaccaaaagcaagtaggagtagctttacttatattagataaaagagatattaaatcaaaacagtaaaagaagacaaagaaggttattatataatgataaagggattacttctgcaaaaggatataacaatcctaattatatatgcacaacactgcagcacctagattcataaaacaagcattaccagattgaaataaagaaagagcaagacaataatggtgggtcaacaccccactgacagcactaggcagattatcaagacagaaaatcaacaaagaaacactggacttaaatcgggctttag

SEQ ID NO: 838602 - DNA, 572 bp, Homo sapiens
aagtatcacttctggcacagtagttgcaattgagatttccacttcgttgtttgagatagtccagtgtcatgctctgggatctgattcctttttgtaggggccagactgatgaattaaatgaaaatatgctggagattaccatctctgtatcttttaggtcttaaggatggcactctttcccttgggatataatattttaaggttttgtgttggatttttaaggagggtcctcagattttttcattatagcagctcctaacccacagactaaggaatcagcaaggggttctgccatctaccacatgcatcctttccggtgataaattcaggaactggggaaatggccactgggtgagtccgtggaaccagtatacccatggtgagtctaacctgaactagaactccttttattacctgactcccacatgcttcatctctaacaatgggctattatttgctttagaggcctgggraccaattcagaccatgaatccgaaagttctcagaatgtctgtgtattctcccttccccagcatctagttagccaaatgcatggttatacatctctttgg

SEQ ID NO: 838603 - DNA, 612 bp, Homo sapiens
gtggtggctcatgcctgtaatcccagcacttttggaggccaaggtgggcaggtcacccgaagtcaggagttcaagaccagcgtrgccaacatggtgaaaccctgtctctacaaaaatacaaaattagcctggcgtgatggtgtgcacctgtaatcccagctacttgggagtctgaggcaggagaatcacttgaacccaggaggtggagcttgcagtgagccaagatcgtgtagcactgcactccagcctggacaacaagaatgagattccatctcaggaaaaaaaagtccctttttaaagatagtaattatttttactttccaatttacaaataatggaatgtattttctaagggggtagaagggaaatgaaatattctatctatatgctttgaattcactccctgtctcagcactcactatgtggccagagaccagagaagaaaggaagcctggaagaggtcccacctacctgactgcagcctcggttttcatggagatgatttaggcagtgtctggggatctgcttgccatggatgatagcctgcccctcagaggacaaggagaaaagtgtgggagaagcccggccttacagttagtatacagctcgtag

SEQ ID NO: 838604 - DNA, 622 bp, Homo sapiens
gattttcaaactttagctgatcctatttttatgycctaaagttccggaggctccaggtaaaagggccgctatttaaatactcatgttgcaaacattaagggataaaaggcaggatggaaaatttaaacacatgcaaatatattggtcagaatggtggactgtgcagtcctggcagaaaatttgctgcctattcttttctagggtgggctcagatttatcagtgaggccatgccctgagcagaattgccctgtggcaaaggaaacctgagctgaggactaaatgagaaagtccagaaccggtgaatgcacatgaccccagctgaaagtctctaggaaacatccccccaaggagggcttcataacccagggctcactgaagaaaattccaattgaagataagctgaggagaaaatatcacaaaacactgaaaaacaccactatgagaggtaagtctagcagatgcaacaaatagagcgttcatgcccaagaaagtagaagtaataaaatcagctgaaaaagtactttaatataagtatgttgaaaatattgaaagtttaaaaaaggatagaatccataaaaatggagataatggaagaggacggaaaaacttggggaaaaatag

SEQ ID NO: 838605 - DNA, 633 bp, Homo sapiens
cacagctatttaatgtgtatttcagcagtataccacagctatttaatrtgtatttcagcagtataccacagctatttaatgtgtatttcagcagtataccacagctatttaatgtgtatttcagcagtataccacagctatttaatgtgtatttcagcagtatgccacagctatttaatgtgtatttcagcagtatgccacagctatttaatgtgtatttcagcagtatgccacagctatttaatgtgtatttcagcagtatgccacagctatttaatgtgtatttcagcagtatgccacagctatttaatgtgtatttcagcagtatgccacagctatttaatgtgtatttcagcagtatgccacagctatttaatgtgtatttcagcagtatgccacagctatttaatatgtatttcaaaatgcaggcagtccttgctttgcatggtaatgtggagccataaaaatgaccatgctgctgagactctgcaaagcaatgttaatcatcagtgaagggaaattattattctgtgacctttacatttttttgtgaaaatattaaaaactgcaatagtcaactataaaggtacaaattaggaaaaagtgaaaaatatattaaagttaatattgtta

SEQ ID NO: 838606 - DNA, 624 bp, Homo sapiens
ctactcctaatcctctattaacataaatgttttatgctgaatgtgtggtaacccacaacaaaatctcattttctagattcagaaatgttaaaacaaaaatgatcaacaccgcccccccgccaaaaaaaaaatcctcaccatggaatatagttccagaaatgactaacagtattaagaaataaacacaggtgttctgagacacagcacttaaccctcagccacatttgcctcctgctactttcagcctactaacctcacccatgaattgacaatatgtaaaaaccccttctgtcctttcacgttgtataaagtactttagtgctatagtgttaagcaacatttaagtaattaatgcatttctgctgtcacaatgcagcaattttgccagaatgtatgtgggagaatgtagatggattaaacacatttatatctccaagaaaattgagcagctatgtcaaaataaaatatcactgtgcatggtttaccattttatttttttctctaattattagacaaatttcaaacttggctgtctgtctgagtatgagacagattagggctatttatttatacctaattccaattagaatatataggattstcatttctaaaataagtatggtt

SEQ ID NO: 838607 - DNA, 592 bp, Homo sapiens
ctcactgcagcctccacctcccaggctcaagcaatcctcccacctcagccccccaaatagctaggaacacagatgtgtgcccccacactaagctaattttttgcattttttgtagagatggggttttgccatgtttcccagactgatctcgaacttctgggcttaagtgatctgcccacctcagcctcccaaaatgctaggattacaggcgtgagccactgcactcagcctagattcataagtttcaagtatgttaaaacttatgaataacaatgcaataatattaagaagcagggcctatgggagttgattagatcatgagagtggagccctgatgaatgggattaatcaccttattaaaaaaaacctgagggaacttgttcctcacttccaccatatgaggacacatagaaggcaccatctctgaagcagagagcaaaacctcatcagacactgactctgctggcaacttgaccttgttcatttctgcttccagaactgtgactaatatatttctgtcctttataaattactcagtgtaaggtattttgctatagtascctaaacagactaagacaggagattaaatgag

SEQ ID NO: 838608 - DNA, 536 bp, Homo sapiens
aaaatgtaatgcctttttgttcacgtgactttagtaatcttttggaaataaagacagttttaaagattgttggtaaaataaaawgtcttgaaaatgtagacattaggtctaaattaaggtcagatatcagatttgtggaatgctttaaggtcaaactgttttctctgactataaaaaattgttcagtttacctacctttaagccattagattctagataaggcatggggatatgtgaaattagccatgtcccctacctatacaaagaaaaatataaagaaagagattttatataagaaaggatcttgcatggtaaattcttgtcctaaagtaaaatgactggttgtttaaaaggagggatgtttaaggcaagtcaggaagtccaagaatatctcagatggtctgtgtaagtcataaaaggatttgtgaaagggaatttatgcaagaaatgttgtacaattcaaaagtcgttaggcctcccaaatgctttataaaatgccactataactcttgctgtgcaacttgcctgcttaagta

SEQ ID NO: 838609 - DNA, 596 bp, Homo sapiens
ttacccagccataccaaaaaaaaaaagattttgccatttgccacaacatgaatgaaactggaggacattatgctatgtgacataaaccagacataaaaataaaagttgtattatatcacttatataaggaatctaaaaattaaaaggttgaatatacagagatagagaatgaaacagtggttactaggattaaggtagagggtatggggagatatatgtcaaaggatataaagcagcagatagataggctaaacaaacctagaaatataatgtaccacattaggactatagttactaatactgtattcaagatttttgctaattgagtagatattagctgctcttgccacgaaggagaaaaaatggttaactatgtgagatgctggatatgttcatttgcttcattctattaaccgttttgttatctacatgtatctgataacaccaacttatatgcaaaaaaaawtttaaaaagaacataaaactgtaaaaataaattaataaacaatcgcattggctcaccatacaagaagtgaaaactgatggtgctatatgtaagagaaaatagaaaaatccaccatcactgttggagtcaa

SEQ ID NO: 838610 - DNA, 589 bp, Homo sapiens
aaatctagttttatttttttttgaggatcctccactctgttttccatagyggctgtactaatttacattccaacccacagtgtactaccagtcttttcatttttctacatccttgccagcatatgttgttttttgtctttttgatagtggctatcttaacgggggtgagatgatatttcattgtggttttgatttgcatttcccttatgattaatgatgctgagtaattgtcacatacctgttgaccatttggatatcttttttttgagagatgtctattcaatcatttcaaatttttaaaatcaaattatttgtgactttttgctattgatgtcgtttgagttccttaagtattttggttgttattttcttgctggatgaataatcttcaaatattttttcctattctgtgtgttgtctcttcattctgttgattgtttcctttgttctgcagaagctctttagcttgatgtaatcccatttctatatttttgctcctgttacctgtgcttttgaggtctaaacccaaaatgtgctttcccagaccaatgtcctgaggtgtttttccaatattttcttctagtatttt

SEQ ID NO: 838611 - DNA, 470 bp, Homo sapiens
gcagtggctcacacctgtaattccagtactttgggaggctgaggagggtggatcactggaagtcaggagtttgagaccagcctgaccaacatggtgaaacctcgtctctactaaaaatacaaaaattagccgggggtggtagtgcacgcctgtaatcctagctactcaggaggctgaggcaggagaattgcttgaacccagggaggcagaggctgcagtgagcccagattgtaccaccgcactgtaccccagcctgggtgacagagtgaaactccatctcaaaaaaaaaaaaaaaaaaaagaatactgcgaagaatagcaactaaatggagcctcagcactattggagagtgacattttattaygtaacaatctatttgaaaggaaataattgacaaatgcatttgtcttctcttttttatttttttgagattcagaaatattttattggaaatgtgatgcaatttcatt

SEQ ID NO: 838612 - DNA, 629 bp, Homo sapiens
aagacaggagcctgccagacccagtggcgaggcaaacgcttttccctatctctccaactattaaaaaacaaaacaaaactaagcaaattaaatcaaaatagaacaaccccaaacttccctccatgaagtagaattataagaaagtgggaaacaattttaaaaattagaatcttaagtttatcttttgcattgtacttaacaaaccagctacatgaataaagacagcagattttaaactaaaattttaagttaacttcagaactaaagtttatttttaaatgcaaatgaatggatgacacttaaatcttacatttatacataagaacaaaattaaatatgaaattttaaacattagggcagtggtttgtttctttgtttctgttcctgggtgtgttgtgtgataggaggaggctgaaatacaaagatttgtggcgggaagcactgacccggctttaagcacaatcctcagagtctacatccttcttcaatcttgtcttctactaaaaggcctcaaatcttyggcaattcccctgactttctatattctactttcctcatctattagctgagggtgactaactctgactcttcaagtttatgtgaggagtatctaattaaaagtcttgaaa

SEQ ID NO: 838613 - DNA, 627 bp, Homo sapiens
tccctgttgctctcaggatggtccatctttttgttctcttccggccttcractgattggatgaggcacactcgcactggggagggcaatttgctttcctcagtctaccaacttaaatgttaatctcacctagaaacaccctcacagacacactcggagtaatgttagaccaaatatctgagtaccctgtggcccagtcaagtcgacacataaaatttactctcggccaggcatggtggctcacgcctgtaaccccagcactttgggaggcctaggcgggcagatcatgaggtcaggagatcaagaccatcctggctaacacggtaaaaccccatctctactaaaaatacaaaaaattagccgggcgtagtggcgggcgcctgtagtcccagctacttgggaggctgaggcaggagaatggcgtgaacccgggaggcggagcttgcagtgagccgagatcccgccactgcactccagcctgggcgacagagcgagactccgtctcaaaaaaaaaaaaaaaaattaagtctcatgggtgttgggggtgggagagtaataccacctatcatgtagcattatgagaattaactatgggtattaaatacttagcacagcatctggtacataa

SEQ ID NO: 838614 - DNA, 432 bp, Homo sapiens
tggcctatgcacagtctctcacagtttacagagaacttctgcacctgttatgacaattggatcatcacacttactctttgaygtggacacagcaggattagtatctccatttttccaaagtgtaaaccaaggcttagaaaaggtaaatggcaggccctaagtcatactcaagttcaggtctaatgtaagtactgtcaatttacaacactaaaactttaccctgagaatatcaaaatacttaacaactgataaggtatgggtactgaccagtcaggataaacaccagccataaacagtggatgtggccattctgattcatgtatttgactatctcccagatgtttgacccaaagccactactctcaacactacaactgtgtatctttgggtccttctctgccacttcacataagctcttctgttcccaaataa

SEQ ID NO: 838615 - DNA, 464 bp, Homo sapiens
tttaggatccctcctcagacaagcaggcctaacaaaagctattcctgaaggtatgctatgaggagcctcagaaattgtatccttcctattcatgtaagtgaagataaaaggtgtcactcttccagccttggacatcccttccctccctcagggtatggccctccacttcatttttggggcataacatctttataggacagggataaagtcccaatactaacaggagaatgcttaggacccttaacagtttttcgagaatgtgttggtaagggccactaaatccgaccttccttggtcctccatgtggtctgggaggaaaactagtgtttctgctgctgcgtcggtgagtgcaacyattccgatcagcagggtccagggaccattgtgggttcttgggcagggggacaagcaaaacaaaccaaaaccgcgggtggttttgtctttcagatgggaaacactcaggc

SEQ ID NO: 838616 - DNA, 575 bp, Homo sapiens; identical to SEQ ID NO: 830154

SEQ ID NO: 838617 - DNA, 616 bp, Homo sapiens
ttgctggttctgattttcttcatttgctcaataaggatgataaatagctactcctcagggttgctgtggggatcagatatgatacgagtaaagggctggcactactggtttcctaaacccaactcccttccatcttgcccatgtcccatgcaggtattggaaaacccaagcattgactctccagaccagcctcgcacctaagaacgccgtgggatgcagtttcagacagtgagaaatctgctggggatgcctgggaaagggacatacctggcaggtgccgctccatggccttcttgctgccttgaattgggacatgagcctgagtcgcagcagccgtcttgtgactgagaggtggcaagcaggaggaagaggctaagagaatagagacactgttgagctgctgaagcacagcaagcggccacttctctatgcttcttgctatttgactgttaagctagtgcaagttacttttctggtcagaatgaattcataactgaaacaygctttaaagtatgactattattattaaatgcagcataagctttccatagctgctacacgatcacacccactgctgtctcagactgaccagtggccgactaaacatgacagcaag

SEQ ID NO: 838618 - DNA, 620 bp, Homo sapiens
ggctattacgctgtcaaataactttgggaaatactgcatggctatttatttttgaaggagacaagggagacaggctcaaggcaagtggcctgggactcagaaccattctagaargggccaggagtacaaagagaaagcaagagagatggccagacatgtgtcccaatgagaattagcgggtagtcctctggtagagtaggcttcatggcacctgtggactcaccccatgctaagaggaggaaaaattcccaaagataagctttctaatatactgtcaactttgattggaatagaccatgaattaggcagtgacctgatcctataaatcaaagacctttagtaactatagcttaggaagtaagcatggatgctttggataattgtaagaagaatgtccccaaaagtaatgacaacagtaatagcaattacagcagagtaataaaaataattatatgaaaatttattatgttctagctactgttttaagtgctgtatttatattaacttatttattatcctaaaattcattcacttaataaacatttattaaatgcctcctgtgtgcaaggtgccatgggcaaaatagataaaacctccttcccttatgaactatattttag

SEQ ID NO: 838619 - DNA, 605 bp, Homo sapiens; identical to SEQ ID NO: 813766

SEQ ID NO: 838620 - DNA, 635 bp, Homo sapiens; identical to SEQ ID NO: 813767

SEQ ID NO: 838621 - DNA, 614 bp, Homo sapiens
ttaggatccacggtggactcacagcctgtttaccatattgtgagtaatatcatctccccctctggagattatgaactgtttcacagacgggtgtacacactcggtgtacagagggtgtacacccgtctgtactgggagtaatatcatcctcttcctccctgaatattaagaacagtatcacaagggtgtttctactccctgcgatatcgcgtgtcatatcctcctctcccacgttgcaattagaaacaatatcagtgggggcgagtccaccttctgtcatattgaaagtaatatcatcttcttccctccaggatcgtgggaaaaatatccctggggggtttccactttctgccatacatgtagtcatatcaccccctctgccttggaatattattaaggaccatctcacacgggggtgaatacttactgccatattgggagtaatatcaacctctcggcctctgaatattaggaagaatatcacagcgtgggtgtacacatcgtgctctattatggggagtcatatctgcctattatggsgagtaatatcatcctctgcctttcaggatattaataaacaattcacacgctgggtcaacacaaactgcgatgct

SEQ ID NO: 838622 - DNA, 614 bp, Homo sapiens
ttaggatccacggtggactcacagcctgtttaccatattgtgagtaatatcatctccccctctggagattatgaactgtttcacagacgggtgtacacactcggtgtacagagggtgtacacccgtctgtactgggagtaatatcatcctcttcctccctgaatattaagaacagtatcacaagggtgtttctactccctgcgatatcgcgtgtcatatcctcctctcccacgttgcaattagaaacaatatcagtgggggcgagtccaccttctgtcatattgaaagtaatatcatcttcttccctccaggatcgtgggaaaaatatccctggggggtttccactttctgccatacatgtagtcatatcaccccctctgccttggaatattattaaggaccatctcacacgggggtgaatacttactgccatattgggagtaatatcaacctctcggcctctgaatattaggaagaatatcacagcgtgggtgtacacatcgtgctctattatggggagtcatatctgcctattatggcgagtaatatcatcctctgcctttcaggatattaataaacaattcacasgctgggtcaacacaaactgcgatgct

SEQ ID NO: 838623 - DNA, 640 bp, Homo sapiens
cgcatcaggcgtgtagaagggtgtaggggcgcccggggctccactcctggagactccacgaacggatmtgctgggtccaccgtgaaacaaaccgggagggccgtgaggagaccgccgcgtttctcttcagacgcgggtagggcgtgcttgtcccattcccaggaacccaactcatctgaaacaacagggcacaaccgccggcctcgggttgctcagccgccaccccagaaatccccgttggaggtacctcctctgagccactgcaaatgagcgggaatcctctaccggccacaagcccagagcccccagcgtgccagttcctcgggatgttcagcggcttccactgggggagaagggagggtcaaaatcagcaacgttcctccgggagtgggaatctaaaaccaaatcacctccccgagggaatctccaaactacctactcgccccaggctccgaccctcagcatatccacctgccgcgggacccccaaaccagcccctctcctagtaaacattaattcaagtacttcctccggaaatccccaaatagccacttgcctgggaaaccccagctctggtccttccccgtctaacccccttttctaagacggtcggccgtcactccctgaacttccacagcac

SEQ ID NO: 838624 - DNA, 640 bp, Homo sapiens
cgcatcaggcgtgtagaagggtgtaggggcgcccggggctccactcctggagactccacgaacggatatgctgrgtccaccgtgaaacaaaccgggagggccgtgaggagaccgccgcgtttctcttcagacgcgggtagggcgtgcttgtcccattcccaggaacccaactcatctgaaacaacagggcacaaccgccggcctcgggttgctcagccgccaccccagaaatccccgttggaggtacctcctctgagccactgcaaatgagcgggaatcctctaccggccacaagcccagagcccccagcgtgccagttcctcgggatgttcagcggcttccactgggggagaagggagggtcaaaatcagcaacgttcctccgggagtgggaatctaaaaccaaatcacctccccgagggaatctccaaactacctactcgccccaggctccgaccctcagcatatccacctgccgcgggacccccaaaccagcccctctcctagtaaacattaattcaagtacttcctccggaaatccccaaatagccacttgcctgggaaaccccagctctggtccttccccgtctaacccccttttctaagacggtcggccgtcactccctgaacttccacagcac

SEQ ID NO: 838625 - DNA, 640 bp, Homo sapiens
cgcatcaggcgtgtagaagggtgtaggggcgcccggggctccactcctggagactccacgaacggatatgctgggtccaccstgaaacaaaccgggagggccgtgaggagaccgccgcgtttctcttcagacgcgggtagggcgtgcttgtcccattcccaggaacccaactcatctgaaacaacagggcacaaccgccggcctcgggttgctcagccgccaccccagaaatccccgttggaggtacctcctctgagccactgcaaatgagcgggaatcctctaccggccacaagcccagagcccccagcgtgccagttcctcgggatgttcagcggcttccactgggggagaagggagggtcaaaatcagcaacgttcctccgggagtgggaatctaaaaccaaatcacctccccgagggaatctccaaactacctactcgccccaggctccgaccctcagcatatccacctgccgcgggacccccaaaccagcccctctcctagtaaacattaattcaagtacttcctccggaaatccccaaatagccacttgcctgggaaaccccagctctggtccttccccgtctaacccccttttctaagacggtcggccgtcactccctgaacttccacagcac

SEQ ID NO: 838626 - DNA, 640 bp, Homo sapiens
cgcatcaggcgtgtagaagggtgtaggggcgcccggggctccactcctggagactccacgaacggatatgctgggtccaccgtgaaacaaaccgggagggccgtgaggagaccgccgcgtttctcttcmgacgcgggtagggcgtgcttgtcccattcccaggaacccaactcatctgaaacaacagggcacaaccgccggcctcgggttgctcagccgccaccccagaaatccccgttggaggtacctcctctgagccactgcaaatgagcgggaatcctctaccggccacaagcccagagcccccagcgtgccagttcctcgggatgttcagcggcttccactgggggagaagggagggtcaaaatcagcaacgttcctccgggagtgggaatctaaaaccaaatcacctccccgagggaatctccaaactacctactcgccccaggctccgaccctcagcatatccacctgccgcgggacccccaaaccagcccctctcctagtaaacattaattcaagtacttcctccggaaatccccaaatagccacttgcctgggaaaccccagctctggtccttccccgtctaacccccttttctaagacggtcggccgtcactccctgaacttccacagcac

SEQ ID NO: 838627 - DNA, 575 bp, Homo sapiens
gttgtaataacagaacatccgaggctgggtaattcataaagaaaagagataatttctgtcatgattctggggagtgggaagtctaagaagtaacacaccagcatctgcttgcctgttggcgggggcctcatgctgcattacaatgtcatggagaagcggaagatgaagcaggaatgtgtaaagagagcaaatacgagggccagccttaatttgctctgcagaaatgaattcagtcctgtagaagtgaggactcactcactcctgtgagactgttaatcccttcatgagagtagatccctcatgactcaaacgtcttttaaagcaccacctcccaacactgtcacattagggagcaaactttaacttgagttttgatggagacaaaccatatccaaaccgttgcattctgccccttgccctccactgtgaggaaattcacattctcctcayagtgcaaaatacagttattccatctgaatagtccccaaagtcttaacatggtctagcatcaacccaaagggtccaaagtccaggtgtgggcctgtgaaatgaaaaataagttatctaattccaaa

SEQ ID NO: 838628 - DNA, 610 bp, Homo sapiens
ttactttctctatccatgcaccaaactagagtttcaattataaaggctttataacatattttaataactgacagagcaagcccctctgtgccagatttgttgatttttaaagatttttctgaataatttatttcttccaataaaatttattaaccattatcttcagaaagaaaatctagcaacttggtggtccatttattgggtttctgttgtatttaaaaataaactcacctagaacagaagccttgctgaagttgaatcttcctatctgtatcttcgtttgctcaagtctacttttgcttctctcaatagtgtttaaagtttttctcacataggttttgaatgtttcttgcaaagttagccaagatgttttattcatttttgctattataagtatggtgttatttttcatgaatcattttactggtatttcatctatatataaaagctattttttgctacgttgtggctgttttactgttttccaactttctattatgaaaaatttcaaacattgagcaatgttaaaagaactttagagtgaacccactaactaaattctaacattaccattttactatatttattttwtaaggctattcatttttaa

SEQ ID NO: 838629 - DNA, 602 bp, Homo sapiens
atgcatagcagagagtgattctttcatcaacgcttgaatgtgaactacattcaaattctgaattgaatgtagctaacttggaaaaataaatggctcaggagttaaacttggtaaaatagcataaccttttaatggttgaatttaaactttaaccagagatccaagcatcttcagatgactcttatttgcctaagcagaaagcccaagtcagcactaataaatcactaactataaagcacaatcttctctttctcagtatcatcatttttgagacaataagtcactggaagccatcccagagtcataaaattagggaaataacttatgacaagagagaaagatcgcattaactttacaaatgtcaaatttcaagagttggaacctaaaagaactgctggtattaatacaagtgttttcaaacatcagaataaaaggtcttactcatggctaccaggaaagatgaacaataacaacaacaaaaataaatacattcgcttgatttcaacattagtggctactcacgtgccacataattaaactttataggaataaatgtagggctcatacaaatayataaacaaattatcatcatatgtaatact

SEQ ID NO: 838630 - DNA, 663 bp, Homo sapiens
tggatcaaaggtgacccttgctatgctttagcaaagagactgggagcattttgcccctgtcctagagatctgtgaaattttgcacttgagagagatgacttagagtatccggaagaagaaatttataagcagcaaagcattcaagacgtgacttgggtgcgcttcaaagcatttggttctatgcattcaagagatggtttggaattggaacttatgtttaaaagggaagtagagcataaaagtttgaaaaatttgcagcctgattacaaggaaagagaaacccattttctgaggagaaattcaaggcagctgcagaaatttgcataagtaactagaagccaaatgtaaatcaccaagacaatgtggaaaatgtttccagggcgtgtcagaggtcttcacagcaacttctcccatcactggcccagaggcctaagaggaaaaatggttttctgggctaggccccgggcctcgctgctttgcacagtctcaggacttggtgccctgcatcccagctgtgactaaaagggtccaatgtacaactcacactgctgcttcagagggtgcaagccccaagccttggcagcttccacatgrtgttgggcctgcgggtgcatggtagtcaagaactgaggtttgggatcctccatctagatttcagaggat

SEQ ID NO: 838631 - DNA, 642 bp, Homo sapiens
gcacacagatcaggaaatagaacctttccagaccctcaaaattgccttcttctttctctcaatcactaccctccttgccccaagtcatctccttggctgamttctacctccatatattcaatttgctagacctcattcttctcgtgttcacattcctgaggcaaagctctctttttgcaaagtaataggattcttatcacaaagactttctggttaaaaaacaagctgaataagccactactgcattgtgcaaggttgctttctcttttgcctacagagggctttcaggtagcagaacaaaatcactgtaatgagacagaaatggtgcctgtgagcaaaggtatcatgtctccttcgctagtggggcaagcactagactcttggaattgttccgatcaaggatgagttaaaccctacattttaattcttcctttcatttattcattcattaaatacttaacgtagtacagagtacacagagtatcaggcattggcctgtgcactcagtgtgtcgacagttaggttagagataaaaagaggaaaataaatctctgaaataattttgatcaatgctactgaaaggttttgacaagtttcagaagtggaagcaaatatatattttctacttgctctgtagcagga

SEQ ID NO: 838632 - DNA, 583 bp, Homo sapiens
atagatagattggatggatggatggatggatggatggattgggatggactgggatggactgggatggatggagtaaatactcatagtagataccttttcacgaatgctcagtaaactgtagctgtggttaaggacttggccttagtcatttgtccgagagcctgtaggctctgtcatggcactaggcagctgcgtaaaaggccaggcctccatcccgacctgtgtattcttgcctgggttgagccagctcggtttgtgtgagtattcttgtacccccttccagaaaggactagctaaaagacacctgctctgagttggccatcagcagggcatcgggggagttgggagccggtaggaactgcagctctgggtgctgtgaagagggccctgagccgcatccaactaaggaagtgaaatgttgctgagctcccaccctcctaggcagaggtctgagccgctgggatgtggacaggtgacctctgaagcgttgttcagctccgccaccatccagtttgagggttgcttggtcccatgttctctccagtcctgtagtgggagagcaragggggtggagcttggatcc

SEQ ID NO: 838633 - DNA, 536 bp, Homo sapiens
gtatttgtggttccttaatgaggatccacaaaattgcatatgtttcaagattcttccccacaggaacatattttttggcagaagaaccagttagagcaaaggctctgtggtaaatgtgcctgatctgctcaagaaatagcaaggaaaccccatggcaggaacagaatgaacaagagagatgagaggatcatggaagggcttggaggccactttacgaattttgatttttatgaggggtcataagagcttgaggcagagttgcgatatgatctgacttacatttcaaaacattgcatattgggatcagacttaagagaagccagggcagagcacaggaattgttgggggccatggcagtaatccaggagggagagatgatggtggcttggaccagtatggagcccatgacagtggtgagaagtagctggaytctggatattttgaaggtcaagtcaacaggacttgactgatggatcagatgtgggttgtgaagacagatgagtattaaaagtgatgagacagcatgaggtcaccaa

SEQ ID NO: 838634 - DNA, 510 bp, Homo sapiens
taagttcttaaaagtttactctccagctgttctcagtgaagatattggggcagagttggactgaagatgtcaggaagtatatcagagaaatcagtttggaggccatttccagagtccaggtgttggcttatatcaaagtggtgaaaggatagtaggaaccagagaacttacagatgaattagatgtgggagatgagggaaagggaaagatttctgatctgtatgaaatggagtgccgtttactgagctggaaagacttgggattgacagagctgggaggctttcaagggaatctagagtttgatggagagtatgttatgtttgagatgcctgagagacatcgagagagagagagaaatagaaagagaaagtttgagttactaattacattttcaggtctggagcctattagaaatatagtttatcagcatatattgatagtatttaaagaaatgtcagaagaactctatattttagaagttgaaragaagaagtctatatagaaatagcc

SEQ ID NO: 838635 - DNA, 588 bp, Homo sapiens
taactttgtccccctgctttttaacaacttttgctgtatctcatgggttttggaatgttgtgttkccattttcatatggaaacatttttagttttaaatttatttttacattttctcaataaagttttaaatttctttttaaatttcttcattgacccatttgttattcaggaacatgttgtttaattttcacgtatttgtacagtttccaaattcctcctgttactgatttctagttttattccactgtggttagaaaagataattgacacaattttgacttctaaattcgtatggacttcattgcaccgtgttagccaggatggtctcaatctcctgacctcgtgatccgcctgccttggcctcccaaagtgctgagattacaggcatgagccaccacgcccagccataggtatctagttttattcctttctagtcagagaagatgcttgatattatttcaattttttaattttttaagacttgttttgtgacctaacatatggtatatgcttgagaatgagccatgtgcagaataatgtgtattctgcacattccattaggttaggtctattaataattgcttta

SEQ ID NO: 838636 - DNA, 608 bp, Homo sapiens
cctggctttcctgagaggggctgtattgtaggcggccagtgcgtcccgcccaggtctgtgtgctggtgaggaagtggtgccacccacctgygccgggccagggatgtggaggggagcacccatgtgctcaggcagaccctgccagtcccaggtctcacaccttgtcgggcttctggttgctcatctgtgaatcgggggcgcccccctggctatgctgacattgttgcccaggaagagccttgaaacagaaggagggctttgaagtgtgatgaggcccagctgggcgcgtgaggagcaccgtgggagttgagcatcgcctgggcatgagcccccggagcgtgcatcatcagggatatgtctcctatccttagcttcgcaatctggcaaatgggcctggtggtaggggcccccagtagggttggtgtgaaggctgaaggatgaatggagagccccaggcccactctgggggaggcggacagtgctgctggccgtagctggttcttgagtgtggctgagtgcagccacctgtgtctcccgtggcttctgtcttctggccacggagacaccatcatctgtgttggggccagcccttgggcttgtgatcgggg

SEQ ID NO: 838637 - DNA, 681 bp, Homo sapiens
atggtaaacacaggggagtccttggcacaggtcacacccaatactgtcccactttgatttacatacctccagtgatggggagcttactacctmtgcaggttgcctcagtgaaacattggttgaatcataacaatgatgtcacaagagtagcaacttctttaaatggactaattcatttaatccccacaatgactctttgaggtaggtgctgttatctcattcacagatgaggaaactgaggctcagagagtttaaccaactggtttaaggtcttatgattaaaaattgaaagagccaggatttcagcacaggcaggcaggctggctgcaaaggccacactcttgatcctagcataagcctcgcatctcacctgcctgggttaataaacaagtgcagagcaaacaaatgaactgcaggagagcccagtggacatttgtggacgtacaaatgacggaaagaacgcgcggcaggtactaacacgacgggatgaacacgtgtgcgaggggcatggaaggatgaagaggtgctgacgggtttgtacaggatgaacaaggagggaaagaaagaaaggaatgcatgtgagctcatcaattttgctgaatggaatgtgcccttgctctttcattcccagaacccactttgcagctgcctggggatcccttttagtatgttttatctcca

SEQ ID NO: 838638 - DNA, 648 bp, Homo sapiens
cattttcaactttcttgagttgagatctgagcttactaattttccatcatccttgttttctaatatgygtttgaggttataaatccttctaagtatcggccaggcatggtggctcatgcctgtaatcccagcactttgggaggccgaggtgggtggatcacctgaggtcaggaattcgagaccagcctggccaacatggcaaaaccccatctctactaagagtacaaaaattagccgggcgaggtggcacgttcctgtaatcccagctactcaggaggctgaggcacgaaaatcgcttgaacccaggaggcagaggttgcagcgagccaagatcgtgccactgcactccagcctgggcagcagagtgagactctgtctcaaaatcaatcagtctttctaaataccactctagctgcatcccacatgttctgatatacccttccttttttggtgttttgttccatgtatttttaaatttccattttaatttttttgactcacatatttcagatacttttaaaatcttttttagaactgtgagtttttgaggaaatatttttcaggtccatctagagttttaagaactaaatataagttactggagaacaaaatttgatagagagttgctttttcagagtataaactgat

SEQ ID NO: 838639 - DNA, 632 bp, Homo sapiens
agataataattagatctgatctcttttcagaaaccatgcaagcagaagagagtgtagtaaaatgtttaaagtgctgagagaaaacactyaccaatgtaggattttataccctgtgaaattatcctttaaaaatggaagagaaataaagactttctcagacaaaaattggcagaatatgtcatagacttaccttgcaagaaatgttaaaagttcttttagagagaaggaaatgatagaggtcaaaaactctggtgtatataaagcaagtgagagcattgaagagggaatgagtgaaggtaaaataagttttatttttcttaattgatctaataggtaacagtttaaaataataacattgtattcaattacatatgctcatgtattacaattacttatgtgctcatgtataagtgaaatgaatcacaatgtaagaaacaggagataggaattaggattatcttgctattaagtggtacttgcaccacctgtgaagtagtaaagtgttatttgaaagtggacttggattagctgtaaatgaatattgcaaactctaggaccagcactaaagtaaaacaaaaatacaactaatagctaagaaaagagacaaaatgaaattatttaaaatgctcagt

SEQ ID NO: 838640 - DNA, 544 bp, Homo sapiens
attacagacatgtccgtgataaagaattttcttagggcagtcacctttgagatgccatagacctaagaggtttcaaggagtattttgattacttcaaaggattctttggaccagaaaatccgtgtatgtcagaatctttgttggtagtaggaccacttaaattagagatagggagaaactcaccagaggcagatggcacaaaatgcgattatggttacattaagcttagcataatcattaatgattgaaattgcattttaaataatttttcatattgtggaatctcatgttgttttggggacttagtgtatcagttacctaaatacagttccaagaggtttataaaaatggtactcacggagggagtaggagatagtgtgtaggataggggaagggaaagagggagaaagcatgaatattgcagttgagaaaatatttttcaattactatgtattttgggagttctattttaaaatgtattttattatcttggaggcttgtgcttttacaraattataagtggtgtaaaccatctaccaactga

SEQ ID NO: 838641 - DNA, 611 bp, Homo sapiens
tttttcacattttggaaatttaaaaccttaattggtttgtgcaagatcacttacatttaaatcttgaaatatatatataaaaattcaaatttgaaatattttattaattttctattgctttattcatgttttttcatctttaaaatttttctcaaatttgttgtttttttttactgtgacttttttcataaaagactcctttttcacagtatagctatatacttttctttttattaggcaaattaaatgttagagcaaattggattaaataaattttttaaccgacataactgtttttattccaaaaagtttttattttgaggtataagtagtaaaatacacaaatcttaagtatatggcttagtgactgtaaagatatatatatacatacatgtaactaccactcagattaaaatatttaacattaaagctgggcgtagtggcacacgcctgtaatcttccgggggctaggcgggcggatcacttgaggtyaggagttcgagaccagcctggccaacatagtgaaaccctatctctaccaaaaatacaaaaactagctgggtgtagtggtgtgtacctgaatggtactcaggaggctgaggcaggagaat

SEQ ID NO: 838642 - DNA, 593 bp, Homo sapiens
atgccaggtagccaggagttgggtcaaagaagggagtcktcatcctgatggaaaaaataaggtcctgggtattatgaggtaggagaataaaaaggtttctggggagtaagtatgacaattactagtccccatggaggtctgatctggtcaggtggcaagggttgggtggggtatgatgtaagctcagtttatgtgtggagatgcccattgggtttggatatataggtttgagtattgagatgtttaaaggacatctaacccataggtaaaaactacttttgcttgacactgacttaacatttcaaaagtgttatttttggtcccaagatctaatgctgtctcagaacatgtgccctgttgtggctgcaagtggcactcaagttgactagagcacagtgacctgggttgtaccccaagtgcactaactcctcaatgcccttttaagtctaacttatttgggaaacacataacaaagggtaccataaaccgaatccaaattacgtgttgggccaaaaatgttgccagaactgaggcactttgtgatggagttgcaagagatagcttgagatcggctcagtctgatttattctagt

SEQ ID NO: 838643 - DNA, 524 bp, Homo sapiens
ctattgtcatgttttatgagcaagtcataaagggaggaagagggaaaacaaagttctgaggctttcttaatctacttgctcaacctgcatttttagtaaccataaagaaattggttgggctcacttttacagcttcctcttctagcaagaagtcccaccacatgccatccacctagccacttaatgctcgtcgaacaagtcaaatctatagcaaatatgtagtcttgttttgtactttttttcaaatgttatgtaaaaggtatactgtaaaatcatactagaacttctttcacccaatgatttttagatgtacctacacacatgtagcgtccccattcactttaacttgcactgaataaatatatcaaatgtactcttctatctccccactgacaagatacttggcattacstactccagacaaccaggcagcgactgttttaagtcttcttatgctgttgtttgtgctagaatttctccacagcatattttggaggtgaaattactggatccgtgtgtatgtg

SEQ ID NO: 838644 - DNA, 650 bp, Homo sapiens
aaaatatattaagctatgtatatggtaatttaattattaaatgtttaaatatgtttaaattagcaaatcatgtggtttaactttttcttagtaatgcctatgaaagttcatgttgtggaagaatagaaaagtagaatggggcacattgagccccaaatgaaaagctaagtatactagagttttcctctcaaatagtgcaacacatgtacatggtaagttgaaggttgtttaccattttatgttttgttttgtttgtttcttaagattaaggattaatgaggctacagagttcagttaactcaaatgtgaaagcttccaaatgtgaaattgatttgtttgttgctaaaatacagctcatgaacataccaaattgtgcaagcaatgtatcaaaaactgagtctgatgattatcttgggctgcttttaattgtgaaaaaattgtctaaaacatgatgcataaaaccaaaatgttggatttctaaggtatattaagattatgttagtatttttttcaaatttatttatttttaatrtttctttttttttaaacttttattttgggttggggatacatgtgaaggtttgttacataggtaaacaagtgtcactggggtttgttgtacttattgtttcatagtacccaggtattag

SEQ ID NO: 838645 - DNA, 613 bp, Homo sapiens
tttccctaagcttgtgccccctctggtgagtttatggagtaaatccgaacatatgtctcaagatggaatcctctagaggtatagtctgggctcaatcagtccccatccatcacttttcatyagcagatgcagtttttagagaatttacaaatgagccttcttctggagggccatgttttgcattgatatgggtaagaagagggatgccagggatatggctagcatgctttctcctattattcattcctgctgcaaccagactcaggagccactttgactctgaccagtagtagactaattcttctgtttctttgtcaagtggacttttaacagaatggggaaaattctaaaccaactgtataaagcattgaatttcaatccaaaacatatttagaatatactcaaattttataaaagaagccaacttcaaacgattttttttaatcaggtaaagtaatcctgaaattcactctgatttacttcctgcactctaaaggaaaaagggtgctagaaaaaatatttacctttacatatataaatgaacagcttagcattaaggatacagcctaatactcaatcccacaactatcacagctaggaaagtcattaagag

SEQ ID NO: 838646 - DNA, 620 bp, Homo sapiens
cattttttttagactcgtcagttctatttttagcaatttcaagtgggaaatatttagaattatagcacagctcctattaaagagaggtataaaagtatgaaaattatccagaatttaaaaaaaaaaagggttgtgacatagtacattttatatcatcaagccactactattagaagaatatggtattggaacaggaagagacaaaatggaaaaacaaagtagtactcagaaatagatccagccaaagggaatgtactaaatatgacattttaattcattcattaaaaaactgaatatataatgattatcttttcataaagttagactttcctaacttaaactaaaaaaattctagatagattacagattcaactatacaaaaatgaaaccaaataagtgatgaatctatagcagtttgagttatggggcattcttaacccaaacactaattccagatgactttaaggagaaaaatgggcctggggcagttgctcacacctgtaatgccagcactttgggaggtcaaggctggcagatcacttgaggccaggagttcaagaccagcctggccaaagtggcaaaaccacatctytactaaaaatacaaaaattagccaggcg

SEQ ID NO: 838647 - DNA, 536 bp, Homo sapiens
gggaaggggtaatctcatttgctcttaccagcaattgtgacacagtttggccaagataaggggaattctggtggagaggttctggaaaaggttttccttccagattaaatgacagtggtggggagaatacttcctttgaaagcaattttagaaggacataatgcttgtaggtcaggctgccacataacaacccaaaggaaaaactatgagaattcctaggagatggagacagagcccagacatcatggagctgttgggttgactgatcctggaactgccctcctctgcacttcttgttttgagcaataacaaatgctcttactgaacgttctaattgggttttctgttatgggtggcccagtgcaaactaattgatatgtgaggtagtcccacatatcaagatagttttatgttcctttatataccttgaagaaaaccagacaagytccttcctggcatcctgcagaatatgactcaatatgacttatcacgtccttcttcaggatcacaaggctgtctggagcctcttcttggct

SEQ ID NO: 838648 - DNA, 554 bp, Homo sapiens
ttgaaatagactgttgtgtttgggggtgggcatgtttgatcatgacgatgaggctgacaccctgaaaataatggaargagaaggttcctgggctcccgcagcagccctggacctcctacttatgattgttatctaagtgaaacttacatcttctttgtttgagccactgttatgttggggtctgtgttacctgtagcccagccctttctctcccctctcctccttttctttctcctcctctctcttctttatattattctcttttctctttttcctccttcctcccactcctttttttttctcccaatccccaaagcccctcgccttccccttctctcttctctccaacccactagcttcttccaaaatggcaggtgatgggcacagacaccaagagtgcagagagccttcctgctccctggtccctgtgaatgtgtccctgtcccaaaggccctggcctgctggggatttgctcctacccaggggagcctcccgctgtgtccagctctgtgctctgaggatagcctgcacccagggaggaggcagagagccag

SEQ ID NO: 838649 - DNA, 636 bp, Homo sapiens
tttgcagatgacatgatattatacttagaaaaacctaaagactccaccaaacaactgttggaactgataagtgaattcagtaaagttgcagcattcaaaatcaacatacaaaaatcaatagcatttacatatsccaagaacaacaatctgaaaaagaaatcaagaaatcaatttcatttatggtagctacaaagaatacaaaatacctaggaatcaatttaaccaaagatgtgaaagatctatccaaagacaactataaaacactaatgaaagaaactgaagagggcaccccaaaatggaaagatatttcacgctcatggacccgatgacattcttcacagaaatagaaaaaataattccaaaatttacatggaaccacaaaagaccccaaatagccaaagcaatcctgagcaaaaagaacaaagctataggaatcacactacctgacttcaaaatatactacaaagctatagtaaccaaaacatcatggtactggcatgcaaagacatcagaccaatggaacagaatagagaacccagacccagatataaatccatgcgtttatagccaactcatttttgacaaaggcaccaagaacatacaatggggaaaggagagagtctcttcaataaatga

SEQ ID NO: 838650 - DNA, 560 bp, Homo sapiens
aaactttttagcttgcggtttgtgtcactggagaacttagtaaaaatgagatttctaaaactaagactagactcagctcttttctccaagtygtgtgtgtgtgtgtgtgtgtgtattaaactatataatagtgtgaatttatcagatctgtaaaaaatattttttaggtcatcttaagggtaactaatggtcctgtctcatttcccagtcggcctcacttccgggtagaattctttagacgtactgtgaataaactgtttcttttcttttcttttttttttttttttttaaggactgacagaattttcaggtcacaaaagattgaagccgagattctgtagttcaagtctattacttgattttaagttcaataattgacattgtgattcagattttgttacagtgctcttgcaaaaaaagttttttctgtgtttgcttataacaaagacagtcataaatgactagtttatcttgtcaggaaaataggaaatggccccttcctttcaccccaatgtcaacttaaagattgtagttttatgctgcatagcaggcagactcat

SEQ ID NO: 838651 - DNA, 680 bp, Homo sapiens
atgactgtggataatggtgctgtgtcttctgtatgactcatgatagcatggttgaatgaccygttgtacaccatgaagatacctttttgcttaaagactcagctgctcctagtttggtcttcagctgtcaaatgtatacgtcctgatgtagagttatattttacttctcccctgcctccctctctctctctctctcacaaatccctaggtagtgtcgcctgcctctggtgggaccctattcagcggttactcttctcaggagcatctgacaacagcatcatcatgtgggacatcggaggaaggaaaggccggacgctgttacttcagggccatcagtgcgtgaccacttgtgggggtggggaaagaatccgagttagtggggagctagtgaaaggcattaatagtctgataccactttctgcaaaccccacgttctaagatggcaattatcattgatagggctcagttcacttttaactgctttctgtcagccccgagtgtctgatgtttagtagcaaaaaactaaacaaaacaaacaaacaaacaaaaaaacaaatgcagggctttcttcctccttagtccaaagagcacttgccactttttctctcaaggagtcaccctgttgaaatatctgattaaggcaggcataggatagagatgcaggtgaggactttgaccat

SEQ ID NO: 838652 - DNA, 595 bp, Homo sapiens
gatgtcttagtggttatatccaccaatttaaactttttcctgtgacttgacagagtgatcaataagccaagccttagtatattgctatatgcagtccaattgtgttctataacattacctcacataaaaaaaaaactttcagaatctgctttagctgaagaaaaatggtaactcttggcttctatctttactgtgtacttcatgcctttttttggtaatataattttatgaaaccatcacaacagctatgcaaggcagataatatttttaccattttgtgaataagcaagctgaggttagaagggttgattgcttgtcattggaattccaatccatgctcatctatgactccaaacctatgcttctcaccacagtgatgggtaggtctacaaactttttatgcaaagggccagacagtaaacatttggactatgtgggccaatctctgtggcacttactcaattctgccttcctatcatgcaaggagtcataaacaagacataaatattgcatgtgagcaatcataagttatatataaatgtagcatgcaagcratcataaatgaaagggtttatgttccaaaggaaaaaaaaac

SEQ ID NO: 838653 - DNA, 573 bp, Homo sapiens
cccagcttacatctatttttttkgggggggtccagtttattggagattcctttgattttattttggttatcatagtttttaacttttaagaactttttcttatctcttttttaaaaaggaaactctgttatttgttttattgacataggaacttcatcttttaaccatctctgagtatactctgtgtgtgtgtatgtgtgtatgtgtgtgtagcaatttgttcagctctgtgatttgttactgtatccagtgttttttttttcctatttgttcttttctgtctctttcttggcacaggctattttcaaatgcctgggactcttgtcctctactcatagttagaagcagggtgcttaaaatgctgacaggcagttctgagggcatagacaggttgactggaggcttcattgttagtacctaaaggtcttttctctgtcatttagtgtcttcagggaagaatcattcagtctcttgaattaagagatgggtttttctgtatgacaaagctagagatggaagttcagaaaccttacatacatagcttttcaggctctgaattaggtttaggatcca

SEQ ID NO: 838654 - DNA, 600 bp, Homo sapiens
ggagtgcaagagtccttcactgccaaaaaggtatcaaatacttagtgctattcttttcaagaataattttatgagatgtataaaaagactttcattaaaatacctatgctkccctgggaaaggagaatagcagtacattgttattttgtttgccagagatattaaagctttattattgagcatggcatttatcattttaattaaaatttcttacaccttttgggaaggctgtatgtgtgctcctgcttgcataaagaaattgggaacactgtggtttgcttgccaaggtataaatgggcccagaagcatccattttgtactgccctggactctgggatttctatataaaataaagtgggaatgttcttttagaagccgcacagatttgcatcatacctcctcagggaacttacctacatcagcccctccattcctcccaggacactgtgagaaagagcacttcaccccactgacctctgccctcccaaatgagatgctctgaggggctgggttccatcccagacctgccacccctagattcttcttcccacagcctcagtgggtcttcccatcttcctattttcaaataagtaggtcaag

SEQ ID NO: 838655 - DNA, 630 bp, Homo sapiens
acaaaatttttctcaagcaaaatgacaataatgcagagtagcacaaccttctaataagttcaatttattagccaatatgatttacttcttaaagaaaaagtaatctatcccttaaatatgaaacaatatatggaaattttattctaatagcaagtaactgttttagtaaatcagtgattatttcaaaagaggacatttcacatctataaactacagaagtaaaactaactgaaaactcgcccctctgctatttgtaaaagtcaaaatatattccttgaccaggctcagtggctcatgcctgtaatctcagtaatttgaggccaaggcaggagaattgcattaggccaggaatttgagaccagcctgggcaacatagtgagaacccctctcaaacaaacaaacaagcaaaaaattgccaggcatggtgaggtatacctgtagtcccagctcctcaagagactgagacaagaaaagccgggcactccagcctgggcgacagagcaagactccgtctcaaaaaaacaacaamaaaaaaaagagactgagacaagaggatcacttgagcccaagagttcaaggcagtattaaacttttacaaatagcagaggggcaagaattacgaattacttg

SEQ ID NO: 838656 - DNA, 562 bp, Homo sapiens
tcttctttcttagagaaaggatacactgtcatctggctggggtggcttaactatgttcactaaggttctcaagactgctaaactgttatttttgcaaaaacacaataactttaaaaattggctgtaagcatgcctgcttaagcactctaaatgcaaacaattactgcttatataacagtgactcataccctatggtgtcacctaaaacctgactattctccaaagctttctagttatagatggaaattctcatacttaaaaacttgtaacttacaagccatcacaggtgcaaagctattttccagagcaaaagcatatcaactccgtctggcaacaagacatgcagtaacaattatgcaccatccttttagttcaaatatacttttgcccgaggcattagccattattctagtgtgtatttgctatgtttacacttagttttgagrtactttatgaacatttactccagtgtctcaaataaatgcaaaaacaataaagcttgtaaaaaaaaatactagattgaagaagcggacaatcacaaatgaaacaaaagtagaaatat

SEQ ID NO: 838657 - DNA, 405 bp, Homo sapiens
tgagtcaccggagcaaggctatggggatcctgatccactgtttgcgtcctctgtagagcaacaggacattttcttattcccaggcccctgtgtgctgaaaacgggccgccaaaggagcctctgccttcagccaggcttggaagaacaccaggaaagcaaaaggtggtggtggggaccttctccatgtttatgggtctatgctgaaaatcccagtacagatatgaggaaagagccctcttatgggcaatggaaaagcttagattggttcaaataacacagtgaagcctactgatttaagatgatgctttgaatagaacacttaaaatttaggtctttccttagcctctgagttgyataaaccacatgatgtggggactttgatgtcctccagtttctttctgattt

SEQ ID NO: 838658 - DNA, 610 bp, Homo sapiens
agagagctagcctgtcctttgaagttttaaaggcaagcaacagctttttctctctagctataaaagtcctggaaggcatcttcttccaagagaaggctgtttcatctacatcaaaaatctgttgttagtatagccaccttcatcagtgatcttagctagatctcctggataacttgctatagcttctatatcagcccttgttgctttcattttggacttgtatgttatggagatgttttagttccttaagccttatgaaccaacctctgctttcaacttttcttctgcagattgctcatctgtttcagcctccatagaactgaagagaggtagcaccttcctttgtattaggctttggcttaaggaaatgttgtggctggtttgatcttccatccagaccactaaactttctccatctcagcaataaggttgtttcacttcttatcatttgtgtgttcccaggaatggcacttttaattttcttcaggaactttttctttgcattcacagtttggatgtttggtrcaagaggcccagttttggcctatcttggctttcagcataccttcttctatctatggcagtatagccttattaattgtatttctta

SEQ ID NO: 838659 - DNA, 582 bp, Homo sapiens
  misc_feature 452: n = A,T,C or G
ttagagggttgttgggcgataaggaacatgaaagtgttttgccaactgtaaagctctgtgtcatttgtggaacatcattcttcttaagcggttgacacagtcattaactaaaaaccaggcatcatcataaatgttctcaacacatttattaaacacctactgcatacaacgcagggggcaagggaatgagggagcaagccgtgtaggacattgtcactgctctcaatggtcctacagtctactcagtgacaaagaatatacttatgttcagatttttaaaaaactgcctgcctcccaggttcggagagatgcagtagtggataattgcagaggagaaagggacactagctttcataagcaggggaggacttttttatttttatttttattagttattcttttttattgcttttaattttggggactacatagtaagtgtatatatttattgngtacatgagataaatattatgtgcaatgtgaaataagcacatcatggaaaatgaggtatccatccsctcaagcatttatccttaaagttacaaacaatccagtgacactccttattttcaaatgtacaat

SEQ ID NO: 838660 - DNA, 488 bp, Homo sapiens
tcttgtaaagttaaatacacacattcctataatccagtcactccatttttgggtatatgtccttgagcaatgttacttaaataactagtaatgaatgaatggctaagtcacttgagtgggtcactagcagtttactgaccagcagtttattttaacaaaacagaacagaacagaaaatatgaaaatacatagaaaggatttgtgaaactttgttttgtaaaacttttgtttcagatgtgtgtttgttgggtcatgatattaatgtttcttattgtgggtcatggtttttaaaaaaggttaaaaattactgctctagaatatgagtcaacaaacttttccttaaagggccagatggtaaatattttaggctcgtggaccataagggttctgttgcaactacagaactctgctgttgtagctggaaagccrccatagaaattagtggcatgttttctaataaagctttatttacaaaaacagatgtcttg

SEQ ID NO: 838661 - DNA, 621 bp, Homo sapiens
aaaaatattaattcattaagyctgccattttgggcaaattaattttgagctttagttttaaaataactttaaaattaactttaaaagtatttaaagaggaggaaacatgaagaatagcagtaagtaacaagatctaggatacatcttattagtgaactaacttttcctcaacttaaggacctttggaaaaagaattaattcttgagcaccactgttacacattatttacaaccaattcagtaatgtgttaaattgagatctaatagtaaagggaacagatttgtcggcttacaggctaaacttacatcaaagaaagactttgacactggaatggattatgcccattgcatttatttcctatggctgccataagaaattgcaataaccatggcttaaaacaataggaacttattctctctcagttctggaagccagaaagccactttccctttgaaagctgtagggaagagtccttctttgtttcttgcagctcttggtggctactagtgttctttggcttgtggcagcataactccaatctcttcctccctcctcatatggccttcttgatctgtctgtgtgtcctttttctgtttcttataaagacacttcatcggactt

SEQ ID NO: 838662 - DNA, 608 bp, Homo sapiens
cttcctttccttgtatggttttcttcctttgtggtgtttctgatacttttccccgaaaaattaactatttgtactgaaataaatattacaactagaaaaatccgaactgagacagaacctatgtggagagcattgtaaatatttttgtaatgatagggaaataaaatgaagagagactaaatagcttcttcaaattttcatagctaaaaactatgaagcttactttaaggtatttacttcatgtgcataccattctgttgtttattattaatataatagttggagcaatagcttcaataataatagtaatagtaatgatactactactaattatgattattaacaaacacaataggtattatccttccctctaagtccctaaagtccattgtatcattcttctgcctttgtgtcctcatagcttagctcccacatatcagtgagaacatgcagtgtttggttttcccttcttgagttacttcacttagaataatagtctccaatctcatccaggtcactgcaaacgctgctaattcattccttttgatggctgagtagtattccatcayatatatagatatatatgtgatgtatatatatatatatat

SEQ ID NO: 838663 - DNA, 554 bp, Homo sapiens
ggggtatgatattagacaccactgagtacctttctactgcaaggaacatcttctctcctgaattaatccttcctggctagtcaagtmtcacatagccacaaacaaaggagctaggattttggcccaggaagcctagctcagcctctgctctcaccccaccaggcttcctctccttcctgcttcactgccctgagtctgcaatcattttaaccttgccaatccgatgaggcacaaagaaaaatctctgctgttctccactctgatgtgtccgggttatgtaaaatgatctgctttatttttccaattgtgtactggtttctaggatttacatttttttatttttaatgaatcttcctctgttgcccaggctgaagtgcagtggcatgatctccactcagtgcaacctctgccttcccaccacacctggctaatttatttatttatttattttttatttatgtatttatttatttatttttttgagacggagtcttgctctgtcacacaggctggagtgcagtggcgcgatctcggctcactgcaacctccacttc

SEQ ID NO: 838664 - DNA, 554 bp, Homo sapiens
ggggtatgatattagacaccactgagtacctttctactgcaaggaacatcttctctcctgaattaatccttcctggctagtcaagtctcacatagccacaaacaaaggagctaggattttggcccaggaagcctagctcagcctctgctctcaccccaccaggcttcctctccttcctgcttcactgccctgagtctgcaatcattttaaccttgccaatccgatgaggcacaaagaaaaatctctgctgttctccactctgatgtgtccgggttatgtaaaatgatctgctttatttttccaattgtgtactggtttctaggatttacatttttttatttttaatgaatcttcctctgttgcccaggctgaagtgcagtggcatgatctccactcagtgcaacctctgccttcccaccacacctggctaatttatttatttatttattttttatttatgtatttatttatttatttttttgagacggagtcttgctctgtcacacaggctggagtgcagtggcgygatctcggctcactgcaacctccacttc

SEQ ID NO: 838665 - DNA, 572 bp, Homo sapiens
gtggtgttgtgtcccctgtgcactcagacccatgaccaccaaggccaccatgtgagccccatagaggaggctgcctcccatcacagggaaaggctccacagttaccttgagaccctgaagttaggaagctgtgagccacccaggacagaaagttgttggagctcagagagaagacagaaagccaaaggcaggaattatcctctcagttgaagcacctaacgaagtttgttgaccatgaaaagcaggcagctttctgtagattagctgaggaaaagacggacattcagaagaaactcggtgcaaacataagggcattttcagaacacatttccaccctgaaaggtctgcttacgcaggtggccgagatgagtgtgatggcagatgtgaaactgctgatggatgtaaggaccgtcctgcacaggtgtaaggcctgcaggccccagctgtccactctatgcagctccagaaggaaggaaacaggcttcccctgcagtactcggctctkcagaaaatcatacagaagtttagagaagttactctggatcctgaaagtgcacatcctcatctgcgtg

SEQ ID NO: 838666 - DNA, 502 bp, Homo sapiens
atggcgtgaatctctgcaatatgagwatcttgtttttccaagaacttccaccccatgattttagcattcattgatgattcttgtgtgaacgtttaatacatttgtgattatggaattttaacgtggtgtcttttcttactcataggaaggattccctatcttggacctgaggctgctttcttgaagaaaacttgactttatttcatttagtgggaagagcagcagcccagctattaagttctaatatgcaataggctgcaggctgtgaagtgttcgtggcagtagactctgaagctaaggagctgagggcttaacaagtttctagaagctgccatcaacatgccaagtcagtaaaactgatagttgatcagatttcaaggtctggggaggatatccactgtgtactgggtcttgagctctagagagctaggccttgctaaaataaaagaattaccttacctaccatctttgttcaagtctcaatggaatttgttacggccct

SEQ ID NO: 838667 - DNA, 597 bp, Homo sapiens
atttcctaatataataccttaatatcactactataattaaaattctaatataacttttcataattaaaaggtaaccatacaaataaactgaataaaaaataatgccattaaaatttaagcggatactattrcctgctaaaagctctgagcctaaggcctgtttctgttttttttaaaagggtggttaatatgtgctacgttaaagatgcactcacatcaaattgagacttctcttaatctattcagaaggactgaaagagaaggcaaaagaaaatctctcatcttgtgtgattccattttagttaacaccacattggttttattaaaccccactcaagatcatcttagatttagaatcatcttgtgagtcctagtttatgggaaacaagataagccagcagttctcaaaatgtgggttttggacagtctgcaagagataacctagcaccagattaacatgcaaatcccctggcttctgagacttctgagataggtcttaggaaatctgtatttttaacacatttctcaggtattacttatacacacaaatatttgaaaaccatgagtccagatttgtcgttttcaaacattagccaa

SEQ ID NO: 838668 - DNA, 677 bp, Homo sapiens
ttgttctgtcaaggatcctattgttttcctaactcacttgactataacagtttcataacagtttcttgggtttgttctmagaattttctcccagagtttctgatttaagaattaggtccatgaatctgtatttttaacagactcacctgagagattctaatcatgaggcaaatatgagaaacattctaaaagggtatgttcaattgaacaaatttccatcattttactccccaacaatagggaaactgtaaagagtaaaagatttcaaacagggaaatttatggcccaacaggtaaacttaaaatagggagttaccacctgcttgctttgtctgatggtcatgcctgaatcacaaacctttgaaccaactcatcttccagtataattcacttccaaactatcaagtaaccttctcaaaaaatctctgttcattcattcatccattcattcatttgacatttattgaacatctgctatgtgccaggcactgttcttggcacaaagaatagagtggtgaacacatatccaggccctacccttagggggctgaattttagtcttttttcaaatcatagtcctcatgtattaccaatcaaaatatcatatgttcttttggataataccctgcaaagcataatgtgaaatcacaaaggtacaaaagtcacctctctcagaca

SEQ ID NO: 838669 - DNA, 203 bp, Homo sapiens
ggcaaggcaaggcaaggcaagaagggaagggcagggaagggcagggcagggaagagaagcccaaacactacactaaaaaaccctcagaactaatcaccaaattcagtaaggatgcagggttacaaaatcaatatacaaaaatcagtakcatttatataggctaatggagaactatgtaaaaaagaaatcaagaaaacaatccc

SEQ ID NO: 838670 - DNA, 497 bp, Homo sapiens
taaacatggttgcaaatatggtgttgtatatcaaaaaagtacaatttaaaaatgctacagaaaattaactcaaaatggtattctgatggtcttcatattctwtttgttgtctcatttcttttttaccaccccagtgatatttttctatgatctaatctgagtagtctagaaatagacctttctttgcacatgggcttcagaatgttaaattaaaaaaaaaacttatattttcttttttattaacaacatttgaaagcaggaattatattttttttaaattttagagctgagttacaaggaggaatttttttttgtatgctttgtctttttctttttttttctttaaaagtatttggaaagcagtctcatgaggctggagcatgggtgtttcatttctatcttattttcttcctccagcagcatgagtgtcctcttggcaacatgtatttttctaatttaggagtgtttctctacatgtcaatcttgttcctctggat

SEQ ID NO: 838671 - DNA, 504 bp, Homo sapiens
tctggtgagggctctcttcctgggttgcaggtggctaccttctctctgtgtcctcacatggkggtgggagagagagagaaagctctctggtctcttcttttaagggcgctcatctatgaggactctaccctcatgacctcatttgaatctgattaaccttcaaaggcctcacctgcaaataacatcatattggggttagggcttcaatatatgaattttcagggggatacaaacattcctcactccgtaaatctctttatcctaccttcctactttactatgtgtaatcattataatgactacaaatatcaagcacttactatgtgtttcatattttttttatttcattcaattctcattcttatcctaagagggtaggtaattgatatggcttgaatatttgttccctccaaatctcaagttaaaatgtgatcctcagtgttggaggtgggactgagtgggaggtgtttgggtccccagggcagatcactcatgcatgaatgg

SEQ ID NO: 838672 - DNA, 328 bp, Homo sapiens
ctgcagaaagaaaaaaggattcaagagcatgtggcctcagaggggcaggggacagagacagagacaataacaataacaatagttgcctgcctattaccctggggtctatgagactctctgttgaatttcatttactcctcttctttttttttttttcttttcaatttgagggtttctgactcatgcaaccaatggtacacattgattataattccatggttggagctgctatcaragtctggcctgatgtcagttgttaaagccaagagtcaagaactcaagagagagaggagaaggaggtcagtcggtcatggtaaacttgctttga

SEQ ID NO: 838673 - DNA, 628 bp, Homo sapiens
cacacatacacatctcacatgtacataaataggttaaaatttatatcmtttcttccaaggaaaatgagattatcctatagacaggtgtctgaaacttgcttattcacctgtgagtacatcacaagtatctcttcaaattaatacatgaatatctaactcactatttttaatagctgcaaaatatttctcagtatgggaagagcataatttattcaatgatctcgctactgatggacgttcacatttaaattttgtctgtttttttttaacccctataaacaaaactacaataaacattcatgtgtgcacacacatacatggtatatttttgtggatagcctctgtagctgactcttcaacatccactcccagataaacagtcaaagccaaggataattctatccctttgttaacgattggtgataaatggacaaatgtccatgataaatggacccagttctggacagtgaatgtgaggggaagttgatcatggaagttgtgagatatgattcataaaactgcttcaaggccgggcgcggtggctcacgcctgtaatctcagcgctttgggaggccaaggtgggcagatcacgaggtcaggagatcaagaacatcctggctaacacggt

SEQ ID NO: 838674 - DNA, 626 bp, Homo sapiens
tctaatttttgttaattcttcctttttctaactttggatttaaaaactttgtttttctagctatttgaggtataaagttaagttgtttgaaattttttattatagtcattaattactataaacttccatcttactactgactttgctacatctcataggttttgatagtttatatttgtttttgtttgtttgaagtattttctttccttttttctttcttttttttttttttaaatgtagagacaagtcaggctgtcttgacgttggcctggctggccttgaactcctggcctcaagtgatctgcccgccttggcctcccaaagtcctgggattacaggtgtgagccactgtgcccagccccagtttcaaagtattttctaattttccttttgattccttctttgacacaatggtggttcaagagtgttttaatttccgcctatttttacattttccaagttttgttttttctttttgaagatgatttaactttcaagttggggctattasacttgacaactttctcttgagcagagtctattaattgatgtgtaagtgtcttgtttactcttcatctacagctatttatagagttataggtccctctatcttttgaaatcaacat

SEQ ID NO: 838675 - DNA, 588 bp, Homo sapiens
ccttcacagaactgaagagagtttgggccttgctctggattaggctttagtttaagggaatgttgtggctggtttgatcttctatccacaccactcaaacttgccccatatcagcaaaaagactgtttcacttttttatcattcatgtgttcactggagtagcactttaaatttccttcaagaacttttcctttgaattcacaatttggttaaacatttggcacaagaaacctagcttttggcctgtctcaggttttgacatgcctttctcactaagcttaatcatttctaccttttgatttaaagtgagagatgggccaaggggtggttcatgcctgtaatctcagcactttgggaggctggggtgggtggatcacaaggtcaagagttggagaccaacctggccaacatggtgaaaccccatctctactaataatacaaaaattagccaggagtggtggtgcacacctgtagtcctagctactcaggaggctgaggcaggagaatcgcttgaacctggraggcagaggatgtagtgagccaagatcacgacactgcactccagcctgggcgacagagcgagactcc

SEQ ID NO: 838676 - DNA, 592 bp, Homo sapiens
gatcctccctcagcagaggcccactgggcttgggttgggtgactggacctgactcaggcccctcagtgtctaccctggctgagcttctctgggcctgagggtctttgtaaatggtgccagagtcccctgcagtgctgcctcctgggggcagggcaagacagccagctgggctggctcctgggccgcaggggtgaggtgctgtatgtggcgccacagtgcagattggggtctggcctgccctgatgtgtccctctcccactgcagggccgctcatggattacttgcccacctggcagaaaatctacttctacagttggggctgacagacctcccggaaggagggtgtggggaggggtggggcagggagcccctcttccctaataaaactgactccggcagcgtcccagcgtgcggcctctccgtgcctaccggccaggccccacacacagccctggtcgccaccagcgttcctcccaggacacccttgactgcgctctcctgtgacgatgccactgcagcccgcaccttgtcactgctgggccaagaagccttcactaggagtgggatccrggctcctctcccacagaaagcg

SEQ ID NO: 838677 - DNA, 584 bp, Homo sapiens
ctacaggaatttcaaaaaacaattggaaggcttaacaacagaaacaagcaaaagaaagaatttcagagactgaagaccagtcctttgaattaacccagacaaacaamaataaagaaaaaagagtaaaaacaaagcttttgagaaatatgaaattaggcaaagcaatcaagtctatgacttactggtactcctgagagagaataagagaacatggaaaacatatttaaggaacatggaagcaacatggaaaacatatttaaggaatatactttagaaaaatttccccaattttgctagagaggtagacatgcaggtataagaaatccagagaactcctgtgaaatagtgtataagataaccatagatactacacaaagcacatagttatcagactatccaagattaatgcaaaagaaaaaattcttaaaggctactagagaaaaaggccatattacttatacaaggaaagcaatcagactaatagcagacttctcaggaaaagtcttacaagccagaagagactaagggctcatttttagcattcttaaagaaaatatatgccagccaattatctcatacaccat

SEQ ID NO: 838678 - DNA, 608 bp, Homo sapiens
gcattactttgaatgtaaaagcctgattgtgccacatggtagagaataaactgatctctctatgactaattcagattttatttggtcaataacatagtcgttgtagtattgggaagaaattacatgtttgtttttatttgatgtgtactttatttatgagctataagttacctcagccagtccagcaatttcccccagatctttgtaagtttaggtgaactgttagtcataaactttttcatggcataataattagtagagatacttaagcagaattgaaaatgtcatatcattaaaataaatatatttattaaatgttttttgagattctgaatgcccacgttaagtaacaaacattcatctagaacctatagccctgcttttttaaggctaacatatttacaattctgaagtcactaattttttgtttagtagacatttgtagttagatgtggacatgtataaaaagcagcatagttgagcaaagattcatttgaatggtataagaaggracatatggccttcagcttgactggacttcatagaaactcctctgcagaaaaatattgggtggtgatatctgattaacagcaatatagagagaaaac

SEQ ID NO: 838679 - DNA, 680 bp, Homo sapiens
cgttaagggtgttgctgcaaaccacagtgataatattattgagtggaatgagcattttgcttagtcatcagcagtgtaattcagaacaacttggtttttgtctgttcttagaagcaagaaggatgcaatgactgagagttttctttcccctgttgaaggaatccatttgcattgggcaagaggttatttccctcaggcaacttcccctacctgcgtttaagttgtttccgcccccgcaatcatgtcaggagtcagcacagtcctatgactacagggagctttgctatgtaagagactgatttttttccctcttgggaggcaacttattaggccaggcctccccttcctttcttagtgtgactgtgagggatgtctcaggaaagcctttaatctgatatttttcccaaccccttagttatagttgaggggaccttttgtttacccatgccttttaaatcatgcctgaaagcccaactcctctgctaggcagggctattttagctggtacgggacccatcatccttatggctccaggacagactctttgtctcaccctagtgcagaccaatattaattaacccagaagtctgggcaactgaaaggaaaattggtgcagccacaactgccatactggtctaggtccaccttaaggatccsacctccttctctaaccagagaca

SEQ ID NO: 838680 - DNA, 624 bp, Homo sapiens
gagctgggtaaaataaagttgagacctactgggctgcattcccagatggttaaggcattcgaaggggtcacagggtgaaatagaacgtcrctacaaatacaggtcataaagaccttgctgataaaataggttgccataaagaagccagctaaaacccaccaaaaccatgatggccacaagagtgacctctgtttgtcctcactgctacccacccaccagcatcacgacagtttacaaatgccatggtgacatcaggaagttaccctatatggtctaaaaaggggaggcgtgcacccttgtttagcataaaatcaagaaacaaccataaaagtgggcaaccagcagccctcagggctactctttctatggagtacccattcttttatttctttactttctcaacaaacttgctttcactttactctatgaacttgccctgaattctttcttgcatgagatccaagaacactctcttagggtctggattgggcccctttcctgtaataatatggaattcttttctaaataaaaggattctacaggtaagcagaattaacagaaaagagcagcctcctaagactaaagcttctttattccttaaatctccatctcccctgaaaagaa

SEQ ID NO: 838681 - DNA, 600 bp, Homo sapiens
ttccacagtgtatcgtgcccctggtttattgagactagagaatggcgatgacttttaccaagtatactgcttggaaacatcttgttaacaaggcacgycctgcacagccctagatcccttaaaccttgatttcatatgacacatatttttgtgagcttcaggttgggtcaaagtggctggggcaaagctacacattaacaacatctcagcaaagcaattgttgaaagtaaaggtctttttcaaaatggagcctcttatgtctttcctttctacatagacacagtaagagtctgatctcactttcttttgcctacactcactgaactgtccttcccctctgctgggccatgaccacggagaacaggtccactgtcctccctgcatggtgcacgatggaggatcagactccgtcctcaaggctggcaagaagacagggtgagacatgagcctcctgatacaggtgacgggtgtggagcccacaggactggaacctcacactgcagggctggaagcacagactgagtatttactgttctgtggcctggggggttcaagacacagagctcctcattagccaaagtcacccaagttccccagcct

SEQ ID NO: 838682 - DNA, 501 bp, Homo sapiens
gcgttcagcatacggaggacccatgccggtaccagcctctgagttcccttagtatttattgatcattatcaggcgtttcccggrgagggggatttggcaggacaatagggtaatagcagagagaaggtcagtaggaaaacacgtgaacaaaggtctctgcatcttaaacaagttaaagaattaactgctgtgcttctgatgtgcatacacataaacatcttaatccattaaatagcagtattgctgccagcatgtcccacctccagccctaaggtggttttcctttatctcagtagatggaatatacaatcgggcttgataccaagatgtcccattgcccagggacaagcaggagacagatgccttccttttatctcaactgcaaagaggccttcctctttcaataatcctccccagcacagaccctttatgggtgtccggctgggggacagtcaggtctttcccttcccaggaggccatatatcaggctatcacatgggg

SEQ ID NO: 838683 - DNA, 615 bp, Homo sapiens
ggcatcagacattgttgatcttgggcaaggaagatcaaattatcaggagtcactggtctgaaytgaaagagcaaaggaattttcctcctgttgtatccagagacactgcaaaagttagaggcagaaaatatcttagggaccccctaggccagccccaacccaatatttcaggtggggaaactgaggctagagaggtggagtgagactcccagtgtttcagaggagtaggatccaggacttccaaactagcctgattgactgctctactgtgtcctccctaggaattcctggtgcccacccatgcttagactgttcccactgctggaaatgcccccgagctttggaaagatttcaaggcacacaaggatatgggtaatttacttcacatgagcttggctcccagtataggataaagaagcaatggcgcctttttccccttctacacagcccaaccaggtagccagcataagtaactacacaagcctgtggtctcaccacatgggatgtgttttctaaaaaaaaaaaaaaaaaatggaaaggagacttctccaggaatgggcatgagacatgagcatgtattaattaggcaaaaggggcaggtccctccaccactac

SEQ ID NO: 838684 - DNA, 467 bp, Homo sapiens
gacaaagggaatttcgacaaagaggcttagatatggaagaattaacactstgtattccaaccaggcctctgatgacttccagcattcttttcagactcaaaagccaagggaagggaataaaaaaaaaaaaaagatgtgcaaagctttaatacttttctaactttttttattgcaacaacaatacagaggaaataaaagaaccctattcactcctttggacttgaaacctcttttaaaaataagcatctacaattgtataattagccccaaggtgagcttgcccagggcctcaaacatgtgccagaatgcttctctgcttcctaatgctagggcaagtcacaaactgatgtggacactaaagcaaaacctatggtagcagaggcccagctaagtggctgtacaagatttttttctctccatggctgtttatgttacaggtgcaactgaaggaacagagaaactgtgta

SEQ ID NO: 838685 - DNA, 618 bp, Homo sapiens
atgtatatagcagtacaattgcccaaatgcccatcaatcaatgagtggataaaaaatgttatatacatacmtatatgtgtgtgtatatatacatatacatatacacacacacacacatacacacacacacacacacacacacacatataccatggaatactgctcagccaaagaaaggaatgaaataatgggatttgcagcaacctggatggaattggaggctattattctaagtgaagtaactcaggaatagataaccaaacatacatgttctcactcatatgtgggaactaagctatgagaatgcaaaggcataagaatgatatattggagtttggagactcaaaggaaagagtgggggagagggagggataaaagactacacattgggtacagtatacaatgcttgagtgatgggtgcaacaaaatctcagaaatccccactaatgagcatattcatgtaacaaaataccatctgttccccaaaacttattgaaataaaaaataaaaaattaatgataataacaataaaaagaagtttatttgtcttatgtttctggaggccaggaagtccaagatcaaggggttgcatctagtgggggtcttcttgctgagtca

SEQ ID NO: 838686 - DNA, 492 bp, Homo sapiens
attttaaaagtgagaaattaagaagaaaccaaatgcttatcaatagaagaatgkataaacaaagtattatttattgatagctaggaatattatgcagacagccctcaaactgatgaaaagaacaaattcggctgggcgcggtggctcacgcctgtaatcctagcactttgggaagccgaggtgggcggatcatgaggtcaggagatcgagaccatcctggctaacacggtgaaaccccatcaaaatacaaaaaattagccaggcatggtggcgggcacctgtagtcccagctactcgggaggctgaggcaggagaatggcctgaacctgggaggcagagcttgcagtgagccgagatcgcaccactgcacccaccttgggcgacagagcgagactccatctcaaaaaaaaaaaaaaagtaaagaacaaattcatttatttaacaaatatttattgaggacattttatgtgctgttctagattttacaggtta

SEQ ID NO: 838687 - DNA, 624 bp, Homo sapiens
cgaagtgggaggatcacttgagtgcaggagttggagactagcctggataacatggcaaaaccccgtctctactaaaatacacaaattagctgggcgtggtggtgagtgcctgtccccagctactcaggaggccaagacacaagaatcgtttcagcctggaaggcggagatggtagtgagctaagctcgtaccacagcactccaacctgggtgacagcatgagactctgtctcaaaaaaaagaaaaaattatatatatttttttttctggaaaaataaatacatttttgaataaatgaaaaatgtgagttttaaatcagaactgaggtggaaaactagctccaatacttactaggcttttcagtttgggacaaattattattgctttttctgagccttagtttctccatatataaaaataagatttatagtatctattcaacagaattgctataaatgtgttttcaatattgttaataagacagtatgtggagaaagtgaaacccacatacactactggttggaatgtaaaatggtatagctgctttggaatcagtctatcagttcctccaaaggttaaacagagttactagatgacccagyaattccatctctaggtatttata

SEQ ID NO: 838688 - DNA, 633 bp, Homo sapiens
cagactcacataaatatggtcaactgatttttgacataaagcaaaggcaatctaaaggagaaaagataatcctttgaacaaatgatgctgaaaaaactggacatttatgtgcaaaaggaggagtctagacatatatcttatgctcttcacaaaaattaactcaaaattgatcatagacctaaatgtaaaacacaaaactaaaaaatttctagagataacataggagaaaacttagatgatcttaggtatagcaataactttttagccagaacactaaaggcacaatccattaaagaaataattgatagacaaggctttattaaaattaaaagctactgctctgtgaaagacactgttaagataatgaaaaaacatgccacagactgggaaaaaaatatttgcaaaagacatatctgataaaggaatgttagccaaaatatacaaataactcttaaaacacaataagaaaacaacaatccaattaaaaaatggtaaaagacctgaacagacaccaccaaagaagatacacagatgcaagtaaacatatgaaaagatgtccaatatcatatattattagagatatcactcttkaattaaaagaatttaaaaaaatgacatatcactacatgccta

SEQ ID NO: 838689 - DNA, 551 bp, Homo sapiens
ctttggacttaaaatacatagtcaaaatactggtccaatgttatttaggtagtcccacccactacccctatacatgctcagtatggttatatcatctgaaatacagttaaatccctttgtctctgtgtgtaatcatttgggttcttcattcatgtttgtttgtttgtatatttagtatgagaaatagtagtatggttctgaaatacacaaatatatgaaaagtagtcactcaactactaatccccatcccatccattctaccctactcacaccaaccccatcttttctactccatttgcacccatcatctctagataaccagtctcaatagtttatagtttacccttcctctgtttctttctgcacaattgaacagatatgtgtatgttatctcatttcttcttccttctatacaaaagatggcaytctataaacattcttctaaatttatattaaattacattggaaatcacttcataccaaattacagatagtttcttcaatcttttttatagctacatatactccattgtgggactgcagcataattt

SEQ ID NO: 838690 - DNA, 563 bp, Homo sapiens
gcagtatcccttgagagagagtaaacaaatgagtgagccctaccattttcccagcttactgcctggagagagtttccaggctacagtacaaggyagaagaactcaggtaaagcctattttccagagtcaagagattgaactaaaagttcaaaaagacttaggtggctagaaattacatggcacagtactgaagaatgacaagcttcagagaaaggaatccagagatctgcagaggggtcccttgagtgctctactgagtacgacggccagatgcatgtgagaaaactcatgaagccagaaaaagaattgtctgaaaggattagagagacccatcccagctgctcataaaggcctgggaatagtcctatcttcactagccaacgtggaaatagtcatgatttggtgcatcacacagaaaattcagaagggcttttagaagcctcagttgtggggtaaaactagcattagactagataaatcctgccttatcctgcttggaaacttaaaaacaataccctaaaggatcaaactgtttccaagaaacttaaagcatcccaagacaa

SEQ ID NO: 838691 - DNA, 529 bp, Homo sapiens
gataaatgttgtgtgtgtgctgactcctccaccaactggccctttccgtctctcttcctctcctcatgcctccctcttccctgagacacaacaacattgaaatcagaccagttaataamcctacaatagcctctaagtattcaagttaaaggaaaaatcacacatctctggctttaaatcaaaagctagaaatgattatgcttagtgagaaaggcatgtcaaaagctgagataggccgaaagctagacttcttacaccaaatggttagctaagttgttaatgcaaaggaaaagttcttgaaagaaatgaaaagcactactccagtaaactcacaaataataagagagctaaatagccttcttgctgatatggagaaagtttggtggtctggatagaagataaaaccagccacagcattccctcaaggcaaagcctaatctagagaaaggccctaactcttttcaagtctacgaaggctgagcgagatgaagaagctgcagaagaaaagtgggaagctaagagattaaag

SEQ ID NO: 838692 - DNA, 529 bp, Homo sapiens
gataaatgttgtgtgtgtgctgactcctccaccaactggccctttccgtctctcttcctctcctcatgcctccctcttccctgagacacaacaacattgaaatcagaccagttaataaacctacaatagcctctaagtattcaagttaaaggaaaaatcacacatctctggctttaaatcaaaagctagaaatgattatgcttagtgagaaaggcatgtcaaaagctgagataggccgaaagctagacttcttacaccaaatggttagctaagttgttaatgcaaaggaaaagttcttgaaagaaatgaaaagcactactccagtaaactcacaaataataagagagctaaatagccttcttgctgatatggagaaagtttggtggtctggatagaagataaaaccagccacagcattccctcaaggcaaagcctaatctagagaaaggccctaactcttttcaagtctacgaaggctgagmgagatgaagaagctgcagaagaaaagtgggaagctaagagattaaag

SEQ ID NO: 838693 - DNA, 623 bp, Homo sapiens
tgaatactgaaccattgctcctaggggaaatatagggttagtttgctgtaggcctccggtcacatttttgtctactgatcaataagtaattatattttatatgtgcttctgtttaaagggactctgtttaatatataatgctggcttgtgaacatggaactcacggaaacagcactagaactcaggcctgaacgaagctcatccaacacatgggttttctccttgacgcacctcacagcttcttgtgcttaggaactttaggcagcacctcagcactatacttgcgagtcactgaaatgcaaaatcactaaccaaaagcacaaaagtgcaaaacacatgggactaagtagatcctgaacaggcaacttatttacagtgtgagagttgaaacaaaaagatagaacattgctctgttcagcattggctggaaacgtgggtgtcaggtgacatatgtttttccaggaataagtgcaaaggcaccatgagtattcattttgaggctacaaataaattttagtgagtaggtgaatttggaaatacagaatccacaaataatgaggatcggctgtagttgcagcagagtctatacagatcacaaagtstaaagtatatgcgttgtgccc

SEQ ID NO: 838694 - DNA, 627 bp, Homo sapiens
ttttcacactctatcagatgcacctaattagggtattacatgttgttttctgcttgttccttcctataccgccattctgtaaggaaatccatcagctaccttaagactgtagaccccarttctccaggttcaaggtggaaggacgctcctaactgaggaaacggacctgtcaacccccactcttagaagatctagaacagcactgtccaggagaactgtctggatgataggaatgttctttatctgcacaggccaatacagtaggtactgagcacaaaagatgaaggagcacctgaagtgtggccagtaccactggggaactgaatttgtcattttgtttaatttaaatttaagtagccaccgtattagcacagatctggagcccacagggtttgcctgcagaattggacaagtgtagacagacaagtgagcatgtctccgccaacaccaccatctctgtgttctttaacagggccgtgcccaagttcatgaagaggatcaaggttccagactacaaggaccggagtgtgtttggggtcccactgacggtcaacgtgcagcgcacaggacaaccgttgcctcagagcatccagcaggccatgcgatacctccggaaccattgtttgg

SEQ ID NO: 838695 - DNA, 618 bp, Homo sapiens
agtctgcttatgacgtggcagacatgctgaagcagtattttcgagatcttcctgagccactaatgacgaacaaactctcrgaaacctttctacagatctaccaatgtgagtgtcctttgatcttaagattgttggcattgggaaaaaatgggaccaactgaagcttgtagcttccttgatagcattcttttttttttgagatggagtctcgctctgtcatccaggctggagtgcagtggcgtgacctcggctcactgcaacctctgcctcccaggttcaagcgattctcccacctcagcctcccaagtggctgggactacaggagggcgccaccacgtctggctaatttttgtatttgtagcagagatagggtttcaccatattggccaggatggtctcgaactcctgacctcaagtgatcctcccacctcggcctcccagagtgctaggattacaggtgtgagccaccacgcctggccttgatagcgttcttttgacaagagagtctgcatggtgacctcttggaaacccatgtcatcaccttcttccttgccgccttgtttgtggaacaggtttctgtgtaattattgaatgatgtgaaaataaatttcccagtct

SEQ ID NO: 838696 - DNA, 646 bp, Homo sapiens
tacaagttgcttgaaaagtagcaataaaggtaagatattacaacactatgtgtcagcatccttgcacgctagttatttaaaktgtaaaataatcatttcaaaatgttaattaaaaaagcagtttccctgccttgggaaaggtgtggttgtaagaaacagaagtgagttcaagtgaagaatatttcagggctagaacagggtatggatttgagattcaaggttaggaaatgaagtacctcaggacgcaaggctggtactgtaaaatgaacaggtttcttggagatgagtgaccctgagcccctatctagagcctacatagggactagaactagaatatcatctactagacttccccaatctttctgcctttccccccaccatgttatgaagcatcacggattctcatcttgtttttctttccctacagctacatttattttgcagaaaaatattcttttgcttcatccatatgtgcatggctaaaaatggactccctaacacagactccaagtgatcacaaccaaccacttgtggtcatctgactattcaggtcttttagttcaaattctcaagactgggtcagtctcacccatggactggttccctgtagatctggttttcaacctgggtccactcagtgaggcgg

SEQ ID NO: 838697 - DNA, 526 bp, Homo sapiens
aaattgaatttaagaaaaaaacaaaaactctgccccattagtgcaagagtaaagttgggttgttgaaatgcaaatgcaaatgcatgtagtctccccctgtctttagtttgggaataagaaatacatatttgaacgtaaagaattttttgttgtcgttgtcactttctgtttttatttcataaggctgcttaacagttttactttagtttggagaagcacagttctgaaaactaaagggggtaaatcccgtcattatctctgcaggtgagatgggtctgtatcaactctaagactgaacgactctgaaggtgaaataataaatgacgcatgcctgaggtcttttctgggaaggaaatcgcccccaagagaagggttttttagcccagaaagcactcaggctgcctytttgcctgccctcatggttgctgagggacgtttaagtcaaactgaaagtactgcatgacccgatgagaatcattaacctcattagcaacatggacgagcaagatggcgaccacatatcccc

SEQ ID NO: 838698 - DNA, 526 bp, Homo sapiens
aaattgaatttaagaaaaaaacaaaaactctgccccattagtgcaagagtaaagttgggttgttgaaatgcaaatgcaaatgcatgtagtctccccctgtctttagtttgggaataagaaatacatatttgaacgtaaagaattttttgttgtcgttgtcactttctgtttttatttcataaggctgcttaacagttttactttagtttggagaagcacagttctgaaaactaaagggggtaaatcccgtcattatctctgcaggtgagatgggtctgtatcaactctaagactgaacgactctgaaggtgaaataataaatgacgcatgcctgaggtcttttctgggaaggaaatcgcccccaagagaagggttttttagcccagaaagcactcaggctgcctctttgcctgccctcatggttgctgagggacgtttaagtcaaactgaaagtamtgcatgacccgatgagaatcattaacctcattagcaacatggacgagcaagatggcgaccacatatcccc

SEQ ID NO: 838699 - DNA, 611 bp, Homo sapiens
aactagctaacatcatgatgacaggatcaaatccacacatatcaatactaaccttaaatgtaaataggataaatacaccaattaaaagacacagagtgacaagctggataaagaaccaagactcatcagtatgctatcttcgaaagacccatctcacatgcaatgacccacatgggctcaaaataaagggatggaggaaaatctaccaagaaaatggaaaacagaaaaaaatcaggggttgcaattctcctttctgacaaaacagactttaaaccaacaaagatcaaacaagatgaagaagggcattacataatggtaaagggttcaattcagcaagaagaattaactatcctaaatatatatgcacacaacacaggaacacccagattcataaagcaagttctcagagaccttcagagagacttagactcccacaaaataatagtggggaactttaacaccccaccaacaatattagacagatcatcaagacagaaaattaacaaagatattcaggacctgaactcagcagtggatcaaatggacctaatagatatctatagaastctccacccaaaagcaacaaaatatacattattctcattactaca

SEQ ID NO: 838700 - DNA, 470 bp, Homo sapiens
aggaggggcagggctaatgggctgctaatggccctgcagctgggctctggtgacccctggctccctaggggccagaaacagtgctaatggggctgcccctcccacagcaggcccttcccttctgttccagatcggctaggctgttaaggggtaagtggcaggagagagggaagagtgatcagccccctccattatccccaccaccttggccctcaaggcagctcagtgagcccagaaaccagcctagaatgtgggggaggacatcggcactccatcccctcattacaggcggggagctgaggctggtgcattaatctggtcctgttcaccttttcccctcttgttcccawgttcatggttcacttctcctctctggactcaagcccataggcacaggccgcagctggcagggaaagccagggagggcacagtaggcacagtgcccagggcccacacaacttccaggatcc

SEQ ID NO: 838701 - DNA, 601 bp, Homo sapiens
ttgtggaaaccacatcatcgatagcattttcaggataagcaactattccaggagacaagtatggaggtaactgaatatacttatattttcccctctctcttttttaatgttgaggacatagcaacaaaatctattgattttgtgtatgctgacatcagttgattaaagttagccagtaatcctaatccacactgtaatgtgattctttgttagtccttttccctgtctcaagtgtatttgagcctcagaaaacctcacgtttaggggtcaacttttgcaggcttgtagatccaaagtcaggccccttgtgggttctggtcaactttctgcatcagaataatgagcctgagatgtaagagttggggttggcatagagggacgaagagtgactacaatgaataacaaggtcaaaacaggcttccaaggtttccagaaccaaccagcctcggggctccagtaagtgattcacattcccttcccctttgttayaaatgtttctcattgttgaatacctttgacttgttagggctgagcccttttctctaaatagctgacagatgagttgtcagtcgaaaaaaatctttaatgagagaaagtactg

SEQ ID NO: 838702 - DNA, 616 bp, Homo sapiens
gcctatgtgagcacgagtgtctttgtgtttgagggtgtgtgtttatgtttatatgagtgtgtatacgtgtatgtgtatgcatgtgtctgcaggtgtgtgactatgtgtaagtatgtgcatgcatctgagtgtgtctgccggtgtgtgaccatgtgtgtgtaagtatgtgcatgtacatgtctatgggttttcccatggtgactgtctgacttagtgcatgtgtacgtgtgagtgtgtgcatgcatacatctgagggggtgggcagatgggtgtaggggtgtgccgaatggagcagaagcaaagagagaaccagaagcaggacccctaagcagagggctgacgcagaagtagatgttaaggcactatgctctcaggaggggggttgccaaagtccaaaatcaaaatacccccattttcttgctgtgacatttgctgggaaccagagcctgatgccagcatccggtggacagcttggtcctttctckccggcagaagtgaggaggtgcagtcctttagcctaattgccttgacagctgggtcctgtccttctgcaagggacgcagcctccagaccttcccttttctccgcatctccacatcttggtgatgtgagttta

SEQ ID NO: 838703 - DNA, 477 bp, Homo sapiens
ggcctttgtccctggttcctgagaggtagcttctaaacctttaaaatttccagagtggtaagagtatctttgtcatttatagtgtgtcccctgagatcacctctgagcttgtgctaaycaactaacacatggtgagccactagatagtttatgctaatttggctcaacatgggggctagccatgccaaaagaccaaccatgtgattaaaagattaacactttgaaccaggtgatatcagcctgacctccagggaagggaagaggaaatagagattaagttcgattgcctggccaatgattcaattaatcatgcccacataatgaaaccccaagaaaaactctggacacaaactcagttgtgcttccctgactggcaatcctctgcgcgtgttgttacacatcaacgtgctgggagggtgacatcctgactccacaagcaaaggacactggaagcttggtatttgggacccttccaga

SEQ ID NO: 838704 - DNA, 453 bp, Homo sapiens
ccaccctgtattcaagatggagtcactcttgttcaaacgcccctgactgggccagcttgaacaacaggcgtataggggttttaggcctgtgttytaccctatggtaccctctttataacagaacaacacagaaagacaaagacagagaaaaacactatttctgggaggaaatgtctcaaacaatatgaatgttcataccaaaaagtacaccagagtcactatactcaggactagtcacgcaaatcctttttttcccattaatcaagattttggagaagaaacaagaacaaattgtgatttttactgtctgcttaaacaggttccacagagaaagagtctggaagcctggctgataagaatttctttcctttctgccagcttttcaggtcctggattccttcactgcggcttcaaacagagagactttggtgaccctgctcacagagccaaaac

SEQ ID NO: 838705 - DNA, 502 bp, Homo sapiens
ataaactgagaagagtatttccaaatcacgtatgtaaactacctggcacacagtaggcgctttttaagcagtagtcaatgtaattccaaattacccttaaatggagagggattgtctttkgggggctgctctggagctgtgattctcagactttcacatcagttactggggagcttgtttaaaatgctgtctgcatttgttctgattcaaaccttaggcattttaagaaagagagctttagggctccataagaggtaatgacacgcatttggccaggtcagcatcctctaagtacctgccttgccacggggcatgtcttaagtggctgcaggtgcgttgaattgtcctgctgttcatacatgaattcaggtggccccatgtggggggctacattctatgtgctcctccaaataatacctgatgtttccagggagcttgactctgtataaagccctgcaccattaatacgaccctgtcacatccattatctagtgcgatcctt

SEQ ID NO: 838706 - DNA, 667 bp, Homo sapiens
aaattgaaacaaacaaaggcaaggatcccaggagacatttagcatcaggataaactcacctaacacattgcaaaacccctaagactcgacaggatgagattgatgtttgttttaatgaccttgatcctgggacaggttaattaacgtccagcctcctccctctaagaagtagacggatgtagacaggaggcagattccagagaaaaggtgtctttatagtgtggtcatttaaaagtatagatgttcccggacttatgatgggattacgtcccaataagtccatcgtaagttcaaaatatcttaggtcgaaaatgcacttaaaacatctgatctacagaacatcatggcttagcgcctaacctagcttaaatgtgcggaaaacactttcattagcctacactcgggcaaaataatccaacacaaagcccattttgtaataaagagctgagtatctcatggaatatattaaataccatgctgaaattgaaccatggaatggttgtatggctactcaaagtctggtttctactgagtgtgtatgactttcacgctgtcttaagtaaaaaaatcrtaagttgaaccattgtgagtcggggaccttctgtatcgttttgtctgtcttgttcccttatatatactcaacaccacaagcggtgcatggtacatg

SEQ ID NO: 838707 - DNA, 496 bp, Homo sapiens
cagaagattacccactgcctataaaggaaggacccagtcctggtaggatccatcacttgctgaccaaagaaccgtgggaccctgaaaatcaccagtggtagccacgtaatacacccagtgggccttgggtaagactgagacatgctggcttcagatgtgatccagcaattcccagcagtggtgactatgaggaaagattccttctgcttgagaaatgcagagtgaagagtaaaggggactttgttttgcatcttaggtacccgctcagctgcactggggtgaaacaccaatcaggatcttgtagtcctcaattctaggctttggctcttggatggcatttctggacgtgccttgagccacaggggagcccactgccmtgaagggtgagtcctaagcctggcattcaacacaagctgactgaagatcccttgggctttcagtgaacattgctggtagcctggcacaactctttgtgggtctgtggcagtggggacca

SEQ ID NO: 838708 - DNA, 524 bp, Homo sapiens
tagcattactgggtttggggtccccctaatgcagatatggctgcagtgaccaaaacttagatcataacacacaagtccattcaaaatcataggaagtcttccctaaaaggrcaggtatgaacaagcccagactgtgaaggctacaattaattctgaattctgtaatgcccagacactgacaaatatccacaagaatcaagaccatccaggaaaacattaccttctcaaatgaactaagtaagtcaccagtgaccaatcccagagagatagaaatatgtgatttttcagacagagaatttaaaagagcttttttgaggaaacacaattcaagataacaaagagaaagaatttaaaatcctatgagataaatttaacaaggagattgaaataattaaaaagaatcaagtataaaatctggagttgaataatgtaattgacatgctgaagaattcatcagcgtctcttaatagaattgatcaaacagcagaaacaattagcttgaaggcaggctatttgaaaataca

SEQ ID NO: 838709 - DNA, 640 bp, Homo sapiens
aagaacctcctttaatatttcttatatagaagctctgctgacaataaattctccccayttttatatgtcaaacaacatcttcatttctccttcatcatgataactttcagtggttataaaattcggagttgagagttgttttctttcatcactttcaagatgtcacccttttgtcttctgacttgccttgtttctgataacaagtccactgtacataatatgtctttttcttgggatgtcttccaaattttctttttaacttcggtgtttagcaatttgaatatgggttcctttttatacatgtgtttatgtgtgtatcgttctctgagcttcttcaatttgttttggtgtctctcattgatttttttctcattaaatcctccttaatttctttgtcattaatttcagagaattatttgccattatttccttaaatatttctttggtcctgttctctgtttctccatctgggattacaagtacacatatttaagactacttcccagaagattgcaaatacactattctacctcagctctcaatttacccgttttcaagtataataattctgtcctcaggtgtaccaaccatattgatgagcctatcaaatgcattcttcacttttgttgctatgtttttc

SEQ ID NO: 838710 - DNA, 542 bp, Homo sapiens
gacaaaggtttaatatcctgcatctataagggacttaaaacaaatttwcaagaaaaaaaaaccaccaaaaagtgggcaaaagacatgaacagacactcctcaaaagaaggcatatgtgcagccaacaatcatatgaaaaaaaaaaaactcaacatcagtgatcattactttaaaatattatgggatcaccatcatatatgcagtcagttgttgagcaaaaaatcattatatggcacatgattacacgcacacacacacacagtcacataaatacatacagaaagacaaaaatgtttactatatatttgactttaagctccatggcaggtgggagccttgttcccttatgtcccaaacatcagggacctcagttatatccccaggatttgcatagagtaagaacttaataaataatgaatgagtgaatgaatgaaaatatgtcaaaaattcattaacagtgtatgttaatattgggtccttaggaattgtttaaaatttagacatataagggaacttagaaactgcctactccaaaacctttg

SEQ ID NO: 838711 - DNA, 629 bp, Homo sapiens
actcaccactttcccattagagcctagcccttagtttcagactttagtgattaaatcctggttctttctactcaggggatcttggcctagagactttggtttcccatctgcaaaatgggttggtaagcaaatgctcatcttgtatcaggcttgctgtgaaaattaaatgatataatgcagaatgcgggacccacatgaagtactgagaagataatatctgtccctgtatagttttatccttgtattatcacttcaaatcccagagatctggggagatgcgtaaggagtactgggtggctagtgtggaaaggggctaagaggcaggatccttgtttccctacctaaccgtaactaaggcaactgtttcatttttttctaaaaacctactccatgtatttaaattttatagacaaaatctggtttgaagaaaagagaatttcagggttttataaacaggtgaatcccaagatttttaaaaaggtttttctgatctcaaatggctgcatagaatttcattgcatggaagccccgttctttacttggtcagtycctttttgttagacatgtagttgtttctaatttttattaatgcaaaaaactctaaaatgaacataattatgcatatattt

SEQ ID NO: 838712 - DNA, 629 bp, Homo sapiens
actcaccactttcccattagagcctagcccttagtttcagactttagtgattaaatcctggttctttctactcaggggatcttggcctagagactttggtttcccatctgcaaaatgggttggtaagcaaatgctcatcttgtatcaggcttgctgtgaaaattaaatgatataatgcagaatgcgggacccacatgaagtactgagaagataatatctgtccctgtatagttttatccttgtattatcacttcaaatcccagagatctggggagatgcgtaaggagtactgggtggctagtgtggaaaggggctaagaggcaggatccttgtttccctacctaaccgtaactaaggcaactgtttcatttttttctaaaaacctactccatgtatttaaattttatagacaaaatctggtttgaagaaaagagaatttcagggttttataaacaggtgaatcccaagatttttaaaaaggtttttctgatctcaaatggctgcatagaatttcattgcatggaagccccgttctttacttggtcagttccyttttgttagacatgtagttgtttctaatttttattaatgcaaaaaactctaaaatgaacataattatgcatatattt

SEQ ID NO: 838713 - DNA, 546 bp, Homo sapiens
attactgttccttcatctgaatgatgacttctgacaacattggaatatagtcccagccccctctttggccactgtccacacacacaccatgtgtaatctgcccccagtcaagrtaacctgtgcagaagcagctgtttgttctgcatgtctccaggggtcagcattgggatgtttcataagcttaaggtttggacttaatagctatgaaagtgagtgagctccccattactggaggtatgcaaacaaaacagatcaagcatctttttgtcagggaagccggagagaagattcatacaacaggtgctggtggagggggaatgagatgattctgaactgctcaccatcagatcatgatggggagagaatattgaaaatgcaggtttctgggtcacacccttgaagattcttattccataggtaggtgtgaagttcagacacctacattttatatgaaaatgcccccaaagtattaactgcagatttcccacaacatctgaggtccctgctagctcagtaatcagccaaccccaagcccatttctttagg

SEQ ID NO: 838714 - DNA, 514 bp, Homo sapiens
aatatattcttataacaaatagtttagtcccagccaatcacagcagctgagcttcagccaatcatargctaccagctggttagatcatgtccatatcagacaaatgcctcatcacaccatgcccaagtaagacaaacacggagctataaccaatcagtctgtttctttacatcacttcctttgtctgtctataaatactgcctgcccatgttctttggtggagctctctgaagctctcttggttctaagcagtgcttgaatcatgaattgttctttgctcaagtaaattcttaaatttaatttgtctaaagtttttattttaagaggctactcaaaggaattttaaaacgttatattttcaatgatttcctctccaacatctgtcatttttccttcttctggaactcctatattcctattttagttctccttgcaagataggccctatagcaagaaggtaattgaatcaagctgtgttaggctgtggagctcgcacctgatgcatgacaagctc

SEQ ID NO: 838715 - DNA, 514 bp, Homo sapiens
aatatattcttataacaaatagtttagtcccagccaatcacagcagctgagcttcagccaatcataggctaccagctggttagatcatgtccatatcagacaaatgcctcatcacaccatgcccaagtaagacaaacacggagctataaccaatcagtctgtttctttacatcacttcctttgtctgtctataaatactgcctgcccatgttctttggtggagctctctgaagctctcttggttctaagcagtgcttgaatcatgaattgttctttgctcaagtaaattcttaaatttaatttgtctaaagtttttattttaagaggctactcaaaggaattttaaaacgttatattttcaatgatttcctctccaacatctgtcatttttccttcttctggaactcctatattcctattttagttctccttgcaagatargccctatagcaagaaggtaattgaatcaagctgtgttaggctgtggagctcgcacctgatgcatgacaagctc

SEQ ID NO: 838716 - DNA, 648 bp, Homo sapiens
aggtttgtaccctttgaccacttctccccattttcattctctttctgccccaataactactgtcctactctctgtttttatgtaattgactttaaaaaaaattccccatatttgtgaaataaagcagtattttcatttctgtctctggtttattttacttagcataatgtcctccaggttcatctatgttgtcacaaactgcaatatttctttctttgttaaggttgagtaatatttcattgtatatatagatcacattttctttatccattcatctgtcaataacacttagtttgtttccatatgttggttttgagaataatgccacaatgaacatggaaattcagatgtctttgttaggtagtgattttatttcctttggtatatacccagaaatgagattactggattatatagtagttctattttcaagtttttgaggaatcaccatactgttttccataatggctatatcaatttacattccagaaaggaattcttaaataaaattcaaggagaggtgttataatttggatatgatctgcttgtccctgtcaaaactcaggttgaaattttgttcccgatgtggtggtgttgggaggtggrgtctcgtgggaggtattttgcttatggatcaaatctgctatg

SEQ ID NO: 838717 - DNA, 517 bp, Homo sapiens
ggctcaaagtttggggaatgacatttatccaaaggccaaatgtcccatcttcagagcagaggcatcatacagctatggcctcatcacagaacgcagaccatctggaaaagtggccactcaccacaccctttagrccttccctgacagagagagagcacgtgtaatgctggattgctgtttcacagctgctggctccagatattccccaatggaattctttaattagttagctctctctagcctattccccatggaggatgaaacaaacaaacaaaaaagatgcaaaaggctagcacctgcagccttcctgtgctaagactgaatagaacataggcactgagagagtcctctaagcaaatgagggtgaaataatgcagccaggaagcttaacagagtctgccaataggaagagtttccagtggcttaagtgtttggacagttaaattatgactgaggaaatattagaataaaatgtgtatttaattcccactgcagggttgacctgacacaccaaaaa

SEQ ID NO: 838718 - DNA, 565 bp, Homo sapiens
taatagaggcagaaggcagagaaatcctaggcaaacaggggcaggtccctggtgaaaccccactttcaagcccaaaacatcctgaaacctgcagaccagagtgagaacttctattcctgtttactygctctctcccgattggttctttctgaataacaccttttaaccagttgaatgttgccttttccaatactacctatggcccacgctgcccccaccctgtgcctgtaaagacccagactccgttggtagagtggtgatggtctcatgggaaggagatggcctgacgtcagggaagagacctcctgacttcaggggaagatgacctgcctttcccatcccctctacagctcccctctctgctgagagctgttttcattgctcaacaaaattatctgccctcaccattcttcagtaatcaagtgtgacctcattcttcttggatgctggacaagagcttgggacccaccaagtatgagtactcagaaaggctgtcacactggccctttgcctttgctggtggagggcagccacctcacgcaacagggtcggggctgactgagct

SEQ ID NO: 838719 - DNA, 643 bp, Homo sapiens
atttttttaaataactgtggtttaagccaatttttttgaagcaaaatctttggttgttcttggcatttcttaatttgcttacttgggggtattctccccaaatccacacatataattttcattgcctctaaaaggggttatgaacacacatctgaaggagaattgaccacttgttttttgatgttttaaagccaactaaagcataaacctcttgtttcctttctgatcccaggctttttcaataagaacaatgcttatgcaagatttcctagggggattttgtggtttgaggttttaataatctaggctaaaattcaaataggaaccacagctgcttggataagactcttagaccttttcatttgaactgtagtgaacttaccagaatttttaactattctgagctctatctgatatacaagcagggcatgtggtagctgtatttcccacataagaatatctgtatacttgcaaattgtataaaataatataaaataatatgcatgtttccttwaatacttgttaacttgtttaaaacagatttgactcttttaaacagcgatgaatattggtgttctgattcagtaaggggaagctatgaagaatactttaacaattagatcttcaggactgttaaaataga

SEQ ID NO: 838720 - DNA, 610 bp, Homo sapiens
aatgaaaattatttttgctttcctttttttatcttaaaaatttttaaagggattttccaagtttatatactgtttatctcatatctggaacacttttaaattttggttagatttggagtaagtttgattatagtcttttctatagtcttttcttgatccttaaagaatgattcatttgattgctgtttcttatttcactgaacttttaatcatgtcacaatactatttttaggagtgtctatggatttctactgcctgagaagataaagccccaagtcttcacattaaagactctcataatctcacattggctttcttttcagtccttatgatccagaaacaccaggttacccattagttgccaagcacattctttaccgtcttcttagtgtccattcatctaccctcccgccaccatatctcctccttcatgaagctttcccagcacaggaaccccaggtggaatgaatcacttctgctcccagaatcctctgctcccagtgatggccaytgtggatcctgctgttcctatgtgtataacccccttgctgtgtaggctgtaagaagcatgaggacagggactgtgcctattcttttttataactggcat

SEQ ID NO: 838721 - DNA, 500 bp, Homo sapiens
cactttgttcttatgtgtgggcattatgagtttaggctaatttccctctttacatgctttgaatgaatttaaaggcaccatctcttgacttttagtcaagacaggcagggttctgaggccagcacagaatcactggaacaacttaagggttctcagaccaggtgcatttacaatggcagttgtgaaattcacattttcaaactcggcatgaaaccttaataaaatagtctctcaaagttaacttagaaatattacttaaaggacttattgtttagatttatctccaaaatctcacctctaaatctcaatatggagatttcaaattgcctactttgccatcatcaaccaggattcataggaaatggtttcactatcccacccttttgggctcaaggttgcaagagracatcaaggttctctacattctcgtggcattaggacagagagtccacctccttccctagacctattgggcctgttcatcatttcttatgcaaatt

SEQ ID NO: 838722 - DNA, 554 bp, Homo sapiens
gaaaatataatctccaaagcattatcattatatatataaaaaaaattctcatgacccaatttgtctttaaaaccaagacagagagaagacaaacatgaataggcccatttttataagtgggaaactgagagcacaggaaaactctcaggcttactcaaggttataccaaaagtagatggcagagcaagaacagagctcaaatggatggttcccaaatatttagttacccaggacttctttaattctacccatcactgccataggtcttatgtttaaaatagtattgtcttccctgtccacctaaagaatcctacatgcattaattattaatccatgcatcttttaaatagttaattttatgtttttgagttaattttctaattaatggtatataaatttaccagctagtgcttgttgatgagaacaaccrtaactaaaccaagttgctatgattccaggcaggagcaatgaaaagtgacagctttgttagtccaagcagcctttctctggacagacatactctttctcttcagcttcttgaaatgctgaaaatc

SEQ ID NO: 838723 - DNA, 493 bp, Homo sapiens
ttacacatgccattcctacaaagtcccaggggttttaataaaacttgactttttaaacttcagtttatttgagaaaaaaaaattaagaaatttttgaaaggcaacaagaagaagagatttgctctaagacattaaacatagttatataagaaatatctaggagttagtaccagaagtaaaacagacaattattatcagtggatgagaattgtgtatatgtgcatgcatacacatatatacacttatgtatatacgcatagatttaacctctgataacagtggctgtccactgtttatctacaataaaatatgtaatgggtttgttgagaaaattgactatctctttggaaataagtaaattgagatattttatgatataccttaaaataaattccrtatggattaaagagctaaggaaacctataaaatatttgaagaaaacagaggagaataatcttttcatctcagtgtaggacaagccttcccaagctta

SEQ ID NO: 838724 - DNA, 540 bp, Homo sapiens
tttttaaattaagaaatcatttttcgttgtttaagaaaattcatgttgttctctggttttccttgagagctcttacttccagtctaataaagctctcttctgccacrtcgttttgttctacctcagtacaagctacctattctcattgtttactaaattcccttaagtggataatgagttttctttttctactcatgattatatgttccctgggcactcgcactgtttgggctgtttagggtgtctcaaaccagaaggcgtcagaaagatggtggatttgtgcctcctggtgggctggcagtgaataagctgtccaacaattacaagcgccctctctgcaggggtcaagaaagcagctctgtcccacattccctgacataggacagtgtggcagtcctcttctacctggcaccactggtcagcaggctcaggcagtgtttccagggaccacacgcatccggcaacaggtgcaacagctctctgagggtccctctggccctcttagcagctgggcctctcagggagttgtgaaatctccct

SEQ ID NO: 838725 - DNA, 387 bp, Homo sapiens
ctgcctggaattaccacctaaatgctgcctgcaaatgtttgaaaccttcatcacctgcccacccagtccatccaggcttttgacttccaaacttctcacgctcattttctttgtcaccctgactgaaaattgtaggtgctgtggttggggtgggattgtactccctctgccccttctgactacattcctttagcaaattaattaccaggtcatattggttgttaatttgtagaatctcctgcaactgtgctaccctmtcctatttccactgcccctgttctggtggacccctcatcaccatgtgcctggtacatgtaactaaatttgttaaggcctccctacgttctataaccccctttcacacttctgccaggttaacacttcttc

SEQ ID NO: 838726 - DNA, 553 bp, Homo sapiens
gttcagaatggtatttcctttgtattcttctaggatttttatcattttaggttttacatttcggcctttaatccatcttgggttgatttttatatatggtgaaaggaaagtgtccagtttcaatcttttgcatatggttagccagttatcccagcaccatttattgaataggaagtcctttccccattgcttgttattgtcaactttgttgaaaatcagatggttgttaactgtgtggctttatttatgggtttttaatcctgtttcattggtctatgtgtctgtttttgtaccagtactatgctgttttggttactggagccttgtagtatagtttgaagtcgggtagtgtgatgcctctgactttgttctttttgcttaggattgctttggccatttgggctcttttttggttccttatgwattttagaatagttttttttctaattctgtgaaaaataacattgcattgaatctataaattgctttgggcagtatggttattttaacaatattgattcttcctgtccatgagcatggaatgtttttccat

SEQ ID NO: 838727 - DNA, 551 bp, Homo sapiens
atatgaattgaataataaaatagtttggtagaaacttaaaactttgaaagtttttttttattaaacgaatctttcattgttaaatttagtataagaaaattgttaaaagacatgattagtgatacaaaaacaggaacatttggccaaagttttaagttttttagattaaaaaaaccgtgaatcctgtattctatttattccagcatcaagcactaaaaaatgtggtttaccccttatttagatacagaaagaagaccctaaacagaaggataacatatagtcactattattaattacatcgtgataaatgctatggagaaaataaattggggatacagaaagtgtagttgtagggaagggaggagccggatggtccagagatgattttagtaggaagagttgagcaagcgaggtatgtggggaacttcttctattcagtgggaacagtgagtgcaaaggctttgaggcggaataggaragttcaaggaaaaggcagtttgtctggagcagagggaggtagaggcagaataataagagatgaggttaggcag

SEQ ID NO: 838728 - DNA, 504 bp, Homo sapiens
gctgtcaccctctgaggaggcagcgccmggggaggggcgtcccgggcggccgccgccgccagggggaggcgctgggagtgggagtgggaacgggacctcagcggtcgagctcggccgggaccctaggtgcgggggaggcggggtcccgggctccggctgcctgcccagacctggcggggatgggcccgtgcggctccgggtgtgggacgtatcctgggagcgcccggggttattcccactgactcccgggaggtgggtgtgcgcccttcgccccctgcctggtctgtggggatccatcgttgctggagactggaggtcgggggccatgggagccccggggcgaacggtgcgggcctgggtcttgtggaaaggaggagcgaccgcctgagcgtgcagcaggacatcctcctgacctggtaataattaggtgggaaggatggttgggggcggttggcgtaactcagggaacactggtcagactgctccccaaacgattacagtgtt

SEQ ID NO: 838729 - DNA, 657 bp, Homo sapiens
taattcagtcctaaattaggcttaagagatgaaacsttttgaaaatgtcaaaagattttttcccccttactgataaccgtaaatccgatttgaaacttaatctacttgattactttgcaacattcttttaaaagtggaggaggtattggattttagggggggaatctttactttttacgtaagttatttccagtcttcttaataaaaagatctttatttaaaaagccaatctagctgtggtactttgctttttcagtaaaaaccaaattgaatagccagtttatgtcttcagagagctacctttgaacagaacttaggtttatatattcactcttaatcattttagttatgaattaggtgtatctttatgatatattgaattctaaataataaaagtacctcaaaaataataaaacttcatggatcacattacatgagttatctacattagttattttaaaaaattaaatacaaattgaaatggataaagttatagtaaaataagtcaaaatctatatttaaattttaatggcatataaatatatgtatattataaacaggttagttatgtttttatacatagttaataaatattctcaggtatttgtgggccaagactgttgtggcattctttatcaataaaggccaaaaagctct

SEQ ID NO: 838730 - DNA, 269 bp, Homo sapiens
ataacaattccaatcaaatcacagctggatttcttattttagaaattgagaaactaaaattctgaaatgtacatcgatgggtagaggacctataatggcaaattactttgaaaggaaacagttactttgaaaccaggtgctgctggagaattaacagcacctggwttcaagacttataacattacagtaatacttaagacaatgtagtacaaatatagatatacacatgtatatcatctatcagctaatttttgataaagttcttagac

SEQ ID NO: 838731 - DNA, 563 bp, Homo sapiens
gatataaagatatataacccaattattttacattgctctaaagataattgattgtctaattttttaaaaaaagagtaactttatattatggaattcataatatttgagactataatgcatgacataaatagtataaaggagagaggaaacagaaatatacattttaaggtttttataccatagttggtatagtacaaattataggttactgtaataagctagaataggtattgaaatctctagagaaaccatgaacatttttaaaaaatggtatgtgcattaatgttttcatagaacttccagcttttatttatttgtttgtattcatttaattttatttattttttttgagatggagtctcgccctgttgcccaggctgcagtgcaatggtgtgatctcagctcactgcaaccacctccgcctcccaggttccaatgrttctcctgcctcagcctcctgagtagctgggattacaggtgcccaccaccatgcccagctaatttttgtatttttagtagagacggggtttcaccatgttggccaggcttgtctcaaactcctg

SEQ ID NO: 838732 - DNA, 627 bp, Homo sapiens
cagcctcccaaagtgttgggattacaggcatgagccaccgcgcccagccaagtttgcttttttgtgtgtgggtttttgttttttgttttttgagacagggtcttgctctgttgcccaggctggagtgcagtggcgcagtcacggtttgctgcagcctcaacctcctgggctcaagcaatgctcccacctcagcctcccaaggagctgggtctatgggtgtgcactaccatgcctggttaattttttaaaattttttgtagaggcagagtcttgttatgttgtccaggctagtttcaaactcctggctcaagcagtcctcccacctcggcctcccaaaatgctgggatgctgggaatgaggacgcgtctgtcctgtcaagtcttttgggggctcagatcgtgtgtcctgggaggaatggcaaccatgaactgttgtccagacctttgccccagcaccctcagagggggcctgcctcccaccacccctgtccctgtcctgttctacttttgggccccargggctgctggcctctccccggccccacagtgaggacaaggctgccttgggaggggaaccaggcagctggagactgaagtgggaggatcccactgtggggacagaggcaag

SEQ ID NO: 838733 - DNA, 644 bp, Homo sapiens
ctgtggctctggtgcccacccacaggtgagctcatgcatgygtggacgtgtgcgtgctcactggggccaggcattccatgtaaatgcacgtattgcagctgaagcagatgaaggagctggagcaggagaaggaggtgctgctgcagggtttggagatgatggcgcggggccgcgactggtaccagcagcagctgcaacgagtgcaggagcgccagcgccgcctgggccagagcagagccagcgccgtgagtgccacagccctgtccccagatccccacacatggggaccccagctcaccccaggcacccttgggcattgtggctgcccctattcccggacacagtggctgtcgattccacccaggatgctgagacatccctttctccgcctgtggctgccccactcctagggcctaaggtgtcttgggcagacctcccacctcagcaatgcccctgggaccctctaggctctctgcagcatcaggaggcaggagagccacctgtgggaacccctatcaaggcaccttgctggccccggctggacctcctctctgaccgcttgtcctctgctttcttcccaggactttggggctgcagggagcccccgcccactggggcggctactgcccaaggtacaagaggtg

SEQ ID NO: 838734 - DNA, 389 bp, Homo sapiens
gggtgggacagatgagggtggagcattgggtgcttaagggacacatggagacaggtccagcaaaggagctggtgggcacagctgggcagttgggggtccggaggccgtgctgccctgggagtrgagggcaaagcaggtttcacctgagcgccgcagaaaggagtggagagcccgggcgtgggactcacgcttgaaatcccagcactttgggaagccatggtgggaggatcgcttgagctcaggagtttgagacaagcccgagcaacatagcggaagcccgtctctaccaaaaatacaaaattagccaggcgtggtggtgggcacctgtaatcccagctacttggagggctgaggcgggaggatcccttgagcctgggaggtggaggctg

SEQ ID NO: 838735 - DNA, 626 bp, Homo sapiens
tgcctgtagtcccagctactctggaggctgaggcaggagaatgtcatgaacccaggaggtggagcttgcagtgagccaagattgcaccactgcactccagcctgggtgatagagtgagactctgtctcaaaaaaaaaaaaaaaaaaagaaactcactgaaagccacacagctacatggaaactgaaccacctgctcctgagtgactacagggtaaataacgaaattaaggcagaaataaagaagttttttgaaaccgatgagaacaaagacaccacttaccagaatctctacgacacagctaaagcaatgttaagaggaaaatttatagccataaatgcccacatcagaaagcttgaaagatctgaaatcaatacccgaacatcacaattaaaagaactggagaagcaagagcaaacaaattcaaaagctagaagactacaagaagtaactaagatcagagcagaactgaaggagatggagacacaaaaaatccttcaaaatatcagtgaatccagaatccggtttttcggaaagattaacaaacyagatagaccactagctagactaataaagaagaaaagagcatagaattaaaacacaataaaaagtgataaagaggagatca

SEQ ID NO: 838736 - DNA, 631 bp, Homo sapiens
tgaaactgaattaagaggggaaatagatggcagtgacctaacaacaaaggaacccgtagctaagggtggatccaggtagtgccaaccttcctcagacaggaggtacactagagttcctgatgggtctgagtcccaggccaaccacacatttcagaacttccagggacaaaataacagtaattttaacacaagccaaagcaaatatcttccaaagttaataagacatattagcagcaagatcagaaaggcagggaatatggaggggtaggtacataagagcctgccctattcactctctgtacttgtgtggatatttgaaatatttaaaatatttagacattttctagggaaagacaaagaaacatgaaaatctcttgccatgaaccagaatcctgattagatgcagcagaactggacactgcaggtgaaggaacactgctctgctgctccacacacccggacacatactccctggtagggagatatgggctggcccacagccccaccctgcccaygggccaggaggaaagcaaggtttcacccacctcgccactctgtcaatgggcagtggtatctagagtgcaaccgtggggattctgagccacttcccaggctctgagaatgaggactg

SEQ ID NO: 838737 - DNA, 540 bp, Homo sapiens
gtaaaaagtactgagtcagagtggagaaaagtggcttagttggaatcctccactaagaaggtcttggcagagtctcctgaagagtacctcagctgagtccctctaataaaraggcctccaaatggcggcgcctgggctagggatactcgtgggaatgctcagcctgaggtaccctgaattgttgactgcgactctctacagaaaacagtaatgactggccgtgcaccaagtctggtgtggacaaggcagttttcccccgaggcctaccgggcacagccctgagattgcctctggatcacacagaggattctggcctggtgccagagtcttcaaactaatagtgttagatcaaataaatgcattccagagttctgaagacctgtagctctcacagatagcacagcagaaattaattttgcaatttttcattattcaaactagttattcatccaaagtttctattttataaaaaagtctgattttatgtattgttgaatttgaatttgatatgagcagatgaaagcaaatatagctgttatt

SEQ ID NO: 838738 - DNA, 422 bp, Homo sapiens
atacataaagaattacattgttaaaaatcatgccagacatattgattgtaatgattatcataaaacatgtattattatcaaagtaaattaaccacatctaattcatcagtgttatagccagwgacaactagaattagagaatattaaaagtagaatgaaacattactatccagttcaagttcagaattttgtacgtatatgtacatatatagcccagaaacccaaagatgtgaagaaatggctagaatgtggcagaaactggagtttgactcagattcctatattgtagtgatttttccatgatgctccattagcccttaagtttcaagaatcaggataattggccaggaaaacacaaaattttcactaatttaaaaggtagatatcattggaaaagaacaggcaagtgacaaccaacagag

SEQ ID NO: 838739 - DNA, 665 bp, Homo sapiens
caagagttcttaaccaggctgaactggctaaaatgacagaaatagaattcagaatatgaataagagtgaagatcattgagattcaggaggatggaaaaacacaatccaarcaaaataaaaatcacaatatagcaatatgggagctgaggatgaaatagccagtgtaaaaaagggtctgacagagctgaaaaacacaatacaagaattttgcaatgcaatcacaagtactgacagcaggatagaccacgccacacataggaaagaatctcagaaagtgaagactggtataaatgaaataagtcagtcagacaaaaataaagaaaaaagaataaaaaggaatgagcaaacctctgagaagtatgggattatatgaagaggcaatgtctacgaatctttggcatccctgaaagggaggggaagaaagtgaacaatgtggaaaacatatttcagaatataattcataaaaacttctccaaccttgctagagaggccaacattcaaattcaggaaatacagacaacacttacaagattctacacaagaagatcatttccaagacacataatcatcagattttccaaggtcaaaatgaaagaaagaatgttaaggaagatagaaagggcaggttatctacaaaaggatccccatcagactaacagtggacc

SEQ ID NO: 838740 - DNA, 553 bp, Homo sapiens
gctcaaatttaattaagtattttgtgcccattgggaagaactgctgtttgatatttggatctgtgaactgtgtttcagtgtctcttgtgtctcttcatctacggctaaaatggaagctgaaaacccasctctctctatatacctgtaattcaaaaaggactttactcctcattatgtgcctgggtgatactttcctagtactaataaattagattatgaattttcttaaattaaaggtactgtgttctgattggtttatagagatgaaaattttctcaaataaaatgagtattcttaaaattcctggaaagcatgaacattgaaattcaaaaactttaaatgtgcaagattttttttttttaatcttactggaactgactccagttaactgaaatgtttcaaaatacaaggaaacaatacaattcaccatgaattgccatttacattatgagctcagtttgagtctcaaatatttgtccaggcaagggcacctccttgtgattttgccatagtccagaacccatcaattacctcaaggaataccaacaattcc

SEQ ID NO: 838741 - DNA, 458 bp, Homo sapiens
ttgaaacagaagagaacaggacaaaaacacatagagaaaaagatgatatgaagatgaaggcaaagattggggtgatcataccacaartcaaaggagtgccagcaaccaccagaagttagaagaggcaaggaagaggtctcaccatcaaccaggctccagagagaacatggccctgctgacaccttgatttcagacttctggcctccagactgtgaaagaataaattgttgttgttttaaggcaccaagtttttgataatttgttatgacaaccacaggaaactaataaaacttccttagcagaggaagatcttgctccatcaattcttccttacagttctttctcctacattttcagtttccctgctgcttgttttcccctagcaatacattcttgcaattttcttccatcataaaacctgttgctgttttttaactcagtaccactttctctttcct

SEQ ID NO: 838742 - DNA, 585 bp, Homo sapiens
gttgtcatatgagtttttctcctttgagttccttcaacatggggattttgtttcacttactccttgtatctgggtgtcatatatggtcatttgctcacagtaagcttcaataagcactgattgaactgcaacatgaacaacttgttacaacactatataccaaacactccacacttaagcaaaacttgcaaagtctgagttttctttatagttcttaactattccttacatcctgaaaaaaatatttttagataaaagtaggcatatttaacttcatcaggggaaccttgagcttttttggctattcaatagtaggaaatgaggggaaaaaagcaattattgtatggattaatatgatccaccttcagaaagaacgtagggcaatttacaacatgccagaggatgcgagaactggcaagcttcatcttattgatgctcagattccctgaagctacataaaaatgtakatgataaggatgagcagaggcacagagaaagcaccagaaccttaaggtaaataacagacatggtagagtttgagctacagtggaatcattttcatcctgaaaaatttgccccagagat

SEQ ID NO: 838743 - DNA, 543 bp, Homo sapiens
aaaaggcattatctcaaatttaaatattagttaattatgaatctgagagattaaccaaggcttcacacggaatcagaattccarctcaggtgtttctgaattcagaagttgttattcactcattaatacccagtcattaataccaccagcacagtagattttactgctctcgccacacattacttgccagtcaagtgaaaattttcttttcagcaaaggaagaatatgtatgctggcttttcttaagtatcatatctcatttcattattggtaactactctgaattcatttacctttccaaaaacataagtctcttttgtgatctaaatagccttactaccccgtgggtaacattattcacagcccctacctacaaatgtgtgggtttcatttgtgtgaaaatcatctctcctttctcagggactccaaactgtctcatatgtaagaattcactactggatggtgttagttcctactattgtccagccaggacactgttgggctgtcaccatgtctgctgagcctctgttgcatgtcactata

SEQ ID NO: 838744 - DNA, 597 bp, Homo sapiens
atatatagaaaacaaattacaaatgacaaacttaagtctaatcacaacatctaaaagtagatattaattgtattaaattaatatcattaaattccacatgaatggctcaaacactcctatcaaaagagagaaataaacaaactggattttaaaagtttccagatgtatgctttctataaaaaacataatttagattcataaacacaaatagattgaaagtaacaggatagaagaagttgtcataataagaactggcatgactaaattaatgtctaataaaatagactctacaataagaaataattctagagacaaagaagaaactttataatcatgaaagtgtcaatcagaaaaatataataattataaaagtatgtgcaactaccaacactgctccagaaacataatgcaaaaactgacactattgaaagaagaaatagacaatttaataccaatttttgaggattttggtatctcattgtaaatatttgacaggattactacagagaaatttagcaagaatagacctggcgtagtrgctcacgcctataatcccagcacttcaggaggctgaggcgggtgaatcatctgaagtta

SEQ ID NO: 838745 - DNA, 672 bp, Homo sapiens
ttttacgttaattgcagtcttgtttctttcttgaaggccttaaagacataagtccttgtggttataattaaatcctactgctaataaaattcttatgtgctcccatggtcctagttaaataactcatttctagaatcttccttatactagctaggccctttaaaaaaatcgaggaggagagggctttattagtattatttgtgaagaatagttcctcctggttttacatatatataaaatgaaaaaagatattaagaatttatcatgtgaatagaactatgaaatcggtaaagagctcagctgcacttgaaaaccttttaacatacttcatttttggagaaagctttctcagactccagcagaagtagcatctgcagtcttctgctatgatcatacttatttctagtcatttttattccataacaaataggctcaatcacattaaccacctacttatacaacattcataatttatataatgacattgaaatctgctattaatctcagaaagcactaggatagtgtcaagttatatgatactggaatgcttttttttagtttctggttctcaatwgctgattgacttattgttagctttttaaaaggtctgcagtgacaaagtaaaattggaaccatatctactataataagcctttgcaactgaaaaaggcc

SEQ ID NO: 838746 - DNA, 598 bp, Homo sapiens
ggatccacgatttattaacacaarcattacacgcaggcaggtccaaattgaagcagcaaaagccccatgaacagtggttgggagcaaagaccctggaatcacacacaaggctgccttgaaattgtagctcacccacttagcagacatgtggctctagcatggacctttctctcccagtgcctccacttcctaatactgtgggataagcttggcagatagagggacaatcactccacagctccagtaccccggagacagcggtgctccggaatattgcttacacgctccgcaagggtttctctcagcctttctagagccatcaataatccatggtctgtttatgtttctcctctagtagatggtgaattctttgaaaacaagaactattaattatttatctttctattccccatacctaacagagtgctggcaaatagcaagggatgaatcaaagccttgcagatagagggtgaatggaaggacacaaagatgagtagaacacacacagagtagccagacacctggcaacaggcattcctctgagccccagcaggagggctggagccctgagacagaggtgtgctagctacacaccacc

SEQ ID NO: 838747 - DNA, 678 bp, Homo sapiens
ttctgggtaacagagattgttgggatccgggctttagactgggacagarcatagctgtcatgatttcaggggcaacacgaggaaaaaatgcttttcattaaaggaatgatgccaccgagaaaaacactttgaatgtgtgtgtaaattagggtatgtgcaattctctaacagcacttcagttcatcaataccacaagttaaaaaaaaaaaaaaaagagtggcagatatgcaaggagcaggtgcacccaagtcaggctttccagcaagcacctcactccagggcaggccccttcatgtctctgagctgcagcgtcctctcatgagatggagaatcctgcctatttcacaggtttttatgagaagtgagatgaagcaataagctaaagttttagaaggactctaagagccatggataaaaatgaagacaactctggttgtagcctgtgagttgtcagcagggaatctgaggggtacgggtgctggtcttaagacaaaggaggtcaggaagctgttctgtgttctgggaacacggaacagacttgcagaggcagctctttactttgcaggcatcttggcagctggaaactgccagcttggcagttggaagcttcgctctttgcaacagccctggaactcatcctttgcaccctaaagtcatcccaccctccaagtcagcctt

SEQ ID NO: 838748 - DNA, 399 bp, Homo sapiens
tatagatcagggaacacaaccgccacacagtatgtgaaatgctattgtaagtttaagctccagatgtttgaagagctgagaaacgtcgaagtcctgtagtttaggatggctcagtatgggaaattgagaaagggggaggagcatccgcaatggagctaggaagctggggaaaaaggcagaaaaaggcaaaagaaaaggcagggaccagatgatgtcaggcattttcactcaggaaggcgcttcctgtacaggataagtttcaaatcaagaatgsagtcgcaggtttgccctcttggaagggacaccctgaacttctttcaggaaattcctctgcccatcttggccatctgatctggtggactggatcctagagtcgggccagactctaagccagttact

SEQ ID NO: 838749 - DNA, 564 bp, Homo sapiens
aaaagtttatttttaaacgaaacactttgacacgaaaaatctgagaaacgctaaattaaatatagttaaacagattagttcrcttatttttcagcattttaaacttctggtggtttttggtatgctaatgaataccatcacagtccaagaaaggtacacagaagggcccaaggagcccataaaacactttctcaagcactactgcatagcattaaagcttcgtaagaaatacaaaaaaagaaagaaagctgctcttagtcatttcaatgtaacagatttccctaaattaagattttgcaggagtacagagaagaacatacacaatcaacaaggaagaacccaggggccagaggaagggcacccaccttctgagcacagggccagatggagacaaattcactagagaaacagccacagactggcaccaagtggaggttgtgggtgctttctactttctaccttcacctacatctgcaggtgagggtgaagggtcagccattgggagcacctcaactgcagaggacagcatccataattggacactaaaatatacagggtaattga

SEQ ID NO: 838750 - DNA, 509 bp, Homo sapiens
aaagctgacattatactgggacataaagaacaactcagcagaccatgtgttctgacctcaatgcaattaagatagatattgataataaaaagatcccmcacgttggaaaattttgaaagacttatcagtaactcatgggttatagaaaaatatgtaattttaaaaatatgtagaactaaacattaatgagaatattatttaagaaaacttatgagatgccattaaagcagtactgagaagaaaattttttttgagacgcagttttgctcttgtttcccagactgcaatgcagtggcacgatcttggctcactgcaacctccacctcctgggttcaagcaattctcctgcctcagcctcccgagtagctgggattacaggcgcccgccaccatgccgctctaatttttgtatttttttagaagacacggagtttcaccatgttggccaggctggtctcaagctcctgacctcaggtgatccaccggcttcagcctcccaaagtgctggga

SEQ ID NO: 838751 - DNA, 630 bp, Homo sapiens
tgcatagccccacacctgcaaccttgaagccgcatgcayatggctctgggcctaatccatatgggctcctgctttgccaggaagagcaggtaagagagggaaaggcagttttatcaaggcctagcacggccaacccctgcacggggcagttctctcgcatgtgttaccagtccagtcctccaggaccacctcccaggcagaccctcattttctctccttctctttctccaggagccggccacgcagcccagctctggcactgggccctgaacagagtcagccaccaaacttttggaaaagcttgtcgcttcttgacaaaaacggacagatgcagctgacaccaactccccctcctctctcactgccttcaacacagatgtggcgcagctgtggccagcccttttgcatgatggggcaaaggaaaacatgctgaggatggcaaagtgaaagaagagagaacctggctctcagtaacatcccaagccgctgcaccagcacctggaagcaagcacctaccttcagtgccttgctattaaggaaacagaaagctgtttaagtccttgttagtaagtgctatgttgctggccaaacatatgctaacacatccaaacacaaacaaacactatgcct

SEQ ID NO: 838752 - DNA, 517 bp, Homo sapiens
agggagcattttaaaccaaccctagccactgggaattataagttactrtggtttttaccattaaaagtaatggcaaaaaatcacccatcccaggggctccaatgtgagttcctgcaaaccttgccactaagggctaaaggactctgggtctctaaggaaacttgaaagccagggtaggccaaaaagaatacaactcttaggcaagtcttagtggttaactggacctagaaaaaatgtactggacaaggagatgggggtgacctagtgagacacaagctggagtgactaagggagtgctggcttcactcctgccctaacccatgcttcacagctcatggctccaagagagatccctttcttctgcttgagaggagaaggaaaagtaaagagggctttgtctttcatccagaatacccgttcagccacaggaggatagggcacttgtcagagtcttgaagccctcattctgggccctagctcctggataacatttctagacatacactgggcctgaagg

SEQ ID NO: 838753 - DNA, 517 bp, Homo sapiens
agggagcattttaaaccaaccctagccactgggaattataagttactayggtttttaccattaaaagtaatggcaaaaaatcacccatcccaggggctccaatgtgagttcctgcaaaccttgccactaagggctaaaggactctgggtctctaaggaaacttgaaagccagggtaggccaaaaagaatacaactcttaggcaagtcttagtggttaactggacctagaaaaaatgtactggacaaggagatgggggtgacctagtgagacacaagctggagtgactaagggagtgctggcttcactcctgccctaacccatgcttcacagctcatggctccaagagagatccctttcttctgcttgagaggagaaggaaaagtaaagagggctttgtctttcatccagaatacccgttcagccacaggaggatagggcacttgtcagagtcttgaagccctcattctgggccctagctcctggataacatttctagacatacactgggcctgaagg

SEQ ID NO: 838754 - DNA, 610 bp, Homo sapiens
cataagaccatacctcatcttggacatttcaaatatctgagatcaaattctggctatacagttttgtcaaatccctaacttttatggatttcagttcatacaactttataattataatgatatctttactcactccccaaatattaactgactccctcctaccccccagtatgtttcctgacactgggaatgcagaatgaacagagcgtaacacgttcctgacctcacgaagctatatcaaaagggataaataaatagataacagtaaactaataaaatgttaatgtaatttcagtaaagttatttgttgtcaaagatatacaaaaaaaggaataaaaaatggtttccaaaagtttaattgtgatgagtaagagtgtagcattgccattcatgaaggtagataatcaagaggagaaaacgggtttcaggaaggacaactgatactttctattttgtacgtgttagatatgaagtacctttctcccattcctttcagtggttgcttctccccactgcctgagtcagccgagattgcactaatgctgggaataacttccttgatttgtaagtactttcttttttcccccytgtacattctcgtagcaccctc

SEQ ID NO: 838755 - DNA, 599 bp, Homo sapiens
aatcaaccatccggagaagtgggaacaaaaatttctatgacatagcatatatgaatggggactgaatttattttatttttcaaaatataatatatatttatttaacatattatttttaacatgtcaataagtttggatttttttttttttttttttgagacagtgtctcgctctgtcacctaggctggagcgcggtggcggtacttcggctcactgcgagctccgcctcccgggttcacgctattctcctgcctcagcctccccagtagctgggactacaggcgcccgccaccacgcccagctaattttttgtatttttagcagagatggggtttcaccatgttagccaggatggtctcgatctcctgacctcgtgatccgcccgcctcagcctcccaaagtgctgggaagtttggatatttttaaaagttgttaagaaaataatgacaatattacactgcagtactgacaaatctaaggtacacagtgaagcattataaaaagtgcactagccaaaaaattggaaaccacacctcctagacattctcagcaacttactagagtgaccttggatmcttcaaatatgaaatgagtttaat

SEQ ID NO: 838756 - DNA, 606 bp, Homo sapiens
ctatatgagggcatacaaattcagggagctggtaataattttaaattaattgatgccatcaggttttcctaacaaacataggttatgccaaacgaccaagaaaaaatcacaagcatgcacaaacacagagacacacacactcacacacacacacgcttttaaaaagttaacctaagctagggtgattaatctttgcaaagaagttactgtattttctatattcacattaatttttctcctcttcattttataatctaaccatagataataagtaggtggatatgtacatatgcagacaaatagatagacaggacttttatataagcttaatttaaacaatttcgtaaaatttaatgtgagatgcattcagtaataattatagccatagttggaataatctgtgaataagtcatgtaagaaaataataaagatttggagatacacagatcatgttttgctcatcctgttccacttacacrattctataaaattaaaaaaataaaacggagacagaaaaatatgttaggaaaatatcaatcccagaacaggggaagaaatctgtaaaattatttatttaatcaaggacattccacttatttggttaaa

SEQ ID NO: 838757 - DNA, 674 bp, Homo sapiens
agatttaatttggttctttgagaaatctccatactgttttccatagaggttgtactaatttacgttcctactagcagtgtctaagcattcttttttcaccatatccctgccaacttctgttgtttattgactttttattaatgtccattctggccagggtaaggtggtgtctcattgtagttttaatttgcgtttccctgataagggatgttgagcttttttgtttgtttgtttttgttttgttttgttttgagacagagtctcactctgttgccctggctggagtgcagtggcgcgatcctggctcactccaagctctgcctccctggttcacgccattctcctgcctcagccttctgagtagctgggactacaggcgcccgccaccatgcctggctaatttttttgtatttttagtagagacagggtttcaccgtgttagccaggatggtctcgagctcctgacctcgtgatctgcctgcctcagcctcccaaagtgctgggattacaggcgtgcagccacacccggctggccattttttcatatgtttgttggccacgtgtttatcttttttgagaaatgtctcttcatgccctttgcccastttttaatgacgtcatttttttcttgctgagttctttgagttccttgtagattcttggtattagtcctt

SEQ ID NO: 838758 - DNA, 508 bp, Homo sapiens
tatatcaaattgtatttatccattaatcagttgatggacattgggttgtttctgctttctggtcattataagtaatgccaatgcaaaaattcatgagcaaaggtttttgatggacaaatgttctcatttcccatgggtatctacctagcaggggaatttctgggtcatctagaactctatgttgaactttttgagaaattaccaaagtgttttcctcagtggctgcaccattttacattcacactgaaaatttatgaggatttctgtttctccacatttctgcactcactttttttttttttttttttttagaattacagccatccttgtgtgcgagaagtgatatttcattgtggttttgatttgcatttccttaatggccaatgctgttgaacattttttatatgcttgcttgccacttgtgtatsttctttgaagaaatgtctattcaattcactttccaattttttaattgagttgtttgtctttttgttgttgagttgtaaga

SEQ ID NO: 838759 - DNA, 619 bp, Homo sapiens
tatgtgtttatctttatgccataccacactgtcttgattattgaagtttayagcaaatttttaaattgggaactctgagtcctctaattgtgttctttttcaagattgtttttgctcttcagagtttttatagtttcatattaattttagaatcagcttatcagttgatataaaaaacccacctgggattttattaagagctgagttgttttcatagatcaatttaaggagcattgccatctaaacaatagtaagtgttctgatctaagagcacgacatgtcttttcattcatttagatcttcttttatttctttcaacagtgtacttttctacgaacaagccttgcattgattttatgtaatttatttctaagtattttattctctttgttgctgtggtaaattaaattgcattcttagttgcatttttggattattcattactagtgtataggaatacaatggattgtttttcaatttctgatcatggcaaaacacacataacataaaatttaccattataaccattttaagtgtgcctttcagtgatattaagtgcattcatgttgtgcatccatcaccatcaagtatctccatatatcttttcatcttgtaaaac

SEQ ID NO: 838760 - DNA, 629 bp, Homo sapiens
agaacttgaaggaacagaaagaggtgcctcatccaatcctctcagtttacagatgaaataaataaataaataaataaatacattgactggttacagacactataacaagctagtgatagagccaagactagaacccaagttctgattttacataattaattggccaaggacatttaacaggccaactagtctaattcagaaacacctgggttgtctatgcagtcataggctaattcagtagagttcaagaatacttagaatctctcttttagcagatttatggacttataaaccacaagtaaaatgtattaaggtaaaatttgcttaaaggaattgataattaaacctgagagatcaaaagtcctaattactgaaccatggctgcctagtaaaggtggttctgagaaagagacaagaaatggctgtgtgcttctccccatttctcagacgagaaaattgaggcatgagaaaaacaacaaaaccatcttgctgcagaagaaatgactccaaagaaaagatttctttttcctgggctgcattctgcaatccaaaatttgtataaatctataaagcactcaagattcagcaarggctccagcaaatcaataaataatatgtagagttgagag

SEQ ID NO: 838761 - DNA, 554 bp, Homo sapiens
caagacagcctgccctttgcagtagacatcactgcatgattccagtgacaaggagggaggaaaaaggtttccttcagaagccgtgttaaatagcagcccctactaagcatgtagcagccacactttatctcactgacttaaagatgagtaacacacctgttcctggaagccctaacactgcttgcatttctttcctcaccacagtgtgactggcaattgcactgctctgtttctttcagagggcatatcctttcactacaagacctctggaaatattctagcccatctatgaatggaggtttgtaaaactgagagacgatctgctgcaatttgaactgtggttctcaaatagaggccgagacactgcacccgaatcaaaacctctggggaaagctgaggtcaggagaccctcgtagtctgatttgaaacccctggtctacgggggacactgatgcatttcyagaaaggactacaagaatctccgcagtgctttggctataaccctcaccacattttagttaataaaagaggcattgatttcctcaaactttcag

SEQ ID NO: 838762 - DNA, 488 bp, Homo sapiens
actgctgaattagagattttaacatatagtggtttaaataagctagtttatttttctctctgataagagtctggttggtctggggctggtgggatgactctgttccgcaaggtcattcagggaccygggttctttccatcttgttgctctgccatccccctgaggctttgtcctcatcagtacagtagaagccaggttgcatgtccttgttcaagattgagggaaagaaaaagagaagttcagggcaagtagttaccttttaggctggctgcccacattactgctgttcacattcctttggcaaaaacatagttacaatgacctagcttcaagggagactaagaaatgtagtcttctagctggagagccatgtggcggaatctgtcactctggaaaagaataaatattccgaagcccgtctgtttctgaaagcatctaatgtatctttacactgtacacagcctagtgctgccaggtgacttaaatgt

SEQ ID NO: 838763 - DNA, 512 bp, Homo sapiens
aaactggcatattttggttccacattgaagttcctgacaaagtttgacctcgtattagtacttcaacaatggataattatggtctgaggcacttcgtctataaatcaaactcggtagaaggagtattccctgcaatgacatgcagcaattgaaatagtcatctttttattttttggtaattattctaccagtttggagtgtaaaagtagaaaatatgatgctgctattacattgctaagcaagcagaaggatatccaacaaggaaccacatataaatttaagtgttcatgactacaagcctatacctattgaaagacgagccttgtgtccagaacagtgatgagcacatattctgtgctaagtatcatttgaatgaatttttttatatgtgtttgcacccgacagagattttatatgcaaaaataaaaaaaaraaaatcctctgtctttttatgctttactttttaaaaaaaatacaacacctggattgttgtagagcatattaacttaaaa

SEQ ID NO: 838764 - DNA, 526 bp, Homo sapiens
tatcagggacccccaaaatgaaccatcaacagaactggaatcaaaatgcagttgaaaaccaattttgttgaaaatcaatttttacatgttggcttgaatgtcctctaggatgggagggttttcaggctgtaattttcatccctttgaaatacagtgaatttaaagtgaattaaaatgcacagggttatctgggggataaagtcacagtgataataataacttttatttaagatatgttttataacatttagattatttttgccatacatttcatcctcccagcaaccctgggaaataagtgatcactgtcttcctttcaaagacaagcaaatgaagactgagagaggtaataagattctcctaaaatcccagagagaagtatcacaataaggatctgaacacaggtgttcttacttatttctaatagctccagtttcctcatctttgaaaactgaagttatggtgatagatgcctcacaaataaagacatactataatsaagcactttaaaatgacctcttcagtg

SEQ ID NO: 838765 - DNA, 635 bp, Homo sapiens
caaatctcaacttgcccttagctcaaacaatctacgccagcaggattagaattagtgttacagrcttagatgaataaagacatctcctggaactgaggaggtgctcttctaccaggacaggtctgtccacggggaatagccaaaattaaatcaggtcttggtggcaagggaggaggacgaaaaaagctgttgggtaggcgaccagaagtgtcttcgataatgttacctaagactgctgtgaagattaaatgagatatgtgtaaaacaccatgcctggtttctggcagatcataaatttcaaataaatgttaatcgttatcttttctgttctgattttcatcccatcttgcacttgctattcctccaattggctcatagccttaacccatattctctctgcttagcatgctcttttcctattgcaatgctaccaatacccaaaagctcatctcaattgtcaaatctacaataatgttttccttgatttctcaatcctccagggtatttgtttcttatttatggctttaatcatgctttgtcttgtgtttgtgtactttctgagatttctctagagtttgagctccttgaggattacacaggtctcattgattcctcatttctttgaataacctcta

SEQ ID NO: 838766 - DNA, 553 bp, Homo sapiens
tctccagggtctggcagaactgggttcaaatgggagctttaccctttattgccgatgtgaccttctgcaagttaacagattcctctgctcttcagttccattttctgtatagtgaggatagtaatttctagtctatatggatcactgcaagattaaataaaataagccatgttaagcattcagtacagtgttggcacatagaaagtcctcagcaaatgcagaaactgaataatatgttcaaggacaaaactatggtaagttacaaaagaggactagagttagagtctgactcggagccaagtctgttttttactccatcatacagcctatctcaagactctctgtggggagtgaattcgttcctgttggaacaatctagaatctctcctttgtggtagctgtacatttgaaatgtactgattctgccaccttggggcatctttaggacagaaagaatgcaaaaggggmgaacacattctgagtgtcaggtactactgtgtgtcaggtagccttacaatattgtctcattttatcatgacactctcactcatca

SEQ ID NO: 838767 - DNA, 553 bp, Homo sapiens
tctccagggtctggcagaactgggttcaaatgggagctttaccctttattgccgatgtgaccttctgcaagttaacagattcctctgctcttcagttccattttctgtatagtgaggatagtaatttctagtctatatggatcactgcaagattaaataaaataagccatgttaagcattcagtacagtgttggcacatagaaagtcctcagcaaatgcagaaactgaataatatgttcaaggacaaaactatggtaagttacaaaagaggactagagttagagtctgactcggagccaagtctgttttttactccatcatacagcctatctcaagactctctgtggggagtgaattcgttcctgttggaacaatctagaatctctcctttgtggtagctgtacatttgaaatgtactgattctgccaccttggggcatctttaggacagaaagaatgcaaaaggggaraacacattctgagtgtcaggtactactgtgtgtcaggtagccttacaatattgtctcattttatcatgacactctcactcatca

SEQ ID NO: 838768 - DNA, 553 bp, Homo sapiens
tctccagggtctggcagaactgggttcaaatgggagctttaccctttattgccgatgtgaccttctgcaagttaacagattcctctgctcttcagttccattttctgtatagtgaggatagtaatttctagtctatatggatcactgcaagattaaataaaataagccatgttaagcattcagtacagtgttggcacatagaaagtcctcagcaaatgcagaaactgaataatatgttcaaggacaaaactatggtaagttacaaaagaggactagagttagagtctgactcggagccaagtctgttttttactccatcatacagcctatctcaagactctctgtggggagtgaattcgttcctgttggaacaatctagaatctctcctttgtggtagctgtacatttgaaatgtactgattctgccaccttggggcatctttaggacagaaagaatgcaaaaggggagaacacattctgagtgtcaggtactactgtgtgtcaggtagcctwacaatattgtctcattttatcatgacactctcactcatca

SEQ ID NO: 838769 - DNA, 514 bp, Homo sapiens
cacatgcccacctccagctactgcctggcccctgcctgacaacattgaaaacaggtagcccttcctgacctatggaagtggatttctgactgcactgtaagttttatagaggccagatcaaggagcctyaatttgctttatgttttggggctttctctaacatttaattgtagagaaattccactgctataaatgtatttgaacattcatgatctatcataaaatcaatctataagttgtcaactatcgtaaaaccttgatagtctccagggttatatcctgagaccttcacaattccccgaagtagcatttgcaaataaccactacacagttagttttcttagttttctcatctgggaagtggacataataatgtttgtatcatatggtgctgggggtgttacatgagaccggatgttgaataaagagaccaatgaagctgcgtcaagaggaaagttggctgatgagcacgtctttctctagttaactgactttcactcatatatcagccttg

SEQ ID NO: 838770 - DNA, 524 bp, Homo sapiens
gcatttaacaaggaattttgtgagcctttaaggaccaaatatttataaattctcaccacacctctggaaagtaggtaaggaagcatattattcctttgaaagcaagccctcctttatcaatcttgtcaagactgtcaaatcttccccatgcaatagcaattattgttatttttccttagtaataataaaataccagagtaaccagaatcaagtttatgcaaagaggaaacggatgcccccattggtggtccaagtttttgtagggccaacagaaagtcatcacagattccaacactccatctccaccaggtcattgatgctggatatcagacacgatgccttttcgttcattatttaaataaagatcgattaagtgcctagcttgtagatgctgcaaatatagcagtgaaaaacaaaaacgaaaccaaaacaaagtttytgatttcagagagctcatagtctagtgtgttgttggttaccatttcccccttctgactccaccccagatctccaaaacacttatg

SEQ ID NO: 838771 - DNA, 517 bp, Homo sapiens
gcaatttttcagaaagtactttaagagcggcttcctcagtggtctttccagctggaagcagagcgtccagaaagcaccgcattctcagcgctgtttcatygcctcaagagctacagatggcttccccaagcacctgaagtcgatgctgcttgcctggatggaataagctgcaactgcagaaactcttgtcttttcacagtggaactcagactccagtttctttctgccttgagagtgaaagaaaggagaagacacagagtaggaaagagccagaaggtggagaaattaatgtttaatgcttgatactcccggggcctggccagctgctcaaaaaaaggtacataaggggatatttataatattgcttcctgtggccacacgtaagcaagactttgaaaatggcccaagtctctttctccggaaagatgtgggtttactagttgagtttgaattgattgcatgattcttgcatgttactaagtatagcagtttttcttattttccttctttctttttt

SEQ ID NO: 838772 - DNA, 619 bp, Homo sapiens
gaaaccgctgctcacccgaagtgtatttaaggggtcccaacagcaacttatcaacattttttgttgtaaagcacasagagagcagtgaattctgtccattttgtgagcagcacatctggataaggcaggtgccccactgcattcagagcagctctgggaatgaggaaggaagagacaacaaaaggaacaggagccttccaataagcccagacattagacctgagccttgtccctgtcataggctagtcattattgattaaaaggtggacatcagataaacccaagagggacagccccgccaacgtccagagcaatgaggccctcactctgccctcacctctgccagtgtaaattctggggaatttctgaaacaccgtgaatacagaggtgtgactcagtgggaatcacaggaatgtcagaggacaaagcagttggtattaataaattgctttgagtctggaaacaaagaagtggccttctttgtttccaggctgaagtacagtgctgtgatcatagctcactgtaacctcgaactcctggcctaaaatgatcctcctgcctcagcctcccaaagcactgggaatacaggcatgagacaccatgcctggcctggccttca

SEQ ID NO: 838773 - DNA, 619 bp, Homo sapiens
gaaaccgctgctcacccgaagtgtatttaaggggtcccaacagcaacttatcaacattttttgttgtaaagcacacagagagcagtgaattctgtccattttgtgagcagcacatctggataaggcrggtgccccactgcattcagagcagctctgggaatgaggaaggaagagacaacaaaaggaacaggagccttccaataagcccagacattagacctgagccttgtccctgtcataggctagtcattattgattaaaaggtggacatcagataaacccaagagggacagccccgccaacgtccagagcaatgaggccctcactctgccctcacctctgccagtgtaaattctggggaatttctgaaacaccgtgaatacagaggtgtgactcagtgggaatcacaggaatgtcagaggacaaagcagttggtattaataaattgctttgagtctggaaacaaagaagtggccttctttgtttccaggctgaagtacagtgctgtgatcatagctcactgtaacctcgaactcctggcctaaaatgatcctcctgcctcagcctcccaaagcactgggaatacaggcatgagacaccatgcctggcctggccttca

SEQ ID NO: 838774 - DNA, 635 bp, Homo sapiens
tgctgtgtaacatgtcaccctaaaacgtggcagcttaaaacaaatgtgtgttatctcacactttctgtgagtcaggaatatggacacrgcttagctgaatgcttgtaactcaaggctgctcatgaggctgcagtcaagctgtcacctgaggctttggtcttatctgaaggttgactggcatgggggcatctgtttccaagctcactcatgtggttctgtccctccccacctaggcgtctccacaggctgccttgtgacatgtggctggttaccctggggtcgtgtgactctggagagagtaggacagaggacccaaaatggaagccacagtgctttttataacctatgaagatgtgacatctcattacttctgccctattctagtcatagaagcaagttacttagactggtccacaccgacagggaaaggatgacatgagggtgaggatacagggagagtgggggtcattggggcccatcttagaggctgcctaccacagaatccctaattatttctctgaaaataaaaggaggagaaagagacaccatattctacatttctgctcacctctgtggtggggctgatgtgcatggttttcatggcttaaaagcacactccatctcactgggggttt

SEQ ID NO: 838775 - DNA, 608 bp, Homo sapiens
ccccaagacctactagctaggtctacaatccaggttgtagatactatgagttaggagggaaggcccaggagtgccattccccaggttcaaattccagctccaagaytcaccctgtgtgtgccctggcataactcaaggtgccctcagcttccccatccttaaatggcaaggtttcgtacttgcctttagagctgcttgtggggattaaatgatacctagttgccaagggctttgcaccggccctagtatgcggtagtgccagttacagaggaggaaacagaggctcagggagattgagcacctcgactaaagagaggagtggaatttcagtccaggaggtcaggctgtctttccgagagccgacacccaccagcctttggtgggcttgagaacacgtggggcctgccatccacgctgctggcatgcatcaggtggtgtcaggtgggtcctcgcacagtgaatcctgagcagagggcagggggacgagggggcggctggagcccagttcgcttttgcgaagcacttcctgaactgcacattcggttaccacaaaatgagtcaaggtcccttttaagtggcttgctgagcttccctctgatctggcactg

SEQ ID NO: 838776 - DNA, 608 bp, Homo sapiens
ccccaagacctactagctaggtctacaatccaggttgtagatactatgagttaggagggaaggcccaggagtgccattccccaggttcaaattccagctccaagactcaccctgygtgtgccctggcataactcaaggtgccctcagcttccccatccttaaatggcaaggtttcgtacttgcctttagagctgcttgtggggattaaatgatacctagttgccaagggctttgcaccggccctagtatgcggtagtgccagttacagaggaggaaacagaggctcagggagattgagcacctcgactaaagagaggagtggaatttcagtccaggaggtcaggctgtctttccgagagccgacacccaccagcctttggtgggcttgagaacacgtggggcctgccatccacgctgctggcatgcatcaggtggtgtcaggtgggtcctcgcacagtgaatcctgagcagagggcagggggacgagggggcggctggagcccagttcgcttttgcgaagcacttcctgaactgcacattcggttaccacaaaatgagtcaaggtcccttttaagtggcttgctgagcttccctctgatctggcactg

SEQ ID NO: 838777 - DNA, 608 bp, Homo sapiens
ccccaagacctactagctaggtctacaatccaggttgtagatactatgagttaggagggaaggcccaggagtgccattccccaggttcaaattccagctccaagactcaccctgtrtgtgccctggcataactcaaggtgccctcagcttccccatccttaaatggcaaggtttcgtacttgcctttagagctgcttgtggggattaaatgatacctagttgccaagggctttgcaccggccctagtatgcggtagtgccagttacagaggaggaaacagaggctcagggagattgagcacctcgactaaagagaggagtggaatttcagtccaggaggtcaggctgtctttccgagagccgacacccaccagcctttggtgggcttgagaacacgtggggcctgccatccacgctgctggcatgcatcaggtggtgtcaggtgggtcctcgcacagtgaatcctgagcagagggcagggggacgagggggcggctggagcccagttcgcttttgcgaagcacttcctgaactgcacattcggttaccacaaaatgagtcaaggtcccttttaagtggcttgctgagcttccctctgatctggcactg

SEQ ID NO: 838778 - DNA, 624 bp, Homo sapiens
cagcatcacaggcaaaggaagcaactgtctccatgcctaccaacggatccacacacatctcrctgggcagcatctctgccccaggaagcagcgcgcttactacactgggcacccagatgtctggtcttgcgtggcaggcagccactttctcccggccttttcttgtcccaaaagtcagaggggcaggccagttccagaatgggattccaggcagaccaggagactaggagtgcatgtgaacaactgcaaggggatgcgtctgtctgcctggtgtccgtgtgttcatgtgcacacctgtgcacgcgctcccccagacttacacacactcgtgaacacatgctcacacaagttcatgcacgggagtagctccaagcctctcactcagcactttgctattaatagctcacttttctaaaaaagtctgcttagccgtttgtaagaataaccaccactgcctgtgtgacagcccaggcccccgcagggaggacaggaccggccctctgctaggactgcctgactgcctgcctcacgttagaatccagagggagggccaagaggggagatgaaaacccttcctgagtggccagggcagcctccagtgcctgtgcccagggacaaggcaac

SEQ ID NO: 838779 - DNA, 624 bp, Homo sapiens
cagcatcacaggcaaaggaagcaactgtctccatgcctaccaacggatccacacacatctcgctgggcagcatctctgccccaggaagcagcgcgcttactacactgggcacccagatgtctggtcttgcgtggcaggcagccactttctcccggccttttcttgtcccaaaagtcagaggggcaggccagttccagaatgggattccaggcagaccaggagactaggagtgcatgtgaacaactgcaaggggatgcgtctgtctgcctggtgtccgtgtgttcatgtgcacacctgtgcacgcgctcccccagacttacacacactcgtgaacacatgctcacacaagttcatgcacgggagtagctccaagcctctcactcagcactttgctattaatagctcacttttctaaaaaagtctgcttagccgtttgtaagaataaccaccactgcctgtgtgacagcccaggcccccgcagggaggacaggrccggccctctgctaggactgcctgactgcctgcctcacgttagaatccagagggagggccaagaggggagatgaaaacccttcctgagtggccagggcagcctccagtgcctgtgcccagggacaaggcaac

SEQ ID NO: 838780 - DNA, 549 bp, Homo sapiens
agctccttcccctgagaagctgttggatccacatkttctcacggtatcaaaaacggcaggaagagaaaactaacctggtggagatgaaacttagtgggaacactccgctttcctcccctgctccgtgtgtgagcacttggctcagaaatgcactgtggctgagacagccctatctggcttcacctaagcctacccccgtgttgagttctttaacttagttatcaaagcggcaagggtttcagatctagacaagctgcatcatgcttatttttgctgaggttttctgacaaatggctctacttgaaatttccagatttaaatgtctgttttattaaaactaaagtacttttgagtcatatttgcttttatgtagtagaagcaagtagaagagagtccatgggaaggaatagctggctttgcctcacaggtgtttagggaggactgctgtctccaatgcaagacctggattaccgtttagagatccacctacccctcatgatgctcttgttgctggaatcatggtctgtttcatgctttacgtgacttagc

SEQ ID NO: 838781 - DNA, 585 bp, Homo sapiens
tcaggtctagggtacttagtgtgttcagtgatgattgtctacatagatggattaatacatatgcacctttataatcatcccagctaccatctaaggttctagctttctctggagacatttttggtggtttacaatgttattttccagtgcgcatagcaggccccagaggcaaggtgatcacctctttgtttcagttaagaaaactgagttttagtgaggacaatcaatttttcccatatcacaaaactggtcatgtgatgctgcatcccatatttaagtccagagcagtgagcttctccctatccctctattatgctgccattttgtattttgtaggtgtgtaaaatcaaatgtcattcttccttaaaaaggactgtgaatggtaagcaacagttgggaagggtgacaccagacaatggctgaaaacagggcgactggaagttgactgatgggtgctgagcrcttggcatccgttcctgctgcagaccccactggagtctcctcagaaggggacactggtggcttccattggccctgcctcccgccagggctgtgtgaggatccacatgggctgggatgagggtg

SEQ ID NO: 838782 - DNA, 585 bp, Homo sapiens
tcaggtctagggtacttagtgtgttcagtgatgattgtctacatagatggattaatacatatgcacctttataatcatcccagctaccatctaaggttctagctttctctggagacatttttggtggtttacaatgttattttccagtgcgcatagcaggccccagaggcaaggtgatcacctctttgtttcagttaagaaaactgagttttagtgaggacaatcaatttttcccatatcacaaaactggtcatgtgatgctgcatcccatatttaagtccagagcagtgagcttctccctatccctctattatgctgccattttgtattttgtaggtgtgtaaaatcaaatgtcattcttccttaaaaaggactgtgaatggtaagcaacagttgggaagggtgacaccagacaatggctgaaaacagggcgactggaagttgactgatgggtgctgagcgcttggcatccsttcctgctgcagaccccactggagtctcctcagaaggggacactggtggcttccattggccctgcctcccgccagggctgtgtgaggatccacatgggctgggatgagggtg

SEQ ID NO: 838783 - DNA, 583 bp, Homo sapiens
gcaaagttaacttcatcagaaatgcttctccctcccaggtagttctttattacttcatcttgaaattggcaatgtagcgctgggtttttactctaacttttaaaatgtttctcsttctcccccatcccaccccaaatagaatcgcttgataaaaacaaaagcaaattaatatttggtgttcacgtttttaaccaatcagccaactgagaaccaggtgggctaatcctaatccctttttgaggattgtcctgaaggccagagccaggtgtggcctccagcctcaggcacccacagactttcaagaggcctcttcctgaggtcctctctccctactttaacaaattctcctcccacatgagatgacacatctgacagtcacccagctgcttgatgtatgcaggtcaagctgtgaactggctttgagttccaatcaccattagaaggtaaattcactgacttgaaagcttactgatgtcatggagtcataatcaaagatctctttgaagtggaagttggtcagtcattgcaggaggaggtaagaaggggtgagataaaaactcaggcagctgaaaccattaccccc

SEQ ID NO: 838784 - DNA, 644 bp, Homo sapiens
actcagggcagggtggaatctttgtattcatctcatctgatcttcttagtgttctgctggagaaagtagcakccagagacgcccagctgaggctatttccctccacaacacagtggtctttatcttccaggatgggggcaaattacgtaaactttaggaagttcatcagcaagggcaaagcttggtttctgatgagaacctgactgtccagacagtagagagttcacaatcacccttttctgctgggtgatgtcccagaggaaagcctgggtcctcaccctagtgaggccattcaccagactcagatcagtttccttatccaccaaacatggtcagagcactgggctgctcagcatctcggtgtgcctgagaagtaataagaggatgaacccagtcagcacatagttgttgatgaggctcggatctcaaacgccggggacagaccgggaaataagacagaccacagtctgccttttgggagtggagtgagagacagacagatgataattgaacattcaggataagtgctgataatgataagtctatgaataaaataaaataaaatcacaagatagagagaaatggtggggaggaaggagggttctctcacgacatggtgctcagggaattctcctcgagaaggg

SEQ ID NO: 838785 - DNA, 284 bp, Homo sapiens
ggttttgtgatcaccatcatggcctattggtaaacgaattccaacaagtacaaaagagtaaacatggycatttaaaatcattcttagatgtttgctaagcttaaaagtgaagattgccagaaagttctggaaggcttctactaatggcctgtctggccatgtcctcaggagggggtcaaattgtcctgcttgaggttagggaagagagtgggattacacagcaggaatgcttcgacatttcaccgttttatagactgttcaggtgccagtcccagagtgtcaga

SEQ ID NO: 838786 - DNA, 284 bp, Homo sapiens
ggttttgtgatcaccatcatggcctattggtaaacgaattccaacaagtacaaaagagtaaacatggtcatttaaaatyattcttagatgtttgctaagcttaaaagtgaagattgccagaaagttctggaaggcttctactaatggcctgtctggccatgtcctcaggagggggtcaaattgtcctgcttgaggttagggaagagagtgggattacacagcaggaatgcttcgacatttcaccgttttatagactgttcaggtgccagtcccagagtgtcaga

SEQ ID NO: 838787 - DNA, 284 bp, Homo sapiens
ggttttgtgatcaccatcatggcctattggtaaacgaattccaacaagtacaaaagagtaaacatggtcatttaaaatcattcttagatgtttgctaagcttaaaagtgaagattgccagaaagttctggaaggcttctactaatggcctgtctggccatgtcctcaggagggggtcaaattgtcctgcttgaggttrgggaagagagtgggattacacagcaggaatgcttcgacatttcaccgttttatagactgttcaggtgccagtcccagagtgtcaga

SEQ ID NO: 838788 - DNA, 599 bp, Homo sapiens
gggggagagttccctcttgccctcagaaggtcagcctttttttctacccaagactctactgattggatgaggcccaccacagtagcaatctgcttgacccagtctattgatctaaatggtaawctcatccagaaaacccctattaattaattaattaattaattaattattgagatggagtcttgctctgtcacccaggctggagtgcagtggcacaatctcggctcactgcaatctctgcctcccgagttcaagcaattctcctgcctcagcctccctagtagctgggattacaggcacccgccaccatatccagctaatttttgtatttttagtagagacagggtttcatcatgttggccaggctggtctcaaactcttgaccttgtggtctgcccatctcggcctcccaaagtcctgggatgacaggcgtgagccaccgtacccagcctcctatttagaataatgtttaaccaaatatctggggactttgtggcccagttaagttgacacataaaattaatcacagatctcaagccaatcagattctctctccagaggaattttctactgggacagagagaccagctggtctctgc

SEQ ID NO: 838789 - DNA, 643 bp, Homo sapiens
ccaatttttatttggcaattatataaaggcagaactttaaatatcatccccaacattctgtgcctacgcctcagagcctatgcttaaaaagagcaatcatattcatgactacgtatttaatgcaacattagaaaactaatgcagtcataacccacaagcgttttccatgccaatgacctttttgccatctggtttagtgactgcagagtatcccattacatggttgtctcacaccttggcaagcatcccttaaggatggacactaaatcatcatggggtttaatactctcatccacagaagggactcccaagccagtcctcacatatcttgctctcattactagggcagagtgttctaagaattttcctcttatgggccaccaccagagcagaccagactcactgtttccatgcctgctggctcttgctgccaccatgccctgatttcaaataaccactccatccatgagctaactgaccttagaaagatatacttttaaaatgcatatcctcccaattttcaattaaggccaaaaggagtagtagagaccaaatatatcctctttcatraaacaaacaaaaaatggcaaaaatatgtgaatctacgaaaagatactagaactcttaagtgaatttagaaagg

SEQ ID NO: 838790 - DNA, 628 bp, Homo sapiens
atgaactaaatcaagctaaagcagattatcttygttcaaatggctacgaagaggcatattcagtttttaaaaaggaagctgaattagatatgaatgaagaaataaagtaggctggtgttttgggggaaaaaatggacatctgttattagattacaaaagaagtttatggaattagaatcaacactaaatgaagcaaaagaagaatttacgtcaggtggacctcttggtcagaaacaagacccaaaagaatgggtattttctgccagaaaaatacacattgagtggtcacaggagtccaatcattcgagtcattttccatcctgtgttcagtgttatggtctctgcttcagaggatgctacaattaaggtgtgggattatgagactggagattttgaaagaactcttaaaggaaggacacacagactctgtacaggacatttcatttgaccacagtggcaagtttctggcttcctgttctgcagctatgaccattaaaccatgggattttcaggactttgaatgcatcagaaccatgcatagtcatggttccccatgaccataatgtttcctcagtagtcatcatggccagtggagatcatatagtgtccgcctcaagggataaaacta

SEQ ID NO: 838791 - DNA, 402 bp, Homo sapiens
aaataaagtaggctggtgttttgggggaaaaaatggacatctgttattagattacaaaagaagtttatggaattagaatcaacactaaatgaagcaaaagaagaatttacgtcaggtggacctcttggtcagaaacaagacccaaaagaatgggtattttctgccagaaaaatacacattgagtggtcacaggagtccaatcattcgagtcattttccatcctgtgttcagtgttatggtctctgcttcagaggatgctacaattaaggtgtgggattatgagactggagattttgaaagaactcttaaaggaaggacacasagactctgtacaggacatttcatttgaccacagtggcaagtttctggcttcctgttctgcagctatgaccattaaaccat

SEQ ID NO: 838792 - DNA, 680 bp, Homo sapiens
ctgatggcctctgccataagacagggttgtgcttcctgccttcccaggacaaattccctgagcccctcattaccttccagtttgctccgttgagcgrgctggagcctctttctcatgatgatagaatcctaactgatactgcaaggggatactgtctagccttcagtaagccactgtaagccccccagggtccctgacagtggcctgggtatagtgtcatggggacaacaaagagaagcacaggccttcaagcaggtgaaatcgtgtgtttttttttttcttttcgttttctctttctttttttaaaaaagagatggggtcttgctttgttgccccggctggagtgtagtggtaggatcatagctcactgcagcctccatctcctgggctcaagagatcctcctgcctagcctctggaatatctgggactacaggtgtgtgtcaccacactgatcttttgtttgtttgtttgtttgtttcattttttgtagagatggagtctgccatgttgcccaggctagtctcaaactcctggtctgaagccatcctaccgcctggcctccgaaagtgctgggattacaggtgtgagtgccgttcctggctggtgtgtttcttctggagaggagtcatttgctaatatctgtatctgctgcctctctcttttggcagagcctctgtct

SEQ ID NO: 838793 - DNA, 575 bp, Homo sapiens
agcataacttttatagtcactaggaaaccaaaaaatttatgtgactcactttattgcaatattcactttattgcagtggtgtggaaccaaactggcaatatctcagaggtatgcctatagttaacaagaatatattgcatatgttcacaaagctggaagagaagattttgaatattctcagcatgaaaaaatgatatatctttaggtgacgtatttcctaattatcctgatttgatcattatatgcatgtactgaaatatcactctgtgcaccataaatatgcgcaattattttgtgtcaactaaaaataaaaggaaaaataaaaggcagagccctctgggaggagaagactaattaggcttagtgattgctaattctgggagctgcatgcaagcaggttttaaagaaggcagaaaacttaaggatgtggatgtaaaaggaagttacaatgacaacacaatttacagaaatcactcagtcacctggaggactccaatttcaaatgtgccatgcttggatatttgcttacattttgyacaatgacttttctgccatctcctgtgaacctctgagca

SEQ ID NO: 838794 - DNA, 527 bp, Homo sapiens
gctagcaatagcagacagattataataggagagagactatataataatcaaggcaccaaccgactcagaagctgtcacaggcccaartgtatatgtatgtgtctaacatacacgcacctcaaaatatagtaagcaaattgacagaactacaagtctaagattacaacccatttaactttatcaaaagttgataaatcaagcaatttaaaaagtactaggttataaaagatttgaaaaacaaaagtaacaagcattatctaatgggtgtgtgtgtgtaaaactttgcggccaaacataaatggtcatcatagatcatttaaaaacagttggtgatatacagattatttaaaaatttgaccacatactaggtcacaaagaactcaacaaatatctagaatcatcaaataacacagatcatattctctaaacacaacccaattaaattagaagtcaatactaaaatacagtctcaaactcatatatgtgggaactaaaaaattcactccctagtaactaataggctgaag

SEQ ID NO: 838795 - DNA, 525 bp, Homo sapiens
attattattccattttacattttatagatgagtaaattaagacccaagaaaagttaagcaatttcccccaaagtctttagttagtaagtggaagaagcagaatatgaaccatttctatctgacccccaaaactactttttgttgcagtaggaaaaaaaacacacacacacacacacacacacacacacacacacacacacacacagtcaaacttaaaaaaaaaaaaaaaaaaaaaaggagtcttggatagccaaaaagtaaactgcagtctaggttgggcatggtggctcacacctataatcccagcatgttgggaagctgatacaggagaattgcttgagcccaggaggtcaaggttgcagtgaactatgatcacaccactgcactctagcctgtgtgatggagaaagattctgtctctaaaaaacataaaaactataatctactatttattgggcacctaccatgcccrttattattacaaattattgtaaacacttcatagatctcatttagtcacaaccac

SEQ ID NO: 838796 - DNA, 444 bp, Homo sapiens
gtattatgaagctgtttgtaaaatgctgtgaaggcaacttgttccaagagccattaattctggtaagggccatgtcagcttcagttatgtgctcataaatgcaaacccaaccyggtcaataatctccagggatggtctaaattgcacagctggctttttagaaaatgtgtgtggaggaacatgaaaagattgttgaaaacacccgagtaaggttagataataaatggaactatactgagtagggggagggcagaacaaagaagttattattgagcatgaggtatgtactgtattctacaaaggggtgatttaggctgggttaacaaggtatttgggaggaggtattaaaataggaaggcagcataaagcataataggtttgaccaaataagttcccagcaatgcctgcttcaggtcctctttctttcttttgctggctgtccta

SEQ ID NO: 838797 - DNA, 637 bp, Homo sapiens
gttgtggatgctgctagtgctccacacctcatctcctcagcctgggtgatcagtttttcccctcatgaagggttcccacctcaagtgcttgctgagtctcccagctctcctttagggttttctcctaagctgtggaagtctgttcagccaggaaatgcaagagagcaaatggttcctctactgatgagtgacaagagccttctgcctttccaacatccagcactgaggtgcattctataccaggacatctcaaacttgaatgtgcacaggatctcctcgtgcaaattatcgttcaggaagtctgggatggggactagattctgcttttctaacatgctgccagctaatgctgaggctggcccatggcccacattttcagtaggaaggttctatggaattttctttgaaggtccctcaggggtttgaatcagaattgcccacagtgagacccagctcaatagcacactctttattgatcttccctccttccttgtccactacctttctctggcttcataggatcacctttcaaataaatcacctgctgccacctaagtccttgttcagacttggcttttrggagcacccacagtaagacactcccctttacagaggaagttcattgattcaggtcaca

SEQ ID NO: 838798 - DNA, 513 bp, Homo sapiens
ttcagtcttcctagggatcaggggaggtccctaatacacttccagtgaatttcttttctgcttaagctaatgtgaagtttaattttatgggtcaacttggctgaaccacagcgcctagatatttggtcaaacatgactctggatgtttctgtgagggttttggatgaggtttacatttaaattggtgaactttgagtaaagcagattgctttccataatgtggtgggcctcctccagtcagttgaaggcatgaagagaagagaagtctggcttctcgcaggcaagaggaagttttatagcagaaacctttggacttgaattgatgtgttgcagggagccaaaggctcgtgggacgtgaccaactcggcattctactggaggctatatgatcaaacagcaaactgtttatcatgaatgcagaatgtgagcaaactcaagrctgctcctgccaacagaaggtttgctggaggcaatcactccctggcaccgaggctatctactgtgatatctaga

SEQ ID NO: 838799 - DNA, 598 bp, Homo sapiens
tttcttttgttccagaaatgtgaggatccaaggttttaaacctargccagtctggccagcttgactcatccaggacatctttcagtagtttcacagtggccatcagctctgtcagacaccggacatggcttgaaagggccatgtcagcaagtgatcattattgtgtctgaaaagagctgtgcttgatggctgaaatattacaactaccaaaaagctacaagtggaaactccatagaatcagctcatttgtagtcacagaatactctattcctacccactttcacacacgctactccctatatctccatatcaagaaaaaagtcctgtcttctttaagtcaattaccatgctttaatccagaatttggaattattcagggaaaccaaatcaagtatctattaccttctagagccatcatcatatccatgaacaaatcagctgtaaagcggtttatctttggggattaaatactttccagtccaaaatgcagtttttaaaatgcaatttttgccttctcttctgtattgagatgactaggcctatgtcaatttaactgtgtctctataaagtcatgcaaatgtaggcactttaaaatgac

SEQ ID NO: 838800 - DNA, 616 bp, Homo sapiens
tctagtggggacacggagaacttttgtgtctagttcagggattgtaaaggcaccaatcagcactctgtcaaaatggaccaatcagctctctgtaaaacagaccaatcggctctctgtaaaatggaccaatcagygggatgtgggtggggcaagataagtgaataaaagcaggctgcccaagccagcagtggcaacccactcgggtccccttccatgttgtggaagctttgtttttttcgctctttgcaataaatcttgctgttgcttcctctttgggtctgcactacctttatgagctgtaacactcaccacgaaggtctgcagcctcactcctgaggccagcaagaccacgaacccaccacgaagaatgaacaactccggatgcacagccttaagagctgtaacactcaccatgaaggtctgcagcttcactcctgagccagtgagaccacaaacccaccagaaggaagaaactctgaacacatccgaacatcagaaggcacaaactctggacacggcgcctttaagagctgtaacactcgccgcgaggttccatggattcattcttgaagtcagtgagaccgagaacccacacattagagccagcaattagtgg

SEQ ID NO: 838801 - DNA, 420 bp, Homo sapiens
agaacaaatctggagacattacattaccagactacaaactatactatyaattcattttgaatggttatctaacctttattcttgatatataccccactttgtctagttgtcctttgtgtgatgtgtgtgtgtataaattatttgctaataattcttataattattataaataataatgttatttgtagacttaggagagatattggtttgtaactttgttttcttgtaatagccttcattggtttgggtgttaatgttatgctgtccttacagagtgagttgataagtgttctcttctcctttattttctgaaataatttgcgtactcttcctttaatgtttgagaaaatttactagtgaaaaaatttgatcctagggtttcctttgtggtaagtttttaaagtaaaaattcactttctt

SEQ ID NO: 838802 - DNA, 512 bp, Homo sapiens
atagaattttaagttaatatgctctacaacaatccaggtgttgtattttttttaaaaagtaaagcataaaaagacagaggattttyttttttttatttttgcatataaaatctctgtcgggtgcaaacacatataaaaaaattcattcaaatgatacttagcacagaatatgtgctcatcactgttctggacacaaggctcgtctttcaataggtataggcttgtagtcatgaacacttaaatttatatgtggttccttgttggatatccttctgcttgcttagcaatgtaatagcagcatcatattttctacttttacactccaaactggtagaataattaccaaaaaataaaaagatgactatttcaattgctgcatgtcattgcagggaatactccttctaccgagtttgatttatagacgaagtgcctcagaccataattatccattgttgaagtactaatacgaggtcaaactttgtcaggaacttcaatgtggaaccaaaatatgc

SEQ ID NO: 838803 - DNA, 622 bp, Homo sapiens
ggtatgtagattttctgactgtagcaaacagttttttyattattaaaagcaccaaagtttattatcaaaattatcaactgtactttccataaagatggaatattatgagctcaattaatgtgctccattacctcactattacaaaataaatccaaagttcttagtatgacaattagatctctccatcattcatctgaggcttctgtttcatctttattatagatattttttcaaatttattatttgcaaattgcattttatattcttattcaaacctcacgacttcccacaactcatttattaagtagtgaggctagtaattcaaacttggtctctgtgatttaaaactcttgttctttttccacactggaatgctctccttcttgccttctacctgaagcatcttttgtattagttattgttctatttatctttcgtgtcctggctcacatgataccttttcaatgaagccttccttgatgcttccagttgtattttagttctcttccctatacttccaaagctctttagacctttattatagcctagtatctaagtttgttctactagagttaatattatggcagagataataatttatccccctaaatatccaagttct

SEQ ID NO: 838804 - DNA, 522 bp, Homo sapiens
atttcttacaggtttagaaaaattcaccagggaagctatcttggcctagagttttatttaagacaggttttaaattatggatttaatttctttaataatcacaggactatttatatttaaaaattctactttattcatattgctagatattctttattataatttgttcatattacttaaattttcaatattttatcagcataaagtcgttcataacatgctcatacatttttagtgtctaaagaatctgtagtaatatttccttggttttatgtgttgtctcttttggatatttttgattattttattcaacagatttaccaacttattagtctttttaagtaatcaagctgtgactttgtcaattccctctaatatgtatttttaaaatttttaaatttttactcttatctttcttcttttttccttgagtttatttttgcttttattctctcaatcktgagatagatgcttagttcattaattttcaacccttcttttctaatctatgcatttaacgct

SEQ ID NO: 838805 - DNA, 569 bp, Homo sapiens
ttggccttatctggcatgttaaacttgagatccactgacttcccagaaacccataaacaggatacgtacagtttgtgaacttgaatgagcaaactacgacatttttatttttactaatctctgactgaaatttaacatttccttcaatattaaatgttgtcaacaaatcagaattaggtactaatacaaatattttcaaatcacataacaactgttggaaatatcttaaaatatcatttactatgctcactacattaaaacagatagctattaggctgcctgctaagtcagtttatattatacattaataaagaagtacatatattactaaatcacagcttaaaaatatttagataacggaatttaaataaaatcagtctcctttgtatccataggcatttcattttatgcattgagaacattattctgaaaagagtccacaggcttcaccagattgctaaagggtatcaaggcacacagaaaggttacgaacacacattgtracaggaaagaaggcacagaatatgggcacagaggcagggactttagcagatttggtgctggaaatt

SEQ ID NO: 838806 - DNA, 537 bp, Homo sapiens
aaacataaactacaaagcaataatattgatgaagcttttttcatcaaaatttagaatttttgctaaaaagcaaatgccatgcccaaggtttatggagagatgagaaaaggaaagaatatttttgcagttgctagaactgaagaaaaacaaattattagcatctattgaaaggaatagctccaaatcaatagtaggaggacaactgtcctgatggaaaaataagaaaagagtatgaacaggcaatttatgaaagaagatatactgaaagccaagaagtatgtgagattgtaagtttttcagtaaatatttcagtaaatatttgttttttgagttaagctgcctttgtaaaaaaaaaaaaggcaaaaaaataaagatgaaaacatagcatcttgtcagttcaggtcaggttctcaaactctctgcgaataatttgagtgtcctgaacatggtgttaggttgaggtagagagagagagagaggtctttaagacattctaaayaaggggattttgaataaagtcgttatagaggtcagaga

SEQ ID NO: 838807 - DNA, 536 bp, Homo sapiens
acacatatccacaaaaaaacttgcacatggatgtttacatcagctttattcataattgmcaaaacttggaagcaattaagatgtccttcagtaggtgaatggaaaaactatggtacatccagacaataaaatattattcagcactaaaaagaaatgagctatcaagccatgaaaagacatggagaaaccttaaatgcacataactaaatgaaaaaaagtcaaactagaaaggctacatgctgtcagtttccaagtatatgaaattctggaaaagttaaaactatagaacagtgaaaagatccatggtttccagaagtaaggggtgagggaggaatgaataggcagtgcacagggaagatttagggcagtgaaaatactgggtatggtactgtaatggtggacacatgtcattacacatttgtccatacccatagaatgtacaacaacaagagtgaaccctaatgtaaactacagactttgggtaacaatgatgtgtcattgtaggttcatcaattgtaacagatgtaccactctgg

SEQ ID NO: 838808 - DNA, 536 bp, Homo sapiens
acacatatccacaaaaaaacttgcacatggatgtttacatcagctttattcataattgccamaacttggaagcaattaagatgtccttcagtaggtgaatggaaaaactatggtacatccagacaataaaatattattcagcactaaaaagaaatgagctatcaagccatgaaaagacatggagaaaccttaaatgcacataactaaatgaaaaaaagtcaaactagaaaggctacatgctgtcagtttccaagtatatgaaattctggaaaagttaaaactatagaacagtgaaaagatccatggtttccagaagtaaggggtgagggaggaatgaataggcagtgcacagggaagatttagggcagtgaaaatactgggtatggtactgtaatggtggacacatgtcattacacatttgtccatacccatagaatgtacaacaacaagagtgaaccctaatgtaaactacagactttgggtaacaatgatgtgtcattgtaggttcatcaattgtaacagatgtaccactctgg

SEQ ID NO: 838809 - DNA, 612 bp, Homo sapiens
ctgctattgctttgtaaaatcaccctttgctccaaaggaaccatgcatttgttatggggaccctaaagagtctacagttggcaagtggcagcagatcccagctgctgacacttccaaactataattgtcatcatagcattacttcagcttctcacatctaaatgcatttctaattccctctctttgtctctcatcccacctccctttctcccaaaggattgccttcctctaatagcagtcttggaattatcatctgctattctctcgtgacatgcacagaatacacaaaatttataatttatgaatggaaacatctccaaagactgaatggaacaccaagggtaatccaggtttcacatctgtaaagcgggttaaaaaatctcatccccttctgttcctctggttggtgtgagtgcagcagccagccctgccactctaccaagtgacaactgactttactgatcatttgagtttactgccaaggsaggaaaatccagtcaaagctttcaaaaggtctgagcatccacgaaggatttttggaggagcaagggtatttattatatgacctcacctgtctttaaagtgattgacagtccataaaattgagttgtc

SEQ ID NO: 838810 - DNA, 497 bp, Homo sapiens
gaaagtaaaaattacctttaagcctactttctctattactggatgataccacatccattactaatgtgtgacttgttatttctatataataatatcgtaactattttctctgtcattaaatgctatcttccaacgaaatatttaataatcatatgctttaaacttctttatcttgatgtaaataaaatttctaagctttcctttgacttgaacttctgcagcctgaataaactcattttgttttcgttttccttttcccccaagacaggcttctcactctgccgctcaggctgcagtgcagtggtgtgatcatagctcattgcaacctcgacttcctgggctcaagtgattctccgacctccacctcctgagtagctgggatcacaggcatgtgccaccatgcccagctaatatttttattttttgtagagatgaggtctccctgtattgcccgggctggtctctaactcctgmccttaagcaattctcctgcctta

SEQ ID NO: 838811 - DNA, 580 bp, Homo sapiens
ttttactacttttgaaaccaacatcatttttttcttggtacttacttctgagatcttaatattgctttctcaggatgctttagaacaagtaatgtacaatatcttctgactttctatatcatagtttcttcacacagttcttcacatagttcttcacacagaattctttttcttgtactagggtttctcttctgaacacattagattattagccacgaatagtttttttgttgttgttgttttgtttgtttgtttgtttttgagacggagtctcactttgttgcccaggctggagtgcaatggcacgatctcggctcactgcaacctccacttcctgggttcaagcaattctcctgcctcagcctcccgagtagctgggactacagtcgcatgccaccacacctggctaatttttgtatttttagtagagacaaggtttcaccatattggtcaggtggtctcraactcctgacctcaggtgatccccctgcctcggcctcccaaagtgttgggattgcaggtgtgagccactgcacccagccaggtggtaagttcttttttttttctccacaaacggttt

SEQ ID NO: 838812 - DNA, 608 bp, Homo sapiens
agccactgcgcctggccatatttatgatatgttaagtaaaagaaagagatgaaccaacatgttagcagtgattatcactaaatatatgaatctaagttgatttttttttttttttgagacggagtcttgctctgttgcccaggctggagtgcagtggcgtgatctctgttcactgcaagctctgcctcccgggttcacaccattctcctgcctcagcttcccaagtagctgggactacaggcgcccaccaccacgcctgactaattttttgtatttttagtagagatagggtttcaccgtgttagccaggatggcctcgatctcctgacctcgtgatccgcccacctcggcctcccaaagtgctgggattacaggcgtgagccaccgcgcctggctctaagttgattttttaaattttttttcattttttgtttttctgtattttatgtggtaaatgcatttaccactttaataaaaatacttataagatataatgtaatacttttaagaaaaatatttatgaaatataatgctttttaaastcctataaacttctaaatgctattaaagcaaacagatgttggcattcaccttgcaatccctgttag

SEQ ID NO: 838813 - DNA, 617 bp, Homo sapiens
gtccctcaaaaattaagaggagtatacaaagtatgctcttaatgtatacaaagtatcctcttaatgtatctagagcataaaaagaacacctacaattcaatcataaaaatacaggccaggtacagtggctcgcacctataatctcagttgtttgggaggctgaggcacgaggatcacttgagcccaggagttcaagactggcctaggcaacatagtgagaccctatctctacaaaaaataaaaaaagtatccgactatggtggcacacacctgtagtcccagctacttgggaggttgaagtgggaggactgcttgagcccaggaggttaaggctgcagtgatctgtgattgtgccactgtactccacagcctgggtgacagagtgagaccctgcctcaaaataaataaataattaagaacaaatttttttctaaaaaaaaagacaaatcattccattttaaagtaggcaaactaggccaggtgccatggctcacgcgtgtamtctcagcactttgggaggctgaggtggggggatcacttgagcccaggagtttgagaccagccttggcaacatagtgagaacttgtctctacaaaaactaaaattaaaaaaaaaat

SEQ ID NO: 838814 - DNA, 623 bp, Homo sapiens
agaagggtaagggagcagactctctactttcacttctgaggcttctcatcctcagtttttattctctcaaagaactatcaaaaaaacaaggtatctgtctgctgattaatgagccacaagggctagctgccrgtcttaaaagactcaaatgtgaggcttgctggggaggacttagtccatccccagtgccctcatggtgctgggaatgttggctctgtccaaactagttttctgtcacacacaactttgctattgcatgggtctggaagaggtcctggagcaactgaggatttctggccagggctactcctggactgaccccagcctccaattgcccaaccaggtgtcggccataggatcaccaagctttcctatgcgaaccttagtttcctcctttcctttccacagtcaccatgtctcttgtgccgtctctgtatgcactgctgtaggagtttttacatcccggggaaataattcaattaggcaagcttagcaaccaccttagcaatcaggaatgcaggtcaaagtttgctgttttcgtgactttctacagacagggggacttcatgatccagatctcaaagactacttaactcctaatgatagcacttcctggggttggg

SEQ ID NO: 838815 - DNA, 623 bp, Homo sapiens
agaagggtaagggagcagactctctactttcacttctgaggcttctcatcctcagtttttattctctcaaagaactatcaaaaaaacaaggtatctgtctgctgattaatgagccacaagggctagctgccggtcttaaaagactcaaatgtgaggcttgctggggaggacttagtccatccccagtgccctcatggtgctgggaatgttggctctgtccaaactagttttctgtcacacacaactttgctattgcatgggtctggaagaggtcctggagcaactgaggatttctggccagggctactcctggactgaccccagcctccaattgcccaaccaggtgtcggccataggatcaccaagctttcctatgcgaaccttagtttcctcctttcctttccacagtcaccatgtctcttgtgccgtctctgtatgcactgctgtaggagtttttacatcccggggaaataattcaattaggcaagcttagcaaccaccttagcaaycaggaatgcaggtcaaagtttgctgttttcgtgactttctacagacagggggacttcatgatccagatctcaaagactacttaactcctaatgatagcacttcctggggttggg

SEQ ID NO: 838816 - DNA, 610 bp, Homo sapiens
cattcttagccaataccatcttgtactgtagcttcatgcagaatacttggggccagaacacaaataaataaataaataaattctaaagaactgaaatttaaagaatgctgaaaaaggcacagtgaaaaattcctaggtttggaatgaattatcgaaacataaatcctaactcttctatttacctgcaatataacttagggtcagttacttatagtcatccataaagcagaaatatcaataaaatccacagatttttttaggagggattaaatctaaataagataaaattagaacatcatgcaaaaacatttatacagttattcatcaaatttgtaaggtatatttgggaatacacaagtatattctatttgataaaatagtaactcactctggaaaatactattactctatttttacttctttggctcactgctacaaccacatcaagaacagtatctagcatgcactgcagtaggtggtcagtaatgtttgytgaatgaatgaatgatggaatgggcagcgattctttagaggggttgaagctggggattcagaagtctcagtgactgccaagaggaaaaaatatgtcataagtgttaggagccataag

SEQ ID NO: 838817 - DNA, 618 bp, Homo sapiens
acaaaatctccaggttgaagatcatgaagaagctatttaggaagatgttgtaagaagggggctgttgaatattgaacatcaccagtattttgctcgtctgggtgcagcagggcagaggctagtatcagaratgaaatccctaaatgcattacaagttgtcttagtccattcaggctgctataacaaaataccagactgggtggcttataaacaacagacatctatttctcacagttcaggaggctgggaagtccaagatcaaggcagtgatcggattcagtgtctggtgaggtcctaggtcatcatcgaaggccatcttctcaccatcacctcaaatggtggaagaagttatgggtctcccctggacctctgtttataagggcactaaccccatctgtgagggcttcaccatcataacttactcacctcccaaagaccccactcttaataaatcacattggtggttaggatttcaacatacaagttttggtgagacattcagtctatagcaccagttcagagggtaattgatgtcaccctgaaggagggaaccatacggcctgaaggggagtgggattacctttggccaaaggagctccagggtttctgaaatttttc

SEQ ID NO: 838818 - DNA, 535 bp, Homo sapiens
aggccaccctccccgcatgcccaccccagtgcctgggacctaggggaggagaagcaggggggtgatgtcttgcctgcagcgtagagatgacgccagtggccacctggagcacggcactcatagtgtctgacacttcaaacacagcttccttgtcctcctgggaggcacatggcaggaggtgagggcctagcagccccctggcacccagggtccccacagccccacccccccactgaggcatccccactgccttccatgggaagaacactcaataccccaacaaaggaagggcagagagttcaagggcagccacggatggagctgtgtgcacaggatgggaggatgtatggcaatcccggggtggggccctgcctgagtgtgccagagccctgagaactggcacrtactagccaggcctcccccggcctcgcacctgtaagtctttgttgtaggtgctgggaagtcccttgagggtcatcaggagcccggcacactgcgggaagagggaggcacaggggctggacccgggatcctg

SEQ ID NO: 838819 - DNA, 597 bp, Homo sapiens
tttaaaaaattaaatatgtcccagtgaataggtgcagaatcatactttatttaatagttttcaactattttaaaaacagaaaggtggtatcctcagttgatattaatgtgtaaaaaggcttctcgtagtttttatttaataggcagaatttcctttttgactgtggttagcagaaaataataatagttacagttacaaaatgctttaaattcaaacgttctcccaccccaatcaaagaccttgttagataaaataggatatttctggtttttaaatttggagaaattgaagctcagttttgcaaactcaaggaacctctcatcaatcatcaaaatagtgctggaatccaggcttctcttccttctagtagggccagggctcttactgctttcctaatgctgtgtaccatttaaaccctctgaaataacatgttcaaatatttgttcctacattgctaggaatttagaggaaaatagagaagacttaaagaaattattacagtaagaaagwagaatctttgaaggcaagataaatcagttgacatagtctagcctggagaggataaggttagaaggtgacttgatacatgtctttaag

SEQ ID NO: 838820 - DNA, 587 bp, Homo sapiens
gtgtgtgatgttcccctccctgtgtccatgtgttcttgttattcaactcccacttatgaatgagaacatgcggtgtttggttttctgtccttatgatagtttgctgagagtgatggtttccagcttcattcatgtccctgcaaagacataaactcatcttttttatggctgcatagtattccatggtgtatatgtgccacactttctttatccagtctattattgatgaatatctgggttggttccaagtctttgctattgcaaacagtgcgacaataaacatacgtgtgcatgtgtttttatagtagcatgatttataatcctttgggtatatacccagtaatgggattgctgggccaaatggtatttctagttctagatacttgaggaatcaccacacagtcttccacaatggttgaactaatttacactcctgcaaacagtgcaaaagcattcctgtttctccatatcctctccagcatctgttgtttcctgactttttaatgatcaccattctaacttgcatgagatggtatctcattgtggttttgattkgcatttctctgataaccagtgataatgagcat

SEQ ID NO: 838821 - DNA, 526 bp, Homo sapiens
aaaatgtcatttataaaatgagtgtattaagaaattttacttttattcattgaagcatagcgtatcactattgtaagggtggtatatacatctttaaaaacgtactttctattgcattctgggaaaccagtaccatattatggccaggtatcataagtagcagtttcaggttttctgatgttaatcacaactctggtgaaatatttaaactgcaatatacagaacagcagcttcaggcaaagcatggaggctccagcctgtaatcccagcactttgagaggctgaggtgggacaatcgcttgattatccaggaagtccaggctgcagtgagccatgtttgcctcactgcactccagtccaggtgacagagtgtgaccatgtttcaaaaaacaaacaacaaaccaaaaataggagcttcaaacaaacgaattatgatattttggcctatgttaacctatgcttaatatttgaagtttaatgttaaataaacttttgcttaayaagaataaatccaaaactagaattt

SEQ ID NO: 838822 - DNA, 589 bp, Homo sapiens
ttctggctactagaaacatagacttcatgagaactctgcagcattagccaataaaccctaaacaaagattgtccaatctgtggaccacaggctgcatgtggcccaggatggctttatatgtgacccaatgcaaattcgtaaactttcttaaaaaattatgaatttttttgtgatttttaaaagctaatcagctattgttagtgtattttatgtgtggctcaagacaattcttcttcttccaatgtggcccagggaggccaaaagattggacacacctgccctaaaccatgataatatttaggagaccaagaagacataaccttgaactctcaggccaaattatatgcccctaatgaatttcccattttgaaaacttagagtagtgtgacaagccatatggcccagagtgaagccttttatctctttctaaaggtggcattctggccctgcttgcctccsttgtctctcctctctccttcacattctcttctgacttattgagttactctcagttccctaaaagctctgtgtcatgtcgtcaggtttttttttttttttttcgtggacactttcctctgtttgatgctct

SEQ ID NO: 838823 - DNA, 619 bp, Homo sapiens
tgcccggctaatttttgtattttagtagagacrgggtttcaccatgttggccagggtggtcttgaactcctgacctcaagtaatccacctgcctcagcctcccaaagttctgggattacaggagtgagccacagtgctgagccttgtctgtttttttttagagtctagaatccactctgtaataatgaacacaggctgctttgtcatgtcaaatgattttagaagcctcacaaatgacgaaggttccattattgagccttgggaaatgagtacaaagctttgttatgatttaaaatatcaagatgagtcatggtagggtggagggaaggaaggtagagattcagaaattgttactgcaaagtcagtctccaaatatggctcagatctcaccatattcaactgttttatcaccagcatcggtctcttgtcaaccaacttctctagactcccaaggaccacatttatcacagcaagaatgagcagggatagattctgactgcccttggccatgatggtttgggggtatggagaaatggagtgggacttttcttattgtctagggatgggcatatgaagcccaaacaaaggtcataggtgaaataaactcatgttctcaaaa

SEQ ID NO: 838824 - DNA, 371 bp, Homo sapiens
gtttccttgggtggtaggaaaacaggacactcttctatttaaatttctgaattttgacattttatataatgaacatgtgcccttcttatagtgagaaatggcttataacaagctaaaactccccrtaatagagacattagtaagtggagtgtcagggaccaccaagcacaagaaggggcttcactccacaaactcagcacctgcaggcaggcttcccccaaatattctcagtagtggtttcccagtgtccttccaggagtgtcaaggctacacacttggagactcccgacccttacttttcatcaatagatctctttcagctatgttagctccccaggctgtgagtggagactggattttgctcagaactg

SEQ ID NO: 838825 - DNA, 619 bp, Homo sapiens
tcttagtggccaagtaaacacaggctttgcaaacacaccatttttccttaagttcctcaaaccctaggcatgaatgaggctttctgtggttgctaatccctgggtaatgtttctttttaccattttgtaattctagcctccatccaggatgatttctttacaattttgttgagatataactgtgtgaaccccaaagatctgagacaggaatcaattaatttagaaagtttattttgccaagattgaggacaaatgcccataacacaggctcaggaggtcctgatgacatgtgcccaaggtggtcagagcacagtttggctttacacattctaaggagacaggagacatcaagcaacatatgcaagaacattggttcggtatggaaaggcaggacaactcgaagcaaaggcaggaagacttgaggtggggaggggactttaaggtcataggtgggtaagagatgaatggttgcgttcttttgagtttctgattagcttctccaaagcaggcaattagatatacatttatctcagtgagcagaggggtgactttsaatagaatgggaggtaggctggccctaagcagttcccagcttgacttttccctttagcttagtgat

SEQ ID NO: 838826 - DNA, 615 bp, Homo sapiens
tcaaatggcattcattttattatttatttatttttatttcattatatgcattacttataaatgactccaagtcttttatttaaaaagatacactttttaaaacaaacatgcatataaacacacatacttacatacttgttgcaggacagaaaatgtgttacatgcctattatagctttagaacaccttgagctatctggtcaatgtttggattttgatgatcattatgtatattactgactcagtttatttgctctcagcatatacactatggactgttaagatctctggtgtctctttgaattcacccgaggaaagaacatttccagtaccaactgtgacattagaaaaactttgagaaacagtcatatccaatgatgcaaacaacttgtttcatgatctctataatctaatgtgaccctagtctaggtcacataattattcctcaggtcttattaattcatttcactaactaaacctgttagtttatagatagcatagatagatagatagatagatagatagatagatagatagayagacagacagacagacagacagatagatagatagatgatacatagatagatacttagatagataggatagatagatg

SEQ ID NO: 838827 - DNA, 615 bp, Homo sapiens
tcaaatggcattcattttattatttatttatttttatttcattatatgcattacttataaatgactccaagtcttttatttaaaaagatacactttttaaaacaaacatgcatataaacacacatacttacatacttgttgcaggacagaaaatgtgttacatgcctattatagctttagaacaccttgagctatctggtcaatgtttggattttgatgatcattatgtatattactgactcagtttatttgctctcagcatatacactatggactgttaagatctctggtgtctctttgaattcacccgaggaaagaacatttccagtaccaactgtgacattagaaaaactttgagaaacagtcatatccaatgatgcaaacaacttgtttcatgatctctataatctaatgtgaccctagtctaggtcacataattattcctcaggtcttattaattcatttcactaactaaacctgttagtttatagatagcatagatagatagatagatagatagatagatagatagatagatagacagacagacagacagayagatagatagatagatgatacatagatagatacttagatagataggatagatagatg

SEQ ID NO: 838828 - DNA, 513 bp, Homo sapiens
aacacgcccggctaatttttttgtagtttttagtagaggcggtgtttcaccgtgttagccaggatggtctcgatctcctgacctcctgatccrcctgcctcggcctccaaaagtgctgggattacaggcgtgagccaccacccccggccagggccagatcacacttgtttttaatctcaacaagatctaagaaaactatagtctatttaagaacatacttttatgtgatttaattttaattttgaaataaaaagttatttcaagatattttatgaagagcattgagtatttcataacttaggactaaggtagtgttggaaggtgaaaacacgtggaaaataattagtcaaaaacaaatttaagcaaagatgtcactcatttaaatgtgtgcaaacattgttcttaattaaaatattgggaagataggaatatattaagcacatatttaaaaaaagagagagaagagaggtttggacagagagcatcaacctcttactttttgccttggttata

SEQ ID NO: 838829 - DNA, 580 bp, Homo sapiens
tcggagatgtatcttctctgtggataattagcctcttgtattaaaaataaaacctataaatatcacttcattagtaggattctatcctcttccctgctctctttatgatctggaataacccacagacatttagaagtctaatggccagaacgaaataaccgaggttggttttcggggctgttgagtgttgtgggtcaataatgaaaacggactgctcctaggttttagatcaacgagctctcaagggaaataaatgaaatgaagagaccatgggagtcaggaatttgctagttgcctcatttccactttttgtatattcttcttagttttccttgtacattaaatcattatgctctcaccaaggagagaatgataagtacctgattcataagatcttcttttctaagtaagttcctaattttttcaagggtaaataataataattcaattcttcagttcttctaagcrtcatctatcatgagttcaaatatggtcacattaacataaatgttcaaactatgatagctcttaaccattgaggaacttaacttttcccctggatttttttcaggagtcactg

SEQ ID NO: 838830 - DNA, 607 bp, Homo sapiens
cttagttgaggttgcctcacaggaaatctatgcaccttacacattctccgtctgtgtaaggcaatttgcttgttgttatttagatgtgactgacataatttggcaatctggtttattagtatactttgtaacaaattgtgtctcgaatgccagtgatatttttttctggctgtaacttaacaaggtgacttattctgaagtagtaaatgaatgtcacaaagattctctcccactttccctaccccctcctccctcctccctcttctctgtccttctttcttcttttctgcacttatctttaatccactgatgaaaacaaattttagaacaccaaatgttatggaaaacttgttggtcatgagtgttactatgggtatgctatgttccagcttttcagttttaggaagcttgggtaaatgtctgctattcccttgtgctgcagccctcccttctcccatttcctttttgggtactatggatagtttgsaaaaaaatgccaacgaaataaagtgaagcaattccttttcaacttgcatcacgaaatccttagtgttaaaaatgagtgtatcttaatggaagagcctattaaatgaacaagaagtaaata

SEQ ID NO: 838831 - DNA, 535 bp, Homo sapiens
aaggctgatttaagaggaaggtttttatggatttagttataaacacattcagtttggagagtcttcaaaaygttgaagttcacatgtcaactattcaattagaaataaaatatgggtcaagcatggtggcttatgtctgtaatcctggcactgtgagaggctgaggtgggtggattgcttttgtccaggagtttgagaccagcctgggcaacatagagaaacctcatctctgctaaaactgcaataaataaataaatatggaaataagggaaaaaatgttaagctaaagataaaatttgagaatcatcaccaaatgattggtcatagaccttcatgagctttcttattagtatatacagtggataataaagtggtttcgatttaggattctctcattatgaattagaagaatctggaaaggtttaatgggggaggtgagctgaatcatgaaaaactatagaatatggataatacgagagatgagtaaaatgaatgaaattggtaggcacacgataaaaatagaaataaatagaaa

SEQ ID NO: 838832 - DNA, 475 bp, Homo sapiens
gtcactccctagctccctgaacacatcatgtagattgctaccctgacgtgtctctttggtacattcatcctaactcctactcatcctgaaggcggaggcrtgtcacctttaggatgttttttctgataacctttttcaggcttgcttagttcccattaaaattactgtgtacatttgttatcattgcacttacattattcagcagttatctctatatgtttattccccactagcttgtgtactctgaggtgaaaaccacattttatccatctcttttttttttccttgagttaaactcagtacctagttttataaatgtttactgaatgagaaaacatggaaatgagtaaataacttacaggtaatcagagaacagaggtagggaaaacagaacaagcaaggaccctaatatatgttcaggtattttcatttagggacctagatcagctagctatagacttaaccattcttttct

SEQ ID NO: 838833 - DNA, 576 bp, Homo sapiens
agaagggacctgtgcacctgcattttaacagcacccctagtggttctgacacaagtagttctgcagaccacatttgaaaaataacaatttattcaaactcagctaatgagtcattgcagatagataaatcaacttcactgatccagagaaaacctgagaaacagaaggaagccttaaaaaaatgagatgggccgggcgcggtggctcacgcctgtaatcccagcattttgggaggctgaggcgggcggatcccgaggtcaggagatcgagacccatcctggctaagacggtgaaaccccatctctactaaaaatacaaaaaatcagccgggcatggtggcgggtgcctgtagtcccagctacttgggaggctgaggcaggtgaatcacttgaacccaggaggcagaggttgcagtgagccgagatcatgccactgcactccagcctgagtgacagagtgagactccgtctcaacaacaamaaaaaaaagagaaaagcagaaaataaaagtcctaaaacaataaagctctcatatactgtattccttagaatttcctcagacctttgatcaaagact

SEQ ID NO: 838834 - DNA, 577 bp, Homo sapiens
aaataagaataataataaaatattaataatatacctaaccaaggacgtgaaaaatctatatgaggaaaactacaaaacactattgaaagaaattattgatgacacaaacaagtggaaatacatcccacacttacggatgggtagaatcaatattgtgaaaatgaccttagtgccaaaagcaatctacagatgcaatgcaattcccatcaaaataccatcaaaattcttcacagaactagaaaaaagaatcctaaaattcctatggaaccaagaaatactccatgcagccaaagcaagactaaacaaaaagaacaaatttgaaggcatcacattactcaacttcaaattgtactacaaggctatagttaacaaaacagcatggtactggtataaaaatagtcacatagaccaatggaacagaatagagaacccagaaattaaagccaaatacttacagccaactaatcttcaacaaagcaaacaaaaatacaaagtagggaaagracaccctattaaacaaatggtgctgggataattggcaagccccaggtcgaataatgaaactggatcctcgtct

SEQ ID NO: 838835 - DNA, 577 bp, Homo sapiens
aaataagaataataataaaatattaataatatacctaaccaaggacgtgaaaaatctatatgaggaaaactacaaaacactattgaaagaaattattgatgacacaaacaagtggaaatacatcccacacttacggatgggtagaatcaatattgtgaaaatgaccttagtgccaaaagcaatctacagatgcaatgcaattcccatcaaaataccatcaaaattcttcacagaactagaaaaaagaatcctaaaattcctatggaaccaagaaatactccatgcagccaaagcaagactaaacaaaaagaacaaatttgaaggcatcacattactcaacttcaaattgtactacaaggctatagttaacaaaacagcatggtactggtataaaaatagtcacatagaccaatggaacagaatagagaacccagaaattaaagccaaatacttacagccaactaatcttcaacaaagcaaacaaaaatacaaagtagggaaaggayaccctattaaacaaatggtgctgggataattggcaagccccaggtcgaataatgaaactggatcctcgtct

SEQ ID NO: 838836 - DNA, 529 bp, Homo sapiens
tctttcaatccaatcaagttgacactcrgtattaaccatcaaaaccaacatcaaaagaaaaaaatagaaaaatttcaaataaacaacttaatgatgcatcttaaagaactagaaaagcaagaccaaaccaaactcaaagttagtagatgtaaagaaataataaaggtcagagcagaaaccaatgaaattgaaacgaagaaacaatacaaaagatcaatgaaagaagaagttcgtttttgaaaggataaacaaaactgacaaatctttagccagattaattgagaaaaaagagataacaaataaaatcagagacgaaataggagacattacaactgatactacagaaattcaaaggatcattagaggctgctatatgccaataaatttgaacacctagaagaaatggataaattcctagacagatacaacctcccaagattgaaccatgaagaaacccaaaatatgaacagaccaatgatatgtaatgagatacaagatgtaatgaaaaatctcccagcagagaaaagtc

SEQ ID NO: 838837 - DNA, 620 bp, Homo sapiens
cttatccatgtaaccaaaaaccacctgttccccaaaaactattgaaagaaattttaatatgaatgtctttttctcacaccatgaatttaagttatcyaaattaatccttaaaaatatcttctaccttggacattatcattattattcaatgtctgaagaggcaacacatttaagagatgaagcaatttgcccaaggttaatttgttcagatgaaattggcccatatagctaaatagtttctaaaataattcttatgattttgcattctctgctgtctctctccatctctgctttccttaatgtactatttgatggcagaaggagcatgactgagagaagagattttagtgcagacggtagaagtggacagatttggagaataaacacagtttatttgctctacgataatcacaaagccatttaatgattttccagaataagccagtgcaggtgttaatttgccccagagagagatttgaaaaaccactccactctcacggctagcttgagcttttatttggcaagagcaaaaacacttctatttgggagacactggtatgtgaattgaatcactcggctaattgattaaatgcaaagttatactaaatcactccactcaa

SEQ ID NO: 838838 - DNA, 392 bp, Homo sapiens
aaaaaattgccatgagtgttcrctagatgcctgccactagacctagatttatttcatttttgatacttacaaataaagtatcattgttttcattatacaaataaagaaatggaagctcagagaagtgaaatgtcttacctaaggtggatggaacccagtgttcagtttcttggacactaccaggttttcttctcttagggaagaaaataggtcaggttatgcttccttcctgaccgtggggcctctttcaaccaggttcctctttatgggacagtctttttttgtgtgtgtgacgccagcctccctaggaccagactaggtctgaagccccgggcgagatttgccagatcttatactgaccaccaggtggtgctgttggcccaacgtatagt

SEQ ID NO: 838839 - DNA, 611 bp, Homo sapiens
acctttttcaaattaagattttatgacttacatgccacctttgtcaatattcctgcaaggraagggacattttaaatttttcaaacaatattgttttgacagtttttttaaatgtacaatctcttatttatctgagttcaacctgagatcacaagagagaagaatctctaagtaaaactatagaataacttcattaatggttacatctacaaggagaggggaagaagaaatggttacattttgaaaagtattaatttcatttgactttgagctattagaagtccagattttttaatctgagtaccccattttaaaaaaagaaataaaaccttgcaaaacacaccagaatacatccagtaaaggaaaatcaaggtgaaaggtcagagaaaaaaatcagtgtctattctgtgaatggttgaaagttatagaaagacagattttcaactcagtttaagtccaaactttctaataatttgatgtagcagtgtaatgggctgcattactagtgagttccttatgtgagtgtgcgagcatatgctggatgacttatctagaataatgtagaagagaattaaacattgaatgggagcttaaattagttaatttctgag

SEQ ID NO: 838840 - DNA, 491 bp, Homo sapiens
aaacaataatgcctattaagaaaacaaaataaaacaataaaaaaaaccccacaagaagaagaaggtaggacaaggggtagtaagagcctgcagaggttgtggcaggggtctagcccagggctggggcctaagctgggcagaggcagtcgggctgggtagaagggattcaggagcattcacaggagttaggctgcttagatggtgggagggcaaggaagaggagtgcgctgaagcttcttgcttaactagcaatgtggtgccatgaagagagatatgatgaaccaccttcagtatgataggcagtacctgtaggccagagattgcactagaagatggagagggaaggaggagagcttataactgactaagacaagagaaatcacattttattcttttatttaagagaggtcctgttgttttatcatttttctgttttatgcatcacttataggacataatgccatgagtarcccatatacagaaaattcaca

SEQ ID NO: 838841 - DNA, 560 bp, Homo sapiens
gctatcacatgaacctgcttgaaagattggaatctgcggcagttccaacatcagaaacagttcgttccaacatcagaaacatttccttccaactgccactgattctcccccacaagcctgcagtagttcaggatgcacagtgctatgctggaaaacaaagaattatttcctgaagtcctggtggtgcttatattcctaagtcccactatagagaaatgcttgcagtacacttagaacagaccttaacctcaagtcatttaacacaggaggggcactatactttgtaaagtggcaacccaacctcagacctagctcagctgcagattggatcaaagggatctctctctagctatctgacagaggaaagagtaggccctctctgggggaaagaaaacttagtttagtctctatgagcctcttaaacataatatatgccatgcaattttaaaaaasacatgtgcaaggaaataggagaatttgacccacaatcaaaattatatatacacatatatatgtgtatatatatatatatttaatagaagcaaaactacacatataga

SEQ ID NO: 838842 - DNA, 560 bp, Homo sapiens
gctatcacatgaacctgcttgaaagattggaatctgcggcagttccaacatcagaaacagttcgttccaacatcagaaacatttccttccaactgccactgattctcccccacaagcctgcagtagttcaggatgcacagtgctatgctggaaaacaaagaattatttcctgaagtcctggtggtgcttatattcctaagtcccactatagagaaatgcttgcagtacacttagaacagaccttaacctcaagtcatttaacacaggaggggcactatactttgtaaagtggcaacccaacctcagacctagctcagctgcagattggatcaaagggatctctctctagctatctgacagaggaaagagtaggccctctctgggggaaagaaaacttagtttagtctctatgagcctcttaaacataatatatgccatgcaattttaaaaaacacatrtgcaaggaaataggagaatttgacccacaatcaaaattatatatacacatatatatgtgtatatatatatatatttaatagaagcaaaactacacatataga

SEQ ID NO: 838843 - DNA, 555 bp, Homo sapiens
gcctactgcaccctataacatcattaacactcaggggcaaggggatttttgtaagaatatgccaccagaggtagatttgtttactttttaaattttttaattttttttgagacagggtctggctctgttgyccaggctggagtgcagtggtgtgatctgggctcactgcagcctccacctcccaggctcaagcaatcctcctacctcagcctcccaaatagctgggactacaggtgcataccattatgcccagctaatttttttttttgtagagatggggtttcatcacactgaccaggctgatcttgaactcctgggttcaagcaatctgcctgcattggcctcccaaagtgctgggattacaggccagaggtagatttaatgtgcctgatcagttagctcttgtttagagaacagatttggattttaaacctaaaaggcactctacatagatttcaatactagataatagaaaggaaagcatagttattattttacgatgaggcttatgcctgtttatacaggggatatataagacttgaatgttcaggacaa

SEQ ID NO: 838844 - DNA, 628 bp, Homo sapiens
aaatgtatttaattcaaattttgtgcaatctttaaaattctccaatgcttcacagagaccctgctttttggattttgagtcttgccatattttggtaatgtgtgagccagcagcaacaatgagcattcatagaaaaagactttggaaattactgtgtgattccaatacagtatatcataaaccaagcccccagaagagagaattttcagtgtcaccattttagggtaccactataattctttttatactcaactaacttcaaataaagtactcatgccgggcatggtggctcacacctgtagtcccagcactttgggaagccgagatgggcggatcacctgaggtcaggagtttgagaccagcctggccaagtgaaaccccgtctctactaaaaatacaaaaactagctgggtgtggtggctggtgcctgtaatcccagctactcgggaggctgacacaggagaattgcttgaacccgggaggcagaggttgcaatgagctgagatcgcgccactgcactccagcctgggcgacaagagtgaaactctgtctcaaaaaaaaaaaaakaaagaaaatgaagtactcttaattaaaaaaaaaataaaaaaaagaaaaagagtacacaatc

SEQ ID NO: 838845 - DNA, 568 bp, Homo sapiens
aagtaatgcttgcagggcccctcatgccggtcagccatgtcgtccttccctccttcgccacagtctgagtacatgggcacatctcagaggcataaccagcttgtgaaataaatctgaataattcttcagtcttagaaatatgtcttgagttctctgaggttcagctttcccagatcgagttgccctctgccctgtcaccctggaatcctgcccactccttccatgtcccccaagttcctgttcctaacctcatctaagtcactgccacactgctcgttactgaggaccaaggtcctttctgactgatttcattggatttcaccttcaccccggtatcccccatcaccagcactgcatgttccccactttccgaaatctccagaagcatctctgacttctcctgccagttcttctcatttttttttgtttgttttttcttgtttgtttgttttgagacagagtctcactcygtcacccaggctggagtacagtggcatgatcttggctcactgcaacctctgcctgctggggtttaagcgatcttccttcctcagcctctcaaatatag

SEQ ID NO: 838846 - DNA, 568 bp, Homo sapiens
aagtaatgcttgcagggcccctcatgccggtcagccatgtcgtccttccctccttcgccacagtctgagtacatgggcacatctcagaggcataaccagcttgtgaaataaatctgaataattcttcagtcttagaaatatgtcttgagttctctgaggttcagctttcccagatcgagttgccctctgccctgtcaccctggaatcctgcccactccttccatgtcccccaagttcctgttcctaacctcatctaagtcactgccacactgctcgttactgaggaccaaggtcctttctgactgatttcattggatttcaccttcaccccggtatcccccatcaccagcactgcatgttccccactttccgaaatctccagaagcatctctgacttctcctgccagttcttctcatttttttttgtttgttttttcttgtttgtttgttttgagacagagtctcactctgtcacccaggctggagtacagtggcatgatcttggctcactgcaacctctgcctgctggggtttaagcgatcytccttcctcagcctctcaaatatag

SEQ ID NO: 838847 - DNA, 646 bp, Homo sapiens
ataattgaatcatggggcagttttccccatactgttcgcgtggtaatgaataaatctcragatctgatgggttttttttgttgttgttctcgttgttgttgtttttattattttcgtttgtttgtttttgaggcagagtctcactctgttgcccaggctggagtgcagtggtgcaatctcggctcactgcagtctccacctcccatgttcaagtaattctcctgcctcagtctcccaagtcgtggggattacaggtgtgtaccaccactcccagctattttttgtatttttagtagagacggggtttcaccatgttggccaggctggtctgaaactcttgacctccagtgatccacccacctcggcctcccaaagtgctgtgattacaggcgtgagccaccacactcagccttgatggttttataaatgggagtttcgctgcacaagttttcttgcccacggccatgtatcttcctttgccttctgccatgattatgaggcttccccagccatgtggaactgacagtccattaaacctctctcttttataaattacctagcctcaggtatgcctttattagcagcatgagaatggactaatacaggggcctacttgagtgtggagggtgggaggagggtgaggacc

SEQ ID NO: 838848 - DNA, 631 bp, Homo sapiens
agcaaagtgtgaagtcaatctttagaagtctaaaatgaagaaggcttacaacactctatgtcagatgccatgccatatctcttacataaattatctcatttttcctttgcatggaatatattcaaaaaattgaacaagttgcccaaatactcagatagtaaatgtggcagagctaggattgaaactgaagatacctggctgtaaaacttgtacttttcattgtatgataaattttctaaaagtaggccgggcacggtggctcatgcctgtaatcccagcactttgggaggcaaggcgagtggatcacctgaggtcaggagttcgagaccagcctggccaacatggtgaaaccctgtctccactaaaaatacaaaaattagccaggcctggtggtaggtgcctataatcccagctacttgggggactaaggcaggagagtcacttgaacccaggaggcggaggttgcagtgggccaagatcacgccactgcactccagcctgggtgacagagcaaggctcctctgtctcaaaaaaaaaaaaaagaaaagaaaagaaaaagaaatttctcaaagttaytcagcataaaaattgtcaataaagttccaacttaattgccatgttcttgtgtgaa

SEQ ID NO: 838849 - DNA, 343 bp, Homo sapiens
gagccatcagagggagcatggcctgccctgctgaacctttgatttcatacttctagcatccagaatgtgagacaaaaaaaaatttctgtttttaaaaccatccagtttttggtactttgttactgtagtcctaggaaacagacacagtggccatgtgcccagaaaaataatgggggttctattagaaaaggggtcagggcattggatacaggggagaaaccaatagtttctgtcattgacyggaaaaaaatgtacaaacatccttcaacaagtatttattgattacctaccacatatagtacactgtggcaggtactgaggatccagttgtgagcaaagccag

SEQ ID NO: 838850 - DNA, 555 bp, Homo sapiens
gaaacactggttcctttctggttcttcacaccttgcggccttcacacgtgctgttgcctgtgcctagaactccctaacccgagtcctgcacgcctggctccttctcaacctccaggattcatgcgaaggtcatctcctccttctgaccacccagaattcaaaaggacacttttcctttgctcctacagttagagctttatttctagattttttcttgtcctctgtgtgggggagacaggatctgttccccggtgtgctcaaagcctcttgcaacactggacacaaaaggcactttacatatctgttggaaggatggagggatgtcttctctctggactctgggacctcaaaagatgggtgccctgatgagaaaacctcagaattttgtctctaaagcccaaatatgtggcaggatgaccactccctcactttcttagttttttyctccccaaacagaggcagccccaacctctggtgacagcaactctgggtaaaggccaagttccaggaagaagtgacttctcagagaccaggccctaacccacaggaatgtag

SEQ ID NO: 838851 - DNA, 521 bp, Homo sapiens
atgttacctgacttcaaactataatacagggccacagtaaccaaagcaggatggtactggtacaaaaccagacacgtagamcataccaatgaaacagaatagagaacccacaactaaggccacacacctacaaccatctgatcttcaacaaagctgacaaaaaacaaccaatagggaaaaggattccctatccaataaatggtgttgggataactggctagccatatgcagaagattgaaactgtacctcttccttacaccacatacaaaaataaactcacaatagattaaagacttaaatgtaaattccaaaactgtaaaatctctggaagacaacctaggcaataccatcccggtcatagaaatgagcaaagattttatgacgaagatgccaaaaacagttgcaacaaaagcaaaacttgactaataggacctaattaaactaaagagcttctgcacagcaaaagatactaccaacagagtaaacagacaacctacaggatgggagaaaatgtttgcaa

SEQ ID NO: 838852 - DNA, 519 bp, Homo sapiens
ttatctttaaaaagtgacacttcctttctttcattacttatgctgtgaatttattgctcttgccttatgataattgcccagaatctctgtacattttgaatgggcaggagatccttgtttagtcccagtrtcaggaagagattacatgggtcacaattaagtattaaaacttttaaatatattttgatttaataaacatgtagattttgattgcctgaaataaatgaaaataatgttaatttggaatattaacatcattctatgtagattatagaagtatatagaagcatataataatcaaattttaattaaaatgtgtattcaaattgatgctataatacttaaaggtatgtgactgtgtatttttatataactgtatactttgcacatactttccctaagaactcagaattatagaaaactatatttttacttccaagctgaacttgaagatgacttgtcatttagaactcagctaaaacatctcatctgtacaattaagacttcccactgattgcc

SEQ ID NO: 838853 - DNA, 583 bp, Homo sapiens
ctgggggagaggagccggccgtattgaggtgggtgcttctgtgtgtaggtaccgagcccctgaactgctgttgggaaccaccacgcagaccaccagcatcgacatgtggtgaggagatayggttaccgctcctggggcctcaggaagggctgggacaggagccgggtcacctggttcctgagctcagcctcaggggaggggcaggagtgcagtggggtctttgccagcctcccactcccagggaggtgggcctgagcctggaaacccaggaggaggtgtgagaacttagcttgctgttctcaggctgggagcacagaggtctggaggaggcacgcctgcccctgcacttgtcaccccgggaggcctgcggggcccaggaggggagccagtggtccctgcctgtccttcacagtgtccctgacccagcgtgcctcacactggcagggtcagcaaaggtctggctgcagtcaggtcctctgttcctcgcgctggcggggtcagcagacgtctggccgcagtgaggtccactgttctctgcagggctgtgggctgcatactggccgagctgctggcgcacaggcct

SEQ ID NO: 838854 - DNA, 616 bp, Homo sapiens
aaatatatatttttctaatagagatgaggtctgactatattccctaggctggtctggaactcctgacctcaagtgatctgcccgcctcagcctcccagagtgctgtgattacaggcgtgagygactgtaccgctggaaatcagctctttgatgtctaagagttaccaccttgctatttttatccatttacctttgaggagaaagagtctgtaaaaagtaaactgtcaagtactgcacttttaaattggcccaggctggcctcaaaccctggctttaagtgatccactggcctcggcacccccagagtgctgggattacaggtgaacttttaaattgggaaagaatcccaagggacttttgcaaagttgcattaattataaaccaccatcttttggattctaaccatggccaaaagatgctgcgtccatgacctcttctgtcctcacactaaccctttgagattggctggtaccaccctcatgttcccaacaaggaaacagggagggagggtctgcatttgctgggccctgtggctagcaaggagccagggctggcacacgaatctgtctcgtgcctcccctgttggggggggctccccgaaggccccaggcaggtg

SEQ ID NO: 838855 - DNA, 566 bp, Homo sapiens
aaaaaattaaaaaattagctgggtgcaagcctgtaatcgcagctacstgtgaggcgaaggccctagaatcacttgaacccgggaggcagaggttgcagtgagacgagatcgcacctgtgcactccagcctgggcgacagagcaagactccgtctcaaaaaacaaacaaacaaacaaacaaacaaaatatatatatatatgtacctcaaggtgacgattaaatcatgatgtagaaagtgccctgcccctccccaaaaggcatcaaaacaaaacaggacacaaaaataagggcagaaaaggacagaagacaaaccaggagagtcatgaccccacagcccccagggtctcaccttcttcactttggcctgctccgccttggagtccttctccgccttcttggccagcttctccagctgcttcgccgtgaactgagcggaagccggaatgtcctgggtcagacatgcggagcccatcccccaggcccggctctccacacccccacacctgtgcccacacctgtgcccacacaggttcctaagcccccatcagccagcctgggcccagcac

SEQ ID NO: 838856 - DNA, 566 bp, Homo sapiens
aaaaaattaaaaaattagctgggtgcaagcctgtaatcgcagctacgtgtgaggcgaaggccctagaatcacttgaacccgggaggcrgaggttgcagtgagacgagatcgcacctgtgcactccagcctgggcgacagagcaagactccgtctcaaaaaacaaacaaacaaacaaacaaacaaaatatatatatatatgtacctcaaggtgacgattaaatcatgatgtagaaagtgccctgcccctccccaaaaggcatcaaaacaaaacaggacacaaaaataagggcagaaaaggacagaagacaaaccaggagagtcatgaccccacagcccccagggtctcaccttcttcactttggcctgctccgccttggagtccttctccgccttcttggccagcttctccagctgcttcgccgtgaactgagcggaagccggaatgtcctgggtcagacatgcggagcccatcccccaggcccggctctccacacccccacacctgtgcccacacctgtgcccacacaggttcctaagcccccatcagccagcctgggcccagcac

SEQ ID NO: 838857 - DNA, 590 bp, Homo sapiens
catcctttctggtttgaaatttgtgttacttttgaaatatcagcagtttgtcccggctgaaataaggtagtgagatttaaagatttaaaaggattttctttttttttgagacggagtctcgctctgtcgcccaggctggagtgcagtggcgcgatcccagctcactgcaacctctgccgcccaggttcagccattctcctgcctcagcctcccaagtagctgggattacaggcacttgccaccgcacctggctaatttttgcatttttagtagagacggggtttcaccaccttgaccaggctggtcatgaactcctgatcttgtgatccaccctccttggcctcccaaactgctgggattacaggcgtgagccactacgcccagccaagaggatttttaaaagggcttaatggtcaaaagtaaacttaactaaaagctaatatcggatatattccaacatagtagcttaattaagtccgtatgccacatacacatatacagacccctgtgtagaaaagaaggcaccagactcstttttggggagaaacttctgtttttcttatggaactccaagagtggaaacagacacg

SEQ ID NO: 838858 - DNA, 621 bp, Homo sapiens
atgtcggtgctcaaaatgtttgagattttggtgtattttgaattttgaaatttcaaattaaagatgtttaacttgtcatttatttgtctaaataatggagagcagcacacacattcctttgtagttacccactgctgggaaacctctaaccctggatcatcaatacatcagtaggcagttcagggattaggtgtcagcctaactatatctcacgtgtttgatgttctcttcctgatttccactcagttaagaaaatttcctttcttttcttagcaatagtgttattcattacaggagaaattaaagtgtcacctaggacatctgtatttgtatgctactggaaatagcctttgttttctgaagccgatgttagttacaactaaagtttcattgctggaaatagctttgcttattttctgatgctacatttgccttgcttaacatttaatttttgatatttatttccttccaatgaaaagattaaagagttttcaatattggggaaasaagacttgcaaataatattaaaagtttttaatcatactgcatgattataagggaagcagaaagtggatgcctattttaaatatcagtaaacaaagacaaaagcagaaaagtaca

SEQ ID NO: 838859 - DNA, 554 bp, Homo sapiens
aaataagaaaaaagtttcttgagatatggggattttttttttttttttttgatggagtctcactctgttgcccaggctggagtgcagcaatgcgatcttggctcactgcaacctccacctcccaggttcaagcgattctgctgcctcagcctcccaagtagccgggactacaggcacccgccaccgcgcctggctaatttttgtatttttagtagaggtgaggtttcatcatgttggccaggctggtctcgaacttctgaccgcaaacaatctacctacctcgacctcccaaagtgctaggattaaaggtgtgagccactgtgaccggctagggatttttttttttttagacggagtctcgctctgtcacccaagactggagtgcagtggcgccatctcgactcactgcaaactgcgtctcccgtgttcrtgccattctcctgcctcagcctcccaagtagctgggactacaggcgcccaccaccacgcccagctaatttttgtattttttttagtagagacggggtttcaccgtcaggtgcactccagcctgg

SEQ ID NO: 838860 - DNA, 576 bp, Homo sapiens
tataactctgccctttttatagtttttagtacaaaactctgctcttctaacagttctgtcctcatttctttctgttattaatgccacaaaacttcattgttgtacaytgtgtgtccaaaaacataaactattaatttttaaatgtaaatgaatcgtaaatagtattgaaagagaaatatgcaatacttaccttttagactagttttttaatgtgttagtctctttaattatgtagacaacaaacaaaaatatggtgccacacatcatcattataataatactagttttaataattgcccatgtatttacattgactgagatctttatttcttcatatgacttagagttactatctagttttctttcatttcaaaatgcaagactctcttgagcacatcttgaacagcaagtctagcagtgataaactcccttagcttttgtttatctgggaatgtccttatttctctctcacttttgaaggatagttttgctggatatgtgattcttggataacaggggtttcttttgttcgtttttttgttttttgctggacttctactttcttacaaaaaaatc

SEQ ID NO: 838861 - DNA, 646 bp, Homo sapiens
gttctggagcataatgataatgtatataaaatgccttacacacaagactcaatttagaattattattgtcttaaaggtygtgcaaagctaaattgttatttatctttgtaaagatttcactatgcatatattggtaaatttaaaaatcctttgtcagattatttattcctcctaaaccagaaaattttcaggatgtcaataatactgagtgtagttgtggtcacttcagtgtaggccaatggaacacatgtgcaatgtagaccaagctaggcttcaatctcatctgggcctcatagtagctcagttcagctatgcaaacttggcaagctccttggccttgcagacttaagtttcttcatctgcacaattgttatactgcaacacaccttgcaaggattttgtatacatgagctatctatcatatactggggactcaatatgttagctctctttccccagcaacatagcctttccaagatatccatttttactaattgaagataatgccttgccttgttttatctggtgtgggattttataatgttaatgttcctccgtgagtgaaagctgccttagattaggctcttaatacatgacctaaaacatggataacccatccccctcaccacccacctcctcctgtaac

SEQ ID NO: 838862 - DNA, 490 bp, Homo sapiens
aacagtgatatttgtataacaattgttcatagcaacattagtcacaatagccaaaaggtgggaaatgacccaaatgtttatcaacagatgaatgaataaacaaaatatggtatatacatacaatgaagcattattcagccttaaagaggaatgaaattctgatgcatgctacaacatgaacaaatcttaaaacattatgctaagtgatataaaagacacaaaagaaccaatattgtatgattccacttgtatgagttgcctagaataggaaaactcatagagacagaaagtagaatcgagcttatcagggggtggagaaagagtggaagaaggttgttattgtttaaagggttcagagttttcatttgggatgataaaaaaaaagttctggaaatggatagtggtgacggctatgcaatagtgtaactgtacttaatgctgctgaatcrtacagtgccacgttttctgaaatgggaagcaaattaattga

SEQ ID NO: 838863 - DNA, 554 bp, Homo sapiens
ctgtagacttggtattttttttcttccttaaatatttggtaaatggatacatgaaatcgtctgtaggtattagttttctttttgagaaggttcttagctacaaatacaatttcttaaatagatacagctattcagattatttctttttgagtgagctttggtagcttgtgctttcaagagtttttgtccatttcatctactttgttcactatattagcataaaattatttataatattcccttattattgttttaatatctgaagaatctttaatgacgtcacccttctcattcctgatacttgtaatatgtatttttattctctcttttttttcccgataagtctggctagagttgtaccaattttattgatcttttcaaagaaacagcttttggttttattgattttctccagtgtttttctgtatktggtttcgctgaactctgctctgaactttatttcctttcttttgattacattgggtttaatttagtcttctttactctagtttctgttttttaaattttttctttttaaaaatcatcttccccca

SEQ ID NO: 838864 - DNA, 580 bp, Homo sapiens
taggcgtgggggcagctaggaaggctgggctcagtgcttccccacccccaccttgggggcctggccaccgtggctgatctgctcctgtccgtcccctacagtgtggctggctacccaaaaccacagcactctggtgacagagcgcagtgccgtgcccttcctgcctgttaacccggaatactcagccacgcggaatcaggtgagggggctggattgggggcctggggtggtctacttcatccccgcggtccctcctcatccggcagtgggctggggcctgagccagctctccagcatttgccagggcctccctcagggcacagctggcactgggatttgggaaggtcaggaggctgttgttttgagcacttggggagcagctccggtgggtgttccggcctctgctcaggcaccctactctatcataccctgccacgggtggccttggctgctgactagccaggtgaagctaggctgggacgctttagctggggttaaattaaatggcagagccatgccttgctacttggtccctgccgycctgcgtcagtcataaggggtcccctgaagccagcctggc

SEQ ID NO: 838865 - DNA, 494 bp, Homo sapiens
attgctagcaatatttgtatataagcctttttatggacatatatatatatatatatatatatatwtttttttttttttttttgagatggagtctcactctgttgcccaggctggagtgcagtggtgaaatctcggctcactgcaagctccgcctcccaggttcatgccattctcctgcctcagcctctcgagtagctgggactacaggcgtccgcaccatatctggctaattttttgtatttttagtagagatggggtttcaccatgttagtcaggatggtctcgatttcctgaccttgtgatccccccgcctcagcctcccaaagtgctgggattacaggcgtgagccaccgcacccagcctatggacgtgtatttttatttctactaaccctaagtcttctaaattagaaactttgggattatttttgatttgtttaatctcttttctcacctatattcacacaataggttatgaagtcgtgggatttcttc

SEQ ID NO: 838866 - DNA, 475 bp, Homo sapiens
tcattggcgacgctgatggaccatatcttctggggagtttggtcatgaacatggtttcccatttgttgtggaccaaactgtgcccttccccttgaattcctgcgttgaagccctaactcccaatgcagctgtaattgaagatagggcttttagggaggtaattaaggttaaatgaagtcatagggcaggaccctaatctaataggattgatgtccttataagaagagggagagacaccagagatctctcctcccccctcacttgtaaacagaggaaaaatgacggaggacacagcagggaggtgggtacaagccaggaagaggggcctcgccgggaactaaccctgacggcaccttgatccgggactttgggcctctcaaamtgagaaatacatgtctgttgtttaagtcactccctccacagtaatctggatggcagcctgagcttaccaaggcaccgtctgcatcagccaggg

SEQ ID NO: 838867 - DNA, 598 bp, Homo sapiens
cagatgtctgaatggaaaatggatccagtacatataaagatacacatagcaattatttcatatattgatacataattatagagacagacttttcttaaaaaaaaacmaaaaaaaaacaaaaaaaaccagaaggggccagtagagtcctccctcggtatctggaggggactggttccaggatgtccctccaatcccaaaacctgtggatgccccagtccctgatataaaaatggagtggcatttacattttatatttaacctacacacatcctctcatatacacagacacacatcttttagatacagggcctcgctctgttcacacaggccagagtggcactgcagcctcaaactcctaggctcaaacaatcctgtctcaagtctcctgagtagctgagactacgggcatgcgccaccacacccagctaattttttttcagtttatcatagagacagagtctcgctaagttgcccaggctagtctcaaactactggcctcaagtgattctcccgccttggcctcccaaagcactgggattacagatgtgagccaccacacccagccctcccgtacactttaaattctctctacattact

SEQ ID NO: 838868 - DNA, 589 bp, Homo sapiens
atctctaattctgttttcagacaagagatttatgttttctacatggaacagaagtaacatgctatggtctttcagttaaccagtgggtcacctgggagcaaagcccttttgtgataaagttggctgatttgtgttttttttttttttttttaattttcgtaaacgttgcaaaaccttgttggtaaacactctcctggcagtttaagtggtgtgcttttccaggttgaataaccaaaaaacctgcttaccagtgtataggttttgtttttgtttttgtttttaaatactgctccttgcggagcagggctgacccacaggcagtgctctcagagtaaccacagttgtcgattaaatggcccgagtacaaaagaatttgtttcgctctcctgctcctcttgctttattttgttttgtactctggcatttggggttttttccccctttcctctcaggtgtctcaygtcttcccattaagaccggaggaaggaagagaaagagatttgctttgaggccaggtacaaacctgtgcctgccacagaccagctttgtaacctgctaggccagtgactagtgtaagactgctgtgagg

SEQ ID NO: 838869 - DNA, 597 bp, Homo sapiens
agattcaggaaactgaacttcaaacagaagaagccaaagaaatctacactgagatatcatcattaaacttctgaaaactaaagacaaaaaatctcctcagaacagccagagaaacaacacattacctatagggacaccagttcaaattatctcatctgaaactacggaggccagaagtgatgtggatgacttgaggtcaggagtttgagaccagcctggccaacatggtgaaaccccgactctactaaagttacaaaaaatagccgggtgtggtggcacatgcctgtagtcccaactacttgggaggctgaagcacgagaattgcttgagcctagggattgtggggccaagactgctgatggggggtggggttgagctgtgatggtgccactgcacttcagcctgggtgacagagtgagactctgtttcaaaaaaaaaaaaaaaaaatcagtaacagaaagactacaggaaaatctctaaacacttggaaattgaacagtacacytctaaatatccacgtcaatgaggaagtctcaaagaaaattaagaaatctataaaactgaatgagaattaaaggacagcataccaaaatatgt

SEQ ID NO: 838870 - DNA, 501 bp, Homo sapiens
tctgtaggttgtgtgtttactgataatttcttttgctgcacataagctctttagtttgatcagatcccacttgytgatttttgttttcctagcaattgcttttgaggacttagccaaaattctttgccaaagtcaatgttgagagggtatttcctaggtcttcttctaggatttttatagtttgaggacctacatttaaatctttaatcctttttgagtgactttttgcataagttgaaaggtaggggtccaattacatttttcagcatatgcttagccagttatctcagcacaagtatcatatagggagtcctttctccactggttgtttttgtcagccttgtagaagatcaaatggttgtagacgtgttgtaggtggttttatttctgagttcgctattctgttccacatcagtctatatgtctgtttttgtaccagtactacgcattttggttactgtagccttatggcatactttgaagttgggtaatgtgattgat

SEQ ID NO: 838871 - DNA, 551 bp, Homo sapiens
cataaaaaagaaggaaatcctgacatttgtgacctggaggatattatgctaaatgaaataagccagacacagaaagagaaatactgcacagtctcacttatatgtggaattaaacaaactcagaatcayagaagcagagagtagaatggtgattgccaaaggctggtggggttggtgggggagttgggagaaatggggagatattggtcaaagtgttaatatattgtaagataaatacattctgaagatataagacacagaatgagtgacaatgaaggtgttcattaatttcttttaaataatgttgggctttgttctaacagacacttacataacttgcaggttggcttaattatttacagaccccttcataagctttttaaaggtgggactagactagattttcctctaagcctgctttagccctactgccattctggggtatctactaagtgctctgtggttcaccctccactttgcatgattgggactcaaatgtctcacagaaatacataagctctgcaaattgctcagcttacaactccaagttt

SEQ ID NO: 838872 - DNA, 626 bp, Homo sapiens
gttttgacatgatcttcagaagattctgatgcatgtaaagtttgagaattacttctttagggattaatagagcagcaaggtagaaggcccctgagtctcyagacaactttatgaagcagagataacacatattttgtatattatacagcagagccacctctcctccatagactgcccactcttacatgagagacaaattctattttgcttgagccgccagatttttgtgttcctttgttgtagcaacttagcaggcactctaattaaagctgtagaggaccttttgacttctcagtttataaccagcccactttaatggggaaataacaagcaaaattttccttgaagagctatgaataatcaaacagtatttacagaggagtacgaaaaattgactggctttcaattaactggatctattcatcaaaaacacatataatacacactcataaactcgcagacacacattacacataaatttttcattcacagaaatatgcttctcggaagtgaagtaattcagaagtaaatcacgtacaatcagaatgatacacaaggtatacttaaataactttacaattattcatatcttagaactagaattcacattcttatttatttgattc

SEQ ID NO: 838873 - DNA, 582 bp, Homo sapiens
agtacaattttatgacctgtagtctttatgttgtacattagatctctagacttgttcatcttaggtacctgctactttgtatactctgatctacagctcctcattttctcccctcccccacaacccctgatgactactgatttattctctacatctgtatatttcactttttgatttttcttctaatatttcacatgtaagtgagattatgcagtattcctccttatctgtccagcttatttaactgaatataatatcctccaggttcattcatgttgtggcaggatctccttctttgtcaaggctgaatgatattcctataagtatgtgtgtgtgagtgtgtgtgtatgtgtgtgtgtgtatatatgtatatatacatatatacatatatttgtgtatatatatttatatatacatatatacatatagatatatacgtatatacatacwgttgacccttgagcaaaggagggattaggggcactgattcctcttgcagtcaaaaatccacttctagcttttgactccctaaaaactgaactaataataaagtactgctgactgccttaccagtaaaataaa

SEQ ID NO: 838874 - DNA, 582 bp, Homo sapiens
agtacaattttatgacctgtagtctttatgttgtacattagatctctagacttgttcatcttaggtacctgctactttgtatactctgatctacagctcctcattttctcccctcccccacaacccctgatgactactgatttattctctacatctgtatatttcactttttgatttttcttctaatatttcacatgtaagtgagattatgcagtattcctccttatctgtccagcttatttaactgaatataatatcctccaggttcattcatgttgtggcaggatctccttctttgtcaaggctgaatgatattcctataagtatgtgtgtgtgagtgtgtgtgtatgtgtgtgtgtgtatatatgtatatatacatatatacatatatttgtgtatatatatttatatatacatatatacatatagatatatacgtatatacatacagttgacccttgagcaaaggrgggattaggggcactgattcctcttgcagtcaaaaatccacttctagcttttgactccctaaaaactgaactaataataaagtactgctgactgccttaccagtaaaataaa

SEQ ID NO: 838875 - DNA, 493 bp, Homo sapiens
ggatattatatctcaaattattttctgtgtatrctgagagtaggaattgagacttgttttttttcccttatatatttactcagttgtcaaatcaccatttgtttaaaagactttcctttccttattgaatttacttggtgcctttgctgaaattcatttgaacaggaggtctatttctagactctttattctattcttacaattgtctattctaatgtcaacaccacacagtcctgattatgatagctttatagtaaatcttgaatgtagacagtgggagtcctccaactttgtttctctttttaaagattatttgactatcctatattcttaaatttttacataaattatagaatcagtgtgtcttttcttcaagaaagcctcctggagttttgagagtgattgcattgaatctatatatcaatttaaggagaatagatatcttagcagtactgagtctttcaatgctgttttaattcttttttaatttttc

SEQ ID NO: 838876 - DNA, 575 bp, Homo sapiens
gtgaaagactgaaagcttttaccctaagagcttaaacaaggatgcctgcttttaccacttctatttaacatagtactgaaggttctagttagttataaagataaggcaagtaaaagaataaaagatattccaattttttaaaaagtaaaattatctgtttgcagatgacataatcttatatattaaaaatcttggccaggtgtggtggctcacaccagtaaccccagcactttgggaggccgaggggggcagatcatgaggtcaggaatttgagaccagcctggccaacatgatgaaactccgtctctactgaaaatacaaaaaatagctgtgcatggtcacctataatcctagctacttgggaggctgaggcaagagaatcatttgaacccgggaagtggaggttacagtaagccaagatcacaccattgctctccagcctgggtaacagggcaagactccatctcaaaaaaaaaacaaacaaacaaacaaaaaaaaaaaacttrcagtttctctgaaataaactgtcagatgcaataaataaaattcagcaaagctgcgggatacaaaaatca

SEQ ID NO: 838877 - DNA, 635 bp, Homo sapiens
ccatcagtctgccagccagaggggccctggactaaactgcaatccctggcccattttagttcttcagagaattctcacccagctctatgtatgctgaccagcatgcccatcagcttcattgcccctttcagtgcggtggccttggctgccgcatctgtgagggcatttccttttacatggtcagtctctcttttgatgtcctctacaatgaattatagtcacttttttttttttttggcagcaaagcagcattctaacaaactcaaaacctgagtgatgttgtctagaaaagcccttggtggtcaggagtccctacccattccaaattgcagcataagtatgaaacgctaaaatatcacacttggaatcggtgtaaatgttaacttttaaatcccttcccaactgcagggctgtagtaagttcagttaactcagctttttgagctgaggttgaggccagcaaggcttgtgccttctcttgtgctgactaataatagcatatctagccctcctgttttcctgatgcataaaacaacttgcatttgttaacccctcttccttgggatggkgaaggggctcatctctcttcagtctggcctgctaaaataaatttgtttcataacctgtgacatggtt

SEQ ID NO: 838878 - DNA, 635 bp, Homo sapiens
ccatcagtctgccagccagaggggccctggactaaactgcaatccctggcccattttagttcttcagagaattctcacccagctctatgtatgctgaccagcatgcccatcagcttcattgcccctttcagtgcggtggccttggctgccgcatctgtgagggcatttccttttacatggtcagtctctcttttgatgtcctctacaatgaattatagtcacttttttttttttttggcagcaaagcagcattctaacaaactcaaaacctgagtgatgttgtctagaaaagcccttggtggtcaggagtccctacccattccaaattgcagcataagtatgaaacgctaaaatatcacacttggaatcggtgtaaatgttaacttttaaatcccttcccaactgcagggctgtagtaagttcagttaactcagctttttgagctgaggttgaggccagcaaggcttgtgccttctcttgtgctgactaataatagcatatctagccctcctgttttcctgatgcataaaacaacttgcatttgttaacccctcttccttgggatggggaaggggctcatctctcttcagtctggcctgctaraataaatttgtttcataacctgtgacatggtt

SEQ ID NO: 838879 - DNA, 570 bp, Homo sapiens
gggtttttcttcagtcattgacatcatcagcrtgtcctgtttggccttgtccggtttgctgggagcctccaagattctctctacgacaaggaaaggattagatgtaaagaggagagattcagagatatatgtcctatctactcagtctgggccatccctatataaatctccctgctcatcacacatagctgttgcccccgaaacaggaaattgagggacagagaaatctaaggaaaaaacaaaactcctaaatatgactcctcacacctagggtcaactgcaaatcccaggcaggactcttcacggtctgatctcaatccctccaacactgtgtctcatcctgcacaacaaaccctccatcccagctcctccttgccccatcagcacccattccaatttcctcctccaaaccttgaagttttatccttgcatcttagatgctcttggtgtttcctttcaatcttgcatggatcttattccaggcaatatcttttaccctaaaatatcttctgtagttatggcattgccaggtgcatttatatttaactttgaatgtgctcatgggctcag

SEQ ID NO: 838880 - DNA, 618 bp, Homo sapiens
ccatatcttgaactcttttctgcttagaaatttcttccactaaataccctaaatcatctctcctaaatttaaagttccacagatctctagggtaggggcagcatgcagccagtctctttgctaaaggatagcaagagtgacctttgctccagttcccaagaaatttctcatcaccatctgagaccaccagagcctggaattcattgtccacatcattatctgtattttggccaaaatcattcaataagtctctaggaagttctaaactttcctacatcttcctgtcttcttctgagccctccagactgtttcaacttttgcccattacccagctccaaagtcacttccacatattcaggtatcttcacagcagtgccctactcctggtaccaatgttctgtattagtttgttatcgcactactataaataactacatgagactaggtaatttatttaaaaaagaggtttaattgactcacagttccacatggctcagggggcctcaggaaacttacaattatggagaagttgaagggaaggcamggcacatcttaccatgatgggcaggagaaagacagacaaaagggggaagagccacacttttaaacactcagatc

SEQ ID NO: 838881 - DNA, 446 bp, Homo sapiens
gctggtgatgtagtagtaagactatgggctttgaaggcacatacatytgagtttatgttctgccttcaccactgtgtaaatgggagatcttggatagtttattaaccttggcatctcagtgtgattatctataaattgaagttatgaacacctacttagcatctccagagtgagggtaaaatgtcctaataaaggtatgtgactagaacaatggctgccatatagtaattacttggcaaatgacaggcatggcctagaaacagaatactcttcccatttttgttgttttgagacaaactcaaagatggccttgtatattccataacaactttagcattggcctcctaatttgtattttccttttgttctaccattatttgaataacttcagaattaccctgattttttaatatatatcacatttggaccacattatcattaataaa

SEQ ID NO: 838882 - DNA, 588 bp, Homo sapiens
taagtaaaagtatgtcacatttaatattttggacatatactaagaaattttgttactaacctgaaaaattgagctaagcaccctgcaccrtatctggtaaccctcacgccaactgtatacttgccccatgccatgtggatggaaagaaagtaccttattgtaaaagccaataaggctcattctctcccttagaaaatacacaatctagcagggaaagagatatgttgaagtgacataataatgtgaaataaaactgcaataattgacacaggtaatattaatgggctctgtctgtcatggtgtcaggcactgagctgcatcttttacatatatgacctccgtcaagtctcacagcaccttggaaacagccttcattattctcatcacttctttgtaggtgaggaatgaaaccacgtgaggataaatgaattgctaagattatctgactagggctgaagtgggtttcagacacgggcttgttggcagctgcctgcctttgaaccacacacactgtcacgcccacaaaggttacagaaagacagctggctgagccaactggacatgggttgacataaaaagacagaaggg

SEQ ID NO: 838883 - DNA, 613 bp, Homo sapiens
gttgctatgggcctacaagaagacactgtttttgagcagctggggtctgtgtcccgggagttattccggtggctgtcctcagtgggatttccttgtgcattttcatcaagtgrtgggaagtggctgtgttatttacccaggctttgtttctgggcacttccagcatataggaacatacataaacacacacacaagtacacactctgttctaatcctttatgttcagaaaatgtaagggaactaaaaataatttttttaatggaaaactaaaagtaaaatcctctaagcaatgccttggaaaataaaaggtgctggggaggccagcacataaacactcaggccatggagcccgtgcagtgaccaaaccaaaaataggttatatgttcattacattaatcagtttctgtctaatagtgctggctatttattgaatggacactataagctaggttctattctaagcacttctcgtgtcctaactcattcaatccttaaccatactctgtacaaaaagagactgttagcaatgccattatacaaatgaggaaactgaggcagagggagttaagtaatttgtttaagagcatgcaacacataaaagtttatgttggca

SEQ ID NO: 838884 - DNA, 571 bp, Homo sapiens
gcattagatgctcagaaaaagtgtgcaacccagatcccttgcatgcacagttcacagttggatttgcactcctatgagaatctaatactgsggataatctgcaggaggcagtgctcaggtggtaatgcgaatgatggggagtggctgtaaatacagatggaagcttcgctctcctgatgctcacctcctgccgctcacctcctgccgtgaggcccagttgctagcaggccatgtactgctaccaatccaccactaccaatccatggcccaggggttgggacccctgtccaagggacgggtgggcttgtatgcctgctggttgagagaaaggtccctgcaaaaggctcatctgagatgtattcgatgctggccatgcagtggacacaaatgacctgccacggtatgagtaagactgcctagttcaggagctaagtggagaagattctgcagaaataggacactagtgattctatcttataacaaaacaaacagcttctctatttctaaggatgattactataagtttcattccacatatttctaaacacagaaaaacaaatcctttgaaaat

SEQ ID NO: 838885 - DNA, 609 bp, Homo sapiens
tttcatctaataacaattttacatattagtaatggttataactctttaaaggtttttgttgttgttgtggttaagacagggtctcattctatcacccaggctggagtgcagtggcaagatcacagctcactgcatcccctatctccctgggcttaaggtaatcttcctgcctcagcctcccgagtagctgggactacagttgtgcaccaccacgcctggctaatttttataccttttgtagagacagggttttgccatgttgcccaggatggtcttgaattcctaggctcaagcgattcactcaccttggcctcccaaagtgctgggattacagttgtgagccaccggtcccggctctctttaaagtatttgatacctttttaaagtattgtttgaaccctaatattagaaaaaaaactctaaatactgtggcatctaatcaggttacaaatatctcataatattatgtcaaaatatttttatataaacagggctaaatctcctttactcaattaaatagataaaaattagttatttagaaaggcatactaatgttttatgtaaaatgmttatcggttaaatagaatttactacaaaagggaaagcaga

SEQ ID NO: 838886 - DNA, 659 bp, Homo sapiens
gttgatcttttctctataatgccctatcacagaaatgctactttaactcccacgcactgacaccatcatttttactggtctggaatctgagccactctgtgccccmaaaaaggcctgtgtccttctctattcctccacattttttacatcctcctgccagagaacagcaaactgttcagacccctttccatatgaagggcccaaataaaacctgtgcacattactcttccattacctcctcacaaaaaccttcctccagccactttcagaaaacaaacatttccatcccaagtccttccaatgaccaacaggagctcacaaaacttgcggaaatgtaccttttctaggactccactttcttaaatttaataactagtaataagtattacatacttccttattattctggcactagtcaagttagaccttcaaacaatgtgaactaatttgtttcccaagtcctcagtttatttgtatttttatgaattgcgtcatattttccaagaaagtgaatcagaagctaacagctctccattaagaacaagaacgctgtccacagcactttgtaaaatgctgtgatgaggagtacaatttaaatggaatttggtactatacgtggcagcaaaacacaggatttgctggaggcttttgcttgttaa

SEQ ID NO: 838887 - DNA, 657 bp, Homo sapiens
ggagacacaaagttccaaaggtcatggcatccccatgagatttactaaaagctaataagttggatcttgaatcatcattagcccatattcagcctgtattacagaagcctagaagttcataccagaagagatgtctttgaagagaatttttaggagtagcaagtgctctgggaaatgggatgaggtcctctttctgtactcagcctcaagtgaaagtgagttcaaacagaaaatgcttttcttctaaaactccaattcagacctgcttcttgttattgtcagcgcaggactagagatttttggaagaactttgcatggatacttgtttggagttcctgtgcctgtgtcatacaggctggataagcttaatttccaaaggttgcagtggcaaaaattgtgaattttcctaaggactaagtcagttgatggagactactcagattgagcctccttgaataagtaaataagtacatagttaaagagaataaaagggtattatagggtgaaaaaggtagcaataatttatgtgcaataaataaaatatacttttcagtgatargaaaatgaatacagagattctgtttcaggaaacttgacatatcaaataatatagaaaaataagcaaaaatgctctttctacaatatatatgagaagcc

SEQ ID NO: 838888 - DNA, 570 bp, Homo sapiens
taatttctatcttctgcactgcctctccctaaaggaggaaggggctagcatttcttgagtatctacaaagtccaggcacagagttggcacatatgtacatgttaatggtgaatcctcccaaacacctgtgagatwggctgtgctatgctcattttataactgaagaatctctggtcctgttaagcagcttgcccaaggtcacacaccaggtaagtggctttaaaccctgagctttaaacctaaatcttctagctgtaaatctcattgttctgctacaacataagaaactgtattgatgtagcgttattctgtactttgttttattaaggttcaaatttcgttgagcatataattgtatactatcataactactgtccaaatatattttggattcgaaacttacatacctgtaagtgtcaaaaaaaaattctgtcaacttactctggcctggcatctgcacaatgacattattgctgaactctgcaaagagtaaatcataatttatcctgtggtatttcttatagctcccctaaactttttcttacccaatgctattcctggactcctgtc

SEQ ID NO: 838889 - DNA, 551 bp, Homo sapiens
aggttatcgtgatgcctctgctgttatttcacgggttttatggtaccrcgccacacatcgcatactctctagccagggaacgcaatggagattgttgtgcctgcttgcaaggtctggagccagggcagccgtattgggcccaggagggaagatatccaagaaatacatgctgagaatagcagcactaaaaatggaaagagcctcagctattcaccatgtcactggcttgccgaagtgaccaaccccagagcttctctaccttggaacttcttgtgatgtacgttgataaacccctggtagctcaccccagctggggttgaatcttctgtttcctgcagctgaaggcattccatctggcttgcttctctcacgtgattgacccattgtcttcctggtggctaagaaacatgactttctcatgccaacagtgaccatgagcactgcatcagaccaggccccacggctgatacaaggagttcccaggagacaaagccctgtcttgggaagtgaggttagagagacaagacagaggggcgtgggaagttgacagc

SEQ ID NO: 838890 - DNA, 422 bp, Homo sapiens
actgagcaccaaactcccttctgggagggaagtccagccctgctgaaggcctcttgcacagaatcacagagcgtaagaaagcaccctctgattkagatctttgattccccaggcatttacagcaatgacaaaggacattttgtgacaaacaatggcattttcattctgcgacctcaattcaaaaggtcagaaatgtgccctgaacattccctggagagtttgttacgggtcagtcatccttgaaattaggctgctggacccagacagacctggctgcagaccagtcctgcctctgcctcctgtgtgatcgtggggcacaggacctcggacaagtgtgtctctccacgttcaatgtcttcacatgtcaacagaaggacaaaggtgttgtgggttggtgttggggtgtttgttttttttttttt

SEQ ID NO: 838891 - DNA, 534 bp, Homo sapiens
gcttagaaaatctagagcaggtggaaaagctcaacaaggtgttgggggagtgaattttaaatcccgggggatattgaccatgtctggggacattttttgttgtcatgctaactggggtggggtacgactggcatctagtgggtggaggccaggggtactgctaaacacccccacagtgccctggatggcacccccctagctgagaatgctccagccccacatgtcaggagagccacggtggtggataggccgtgttccaacactaaagcaaattcaagactgtgacatcagacacaatagcgggacagacacaccccagtgggatttgtcaggataaatgcaaaggaccctttaatatgtagaatagccaggaaaggaaaagaggacccttaggtctctggagcttgatttgcccaggatgtcttgagcaggaaccatgaattctgtgaaatcaatattccctccttcragtcctctctctgccattgaggtttcttaaatgtctgaggccaaaaatcacctgctagcagctcc

SEQ ID NO: 838892 - DNA, 191 bp, Homo sapiens
ctctgcttcccagcccttccttgatcttggtgaccacacggtgtggcaggacaccaagttagcaggtaactggtggcgtttccataggctcaagaaggagcgtatgttctgagccccgcatcacagagccggtgtgaaggcactgagattccctgagcaacgtggccctsaccgtcttcccctgccatgaa

SEQ ID NO: 838893 - DNA, 659 bp, Homo sapiens
gttttattcacggactaagaaataaggattaaaacaaggagcaagggaacaaaggcttgtcgtgcaaggaatggatttgcctttcgacccagaagacaggccatttatttgaacragaactctcacaactctctctttatcccctttggagcatattttatgtcgccaagaatttcaaggcgattaaaaccagcaaagaaacaaatcctttaaaattgcctatttatagcaaagggtaggcaggttttcaaagcagcaggagtggcaagactttagaacctcttttgaagttgacagccggcaggatttactgacgctgaacacacaatccccctgtgacccagaaattacacttctgggcagattcccaccccaaacagggatacgcattcaccaaaaggcacagtctcgaatgttggtggctgtcctgccgaaatgtccatcgatggtaaaatgggtaagtgaatcaggacagtctccccgtggaatactacacagcaaagaaaatgagaatttggcaaccacacagtcacaagcacaaagatgatcaaaaaagtccacatgccacagccataaactcaaactcaaacgacttctcagtggtgacagaggtcacattgtggttcctgggaagggtagttaccagaatggaggaaaac

SEQ ID NO: 838894 - DNA, 644 bp, Homo sapiens
tacgtgtagtgtccacactggcaaacgtggaagtctagcttgaccttgaccttgggctccgaatctcccagaggtgaaacctggacatctggagccttagagatgcccacacaggactctgatgacccacaaggsattcgatagcccagctggtctgcagagctggctgccctaattcctggttcctctgtctgaatctaggtgtaatggcaagaaatctctgttgatcagctattctggagttaggaccaagggttcacagttgggccatcttgcatctgaatgctggctccgtcatacaagagctgtgagacctcaacaagtcacttctcctctcagtgcctctatagaatgagggtgggaacagcatctaccacacaggatcatgtgagcagaaaacaagccgtggccaggcctggcacagaacaaaccctccatcacgtctctccacgcatggggaaccgattactctcaagggaggtgagactatttttagacatctgctgcaggttcacaaccccccacacggcccagcccccaaaggaatgacagatggcatctcaccctcctgagctggccctacaatgccaggcagaagtatcagctttgaaagaacaaggactgaaaccttccctggtatatgc

SEQ ID NO: 838895 - DNA, 614 bp, Homo sapiens
aaaagataaactacaatgattccaatctttgagatatttcaggaccctatctactctcattattttattattttatttttatttatttatttatttattttgagagtctcgctctgtcgcccagactggagtcttggctcactgcagcctccgcctcttaggttccagcaattctcctgcctcagcctcccgagtagctgacattacaggcacatgccaccacgcctggctaatttttttatttttagtaaagacagggtttagccatgtaggccaggctgttctcgaactcctgacctcaggagtccgcccacctcagcctcccaaagtgctgggattacaggcatgagccaccacacttggcctctaccctcattattgatggtagcagtgggctgtgcggagtggccaacacaccagctgtagtggggaaatggggaagtgtagccggtggtggcagaagcggctgcaggaggagcagtggcagccgtgggtccccatgtgccctgcatcgtctgtgccccatgtccgagagagagagagagagagagagagagagctctcacccctcmccactccacgcctggcttgcatggcaggcatgggatccaggc

SEQ ID NO: 838896 - DNA, 601 bp, Homo sapiens
attttaatttcaaatgcattattcattkctgctatatacaaaagcgattgacttttgtatattttttgtggtgcaaacttactgtaattatttcttagattttggagttttttgttaacattttaatttttaatatagccaataagacatctgcaaacaaaaagagttttgtgactttctttccaatatgataccttttatttccttttcatgtcttactgcattagctaggacttccaatatgatgttgaaaaagtgtggcgagaggggctatacttgccttgctcctgatcttaatggggaagcatcttctttttcactattaagtatgctgttaactgtagattttttgtaaatattctttatcatgtttaaaaaaagttccactctatttgtagttcattcactggattttgtcaaatgtgtttctgcatctattgctatgattatgtgtttgtcttctttaacctgttgatgtgataaattacattaattgatttttgaatgttgagccagacttgcatacttgagctaaatcccactttgttgtggtgtatgttctttttatgcactattagagtcaatatgctaatatttcatt

SEQ ID NO: 838897 - DNA, 641 bp, Homo sapiens
aaatgttaaagagccctctcaaagaaagttatgctttatttcaagactatcctaattagtaatttgattttacactataatgcttattgaatttctgaaggctatgcaggttgtaatttcaaagttgaggagtctcatggagtatttatagagcaagggcattaaaatcatgcctaaaagcaattgtgaatgtgacagaatacagattggaacaatcaactatccaaacattctgattaacttttttcataaatattctttgtagtgctgagtttgctttacttatttcaagatgcaataaagaaacagcttagaacagaggactgattggtatatgtttaggtgtaactgtggtttaacttcgcatcttattgtacctctactcacagattggcgggcctaaccccagcatgtctgatccaggtctgatatggggtctgagaatgtctttctatgtccccagatgatgctgaggctgctgtacgtgcactacattttaagaaccactgccatagagtgtasatacttacatctctttaggttgaggactctgtatgaagactcaaaatttgcatttaatatttacttagaatttaatgttaaattaatctttaaagtaagaattaatttaaagcacgtag

SEQ ID NO: 838898 - DNA, 379 bp, Homo sapiens
cccattttacaggtcgaacaagtgaggcttagagggatcctctcccctaatcccacttagcccaccactgagagagaggaaagggcctgcccatgctcacagagacgacggcagaactcaggcttgagtccatggctggtaggctcaggcagggctgaattccagacagttactcaaacttcaagactttagaccagctttgaaaatcccaagctaggtgaaaccctacaccaccgttacttagtgcagggcagtggagtgtgggcrtggtaggtcagggaacgacttattcagctaatgcttccaaaaccctccccgctaaaggagaagcatctggagactaaatatgtaaaatgacattggctatagagtcccacca

SEQ ID NO: 838899 - DNA, 377 bp, Homo sapiens
ttctcatgaaaataagttaagcaacaaagggtcaccccacaggttaaatttagtaatttatttacccatacatcttttaagagccacttttcctgagaggcatggtggtgtagtagcagtgatgctggctagggaatcagatgacttgcttccaagcagcgtgaccctaggcatgtctctggcattatctgtggctggttctttagataatatctaaagatgtctccagatctgtggttccatatattttagagcaatacacaattacctggcttcttttctcactgcttattcaaaggaacactagaactataatcatgrgagctcctgataagatttaaatcatggatagctggaggcagatggggtgggaaggg

SEQ ID NO: 838900 - DNA, 385 bp, Homo sapiens
ccctgagcccagcatcgctgggacaaaggcagaaggggctatcttctgttcaagacctgctggctgacagttggaatttttgatatatattttatttggcgtttccaataacgtgtttgtctttccctctccaccccttgcagccatctattacttttaaaacatcccttctccataaacatcggctcatccttgtgaactattcttgaccttcccagcagtgtaaccagcagctctgaaagttggcctagaaataattccactggcttccttacctgttaaytttactcactcttcctagctgggatcaacagaaggaaggggacttttttgtttgcttttgttgttgttggtggtggtggtggtggtggtggtttttggttct

SEQ ID NO: 838901 - DNA, 659 bp, Homo sapiens
gtatactcctaatgattgcagccttttagcaatgtaaataaatattcctttatttcttagtgttccataaagttgttttcgtatatttttttctgcccagasacttagcaaagctttaacctcctcctcagtccagtgctttcctgctccactctccatgttgaaagtgacctggaaatgattcactatttccagccaaggttttgtttcctaggaaaccacatggctggttgtcaataagctccgaagagctgaaaggatgtagtttaactggttcaagctgcctgagggagtaacttgagaaactgccaaataagcaggctttgtgattaaagaagcctggatctaaatgattcttaactatatcatttcagcctgaaggaaaaacttcccttgagacaaaagggaaagaaaaccgttttttgtgtatttcttttcttacataatttactgttttaccaaatgattgttgatttttaaaaattgttttgaaaatggttggcagaggctttttccaagaggtctatagccaatgttaataatatatttcctctgacatgaatcacctagtcctctaacattggttaacttacagaccccacagcatttcactaaataaaagaaatcataagtcaatttatttagtcccatatggtata

SEQ ID NO: 838902 - DNA, 567 bp, Homo sapiens
cgcgcgctgctccctaggtggcgtggcagctcagccctgctcctccccctccgagtccaccaacgagcgagggcgsaggggcggtcccgcggctgaggggcggggtcacggatgctgtagggtggagctagccttcccctaagagctgcctggaaagctgtatttgctgcacgtggaaatctccgttattttccagcacccaacagtagcgtaatgggagtaacggacttaacctcatttctctttcagagcatttagccttcatatgcccttccctgcatgcttcccccaggccgtcaagacttggtacgctccaacttctgagtcgctcccgcagccgagaaggggccggggtatgcgagcttccgcagagtggggaggggccgccagtgcgcgcacttttcgcctgtccgggcactgcgccagcggggcggcccggaggcggggtcgcgtctctgcgcctgcggcgggaagccagtggggcgttgtttcgtccgatatccgcgtttcagtctccgcccatacccctccgggttaggcggctgtagcggactcgaaaagagtggc

SEQ ID NO: 838903 - DNA, 516 bp, Homo sapiens
ctgtgctttatttttcagtcgactaagcagtatgttcctggtaagtcgtagaagtgatagtaactttattaacttgcatgaatgctttgcatttttccatgacaacgtgatgctggtattgatgcttagtaagcagcctaagagaccgcccccttgtagatgccagcatggaatgagagaatttagttgtgtctgaggcatgtatgtttttatgtctggaattgtctttgtgtatgtgtgtatgtttatttttaaaaagagagaagtaatggaaaacacctatttgacagtgtatgtcctggcaagctgattagccaccattattaagacattcttctgagatgagatgtctactggagtgccttttttctctgtggcttaagaaacttcccagcccttcgagttcctagagacccacggaagggtgtctgtctgtaatgcctgcctttggaaaggytgccctctagtgcctgcacatggtgggctcaccgagaactgtcttagtttgcaggttgg

SEQ ID NO: 838904 - DNA, 499 bp, Homo sapiens
tgtgagggagctatgtagtttttttatctttgtagctgtcttatttaggaatcaaatgggaggcaggtttgtgtgacccagttcccaacttgacttttcccctttggcttagtgattttgggatcctgagacgtattttcctttcacagtaacatctattcctcgactagttgttgtagtctgggaaaggaatacacagccttgcagatgtaagttacattctcattcctgaatctaaaagatgcaatcatctctagtaaaattataatgattcaatatgagagggaattagttcttcaaaataaaattataattactttatgaaataaattattgcagtggaaagagaaccaggaatttatgaggaaaaagggaggagggaggctaggggccagacactggacaaacataaaagtataraagtatatatccaaaagatggtctggaaatattagcatgggtcaccatattccttaggttgacttacaagtctttttgc

SEQ ID NO: 838905 - DNA, 610 bp, Homo sapiens
tctgaaaatgaaaataactgacttatctcatttcttatgactattaaatcatatacagtactttgattatttcttgacacaatgamggcccttagcaactaataattagtgttatcattagctttgctattattgtttcctgagtgcccagagcagtgcctgacatgtgataaaactgcaataattcgttgtttggtgaaaaatttaatgaaataatgaatacataaacaaatcaataagttatagaaatagcattataataaattatgtttacataatagtgtgattctggtaaatatcatagaaggactaacagacaagcaaataaatgtccttggagatagtcaacatggattcacagaaagcataaaataagaaaaattagttgacttttaatgtaatataccagaaaattaatctgcatacattgtctatatatttgaaatctcagaactcatagtttctatttattctatttaatcatataaaatagctttcttttttttaaattataaattttattgttctgtgttattggaggttgtattaattaggataggctaggttatgttgcattataattaactacatagcaaatacaaatagtaac

SEQ ID NO: 838906 - DNA, 663 bp, Homo sapiens
ctgttcatgaattttggtgaaggtttctctacatttaggggcattgaataaagaagcagaattaatattttaccaatatattctgaacttgaaaaatgtagtttctggcatttttggatcyttttttttttttttttttttgatgcttctctaagttgagtttctcaaaaactgacaatagaatgaggacttgagttaagtaattcatgaaggaagtgctcccataagaaactattagaggagtgaagaaagcaggagagaggagagaaatctaaacagtttttattttcagcaaaatcttaccctcagcttcatcatgctggggacttctggctgtaaattttgttttagatttagtcccaaatccaagacactcttggctaaggacttctctagattagcacaaactcagacaattctgcatctctgcatgtataataaatataataaatgtgactagaatagctgaaaagcagaccttcgaagacagtcacaagtttgagtcttctatagttatctctgcaattctgtgacccactcccctattatattaacttcactctgtcctgttagagttttctcaaggtggtgattactcacaatttctgcagaataattttcaatacaatatttagaatgatcagttatatctagctaccgtag

SEQ ID NO: 838907 - DNA, 614 bp, Homo sapiens
tgttcatgaattttggtgaaggtttctctacatttaggggcattgaataaagaagcagaattaatattttaccaatatattctgaacttgaaaaatgtagtttctggcatttttggatctytttttttttttttttttttgatgcttctctaagttgagtttctcaaaaactgacaatagaatgaggacttgagttaagtaattcatgaaggaagtgctcccataagaaactattagaggagtgaagaaagcaggagagaggagagaaatctaaacagtttttattttcagcaaaatcttaccctcagcttcatcatgctggggacttctggctgtaaattttgttttagatttagtcccaaatccaagacactcttggctaaggacttctctagattagcacaaactcagacaattctgcatctctgcatgtataataaatataataaatgtgactagaatagctgaaaagcagaccttcgaagacagtcacaagtttgagtcttctatagttatctctgcaattctgtgacccactcccctattatattaacttcactctgtcctgttagagttttctcaaggtggtgattactcacaatttctgcagaata

SEQ ID NO: 838908 - DNA, 591 bp, Homo sapiens
tgaaaaaatgatcaaaaaaaraacactgttgctgttagatttttatgatttttcctgttattggaaagttatttttgtataattagatgaattcagatttatgactagattatattataggcaaccatagaattcaagaactaaatgtaattagacaaagatgtcaatcactctcacattagaaacaaacttttatttagacatgcatatgaaacacctaaatgagcagaaagacctgttttcggtgcttgaccacactgtagtatattataagtaatacattgaataactcctttttacctgcgtaatttggaaaattatcaccataaaaatattgaaaatctgtatgccatcaaaatctatttttaaagaacttcatcagctgtcaaaccatgacagctcttctctgcataaaaatttgcgacaaagacagcaataatgaatttctagagctgtgccactacttgatattaaaactgtgctcttctcaatttggtgagaaaagatgctgcctggctgacaaaaacagttcctttatcactacagaaaatttgagaggagagtatattctgacgtaaaagagccaagcaa

SEQ ID NO: 838909 - DNA, 560 bp, Homo sapiens
tgaactgcattggtaaggcagcaaaaaaggagggggaggaaattactgccaaggtaaagcttcaacatccctaataagcggtgtttatttactccagatagccaaagagtaggaatgaaaaggaaatggtgttgccaaaattaactaatgcaactagtagaattaaaaaggtcaagtatcaagctgtggagctcctcattcttggagctgattcctttttatgaacctaattagtacttcacttgtatacacaaggcccctcatttttatgcaaatgaatttgtaccatctgttcggtttactcctaaatacatatgaaaatgttttactctcccactcagtagaatgggggataacagagctgctcaaacatctaggctggtcaataataacctcatgtgtatgtaaatagtttgtctcacacaatactagcacagaaagcgcaatatgaatcatgttactataggaygtataaggcataaatgctcttttcagttttcatttaactgtgattttctggtctatggctagaatggcaggaaagaaatacataatcgata

SEQ ID NO: 838910 - DNA, 574 bp, Homo sapiens
aagaattccctaccaccacacaattctgataaattatgacaggacacttgtgagctcttcaggcttctgtagggctaatgcccattccactcacataggtacatgaggagtttattgctcagtaacatttcttgatctaaagtacctgtcactacttgtcacattgcatttcagactaaagatcagcctgcagccttgactcaaatggagccttgagcctcctgagagtggttctgtttcatgcagctgcacttcaggcttgtctgtcccaggttagggctctcctgcctcttagactgcattgctccaggcgaggctgtcattacagttgtttcagctaagtgaaggaaaggaggcctcaacaggcagtttttttcaaagcatgtaattatagacccattttgaaagttaaatctattattggttctctgctttacccatttttatgtcagactttgaaagcatacttatcaaatgttcagattgcagtatccatctgatattatcagrctctaaaaataatgtgattaaagactaaataaaagaatggttaaatatgacaaaactacaaaaa

SEQ ID NO: 838911 - DNA, 599 bp, Homo sapiens
ttcttttctatcacattgtcaggctgcacattttttgaacttttatgctctgcttcccttttaaacataagtttcaattccaaaccatatctttgtgaatacataaaactgaatgcttttaagagcactcaagttatatcttgaattttttgctgctgacacatttttttttttccactagataccctaaatcatctctctcaagttcaaagttccacagatctctaagacaggggcaaaatgccaccagtctctttgctaaagcatatcaagaatcacctttgctccagttcccagtaaattcctcatctccttctgagaccacctcagcctggactttttggtcaaattatttgacaagtctcttggaagcgccaaactttatgacatcttattgtcttcttctgaaccctccaaaccattccaacctctgactcttatcaagttccaaagtcgcttccacattttcaggttwcttaatagcagtatcccaatctactggtaccaatttactgtattagtccattttcatactgctataaaaaagtgcctgagactgagtaattcataaggaaaagaggtttaatggactcacagtt

SEQ ID NO: 838912 - DNA, 614 bp, Homo sapiens
tctgaagaaacaggactggaggaattcacagtaatttgagccttgtccctcttcaagctccagaaagaaatatactgtgtttaattgaagtagaaaaggaatatcrggctttgtttgatcaggacatatagtatttatgtcctggctaatttcagacactggactagtttacaaaaagtaggtacaagacagagagattaaatttgatcattattcttattttgttgtttggggatgttagttataacttcttaaatgtgatttaggctgaattgggaatttcttccatgtatctatgcaaagatccttttgtatttttgacaaaaaaaaatttataggaaggattttaaaatatatttagactagataccatatctgttgagtgaaacatcaccaaactaatgcttttttaatattatgcttgggagtacattgttgcctctttgtgtaaatatgacatccaaaagagggagttacacatctgttttattccctgtaataaaggtgatttctgggaattgtttgctaaataaatccacaataagatgtacatcatttttattgatgacatgggagatgtcatttataaagcttaggtacatcattttcttatt

SEQ ID NO: 838913 - DNA, 554 bp, Homo sapiens
aaaatgtatttcaagttatacacaactggtggctaactgcatgataagtagtaataagcaacatttatttttgtttctttttatttagatttttcttttttggaacagaagcacataatctgtgagtagctttgatggtgagaattgagagtaaatatcacacacagaaaaatacaaatgctttatttaaggcagattcaaatctattctaattcacctcctatagcagacagcatcatgactctcacacagaattttaagaaaagtctaaccggttcagaagagtaatacttaagaggtcaattgagccatattgtgcttgactaggcacagtaaacaaataagcaaacaaacaacaacaacaaaaaagaacataatttacaagaaaaagtaatggctagtgctcttatttttttaaatactgactttttagataaaaattttgataaaattagagtcagagaagtgacatcttagcatatataatggatattatraaataagattttggcaatgattatagcatattgattcattgtgaaagagttataaaa

SEQ ID NO: 838914 - DNA, 621 bp, Homo sapiens
ttatagaagcaaatagacagatatggcctttaatttcatggtagtcacattctagttagagaaaaatacaataaaccaataaaarctaatcattgagatcatttccaagaatgataagtacagtaaaggatacatgtatttaatgcagggtgatgtggtagaaagtaactgggttcacagggaaaaagaaacatcagatcaggttgtctgagaaagcctctgctgagaagatagctcataggtaacaaaatgttgagaaagaagcacacaagaaaagatcagggaagggcatccttgtcatagaaactagcaggtacaaaagccctgagtgaaatagtgtgaaatgattaaaaatcagaccaaaaggccagcatgttcggagatggtgtggaagagggaaatattagaagatcaagtctaagaggtaggaaccttctaaccaaggtagagcaaactatcccccacaggcctaatctggtctgctgacagtttttatagacccaccaactagaaatggttttcattttttaaggattacattttaagtagttttataagtatgtacataatatcctcttgactctcaaaacctaaaatatttctcatcttttggccctttac

SEQ ID NO: 838915 - DNA, 621 bp, Homo sapiens
ttatagaagcaaatagacagatatggcctttaatttcatggtagtcacattctagttagagaaaaatacaataaaccaataaaaactaatcattgagatcatttccaagaatgrtaagtacagtaaaggatacatgtatttaatgcagggtgatgtggtagaaagtaactgggttcacagggaaaaagaaacatcagatcaggttgtctgagaaagcctctgctgagaagatagctcataggtaacaaaatgttgagaaagaagcacacaagaaaagatcagggaagggcatccttgtcatagaaactagcaggtacaaaagccctgagtgaaatagtgtgaaatgattaaaaatcagaccaaaaggccagcatgttcggagatggtgtggaagagggaaatattagaagatcaagtctaagaggtaggaaccttctaaccaaggtagagcaaactatcccccacaggcctaatctggtctgctgacagtttttatagacccaccaactagaaatggttttcattttttaaggattacattttaagtagttttataagtatgtacataatatcctcttgactctcaaaacctaaaatatttctcatcttttggccctttac

SEQ ID NO: 838916 - DNA, 559 bp, Homo sapiens
aaagaaatgtaaatcaaaactgcaatgagatatcaactcaccccagtaaaaatgttttttatccaaaagacaggcagtaacagatgctggcaaagatgtggagaaaaagagatccttgcatattgttggtggaaatgtaaattagtacagccactatgcagaacggtttggaggttccttaaaaaactataaacaaaactaccatatgacccattaatcccattgctaggtctataattagaaaaaaaagaaatcagtatatcaaagagacctccgtacgcccatgtttattgcagcactattaacaatagccaagatttggaagcaacctgtatccatcaacagatgaatgggtaaagaaaatgtggtacctatacacaatggagtactattcagccataaaaaagaatgacatcctttcatttgcaccaacatggttggaactggaggagattatattaaataaaataagacaggcacataaaaataarcttcatgtgttctcacttatatgtgggagctaaaaattaaaacaattgaacttatggagatagaaagt

SEQ ID NO: 838917 - DNA, 533 bp, Homo sapiens
ccataagttaagaatactcacatagtttctgaattctggggaagccaggcagagagaaacagatatgttccaaattttgttcacaggatgataccttactcaattgctaaaaggtggatagctcaagagaaaactttctttgactctgaaaaacaaaaaaaggatcagcaatgttttaagcaaaaagctaaaaaagattacttcagttttctgttagttcagtccactcaattaactcttgttctgcttgatattcatgaatatttcaacccttcatgggtcctgaatgattttccattattccaatgtcacaatccccaaaggtatcaggaacctacatttaagagcacctctcaaagtcctatagctgattataaaccatcttttgaaaaggatcaaagcaagacaacaattgtctgtgaawgaaaaaatgtccagggtatttacagtcaaaaacatgattgacaaagaaatttggttatttctgttgtttacaataacaacatacaacaacataataacattaattgtga

SEQ ID NO: 838918 - DNA, 417 bp, Homo sapiens
gaaaaccaaatattgtatgttctcaagtataagagagagctaagctatgaggatgcaaaggcataagaatgatataattgagtctggggactttgggggaagtttgagagagsggtgagggacaaaagactacacattgggtacagtgtacactgttcaggtgacaagtgcaccaaaatctcagaaattaccactaaagaacttatttatgtaaccaaaaaccacctgttccaaaaaaactattgaaataaaaataagaaaaaaaagaaaaatgtggtaaatatacaccatggaatactatgcagtcattaaaaagaatgaaatcatgtcctttgcagcaacatggatagagctagaggccattaccctaagagaattcatacaggaaaagaaattcaagtactacatattatcact

SEQ ID NO: 838919 - DNA, 560 bp, Homo sapiens
tattttaatcctagttgtttytaaatccccagatgtaataacagacagcagaaatgaacccaagttaccccaaacagtcaacgtctaatatattttgttccccaaatgagccaaaaaccacacaagctaaaaaacagtgggtttaaaatttaacctaaatttaacagtagcagttttaccatatgtaaaaattggcaaagtcataacttaaatatccatagtctgttattctggaaaaaatacaattattatggcattttttagaaaagaaaaatacattaaatatgacaaaatacacccactcacttatcatatctttgaaataaaaatgattttattcttactcttaaatatttaatatttagatgagactttcaagtgttatagctaccattcatgaattaaagtagccttaggggaaatagtgttttatattaataattaagattgaagctcctgggatgtaaaataatttctcttggatacacagctagtgacccaacaagctcatatatgtttgatttaaaaattttaattttcccactgttgacaatgttgac

SEQ ID NO: 838920 - DNA, 556 bp, Homo sapiens
gagttcaagaccagcctggctaacatggcaaaaccctgtctctactaaaaatacaaaaattagctgggtgtggtggtgggaacctgtaatcccagctactcaggaggctgaggcaggagaatcacttgaacccgagtggcagaagctgccatgagctgagattgcatcactgcaccccagcctgggaaacagatcaagacttcatctcaaaaacaaaacaggtggggcgtgggggctcacacctgaaatctcagcactttgggaggcagaagcaggcagatcatgagatcaggagttcgagaccagcctgaccaacatagtgaaaccccgtctctactaaaagtacaaaaattaggcatgatggcatgcacatgtaatcccagctactcaggaggctgaggcaggagaatcacttgaacctgggaggcagaggttgccgtgagccaagattgcrccaccgcggtctatcttgggtgacagagcaggactccatctcaaaaaaaaaaaaaaaaattattacattgcctgcatggactacaacttttacaatgtaaga

SEQ ID NO: 838921 - DNA, 591 bp, Homo sapiens
tttagtggtgatttgtgagattttcgtgcacccatcacccaagcagtttacactacacccatttgtagtcttctatcccttgccctgctcccactcttcccscaaagtccccagagtccattgtaccattcctatgcctttgtgttttcgtagtttagctcccacatatcagtgagaacagaaaaccttttatctgaggaatgcaaatcctcttgttaggtcggggcaaaagttattgtggttttaccttttaatgtaatggcaaaaaccagaattacatttgcaccaacctaatagttgtcaaactcagagagacattaaaatgagaacacaattatgtctttcctctttgaactatgtagttatctcttgaaactgtttactattgccaccagtggctataaattaaattaatagtgctgcactgtgcactataacccatactctaaaccttaacgatgtatatatacccaattaataatcaattttttttgtaaataaataatttctgacagacaaccttgtatcagcccacttgggggtgtctctcaggtcctgcaggagcagtctgcttccttcagatggtctgtg

SEQ ID NO: 838922 - DNA, 591 bp, Homo sapiens
tttagtggtgatttgtgagattttcgtgcacccatcacccaagcagtttacactacacccatttgtagtcttctatcccttgccctgctcccactcttcccgcaaagtccccaragtccattgtaccattcctatgcctttgtgttttcgtagtttagctcccacatatcagtgagaacagaaaaccttttatctgaggaatgcaaatcctcttgttaggtcggggcaaaagttattgtggttttaccttttaatgtaatggcaaaaaccagaattacatttgcaccaacctaatagttgtcaaactcagagagacattaaaatgagaacacaattatgtctttcctctttgaactatgtagttatctcttgaaactgtttactattgccaccagtggctataaattaaattaatagtgctgcactgtgcactataacccatactctaaaccttaacgatgtatatatacccaattaataatcaattttttttgtaaataaataatttctgacagacaaccttgtatcagcccacttgggggtgtctctcaggtcctgcaggagcagtctgcttccttcagatggtctgtg

SEQ ID NO: 838923 - DNA, 552 bp, Homo sapiens
gctggccgggcggggggctgacccctacctccctcccggatggggtggctgccgggcggagacgctcctcacttcccagacmgggcggctgccaggcggaggggctcctcacctctcagacggggcggctgccgggcggaggggctcctcacttctcagacggggcggccgggcagagacgctcctcacctcccagacggggcggcggggcagaggcgctccccacatctcagacgatggggggccgggcagagacgctcctcacttcctagatgggatggcggccgggcagagacgctcccaggagaaggggtttaaagaaatcaaaaaagcttgactcaggccccagctttaggactgccggataaactaactaagcctatcttcttgtatgtccacaagtgaaagggaggccataagggttctaactcaagccataagtttatggcatcacccagtgacatacttatccaggcaattagactttgtggcacttggatggcctctttgttttaaagctattaaagcactagctgccactgccctactggt

SEQ ID NO: 838924 - DNA, 552 bp, Homo sapiens
gctggccgggcggggggctgacccctacctccctcccggatggggtggctgccgggcggagacgctcctcacttcccagaccgggcggctgccaggcggaggggctcctcacctctcagacggggcggctgccgggcggaggggctcctcacttctcagacggggcggccgggcagagacgctcctcacctcccagacggggcggcggggcagaggcgctccccacatctcagacgatggggggccgggcagagacgctcctcacttcctagatgggatggcggccgggcagagacgctcccaggagaaggggtttaaagaaatcaaaaaagcttgactcaggccccagctttaggactgccggataaactaactaagcctatcttcttgtatgtccacaagtgaaagggaggccataagggttctaactcaagccataartttatggcatcacccagtgacatacttatccaggcaattagactttgtggcacttggatggcctctttgttttaaagctattaaagcactagctgccactgccctactggt

SEQ ID NO: 838925 - DNA, 632 bp, Homo sapiens
acaaaattcaggcttaattaaacataaatttccatttaatccctgattatgttaccagaaagttttctcctggacactccaaatgaagygactacctaactgtacccaatcatttatttaatttgcattccatcctcatacacattatagaatccttttcttcaagaccctctggtagcccctgaaggggtggcctgcccctccacacctgtgggtatttctagtcaggtgggactgagaaaagaaataagatacaaagtatagagaaacaacagtggacccaggggaccggcgctcagcataccaaggacctgcaccagcactggtctctgagttccctcagtttttattgattattattttcattatttcagcaaaaatgaatgtagtaggagagcagggtgatgataaggagaaggtcagcaaaaaacatgtgagcaaaagaatctatgtcataattaagttcaaggggaggtactatgcctgcatgtgcacgtaggccagatttatgtttctctccacccaaacatctcagcggagtaaagaataacaaagcagcattgctgtaaacatgtcttgcttcccaccatagggcggtttttctcctatcccagaatagaacaaatgtacaa

SEQ ID NO: 838926 - DNA, 616 bp, Homo sapiens
tgggaatgcagccagcctctagaagcttgaaatggcaaggaaccggcttctccctagagccttcagaaggagcacagctctgctgacaccttgattttcattcagggacatccattttggaattctgatccccaggactataagctaatgtgttgtttttaagctaccaagtaataggttgcagtggcaacagaaaactaatgcagggggccactgtttggtatatatttaaacatttttagaggatgagaatattctctaaatttctctttaaatgtcaaagtattgctgcagctaggagaaccgcacatggaaacttgaggaaatttctcttattgctaggactataggacaatgggattcaagatgaatttccacaatgggataaccacgaaccgacctagagaatcaggaagtctcttatcaaagcagatatgtgtcaatgctgctcaaacacacacattcttttctggttggacagattgtaaattattcccaccacctgggggacaggcacaygtttatctagcggtcagtagaagtcacaacccaggcatccaaaccagttagtatgagttattactaagtcaggtgaaaagagctaggtggttataca

SEQ ID NO: 838927 - DNA, 616 bp, Homo sapiens
ggaaagaaatgtatgaaagtgagttttattttaagtctgagcatacacaatgttttaagcacttggctggccacttcacctatagtgtctcatttcattttctcaaataatcttgaccttttggaggtatttctgtgataggagttattaacaaattattttaggcagataggaaaaaaggggctccttggaagatttttcccagctcttgtccagcatgaaagccctggctcttagacccaggcaggcaacctttgatatgcaaatgcaagccgctagaaactgggtccacccaacgtggtgattcccgccgttttcctcttgcccttgtccctacatgtgcctggcagcatggccacccccacatatcctcacaggtggaaaatcatggcgccctgcatttgcatattaaaaggctagggtgggagggccagttttttccgcaggctgcatgaatgacatgcctggtcaaaccaatccactgagccctatgcaaatcagacaccgcctcctccagccatcaaatatagctggctgataatacctaagtgtggggtrccttctttcggctttggaaccaccctccctctgtctctgtactggggagcctcttcct

SEQ ID NO: 838928 - DNA, 594 bp, Homo sapiens
ttataaatgttaagatactttaccaaagtcatatacctaatgagttatgttatagggacttgatatctgctgagccatttcttaattaagaatgttgtacttcaaacacacataataatctgacacattttaataacacacattctgactatgatgctttgtggcaatgaggcataagtggaaaaagttttcctctgaatagatataaattggaataatgtttttaaagtcaaatttcacgaatttttaaaccttctgaaagcattatcttctataactggtgcattcacaaattctcttacattcacatgaatggagtaagatgtgaataaaacttgtcaacacttttcttctctatctccttgtggcctacagccactttgggctttgggttttaggtgttctgggtttcagaagctgaaagcaataaagtcttattgcagaagaaataagaagtttctcctatagatatctactataacaaggcaggtcctaggaatgatggcgacagtgaggattgactaatctgttcccgtcagttctcagaccctgtcattragcagctacagtcaatccactgaggcttggccccaa

SEQ ID NO: 838929 - DNA, 630 bp, Homo sapiens
tcttccctccccccagcttccccaccttcttctgctcctaacctaagcagcacagattttgtgcaatgacaaggaaagggaacattcagtgccaggcttttaattacagttgcttcgggctgctggcctctctgccaagtggccatggagagtgttttatcacaccacaaagccaacaaggtcgggtctgtggtgtgtgcccttggcacctggttagggtggggctgtgctcgtggcccgctggagaaaggctgggcccagattagttcacacaggcatcagaacagctggccaagtgcagccctgggcttcagggagccatggaacaagatggaaatgcctgttgggacctttagagcagactccagggaaggcctgtaattgggtaggaaaggggtctttaggaggatgaccaagctctggaaggaggatggggacagattatactgtggggtatggccaaatgagagaagtacaacaataatcatgtccacaacacttcacagtttacaaggagctttccacttgcttcagcatgcttaatcctcacatcaaccctgcttmggggacacaagctcagacagaggaagtgacttatccagagtcacacaggcagaaacccaggactga

SEQ ID NO: 838930 - DNA, 489 bp, Homo sapiens
atgaatttgactcaggaagaaaagtgaagaaggcatcatttactctataaggatcaattccctggtgacccttaaaggggatgagttggatgtttcctcatarcagtttttcccctctggccttcaaagccaacctgctcaattccacagctggtccttgcgtctctttctttctgccagcgccaacatgctcctcatgagaaggcctatcatcagctagtactcggcagactaggctgaaagaggaagctggccttccaatgggagtgctttaacatctgtcctcttccactgtccaaaacctggctgctacttcagtacaaaaatgatgcctttgctttttaatgttttatgttagaaccagggttaactgagaatagctggggagggatgaaaaaagaatcagcgcctcctttatctaaaaacatcacatgagacactcgggcatgctcaggagtctgatttcattcttctggccaccagcacacc

SEQ ID NO: 838931 - DNA, 489 bp, Homo sapiens
atgaatttgactcaggaagaaaagtgaagaaggcatcatttactctataaggatcaattccctggtgacccttaaaggggatgagttggatgtttcctcatagsagtttttcccctctggccttcaaagccaacctgctcaattccacagctggtccttgcgtctctttctttctgccagcgccaacatgctcctcatgagaaggcctatcatcagctagtactcggcagactaggctgaaagaggaagctggccttccaatgggagtgctttaacatctgtcctcttccactgtccaaaacctggctgctacttcagtacaaaaatgatgcctttgctttttaatgttttatgttagaaccagggttaactgagaatagctggggagggatgaaaaaagaatcagcgcctcctttatctaaaaacatcacatgagacactcgggcatgctcaggagtctgatttcattcttctggccaccagcacacc

SEQ ID NO: 838932 - DNA, 374 bp, Homo sapiens
agtaaaccggagaaaatcaggaaggagaaaaggtgctgtgcttggaagtgaaattatgacagcaacaagtggagaaatggttttttgacacgttaagatactttaaccgaaaaagtacttgattttttcttgttatgaccacaaaggggcatcgctgtgatactgggttaggcagtgtggtatagcagatatgtggttaacatcattgctgtgtcatttgtttaatctgtgactttagtcaagttactaagcctctctgaatgtgttttctgaggtatacagttggaatattggcacctacctgaggggcttgttgtgagaactatgttagttaaagtrtaggttgggtgctgaacagagcgccaggcctctca

SEQ ID NO: 838933 - DNA, 558 bp, Homo sapiens
aaaaccacaatgagatatcacctcacacttgttaacaaaagattaacaagtattagtaaggatgtgaagaaaagggaaccctggtacactgtcagtgagaatgtaaactggtacagccattataaaaaatagkgccgggcgcggtggctcacgcctgtaatcccagcactttgggaggccgaggcaggcggatcatgaggtcaggagattgagaccatcctggctaacatggtgaaccccatctctattaaaaaatacacaaaactagccgggcatggtggtgggtgcctgtagtcccagctactcaggaggctgaggcaggagaatggtgtgaacctgggaggtggagcttgcaatgagctgagatcgcgccaccgcgctccagcctgggcgacagagcgagactccgtctcaaaaaaaaaataaataaatagtatagtggtttctcaaaaaataaaaaagagaactaccatacgatctagcaatcccacttctgggtatttatccataaggaattgaaatcaggatcctgcaaatacctgcactcccatgttcatt

SEQ ID NO: 838934 - DNA, 597 bp, Homo sapiens
cattgtgcaaaactacaaggtattttttaatacaatggagtcaactatcatacataattttaaatttatatactatcaaccatgttgtaactatacggwcccttactacaaaaaaatccactttttaacaaaatatagcccatacatatagtacagtacatacacacacagtatgccaatgaattcaatgttggacccaaccaatgaaataataatctttcaatattgggaaaaatctgaatatggtggacttattgagaaagagtatagtatacataaacttgtgtaatgctaaatgtaatggttaatttaagaaatttttatcggtaattttaacatatgtagtgttctctttacatgctttttagaagctaacttgttgaaagaagctactgctctacacaaaaatcttgagtatgtaattaaataagctaaaaaagcatcagccttagtaaaatcctagtgcttaaggagaaggaagttctagcctctataagacccaaactaatttttgtaagtaacaagagtaacttgagattaacaaaaaaggtgaccttcaatcctacaggtggtttaatctaatgttaatttttggtg

SEQ ID NO: 838935 - DNA, 592 bp, Homo sapiens
taaactttatggtttagacaaattgtgattgtaactttcacaactattctgctcctcttctatagcagctgtgctatttttgtgatattgttattaattccagctccctgtrtagtcctgattggtctaggccaatctttctcatagtgtgatctagggaactctaagcttccttaagaacttttcaggggctctgcaaggtcaacattacttttaaaataatattaggatataagctgtttcttcccctttcattctcttgtgagtgtactgtgcagttttccagaggctacagatgagtgccatcaccacagattgaaagcagatgcaggtatgagaacccatctatttagccagatgttatggagatgttcaaaaataatgaaacaatggtacttgctcactaattcattttgttttgaaaatatatcttcattaacatatgtattggttaacatatgatttatttattatagttgttaaatgacataataaatatatattataaaatatctgttttaatttccagtacagtaaatactgataaacataaacaaaaccttttaggatcctcagtgattttttaagaatg

SEQ ID NO: 838936 - DNA, 637 bp, Homo sapiens
tgataaatgatacataattcacaatatgagcatggtgtaactttaattctgaaataaattgccrtggtacagtggtcttttacaacaagcttcctgccatcacagatcttatagtttagcttaggagacactgtgatttgtgctaataaaggcatataaagcatgctgtggacatatagaaagagtaacatctaaattgaccgggaggccgaactatgactgaaataacttttattcaaaataagaggcttggtgcagtgtctcacatctgtaatcccaggactttggaaggccagggtggaggatcgcttgagcccaggagtttgagacaagccaaggcaacatatgaaacctcctctctccaaaaaaatacaaaaatcagccagacatggtggcatgtgcctttggtcccagatactcaggaagctgaggtgggtggatcacataagccctggagttcgaagctgcagtgagatgtggtcacaccactgcactctagcctgagcaacagagtgagaccttaggtcaaaaataaataaatacgtaaaaataaaaatatatgaatatgtcattactggtcaagagacagaaaaatgtaacaatggagaccatggatccagccaatatcacacattcc

SEQ ID NO: 838937 - DNA, 553 bp, Homo sapiens
gcctgtctgttcagtttcttcttggtgtctctgtgtcttcagagataaggactttcctttccttcaggtacagggtgggcacctgtcacaagagggtcttcaggggagaagggagggaraaagtcagaaagtgacctttctaggttttatggcctgtttcaggaaaaaagggtgagaggacattgagagtggcctttctggcttctactgttttctcaatatccagggtgccatattttgggatagaattttgtgcacctcatcattaattttattggctcagcttggttcacatactcattttaatgctgaagagcacaaaatctattgccagaagagatggaataggtcctgggcaaggaaatacaatgattgctacaggaatattaaagtaatcggtgtagtagagttctctacattttgcaatacagcttgattgctgaatgggtggtcatcaattccacagaaagccccaaattctacattttgaaatatttattcaaatatcatataatcagaaacttggacttcagttaacgaaatggcagaaact

SEQ ID NO: 838938 - DNA, 553 bp, Homo sapiens
gcctgtctgttcagtttcttcttggtgtctctgtgtcttcagagataaggactttcctttccttcaggtacagggtgggcacctgtcacaagagggtcttcaggggagaagggagggagaaagtcaraaagtgacctttctaggttttatggcctgtttcaggaaaaaagggtgagaggacattgagagtggcctttctggcttctactgttttctcaatatccagggtgccatattttgggatagaattttgtgcacctcatcattaattttattggctcagcttggttcacatactcattttaatgctgaagagcacaaaatctattgccagaagagatggaataggtcctgggcaaggaaatacaatgattgctacaggaatattaaagtaatcggtgtagtagagttctctacattttgcaatacagcttgattgctgaatgggtggtcatcaattccacagaaagccccaaattctacattttgaaatatttattcaaatatcatataatcagaaacttggacttcagttaacgaaatggcagaaact

SEQ ID NO: 838939 - DNA, 524 bp, Homo sapiens
cctgactaatacatatagtgactttgttcatgtgtttcagtggtaaatctttaggactaattcacatgaataatttakcctagggtggcagagaacataaaatacaaatgttggactttgcctgctgcaacctgacaggctgagagagaccctgccacattacagctgatcacctgaaaatttttcagagatacaaggactactagagattttctctgtgatgtgtcaggacatagtaaatagtaagtacaggattggtacttatgggaagtaatttttagtaatagaatacactcatatcagaggtccaatatatacttttaatgatataagtatatatatcattatactgacataagtaaatgtcataagtatatctatcatatgtatcattaaaggtatatattggacctctttagtgcatgagtattaactccaaagtcaatcaaaattgaattatttaaacatttatttttattcacctatatttcaggcttctctgaattctttagttataacttaat

SEQ ID NO: 838940 - DNA, 620 bp, Homo sapiens
ggtacaagcattcccttttcttcacatctttgccagcctctgttgttacctgtgtttttgatacragacattttaattgggatgagttgatatctcattgtggttttaattagcatttctctgatgattagtgatgttgaacattatttttataatctgttggccatttgtcttttttcaagaaatgtctattcagatctcttgctgatttttaaatcagattgtattttttttctgctattgagttgtttaagcttcttctatattctggttattaaatttatttttagatagtttgcaaatattttctcccattctgtaggttgtcttttcattttgataattgttcctcttactgtacagaagctttttagctccatgtaatcccatttgtctattttctcttatgttgtctgcactttttgggttttatacaaaaaaaaatgttgcccagatcaacgtcctgaaacacttacccaatgttttcttctagtagtttcatgtcttagatttaaggctttaatttattttgaattgatttttgagtgtggtgagagacagggatctagtttccttcttcagtgttgagttatacggttttcccaacactgtttattaaa

SEQ ID NO: 838941 - DNA, 631 bp, Homo sapiens
catcgaatttcccaggttttgctgttttttgttattacttttatttttttacttttgttttttgattgctgtaggctgtctctgtgccaacaatcagccagtggtataaatttacggtcagtttagatcttttttgagtctgcacaattgtcttctcatttctctgcatatacagttgttttgaaatgttcaagtgtttaatgtctatttcccaaaaggggaaaaatagcaaaatgaaggagaacgaaggaactttagccctgtaaattccttgaaagtcacttcagtcagagagggaggggtttgcaacaatgaggggagatgcaacaatattagccacctgactctttgtctgtatgcctgtaatcagaagcagtattcagggatttgtccgcagattactgacatttggagtacaaggtcctatttgcctatcctggctcctgcaagatgtgtgcaagtcacgtcaggaacacacgcacatctgcctgccacaggattggggatgaagaataggttactgctattgtctwaagagctgaaattggctaaaattaactataatttattgtccaaccctttctctggaattttcaaaccttgaataaatcccagcattccaaattggtta

SEQ ID NO: 838942 - DNA, 631 bp, Homo sapiens
catcgaatttcccaggttttgctgttttttgttattacttttatttttttacttttgttttttgattgctgtaggctgtctctgtgccaacaatcagccagtggtataaatttacggtcagtttagatcttttttgagtctgcacaattgtcttctcatttctctgcatatacagttgttttgaaatgttcaagtgtttaatgtctatttcccaaaaggggaaaaatagcaaaatgaaggagaacgaaggaactttagccctgtaaattccttgaaagtcacttcagtcagagagggaggggtttgcaacaatgaggggagatgcaacaatattagccacctgactctttgtctgtatgcctgtaatcagaagcagtattcagggatttgtccgcagattactgacatttggagtacaaggtcctatttgcctatcctggctcctgcaagatgtgtgcaagtcacgtcaggaacacacgcacatctgcctgccacaggattggggatgaagaataggttactgctattgtctaaagagctgaaattggctaaaattaactataayttattgtccaaccctttctctggaattttcaaaccttgaataaatcccagcattccaaattggtta

SEQ ID NO: 838943 - DNA, 617 bp, Homo sapiens
acagcttagtctttacatagacaagactctatataagaaaaacttaaaacaaagatagtgcatttcttcccttgctttctgaggacactctactctgtaatgatgtagctagctttcactaaatggtctcttctcactgagaggcactcctctgcttgctttctgaggatgccctactccgtaacagaatacttttcaataagcttgcttctttcactgcactttgcaactttccttgcattccttcctgcaggagatccaagaaccctctttgggggtctggactgagactcttttttctggtaacagaattatctggtcaaatatacacatttaataaatatagctgaattgctttccaaaatgttttgatactttacattcacattattgagtgtatgtttctttatacctatgaaaatactttttaaaaaactctgctaatttcatggacaaaataaatggtttctcatttttttcaatttagttattgagctaaatttaatttctatttaattaaattgaacaaatttcaatttaggtcttgagctaaatttaaatttttaatttagttactwgctcactaactataaaattggacattgttttataggttt

SEQ ID NO: 838944 - DNA, 564 bp, Homo sapiens
caagattttttaccacacccgaaagatcacactagctcatgagcaatggatccaaaccgagaagaaatccctgaattgccagaaaaagaattcagaaggtcgattattaagctaatcaaggaggcaccagagaaaggtgaagtccaacttaatgaaataaaaaaaaaagaaaatgatacaagatatgaagggaaagcccttcagtgaaattagatggcatcaataaaaaacaatcagtttctggaaatgaaagacacacttagagaaatgcaaaatacactattaagtctccataatagaatcaaacaaacaaagaacttcagagctcaaaaacaaggttttcaaattaattttaaaattaccaacaaaaagtttgagaccagatggattcacagctgaattctatcggatattcaaagaagaattagtaccaatcttattggcactattccacaagatagagatagagattctatgaagtcagtctcaccctaatgccacctsacctaaaactacaggccaatattcctgatgaatatagatgcagaaatacttaacaaaata

SEQ ID NO: 838945 - DNA, 655 bp, Homo sapiens
actattataagcagaagaattactttttaaaattttctttaaaaatcaatgcataggatagaaaacattcattcattagccctggcttattaacaagtcaatacatgacacaaagaaataatgagcaggaataaggtgatgggaggaagatgccagaaattcttggagttgaagttattttgagtagtctgatttacaaaggtaggaagctgaggctttatacttggttgggcaaataggcagttaaatggtatgaaggatgtctatttctggccaatgtgaagtaccagggaccagatatactgccccacctgaaataaccaaaaatcagataaaatatatcaaataatggtgttttaaaatatgatttctttttatttccttccagctttattaaggtataattgacaaattatatatatctacaatgtacaacataacattttgatatctgtatacattgtgaattaaatcaagttaattaacatattcatcacctcacatacttagcatttttgtggtgataacacataaaacctactcttttagcaattttcaatcatatcctacattactattaattacagttaccatgctgcacaataaattcccagaattyattcatcctgtctaactgaaactttgtaccctttga

SEQ ID NO: 838946 - DNA, 587 bp, Homo sapiens
actgcttgggcccaggagttcaagaccagcctaggcaacatggcaaaacccccgtctctgctaaaaatacaaaaagtagccaggtgtggtggcacacacctgtagtcccagctactcaggaggctgaggtgggaggattgcttgagcccaagaggttgaggctggagtgagccaagataatcccactgcactccagcctcagtgacagagggagaccctgtctcaaaaaaaaagaatagatgaataaaaaataaaaataaaatgtgctgatagaagtgcacagtactgtcgaataaaataagcttcttgagacctctgcaattctagtcccaccatgtgcagtaagcgtgttcatatgctcagcatatcactgctacaaccaggatttgagaaagccaccgcacaaaggctatttataaccaagaaactcataagacttgggcccctgaaagcacacagaatcaaagccaaacaaccasacaatatacattacagtcataccctcaagtgggggaaatgctttttaaaagtcccattcaagcaaaagtaaattaaaaaataagaagtgacagcttctccagataaga

SEQ ID NO: 838947 - DNA, 602 bp, Homo sapiens
tcactgtaatcccagcactcgggaggccgaggtaatcagatcacctgaggtcaggagtttgagaccagcctggccattatggtgaaacaccgtctctactaaaaatacaaaaattagccaggtgtagtggtgggtgcttgtaattccagctacttgggaggctgaggcaggagaatagcttgaacctgggaggcagtggttgcaatgagccgagatggcgccactgcactccagcctgggcgacagagtaagactccatctcaaaataaataaaaaaggagcatcacattgtacccgataaaactgtacagttattatgtgtgtcaattaaaaataaaataaaaacttacaaaaaggaaatgagtaaaaaaaaaatctagcgtgggaataatttgacttgcctattttacttccacagaaatcgaatcaagtcaaagggttagatagtataaatggccttaaatgttccccatcttctacagctataaatttgtttggttcattgctgtgttttcttgccttttattttycctctcctctcttccccttttagtttagtttagtttagtttagtttagtttagtttagtttagtttagttta

SEQ ID NO: 838948 - DNA, 602 bp, Homo sapiens
ggcttgaagcaagcaagacttctgaatgttttttgttcagaagaacttggcttgagataatttttggctgtacttgaagttgagtaactgggacatgaaagtagggctgctcgaaagagagccaaagaacccagcctgctgcctgaggcaatgtgtgtccgtcagagtcctactcaagaattcatgtcatcagaagtaagtggtttgttcttaatgaaaaagacgttactcccaaagacatgtcaaatagtgtctgaagaaatgaatcagggtataaaacctgggcggtctttagagttgattttgcacatagtacaaaagaagcatttgtgaggtggcacggtatctgtgaagggaattctttctgcagacttggggccactttggcataggcaaggagatcattcagcagtgctaggatttgtgtggccatattatcttttgccaggaaatacttaccccatagtctaatactgtgtgctcctgaattaggacaggcagttaccaattgccatattctacggtattaaatggacttcttttgaggaatatatgttctggagatgtactgtrgcagctcgccactgagcatgctccccaag

SEQ ID NO: 838949 - DNA, 594 bp, Homo sapiens
ttaaatggctatatattgttatttgcactacaaattccaggactatgaaaataatgggtgaggcagctagtaaggaacaaaatgactttttaaaaattgtccctggggatgggtgggggtatcagctagactccagggtaagattgtcttccctctctgtccccttctcatctccctttcctgctgagagctactttcatcagcaataaaatcccctgcatttaccatctccaatttgtttatgtgacctcattcctcctgaatgccagacaagaactcaggagcaggtgcaaaaagctgttgcactgatcctccactgagctgttaacacttaagtcatccatagatggcaaagctaaaacagcgctgcctgtaacactctttctggggcttcagggatcaagggcacctccctagatgctgctgtggtggtgcagggagttttgctcttgttggcacccaaaaccagcagccctggctcctgcacctgctcatmtgtgctcctcctcctgcaaagggtggaatatagtgggaccgagcaagtggtatccatctctgctgcagtgaagcagctggctagttctagcacccatg

SEQ ID NO: 838950 - DNA, 521 bp, Homo sapiens
atttgccctcttctcagaaagcctatactcagagcaacagctatatagtcagtggatcaggtgaccccaaaatgtaaccattggaccacaggtattctcatgagccaagctaagacaatacacttctcttaccaggacttttaaatttgaacttataattgattgagtttttgttaggacttcaattaccagatgataaaaagcaggaaacaggaaacttatatagtcagtctctgctgtgttaatgaagaatcagagaaatagccactattgaaagagagagaaggataactagatttacagagagaaatagagaggtgaagaaacgaatttggttctcaactgattctactctttgagaggtttggctatgtctctggtattcttctgatgcattttacagtttgtttaagttaaatgagtttgtgtgccttactatcaaatggtaacttgacagacatttatcagtcagtgggaagtaatagacccctgsgaaaaattgtagaatattaaggatagtg

SEQ ID NO: 838951 - DNA, 550 bp, Homo sapiens
ttcatttctccttagagtggtaatgcagtggtgatgcatgctctttatcccacccaaaaagggcggctggcctgagtccctggtactcaatgtscctgtgccctgatcccgtcacgagcttgggttgctcattcccatttcaccatggagcacacaacttctttctctgcttgtttgttctttcctgtttgccgagagctgatgtcattagtttaatgcagactcccagacatcaggggctgcgtctgtgtaactcgctttgtgtttatactacacggatgcttaatagtgtctggtgatgatggtgtattacaaatgacagccgagtcaagaatgcccctctgctggcctgaataagtcaagggggttttgaaccatcgttctttccacaaacagttgtttagcacatattaagtgctaagtagaagggatgcaatgatgattaacttaggtctctatcttgtttattttagcataggtcttaatcttgcttatttatgtgcataatctgagctctttgaggtcaaggaccatgtcttgacccctctca

SEQ ID NO: 838952 - DNA, 604 bp, Homo sapiens
ccgctgacaggccctggtgtgtgatgttcccctccctgtgtccatgtgttctcattgttcaactcccacttatgagtgagaacattcagtgtttgattttctgttcttgtgacagtttgctgagaatgatggtttccagcttcatccatgtcctgcaaaggacatgaactcatccttttttatggctgcatagtattccatggtgtatatatgccacattttctttgtccagtctagaactagaaataccatttgacccagcaatcccattactgggtatatacccaaaggattataaatcatacgtcttttatactgtaattttattacagtataaaattccttttatttattccttttatactgtaattttattacagtataaaaattccttttctatgtttagatatacaaatacttcccttttgtgttacaattgcctatagtattcagtacagtaacatgctgtacaggtttgtagcctaggagcaataggctatactctacagcctaggtgtgtagtaggctgtccmgtctaggtttgtgtcagcgtactctgtgatgtttgcacaatgtcacaactgcctagatacatttttcagaa

SEQ ID NO: 838953 - DNA, 557 bp, Homo sapiens
gtgagaacatacgatatttggttttctcttcctgcatcagtttgcttaggataattgcctccagctcygtccatgttgctacaaaggacatgatctcattctttgttatggctgtgtaatagtctatggtgcatacacaccacattttctttatccagtctagttgatgggcatttaggttgatgctatggctttgctattgtggagagtgctgttatgaacgtatgagtgcatgtgcctttatagcaggatgatttatattcctgtgggtatatacccaaaatgggactgctgggttgcatggtagttctgatctatgttctttgagaaatcaccgaactgctttccacaatggctaaactaatttacactcccaccaacagtgtacaaacgtccccctttctcctcaactttgctagcatatgttatttttttactttttagcaataccattctaactgaggagagaggtatctcattatggtttttatttgcatttctctattgattaatgacgagctttttttcctatgtttgttggtcacatgtacatcttt

SEQ ID NO: 838954 - DNA, 628 bp, Homo sapiens
ggaatatttttccatttgtctgtgtcatctctgaatcaatctttgagcaatgttttctagttctccttgcagagatctttcacctccctgttagctgtattcctaggtattttattctttttgtgacaattgtgaatgagattgtgttcctgatttggctttcagcttgactgttgctggtgtataggaatgctagtgacttttgtacattgattttgtatcctgagatttcactgaagttgtttatcagcttaagtagcttttgagctgagactatggagttttctagatacagaattatgtcagctggaaataaaaatagtttgacttcttttcctttttggatgccatttatttctttctcttgactgattgctctggccaggactttcaaaactgtgttgaataggagtggtgagagagggcatccttgtcttgtgccagttttcaatggaacatttccagcttttgcccatgcagtatgatgttagatgtgggtttgtcatagayggttctttttattttcaggtatgttccttcatacgtagtttattgagagtttttaacataaatgggtgctgaattttataaaaagcttttcagcatctattgaggtgatcatgtggct

SEQ ID NO: 838955 - DNA, 630 bp, Homo sapiens
aacctgcacgttgtgcacatatacttgaagtataattwaaaaagaaaaaaaagaatttgggtctttgagctgaacagtgagaacacatgcacacagggaggggaacaacacacactggggcctgtcgtggtggggagcaggtggtgagggagagcatcaggataaatagctaatgcatggggggcttaatacctaggtgatgggttgataggtgcagcaaaccaccatagcacaagtttacctatgtaacaaacctgtacatcctgcacatgtatcccagaaacataaaataataaaataaaatatcaaaaaaaagaaattgggtctttgtagattatcaagttaagatggttcattagagtggttcctaatccaataaaactatgagtttgtaaaaaaggacaatttggatacagatatagacaggtatacagggagagcaccatgtgaacgtgaaggtggagattggatgaaacttctacaaggcaaagagtgccgaagttgtcagcaaaccactaaaaactaggagagagacatgaaacagattctccctcaaagcactcagagggaactaaccttgctgacaccttcctttagccgctagaaactgtgagacccaaatttctattt

SEQ ID NO: 838956 - DNA, 517 bp, Homo sapiens
ttcatttctgtgtttagcattcccttaagtaccttttctaaggaaggtctggtggtaacaatttcccttagcatttgcttgtctgaaaaagattttatttcacttttgtttatggagctcggtttggctggatataaaatttttggttggaatttattttcattaaggatgctgaatgtaggcctctaatctgttctggcttgtacagtttctgctaaaagttctgatgttagcctgatagggttcccttggtggggatctgagattctttcctcagcttggtctattcagctgttaatacttccgattatattgtgaaatacttgtagtgagtttgttttagctttttaagaccagtttgggtcattcataaaatgactgtttcatctctcagatcttgtattgttttaayacattccttagattccttggattgggtttcaattttctcctgaatctcgatgatcttccttgccatccagattctgaatgctatgtcttttattccagctattta

SEQ ID NO: 838957 - DNA, 640 bp, Homo sapiens
agtagcaaatattttttaagacatgacacacaaggcacatctctaaaagatacacattgttaaatcaaactatattataattaaaatggtgtgttcttcaaaagacacaaatacaacagttaaaaggcaacctacagagtgggagaagatattttaataaatatattcaacaaataactcatattctaaacttataaagaacctcacaaatcaattttaaaaataggcattcccaatagaaaaagaaactgaaaatgtgaacaaatactttataaaagaggatcttccatggctaacaaatttattaaaaggtgctcaaattcatttataatcagggatatccaagttaaaactagcgtatacccactaggatgaccaaaataaaaaagacagaccagtatctaaaaggatgtggaacaactgaaactctaatacactaatggcaggatggtaaattggtgcaaccatctcgcaaactgtttgggagtatctataatatctaaatatctgcatatcctctcactcatcagtttctctactaactgtgtgcctaacagaaattcatrcatatactcaccagaaaacaagtaccagaatatttcatagcatcgctattcacagtagtccaaaactataactt

SEQ ID NO: 838958 - DNA, 525 bp, Homo sapiens
atcagacttaaatagctggaataaaagacatagcattcagaatctggatggcaaggaagatcatcgagattcaggagaaaattgaaacccaatccaaggaatctaaggaatgtrttaaaacaatacaagatctgagagatgaaacagtcattttatgaatgacccaaactggtcttaaaaagctaaaacaaactcactacaagtatttcacaatataatcggaagtattaacagctgaatagaccaagctgaggaaagaatctcagatccccaccaagggaaccctatcaggctaacatcagaacttttagcagaaactgtacaagccagaacagattagaggcctacattcagcatccttaatgaaaataaattccaaccaaaaattttatatccagccaaaccgagctccataaacaaaagtgaaataaaatctttttcagacaagcaaatgctaagggaaattgttaccaccagaccttccttagaaaaggtacttaagggaatgctaaacacagaaatgaa

SEQ ID NO: 838959 - DNA, 613 bp, Homo sapiens
cacaaggcacatctctaaaagatacacattgttaaatcaaactatattataattaaaatggtgtgttcttcaaaagacacaaatacaacagttaaaaggcaacctacagagtgggagaagatattttaataaatatattcaacaaataactcatattctaaacttataaagaacctcacaaatcaattttaaaaataggcattcccaatagaaaaagaaactgaaaatgtgaacaaatactttataaaagaggatcttccatggctaacaaatttattaaaaggtgctcaaattcatttataatcagggatatccaagttaaaactagcgtatacccactaggattactcaaaataaaaaagacagaccagtatctaaaaggatgtggaacaactgaaactctaatacactaatggcaggatggtaaattggtgcaaccatctcgcaaactgtttgggagtatctataatatctaaatatctgcatatcctctcactcatcagtttctctactaactgtgtgcctaacagaaattcatrcatatactcaccagaaaacaagtaccagaatatttcatagcatcgctattcacagtagtccaaaactataactt

SEQ ID NO: 838960 - DNA, 521 bp, Homo sapiens
gaaatttatttctctcagttctggaggctgggaaggccggggatgggtgtctgctgagggccstcttcctggtttgcagatggttgtcttgttctgtcctcatgtggcctttcctcggtgtgtgcctgtggtgcatgcctgtggtgtgtgcccgcggaaaggagagctcttgtgtctcctcttcttgaggccccaccctcatgatctcatctaaacctaatctcctccttacagccccacctccaaacaccatcacattggggtcagtgtttcaacagtttaattctaggggcacacaaacctgtagtccatagcagtaaatcagcagaattctcacctgtgtttgtgtagtgtcaacaccctagagtatgtttattttggtgtttctgtaattgaatctggacagcatgcactgtatctgtggttgataataaaccattctctttgggtattgaggtaataaggtcagacaagcaatatcagaagaaaattagaatttattggtcaggcgtggtggctca

SEQ ID NO: 838961 - DNA, 247 bp, Homo sapiens
gtgtgagccaccacgcctggcctgccaacagagattttatggaagatgaagtagcaggtttcttcatgtgcccatttccgagagtgactccrggactcgccaagggtattgaaactgaaggagtggtagtctttctccaagtacaacacggctcggctggggattgaagggtagaacctgatcatacgtaggcatggcgggatggcatgtatgttcccaaggtgtcacttctcttagccaaacattg

SEQ ID NO: 838962 - DNA, 524 bp, Homo sapiens
tactgagcacctaccacaaaccagacccaggatgaagcccaggagcagcaaagaggatgaagaccaggtccccacccctagggacctggytgaggagcctgccacagactggtaggacaggcagatcaataatcacataattacagtgaaatgtgctcaatgtgatgatagagctatacgcagggcagcatgggaacccctgggaggcatacttgacctatttggcttaggtgtggggtggttggcaggcatgtttcaggtaagactttctgtattgcttctcaaaaggtaagccacagatgaccgggtggggaaaggagagagcaggcagagaaaacaacacaagcacaggcacggggtagcaaaacacaccaccacagtgattcggcacagctggaacagatgtgcacttaaagaatggcaggagatgaggccgactaagcaggctgtggtcacagaagaaaggctttgaattttggccccacaaagaacttctcaacagaaagggtgacaggtgtgtctga

SEQ ID NO: 838963 - DNA, 516 bp, Homo sapiens
ctaagattgggactgctgggttgtgtggtgtaatgtttaattttacaagaaattgccaaactgttttccaatgtagtcgtacctttttacatttccacctgcagggtatgagaattccatttgcttygcatcttttccagtacttgggattgtcagggttttctttttagcagttctaatcggtatgtaatggtatttcatttgattttagtttgcatttccttgatgcaagtcagtctttttttttctgagacagagtctcgctctgtcacccaggttggactgtagtggtataatctccgcccactgcaacctctgcctccaggaactcacaagtcattctttgtttttgcttttgtttgtttgtttgtttgtttgtttgtttttgagacagtttcactcttggatcccaggctggagagcagtggtgcgatcttggctcactgcaacctctgccttctgggttcaagcgattctcctgcctcagcctcccgagtagctgggattacaggtgcc

SEQ ID NO: 838964 - DNA, 594 bp, Homo sapiens
gcatataatgagcagtgaggacaaccagagttcacatttgtcaccatcttggttttggccaggttctttaccaaagcctrttttatcagcaaggtcttcatgacctgtgtgttgtgccaaccccttatctcatccagtgacctagaatgcctaacctcctgggaatggagtccagtaggtctcaggcttattttatccagcccctattaaagatggagtctctctggttcaaacgcctctgacagaggaacgtatttgctcttgcaaggatctgcgttcacttatgtacatttttatgagagctgtaaaatgaaatggtgaaaaggtagtttctcatattaatttcctcatctgcaaaatggaggcagtctaaatagaaagtgtcagagttgtcaggatcataaaagattaaatatgtgaaagaagtttgcacagtgcagtagactttgcaaatatattagatctcattaattgatgctgtttatttgttatgatttttgaagacttaggtgatattgttattcatttccaagtcaataataatgtccccaaatatctttaaataacattttctgctgtcatttaaaaatacca

SEQ ID NO: 838965 - DNA, 558 bp, Homo sapiens; identical to SEQ ID NO: 818544

SEQ ID NO: 838966 - DNA, 625 bp, Homo sapiens
cctcaggccactcacaaccctgaattggaataagtggataaaaaatcatcttactcatttttattaatctgtttaaaatgcatgtagggctcacatttatttctatgtttaatattagaagtgttttggtttttatttagaacttcggtgatgtttttgtgaccagcatgccataggaatttaactcttgcttgtatgagttagcctatgataaaattgtttttgttatacatcatttcattcaaagttgcagtttccaagaatctattgaggacattaagtgagtattttgttcttacaaataatgctatgcaagcagacacacctgtaagacaaatactagaggtggaaaagccaggtcaaagagcaaatgctcttgtcgtttatatttttcaggactgccttctctagggttcatataaatttatactcaatctgaaacatgcactccaaaaaatacaagcaaattgaatacagtgacctataaaaagaattgtatacaatgaccaagtgggatttatcccaggacggcaaggttggtytggacatatgaaaatcaattaatataattcatcatatcagtagaataaaaacaaaaattacatgattatctcaataaacacag

SEQ ID NO: 838967 - DNA, 692 bp, Homo sapiens
cctcatagtttctttgggggatccagtgaaatagtggacatcaaataactttatgggttgtattggttcctttactatgttctagctgtgtttgccgctcttactttccttgcttttcagtacatagcagaatgttctgaaaagctctgaagtgtagactcagtttttttcataacttcagtgtctgacaaaagttctctctagtagcctcctttaacacacagataaacggaaatgattatttctcaggtttcttttggcacagtgacttttattctgtttcagtgttataaagctcccaggatacatttcttctttgagagtggctcttacatcctaaatctttaatgtgggtagatttaaccacagatactgtgttgaggaggaaggggtaaaggaaaaatggaaggaaccccttaatttacttcagtgtcatattcaggtaaaaaggaaagccagtcatttttgctaacttataggaagggtttgtctttctgtttattatttgtagagaggactttattaatcattttgttaagcttcccttattttgtaaataaacacttttattgattcatgctaaatctggcaccatgaaaggagaccagagatatgaatargacagctgttgcctttaagggcctcaggaaaacaccttgagcattgtgtatctagagatacgtgcatgagtc

SEQ ID NO: 838968 - DNA, 645 bp, Homo sapiens
caaaaatccactccaaaatggagaaaattttcaggatgttgggctagagagctctcaggtttggcaccaaataatartccataaaagaaaaaactgatatacaccaattggtactgtccaggccagaaaagtccattttcatatatacataaacccttatagagtcaatgacagatttacctgtgtttgagagcccctgcagcctggtcagggatgtgagggaatgagggatggacaggtcagcaggaaaggtttcaaaaagattaggcacaaagagcactgctagtgatggcaaagatcaggtaatgacacaaaatactttaaagtggcaggcatacttaagggtatgttatgatctacatgatcaaaaccaaatttgcatcattaggctgaggaatcgataagaaaagtgggtgtgtcctggaagtatggtatgcaagacatactagtggagttaatttacaagaacatccgaagaccatttgaggaaagaggctcaaatttcagccttgggaataaaacatagagatgggtattggttagaaaaacacataacaagttaatgacaatctactggatgtggagacagaagtagcaaaatactgcagtaaagaacaaaagatcatggttgtctttcatgatgga

SEQ ID NO: 838969 - DNA, 547 bp, Homo sapiens
actttaatatactgagtttgaatttgggattccagaccaactagttaggtaaatttggacgggtmcctaagattcagaatcagttggtataaactaggaataccagggatgtaaaggctgtgttctaaaaccttgaataggtatatggatggtgggtgggaagtacgtgggaggaatcttcggtcttctcatttcatggctgtactcttgtttcaactgcaccttcatttctgtttattgggatttgaaaatttgagcttccccattaaatattatttgaagaagttgatctgattaaaataacacagcaactgatctttaagtttcagtttagttctgacaaataagttttttaattaaatggatttagctcaagatattctgggatctccaactggtagggtcagttgggattttaagggtaggagctgatccaaagtagatgagatcccctaaaatattcaatgccccaaatcacagtgtcctaagaggtgttgctaacctagactcaattagtataaatatatgggggattcagtctagtgtg

SEQ ID NO: 838970 - DNA, 638 bp, Homo sapiens
gaagatgtgagaaagttccgagagactcgttaaatggttttgaccaaaatgctgayagtgatatggacaataaagtctaggctgaggtggtctcagatggagatgaagaacttattgggaactgtagcaaaggttactcttgctatactttagtaacgagactgagagcatttgcccctgccctagagatctgtggaactttgaacttgagaaagatgatttagggtatctgacagaagaaatttctaaggagcaaagcattccagatatgacgtggctttttctgaaagtaagatatgaaattggaacttatgtttaaaaggaaaacagagcataaaattgtggaaaatttgcaacctgactttgtggtagaaaagaaaaacccattttctaaggagggctgcataaatttgcataagtaatgaggagccaaatgttaatagccaagacaatggggaaaatgtttccagggcattttagagatcttcacagcagctcctcttatcacaggcctagaagcctaggagggaaaaatgtttttttgggcagggcccactgctctgttcagcttcaggacatgatatcttgtgtcccagcagctccagctccagccatggcttaaagaggccaaggtacag

SEQ ID NO: 838971 - DNA, 638 bp, Homo sapiens
gaagatgtgagaaagttccgagagactcgttaaatggttttgaccaaaatgctgatagtgatatggacaataaagtctaggctgaggtggtctcagatggagatgaagaacttattgggaactgtagcaaaggttactcttgctatactttagtaacgagactgagagcatttgcccctgccctagagatctgtggaactttgaacttgagaaagatgatttagggtatctgacagaagaaatttctaaggagcaaagcattccagatatgacgtggctttttctgaaagtaagatatgaaattggaacttatgtttaaaaggaaaacagagcataaaattgtggaaaatttgcaacctgactttgtggtagaaaagaaaaacccattttctaaggagggctgcataaatttgcataagtaatgaggagccaaatgttaatagccaagacaatggggaaaatgtttccagggcattttagagatcttcacagcagctcctcttatcacaggcctagaagcctaggagggaaaaatgtttttttgggcrgggcccactgctctgttcagcttcaggacatgatatcttgtgtcccagcagctccagctccagccatggcttaaagaggccaaggtacag

SEQ ID NO: 838972 - DNA, 569 bp, Homo sapiens
gccaactctgctttgcacttcagttattagggtaygtatttgaatcttctgaaagctcaagatcttgtggtgacattcaagatccctggtgatattggtgttgtggccatcttagctatggggggtgtttagtggcttggcctcatatattcatagggcccagagcaaaaatacccaaaaaacaaaaaacaaaaaataacccactattagcatgtccttatactatgtgtctaaatatttaaagtaataattcatcctaataaaatgctaaataaaatatgtattttctttcttcctggatgaacatatcttcataatgacctggaaggccaggttgaacttagaattctctggttggagttccacaccagaacatggtggcatggagagagccagaacttggcatgccatctacctcccttttatttgtattataccagaatgctaccttactttgtcttgtactgtgaatgcctgtgtaatctccatccaagttctgtctccttggatctagggatacacacataatgattcagtctgccttagggagaatggagcatgaaagaaaa

SEQ ID NO: 838973 - DNA, 569 bp, Homo sapiens
gccaactctgctttgcacttcagttattagggtatgtatttgaatcttctgaaagctcaagatcttgtggtgacattcaagatccctggtgatrttggtgttgtggccatcttagctatggggggtgtttagtggcttggcctcatatattcatagggcccagagcaaaaatacccaaaaaacaaaaaacaaaaaataacccactattagcatgtccttatactatgtgtctaaatatttaaagtaataattcatcctaataaaatgctaaataaaatatgtattttctttcttcctggatgaacatatcttcataatgacctggaaggccaggttgaacttagaattctctggttggagttccacaccagaacatggtggcatggagagagccagaacttggcatgccatctacctcccttttatttgtattataccagaatgctaccttactttgtcttgtactgtgaatgcctgtgtaatctccatccaagttctgtctccttggatctagggatacacacataatgattcagtctgccttagggagaatggagcatgaaagaaaa

SEQ ID NO: 838974 - DNA, 667 bp, Homo sapiens
ggattttaaaccatactaggagagaatatgggcaattttttttttttttgagacggagtctcactctgttgcccaggctggagtgcagtggcscaatctcagctcaccgcagcttccccctcccaggttcaagcaatttctcctgcctcagcctcccaagtagctgggactacaggtgtacactgctacgcctggctaatttttgtatttttagtacagatggggtttcactatgttggccaggatggtcctgatctcctgacctcatgatccacctgccttggcctcccaaagttctgggattacaggtgtgagccactgcgcctggccaggaatattttttataatcttcaagtggggaaagcccagaattcataatggaaacaagttaacaattaaactacatacataaaattgtatgacaaaaacatcacaaatgaagtcaaaatacaattaagagtaggaaaaaatttgaaacactataaacataaagagctaatttctgtaacatataaaatcactttgagcaatgagaaaaaagtaaacaaaggaaagcagttaacagaaacaaaattacaaatagttaatggacatgaaaatatgttcaatgtctttcagcaataaatgaaattaaaacaataagggcttgtttttatctatcagtaaa

SEQ ID NO: 838975 - DNA, 618 bp, Homo sapiens
aatgcattgttaggcaattttgttgtacaaacatcagagtgtatttacacaaacctagatggtatgacctcctgcacatctgatatagcactaggctatatggtatgcctattgctgctaggctacaaacctatacagtatgttgctctactgaatactgcaggcaaccacaacagaatggcacttgtgtatctatgtttagatacacagatatagcaaagttcatgcaatgcactgggacctacaatgtcaactaggtgataggaattttcctgctccattataatcttttgggactactgtcgtacatgcagtccatcattgaccaaaatactgttgtgacacataactgtattttcttctgcttcttattttactattgtttttatagtttcttataccggaaattgagattacagagactttcctccttttataatgtatgtatttactgttacacatcttccctttgtgcattgctttaactaaatttgacttaatttgttatgttgcattttcattcaaaatrtgttctaatttctcttgaaacattttctttgactcatattattttgaatcatgagctttaattttcaaatatttgaaggttttgttttt

SEQ ID NO: 838976 - DNA, 604 bp, Homo sapiens
gattctggattctgttacattccatcaaagagtattgatattttgtatatacatttacaaatgtacatgtacacaataataaaaataatttttttctcagacctgcctgcaatcatgaagggtttcttctttatgtgcttataacagtgtagacaaggggactcccaggcaagatggccaagtaagaacagctctggtctgcagctcctagcgagaccaatgcagaaggccagtgatttctgcatttccaactgaggtacccggttcatataactgggactggttagacagtgggtgcagcccacggagggtgagccgaagcagggtagggtgtcacctcaccctagaagtgcaaggggtcaggaactccctccctagcgagaccaatgcagaaggccagtgatttctgcatttccaactgaggtacccggttcatataactgggactggttagacagtgggtgcagcccacrgagggtgagcagaagcagggtagggtgtcacctcaccctagaagtgcaaggggtcaggaactccctcccctaaggaaagctgtgagggaacttgccatgagggacggtgctatctggcccatatactacgc

SEQ ID NO: 838977 - DNA, 654 bp, Homo sapiens
gataaaatttggctttaccattaggtcagtattgtaataaagcaaataaagaattttcagaatgtagcagtctgacaattataagcaatgtaaagcgttaaggaaatacctcattctctgctttaaaaaatatctccccatcctatatttattatttatgtgtccatatgttgtattttttcactttcatctaactttaaatcctaacataatttgtactacttgaaagaattattgccagtcaaaatgccatgtgtggactgtcagatctagaaaaatgcttctaagtcattcactctagatccctcatcatcacaacaaggacatcagcctcagagtggttagaggggatacggctgggaaggctgactctgggaaaaatgaagaatatcttgtgcacaatggaaatgggaggactcaccctaggggaagagagagtggcagagaaccctccctgacagctgtgtgtatacactgtttcctgatgttaaaggagaaaatcactcttacccatccccaggctaggacctaacaatgtctattytaaaaaacatgaaaaaaaaaaaaaaaaaaagaaggaaagaaaaacaatagcaagcttgagagagagaatacagcagtttgaccttccaccatgcacccttcttggggaaa

SEQ ID NO: 838978 - DNA, 475 bp, Homo sapiens
cttttgctaaccatgtctcctcttctctccttcccataacctgtcttgccaccatatcattttttggccaakccaccattctttctgtaacctcaagatagtaaaaaaaaagtgtcaaccatctggccatttctttgagattttatattttgtaagtctattatgtatgctaaaaatgtatatgcctttttcttctattaaccagacctgtcagttgactttcagcaactttcagagggcaaagatgaagttttattgtgacccctgctactaatttagttcctatgtcactaaaatgtgtcaggctctctaccaagctttacggtttcagagatgaaccagacaaatgctcttctcaagaatctcagagttaagtgtgaaagacaaataaatggttacaaaacaatgtaaatactattacagagctctgtacaaagtactttgggagcgaacagcaggtgattacaaaaagcta

SEQ ID NO: 838979 - DNA, 516 bp, Homo sapiens
tgcaattgtttcaatactgtttatctcaaggccagtgcttatttagctgctagagaaaaagaaaatcctcgtggcagtgagtacatagtttattctttaagtgtaggggtgcwtgatgtaacttttgcctgcagtggccttaggtcttgtttataacttggtgtctttttgtcagaaagagcccattctgcctgtcttatcatctctatttttacattaatgctgctcacttgtatgtctaaaccacaaaaggaaggggctataaataggcatatccaaccgcctgtccagttatggccaggaactcagtttttaaggtttctctggagtccccttggctgagagtgagcccaatcagttggttaggggttagggggtgggtgtaggattttatttttagttctcagaaggaagctgtgtccctgaatgaccttgttgtgtgtcagaaaccataccccaaagtatggtgctttgacatgctgaattgaagaagcctcaaggtctctctgaccttcc

SEQ ID NO: 838980 - DNA, 530 bp, Homo sapiens
gcttccagaaggctcaggggatccttctaccagaaaacttaacacacattactgagatcctccagggctggtgagctggtaaaggtgaacacagtgggtaggagacgtgtctagcagcctggtttggcatttargtggtctgtgttgcttgagtcaataaaatattcgccctttagatccaggttgttccaggaccaatgggagtgcgagccttctctcagaagtggcatttctgagtggcatttcagtatcacggcctgtccttcttgtgatccactctgatcactgatcaaaaataagtcactatggcctggcatggtggctcatgcctgtaatcccagcacttgggagaaccaggtgggcagatgacttgaggccaggagttcaagaccagcctggccaaaatagtaaaaccctctctctactaaaaaataaataaaaaaaaaaaaaggccaggcacagtggcttacgcctgtaatcccagcactttgggaggccgaggcaggcggatcacgaggtcaggagatcaa

SEQ ID NO: 838981 - DNA, 591 bp, Homo sapiens
tccacaagtcacctttacaggtcctctagggaggcatgagggaggatctttggatctaagccacagttagaacctgcctctcagtaggtgttatccttctgaggaaaaaaatgactgatctatgaggaattaatcttggaaatagtcccttgtttcttaaatcagaaaattctatttcccaaaactcaatctttaacagaaataaattttctatgtcaggactgcttaaattcggcccaacaagttgtttttagaccttgatcaacggatgtaggtaaaagaaaacctcctattcagttcttccgatgttggatgcagtcaatgtacgggttaggtcaatacttcttgttttggaagcttagtcatctgtgtccatctggatctgtttcccatggtgtggccacagttcttcctatatcaaaattacctgggaggcttgctaacaaaacagatgcctggttgttgcctcacaggtgtgtggtgtcagacacttctcaggctgtgcatggttaatacatttcctgtgatrcttagacacaataaagtctggaaaccactgatctacacaaagtgacctttcttaataaacac

SEQ ID NO: 838982 - DNA, 483 bp, Homo sapiens
catttctccttgagagtagggactggtttttagtcattgttttatccccaaggcctaacttagaggcttgtatatattacacactctatgggatgaatgaatgtgtcccaacctcaaaaaagccccaaaatgaaggagtcccattcaaacatgctaatttgcattactccatttacacttttctcttggttaatgttaatccattaggttttagtaaatcaaacttttatattggttcatatttatataaaagtgtagcattgatgaggagggggcagtgaacagctttgcgtttggttgaatgtattattttagctggtccctcctgactcctactcatgcttatacgtktgtctgtatatatgcgtgtgtgtatgtgtgtgtgtctctgtatgtctctctgtgtgcatatatgtatgtgcatgtgtgtatatatgtatgtgtacatgtgcatgcatgtgtatgtttatgtttgcatatgtg

SEQ ID NO: 838983 - DNA, 528 bp, Homo sapiens
aagggaggggtggcaccaaccccgtttagtatgcagctctattgtgaacagaaagctgtcgcggagggccagcttcaaactcrtgaatgcgcgggtactaaagagcaggagctaaagagcaggagccgtcagcagagtaaatagccatgaggtctgtcctttcatgtcctcaggagtttatttctttatggcatgcattttattaacattagcaaggatagaaaggaaataaaactaaagcaataaaaaaaattaaaaatgggtgaatcaaagctgcattcctttgggaaaagtgtcctggtacagcatctccctgggaaaacacacaacactgatttttcccttaggaacaagactaaaaccaaagcaaaatacaatcttctgttatgattgtaccaatgagctgtgaacagtgcaaaacactggcaggaataatggagaatgggcaacggaaacctgccctgtaattaatggaataaaagaaatcggatcatattcctcttccactcaaccccttcaaataaacta

SEQ ID NO: 838984 - DNA, 646 bp, Homo sapiens
tatgaataattgtagacttgcggaagaagaggttcagtgaaagtgacagcagtttaaaatggtccaatggttttaagtccaaagtcctatactatttatgatacatactagatccatttgagttaaggttttgtatctggtgtgaggtagaggtccaaattcatcttttgcatgtgaatatccagttgttccagcagcatttgttgagaccactactttgccttttgaattattctcaaaaaaagcaattgcccatagtgcatgggttagtttgtggtctctctcttttaagtggcaaggtcttgctgtcgactaggctggagtacagtggtgcaatcatagcttactgcaacctcaaactcctgtattaagtgatcctcccacctcaacctcccaagtacctgggaccacaggcacgtgccacccactctcagctggttaaattttcttcttcttcttcttcttttttttctttttgtagagatgaggtttcagtatgttgcccgagctgatctcaaactccygggctcaagtgatcctcctgccacagcctcccaaagtgctgggattacaggtgtgagtcaccatacctgggctatttttggtttcttaattctgttgatctgtgtctcaaaggccagttcca

SEQ ID NO: 838985 - DNA, 585 bp, Homo sapiens
gatctcatctctacaaaaagagtttttaattcatttaaaaaagtatttaaaattatacaaataaaacataaatacatactctttgtaaaatgttcaaatagtgggcaggtgcagtggctcacgcctataatcccagcactttgggaggccgaggcacgtggatcgcctgaggtcaggagttcaagaccagcctggccaacatggtaaaaccccgtctctactaaaaatacaaaaaattagctaggcatgatggcaggtacctgtaatcccagctgctcgggtggctgaggcaggagaatcgcttgtaactgggaggcagaggttgtagtgagtcaagaccatgccattgtactccagcttgggcaaaaaaagaaaagaaaaaaaaaagaaaaaaagaaaaaaaaagtagtctatagaataaaaagcccaagtttccttttacccttcctcattcccactcctctccctacagacaaacattggtgttagttgsgggggagaagtatatcttttcaaatgttttgatgcatttagttatatataaatatagatatagttattttcttccacacaaatggtaacata

SEQ ID NO: 838986 - DNA, 607 bp, Homo sapiens
taacatactagatttaatttctgttttcatgaccccattcagcatttctatcaaatatttatctgtaaartagattacgataattttttatgtgtttggtggcatagttgttctacacattcagctgttgcatattctgttttattaagtgggcagatcttagagcttggtctccaaagatgactggctgattaatgaaactaatatgatgggtcccattgtgaaactcacattgaaaatttagaaataataccaagatatgtttgaagagaaaatagaagaacatttttgtcagcctctgtaaataattgtccctctgaatctaggaagtagaagccaatgaaacctatccaggatttgttgttgctgatgttgttgttgttgttgttatgcaaggaacttaactatggctcctcatccttccccactgggtctgaaacatggttttgttagagaataaggatttgtttgtcttaccaaattaaaatgaaaatttcaagactaaatggatacagagttaaataatttccaattatggctagattgcacattctccaaattcagaaggaaggcacagggccctgctggtacactaggcacagatagg

SEQ ID NO: 838987 - DNA, 404 bp, Homo sapiens
agtagttgcaaaaaccacagttactttttcaccagcctaatacatattagtaaattkattttagttgtggcactgcagaggaaaaaacacataatttttacatcttcaaatatcattctccagcaatagaacacattcaggagacttaaagaatcaaaatatttgattttctttttcatcaaacatcaaattggtatgaagaaatggcagttgtattttaacattttcagcataactttaatagcataacttcacctcactgaggagaagaaatacagtctgtttgacatctgaattatacacatattttagcaaatgaaaactttaaaatatttagtttacaaaaataactctaaaatagtggttttggaagtttgttccctgaaacggtaggttctcctatg

SEQ ID NO: 838988 - DNA, 429 bp, Homo sapiens
ttgagagctatcctaaaatctagacttttgttttaaaaaatacactataatctaatgtctcaattttttaaattttgagaatggaatactagctwttaaaaccatgaaactattttctatgatagggcggagcaacttttcttcattctgagttaatgcccttttcttattatagtccacacttttacgcttagattattgttaccaaattattttattctaggtatctctcaatacctgtaatttattatcttccacatgttttactaagctgatagactaataaccatttgtgttaagtgctgtttataaaacggtatttgcaacatttattcaaggttgttttaaatttttattctcatttaatgtactttgatatctgtgtgtgtgcatgtgggtttaaggaagtatatattgaggtaatacttt

SEQ ID NO: 838989 - DNA, 619 bp, Homo sapiens; identical to SEQ ID NO: 827163

SEQ ID NO: 838990 - DNA, 609 bp, Homo sapiens; identical to SEQ ID NO: 827164

SEQ ID NO: 838991 - DNA, 495 bp, Homo sapiens
aagtgaacaactgagctttacacttaatcacataaaattcacaaaggccaataaatgataaaaataactctgcttgcaaataagaaggaaaattttctcaatgatcaggatgaaagtcraatcatataaaagaaccagaaaaggccaggtgcagtgactcatgcttgtaatctcaacactttgggagtccaaggcgggtggatcacctgaggttaggagttcaagaccagcctggtcaacatggtgaaaccccgtctctgctaaaaatacaaaaaaatagctgggtgtggtggtgtgggcctgtagtcccagctacagctacttgggaggctgaggcaggagaatcgcttgaacccaggaggcggaagctgcagtgagccgagatggcgccattgcgctccagcctgggtgacagagtgagactctgtctcaaaaaaaaaaaaaaaaaaagaaccagaaaagacagagatgaaggaattaaggagacaaggatcc

SEQ ID NO: 838992 - DNA, 282 bp, Homo sapiens
aggaggatgtttgaacccatcgcaaggaagctaaaaaccttgaaaaaaattagatgaatggctaactagaataaacagtgtagagaagargttaaaggacctgatggagctgaaaaccatggcacgagaactttatgaagcatgcacaagtttcaatagccaattcgatcaagtggaagaaaggatatcagtgattgaagatcaaattaatgaaataaagtgagaagacaaggtcagagggaaaagagcaaaaagaaatgaacaaagcctccaaaaaatatg

SEQ ID NO: 838993 - DNA, 618 bp, Homo sapiens
aagtatcttttccaaccacaatagtataaaactagaaatcaataacaggaagaatttcagaaaattcctgaatgaatacgtggaaattaaacaagatgctcctaaactagcgatggttcaaagaaaaakaaaaaaataaacaaaagtatcctgagatgaaagataatggacacgcaacatactgaaactcataggatgcagcaaaagcagttttaaggggaaagttaatagtaataaatgtctacataaaaaagaataaagatcctaaataaacaatcttatgttacatcttaagaaactaagaaaaggaacaaacgaagttagtagaaagaaggaaacaataagaatcagaggagaaattaataaaataatagaaaaacaagaaaaaatattaatatatcagttggctttttaaaacagataaagataaccaacaaacattacctaaactaagaaaaaaaagagaagactcaaaatcagaaataaaagaggagacattacaactgatgtcacagaaatacaaagtgccataaaaattactatgaacaattatatcccaacaaattagataacctagaagaaatagataaatttctagacccatacaacctaccaaga

SEQ ID NO: 838994 - DNA, 505 bp, Homo sapiens
tgtataacgcaaaaagccaatgatgagtcaggaatggattaaaaagttgataaatctaaacaatattcrctgtaaaattatgataactaacaacaatgaagagcaactgggagtatttatttttattttgtaagtgaaactaaaatattgcccaacaatattacggaagatgggaggaggttttaggagtaaaagcatgcaaagttccttgtattgtttgaggaaataatagagattttcattagctctaaacctgcaatcatgcatgctaataattaaccaccaatgaaaataaatcaaatgtttaacttctaaacaagggaagaggaaagagtggatgaagaagcaaagaaaaagcatggtacacattataggcagtggctcacgcctgtaatcccaacactttgggaggcccaggcaggcagatgacatgaggctaggagtttgagaccagcctggccaacatggtgaaaccctgactctactgaaaatacaaaaattagcc

SEQ ID NO: 838995 - DNA, 632 bp, Homo sapiens
taatcaagggaaagacaggattagatttgcatccttaaataagccttgctgcttactaagtgaaagtaaataggttgtggctagawcagagtgttacattgtaaatacagatgaggctgttgtcacaagctgagcaagagacatcactggctggtgctcagacagttgtgaagaagctgaagagatgtgtatggattcattacaagaagtaaaattggcaggacttgataattgattagcaatgggagcaagaaagagaaaaagtattacaatacgcagctattgcccttttgctttgtatgctggtaagctctaagatacaatttcagtctgcattttatttttatgaatgaataaaaacctttgggcatgtgtttctgttcataagctctcttttgcttcattttactgtttaattataaggtttttttttcttttgccatataatttatatttttgtaactcaatgccacttttgaaatgagatagcatatatgtatatattcattacattacaatattctcatttattaacaatgttttgactgtcataaaatcagttaatatattccattaaaataaaaaaatacattttaaaaactcattgtagagtggcaggaaaggtggaaatg

SEQ ID NO: 838996 - DNA, 511 bp, Homo sapiens
tgagggggaggagcaaaggaaagatggcagaagcagaggtggagcatgtgcaaaggaccagaggcctggaggtgcatttcgagaggcacagaggcacagtttcagaggcacagaggtgcatgatttcgggtgtggccactgggccattatggctggaactcatgggaaatggaaggagttgtgacagaggaggctgggaagctgggcaggagatgtccatggaggttctaggcaggaaagtatgtggtcactctacctgtgtggctttcctgcctgtaggggctcaattggagtgtccttttctccacctagcttcagcccaagggaaacaggggaccagacagctggtgagggggcagctcaaactgtggaagaagagaggctctctcagccctcctccctctccagtgctgaggcaacaacaggcccaggccacactgggggatgtggagatctggagagccaygggcttcattcacagaagctgacccaccaccccaccacagccccc

SEQ ID NO: 838997 - DNA, 439 bp, Homo sapiens
tgccatgttcctgaacatcagcaggatccgtgagctcatgtttagaaagcagaaagatagctccttgtcaaaacacccagctgctgctgggacaggtttcatgggcgttgtggatacgtagtaagagaagacttcagaagacaccaaagggctctagccgtgagtggcagggagtgcctttggttgtcttgggtgactccgaggtgactgccggatgctgtgggtgcaggacgtcaggtggggcccacaggcagtgagacagtgaagtgacagaggggccaggccccaccgcggcttttctggagtgctgttctttagcacagccctgtttgaagccaggaaaggcgccctgagygtatcaccagaaaggggctgttgcaaagagcaggaggtagcactggtggggaatgggttcccaaaccccagtccttgtgaattt

SEQ ID NO: 838998 - DNA, 569 bp, Homo sapiens
cctttatgagctgtaacactcaccgcaaaggtctgcagcttcactcctgagccagtgagaccacgaacccaccagaaggaagaaactccgaacacatacgaacatcagaaggcacaaactccagacacgcygcttttaagaactgtaacactcaccgcgaggtgccgcagcttcattcttgaagtcggtgagaccaagaacccaccaattccggacacattactttctatttttattatttgtctatgtctcttgctgttttcttgctccttggcacatagtaggtactcctttcaattattaagtaagtgaatagacaaattaaatgcatgagtgatttagtaacccaattgatctccgaaggtatgtctttgggaagaagaaattaaacagccaaatgctatactagcattcatttcagacaacaaactaaatgaaatggcaaaaatatattcagaattatcccaatgtagttttactccaaactctaagtttgctcacacttccttcttttggtttctttaacccaaacaactaatcgttattctcagagttggggtaaaatgaga

SEQ ID NO: 838999 - DNA, 565 bp, Homo sapiens
atgctcatacctagcatggctttcagaccacaaattcttcttgcctggattackgtaacagtttcccactggtctccttcttctatccttgtcctcccagtatcccttcatacagcctcatacggcctccaaaacggcccttagagaagaaccttgtcacttctgtgttcaaaactctccactgtcttgccacctcactcagcatgaactccagagaacttataatgacccaccacacccaacatagctccttgttgcaacctatcccagttcatcccccacccctctcctcctcacttacagggagaagcagcctccagcctctgagcacctttgcacacaccatgttctttctctcgaacacgctcttccctatatattcatagcccacgctctcccttcatgccttcggggtcctgtttaaatgtcactttatccgaaagggtttctcttataagtctagcatcctaccccagccctgtctggccccatcactctctattgcctaacttggctttactattcttcataacacgcttaccactggacctggggctagtgttgc

SEQ ID NO: 839000 - DNA, 566 bp, Homo sapiens
aaaaaaaatagaaaatatggaagtgactttggaacatgggtgacaggcagaggaaggaacagtttgaagggctcagaagaagacaagaatatgggggaaagtttggaacttcctagagacttggagggcttagaagacaggaagatgtgggaaagtttagaacttcctagagacctgttgaatgactttgaccaaaatactgatagtgatatggacaataaagtccaggctgaggtagtctcagatggagatgagaaacttgttaggaactggagcaaagataaccctcgttatgctgtagcaaagtcaggtggcattttggccctgccctagagatttgtgaaactttgaacttgagagagatgatttaggatatctggcagaaaaacatttctaagtgcagagtgttcaagaggtgacatttgacatctctggacacaagagagcataaaagtttggaaaatttgcagcctgacgaaccagtagaaaagaaaaacmcattttctggggagaaattcaagctggctgcagaaatttgcataagtaaggaggaaccaaatgttaat

SEQ ID NO: 839001 - DNA, 632 bp, Homo sapiens
cttctccatgcgaatcactttttctcatccagccctataaaattgaccttgctttccattgttataagtaacgagagtcagttatgattatattactattttatcagaaatkcatgtacttattagaatttaaatatttatttaaattgacaagtaaaaattgtatatatttatagtgtacaacatgatattttgaaatatgtatacattgtagaatgagtaaatcaagctatttaacatataccttacctcccataattatcatgttttttttgcagtgagaacatttaaaatctactgtttcagcaattttcaaatatacaatatattattatgatctgtagtcactaagatatacaacagctctcttggacttattcatcctaatttaaatgttgtcctttgaccaatatctccctatttcccccctgcccctcagcctttggtaaccacgattttagtatttcactgagttcaacatgtttacactccaaatatgtgaaatcattaggtatttgtgtttctgtgcctggcttatttcacttaacataatgtcctcctgattcatccatgctgtcacaaatgacagaatttcctatttttaaggcttaatcatattccattgtgtatat

SEQ ID NO: 839002 - DNA, 558 bp, Homo sapiens
caactttagatcaagctttgtctcttgaccatctttgttccctaggggaataatttctaaactaattacaccacaaatttaatatattacctcagcgcacaccaagagctgccagatgaggtaaagtgcagaaacagtttctgaagagtttcatcaggatctactaccgtatacctgacacttttcttagtattagaagcttaatatggcagtggttgtctttgtgacagtttggacaccagaatcactgttatttactactccaaaataagcttgaatgcctctttccttctccttgagaattattctagttagtcttgaaactttgatgtagttgatcttcaagacaagtattgccataaatgtccctgcacctgactttcaagaaaactcattactctcatatttccccaggataactatagaagtttaaaacaataaagagtagtaccatgagagagaaataaggtgggttgttgttcatttattcaatgtttatgaatagttgtcatgcaccargcattttgcttttgatgccagaaatagcaaacagttcct

SEQ ID NO: 839003 - DNA, 541 bp, Homo sapiens
atgtacttcattattttgtgttatttctactattggtttactaatgtacttcttttttaggttctgctttaaggtttaaaatataaatacttctgytttaaggtttaaaatataaatacttctactttaagttttaaaatataaatacttaactcatcacagcctactttcttttttttttttttttttttttgagacggagtctcgctctgttgcccaggctggagtgcagtggcgggatctcggctcactgcaagctccgcctcccgggttcacgccattctcctgcctcagcctcccaagtagctgggactacaggcacccgccactacgcccggctaattttttgtatttttagtagagacggggtttcaccattttagccgggatggtctcgatctcctgacctcgtgatccgcccgcctcggcctcccaaagtgctgggattacaggcgtgagccaccgcgcccggcccacagcctactttcaaataacagtatatcacttgatatgcagtataatacattgccagtttttttct

SEQ ID NO: 839004 - DNA, 648 bp, Homo sapiens
cttaaagttagaatgattgttaattttaaataataaaagtattccaaaccccacaaatattaaacaacaacaaatttatgaataaagctaatttttaaaattaggacaagaagcaaagagttcttgctacatgaacttcattcagtctaatctgaattagagaatgttttaaatcaatgtagtttcatttctgtaaaccatacataactcatacagctagaaaggcactgcttgtaacagataatgtagggatctggttaacaaatagagaaataattcataattagcatgccaattatacatgactggttgctttcctggacttaaaatggcatatacactaaactttctttctttgtggattattaatttgcttggcaaatccttcccagtctagaagtaagaactcacttcttgtcttgctgaccagagctcttctaaggagatttcactatagtttacaggcaacacagttggctaggttttcaagtgacctgtgttcctcattgccccactgcctttggcttacactggagcaagttatttgcatatatgcaaaccttaatttccctatttgaaaagtggggctgaaggtctgtgcaagttcaagtgaatcaattgytaaaatccaatttgatcctaaaaaag

SEQ ID NO: 839005 - DNA, 619 bp, Homo sapiens
ctgggttcatctccatggttcttctgcttatcttgcctcctggagtcrcctatgtggcaattgattggtgggttgcttggaggctggctggtggggaccatctcattcatatgtgagtgaattgctggaacagcttgctgtctgggcctctctacttggccttatcctcaaggaagctagcttgggctttcctatatggtgatagcggtgtttcagaagagtgagagtggaagctgcaagatctcttaaggcctgggcttggaagcctcacaacaacacttctgttggtcaaagtaagtcacaagcgcagccctgattcaaggagtaggaaaatggattccatctctttaagaaaagagctgcaaataattcatggccctgcttcatctacgcaggtaggaggagtcagtgttagagccattggcccctataaatgtgggctgctgggatgtttctttaatgtcaggtgaaaattcactttgggaaaggagttgcaaagtgagcccaggttatggtctttctactgtcagatcaacccttggcaataagctcctgcactcttgccagatgatttttctaagattcaactctgattgtatcactctcaagctcatacctt

SEQ ID NO: 839006 - DNA, 312 bp, Homo sapiens
agtcccagctactcagaaggctgaggcaagaggatcccttgagtccaggagttcaaggttgcagtgaaatatgatcatgccactgccctgtagcctgggtgacagagtgagattctgtctgaaaaaaaaaaaaaaaaaaaaaaaaaaaagattgtctgtgaggtcattattgttgaagstgggcaatggatacaggggagttcattatactattctctctagatttttgtatatttaaaaattttcataataaaaaggtttttaaagtgccgtatgtaaatagttgaaagaaaactaaagaagtctagatgt

SEQ ID NO: 839007 - DNA, 659 bp, Homo sapiens
ttagaaagcctgatttgctattttctaggtgcaattagttggctttttcatcctttgggtattgtctgtccaagctttctacttcttraatctatttgaataatccacagtttcctagaagataattgtgttatttgaaaaactttgtagaggacgcctcatcctacaagtttatgttctgtgtgtgtgtgtgcttcctaaaccatattttgtataaacatgttgctattagttaaaattgataaatatgtttgtgagtataggctatctaaagataagaatacttcatttgtaaaagataagcatttgctatgtacttaagatgtaaacctctaaaattttaattatgcttatgtaaaacataactcataagcaaaagatggaacttgtttattaggagtgtaaaggcactaataagacaatgtgatcttgagccaactgagtgtaagccatgtttaaaaagtgccttccccagttatctcaaatacctaacctgtcacaccagcaataaaaaattaagcattgcctttgcatcctcatagcttagctcccacatatgagtgagaatatgtgatgtttggttttccattcctgagttacttcacttagaataatagtctccagttccaaccaggtcactgcaaatgctattatttttt

SEQ ID NO: 839008 - DNA, 633 bp, Homo sapiens
aaaaaaatagagagaagactcaaattagtaaaatcagagaggatattaccaccagctttacagaaataaaaagcactataagggaatactatgaacagctgtttgccaagaaattagataaactagatgaaatgggaaaattcctagagaaacacaaactctcagactgaaacttaggtcagaataaacctataacaagatattgaattagtaatcaaaaaacttcttgcccacaaagaaaagcccagggccaaagtcactggtgaattctgccaaacacttaaagaattaacaccaatcccttacaatgtccttcaaaaaatagaatacaaagcactaaccaattcattccatgaggtcactattgccttaatactcaaactaggaaacaaaatcacaaggaaaaaaactataaaccaatataaaccatccataaatgtagatgcaaaactcctcaacaaaatattagcaaatcagatccagcagcatattttgtaagtattcatcatgactaagccrtacgtattcaaggaatgtaaggttagatcaacatacaaagatcaatgtaatataccatatccatagaccacataatcatcacaatagatgcagaaaaatcatttaataaaatcc

SEQ ID NO: 839009 - DNA, 613 bp, Homo sapiens
tcaactctgagaagaaaaatgccctctaggcagaaactttacatacacagtctttgtcagagagtgtttatggaaattttacaatattaaatatattcagctggttttaagaatgtaaaaaggcccaacagccaagattttagaactcgtcttccaatagaaggccaaccagtggaaaactggaagggaagtcttggaatcctgccactttttaaagaaaaataaaataggatatgtttccagtgttgtctcagatgtagtcaattaatgtgaccattcccctgctctttcagctttcagcttttctagatgacagggccaacggacttgagacgagctgggtgacaaggaggaacttgaagcccttgcggcattagctaggcttctagaagtgccccatccgaagtggctccaggacggagaaataaacaagggcgtgagatgggagaatgccagatgggagtcctggcaacaactggagaaaggaacaaggaacaaattgataaacgggtgctgctgatcggggctgccatgggccaagttttgaaaggggggaagaaaagtggatccackagcaagcagcccacacaacgacgtcattttgtgaattcaa

SEQ ID NO: 839010 - DNA, 656 bp, Homo sapiens
gtactgtaaaattcatgaaacatggacacactgatgaatgtaatatggtcctgctttaatgattcagaagmacatcaaggttatgctttaaggccataattttgagcaacagtcttaactgcagtagaaatatgtggatgatggctaatagaaaatctccattaaccaacagctagactggaagggactagctctttttcccttcacttaaaagttaataaataagtgaattgggatggcaattaagctcaccctttttgctttatacgccaatatttctgtacatgattgtagtctctgggtagggttgaggatgctgtatcagagaccacgagaggattttcctggtggcacaacttcagggccaacattgccctgggaatttttttctcattctccatgcatctccagaaatgatgcactcattctggagaaaaggatattatcacctctacagagatataagatgtattgctttaatgctcatgcagtttggatgggttgggatgcttagataaaatactatacaaaaatacaaaacagtgctcattggaatttcaaatcatctcccctgcacccttttaaactactttatatttattggttatgtcctgctggggccattagacctttgattgtatagtgtttccttttta

SEQ ID NO: 839011 - DNA, 661 bp, Homo sapiens
agcagatgcaaagaaatattatcctttagaacccatttgatcccttttttaaacccaagaaaacataaatgcaacaatagatcaatttgactgtaaatattatctaagtatgtcctttaaaagccaaaggaatgtcagatacaatttattttccaccagtgcaagctgagacattaagtggcaattctacttccattagctaaatctggcaaatatgcaactgtttaaaggcattgtcgatagccattcacaattaagtatttgtactgatgccttattaaattacccttttcaagtaggcataataaactaggagttcactgtgcagattttcatggggaaagtcagatcagtatggaatttatttagagagaatttagtgcactgagtaatgaagtaaatgtcaaatgttttgaccaaataaatcttatcttccttaaaacttttttttgaggtcaagagacacagcaaaataaaaatcccagtgattataatggtcataatttataactttattgaaacaactttaaaactttgattgttttttaaataatgaaatctgttttstttttaactgacagcattgccctacacaggggatttctactcttcctttacaaagctggtttcttccaaacattaagatctcttacagggactg

SEQ ID NO: 839012 - DNA, 661 bp, Homo sapiens
agcagatgcaaagaaatattatcctttagaacccatttgatcccttttttaaacccaagaaaacataaatgcaacaatagatcaatttgactgtaaatattatctaagtatgtcctttaaaagccaaaggaatgtcagatacaatttattttccaccagtgcaagctgagacattaagtggcaattctacttccattagctaaatctggcaaatatgcaactgtttaaaggcattgtcgatagccattcacaattaagtatttgtactgatgccttattaaattacccttttcaagtaggcataataaactaggagttcactgtgcagattttcatggggaaagtcagatcagtatggaatttatttagagagaatttagtgcactgagtaatgaagtaaatgtcaaatgttttgaccaaataaatcttatcttccttaaaacttttttttgaggtcaagagacacagcaaaataaaaatcccagtgattataatggtcataatttataactttattgaaacaactttaaaactttgattgttttttaaataatgaaatctgttttctttttaactgacagcattgccytacacaggggatttctactcttcctttacaaagctggtttcttccaaacattaagatctcttacagggactg

SEQ ID NO: 839013 - DNA, 685 bp, Homo sapiens
catttgatggacaatttttactctgagtgaaatgaggagcccttaaaggattttgagcagataagtgacataatctctttctggctgctattttgggaagagactgttggggacaaggatagaagcagttaggggggttgttacagtaattcaggagagataatggtggccccagcatgagatgctagaagtagccagatgctggatgaaaccaacagaatttcccaatgaactggacctgggtgtaagaaaaaaaagtcagggatgatgcttaggagagactttcaggagtttatcttaagacattttaattaaaaaatatctgttaggtcaagtaggcagttgatcattaagtcagaaattcagaggcagtctaaaagttgttggcaatagagagcatcaaaagatatgggatttaatgttatcctcaagaaagtaagggtggatagaggatagaaaagaccaaggtcacttcaacattgaaaatggagggagaactgagaaggagccaccgttatgctaaaggaaaaccaagaatgtagtattctagaaaccaagaagagggtaatcaactgtgttaartagcagtgataggtcaaatgataattggattagtcaacatggaagtcattcgggactttaacagaattatggggagaaaatagtgcataatgggaatagggcc

SEQ ID NO: 839014 - DNA, 613 bp, Homo sapiens
ttaatggaagtttatttttatgcttatggctataaagttcatatatttagatcaaacttaatctttgatctatcagttcctgacaggggctatttatagatttctccctgtaattttatcagttgctttatctagtggaggctatattattgagccctgctatagactgaatatttttgtccctcctcatccctgcaaaaattcatatgttgaaatcctaacctccaaggtgatgatattagaaggtggggcctttgggaagtgatgaggtcatcagggtaaagccctcacaaatgggattaatgaccttatcaaagaggcctgagagaggtcccttgcccttcgcaccttgtgtggacttaacaaaaagactgccatgtatgaaccaggaagtgggctctcaccagacactgaatctgccatcagcttgattttgaacttctcatcctccagaaatgtgagaaataagtttatgttgtttataagccacccagtctattttattttgttatagtagctgggattgagtgagacaagtacatatttattatgattgctawgtattcttgttatattattcctttaccatgattaatttattcttttttcgtta

SEQ ID NO: 839015 - DNA, 644 bp, Homo sapiens
tacatattatccatttggttcttaaaccacaaaatctagtgagacaatataagtatttagttttacggatgakacataaataagtcaatgtatccaaagccaaaaacttcattccctctccaacacttaaatctacatttccaactagtaatcttcccctgggccaccaaatcattttgggtggacaaaatagaattatttgcaccctcaaaatctatttcttttcctctatactctttccttaggatgtcacccagtcacccattaaagatggaagtgacacatggacacagggagaggaacatcatcacacaccagggcctgtcggggggtgggggggacaaggggaagggagagcattaggacaaatacctaatgcatgcagggcttaaaacctagatgacgggttgataggtgcagcaaaccaccatggcacatgtatacctgtgtaacaaacctgcatgttctgcacatgcatcctggaacttaaaataaaaatattaaaaaaataattaaaaagatggaatgacagtattatttattaggggtagccttaagtcttctctcaccctagatctcactggtcaccaagccccatcaattccgtatccttaacatctctcgggtggatcccttatctattt

SEQ ID NO: 839016 - DNA, 469 bp, Homo sapiens
ggccaagctctgcttcacttaactctcagccattgtttggaatcagcagaaacctctagaggaaatgccactacaaatgccaagcttgcattytggtttccttcctttcacagatcttaattttatgcttttcctagactttttctcaggaggaacatttatctgaataacctaatctgcaattgctagaagtgaaaatctcttctatttaattcttgttttcagggaattagagataagaaatagttcatcgtcaggtgaaaaaaaaaaaaaaaaaaaaaccatgagtaacagctaatgatggttggagaattagggcccaaaaagatagtttgagactagaacaataagcagattttaacagtaattctaaatttctaaggatcggtaatctcttagagaatctgattagagttgtggagccagaaaaatacacatggatacatttgccaaacatattaatataatt

SEQ ID NO: 839017 - DNA, 469 bp, Homo sapiens
ggccaagctctgcttcacttaactctcagccattgtttggaatcagcagaaacctctagaggaaatgccactacaaatgccaagcttgcattctggtttccttcctttcacagatcttaattttatgcttttcctagactttttctcaggaggaacatttatctgaataacctaatctgcaattgctagaagtgaaaatctcttctatttaattcttgttttcagggaattagagataagaaatagttcatcgtcaggtgaaaaaaaaaaaaaaaaaaaaaccatgagtaacagctaatgatggttggagaattagggcccaaaaagatagtttgagactagaacaataagcagattttaacagtaattytaaatttctaaggatcggtaatctcttagagaatctgattagagttgtggagccagaaaaatacacatggatacatttgccaaacatattaatataatt

SEQ ID NO: 839018 - DNA, 469 bp, Homo sapiens
ggccaagctctgcttcacttaactctcagccattgtttggaatcagcagaaacctctagaggaaatgccactacaaatgccaagcttgcattctggtttccttcctttcacagatcttaattttatgcttttcctagactttttctcaggaggaacatttatctgaataacctaatctgcaattgctagaagtgaaaatctcttctatttaattcttgttttcagggaattagagataagaaatagttcatcgtcaggtgaaaaaaaaaaaaaaaaaaaaaccatgagtaacagctaatgatggttggagaattagggcccaaaaagatagtttgagactagaacaataagcagattttaacagtaattctaaatttytaaggatcggtaatctcttagagaatctgattagagttgtggagccagaaaaatacacatggatacatttgccaaacatattaatataatt

SEQ ID NO: 839019 - DNA, 593 bp, Homo sapiens
aataaaaatttcagatatttaaaacacttctacctaatcacttcttttgaacaaaaaggcatatgtatgcttaatttctatatcttcatatatgtttattaaactttgctttgaaggctgggcgcggtggctcaagtctgtaatcccagcactttgggaggccgaggtgggcagatcattgaggctaggagtttgagaccagcctgggctatgtggagaaaccctgtctctactaaaaatataaaaattagcctagtgtggtggagtgcacctgtaatcccagctaactggagaagctgaggcatgggaatcacttgaacctagcaggtggaggttgcagtgagctgagatcacgcaattgcactccagcctacacggcatggtgagactgtctcaaagcaaacaaacaaaaactttgctttgaaacatacgttgaaaaggttttaaaattgtaaatttaattgttgaatacatttagtcaacttcatctgagtgatgaacacaggcatgcactctccaggtctcacttggaggaaggactcgttgccccarctgctgggagtgctgtcagcagacttttcagctgtcagccc

SEQ ID NO: 839020 - DNA, 485 bp, Homo sapiens
agcaaaagttccaatatagaagtactccaaagasattcccttatacaagactgttatacaagacattgaatacaagaataagaagtttacctggtgcctaaatatctctggaggctttgaaaaagaggtgatcagaatcgtacttcgaagagattaacttgaacaatgatggaagtgttctgtaggggtgagtgaaaagaataaagaacaagcagtttttttgaatggtaataagaaactaaagatgatttctggcagtccctgaggtagttcttctcaatttcccagtaaaaaaacaaacaaacaacaacaataaaaaaaacctataaaggcacaaagtctacttagagacaaaatctgccagcatagaagtagatatatgcctcaaccctcccccacagtctgcccctagggtagagataaaaggtatatatacaagattattaatcagtcagctctttgccttaaaaagcattacctatcag

SEQ ID NO: 839021 - DNA, 602 bp, Homo sapiens
ataatctgagtgatacatacttctactacgttttcgctgcccataacwccctgggaagaaatcagaaaaaaaaaaaaaaattattacctcctgctagctacctatcaatgttagacaactgtaatgtgttttatactgagaaaatatatagaagaaacgtttcttccactgaagatcttccaaaaacagtaccaaatagtattttatgtaataatgaaaaataataataacacatggcatagctgagtacagaacatacatgcaatataagtttgtgtatttttaaacatgcactcatatatttaaatttcaagaaatgtttattgacatgtgaatcagaagactctgcaaataataatggacacaattaaatgtagcttcaacagtaatgaatttctattacttcttaatgagaagtctagaaataagactgcagtgggattgactaactcagtggctaaaacaagtcatcaaataccaaggagctttacatctttccatagaatagcttgagtgtgataactatgcttttcctcactgttttaagatagttgaagcttgtttctggcaatgaagggtgtttccttctatgtatcattttt

SEQ ID NO: 839022 - DNA, 602 bp, Homo sapiens
ataatctgagtgatacatacttctactacgttttcgctgcccataactccctgggaagaaatcagaaaaaaaaaaaaaaattattacctcctgctagctacctatcaatgttagacaactgtaatgtgttttatactgagaaaatatatagaagaaacgtttcttccactgaagatcttccaaaaacagtaccaaatagtattttatgtaataatgaaaaataataataacacatggcatagctgagtacagaacatacatgcaatataagtttgtgtatttttaaacatgcactcatatatttaaatttcaagaaatgtttattgacatgtgaatcagaagactctgcaaataataatggacacaattaaatgtagcttcaacagtaatgaatttctattacttcttaatgagaagtctagaaataagactgcagtgggattgactaactcagtggctaaaacaagtcatcaaataccaaggagctttwcatctttccatagaatagcttgagtgtgataactatgcttttcctcactgttttaagatagttgaagcttgtttctggcaatgaagggtgtttccttctatgtatcattttt

SEQ ID NO: 839023 - DNA, 491 bp, Homo sapiens
cttttggcaagagaagagtgkgtcaatataaagagcctaagagaggtgcacccttgagcctcttttgaactctgttcaatgaaaggaacagattggaaaccctgttactctctcaagtcaagatcctttctctctgactgaaaggtctctcaccactagagcagggagtcaaaactcttatactgcaaagatccccctccaggcctttttcctgatccttaatgtccaactttagtgattggaaacatatgacttttcaatactttcaaaggagtgttcagtaaaggaaatcagacaaactctgaaatccatattttctcacaattgttacccttctacaaggatattacctgtgtagctagctagagcctatagtttaggtagaaaataggctaaagaagattggaggggcttaatggacccagaaaggtacctgggtcctgaaatatctcccacttcaaccctaaaactctttgtgtcttaaattgtat

SEQ ID NO: 839024 - DNA, 432 bp, Homo sapiens
cttacttgtccacactgacatgtttgttagtgtattccaatttcattagtccaatggaacctttttaatgtcctttcacctggaaactttctggtctagtgccttgtkgttttgctaatgaaactcttatcttgtccagccattgataccctctggcattatttatttaagctagtttttctttattatattcattacaatcagaaatctaagtattttaatcatgttcccactttattatgtttatatgagcaacggcgtttctgaagacccctaccccccaatagcactccttatggagttctaaacaatttgaatatttaaaaaagatggaaagtgtagatgaataaacaattatcatccttgattttgtctgttctgctatgttttccatttcagtaatgtggaaaatcttacacatattggaatatg

SEQ ID NO: 839025 - DNA, 618 bp, Homo sapiens
aaatttcacctccacttaacagctgtctggtgtaggacaagttgtctgactcacttagttttgtcttctctgaaatagggaascttatacctcatggagttgtcacaggaacttatatgatatagtgcttgtaaagcttttagcacattccctggcataagttaagttgttctataaacaatagttattgtgattcattttgttatctttcacaagtttcagcagagtacaaggaaatggtagttgcgtattcaattgaagtggatgaaatcagactgtattttaaaactagcaagcatataaaggacctgctttgatttttcctagagctgatatatacgttagaatccatttttatatcagagtaaatgtgagcaagataaataatgtgtagaaaaaaattcttttttataatgtcttctgcttgtagaagagtatgtttaataaaatattttaagtgatctttgttgggttcctaaacagcacattttagcactttttgatgtgaggtaaagaattaggacaagtgttatgatcattttctggtatttcaatctcgtagtctttaatttattcatttatttggcaaccatttgttgagtgtcaactatatgtcag

SEQ ID NO: 839026 - DNA, 590 bp, Homo sapiens
atcagtaataaggccggtcgtggtggctcatgactgtaatcccagcactttgggaggctgaggcaggcagattacttgagtctaggagttcaagaccagcctggccaatatggtgaaacccagtgagctgacatcacgccactgcactccagcctgggtgacagagcgagactttgtctcaaaacaaacaaacaaacaaacaaacaaacatcagtaagaactgaagaggaagaaagctgagaaaactctgagggatgtggggtttccatctggagaggctcagtgtccacaaggccctctctccttcctgtcacctactgggcctcttgcactgtatcttagcaggccctgtgctactgggaacagattcctctacctttgtgggctcttggtctttcactcttacattatctggacttataagtcctggcttttccttgatggtggtgccttctctattcctgtaacactgatgcatggagatgaaggagtaatggacaccagtgttcttgttcttcactgcctctaccaggctattcaaatgaagaaatttcataakggttagtaaggtgaagcccgtgccatccata

SEQ ID NO: 839027 - DNA, 626 bp, Homo sapiens
ttaagaaaatgctcaagggccgggcgcgttggctcacgcctgtaatcccarcacgtggggaggccgaagcgggcagataaggaggtcaggagatcaagaccattctggctaacatggtgaaacaccatctctactaaaaatacaaagcagttacccgggcgtggtggcaggcacctgtagtcctagctactcgaaaggctgaggcaggagaatcacttgaacctgggaggcggagcttgcagtgaggcgagatggcaccactgcactccagcctgcaatagagcaatactccatcaaaaagaaaaaaaaaagctcaaatatttcatatgtcataatgaatttatctaggagaggattcacaagaagaatatattactaagatgatgaattgcctattattattattataatgtagcagcaggttcattgtgtacagcaatgatctacaaccaagtcattatatagagcccagtagtgaataatttagattattctatgaatctgggtatctcaaataacttttaatctctaagtaattgccaaaatattttctgaagtattataaaaatggtgatgtaatgaagatggcagctggttaaattaaaaaaatatatattttcctcaga

SEQ ID NO: 839028 - DNA, 427 bp, Homo sapiens
cttacatgaatggcagcaggcaaacagagaatgaggaagacacaaaagcagaaagaaccctgataaaactatcagatctagtgagacttattcactaccatgagaacagtatgggcaaaaccrccccaccccatgatttcattatgtctcactgcgtccctcctacaacacatgggaattatgggagtacaattcaaggtgagatttgggtggggacacagccaaaccatatcacacgttaaaatgcactttgttttttcaaatttcgcccctgtcatcccttttttagtactatcttatccttctagtgattagacaggttgaagggtactgcatgtagtatttatgtgataaaaactatatttttttaaaatatgaatttagaaacatgatgaaagcttaatgttttcttaaatatggatttgga

SEQ ID NO: 839029 - DNA, 584 bp, Homo sapiens
gcatttatatttagagagagacagacgattttttcctgaacatgtgagaaaagtttggagatattgtatctttttrctactaaatgtttcagtatgtactattttatggaaaatggcaggatattttctcacatgtccacagtataataaaatcagaaaattttagcattaatatatttccatggtatacccacatatcataatcaaatttatcaagtgtatcaattacgtattttatagtaactttatttttcctggtccaagaaccaatctagaactgcacttggttgttatatttgtttagccttctttaacctgaaatagtatcttagcctttcctaagtttcttggccttgcaatttttgaaatgtagaaaccagacatttagaaaatatttttactaaattgggcctttgtcctataattagattcaagtcaagcatttttggaaggcgtgccattaagttaaaggtggatccttctcagtacattatatctattatatctgaggcacatgatgttgaaatgtttcaatatcggttaactttggtaactttgcttaagattgtgtctgtcaggttttt

SEQ ID NO: 839030 - DNA, 584 bp, Homo sapiens
gcatttatatttagagagagacagacgattttttcctgaacatgtgagaaaagtttggagatattgtatctttttgctactaaatgtttcagtatgtactattttatggaaaatggcaggatattttctcacatgtccacagtataataaaatcagaaaattttagcattaatatatttccatggtatacccacatatcataatcaaatttatcaagtgtatcaattacgtattttatagtaactttatttttcctggtccaagaaccaatctagaactgcacttggttgttatatttgtttagccttctttaacctgaaatagtatcttagcctttcctaagtttcttggccttgcaatttttgaaatgtagaaaccagacatttagaaaatatttttactaaattgggcctttgtcctataattagattcaagtcaagcatttttggaaggcgtgccattaagttaaaggtggatccttctcmgtacattatatctattatatctgaggcacatgatgttgaaatgtttcaatatcggttaactttggtaactttgcttaagattgtgtctgtcaggttttt

SEQ ID NO: 839031 - DNA, 615 bp, Homo sapiens
gaaaagccaaacaaatatccaagaagttttctgtcttaggttaagatgagacagtgcacaagctcaatgacactgagcccaagtcaagctcaatcctatgtacatgagatgcrtgaagctgtttaacacctcaaagaaagacagcgttgaaggggcagatcccactccaaagcagatgagagagcacagtctgcagaccccaggtgtctgcaaatggctcctcttccaagaacctcaggaagttgcatcagctacaggtgcttccctaactcccctccccactgccaagggcgtgggcctccatgcagcaagcttgttctgctgtagagtaaccccagatgctaggtgtgcggaggaaatcaaagcagggctgagagctactttgggctctgggaccttgtatgatttatgtgagtgtaggtctcttggatgcgttgccatgtgggctttctggtttaagggttgtaattcttttttgttgtttttttgtaaagacagagtctcactatgttgcccaggctagtctcaaactcctcaagcaatcctttatgtcatattggacaatctcagattagtggcaagagaaaagacgttctaactacctgtgattacagc

SEQ ID NO: 839032 - DNA, 599 bp, Homo sapiens
catcaagttcaacatcctttacctttgagatgaatctgctgctgccttgatgtgttgtaacggaaggcaagtattgtaactcctgtttcctcagctctggggctctcagaggccacgacctggtcctgaaacctcagggtcttaatcttttatatgcagagcggaggagttacagaaatgccttcgcctgacaaggttacacacacgaaattagcactagattcacagagatcttattccagggacaaagtgttaaacagtccccatcccctgctccctctgcccaccccgggggcaggtaagcttctgctctggcacgttccacagaggccatgacttggctggaagtaaagttaatgtttagaacatgccctggatcatctgtgagcatgaatccttggtgcatcaggccaggctgccctccacggctcaggcggtaaagaaggcgggatggtgtgacaagtcacacttcggggtcaccttacaggatgacttagagaggcatgtttttctttggagccgctaatccaaggatagagctgrgtgaggacatttcacaatatgctcagtcctcccccagtgggggcaggaacagtgac

SEQ ID NO: 839033 - DNA, 613 bp, Homo sapiens
ttccctgtttaggctcttctgtgtcgagtggggccaaagcagccctaactaaggcccataatgttaragatgttactggtacccattgcccttgtgcatgatattgtttaagatttctgcccacttgttcccagagctctaggtctagcatgccttcttccaggaatcatgggttatgggaaacaacagtttgcattaggtcccttaattgacgctgggaaacccaggcttcactagctttaagcagctatttcaatacttttatatttgctgttgagctgataactgttgtcccatgatgaaaccctagcttgaaaattccctcaaacttggaaatcccaagcaggcacccattacttattgactgggcagtcactttacctttgttctcaagggttctgtcacaatctgttgctgagttcctcataggggacaccagctgctgggttcatgctgcagaccctggctgagtgactgatgaaaggagtactcagacacaggtatgcagtgtaagagaagctaggggactgtccagcactagtggctgaagaatgagcagtcccaaacagctggggctgcttgcttttattcaatagagacataatgctgaaag

SEQ ID NO: 839034 - DNA, 613 bp, Homo sapiens
ttccctgtttaggctcttctgtgtcgagtggggccaaagcagccctaactaaggcccataatgttagagatgttactggtacccattgcccttgtgcatgatattgtttaagatttctgcccacttgttcccagagctctaggtctagcatgccttcttccaggaatcatgggttatgggaaacaacagtttgcattaggtcccttaattgacgctgggaaacccaggcttcactagctttaagcagctatttcaatacttttatatttgctgttgagctgataactgttgtcccatgatgaaaccctagcttgaaaattccctcaaacttggaaatcccaagcaggcacccattacttattgactgggcagtcactttacctttgttctcaagggttctgtcacaatctgttgctgagttcctcataggggacaccagctgctgggttcatgctgcagaccctggctgagtgactgatgaaargagtactcagacacaggtatgcagtgtaagagaagctaggggactgtccagcactagtggctgaagaatgagcagtcccaaacagctggggctgcttgcttttattcaatagagacataatgctgaaag

SEQ ID NO: 839035 - DNA, 632 bp, Homo sapiens
aaagttatttgcaatgaatatgtagtggcaaaaactttagacttcagagatggcattttaactagaactaaacataacctataatcatatattttagagcattgctaaactacatttacaaattactatacaagccaagatgatatctaaattccacaactaagttatcaatatcaaaagtataatgaagtgtgccaatatacgagtttcaggctgggctttagttccctaccttatcgggaaacaatcattgttctcttaattttatgaaaagtaaaaatgaatatgtttaaaatgcatcatattaaaatgtgtgcaattacttaattaaaaatgtcaatttatgatttctctatattgacatgtatttctaaattgtagttgacattatttaatatattcaaatagcttatatgcatattaataaaacattataataaaaaatcattatatatatttacgaattaatgggatctttaaacatgttaaatttgttttggtgtaatattaygaaccatgttaggttttaaatttcatttgcatttcaatccctggcatgtagatatcaaagctaaatcccagtcttcgttgtaatgaagttcatgttttgaatgtgtttcatgcttagttct

SEQ ID NO: 839036 - DNA, 579 bp, Homo sapiens
gtctattcaaatcgtttgcccattgttgtagaggattgtttagttayttattactgagatttgagaggtttttcttttaaaaaaatatattctgaataaaagttatttttcatatatattatttttaatcttttctcctagtttgtggcctgtcttttcactcccttaacagcatctttctaaaaacagatattttacattttgataggttccacttgatccatcttttctttaatgaagaagctaagaaatcttttgtctatatatttccttttctattctgttaataaggaatgttacatattgaaattataatggtaaaccttgcattactgagataaaccccacttggtcagatatattacccttgttgtgaattttggattcaatttggtaatactttgttaaatgtttttgcatccatattcatgagagatatttttctgtaatgtcttttttttctggttttagtatcagcataatgctggcttccaaaatgagttaggtaagtcctccctccttttccactttctagaaaggtctgtgtaatattggtaatattccttcctttaatgtttg

SEQ ID NO: 839037 - DNA, 474 bp, Homo sapiens
atgtttaccacctgcgcactgtcagcgctgagtaaaggggcccgaacccccggttccaggagcccctgctcgcctctccagccaccttcccaccagcccacaacgcacaaggaccacagcttccagaggcgccgygcgctctctttccaggcgctttccccctgctggaatgctccaccccttccgctcggcgaactcctattcatccttctggactccttcccagagctaactacagacctgaaagatttcttcttctgcgctctcagggaacaacagtccttaaagtccagctcacgctgctgtgctgcagcgtcgctctcggtcccctccactgcactgggtctccccactgcactgggccccctcttcactgcacccggccactccaccgcacccggtaccccggccctctatggcacccagttctctctcctcggcacccagttccccgcccccacctccgccccaacg

SEQ ID NO: 839038 - DNA, 632 bp, Homo sapiens
cctctggctttatctcccaacttatggagtgcatatgtcttacaaagtctaagtgatagctacttcttgtgtatgtaatacaatcagcatattatccatgtgatggatcagtgtaatatgagatgtccagatggttcggattttttgatttgtagtatgataaagtacaaagagttaatatagtcctgggggaatatagtaaataaataatgtccatcttacacaaatgcaattgttaatgattctttctattaattcaatcaccaaatcaatagccccagaccacgtatatgatgctgtgttaatttgctctagtagataccatatctgacatagtggctccagttgggctactattgggtcaagcttgtgatagtttacatcacagattagcaaattatagcttttgctgcctttttttgtaaataaagttttattggaacacacagccatgttaatttgcttgtatactgtctgtggctactttcacactgtagtgggagagttaaatttttgtgacagagcctgtataggccataaaacctgaaatatttactgtctctttatagaaaaaatttgccaactcctggtttacatcaattgttcasgatccatgtagtttttttaggggc

SEQ ID NO: 839039 - DNA, 609 bp, Homo sapiens
agtaaagtctgtagtttaggtaattgtaatgtatcacagttaattttacttctgacaaatgtaccaggattctgcaagatgataaacttagrggaaactgggtgagagatgtacaggaactctctgcactatttttgtaacttatgtgtgtctaaaattatttcaaaatcaaaagttattttttaaaaatcactgaggggaaccaagtttcatatagctgaaggaaggatttacatatatgtaaatgggaagagctagaatgtaatctatggtgttgcattggaaatggagggagaagactttattcgggaacaccatgacttgttgattttaaggtcagatccagatcctgaaaaatgaccttgtaagccatagtagaaagttggaactttgtcgtgagacaactgctcaaaggctgtgatagtttcccaggtcttttgtctctaccagcaaatcatgcagtgctgggcatacttctaagaccatctgggtcttacctgcaaattaggaataagttggcaagaaccaccacactaccagacagaatcctccatgattgaaggtgtagggagactccaagtgctgtgcctagcaggaaccacaataata

SEQ ID NO: 839040 - DNA, 602 bp, Homo sapiens
aagttatgtaattacacctctttgtgatgtcactttaccactcttctcatacatagatgcagacctatttctgtatctcttaaatttaagttkgttttgcttcttgctttaactaaaaaaaaaaatgcagcagtagttatattagtctttattttaaggctgagccttaatgtgagaacagacttaaagagacactgaggttattactttggccctcttggattctacatagagactttcatgacacaaagaacctggaataaaataccatgtagacagagtgatgcaaccatctcagctgtcccagatgagcttaacttccaaccaacttacctcctgaatacaaatacatgtgtgaatttaggtgcaactagcagaaaaaaatacgcattcaactcacagcctggtgacaaataacttgttttaagccactacatttttgtgtgatttgtaacagcaatacttgggaacatcattgtcagattattgaaaaagttaaggagaaaaaaatctcaaaaggaaggaaaaaactcacatacatattacatattggcagataatttgaggaaaagaattaattttcatcataaacaatagaggcc

SEQ ID NO: 839041 - DNA, 598 bp, Homo sapiens
aatactttcaaattcattgtatgaggccagcattaccttacaccaaagccagatgacgatactaaaagaatggaaaattacagataaatatccctgattaacacagatgcaaaagtcctcaaaaaaataccagcaaatcaaattcaacaacacatttcaacaacagattaaaatgatcatacaccataatcaaatggcatttatctctgggatgcaaggatggatcaacatactcaaatctataaatgtgatcatcactctcacaaaatgagggataaaaattatgatcatctcaatagatcaggaaaatctttgacaaaattcaacactttttcatgatagaaactctcaattgattagatatagagggaaaatacctcagcacaataaaagatcacatatgacaaagtcctggctaacattcttaaaggtgaaaagttgagaggctttcctctgaggctaacattcttaaaggtgaaaacttgagaggctttcctctgagatcaggaaccagacaaggatgcccggtatcatctcttctttytaacatagtactggaagtcctattcagagcaatcaggcaatagaaacaaagaaa

SEQ ID NO: 839042 - DNA, 504 bp, Homo sapiens
ctcagatgtgagaggtttaggcaagttaaattattccacatgagacatgaattggaaatgtggagttgtattttgctgttggagacagygacttgaagaccttctagataaagtgaaactgacagtcgcaagagattccaccaaggtgggaggcagcggtccaaagagaaacatggccaatgtaattctaggtacccctattcccaagcctttggggaagaaagacagaagaattatcatcccagagttctgaccttgaaataaggcctaagagtttcttacaattttttaaataaactgagctgaaaaatgttgagtgacttgtttaaatgaacacagccaggggcagatctaggaagagaacataggtcttctgactcctatgccatgctgaacgcagaaagctgaggatgcagagtctaaacatggaggaagaggtgaaggggcaagtgaaaagaaagactggagatcaaaaaaggatatagatggggcaaagcccagagg

SEQ ID NO: 839043 - DNA, 607 bp, Homo sapiens
atgggtggtgtgattttagcatattttcatggaattcattactctgcttatcgaatgagtaatatccttacagtsagtccatattttggaagtaattttataattttaaaattaaaatttattttactaataccttttaaaaataaatataccttccagtattcctactccaacttttctggggtactcatacacaaacaacttttctctacatacctggcaacaactacaactaacatagagataatatctaatgttctatgttatacctaaggttcttttcatcaacagcactaaatgaagaaaaaaaaaaaacttgcatattcagcgctacaaaccaaacaaaaaatcttactgttctacttaattataagaggcacagaactagctcttttcaatttgtcttgtttagaagaaatttaagagtaaaaaagagtacaagcccctcacatttcatagatgagaaagctgaatcacagggaagtaaactgacttgtccaaaatcatcaaatcaccagttggtatcaatgtcaggaacagaactaggtatcctaagtcctaaagttcagtgcccattctactaaaccaaacataaatatacagtttt

SEQ ID NO: 839044 - DNA, 630 bp, Homo sapiens
gaagactttataaaagaagcaaaaagtgtgtccaatcttaaaagatgagtagcatttgaagaagtaagacatgccaaggaggatattttaggcaaaaagataggtrtgaagagatctttaaaagctacagactgggaaaccaaaaactgaactttgcaggggcagtaagaaaactggtgtcaccagaattaacattcatactgaggactagtatgacactggataggcagcctagggctaatttatggaggtcttaagtaacaagcatagaagttgagatgtgatgggtaatagttcataattcagcataggttcttaaggaggcaagtaacataattaaaatagtgttttataaatggcaatcccacaataaaaaaggaaaaagatgggataaaaaggaaaaaagagatattggagttatgtggactaaataggagggtcctgcaatagtctagtcatgataatgaaaagtcatacccatctgaactaagttcttggatatggagatggtgacatcaatttgaggatgataggtcaaaaagcactggttaactgagtttgtatgattagagtcaccatacattggaagaggaggttgttctcttttgttaatgtgagaaaggaagagga

SEQ ID NO: 839045 - DNA, 610 bp, Homo sapiens
agtttaagagcgatcctatttctccacatcctctccagcatctgttgtttgctgacttttcaatgatctctgttctgactggcatgagatggtatctcattgtggtgttgatttgcatttttctaatgaccagtgatgatgagctttttaaaatatgtttgttggccacataaataccttcttttgagaagtgtctgttcatattcttcatccactttttgatgttttttttttcttgtaaatttgtttaagttccttgtagattctggatattagctatttgtcagctggatagcttgcaaaaattttctcccattctgtaggttacctattcactctaatgatagtttattttgctatgcagaagctgtttagtttaattagatcccatttgtcaattttggcatttgttgccattgcttttagtgttttagttatgaagtttttgcccatgcttatgtcctgaatggtgttgcctaggttttcttgtagggtttttatggttttaggtcttacatttcagtctttaatccatcttgasttaatttttgtataaggtataaggaagggatccagtttcagttttctgcatatggctagccagttttcc

SEQ ID NO: 839046 - DNA, 550 bp, Homo sapiens
caatgatctctgttctgactggcatgagatggtatctcattgtggtgttgatttgcatttttctaatgaccagtgatgatgagctttttaaaatatgtttgttggccacataaataccttcttttgagaagtgtctgttcatattcttcatccactttttgatgttttttttttcttgtaaatttgtttaagttccttgtagattctggatattagctatttgtcagctggatagcttgcaaaaattttctcccattctgtaggttacctattcactctaatgatagtttattttgctatgcagaagctgtttagtttaattagatcccatttgtcaattttggcatttgttgccattgcttttagtgttttagttatgaagtttttgcccatgcttatgtcctgaatggtgttgcctaggttttcttgtagggtttttatggttttaggtcttacatttcagtctttaatccatcttgagttaattttygtataaggtataaggaagggatccagtttcagttttctgcatatggctagccagttttcc

SEQ ID NO: 839047 - DNA, 582 bp, Homo sapiens
gatggatggatggatggcctggtagactatggcaaataaatgaatgcagatttatttttcaaaataataaatatccaacaaattcsgaactgttatttctccatccttcctttaaaattcaattaaaaatatagtgtagggataccctaaatgtcttacaaattaaatttcagtgaaaaggagtgttttttcttgaaactagcgtaatgaaagatgttttcagccatgtgcttggtgctcatgtttgcagaaacaaagtattaatttgggagaatgtttattttaaaatgccacatttatataagagctaaagttgatactaatacaacttcccagtgtataaatcgaaactgcaacacgctttccaaattggaaaatagagggcagaagtcatgataatggaattggtcttagcaattaattgtcaatcaaggcattcttgacttttggtatggtggactttgtaatctataactgtcaataaagatgattgacaaaatgtatcttgaatctgcaattagtcatttgctcccattatgtattaattgattaaattattcattatttcaagaatacaaaaag

SEQ ID NO: 839048 - DNA, 582 bp, Homo sapiens
gatggatggatggatggcctggtagactatggcaaataaatgaatgcagatttatttttcaaaataataaatatccaacaaattcggaactgttatttctccatccttcctttaaaattcaattaaaaatatagtgtagggataccctaaatgtcttacaaattaaatttcagtgaaaaggagtgttttttcttgaaactagcgtaatgaaagatgttttcagccatgtgcttggtgctcatgtttgcagaaacaaagtattaatttgggagaatgtttattttaaaatgccacatttatataagagctaaagttgatactaatacaacttcccagtgtataaatcgaaactgcaacacgctttccaaattggaaaatagagggcagaagtcatgataatggaattggtcttagcaattaattgtcaatcaaggcattcttgacttttggtatggtggactttrtaatctataactgtcaataaagatgattgacaaaatgtatcttgaatctgcaattagtcatttgctcccattatgtattaattgattaaattattcattatttcaagaatacaaaaag

SEQ ID NO: 839049 - DNA, 619 bp, Homo sapiens
caactataggaaaaacaaagaatggttaggaaggaaattgaatactctacatggctcgaatgtgaatacttattgtcataaatgttaaatacagtttagcaaaaagctatgttacaacatactctggcrggatgggcagaaaggcctttgtgttgctgagtggctaaagagtgtggaggacagtggatgagagagccaaatacctatctccatagcaggaagtcaataactaatgtctaaaatcaagaaaggacagaacaaatatatcatttctaaatatcaaggaagtatcatgagaaaaaacaaataattgacagtggttgccagcacaacagttgccagaacagcagttctgggtgtagtgtggcagaagactgctgcttttttttttttcaaaatttattatgtcttatgctattagttgaattttataactatatatatgtagtattttgaaaaaaattaaaatattagaaagcacatgcaccaagagatgaagaacaataaccaaaaagagaactcaaaggtctaggaacttgactgggtggaaatgggaggatttcaatgggccacggggttctacaggaagagtgaatggtttaaacaaagaggcagagac

SEQ ID NO: 839050 - DNA, 602 bp, Homo sapiens
tctctccctgtcctcatcttgtttgctttcttcccagactaactcagctccaggattgtcccttctggaagctatcccatgcggctgtccctgccttatacaggatctrccttggcagagggaaaacaactcttggtccttgtcatggtaaattttacgtgtcaacttgactgggctaagggatgctcagataccagataaaatattgttgctgggtgttttcagaggtcatcagcattggaatcagtagatgaagtaaagaagattgccctcaccaatgagggcgggcatcacacatctatcgaggacctgaatagaacaaaaacgcagagaggagggataaggaaggacttgttaaagattacaaaattatagctagataggaggaataagaggaataagttatagtgttctataccactctaggatgactatagttaacaataatgtacagttttagataactagaaggaggacattgaatgttcccaacacaaagaaatgataaatgtttgagatgacaagtatgttaattacccttatgttatcactacaaattatatggctctaaacatcactatgtactccaagaatatgtacaa

SEQ ID NO: 839051 - DNA, 589 bp, Homo sapiens
acaggaaacaattttaagaatggttattctgaattggctctggagtctctggaattggctctccaatctgattagatttaaagatactaatgactatttctagtagtaaggaaagcagtgatagtctgtgacatacactatttatatagagataggaaaaatatctgcactgaatacttctaatcaacttatatctaatcacttatatgaagcaaggagctcatttactctgtatatgatacttttaaacatttttagaaaataagagaacacaatgacattggttggtttctcctaatatcaatggacaaagtggtgaaagaaagggatgagcttggggatttaaattccccactggaggctgggcccagtggctcacccctgtaatcccagcactttgggaggccgaggtggatggatcacctgaggttaggagttcgagaccagcctggccaacatggtgaaagcccrtctctactaaaaatacaaaaattagctgggtgtggtggcgggcacctgtagtcccagctacttgggaggctgagacaagagaattgcttgaacctgggaggcagaggttgcagtgagc

SEQ ID NO: 839052 - DNA, 637 bp, Homo sapiens
tctggatcccttttcgtagtcagctgagaagcagaagcaaaactggttaggaatctccaaccttgcccctgtcctctgaacccacattccgagaatggcatggagctactgttttctttcgttaccccttgtctcaccctgaagatacatttaagatagaacaatatactccatctataggctcatgttggtaatttgccctgtctcactctcaaactgtattctaacaagaaacaatgcgtttggcaacattttcttatatcccacacgagtcatgtcccttggcatttaccctgagaatacagcactacgtgtgtggaagcgtgaaaagagtaattgcatgtgaaaagagtagttgcatgctagcaactaaagccacatctttgtagttttgccacttcctcaccttaaattatagcttcaaaatgaaatgtgaaaatgaaattacttgaaggttgccctaagtgtagaaactgtacccatttggggccaaatgatacccartctttatttgacttcataatattcacccctttcatctctgctgttgaagtaaaagaacaaatgcattaactgatcaaaatttcagaataaaattgattttgtctgtaacatttcctggcactatttggacttg

SEQ ID NO: 839053 - DNA, 559 bp, Homo sapiens
ccctaggaaattgctaggtggcttctcatcaggggattttcctggatccctctgtgggttttatccacactayacagggaacaaactcattatatacttggcatttcttaggaaaatgtgagggcaagagaaatgtagtttgagcccagagctatttgagaccggggctagaatgttacccccttcatagtgcacgaatatgcacacatgcaaagtaatttctggcaaggagatgagtttcccgattttaccaacaagaactgggctcacgcctgtaatcccagcacttcaggtggctgagctgggcagatcacgaggtcaagagatcgagaccaccgtggccaacatagtgaaaccctgcccctactaaaaatacaaagattagctgggtgtgttggcatgcacctgtaatcccagctactcaagaggctgaggtaggagaatcgcttgaacccaggaggtggaggttgcagtgagccgagattgcgccacttcactccagcctggcaacagagtgagactccgttaaaaaaaacaaaaaacaaaaaaaagaatctcc

SEQ ID NO: 839054 - DNA, 441 bp, Homo sapiens
tagacttgtaggttgtttccagtcttttgctatagcaagtaatgctgcagtgcayatcttgtacgtgtattgttttgtacttgtttgaatatatctatataaattcctagaaaaggaattttctgtgtttatgagtagattatctgatatatattgcagaactgtacttcagaaaggttgaatcaacttacattcctgccaataatatatgatattgcttattttcccatattcttaccaacagagtgttattaaacgttacctagcaacgtttttcaaaaattgaaaaatgatgactgagtgttgttttaaattgctctttttttttttttttgagactgagttttgctcttgttgcctaggctggagtgcagtggcacagtctcaactcactgcaacctctgcctcctgggttcaagcaattctcctgcctcagcctcc

SEQ ID NO: 839055 - DNA, 494 bp, Homo sapiens
cccccagcctcactgtcgccttgcagtttgatctcagactgctgtgctagcaatgagtgaggctctatagatgtgggaccctccgagtcaggcacgggatataatctcctggtatgccatttgctaaggccattggaaaagtgcagtatcagggtgggagtgtcctgattttccaggtaccatctgtcatggcttccctttgctaggaaagggaattccctgatcccttgagcttccagggtgaggcgatgccctgccctgctccgtgggctgcacccacgtgtctgggaagccccagtgagatgaacccggtacctcagttggaaatgcagaaatcacctgtcttctgcatcattcacrctgggagctgcagactggagctgttcctattcagccatcttggtgccacccctgtctcaagatattttctaatttaccttatgatttattgtgggacccattggtagtttaagagcatgttgtttaaattcaac

SEQ ID NO: 839056 - DNA, 633 bp, Homo sapiens
acaagttatgttctaatattgaaagaccattcaggtcccagaaatacctaggcyagttcatgtcttcattgaatggcacctgctcggcttttgtgaattctgagatttgccttttgcagtcttctacctctgtctttccactgagctgtcagtcacacttaggcctttagctgttctatctattgggtggccagtgttcttcactacactgaaattgctgctgtgagttgcgaaaatagaaagtgaaagttattgaaaaccatgtcaaagactagtaaagaagctatgattcaggtcagagattgtgtgtgattctgtaagtaacttaaataaacttcagcgtgaggtctctattttggttgctcaggtgaccactgtcctctcttttgttgtttttctgatacgttctgtgcaatagatattactaaataaataggaggatattctatgcgaggataccttggaatgatgaaacatcacataaaaagtggagaaaaaatttagttatgaaaagctaagggaagacgtctagcagaaagaagacgatgagaatgatttacataaattaaaaaaggtattagtagtaataagtgcactggtataaaatttactgcaggttaaaagtatttttga

SEQ ID NO: 839057 - DNA, 597 bp, Homo sapiens
cttctcaaatccttcttcctcagggacgtcttccctgctcctgctctctgccagggatggctcctctgacataaactcccatagcaacctgcttatagttagagatctgtgcaactgtccaagaccatgcctgcttgctaaccattctagaccttgtgcctggcacatagtgggtcctcagtaaatggtagatattgccaccactgatcatcccacatttacctatgctgatatttggcagatgtccccaagaatctgtgtgtaggccaggtgcagtggctcacgcctgtaatcccagcactttgggaggccgaggtgggtggatcacctgaggtcaggagttccacaccagcctggccaacatggtgaaaccatgtctctactaagaatacaaaaaattagccaggcatggtggcgggcgcctgtgatcccagctactcaggaggttgaggcagaagaatcgcttgaacctgggagatggaggttgcagtgagttgaggtcactccactgtactccagcctgagcaacaagarcgaacctccatctcgaaaaaaaaaaaaaaaaaaaaaagaatctctgtgtggaagtctgcaaaa

SEQ ID NO: 839058 - DNA, 668 bp, Homo sapiens
aaaaaaaatcagaaggtcaggtataggtattatgaccacattttaatcactcataaaatggacattctggaatgctgtatcagctcagggcagagtactggggacactatattgagtaaggtgtggttctcctggctctatgaagaaagcagaggagaaaggctgtggctttcttgcttctgaaaggggcacattaaggatggggcggggcgggcagggagtgaggggcagcatgcccaaacccactccaaagccactcacccggcttgacagcagaatcaggactagaaccaaggcctcccaaggtgatggctgagtcttttccattctaccaggctgctccagaaaacgcagcccctggtcttatgctgctcaaacggaagcaagcaagtgaggtttgctgccgactctgacccttacctccaactcctccaggatcttcagagatcacctcatccaaacagctttctgggaacggccagccataacaaatgctaagcatttattatgtgccagacatggtggcaggtgctttgcagcattatctgagtgattmtcacaattctatgtggtaggtgctaggattcccacatcacctccatattgcaggtgagaaaatcaatgttcagagagggaaagtgatttgcccgagaagacacagctagttt

SEQ ID NO: 839059 - DNA, 601 bp, Homo sapiens
aaaaatagccgggcggggtggtgtacctgtagtcccagctacttgggaggctgaggcaggaraatcgcttgaacctgggaggtggaggttgcagtgagttgagatcacaccgctgcactccagcctgggtgacagagataaaaaagagaaaactctgttgtgcttttattccaatgttcaatttatggaaaacctttaattttagccaatatgtttacacacagaatgttatatgtaaaaggcttgtttttggtactgtaaggaaaaattagcatttagggaaaaagtttttttagcaaggtaattttactttttgcagaaagggtgctttttgcagatggaacaatgacaaaagcacacctaaacaaaggagggaagcaatgtttattttttatgcagcttatttttgctactgtgttttgtcttcattggctggagctagaccttacaatttaaactaaaacccgactggctaataatttaaaactttttaaaataggtaaaggcaatagagaacaaaggaaaagaggaagttgcttgcgaaaggacttagaaaagtaataatatttttaaataaggaaggggcataagctgcaagttg

SEQ ID NO: 839060 - DNA, 601 bp, Homo sapiens
aaaaatagccgggcggggtggtgtacctgtagtcccagctacttgggaggctgaggcaggaaaatcgcttgaacctgggaggtggaggttgcagtgagttgagatcacaccrctgcactccagcctgggtgacagagataaaaaagagaaaactctgttgtgcttttattccaatgttcaatttatggaaaacctttaattttagccaatatgtttacacacagaatgttatatgtaaaaggcttgtttttggtactgtaaggaaaaattagcatttagggaaaaagtttttttagcaaggtaattttactttttgcagaaagggtgctttttgcagatggaacaatgacaaaagcacacctaaacaaaggagggaagcaatgtttattttttatgcagcttatttttgctactgtgttttgtcttcattggctggagctagaccttacaatttaaactaaaacccgactggctaataatttaaaactttttaaaataggtaaaggcaatagagaacaaaggaaaagaggaagttgcttgcgaaaggacttagaaaagtaataatatttttaaataaggaaggggcataagctgcaagttg

SEQ ID NO: 839061 - DNA, 597 bp, Homo sapiens
gctgttcttggaaatagcctttatctacatgattcagatggctcttcagttcttctacattttaattaggtcatagggaaagggagaaaggggttagaaaaggtataagtatgccttgaaaatttcatgtattacttagattcacacctcattggtcaaaacttagttaatggccatacacagcttaaaaggaggctaagaaatgcagtcttcatttgagacagccataaggctatgctaataaatgaagatgttattatataaggcatgaagaaaaaaatatctgtttggggattatttgtagtcactgccacagtgctatcttgtaggcagctcaagaaggttgacaggagcagactggtttaggtgattcagtatgggcagaaagaataagaccacacaaaggttaagaggaaggggaggagtagcagctgaagcagaagtttcacaaaggttagttcaatgtgcaytagctgtgaaacaactttgcccttaggaggatcccagaaagatattaagggaggaatgtctttttagttgaggtgagaactaataagccattggttgcagatacataaactgttaaagtggcatact

SEQ ID NO: 839062 - DNA, 597 bp, Homo sapiens
gctgttcttggaaatagcctttatctacatgattcagatggctcttcagttcttctacattttaattaggtcatagggaaagggagaaaggggttagaaaaggtataagtatgccttgaaaatttcatgtattacttagattcacacctcattggtcaaaacttagttaatggccatacacagcttaaaaggaggctaagaaatgcagtcttcatttgagacagccataaggctatgctaataaatgaagatgttattatataaggcatgaagaaaaaaatatctgtttggggattatttgtagtcactgccacagtgctatcttgtaggcagctcaagaaggttgacaggagcagactggtttaggtgattcagtatgggcagaaagaataagaccacacaaaggttaagaggaaggggaggagtagcagctgaagcagaagtttcacaaaggttagttcaatgtgcattagctgtgaaacaactttgcccttaggaggatcccagaaagatattaagggaggaatgtctttttakttgaggtgagaactaataagccattggttgcagatacataaactgttaaagtggcatact

SEQ ID NO: 839063 - DNA, 639 bp, Homo sapiens
acaacattccctattcaggcttctcctttcaccatatttctacctccacgtagtgtagtgaagaaaacgatagagcaggaaagaatagatgctgtggaaggtcatcacaacctatggttaaagttttcaaagctgccactcattcagaagaagggaacagagaataggcaaatcttgggcaggaatgaatactgggatgtacagatgttaactacgactttatttaagaaagttagacaaagccgttaggaaaagctgttgtctcacaagagcaggataagctaaatgaatccatgccatatgtatagaattaggctggctcttccagagtatgaaaaggggaaataaaataccatttgctcatgactgctatcaccagatactgattccagatctgagaaatggatgagaatgtgagcagacattgagataattgatgcaaggacgacctgtgaacagcagaatgagttaagttttccatcccacacaattcctggaaagtatgggaaggttatgatctttgtaatatctgttatacatgcaatgggggctgyttgcatgtgtcttgggagggaattatatataacgtatactggcaacaatctttcacagaagttatttttaagtgtagagaaaatg

SEQ ID NO: 839064 - DNA, 583 bp, Homo sapiens
  misc_feature 1, 2, 3, 4, 5, 6, 7, 8, 9, 10, 11, 12, 13, 14, 15, 16, 17,18, 19, 20, 21, 22: n = A,T,C or G
nnnnnnnnnnnnnnnnnnnnnnagatttgatgagcataaattctagttttgataaattcttttttttttttttttttttttctgagaccgagtcttgctttgttgcccaggctggagtgctgtggcmagatctcagctcaccgcaacctccgccttccgggtttaagcaattctcctgcctcagcttcaggaatagctgggattacaggcacccaccaacatgcccagctaatttttgtatttttagtagagatggggttttaaccatgttaggcaggctggtctcgaacatctgaccttgtgatccacccgccttggcctcccaaagtgctgagattataggtgtgagccctgcgcctggcctgaattcttataaattctaatctattttctttattggttggtgcattttgttctttctaaaaaatcctcttatattccaaggttattaggatgtccttctatgatttctcttagaagacttcactttaaatatatgtttcatctgacataaatttttgcgtataacttcaggtaggtgttgatgttagttttcttttctatgtggatatccagcagttct

SEQ ID NO: 839065 - DNA, 585 bp, Homo sapiens
  misc_feature 247, 331: n = A,T,C or G
cccttctccccgcttcctctattctgctgcacggaggtggatmtgacagctagagaccatcttgaacaaggagctacaacctaggaaatgatggtgccatgagctaagcttttcatagagcagaaccttaatattgaactattcctggacttttgcctgacagagaaaaaaggcttctggctggtttaaaccactgttattatatatattttttcttactgtagttatctccaacagtatctagcanagaatcacaaataaactcatttgttctccttactatacatttattccatttaaatcatatataatcatgtttgccttcctgcanatgagtgttacaaacaaagctgaagctagtattttggtctttctctcaatggcagatacatcttggaagaagaaatgatccgtgcacaaggtggttttatgtttagaaggttcttgacatcaggaggagtgtttcagtacggacagataatggcttgttaggcttttcagccaaggatcggagatgagggcagaccagtcaatgggttccatgggttcatgaagttataaattcgtgcaatgatttactcattc

SEQ ID NO: 839066 - DNA, 556 bp, Homo sapiens
ggatggccccatcagcttaggtcatgggtcggggtccctggatagatatggctcgggtggattgtgggggatagaggtggtacttttgagagaaagcagggggctactgaggatggacttcacctacatgtccactgcagatcccggataatccccttttgacacccacaggggagcttctcagaagagcaagcacatgcggggaaaaaagtgggatctggtttgttttgtgggtgttgtttctttgacacctttaaaattctgtttacccgtgtgccttttctgtgcattccagcaaattgcctcacactgcatatagtatcaaaaatctctaaggaatatctggtggatttagtaagtaaacttaatttggggagtttttttgtgatttggactagattgtccattcattttgtcagtcacgtatctgttgattcccattatgtaccrgggctctgcctgtaggtctgtcacataaaggctcacaggtacagagactcccaactgcaggcttgcactgctccagacactgcgttccttcccttttgtggctcat

SEQ ID NO: 839067 - DNA, 524 bp, Homo sapiens
ctaccccactgttgtgtgtgggtgcatgttttaaatgaagcagcagtcatgagaaccagacaatcagatatccaagaagcagggcacccttaccattccctttaggcatggcttcccgggtcatgctcctcgtrcccaaggtgatgcccagtgcaccactcgcctgacacatggacacatggagggcaaagccctgtttcctgttgttatgcagagtctgtggtatacaatgatcccatagcaaatgttgctgggaagacacgcacaggagactgtaaaaatccatatcctcatatccatcagctaagtgactttacctatacctacaccttgaggggccctggacctccattccctggtgcactagggaccttctagagctcacccaccttagcctgctctgggtcaggggacatgcctgtggtggacctatcactccaccttctactctctccctgcacctgcctcaaaaggccagatgttccctaggaatccttacgaggagctaggtcctacagtggaat

SEQ ID NO: 839068 - DNA, 546 bp, Homo sapiens
tttcccagtcctattagaaataattcctccctctagatgacagcaagattttcacatatataatgcattctatctaggtctgtggatattttaacaagcacttaatgttcttytccttagggatcactgtatactgcagataggaaatatgtatttgtttaacaaataatagcatcaataaatcagtaactacatgaatgtggtgatgcttcaagattcctccaaagttgataagtgtcaaaatgactgaaaccactagaaagtcgactgtaataaaaaaatattatgagagttgatcatctgaaatgttatctagcatattatttaggttttgaaagaatatgtatctgtattcttgttatttttgtatttaatttttggctgcttatatatcagtatatatggtacatgttctctgtaatatgaaaactcacatctacgttatttcttcagtttttaaaaattattatatcagtagttttgggggaacaggtggtgtttggttacatggataaattctttagtggtgatttctgagattttggt

SEQ ID NO: 839069 - DNA, 546 bp, Homo sapiens
tttcccagtcctattagaaataattcctccctctagatgacagcaagattttcacatatataatgcattctatctaggtctgtggatattttaacaagcacttaatgttcttctccttagggatcactgtatactgcagataggaaatatgtatttgtttaacaaataatagcatcaataaatcagtaactacatgaatgtggtgatgcttcaagattcctccaaagttgataagtgtcaaaatgactgaaaccactagaaagtcgactgtaataaaaaaatattatgagagttgatcatctgaaatgttatctagcatattatttaggttttgaaagaatatgtatctgtattcttgttatttttgtatttaatttttggctgcttatatatcagtatatatggtacatgttctctgtaatatgaaaactcacatctacsttatttcttcagtttttaaaaattattatatcagtagttttgggggaacaggtggtgtttggttacatggataaattctttagtggtgatttctgagattttggt

SEQ ID NO: 839070 - DNA, 546 bp, Homo sapiens
tttcccagtcctattagaaataattcctccctctagatgacagcaagattttcacatatataatgcattctatctaggtctgtggatattttaacaagcacttaatgttcttctccttagggatcactgtatactgcagataggaaatatgtatttgtttaacaaataatagcatcaataaatcagtaactacatgaatgtggtgatgcttcaagattcctccaaagttgataagtgtcaaaatgactgaaaccactagaaagtcgactgtaataaaaaaatattatgagagttgatcatctgaaatgttatctagcatattatttaggttttgaaagaatatgtatctgtattcttgttatttttgtatttaatttttggctgcttatatatcagtatatatggtacatgttctctgtaatatgaaaactcacatctacgttatttcttcagtttttaaaaattattatatcmgtagttttgggggaacaggtggtgtttggttacatggataaattctttagtggtgatttctgagattttggt

SEQ ID NO: 839071 - DNA, 588 bp, Homo sapiens
  misc_feature 398, 399: n = A,T,C or G
tgccttaaacgtactctattgtatatcacgtaaagtaagtagatgcaaatcccacctacaaatcagtttaagaatactggaggcagggagcggtggctcacacctgtgatcccagcactttttgggaggccgagatgggcggatcacgaggtcaggagatcgagaccatcctggctaacacggtgaaaccccgtctctattaaaaaaaaaattcaaaaaaaaaaaaaattagccgggcgtagtggcggttgcctgtagtcccagctactctggaagctgaggcaggagaatggcatgaacccgggaggcggaacttgtagtgagccgagatggcgccattgcactgtagcctgggcgactgagtgagactccgtctcaaaaaaaaaaaaaaaaaaaannaatactggaaatattattaaatagcctacaagtattttgaagatttcttcccttatcttcaagataatcataagcacatcccctttcagtaagatgcaaattaacttatttctgacacactaraagtaggaagggaaaggagttggattgcaaaatgatttcagcagccacctgtctttcaacccaaaa

SEQ ID NO: 839072 - DNA, 594 bp, Homo sapiens; identical to SEQ ID NO: 833084

SEQ ID NO: 839073 - DNA, 432 bp, Homo sapiens
  misc_feature 176: n = A,T,C or G
taagtcatgcgctccagtccaaggatgagacagaattgactctgacaggagaacataaactaaaagtgatagagatgaaaatatagaaagattttggtatctgaaaacaacatatttctattactacctgcattagtctgttttcacactgctataaagatgctacctgaaactgngtaatttttttattttaaattttgaagaaacttaatttcctcatattctgctataccttactctgtatggaaaatatcttttttaaaatagtacattttcttaaaggttatgactcctatcttagagaaatttttatttttgcttattttaaaaaaaaattcctggactaataawtccaaaatctctgctatagctgagtctgatcctttttccttctgtatttcaatggttttgggggaaggagtggcgtttggt

SEQ ID NO: 839074 - DNA, 639 bp, Homo sapiens
tgaactccagcctgattcacagaacaagatctggtctcaaaaaaaaaaaaaaaaaaatatatatatatatatatatatrtgtgtgtgtgtgtgtgtgtgtgtgtgtgtgtgtgtgtgtgtgtgtatgtatatatatatgtatgtatgactttggaaagtaaattttatttttttattttttatttttcatttttgagatggagtctctctctgtcaccaggttggagtgcagaggcgcgatctaggctcactgcaacctccacctccgaggttcaagagattctcctgcctcagcctcccaagcagctgggactacaggcatgcgccaccacgcccagctaatttttgtatttttagtagagacggggtttcaccatgttggccaggatggtctcgagctcttgacctcatgatctgccttcctaggcctctgaatccgcccgcctcggcctctgaatccgcccgccctcccaaagtgctgggattacaggtgtgagctactgcgaccggcctagaaggtaaattttatttacattgaagtgatgatcttatacgtaattcctaccatctattctcacacatacatacacatcaatatagttttaccaataaatctgatagtaaagccacacatttgaa

SEQ ID NO: 839075 - DNA, 513 bp, Homo sapiens
tgacaagagattttggctgatggaatttaatactattcaattcatttcatagatcttgacaaagccatacctttgttagccatttatcttcagatgacagttacaraaacttaaacagcttaagcaacaaggagaatgtgttggcttctgtaactgagaagtcatgtttggctgcatccaagggttcaggcaatttcattactactctctctcgtactcactgttggctctattgttaggcagatccctccctgcttcataatggctggaactttcagagtatgtgccaacctcagcaacatctgcaggaagagagcttctctttcaacaattgtcccaataaaactcccatgattttctctgtttgcactaactgaggcttcaagctcttcccttaactaatcactgtggctggtagttgattcctggtcacttagttccatgaagccttttaaagtgcagaagtcttatttggccaaaccttacacaccaggtgttgtaggttccaaagtg

SEQ ID NO: 839076 - DNA, 363 bp, Homo sapiens
aagagtatcctaaattctgatcattctcattgagtctccacsatgaaacatttcagtgtgttgcttctttcctgtaactatataataaagtacagccttataatcttttagtcagcagttatgtcaaattgtattctaagagcaagaagtgaaggaggtgatggctgaggccatttacataccaacagatcccaacatccctggaatgttagatgttttaagatttccaggtgctctcctcagtggaaaattctgccacacacacacacacacacacacacacacacacacacacaatgtagagtaacatttcttaatgggagatcatcctcttctacatgcaattgattcattttgcctaag

SEQ ID NO: 839077 - DNA, 629 bp, Homo sapiens
ctatgacataggtcaatgattcctccagaaagccatagagaatggagatacaagtctcccttccataacatctacatattaagcaagacttgtttgcgtctattgaatagcctcccagacataaatactttcattagggagttctttgctacgttctctgaaacatgactctcagaggaaggttgagattaacagtgcatcaggttatgcttaatcttctttcactattccattttgttttaatcccataatatttgcatttctgaaattagggtattgtatccattggggtgggacccagaggcctcatttgggttagatttattatctactaaatgactttcttagcacaaatttttatctctttgtgtgccagctaatctcaatgctctatcttgagcagattctattacagcaaaatttatcattcttttttaaaattttctacatagcttttagaaactttcttattaatagtaaatgctaacagacacattacaacacaacagasagagataagagtcacaccttaaatatgataagatgtctttgaccctgaagttatccccaagtccttggtttagaaaaatatttcatttgtcacgaaaatcttttgcaggcccaatgag

SEQ ID NO: 839078 - DNA, 629 bp, Homo sapiens
ctatgacataggtcaatgattcctccagaaagccatagagaatggagatacaagtctcccttccataacatctacatattaagcaagacttgtttgcgtctattgaatagcctcccagacataaatactttcattagggagttctttgctacgttctctgaaacatgactctcagaggaaggttgagattaacagtgcatcaggttatgcttaatcttctttcactattccattttgttttaatcccataatatttgcatttctgaaattagggtattgtatccattggggtgggacccagaggcctcatttgggttagatttattatctactaaatgactttcttagcacaaatttttatctctttgtgtgccagctaatctcaatgctctatcttgagcagattctattacagcaaaatttatcattcttttttaaaattttctacatagcttttagaaactttcttattaatagtaaatgctaacagacacattacaacacaacagacagagataagagtcacaccttaaatatgataagatgtcyttgaccctgaagttatccccaagtccttggtttagaaaaatatttcatttgtcacgaaaatcttttgcaggcccaatgag

SEQ ID NO: 839079 - DNA, 560 bp, Homo sapiens
cctttcttgaaattctccaacatccactccaatggagtaggctttgatgcttttcctcccattccaccctttgtgatgcactttcactctcactttcactcctggacagaccagaccaggtcctattacagcaggttcagactctgcttagccaggagcatgcctgtcacagctagctgcagctatagagctggtcctatgggctgtatgcagtgtcataggtctggtttttcccacacttgccttggagcacacagtacacactaagagatctgtgtctccccacatcacgccccacattggtctctcccaggaccatctctttcactcactttcacacacctccccatccctgaaacagtttttctttctgaccgactcacgagccccacccacatctggtgtcggttagggtgtgagtttcatccaaatcaatggccttctccaaytgtcccaaccccctcaggtcagactagtcctcataccctggcaggtgatcaggctccccttccatctttatgggacaggtcttgccttagggccaaaaccttaccacggtt

SEQ ID NO: 839080 - DNA, 560 bp, Homo sapiens
cctttcttgaaattctccaacatccactccaatggagtaggctttgatgcttttcctcccattccaccctttgtgatgcactttcactctcactttcactcctggacagaccagaccaggtcctattacagcaggttcagactctgcttagccaggagcatgcctgtcacagctagctgcagctatagagctggtcctatgggctgtatgcagtgtcataggtctggtttttcccacacttgccttggagcacacagtacacactaagagatctgtgtctccccacatcacgccccacattggtctctcccaggaccatctctttcactcactttcacacacctccccatccctgaaacagtttttctttctgaccgactcacgagccccacccacatctggtgtcggttagggtgtgagtttcatccaaatcaatggccttctccaactgtcccaaccccctcaggtcagactagtcctcataccctggcaggtgatcaggctcccyttccatctttatgggacaggtcttgccttagggccaaaaccttaccacggtt

SEQ ID NO: 839081 - DNA, 511 bp, Homo sapiens
tccttaaatttagggataataatctgccctgtatgataatcagaaggaagagcatacgatgaaattgctttgcaaactgaagcacrttacaaattttagtcttaactaattatatatatacacacacatgcatatatatatatgtttataagtttacgtgagtgtgtgtctatatatgtataaatttgagactactgcaaaggggaaaaatttctctcttatagataatttagtggtgggtgtaaatcagccagattagtaatcctgcttcaactacggagtagctggaaggatgaaatcctttaggcttttcttagaaaagaaagttcatttcacagacaaggtggctgggaagccaagcctgaagaattcgtttctgttccccttccctctctggacctgattccatggcaagggatatccttgggaattatttcatccacagaaaagcacaatgatcaaaacatttctatggtttttctgatcctgatcatgagaaaaacctttaaaa

SEQ ID NO: 839082 - DNA, 654 bp, Homo sapiens
gtgatggctcatgtctataatcccagtgctttgtgaagctgcagggggaggatcacttgaggtgaggtgttccaaactagcctgagtaacatggcaaaacttgtgtctcaacaaaagaaaacaaaacaaatccaggaaacttaccactgtattgctcatttttcagattttgatttctctagtaaatctgtctggtattatttacttttcagagtcatcagatagttgccttgtgtaatctgtccaggaattttagttgttttcagtggaagaaatagggtggagtgggtttaatccttcttagctgaaactagagattgctattttaagttgacattcacattgcctacattccttcacctctttcactactctaaggtttcaactaccaacttcttgctttgaggctcatttttttagtaataaatcatattttatcatatgactccctagtacacatcacaatgttatttccatctttaatgatgactatctcttaaacagaagtgatccattttttcttyccaaacctgtttgggaaaagctaggctagtaaaattaaacaattcctttactatagaacttctgaagcctttaatatgttaatctggattctaaatttctagaagtggaatacagtgcattgcaatttcc

SEQ ID NO: 839083 - DNA, 623 bp, Homo sapiens; identical to SEQ ID NO: 826495

SEQ ID NO: 839084 - DNA, 649 bp, Homo sapiens
catgtggggcttaaaacctacatgataagttgataggtgcagcaaaccaccagcgcacacgtatacctatgtaacaaacctacaaggtctgcacttgtatcctgcaacttaaagtaaaataaaattttttttaaaaattggaaaaaagaacagatttagaaggctcacattactgagggtatgacttacaataaagccatagcaatcaagacaggatggaatcagcataaaggtagacaaatacatcaatgaagtagaacaaaaggttagaaatagataaaacatatatggcccattatcattttaaagacgtaccaaggcaatttaattgagaagggaaagttttttcaacaaatggtgctagactaactgaataaaaaaatcaccctcaaaactcagtctgaggtggactgtagtcctcaaatcagaaagctaaaactaaaatgcttctcaaagaaaacataggagaatacatttgcaactttgggctaaagattgttttttaaaggacacaaaagcactaagaataayagaaaaaaattgataattagctttagtcaaattaaaaactcctgtcatcaaaggcactgttaagataaaaataggccagacacagtggctcctgcctgtaatcccagcattttgggag

SEQ ID NO: 839085 - DNA, 620 bp, Homo sapiens
agtcaatttagagagccaagcaaaatacaggggtagagcaagcagcgggaaaggccctgggagcttcccgggtccccaagtaggccactcttgcctggcaccacagggatccttcaagagggyagccagaggtgtggggggaaatgccacaaacagaaggaaatctttagctaaactttgtaacaatttgaaccaggcaagaagcctcctggccagaactcggggcagaacaagaatccggcatgcagactccacaagcaggggaagaaccaaagtccttttctttccaagctgggaggcaggtagcctggggcaagttctcaagccctgcttgcccactgcctggacacagactcggggctgtttgtgggggttcatggtggaagtgagaccgcccttcagattgcgtgggagctgggtgaggcctgtgattgccagctttccccacttccctgacaacctgcatgactcaacagaggtagtgataatcctcttaggtacgcaactccagtgacctgggaagctcacccccattcccgacagcagctgaagcaagatatgcccaaggagagtctgagctcagacatgcctggccctgccccaacctgatgggccttccc

SEQ ID NO: 839086 - DNA, 525 bp, Homo sapiens
gtttccatgactgcataacattccttcatgcttcttcccctattctaatccccaggcaaccactgatctgctttctatcatcagatccatcagatacacaccattctgtctcttccagaatatcacacgaatcatacagtatgttctcttctgagtctaggttctctcactcaggatgtttttgagattcatctatattgttgtgtgtatcagtggttagtttctttttattgctaagtagtatttaattgtttggatataccacaatttgtttatgcattcaccagttcatgggcattttgttgtttccaagttttgactactgtgaaattaaagcgctattaacattgttatacaagtctttgtgtgggtatgtttattctctctctctgttgaaatacctggccatgtgcagtggttcacgcctgtaattccagcaatttaggagggcaggattkcttgagctcaggagtttgagactagcctggacaacatggtgaaaccccgtctctgaatctaaaaaaa

SEQ ID NO: 839087 - DNA, 611 bp, Homo sapiens; identical to SEQ ID NO: 834256

SEQ ID NO: 839088 - DNA, 611 bp, Homo sapiens
tatgggctttagaatatagttggggaaaaggctactggatacctggtattgctgcagaaaacttctttcagttgagcatcacagcaccaaatagcagctaatcaaataataaactctacttttctatagttcattattttgaactataggagtagttggtttttgtactcgctgcctacataagttatgctcccatgattattttccttgtattgaaaaacaaattaatgtccttaaagtctgcatagaggtctgcctaaatttcacttaagggcacatttctatgaacttgcagggctcatcaaaagggaaagaaatttagaataagggaatgccatttacacatttgttcattggatttctctgctctcatttgggacttagcttaatgcatgtgatgagatgatacagaggactaaaaaagaaccaaaaacccaaacaataaaccccactcaaaatcagctccattaatatgaagaaatatgcaagtactggacatcagacaaggtgaaaaggctgccaaagatctggcaagttatattagggatttctgctgttagcactgagcccagtggtatgagatgracattggaaataaaataaaaaactag

SEQ ID NO: 839089 - DNA, 564 bp, Homo sapiens
atgctgaggatgatggcttccagcttcatccatgtctctgcaaaggacatgctctcattcctttttatggctgcatagtattccatggtgtatacgcaccacgttttctttatccagtctctcattgatgggcatttggattggttccatgtctttgctattgtaaatagtggtgcaataaacatacatgtgcatgtgtctttatagcagaatgatttatattcatttgggtatatacccaataatgggattgctgggtcaaatggtttttctggttctagacccttgaggaatcaccacactgtgttccacaatacttgaactaattttcattcccaccagcagtgtaaaagcattcctatttctcaacagcctcgccagaatcaattgtttctcgacttcttaataattgccattctgactggtgtgagatggtatgtcattttggttttgatttgcttttctcaaatgaccagtattgatgagctttttttcrtatgtttgttggctgcataaatgtcttcttttcagaaatgctgttatatcctatgcccactttttgat

SEQ ID NO: 839090 - DNA, 598 bp, Homo sapiens
gcagacaacaagacaaggacacaaggaccagaaaaatcaggatatcaagacacctccaaaataaaatgagcaaagccgctaacaacaggaccttgaagaaagatctgtgaaaggacagataggaaatacagaataatcctcttaaagaacgtcagtgaactacaagaatacatggataaaaaaaaaattaatgaggggcttcaagaggctgactagaggtatctggcacttgcctcctccacaattaagaaccaaaacagctgttagataaccacctatcaaatagagctcctaaaaaataacactgtaattcagcagagaactgacagggaatctctcaggcacagaaaaagggaaatgaagcaattgtcctggctaagatgcactcagagccaggacagactccttgctgtgaagaaaaggtaagcaagaaatccccggaagtccatgttccactgaagactcttgtaatcctaggtaaaggagagccccttggccctggcaggacctgagactaatatgggggctgcctggagtccacataactgcactgttcaayagggagagatcatgctggatcccacacatcccctgagac

SEQ ID NO: 839091 - DNA, 626 bp, Homo sapiens
taatccaaaaatccaaaatgctccaaaatatgaaactttttgagtgccagcatgataccacaagtagcaaattccacacctgacctcttttgatgggtgacagtcaaaatgcaggctcactagacaagagtacccaagggaaaaaagactctcccagctcccttcagctgtgttatatcttttctgcccatgtccagattactccaccaagcatacctacaaggggtcataaaatggcacccatgcagaccagacacacgaacaacagtaataaataaagtatgttgtacaataacctttaatcgaaacacagaattgtagaaagaaactagaagcctgccattgtttgttgttactgttgtttaacagctgaggcaggtattctggtgatgccactgttctgtttagtaccctgaacacattcttcttcactgtactaacagtatagcatattttttactgtgaagtactgatatgtaagtaagtgtaagaaaatkattgtttttttgtagaatgtaaattcagagtcagggacgatgatgatgccaaacaactacagactgtccacgtgggtgcctgaaatagtgacacctttgctttctgatggttaaatgtacaaaaactta

SEQ ID NO: 839092 - DNA, 554 bp, Homo sapiens
ggccaggcacagtggctcatgcctgtaatcccagcactttgggagsccgtggtggtaggattgcttgagtccaagagtttgagaccattctgggcaacatatcaggacccctgttactgcaaaaaaataaaaaagaaattagtcgagtgtgatatgtgcctgtagtccagctacttgggaagctgaggtgggaggaccccttgagcccaggaggtcaaggctaccgtgaaccatgatcacccactgcattccagccttgatgacagagggcaatcctgtctctaaaaataaaatataaaaataagtaaggtttgaacttgagcaaataatgtacattagatctaaaatcaaagataagttagcttttaataatttattttaaaatttagggttttttttttagcaactttattgaggtatattttacatattcacctattccaaacataccatttaatgatttttagtaactttaccaagtggtaccaccatcaccataaatcagttttataacatttttgtccccgaattggatccattatgctcatttatag

SEQ ID NO: 839093 - DNA, 558 bp, Homo sapiens
aatgtatagatcaggctggggagaattgtcatattaacaatactgaatctcccattccataaatatggaatgtttctccatttatttagatcttctttttttttgagacagagtctcrttctgttgcccaggctggtgtgcagtggcacgatctcggctcactgcaagctccgcctcctgggttcacgccattctcctgcctcagcctcctgagtagctgggattacaggtgcgtgccaccacgcctggctaattttttgtattttttagtagagacggggttttaccacgttagccaggatggtctcaatctcctgacctcgtgatccacccacctcagcctcccaaagtgctgggattacaggtgtaaaccaccccacccggcctttatatcttctttagcttcctcaaagttttgtaattttcagtgtataaatcttgcatttcttttgtcaaatttattccttagtattttattccttgtgatgctattttgaatagcattgtattcttaattttattacaaattgttcattgctcatatatactaatctattt

SEQ ID NO: 839094 - DNA, 558 bp, Homo sapiens
ttctttggcttggcttgcccaacctctactccacattacttcatgggtgccttcctgggctgcagaaggtagaaagctatctttcccaacttttgcgcaagggttccagatgcacaaaatagatgcattcttctaagacacagaaattgaaaatggggttgaggccatctacctgcctttttctagttgtttttttttctactggtaagcaattttgcacagactgttttctataacagagtttctgtgtccattttctagcctgagtgttaagaggcagttgcagtggcagcatctaggatggcttcctgattcttcattggtggatggcaagatattcttgggctgaataattccaggacagtactatggtcttctgggaatcattcctggtgggccagtctatagcccattcttttggccctttcatgatttttttcctaattacttatggcttttagcctattctttctgtcttaagatgactacattggtttctgttttctgcactgaaccttgactgatacgggccttggwaaatattgctgggacatggaa

SEQ ID NO: 839095 - DNA, 589 bp, Homo sapiens
tacttaattattgtaataaccttataaggtacattattattacctcttttttacatgaggaactgaagcaaagggaagttatataatttgtccaagtttacaaagttagtaagtattggatccaaatactgacccatcttggtataactccaaaaactcagctcttaatcactgtacaataccaaggttaaaaaggcgtatgcctcaatatgtcccaaataaatgatacaatacacaatggagaagacacggcttaacagcccacgttttaaaaacgttttttgtttttgagaataagcacaatatgggtcagcagagtgatttgtaacaaagtgactgccaaaaaaacatgctctatctcaagctgcattaatagaaatattgtatcaaggagccatggtcatgctgttctgcacactgcctcagctcccacctgctctgtatatcacacatcaaggagcacatccacaaagacaataggcagggtttgagagaccaagaatcaacaatggtycctaggaagaaagttttaaggacttgggactattagcttggaaaatggacaactcaattcagggggcagtcatga

SEQ ID NO: 839096 - DNA, 516 bp, Homo sapiens
gacagtttttaaaattaaaaattaaggttttttgtttgtttgtttgagaccgagtttcactcttgtcrcccagctggagtgccatggcacagtcttggctcactgcaacctccacctcccaggttccagtgattctcctgcctcagtctcccgagtaactgggattacaggtggctgccaccacacccgactaattaagggttttttttttctaagtaatttagctagggtggcagttttttccaatactatgatcgggtctatatttcatattttcaaagagtcttgagggcaattattttgagtcgctggctggaaatgtatagcaagctcccagagagggaggggaagacccaaaatctcctgaagatttctaatacagcccatgaaggcatgtgtcatacccaaggagaacacttcaggaacctccttcatcctcatataacccaccccaaggactctggatgtgtgaggtattggctgagaggacaaaagtgcaagatggccatcttttgt

SEQ ID NO: 839097 - DNA, 611 bp, Homo sapiens
aagactttgaagtcaaaattactccagatccatgggctacagaatgaatgctgtgttagcagcatgaaaacaacattaatctccttgtacacctccatcagagctcttgtgtgactaggtacatagtcaatgagcagaaacattttgaaaggaaacattttttccgagcagcaggtctcaacagtgggcttgaaatattcaataaaccctgctgtaaacaaatgtactgtcatccatgcttggttgttgcattgatagagcacagtcagaacagatttagcagaatccttaagggtcctgatatttttggaatggtaaatgagcaatggctttatcttataaaatcaccagctgcattagcacctaaaaagagtcagcctgtcctttgaagctctttgaagctaggcattgacttctctctagctgtgaaaatcctagatagcaccttcctccaactgaaggctattttgtccacattgaaaatatgttgtttagtgtagctgccttcatcaatagtcttatctagatcttctggataacttgctgtagcttctccatcagcacttgctgyttcctcttgcacttttatgttatagagacagcttctttcc

SEQ ID NO: 839098 - DNA, 645 bp, Homo sapiens
cctcttaagtagctagtactgcaagtgttcaccacgaaacttggctaatttttttattctttattttttcttgarataaagtctcactatgttgaccaggctggcctcaaactcctggtctcaagcaatcctctggctttggccttccaaagcactaggattacaggagtgagccactgtgccaggccctagatcattacaatttttataagggataatgtctttgcattatgaaaacagatttttcttaatagcagagttgttaagttgaaattggatacaacattattttgttaaactgttattgagagtcaacaatcagaaataggaaacttgtcatggcatctcataattgcaatttgatttgatgatggtgaatgttatacatcctatctaagtcttctgtggattaacatattattggaccttctttacctacatcttgatccaaactgcctaacatatagttgactggtataaaacctctttaaatatgtctttgaaaaattagttgtgaacaaatatgtaagtagccactagtgatgttctactactcattcttaaatcacagtgccatccttaaaaggggaatttggatgggattgatttaaatcaccagctaggaaaatttggtttcaggcagtt

SEQ ID NO: 839099 - DNA, 645 bp, Homo sapiens
cctcttaagtagctagtactgcaagtgttcaccacgaaacttggctaatttttttattctttattttttcttgagataaagtctcactatgttgaccaggctggcctcaaactcctggtctcaagcaatcctctggctttggccttccaaagcactaggattacaggagtgagccactgtgccaggccctagatcattacaatttttataagggataatgtctttgcattatgaaaacagatttttcttaatagcagagttgttaagttgaaattggatacaacattattttgttaaactgttattgagagtcaacaatcagaaataggaaacttgtcatggcatctcataattgcaatttgatttgatgatggtgaatgttatacatcctatctaagtcttctgtggattaacatattattggaccttctttacctacatcttgatccaaactgcctaacatatagttgactggtataaaacctctttaaatatgtctttgaaaaattagttgtgaacaratatgtaagtagccactagtgatgttctactactcattcttaaatcacagtgccatccttaaaaggggaatttggatgggattgatttaaatcaccagctaggaaaatttggtttcaggcagtt

SEQ ID NO: 839100 - DNA, 621 bp, Homo sapiens
cttcctgatgctgtttctcctgccacctcccatcctctaccaggccccagtttgtgttgtttcccaccatgtgtccatgtattctcatcattcagctcccacttataagtgagaacatgcratatttggttttttgttcctgtgttagtttgctgaggacaatgacttccagctccatccatgtccctgcaaaggacatgatcttgttcctttttatggctctgtagtattccacggtgtatatcaaccacattttctttatccaatctatcattgttggacatttagttggatttcatgtctttgctattgtgaataatgctgtaatgaacacacgtgtgcatgtatctttataataatgatttatattcctttgggtatatacctagtaatgtgattgctgagtcaaatgtatttctggttctaggtctttcaggagttgccacactgtcttccacaatggttatactaatttacactcccaccaacactgtaaaagtgttcctttttctacacaacctcgccagcttctgtttttgtttttttttccccccttttaataagctattctaactggtatgagatgatatctcattgtggttttggtttgcatttctctaa

SEQ ID NO: 839101 - DNA, 459 bp, Homo sapiens
tattctcctgcctcaacctcctgagtagctgagattacaggtgcctgccaccacgcctggctaatttctgtacttttttagtagagacagggtttcgccatgttggccaggctggtctcgaactcctgacctcaggtgatccacccacctcggcctcccagagtgctgggattacaggtgtgagtcactgtgcccaaccgaaaaaaaattcttttttttttttttacttcattcactgatactgtttcttctgcaacagtattttcacatgttaaatgaaaatatgctaaacagttaaatttaataagcagaaataaagctatgctggatttagcaggtgtcaagtagtcctctgactagcaattgttatcctgtcagcatgtatagtttagtgctacagtgctttytagatagacaaagaaaatgtgtcatgagggtaggcaccaaaatattaggaaa

SEQ ID NO: 839102 - DNA, 573 bp, Homo sapiens
actcttggactgaagcaatcctctcactcagcccccacctagtagttgggattataggcatgagcccctgtgcccacctaaggagcatttttatgtctactgctgaagcwaaaagtggtttaggataaaagtggttgagggggttcttctcagtcagaaaaatttcagtattgatccctaatgtgaaacatcacaactagactttaccactgttaagccatcaaactgctgccatgtgttggaataatcaggatattcagcatctgtatctgtcaaaaaaatcatacaaccaacaacggacaagtccacaagagcaagtgaggttcactgttgacacttctgattaaataccacattttacattcagatgtttttacaaagtttttgctgatgaataatgcagggaataactgtaggctttaaattttcgtagacttacattttcacaagctttgtagatttgtccaactaagcctctttccgctctctgttgttaactaccatgatatataacacatcttagcagattccacatcaggttgtactgaatgagtgttttctcaattttgttga

SEQ ID NO: 839103 - DNA, 631 bp, Homo sapiens
aagagtgagtgtatctgcttatgaggtccagattttatttttcatagaattgatattattaaaacaatgagattctagttttgtccatttagagacagaacttgaaatccactcataagtgtttgtcaaattagaaaacattaaaatgaaacaatcttttttaacagagtaaatttacagcatcttgtttgttttattcaaaattgtaattggggtcttttattctaggaagtagaatctaatcttggaatttatcctcttttgtcagtctttcagtgtcttgtgtgaatatatttattgtaatacttcaatataaatgtgtttatatttaatgtattagttttccatgttgaagagtttactaggattgcacatatagtatcctgagatcttgattctataaagaattattaagtttattaaaagatacagaactctttcctcattcctttctttttcacagttgtttgtgtgtttattttttatttccaaatttatagtgatgttatataaatctgcctagattgttggcttttaagtattctttaaatgttraatttgtggtggagtttggaagaggataacatattattatgtgacttttgttcacctgatcatcccacataccatt

SEQ ID NO: 839104 - DNA, 603 bp, Homo sapiens
ccaaaatgaaactagagagaaaaagaaggcttagaagagcatttgtgagttgtggtacaactttaggtagccaaccatacaatatacatggagttgccaaaggaaaggaaaggaagcagcagaaaaagagaataatgaataatgactgaaaattttccaaatttgataaaaactataaaccaacagacccaagaagctcagtgaaccccaaacacacaaaaaaagatgaatgaggctgggtacgatggcttacgtctgtaatcccagccgtttgggaggctgagatgggtagatcacttgaggtcaggccaacatggtaaaaccccgtctctacaaaatataaaaaaattagccgggcatggtgccatgcgcctgtaatcctagctacttggaaggctgaggcaggagaattgcttgaacccaggaggctgaggttgtggtgagctgagatagtgccattgcacttcagcctagccracagagcaagactgcatctcaaaaaaataaaaataaaaagatgaatgaaattacatcaagtcacatcataatcaaaatgctttttaaaaccagttatggaaaggaaagtcttaaaaacagagaaaa

SEQ ID NO: 839105 - DNA, 460 bp, Homo sapiens
atgccagcactctcttggctaccttagctggtatctcagtagattgtgtgcccccatccccccaagtccactgtctctgttcctagttcagcactaggattcacctaagattcgcagtccttatggcctagactgtctttcaagtttccttggaaacacagaacactcaagccatcagtggcgaggtttgccaaaactcaagcagggactgctggggttggcaattcccctctggctagggctggtttaaatgttccctctgtgttggggatgtcagttgagtttggtccgattttcctttctgctctaataccactgaggacaccactgtgttcaatgcctcacaattgctgtcctctccctcccccagtgcctggagatgcygtccacatcatgcagctgctcggggtaagggatggagagctggaggggtggcatctgtgtttactatctcttcaat

SEQ ID NO: 839106 - DNA, 460 bp, Homo sapiens
atgccagcactctcttggctaccttagctggtatctcagtagattgtgtgcccccatccccccaagtccactgtctctgttcctagttcagcactaggattcacctaagattcgcagtccttatggcctagactgtctttcaagtttccttggaaacacagaacactcaagccatcagtggcgaggtttgccaaaactcaagcagggactgctggggttggcaattcccctctggctagggctggtttaaatgttccctctgtgttggggatgtcagttgagtttggtccgattttcctttctgctctaataccactgaggacaccactgtgttcaatgcctcacaattgctgtcctctccctcccccagtgcctggagatgctgtccacatcatrcagctgctcggggtaagggatggagagctggaggggtggcatctgtgtttactatctcttcaat

SEQ ID NO: 839107 - DNA, 607 bp, Homo sapiens
ggcttgaagcaagcaagacttctgaatgttttttgttcagaagaacttggcttgagataatttttggctgtacttgaagttgagtaactgggacatgaaagtagggctgctcgaaagagagccaaagaacccagcctgctgcctgaggcaatgtgtgtccgtcagagtcctactcaagaattcatgtcatcagaagtaagtggtttgttcttaatgaaaaagacgttactcccaaagacatgtcaaatagtgtctgaagaaatgaatcagggtataaaacctgggcggtctttagagttgattttgcacatagtacaaaagaagcatttgtgaggtggcacggtatctgtgaagggaattctttctgcagacttggggccactttggcataggcaaggagatcattcagcagtgctaggatttgtgtggccatattatcttttgccaggaaatacttaccccatagtctaatactgtgtgctcctgaattaggacaggcagttaccaattgccatattctacggtattaaatggacttcttttgaggaatatatgttctggagatgtactgtrgcagctcgccactgagcatgctccccaaggagat

SEQ ID NO: 839108 - DNA, 624 bp, Homo sapiens
tctaagatattttcaatctgcactttttgatcttcaggggatgataagaggaaagtgggaagggggcaaatacaatgaataatgagatgacttcccagattttgctccttcccaatgtctgtgaattcaccatgtctgtgaatctatttttattagcacaagaagctctcacagctcaagctcggcatttccataattaggtcaggaaccaaaaagaatggcacaaactagctaaattcttgagtcataatgactcagtagcttatgaggccaaatcagagtttctgtgggaatagctagcttcataaacattcttggcatgattggcttcagggaccatgctttgaacaagcaacctaaggacaccgagcaaggtctagggacagagattctgactcaatccaagggcttcaacctcttctcagtctgtatgacacaaggcctctgactttggctagtgctgtgactgccacttactcttccttgctctcagttccacgtttacaagatgagatgctgtctaaagtcatttactgttctgttatttttatgggctctttagaataygtaaaatatttggactctacaataaaacaaaatagtcaactccgattctctacgtgt

SEQ ID NO: 839109 - DNA, 622 bp, Homo sapiens
gtgtatttcttctagaaaacagattattgggtcttgttttgttatccgttcagccactatatgtcttttgattggagggtgtcgtccatttacattcaatgttattattgagaagtaaggacttactcttgctattttgttatttgttttctggttgttttgtggttttcccctctttctttctttccttccttcgtgtcttctttttagtgaagatgattttctctggtggtataatactctgtgtttttctgtgcgtacttactattagtagtgatttttgcaccttcagatgattttgtattgcttgttaatgtctttttctttctgattgaagtattttctttagcatttctggagaagtctgatgttgataagatccctcagcttttattagtctaggaaagtctttatttcaccctttacatttcaaggatattttcaccagatatactactctacagtaaaaaacaaaaattccttcagtacttttaatacaccatgccactttcttttggattgtagggtttccactgaaaagtctgctgccrggcttattgaaagtctttgtatgttactttttcttttctcttgctgcttttaggatcctttctttattgtt

SEQ ID NO: 839110 - DNA, 535 bp, Homo sapiens
tcctagaccacagacgcttttgtggttcatagagcttcatttaccttcacttccctcctcttcaatataaatctgaaaaagtacaaagaatggtgatatcaggaagcctaaattgaagaaataraatttattgaaagaggaataaataatgccttatgaaggctgtaggacaatcttcttatgacctctttaatggatctttttcataggatgacaaaaagaccatgttcaggataagacatggccagtttctaaaggtattgggtgtgtagagggacctgattttgccatttcaatgtgttatactaaacaatgctattctgtgacaaatttagagcaataagggctatacaggcatattaaaaattatctggccaggcacagtggctcatgcttgtaatctcagcatttggggaggccaaggcaagaggatcacttgaagccaggagtttgagaccagcctgggcaacataatgagaccctgtctctacaaaaatatattttaaaaaaatttctttgggccaggaacagtggc

SEQ ID NO: 839111 - DNA, 613 bp, Homo sapiens
cttaagtgatttctgttgcctggatccttaagctgccctagtggttgacctttctgaggttggtcaacctttccttggattctgtgggcttccatgtatgtatgtatgtatgtatrtgtatatatatatatatatatatatatatatatatatatatatatataaaatatttacatatatagtgtacttttaaagttaagcagtgacattaatacccaaggtctatattaattgtttttgaacaaacattcctaaccaatcaatttcatcgtcatcattattacatgcctcaaatgtaaaacacaattagaggggaaaaaaagaaaaacataaaaggtaacaaaaatcagctgtaatccttacacatgtagacctccccacttaacatttttataaatgtacttcttggtttctccacatatgtgaagattgtgtttttgtagactttttgtggaatgatattttaagtgaacatgcagaaacatttgaagatgatgccagcgaggacagtatatgggaaagtctttagggccactatggggagttatctgtggatgttttgtgtggcctggcaacagaattgctatagtagacactgctgtaggaactgaat

SEQ ID NO: 839112 - DNA, 644 bp, Homo sapiens
tgaactcctgacatcaagtgatccacctgtctcagcctcccaaagtactgggattacaggcgtgagccactgcgcctggcctgatttttattatttcttctactaatttggggtttggtttgctcttgcttttctagttctttaatatacatcattaaatagttgtttgtttgaggtttttttcttttttgatgtaggcacttatagctataaacttgcctctcagtactgcttttgttgtatcccatagcttttcgtatgttgtgtttcctttatcatttatttcaagaaaattttcaataattccacttattattgatctctagttttattctattgtggtcagagaagatgctttatattatttcagttttttaaaatgttttaagacttgttttgtgacataacatatggtccatccttgagaatgatccatgtgctgaggaaaaagaatgtgtactctgcagctttgggatgaaatgttatgtatgtatctattaggtccatttggtctgattaggtccatttggtacagattaagtctgatgttcattgattttctctctggaagatctgtccaacgctgaaaatgggatgttgaagttaccagctattattatattgggrtctgtctctctttttag

SEQ ID NO: 839113 - DNA, 562 bp, Homo sapiens
aattactaaattatcccacaacttatgctttttttgggtcaggaatccagccatgggtgactctgacttagagtttctcacaaggatgcctttggggtgtgggtgagggctacagtcatctgaaggctcagttggggcagactcatatgcagcctcatgcacatgctgttggctggtgtgaggtcctcactcactgttaacaggagaaatgtcaatgccttgcctcatagacctctccatagagctactcacttcatggcagtttgttattctgttttctgctggggacgtgtatgtgggagaggggagtgggagagaaagagggagagaaagagaaacagagatgccaacttgagcacacactctgggaagaagattatacaatggcatgaataccaagaagtggaatgatgactggagttattttagagaaagtcaaccacaattacatatcrtacatttgataaaaatgattcaaatgacaaatattagtaaatattagtcaccacttgtgaaagcctttggtaaaatttatagtggtaaatttgcattatgtatcccc

SEQ ID NO: 839114 - DNA, 562 bp, Homo sapiens
aattactaaattatcccacaacttatgctttttttgggtcaggaatccagccatgggtgactctgacttagagtttctcacaaggatgcctttggggtgtgggtgagggctacagtcatctgaaggctcagttggggcagactcatatgcagcctcatgcacatgctgttggctggtgtgaggtcctcactcactgttaacaggagaaatgtcaatgccttgcctcatagacctctccatagagctactcacttcatggcagtttgttattctgttttctgctggggacgtgtatgtgggagaggggagtgggagagaaagagggagagaaagagaaacagagatgccaacttgagcacacactctgggaagaagattatacaatggcatgaataccaagaagtggaatgatgactggagttattttagagaaagtcaaccacaattacatatcatacatttgataaaaatgattcaaatgacaaatattagtaaatattagtcaccacttgtraaagcctttggtaaaatttatagtggtaaatttgcattatgtatcccc

SEQ ID NO: 839115 - DNA, 410 bp, Homo sapiens
ctcgttttggagtgcttgaaaataatgtttatttatttacctatgcaataaacatttagcatctattatgtcctaggtactgtgtttatacaaagagaaaggaagaaaaggttattatttctgtttaaaamaaaggattatattacaatcttatatagagactttttgctacctaatttttactctcagcataaactctcaacaacagcgtcacatctctctggatcccaagtgactagattctgattttcaggccttatctgagacactcagaattgttttgctgcctaatttttcctagggtttttttgatgttaatgaaataggttttttttttcattattaattgtgaaggaggaattcttttttactgaattcccacccaagtacagacagcatagattttcttt

SEQ ID NO: 839116 - DNA, 724 bp, Homo sapiens
aaactgtgaaatttgtaaaagaaaataaagagggaaatttttcaacattgaccttggcaatgaatttttgggtatgacaataaaacacaatcaataaatacaagatacacaagtggaattattcaaactagaaatcttccacacagaaaaaaaatcaacataatgaaaaggtaagctataaaatgaaagaaaaatatttgcaaaccatatacccaataagcagttaatatccaaacaactcagaagaaaaaaaatctgattaaaaaattagcaaaagaactggctagacatttttccaaagacatacaaatagccaataggtatatgagaaggtgctcaacatcactaatcatcagggaaatgcaaataaaaactaccatgagatatcacctcacatctgttagaaaaactgtttatcatacacacacacacaaagacaaacattggtgaggatgaagagaaaagggaatccttgtacactgttggtgggaatgtaaatcggtgtggctactatgaaaaacatacagaaattcctaaaaaaatgaaaagtagaactaccatatgatccagtaattccactactgagtatatatccaaaggaattgaaatgaggatctcaaagtgatgtctgcatctccagcattattcacaatatccaagacatggaagcaatctaaatgtatactgatggacaaytgaataaagaaaacatgatataagcatg

SEQ ID NO: 839117 - DNA, 586 bp, Homo sapiens
gcagaattgcttgaacccaggaagcagaggttgcagtgagttgagatcacgctgctgcactccagyctgggtgacagagcgagactccatctcaaaacaaaacaaaaaaactgattaaatgtattaggagaagaaattttttaaatgatttttttggaatacttattttcaattattctaaaacttaaccctttaacttaaaagttctcaaaacccaaaggcttcattttatgggaactctttatctttagctcatgcaagaaaatggaacctgtctacattctactgaaaccagagatacaaaatttcctggagctaagagaattaatcattaccaaaataaactcatatcatcagtacattaaaatgcttcagaagacactttagaagtggattcttggtgggggaaaaaaaaaaaatcacatgattctgcagcatccacaagtgcctgactgaattcaccagaggtctagtcaagctttctaattctattaaactctgaaactacaaagctagctacgttggcttatatcatcttttgcttttcaacatagcaatatcaacaaagggccatgtagggatatct

SEQ ID NO: 839118 - DNA, 557 bp, Homo sapiens
acctggtctattctgagggatcttccctggaattcccctttatattctgttttagtgggtaagagggggtagctgttttctaggagagtctaaaagtgtttaccatttctcttccccccatgaataccttggttatgaagccttattaaaattcttattcataataaggatcatttccattacttcctcttaagctgctctggccaacccataggattgagtcttcttggtaagaaatggtggagagatggagaacaagagagtaataagctatgattcttccatgtgctgcccccgctcctacttctcagccaggttttacctgtgttccctagattggcctcaccctctgcattttggttttgtcttagtaaagcctggcagagactggttggtgaggattggatcactaccactgatgaatatcattttgctggcttgctcttggaaggtggggttgttgtaaagcttgctaaggctttctgtaatcacttkaaggaattcgagcagaactagaaggaatgtggtattgtgagtctggtgttgccacatttgga

SEQ ID NO: 839119 - DNA, 617 bp, Homo sapiens
caaagtgatataattctcttggatggaaatttggcaatatctaacaaaactgcgtatgatttaccttttgacccacctatttacttcaggaattcaccctgaagatacacctccagaaaatgaaaatatttacatgtacaacattattgattagttgtaatcacaaaatactggaggccaggtgcagtggctcaacacctataatcccagtactctgggaggccgaggtgggcagatcacccgaagccagaagtttgacagcagcctggccaacatggtgaaaccccacccctactaaaaatacaaaatttagccagttgtggtgacatacacctgtaatctcagctactcaggaggcaggagaatcacttgaatcccagaggcagaggcggaggctgcagtgagccaagatcgccccactgccctccagcctgggcaacagagcaagactgtgtttgaaaaaaaaaaaaaaaaaaagacaaaatattggaaattaaatgaacwtaggagactatttcactaaacactgatagatacacatagtggagtgctatgcagccataaaaaagaatgaggctaatccctatgaactaatctgaagcagtttccagggtgca

SEQ ID NO: 839120 - DNA, 625 bp, Homo sapiens
caaacagggatcgttgttataaagttgtatttagtccattgaactccttctcaaatttccacccaggcttcatgggttttttgttgttgttgttgttgttgttgttgttgttgttaaatgtgtagtttctggctgatggttttccattgtgagaaaaaggtagtaatgttgttactactctagacaatactactcttcagagcctatttatattgaagcaatatggactttacctctccagtaaaggcttccagtggctctctgagaggttgttcctgcacacaattgtaatcacacatggataacttacacagagtatggagggaaatgtgaaccttaatttgtttctagtcatgttgcatttcccattcagaattttagagcatgaacatagaataacacattttccaaccatatcttgaacttttttgtgctgtaatatctgccttcatggaatgggatgtctgtaaatatagactgtacccctgccttstacatactgcctccaggagagaagaggtgactggtccttgggtggagagagaagagtggtctcatttatgcaaggaatattggtcccttaaccatacagattatagaaggtaggagagggcattgatcaaaa

SEQ ID NO: 839121 - DNA, 644 bp, Homo sapiens
tcccatcacctgagtattaaccccagcgtccattaggtatacttcctgatgctcttcctagccccccacccccaccccctgacaggccccagtgtgtrttgttcccctgatgtgttcttttttttttttctgaggcagagtctcactctgtcgcccaggctggagtgcagtggcatgatcttggctcactgcaacctctgcctcctgggttcaagggattcttgtgcctcagcctcccgagtagctgggattacaggcgtttgccaccacgcccagctaatttttgttttttagtagagggggttttgccacgttggccaggctggttttgaactgacctcaggtgatatgcccgcctccacctcccaaagtgctgggattacaggcgtgaggcaccatgcccggccatgtccatgtgttctcatcattcagctccaacttataagtgagaacatgcagtgtttgattttctgttcctgcgttagtttgctgaggataatggcttccagctccatccatgtccctgcaaaagatgtgatctcattccattttatggctgcatagtattccgtggtgtatatgtaccaaattttctttatccaatctatggacactttctactctctcactccttccaccacaac

SEQ ID NO: 839122 - DNA, 483 bp, Homo sapiens
cactgaagtactatttacagagggcttctgaatttaaaaacaaaactaaactaaactaaactaatttaatactaaatctgccttgtaaccttagaaaagttactttacctttctgagctttctaatctgtaaaacactcagatctctgctcaaatatagcctcaccagagatgccttccctgtccacctatctaaaatagcagctacctacccacaactctctttacttcatggcatttctcatctcctgactttattatctattgattgttaatttattcattgtccatctctgcctactgctctatctccagcaaaaggatggtgttctacctcacatctagggctattctcctccttattctccaagttcccgccactctgaacttctgttggctcttcaaatacaagagaaarggcaaggagtgtgctgaaaaaaaaaaagttacatgaaagagaggaagagagaggggaaactggagt

SEQ ID NO: 839123 - DNA, 581 bp, Homo sapiens
caccgtgttagccaggatggtttcgatctcctgaccttgtgatccgcccgccttggcctcccagagtgctggaattactgacatgagccaccgcggccggaggtgatttttaccatttttaagtgtacaagtcagtgacattaattacatttacagtactctccaaccatcaccactatctattttcaatacgttctatcacccagaacagaaagtgtgtccccatgaaacagcaactccccacttcccctccccacaggtcttagtaacctccagtgtattttctgtctctatggatttagtctagatgtttcatgtaagtggaattatgcgatatttgtcttttggtgtctggctgattttactgagcatgttttcaaggctcatccctgttgtagtgtgcatcagaacttcattcattccgttttatgaatgagtaatattctattgtacaaatagaccacatttgggcccagcrtggtggctcatgcctgtaatcccagcactttgggaggcctaggcgggtggatcacctgaggtcaggagttcgagaccagcctggccaacgtggcaggaccccc

SEQ ID NO: 839124 - DNA, 626 bp, Homo sapiens
gaatgaaaatgagttgttatgtttaatgttttccaatggaagaatcttattttacgatggcttcatgtttcagaaaaaaaccaggggttaaattacattatgtagcatggtttaaaattcagggtagcagawgagacatttctctcatggaacagattaatacaagacctaatagaattttctgaccctaaaaaccaccaagagaagatttcatttatttctcttctgtatataaattttacatattataaaaattatttcagaaatgttattgccaacaaaaaacataaaatatagtatgaactaagataaaatggcagaataccatttgcaaatgattaatctagcctaacattgctttttaaaaaggccaacaactaggtttcatcttcagaatctgctttccaatcccagtgagcttgctcagttatgaatgcaacatccaagactgctggtttcacctccaacatgtgaatcattttaaagtcaccactcccattcataaaacaagaaaggagctcaacaaactgaaaacccacgacttttattatgcacatcagaaactgtaggtcacagcacagttacccccaaacctggagagacagggaaatatagataatcacaat

SEQ ID NO: 839125 - DNA, 662 bp, Homo sapiens
cacagggttctttcccatgtccatatcrgtgtgttcttccttccatagtgaaaacccgactcccaatgataacaacaacgttcactcctctgttcaattctgtaatactccaaaatgttctcagaagattagaacaaaaacagcaacatgaaacaaacctattaaccctattaaagattgtgagtggatagtgaaacactgtgttcgtaagttatactgattagttttgtttaggttgattcccttcagtgttgttatagcattcatataaaatacatagtctgctaattttatattcagttttataatgtttttatccccctcccatctttattaattttttgtgcttccaaaagtcaaaatttattcaagaaagtataaaactgtctcactctctctcatattccacctgcccactccagcctcaccttttccaagtaaccaatttcattttggttgacttattttcctgtgcatattttttttctagtaaagataagcagacacatgtattggtttttattttctattccttctttacacaaaaggtagatgtttttacttaacagtattttctgaaaatcattgtttataaaatcctccttcttgtttacactggcagagagtcctattgtgtggcatggagaggttacacatccact

SEQ ID NO: 839126 - DNA, 604 bp, Homo sapiens
attgcattttagaataaacacctgtatgccctgcaaggtattctccaagaatgcacacaatctggcctcttcctgcctatttgrtgttgtaactattgacagcaacaggaggcagagaaactctaggcagccagggattggtccccagtgaaaaccccaacttcagactaaaagttgcctgaaacctgtggcttaaagtgagaactcctattcctgtttgcccactctttcctgattagttctttctgaataatgtctttttaccaatggaatgttgccttttccaaaactacccatggcccaccccacccctaatcctgtgcctataaagacccaagactcagtcagtagagagggaggtgacttgacttcagagagaggtaacttgatttcagagggatggctggactttggaggagagacagcttgatgacttgacttctgagaagaaccagccagagatggccaggctttgggggaagattacatgcccatcccaacccctttccagctctcctctccactgagagtcacttgtatcactcaagaaaattctccatattcaccatctttcgattcatctgcatgacctcattcttcttgg

SEQ ID NO: 839127 - DNA, 493 bp, Homo sapiens
gagttcaaaaggctgggggctctgatttgatacgttagtgtccttatgagaagagactcaatctctctctctctctctctttctgtctctyattctcttcttctcttgctctttctttctttccgtgtaaggacacagtgagtagctaactgtctgcaattcaaaaatagagcccttaccagtaactgaactggcggtcaccttgattttggatttctaaccttcagaactgtgataaataaatttcttgtgtttatgccactcagtattttggtttgggttaacaaccaaaacagactaagacactctgtaagagaatgtctgaatggatgcatggaggagtctgagtgtctgagaaaggggtatggtcttcggcaagttggattcattcttttaggcctgtttctccatctttcttgtgaaaggataaagccatttgtcatctgtccattcattaatttactctacaaattacacttagcgctcctagtct

SEQ ID NO: 839128 - DNA, 473 bp, Homo sapiens
aacagccctgaggtcttgggtgtcaatgtccaktttaaattgaataaaagagaaatatagtggagagggactcattgactaatatagcaaaaataatattctgctatatatataagatattttagcttacattaataacattttatccactcctgcacttttctggaggctgggaaatccatgaccaaggtgccagcagattcaatgtctcagcaaatttcaagcatacacaatattattgttaactgtagtcaccttgctgtacattaggtctccagaacttattcatcttataactgaaagtttgtacctttctttgttttgctaaaactatttcccaaaatagtccatgtcaatacaaataaatctatcacataactccagagtatgcaaaatattgacttttgtgggtatattataattttattgaaaaacacctcttccattgaaaagacatttaagtttgtagtcag

SEQ ID NO: 839129 - DNA, 612 bp, Homo sapiens
cagcactttgggaggccaaggcaggcggatcacgaggtcaggagatcgagaccatcctggctaacacggtgaaaccccgtctctactaaaaatacaaaaaaaaaaaaattagccrggcgtggtggcgggtgcctgtagtcccagctactggggaggctgaggcaggaaaatggcgtgaacttgggaggcggagcttgcagtccagcctgggcaacagagcgagactctgtctcaaaaaaataaaaaaaaaagaatgaaagacagcataaataaaacagaatattatgaagaactttaaaaaaaaagaaaaatattatgttgaggttacaaaaagtgtttatgccaaaaaacaattcaatttctagagccattgttataattgttatggatgctattattgtttaaaattccatgatttaattttagttataatagtatggataggctctcttttttaaaagatgaaggagttggcagtcttcccacttcttttaccctatgtcttcattagttgcattaatcgtttaagatttggaatatttgcctgctgtggtggaatcccagcttttgcagtcatttagttttatgtctatatttatcttatacaaagct

SEQ ID NO: 839130 - DNA, 550 bp, Homo sapiens
gttacttcctagatacaaatggtgggggtacaggcattaggtaaatacaccctttccagatgggataaatgggccaaatttgtgagagagacattttaagtggagttttagcatgcttgaagagtgctatggttgctcttatctataggccagaccttacagtggagactgcagtcaatgaattgtgtaagctgaatgcaatgggtataattggattctgggaaagcagtagtgaagtggtgtcagtcagtcaccaaaggcagggtaggcatgtttatcataaaagtcagcacagtcagagcaacaatgagaatatgggtgtaccttggagatattgtgggtttggttccagaccaccacaataaagcaaatatcacaataaagtgagtcatacacacttttttgtttcccagtgaatataagttatgtttatagttttctgtagtctattccatctgtctrcaatagcattatgtctaaaaatgtacacacctcaattaaaaatactttattgctaaaaaaaaatgctaacacttatctgagccatcag

SEQ ID NO: 839131 - DNA, 574 bp, Homo sapiens
ttaatttctctgaaacacagttttcttgtctataaaacttggattagttgaacttaattcaaaaatttttgagattataattttaaaagtaaccaattaattcattgtacaataaacaatatatgcttaattcgtgttagtttatttacttttatctttgaagagcatactaccaagtaaagttgttatccagaactcagataacttccataacccagattattccattgggtactttgaattacataatggaccataatttgtcaaatgcgtgacaacttgccacctcagttgccaccttccttattcctttcatttcagtacatagctccatatgttatacttctatattagaataaaaaatatgatagcacaggattaaatacattaaaactgtaaaggatactaaagtaacattgatgcatctaaaaaatatttggcattcackccccttattttaccatcaggaaacaggcccagtgttgagctgaaaggccttgagatcatctgactgaaaaaatagaacagatgtgcgagtgagtcaatcattccagaactttgacactacaaatga

SEQ ID NO: 839132 - DNA, 674 bp, Homo sapiens
tttgcagccaactgttcttagaggatccctggtgtttagtattttatgagaaatgaacatgtagcaaaagtaaattcaagtttagaractagaaaatgtctaatcaaacaatgtgaaaaatagaagagggcattaatagatgtaaaagcagaaattaactaaattaaattatgcaatcccaataggaaaacatggttctccctgagtctcttctgaagtgcagcccactcattcccacagccatgcttcttaggttgggcagtggaattcacagacatgtggatcatcctagactccactgcagagtccattgagtcatatcactaatacctcctcctcggaggagtcttgggtcatctgtctacccctcctcattgtttcacctgctgggctcccagcgactcctttccttcatggaagacttactcctgagtggtggtcttcttttttgttttaagctgctggacaacttcatggatcatgaccatgacttacccagaagtctgggttctagggaaccatggaagttcgggtgaaagtagaaattgaccttatcataactttcaccccaactcccatggtcaatctgtggccgtggtcatttcttagagttactccaattctgaaaacacccacatcctcaccacatatcacctatccttccaactctttca

SEQ ID NO: 839133 - DNA, 608 bp, Homo sapiens
gtcttgtttaaaatgccagggcccagcagaattaggcaggtacaagcccctggagtgatgtttttaggatgatctgtttcatagcctgaataaccaagagctgaaactgcttatttcccccatgggagagggctttgggatcaatagcaatcaagatagcccccaagagtatttcattgtctcttggtcatggtgtggggggtgggggttacgtgtccacagcccctctgtgcctggcaggcatggcaaaagcacagaacaaagacaaatctgaatgctttcgcctggcctctctccatgcaggcaaagctaatggattatgattccagaatccatcaaccaggacaaagccgggttaacccctgcctttccagtcttacaccagagagaacctctgacagagttactgtacccatcccctgcctctgtccccactgaagcttcttccaggataaaagtggtggggtgggcccagggatctcattcactggatgttttgcctgaaggaacaatcacctcatgttttacacttaygaattctggggtttgttgattaactgggagacttcttagaagcctggtgagttcagcccaggcagtcacaaagc

SEQ ID NO: 839134 - DNA, 592 bp, Homo sapiens
taagcactttcccaagtgttttataggtattaatacatttaattctcactctatgaggtaagtctattagtgcctttttattatttatttatttatttatttttcttgagatgaggtctcgttctataacccaggttgctggagtgcagcgatgcagtaacagctcgctgcagccttgacctcctgggcttgagtgtgcctcccacctcagcctcccaagctgctgggaccacaggtgcacgctaccacactcaactaattttttatttttagtagagatggggtctcactatattgcccaggctggtcttgaactcccaggctcaagcaatcctcccactttggcctctcaaagtgctgggattacaggagtgagccaccacacccagcctagtgtcattttacagatggggaaaagagagatacaggaaagttaaatattttgtccgaggtcattcaaacactaactagagaaggcaatatttgaacacaagcattcagacttcagattttaaactcttctgatacggtgaaatgtttatggtacactgttaagctaawaaaaaggatgatattgaatcgcacatatagt

SEQ ID NO: 839135 - DNA, 601 bp, Homo sapiens
attatttgcagaatttttcttctgtaccttcttcggtgggcagaggtgtttaagggagttttaaaaactgaacaaaagaagctataaaatagtttaggacgggcacaatggctcacgtctgtaatcccagccctttgggaggccgaggcgggagaatcacttgagcccaggagtttgaggccagcctgggcaatttaagaccccatctcggccgggcacagtggctcgcgcctgtaatcccagcactttggacggctgaggcaggtggatcatgaggtcagatcgagaccatcctggctaacatggtaaaaccctgtcgctactaaaaatacaaaaaattcgccaggaatggtggcgcatgcctgtgctactcaggaggctgaggcagaagaattgcttgaacccgggagacagaggttgcagtgagctgagatcacgacactgcactccagcctgggcaacagaatgagacgccatctcaaaaaaaaaaaaaaagcccctgtctctactaaaaatcaaaaaaattagctgggtrtggtggcaggtgcctgtaattctagcgacttgggaggctgaggcagaaggattgcttgagcctggg

SEQ ID NO: 839136 - DNA, 541 bp, Homo sapiens
ttcttaggaactcaaagacccaggaatctgagtgaataagggttagtgataaggrtatatatattttttttctttttttttttttgagacggaatcttactctgttgcccaagctggagtgcagtggtgcggtcttggctcactgtaacctccgcctcccaggttcaaatgattctcctgcctcagcctcccaagcagctgggactacaggtgtgcaccaccatgcccaactaatttttgtatttttaatagagaaggggtttcaccatattggccaggctggtcttgaactcctgaccttgtgatccacccgcctcagcctcccaaagtgctgggattacaggagtgagccatcgtgcccggcaaggatatatatattttaaaataaatattaaattagctgggtgtggtagcacatacctgtggtcccagctacctgggaggctgaggcaagagaatcgcttgagcccaggagcctaggaggtgaaggctgcagtcagccatgatcaagctactgcactccagcctgggcgacagagtg

SEQ ID NO: 839137 - DNA, 548 bp, Homo sapiens
acggtctcactctgtcgcccaggctggagtgcagtagcttgatcatggctgactgcagccttcacctcctaggctcctgggctcaagcgattctcttgcctcagcctcccaggtagctgggaccacaggtatgtgctaccacacccagctaatttaatatttattttaaaatatatatatccttgccgggcacgatggctcactcctgtaatcccagcactttgggaggctgaggcgggtggatcacaaggtcaggagttcaagaccagcctggccaatatggtgaaaccccttctctattaaaaatacaaaaattagttgggcatggtggtgcacacctgtagtcccagctgcttgggaggctgaggcaggagaatcatttgaacctgggaggcggaggttacagtgagccaagaccgcaccactgcactccagcttgggcaacagagtaagattccgtctcaaaaaaaaaaaaagaaaaaaaatatatatayccttatcactaacccttattcactcagattcctgggtctttgagttcctaagaa

SEQ ID NO: 839138 - DNA, 676 bp, Homo sapiens
tattttcttaccactttaagatatgcggcgtgaagttcttctcttcaacctactgtgtcatttaagtgtctctcttacccatttttcagtgtctaccttgtgaaggaagtcagtttgagggttttcggaggaaatgtcatcctcatcatccgatctgtctaagatgtggtccactttgataatttcctttagcaaactgcaagccacacaatccaaacagaggctgttattatgcctttgggccagagcttgggcctgcactactcctttctaaagggagaacactgagatcttccccagtcccagggagcatctgctatccttgtactgagttctttctgggtgaataacacctcacatattatatctcacaagtagaaatagaggggctggataaataataattggctgaatccataaattaacagtgagattccaaattccaaagtaattgcagttctgtgcatatgtatgtataaatgagtgtgcacaatcaacaaataagtaaattaatatcctgttttaaaaagtggagtttaaaaaccttatgtggtttaaatgggcagagaggagtaggtctacagtgccctcttgatctccaccccsccagctgtcctcctcacaatgtttactagcttctttattttcaacagagatgctatgcataaataagcag

SEQ ID NO: 839139 - DNA, 622 bp, Homo sapiens
agggacccagtgggaggtaactgaatcatgggagcrggtatttcctgtgcttttcttgtgatagagaataagttcacaagatctgatcgttttataaaagggagttcccctacacaagccctctcttgcctgccaccatgtaagacatccctttgctcttccttcatcttccaccatgattgtgaggcttccccagccatgtgggactgtgagtccattaaaaagtctttccttcataaattacgcagtctcacacgtctttactagcagcatgagaatagactaatacacatggtgaagtcccacgatacgctgtctggaagctggggaaagagagaagccagtagcatggctcagtccaagtccaaaagcctcaaaaccagggaagccaacagcatagccctcagtctgtggctgcaggcccaagagcccctggaaagcaactggtgcaagtcccacaatccaaaggccaaagaacctggaggctgatatccaagggcaaaaggagaggaagcaagtgtccagcatggcacaggaagagagagagagtgagcagactcagcaaacaagctgcttcttccccttttctgcctgccttgttccagctgtgctggcagccgat

SEQ ID NO: 839140 - DNA, 540 bp, Homo sapiens
ccggccgccagctcgcagcacacgagtccttccccgtcctttccccaccctgcctgcactacaccatgtcaggaatccgggcaggcaccgagctgggagctgacatcactcccagttccaggtacctccccctcccactgccgcccttctctcctccctccctgcaggaatcagccaaagagagtcagcagtggggcggggccgggggcgcctgcgcgcccgctgattggagccggggaacgtcactcagaggagtccactaattttatgcattcctcgctgagccagactagggctggaagtgggtggatggaagaaaatgctgcccttcctgctatctctaaggaacggagataatccgatggggaagaacctggcgggtcgagttttaaacttttcttgttgtagttactgagattccagatcagaaacgaaamtaacccacgcgaaccccctttttaaggagaaacaattgcctcggtgtcacaggcacacgggcatgtacaagcccggcggcgcgtggtgtagaaaatggctagc

SEQ ID NO: 839141 - DNA, 636 bp, Homo sapiens
tatcttatttggaaaaagagtctttgcagatgaaactaagaatcttgatataagatcgtctcagattacttgaatgggttcctaaatccaatgacaaacatcctaatgagagacagaggaggagaagacagacaaagagaagaccatgtgaggatgaagacaagagaccaggagttatgtagctacaagccactgaaggcctggagtcccagaagcctgaagaaggattctctcctggaggctgcattaggggtgaatagctgaattctactggaagataatctgtgaggagggggtatggtcatatggtgatttggtcatatggtgatttgctcgaaggtgagaaatgtcacagttatttcataaattcccgaggacaaaaataacatataattcacttttttttcttttttgttcgcatgggaaggctagtaagtccttcatgtggtaacagcagcatccagtgggaacaatgccatattccctgcctccctcctgatttcaagctttgaagttctgcaccaattagaagaaaaccctcagatattttcttaccactttragatatgcggcgtgaagttcttctcttcaacctactgtgtcatttaagtgtctctcttacccatttttcagtgt

SEQ ID NO: 839142 - DNA, 636 bp, Homo sapiens
tatcttatttggaaaaagagtctttgcagatgaaactaagaatcttgatataagatcgtctcagattacttgaatgggttcctaaatccaatgacaaacatcctaatgagagacagaggaggagaagacagacaaagagaagaccatgtgaggatgaagacaagagaccaggagttatgtagctacaagccactgaaggcctggagtcccagaagcctgaagaaggattctctcctggaggctgcattaggggtgaatagctgaattctactggaagataatctgtgaggagggggtatggtcatatggtgatttggtcatatggtgatttgctcgaaggtgagaaatgtcacagttatttcataaattcccgaggacaaaaataacatataattcacttttttttcttttttgttcgcatgggaaggctagtaagtccttcatgtggtaacagcagcatccagtgggaacaatgccatattccctgcctccctcctgatttcaagctttgaagttctgcaccaattagaagaaaaccctcagatattttcttaccactttaagatatgyggcgtgaagttcttctcttcaacctactgtgtcatttaagtgtctctcttacccatttttcagtgt

SEQ ID NO: 839143 - DNA, 545 bp, Homo sapiens
cattcattcaacaaatatttcctgaggacctagagctggatttggcctgcgggaaatggtggtaaacaaaagacagaaggcctcttccctcttgggrattacacacctcctgaaggggaggtagacacactacatgttacttataggcacttccaagtaagtaagaggtgtaaggctagaagcagggccctcaaatagtccaggggatagagaaggactctctgaggaggggattcttgagctgtgatctgaaggcagaaggggagttaactccaccaagatggagggggaaagcatgccaggcagagggtagctcacaggcaaagaccctggggtgggaagaaacttggtgtctgtgaggagctgtaataggaagtgtgaccaggaagcagagaggggccagggaaagagaaaagggaagaggttgcagaggtgagcaggtgaagctgtcctcacagggataacaagaattctggacagaaatgtagttataattaagcattaatcaggctgcactctgacccacttcctcgtaaccaaaagcc

SEQ ID NO: 839144 - DNA, 557 bp, Homo sapiens
gtcctagccactcaggagactgagacgggaggataacatgagcccagaatattggggstgcagtgagctatgattgtaccgctgcattccagtctgggcaaccaagcaagactatctcaaagaaacatgcaaaaaaaaacacttgaaaatacaagaattctttttttttttttttttttttttttttggaaatagagacactctgtcacccaggctagagtgcagtagcgtgatctcggctcactgcaacctctacctcccagattcaagtgatactcctgcctcagcctcccgagtagtgaggattatagtcacccgccaccacaccaggctaatttttgtactcttagtagagttgggttttcaccatgttggtcaggctggtctcaaactcctcacctcaagtgatctgctcgccttggcctcccaaagtgctgggattataagcggagccaccatgcccggccacaagaattcttaaaagatagcttcactgttctctcccagaaagaccaacctcatcctaaccactactagcctacagtgatcttacaaca

SEQ ID NO: 839145 - DNA, 481 bp, Homo sapiens
ccatgtcatatacatttaggctatataaygtactataataacaatgattatggctaatatttttggaggagagctgaccattgtgtgcaggaagcctatcaagtattttccagagcttgtctcttttaattctctcaatatcccaataaggcagataatgttaatatccctacttcacatatgaggaaatggaacatcaagaaataaggccaggcatggtggctcacgcctgtaatcccagcactttgggaggccgaggcagggggattacatgaggtaaggagtttgagactggcctgaccaacgtggtcaaaccctgtctctactaaaaatacaaaaattagctgagcatggtggtgggtgcctgtaatcccagctacttgggaggctgaggcagaagaatcacttgaacctgggaggcggaggttgcagtagctgagatcatgccgttgcaccattgcactccagcctgtgtaacagt

SEQ ID NO: 839146 - DNA, 489 bp, Homo sapiens
taaataatatgatttttttttaataataagtgatttagcagtacttaaataatatgatcatgctggttttcattctgaaattcatgccaccctaactaaatagaagaataaatgaaagaacacaactgtgttgtgacttacgacacacttttataatcgacaaaagtgcagttgaggttatttttttattaatctcactgaacaaatgttccaaaactagacctctttttccaattaaacataatctctatttcataaattaaagttaacaaagtcaaatgcaatttagttatgaaaatctgtctttcttttctcagctcacagttgaccaatcccatgtgcataagataaaaggacagggaaacaagtggctttgctaaacattttggtatgcaragaaaccattacgccattgatgctgtgggactgcaatcacattcacatagaatgaaacatgctgcctgcaataaattactgggtatgttggag

SEQ ID NO: 839147 - DNA, 537 bp, Homo sapiens
atatgcaatactatataacgaaattagagagatttccccattgtggtagtcaggataaatcatctggcctttgataagattggccacctcattgagccttggagtagcccaggcctgaataatacatataacttttctgtttgcaggccttttgtgaagttgctctgttatctctgtggccccaaagaccaaaatgatggagaaaatgaaaccaggatgatttctgacatctgcttccactccaccttctttaaccacttcatccacatctctcttagcttctcacataagtctcacctggaatcatcttatttacaccaataaatttacctaccacctgcctgttgattgccaaatgtgtaccttcagatattttttctatgctccaagctgatatatctgacaatctattgctcaactcaacctggatccccacagacaaaccaaacttaaccttaccaaagcaaaaatyattgtctctccctctccgaactcttctgctcctgtgttctctctgacagtgcagcatgtcaatcc

SEQ ID NO: 839148 - DNA, 510 bp, Homo sapiens
aagaggtttaattggacttacagtcccacgtggctggggaggcctcagaatcatagtgggaggcaaaaagcacttcttacatggcagtggcaagagaaaatgaggaataagcaaaagcagaaacccctgataaaaccatcagatctcatgagacttattcactaccatgagaacagtatggggaaaaccacccccatgattcaaattatctcccaccaggtccctcccacaacacatgggaattatgggagtatagttcaccatgagaattgggtggggacacagccaaaccatatcaacatatgtgatattgctagggactgaattgtgtcctccccaaaattcatacgttgaagttctaatttccaatgtgattgtatttagaaatagggcttttaggagataattaaggttamgtgagataatagagatgggttcctaatctgataggattgctcttcttataaaaagaaagagagagagaaagagagagatttctctaggaatagg

SEQ ID NO: 839149 - DNA, 622 bp, Homo sapiens
atttacaggataaattcttggaataagactgctagttcaacaggtatatacgtatgaattgtaactgatattgctaaatactctgcactccccacaggaaatatgtgagaataccaatttccacatgttaatatttctgttgtattattgaactttaatatttttgcccatttgaagggtgaaaaaaatctatctatatgtattttcatttgaatttcttctgtcataaccaagcttgaggttttttccatatatttaagagccatttgtattttctatcacttttgcccaattttttattgggttattagattttgacatatcaatgttcaagaaaaccttatgtcttaagatgataagcccttggtcaatattgtgagctacaaatatttttctcactttatcatttgccttttgagttttcttatgactttttgttatggagaattttttaatttcaattttagtcaaactcatcaatcttttctgttgcagtttattttgaaattctacatattttctkctaaatttttatcttttttatatttcatctttgatttgtttggaatttatcataatatcgtgtgtgaggaatggatccaacattgttattttttagttg

SEQ ID NO: 839150 - DNA, 622 bp, Homo sapiens
atttacaggataaattcttggaataagactgctagttcaacaggtatatacgtatgaattgtaactgatattgctaaatactctgcactccccacaggaaatatgtgagaataccaatttccacatgttaatatttctgttgtattattgaactttaatatttttgcccatttgaagggtgaaaaaaatctatctatatgtattttcatttgaatttcttctgtcataaccaagcttgaggttttttccatatatttaagagccatttgtattttctatcacttttgcccaattttttattgggttattagattttgacatatcaatgttcaagaaaaccttatgtcttaagatgataagcccttggtcaatattgtgagctacaaatatttttctcactttatcatttgccttttgagttttcttatgactttttgttatggagaattttttaatttcaattttagtcaaactcatcaatcttttctgttgcagtttattttgaaattctacatattttcttctaaatttttatcttttttakatttcatctttgatttgtttggaatttatcataatatcgtgtgtgaggaatggatccaacattgttattttttagttg

SEQ ID NO: 839151 - DNA, 613 bp, Homo sapiens
gagtgttatctgggaaattaagacagtatctttcatatccaacgacggcacatctttcattgtttycatacttcctgctgaagccattatcaacatggtttcaaaattatagactcacaggctcaaagaatttcagaactttggttcttatgtctgcaaatgtgtggaaatattaatggaaataaattctgaaagtatgtaacaaaggaggaagtaatattatttaaaattgggctgaaggtatcaatataaacacacctcccagagattcatgattccgtgtgttacctcaaattttgggtctaattattggctcttctagagtgacttaccagttacccacattactgtgccttggcgaaggctgttaatagaaacaatgtgagctgcaaatatgtgccttgcttgcaattttaaattttctaatagccacaaagtaaaagtaagcaaataaaattatcttttatattttattggatgaaatgtacccaaatcattataatttcaacatataaagcaatataaattattgatgacagattttacatcctatgataggatgtaataggagaaagggatttgctcagccctttaaaggaattggtacactgag

SEQ ID NO: 839152 - DNA, 621 bp, Homo sapiens
atggaactctcagagctcattttttttccccctaaaactcgctcttcttttcctttgttccatatttctaaaaatttctccccccaaacaagccatcctctcaagcaaaactatggtgtttttcacactccccttgcatacagatagtcggcaagtgcggtagattctatcttggaattgccttttgtaaagagccctatcactctcatggaagtcttcatcatttctcacttgcagtactggaacatctcctaactgatctcctttaaattagtcttcttttttcagtccatctgccacattgcttccatagtaattatcctgagtggtaaacctaattattattctcctgcacatcaaaccttccctggcttcccattccctacagagtaaagttcagagcacttagggttacatataaggcccttaacggccgacttcttctcgctcatctcagaacacctcctcctgtccatcctatagtggggccatcccaaatttttgctatttctargacatgccacagaattccacacctatgttttggcacatgtcatcacctgttcctgaaatgcaattcattcatttatgcagtagtgctagccctgggctgtgcacagg

SEQ ID NO: 839153 - DNA, 517 bp, Homo sapiens
gtactaaactcctatcatatgccacccactgaactccatctcatgcctggattaaccagacatatacagtccctgctgtcagggtgcaaagactcaggccatcagaagaatcaatcactaaatgaagaaactcataaaggattaactggaggctgggcacagtgactcacgtctgtaatcccagcactttgggaggccgaggtgagaggatcacttggggtcaggagttcaagaccagtctggccaacatggcaaaaccccatctctactaaaaatacaaaaaaattagcagggcgtggtggcacgcacctgtaatcccagttactcaggaggctgaggcaagaggatcgcttgaatctgggaggtggaagttgcagtgagctgagatcacaccactgcactccagccttggcaacagagcaagactccatctcaaacaaggaaaaaaaaaaaaaaaagaattaactgcaggatatgaggcycgttttcttccctttctctgtctttcagagaatgt

SEQ ID NO: 839154 - DNA, 608 bp, Homo sapiens
taagagaatgagcagaaacatgcaagaactcttgaggcttagactcagagttgtcacagggtcatttctgccacatcctaarggtcaaaaccagcccagagtcaaggggttaagggataggttccacttcttcatggagaattgttgtaaagccacatctcaaagggtgtgaatacagggaggggaaaaattagggtcctgttttgcaatcagtctatcatagatgcattcaaatgagttactgtagccactctattagttcctccttgatcatcatgcaaaatctaaaaatatttcagattttagtaccaatgattctgattcctagtcaaaaagcttctgttcccaagatgagtagagcaaatactttaggaaccttaaaatgctacttattgttccttaacatgactatgatcatatccaccaaggatttgaagctggtacttgagaaactgcctctgggaattaagggccagataaactcaaccatgagtacgagatccaagcccacagcctaacacctgccactcttgggtaaaaccaagcaataccccaaatctcttgatcttccaggaaacgggatgcactgagtacatctgcatgggctc

SEQ ID NO: 839155 - DNA, 608 bp, Homo sapiens
taagagaatgagcagaaacatgcaagaactcttgaggcttagactcagagttgtcacagggtcatttctgccacatcctaagggtcaaaaccagcccagagtcaaggggttaarggataggttccacttcttcatggagaattgttgtaaagccacatctcaaagggtgtgaatacagggaggggaaaaattagggtcctgttttgcaatcagtctatcatagatgcattcaaatgagttactgtagccactctattagttcctccttgatcatcatgcaaaatctaaaaatatttcagattttagtaccaatgattctgattcctagtcaaaaagcttctgttcccaagatgagtagagcaaatactttaggaaccttaaaatgctacttattgttccttaacatgactatgatcatatccaccaaggatttgaagctggtacttgagaaactgcctctgggaattaagggccagataaactcaaccatgagtacgagatccaagcccacagcctaacacctgccactcttgggtaaaaccaagcaataccccaaatctcttgatcttccaggaaacgggatgcactgagtacatctgcatgggctc

SEQ ID NO: 839156 - DNA, 590 bp, Homo sapiens
gaaatgtcagcaggaacacctagtctcaatgacacaatgagtcacartgagtttaaattaaagaaaaattgaaaggtaacatcataaatctttgtagatgaagtgctggccatggccctgccaccaagtaatcgctaatagagattagaaggtcatttatttaattacttcaagtgtttatagtccttcatgatgaattaatttagcaggtataggtgaaacagaacgcatttagcctactcctgcttcattgagaggtgaagcattttttaatattactgaaaaagtgtcatcttctcatggtgtttggcatattgtacacattcaaagcaaggtacattgaaatggattggataagcacctattctaagcactacacaaccgatctcttattcagcttacaataaatcactagcttttgttaatttaagatgtgtagatttgtacttattatattctacttctaagtacaaactcttaggatcctgtttatatgagtctgtgagtatgtgttctactgaatgaggaggtgaatgtcagggatgaggttggtcattcatagggtgcttatcatatgtcaggaacatgca

SEQ ID NO: 839157 - DNA, 323 bp, Homo sapiens
cttgagctcaggtgttcaagaccagcctgggcaacatggtgaaaccctgttcctacaaaaaatacaaacattagccaagcctgatggtgtgtgcctgtaatcccagcyactcaagaggctaaggtgggaggatcccctgagcccaggaggttgaggctgcagtgagctgtgattatgccactgcactccagcttggatgacagaactagaccctgtctcgaaacaaaaaacaaaaaaaaaacactgagatttctgcatatacccttgggctctaccatccaacttcaaggaatttaactttaggaaataactatatttttgtg

SEQ ID NO: 839158 - DNA, 633 bp, Homo sapiens
ttctatatggaaacaggatgtggatatttgacttgccacaaatttcttatttttgtaccctccttcctaaagtgctgactgccttcaygtggcttggaattaaaccaccaactccctggacattgcttcacacaatgggtcccaaccatggatcggacatatttcttcataatgacaaagaattcactctccaccaatccttacacttctctactaatcttatttgccatttacatctgtgactttttcatacttctctagcagacaccttttatgtctatttcagctcctgtctccggttgcaggggctgcagtggtgactggctatgcatgggctggaaccaacctcaccatcagacagcacctagcttcctgcctgtgcctcagacctcttgccttctgtcctggggcttccctgttgatgttgagacacaggaagctggggagccccacttagtgcccacatacatgcccagaagtacagggcaagcaacacccagagtgggtcttatagacaggagctgatggggaagttccttctcttctggatgaattgtcctgaggcagattgtaaatggcttacagccatttacaatgactgtagaggagtatcctaaggtggagctgtcaggt

SEQ ID NO: 839159 - DNA, 494 bp, Homo sapiens
gacaattcctgtgcataactgttaatggcctggctctcatctctgccatctggaatacatacttgatgtaacttttctcactgagtttgcaggtatgttgtaaagacaaattagttcatgtttgcagggcgctacctcagtgacttagtggcagggtgcagtgggtactgcttcactgggtacttctatggttggatttcttcctatcagactctctaaagggaaaacgtaaagggggaagaaggtatgactgggatagtgatgtgtgctgccagggctgccgtaggagtaattctggcaagacctaaatggcttcagtccctgaaaaatcagagtggatttttcttctcagtggcaggtgtgaagataatgtgaacctcccaaggctttccagatggtgttagactcaaactgctttatgttctcacttaggtattggaayctcacactcaaatctgtaccttcaaatagaaaagtgacagggaggcttcaaa

SEQ ID NO: 839160 - DNA, 563 bp, Homo sapiens
tggttctttttatgttttctatctctttgttgaattttttattttgttcacgtattgtttttctgatattgtttatttgcttgtatgtcttctcttgcagcttactgagcttctttgcaactattmctttgaattctttacaggggatttcatagatctccatttatttggggtcagctactggagttttgttttgctcctttggtgttatgtttccttgattcttcatgttccttgacatcttggattgctatcttcacatttgaaaaacagttctttcttctagtctttactgagactgctttaggagagaaagaccttaactcaagaaagcccagccagacattttggggtttttgcagggcttttctatggatgcaccctccccgctcctttttttccctcttggagaggaagtcttaggattgtgtgccttctcttaatcctgcaaaattgagccaggtgtggagaactttctgtttattttcctcatggcagtgcttgaaagtgttcaaggttgcactccttcttccgatctcacaagttgagctagctgctgctgt

SEQ ID NO: 839161 - DNA, 628 bp, Homo sapiens
taagctgcaaaatattattggttactatagttgtgcggaatatttgacccraattttctggtggtcaaaatgaaaaagtgaacctgggcagtcatatagttcttagtgttcacaaataataaaaataagcacttactatgagataaatactaagcagtaaatactaagttctaagtggtttgtttgtgtgtatatatatatatgtacatgtatatatgtgcatagtttgtgtatatatatatgtacatgtatatgtgtgtacatatctacatgtatataactctatatctcaaatatatatgtgtgtatatatacgtatgtgtgtgtgtgtgtatatatatatatcttacacatggaccccctcccccaaacaactgattttgcaaatgaataataagagaggtgaagtagtttgtccaagatcatacagctcaaaattggtggatccacattttgaacccaagcagcctgaccccagggtctttgcttttcaccattgtactaggctgtttctaaaggaactcatctctgttcctgagagaaagaaaagctttttcaagtacttagttctgtctttttatgtgtggaacattatatagagaaccctgaaagacgtagtgaaccaagt

SEQ ID NO: 839162 - DNA, 606 bp, Homo sapiens
ttgccttttctataatgtttaataaatggaatcatacagtatgcagtattttaggtgtatttcttttcttcagcttaattattttatttttttaaagacagggtctctctttgttgtctaggctgcaccatcagacatcaccagatggtgatgtctgcaccatcacggttcactgcagtctcaaatttccaggctcaagtgatccttccatttcagcctcccgagtagctggggctacaggtgcacgccaccatgcttagctaattttttattttttctagagatggggttttgccatgttgcccagactggtcttgaacttctgggcttgagtgatcctcttgcctcggcctcccaacatgctgggattacaggcatgagccaccactcatggcctcttagtgtagaacttttaaaagttatccatgtcattgcatgtgtccaaatttcacacttttttgttttcagtgtttcattttayggatataccacaatttgtttagtgttctttgtcttgattacaaatagcctgattacctataaatatatgatgagtacctactatatactaggaaactcggctgttggagacaaaaacactaagac

SEQ ID NO: 839163 - DNA, 606 bp, Homo sapiens
ttgccttttctataatgtttaataaatggaatcatacagtatgcagtattttaggtgtatttcttttcttcagcttaattattttatttttttaaagacagggtctctctttgttgtctaggctgcaccatcagacatcaccagatggtgatgtctgcaccatcacggttcactgcagtctcaaatttccaggctcaagtgatccttccatttcagcctcccgagtagctggggctacaggtgcacgccaccatgcttagctaattttttattttttctagagatggggttttgccatgttgcccagactggtcttgaacttctgggcttgagtgatcctcttgcctcggcctcccaacatgctgggattacaggcatgagccaccactcatggcctcttagtgtagaacttttaaaagttatccatgtcattgcatgtgtccaaatttcacacttttttgttttcagtgtttcattttatggatayaccacaatttgtttagtgttctttgtcttgattacaaatagcctgattacctataaatatatgatgagtacctactatatactaggaaactcggctgttggagacaaaaacactaagac

SEQ ID NO: 839164 - DNA, 614 bp, Homo sapiens
ctatactactctagacaataccactctataccatttcactctacaatatactatgtgacactacactatattatactatgctatactayactataccatactatattatagcacaatataccacactaaatgttatatactatactgcaatatattatttatataaactatactatattacattacactgcattacactaactatactagtcagcagatttaagtaagcatcactgtttctggaacatacatacaaagtcattacagagaagatacctaacattcgggtttgatttactgatcacgtggtatagcccccatgatacttagcatgcagtgctagtccagtagatttccagattctgttgtctgggaaatgtttaatggttttgctcaggcaattctacagtgcatggctaatggtagatccattttcagtttgggctctaagcagaaggaaaaatttttccctaaagagatttctaaacacctctgattttcatagttttggaagaacatattgtaacatgaaatatatgaatatactgcataaataacgttgttacgatgccaaaggaaattattctaaaataaagaccaatttacccgcaatt

SEQ ID NO: 839165 - DNA, 614 bp, Homo sapiens
ctatactactctagacaataccactctataccatttcactctacaatatactatgtgacactacactatattatactatgctatactacactataccatactatattatagcacaatataccacactaaatrttatatactatactgcaatatattatttatataaactatactatattacattacactgcattacactaactatactagtcagcagatttaagtaagcatcactgtttctggaacatacatacaaagtcattacagagaagatacctaacattcgggtttgatttactgatcacgtggtatagcccccatgatacttagcatgcagtgctagtccagtagatttccagattctgttgtctgggaaatgtttaatggttttgctcaggcaattctacagtgcatggctaatggtagatccattttcagtttgggctctaagcagaaggaaaaatttttccctaaagagatttctaaacacctctgattttcatagttttggaagaacatattgtaacatgaaatatatgaatatactgcataaataacgttgttacgatgccaaaggaaattattctaaaataaagaccaatttacccgcaatt

SEQ ID NO: 839166 - DNA, 585 bp, Homo sapiens
agaaatgaagtgctgcttaataactatctatggtatagatgatttttctcactttggctgctgcactttgtttcacactcaaggatttggggtccccagttgacctaagtcttccaaactggtgtgtcaactccaccatgatcctggcatatccctttaactttctgcctttcggttatagttttttccttggctatatattttttgcattaatttactttcttttcattgaaataagatgatgaaggctttttattctaatatccataaactctgactcatgctataattttacaataaatgtgttttgtgtgtcttaaaattgtttttccagattattatattcttttcctgaaattagtcaatttcaattagtcaatatttattaagttagacagtgtggaaagaaggattgatgggggttaaaaatggaagacttcgagggcttgttaacctaagaatacaaactggcaaatgataattgctgaataaggaaggcaataataagtgctataggtttccagatargttgcaatgaactggacaggtgtttttgttttttgttttttgttttattattatact

SEQ ID NO: 839167 - DNA, 614 bp, Homo sapiens
gtggtgtgatctgactcactgcaacctctgtctcccgagttcaaatgattctcctgcctcagcctcccgaataactgggattacaggcgcctgccactacacccaactaatttttcatatttttagtagaaatgggatttcaccatgtgggccaggctggtctggaactcctgattcacccgcctcggcctcccaaaatgctgggattacaggtgtgagccaccatgtcaggcctctgaccaccatgtttattaattatctcacctttcttctgttagccccctacagtgggcttggtaaagaggaagctcagagacactgccagctctccccagacaggtgcagctcctgtcccaagagggacttaggggagtcagcaatctctgaaattataagtagcagtttgcatatgttttcatctatgtgtttttctgaggtaaaagtctcgcactgatcttcaatctcaacatgatctgtgatctcaaatggctgaagccccacctaagtaacctcttcctctcagctccggctcctttatggtaccattttcatgtcaacamcacaaagaccaaactctgggtactttgcaatttcttcacagtattgaaataaat

SEQ ID NO: 839168 - DNA, 667 bp, Homo sapiens
gcatgataggcaactcaaaggatgcttggtgrttaaaacacctaaggtcttataattctgcaataagaacagtggcctggattcttacttataatgataatggtggtgaattagaaagcatttggtcctggaggtacaataaaggcaatttgaacactaataaagggaagctgtcaagcagatccagctaatgatttataaagataaagaaactactttagtggagtttttttatttttttctgctcaccacaaattatttcaattcaagtgtaacgtttgattttgagaaagaaaaaaagatcaatttagctttaatttttgctcttattccatattccaattatacttccgctttagtgtgtgaagaatacaaggcaccaaacatcaccgtaataaaagcaagtctaggattctttttttttgtagcttttttttaatttttaatttttgtaggcacacagtagatgtatatatttatggtgtacctgagatgttttgatacaggcatgcaatgtgtaataatcacatcatggaagatgggatatccatttatcttttgtgttacaaacaatctaattatactcttgtagttatttttaaatgtacaatttagttattattgactatagtctccctgttgtgctatcaaatacaaatgcctattc

SEQ ID NO: 839169 - DNA, 482 bp, Homo sapiens
tcttgtaattttgtcatttgacatacatataacaaatgaaaaagcatggtgcttgttgtcaacrgacttggatttaagttctgaatctgccactaataagctttctgactgtgggaagtttaattcacctgtttcaccataaagtgaagatcacattagtagtacttaccttatcagagtttatataatttatggaaaatgcttagcagagtgcacagtacatagcggagtttttattaaaatacagtgatgcctacagcaatgaatgaaagccatgccctactttaagtgagggtcttgaggaacttacagttctctgaaggaggtaaggcagatacagaagctatcactgaacctattcactatacctgtgcagtaaaggcaaacaccagcatgaaggtacgcagtaagagaaagaaaagcatttattgcagggtgccaagccaggagagcaggcagctaatgctgaagacctgaacacc

SEQ ID NO: 839170 - DNA, 578 bp, Homo sapiens
gagacttgttaaattgttgtgacaaaaatgctgatagtgatatagacaatgaagtccaagctaaagaggtatcagagggagatgaggaacttattgggaactggagcaaaygtcacttttgttatgctttagcaaagagactggctgcattgtgcccctgttccagggatctgtggaactttgaactttgagagtgatgatttagagtatctgacagaagaaatttctaagcaaaaaaatgacctgaaactggaacttatatttcaaagggaagcagagtataaatgtttggaaaatttgcaccctgtcatgtggtagaaaagaaaaacttattttctgaagaagaattcaagcaggctgaagaaatttgcataagtaaaaagaagccaaattttaatagccaaaacagaggggagacctcaaaggcatttcagagaccttcacagcagccactctcatcacaggcccagaggcctaggagggaagaatggttttatgggccaggccttgggccccactgccctgtgcagccttaggacatggcttcctgcatcccagctgctccaactctagctgtg

SEQ ID NO: 839171 - DNA, 640 bp, Homo sapiens
aagcaattatatgccaataaattggataacttaaagaaatggataaatttcttagaaagatgcaatctacagaggtgggacaaaaaagaaatagaacagcccaaaagcaarcaaagagatttattcagtaatcaaaaatttcccaacaaagaaaaacccaggtgcagatgctttcatgggcaacttttaccaaacattcaaagaagaactaacaccaaaaagtcttaacctcttcagaaaaaatagaagagagaatagtcccaatctcatttcatgaggccgatgttaccataacttaaaagctagacgaggacaacacaataagaaataattacagaccagtattcttaatgaatacaggtgcaaaaattctcaataaaatacaaactaacaaactgaattcaaaagcacattgaaaaggtcatacaccatgaccaaattggaatttatctatgggatacaaggatgtttcagtgtgtaaaaattaataatgtggtagaccacattaacagaatgaaagacaaaaataacattccaatagatgcagaaaacacatttgacaaaattcaatatacttttatgataaaactctcaacaaaataagtatacaagaaacttaacactataaaggctgtatatg

SEQ ID NO: 839172 - DNA, 610 bp, Homo sapiens
ttccttctaaaatatgtttttagaaatcagtacacttggcaccttggaaatgctgaaatgttatcatgaatgctggttatttgttatgagtcaactgaatawtatcttcaatataaactataatttactggtctgaacactcttcctatcttacctgcatatactcaaagggagcaatttctcctgtttagcaaattgttctttaggtaatttgttctttaggttttttgtacaaaagtgcaaaatagttatcacagcaaaccttccagtattttctattttaaagctatatattttgaagtgaacttggttttcttttcttttctttttttttttttttttttttgccatgtcaggtttgagcaggatagcaaatatataaattgagctctctaattataatctcaatatatgaattcttgctaattaaaatactttgcaccagcaaaaacaattgccacgtatgtgtttaggaggtagttaagtaactccatataaaaataagtgcactttcccctccttccttcagtgactagaaaacttccatacttttaaaataatcaaataataatttagagagcaacagccctcaactctttgctggtgctta

SEQ ID NO: 839173 - DNA, 629 bp, Homo sapiens
cccttgggggccccaggaaggatccccccmacaatccctgcaggctcgagggtgtcttctcccgctgcctggcctctctccagcccccgctcccatcttggagcaggagctggggctgagcctggggcatcacaaatggcatcaggaggcagactgattcctgggcagaagagggtgggtccccagtaaggccccacctttggaccagggtgggcctgaaggctgggggccaagctgccagtcgggcagatgggagtggggactcctggtgcctctccccgcctgcccatggtcacccatggaccaatcagcatgcacttcctcccctctgaggtccataaaagccctgggctcagccagaacagggcagaggaggaagaagacagagagaagatgggatggggtgaccagctgcagagaggagtatcctctaagctgagagctacagagatgacctgccgggagagaggaaccaccctctcagctgagagcttcagagacctccaagagcttcagagacctgcagagatatccgaatgacttgcttgaggagaggggccaccctctccagggcctcctgtctgctgagagctgaacacttgaagggaccacctgcctacagagaggag

SEQ ID NO: 839174 - DNA, 541 bp, Homo sapiens
tgatggaacaggggttctgcaaaacatccctgaacgatcttgtcatgccctttctagaactttgataatggtgattctcgcctggactccagtgaattcctgaagtttgtggaacagaatgaaactgccatcaatattacaacgtatccagaccaggagaacaacaagttgcttaggtgagaggaaccgagaggtcagagaatgatccacaagggaagactaactgagagaggggacttaaaccctttcccacctgcaaaagagccaccagtgagagaatgtcacgtaaaaagcaaaatgggaattctgtcctgttctattctatgaaagtatgaattaatatattgagtaccactgatatctaatcaaatagttattgtttttggtcagaacttgcaaggactagaagaatataattttaaaataaattgccaagggcacgtcagagcaagttatttmtgaatgttgtgggtgatgttttactgattaattttctgaaggaattacagtaatgtattatttaactataggtctaaaatag

SEQ ID NO: 839175 - DNA, 541 bp, Homo sapiens
ggaagttggagggtggttagaggggactctgaaccccaagtttacctccaccctgcccttccaagacaagggtgttcagataaaagcatatacttatcatgacagttggcagccagctgagctgggccaggccaacccttgtcccagatcatctgggctcctctccaaacatgggcggggaggatgtcaggcactacatcttggtgcagacttaggagattcagagacagaagcctctcatctctggcttcacagcctggcaagagttcaagtcctgcctcctggcagcccagggcctgagctgaggcctgactgcttgaagcaggaagaaagaatccagccccaaccccgctgaggattaccttcgtcagattctggggataaagagcccagctggaggagcaaacctagaagctgggctcagcttaggaggacagagcggargcacaggggatgaggctgagaggggccttgagctgacggggtccaggcaggggagggcagagcaaggggatcctgagtggagtccttgttctgccct

SEQ ID NO: 839176 - DNA, 620 bp, Homo sapiens
acagctgctcttataccatgagggatcctatccacatgcagaagggctggccaacagtcccacagatttgtyagcaaatataaacccttattgctctaaaccaattagttttgaagtgatctgtactcagcaatgactactatgcacgtgtcatcattcctttcttgagtttacagggcttctgtgagaaaaatgtggaaattgactccttctgaccacctactaagtgtcagagacatgagtccattacatgctcctaccaccttttagtgaggattattagcctcatggggaaatcaaggcacagagaggaagagcaatggccccaaacccacccaggagagccaacattccagacccaattgtatgtgatccctccaccccaaggctgcagctgggatgctgagttcaaggcactcacatgcatgatgtttgcactcttgctgaaaatctttatatagggcttcaggatgttgaaatggaaggcaggcgtcagcaagcgacggtggtgtctccacttgtcaccaacacttaacaagagcccatcccctagtacggcagccaaaggctgtgggcaagggcagaatcttcccctggccacaaaagttggtccccgtccc

SEQ ID NO: 839177 - DNA, 490 bp, Homo sapiens
gtcgagactcggtcttgaaaaataaaaaagaaaaagaaaaagatgtttagtgcagccatatcatagcaggactcaacatccttgccaatactatgtgttagatataagagaataagtacattctatgtctttgtactttaaccaagatatttgtactagacatgctcacaggcacatagtacattctacgtccttgtactttaaccaagatatctgtgctggatgtgctcacaggcatgtcccagctcgcagcccatgccctttccttatttggaaatattattgcttttctaagtccttttgtaagcaacttcctcttttcctttgctctctattgcctttacctatttaggaaagttttaaattattagccagtcrggtttaatttagattgtgaggtcttgcttcagccaatggagacaggacacagtagcaaggacaaactgcataagggataaaaattgcttccctcctttgttcaggtgtgctc

SEQ ID NO: 839178 - DNA, 628 bp, Homo sapiens
tcccttctcagcagtgcccaggtgaggctaaggggcttctgaggcgggcatggggtgagggtgccacaggtggaggcaaggtctgacttgtggggccacgtgttkcagggagtcgagggttttaataagatcccaggaaaagggggtgtgtgttctcagacttccccactcctacgtctgctggtctgggggctggagtctaagccaggctcggaggatatgcaagcccacatgggggtcccaggcacagagtccctctctctgcccctcaatcggatctgggtggggttgggagtcccagacgaggttcccggcgcgatggggccgggatgggggtcctgggcacagtcagagtccccaccccctcccccgggaactgcatcggccagacgttcgccatggctgagatgaaggtggtcctggcgctcactctgctgcgcttccgcgtcctgccggaccacgcggagccccgcaggaagttggagctgatcgtgcgcgcggaggatggactttggctacgggtggagcccctgagcgcggatctgcagtgacccaccactgtcaggtctcagagccacccgcgccctcctcaggcacctttgcagattccggggaatcaacctgtgcc

SEQ ID NO: 839179 - DNA, 562 bp, Homo sapiens
gatccaggcacggatacccccttctctgttcctcaaactgctctaggtggggttgggtgtcccaggccaggttmccggcttgatggggccaggatggggctcctgggtgcagtcagagtttccacccctctccccaaggaactgcatcgggcaggcgttcgcgatggcggagatgaaggtggtcctggggctcacgctgctgcgcttccgcgtcctgcctgaccacaccgagccccgcaggaagccggagctggtcctgcgcgcagagggcggactttggctgcgggtggagcccctgagctgagttctgcagagacccactctgaccccactaaaatgacccctgattcatcaaaagtgaggcctagaattaccctaagaccctgttccacagtcctgtattccatcctagatatctactcaaaataattgagacaagtgttcaaacagaaagacgcttgtgcgtgaatgttcatggcagccctattcacagtagccaaacgatgaaaacaaccccaagctatatattaccagatgaaaggataaacaaaatatggtccat

SEQ ID NO: 839180 - DNA, 576 bp, Homo sapiens
gtcagttggttaaatccctgcatttgccttaactgaatctagtttgaacagttggccacctgccacaggctgaaattcggctgctataattggctgagactcagttgtygttacaaaggcaaattcctaagttaggttttctgttggtttatttgctaagttaggttgcagttagttacacggacttgtacagaggcttctaaagcccaaatgtagtttgatttagaaattttttcatacattttcagctggtcattctaagaaactgcacacacaggagtagctctaaaaagctgtccttctgtaaaggaaatttacatctagaacagaaatctacattattggagtatctgtatcaggaaaagggctgctgggagatatattacctgagagagacttcagctgcatgacaagacaacctttattcactgtacaattcctcccctcactttcccataacttgtgctgtctgccactccccgaacccacaaactcaaagcctctatttctttctgtaactcaggatgctacagaaacttcaatcatctgacccttctttgagtctcatattttgtg

SEQ ID NO: 839181 - DNA, 601 bp, Homo sapiens
taaatcgtaaaaccctgaactgctctagactgctaagcttttatagttttatgtttgctttatwtggattttctgtctctccctgcgcaatcaagctgtcggctcttatttcttgctgctcccagtatgtctgagatcttctctttatttgtttcccatctgctatgctgtttctaatctgtatgtgcgggggaagcagatactcatgtttgttagaagcatttgtaatgtaagagtaagtaggttctgagtgagtattgagggtcataaaattagtgagcagacttagggacatatattttggttactcagaatcctcgttaactttattttctttttagattggcaaataaatgatgtctagataaatgatacaggacagtactttaaaaaataggcataaaaaacacagacatcctttgcttatttatatacatcagtctttccttgggaagtgaaccaaatctccaagcaacagagtgggtcccgggttttttaagttatttctttcatttcttttaaatttctaaaatcaatttccaacttaaaagtggtcttttctaaactcaaatggagagtaaatggaaactcagccaaggta

SEQ ID NO: 839182 - DNA, 647 bp, Homo sapiens
tccactgtctacatctccactgtcactgcattagcccaagtctccatcttgcctctacctcagcagttgctttctaactggcctttctgcctctactcttgttgcttctgacttggttgtccatattagagccagcatcatcttttcttaaaataaaccattattattgaagtatatttataaaaagtatacctgtcatagatgtacaacctgaatttttacaaactgagcccaccaatgtaagcagtgcccagatcaagaatcagaacattaccagtccccagaagctccctagttagtgccttactgcaatcactaaccttcctatcaagggtaaccaccagctagaaaaattgtatcatttgatatgaactgtttcatgtttccaccagcactatctttacaaaaagtaaatctgatcatgtcactccccatttaaaatcttttcatggcttcccactgttcataagataaagaccaaatttcttagcctggcctatgacactgagaatgagctacttccacccccaaggctcccactcttccagatgcttcttttaccacactttcctctcttttctttctatgattctgtcgcattgctcatctttcaaatatccagcakgctcagcatttctcatcaccag

SEQ ID NO: 839183 - DNA, 592 bp, Homo sapiens
gaatactattcaaccacagaaaggaataaaattttgtcatttgggacaacatgaatgaactggaaggacattatgttaaatgaaataagccaaggcagacatcactttcaaaaactttggttatgaaagaagtaccatgcttagaccaaacaggaaccttgcttggggcatgtactttagataggtccctagtctgggttctctacagccctatgcatctccatggggcaggagtccgtagggccacagagacacatgttcacctagagcctatatattcccttttaggcccaggaattctttgcccaaatagaaccaagctcattttcaaagactgcacaagcccctcccaggtctctctgcccaaggatggatcatatcactggtatgcctatcaccaaacctaaggcatagcccagggatggctgtttgtggggcttggggatggatttcagatagtcagaccaggtgtcaacactttgggttgtgtggcccttcataatgtagggtgagtagtaaagcagggtgagcctccatctgtaggcctcacaggagttagaggacwtttctaagaagaggtagttacaggcag

SEQ ID NO: 839184 - DNA, 570 bp, Homo sapiens
tcaaatgatgtttcatcaggagaatgaataaacaaactgtggtttattcatatcatggcatactactcaacagtaaaaaggaacatacatgaacctcaagaatattatgctgagcaaaagaagtcagacagagtacatattgtatgattccttaatatgaagttctagaacaggcaaattgaatctatagttatagaaaccagatcagtagaatgttctggttctaggcacagaaccagagggacagaaataggcacagaaatagaaatgttctgtgccttgattggcaaggcagttacatgggtccatatatttgtcaaaactcaatgaactgcacatttaaaatggatgtattttactgttaaattatacctcaataaaattgtttttttaagaaaagtgaaaggggaggaagacatgggaaagttataaaatagtatgcagttattaaaaggaataaggtagataaatatttctgaattgaaagatatagtgttaartggaggataagagttgttaaatagtacacttgatctagtttacattttcaaaaaaagtagtagagtgtga

SEQ ID NO: 839185 - DNA, 469 bp, Homo sapiens
ataaacaataagataaaaaatattaaaaagcaaattatggagttgaagaatataaaaagaaacaattcctgagaaattgttaagcttaaggaraaaaacgtaaacattaaaatgttcaacaaattttaaccaggataaacagaaaaagttttataataagaaaaattataagcaaagttttgaaagtcacagactagtagataatcttgaaagccaaaaaagaaaagctatgtgtcatttataagggtgcttctatgagataacaagtgcatctagctgcaggaatcttgccggccagaagggacatgggtaatatagtcaacgtgctgaaagaacagaaacttttaagcaagaatactatatccagataaactatttatcaacagaaagaaaaagtaaagtcctttcatgatgaccatatactacaataccatatcaccactaggcctgcactacaagaaatgctaaa

SEQ ID NO: 839186 - DNA, 594 bp, Homo sapiens
acccagtataattcataacgtatattctcacacacacacacgtgcgcataactgtccctcaacaattgcagaacgagagctggggagcagcgggcttaatgctgtagaagttggttagcagtgtcaratgccatggagttctgagaatgggtgatgggattgggcatttgggggattattagtcaccttcgtatgactaccaccatccatccacagaacgcttttcatcttccccaactgaaactctgtatccagtcaccattcaacacgaattccacattccctcctctccccaggctctggcaaccaccactctacttcctgtctctaagaatttgactaccgtaggtacctcacagaagtggagtcacacatatttgtccttttgtgatcggcttattttgctcagcacagtgtcctcagggtccatccatgttgtggcatgtgtctgaatttcctttcaaggctgaataacactccattgtgtggatggactccattttatcaatgcacgcatctgtggatggacacttggtttgcctccaccttttcactattgtgagtaatgctgccgtgaacatgggggtacacatg

SEQ ID NO: 839187 - DNA, 384 bp, Homo sapiens
ttgcaatattcatcattaatacagtgaattaaattcctcacatagcaaaacatacatcaagtatgtcactgctcactgcacctcccactctcagttgasacatcaccctgcacagctcctccctggacaactccagctgaccagagtacctgcttataccacgtggaacaggagaccgaggatcctctcaccctgacagctgccttgctctctcctggaacatagcagcaggtgattattcagtgtgggggcaaaaagagtccctatcactcctctggtctgagagccagatgctagagtatgtccaggaagcacttccgagaagctattccctggacaggctgagccgccttggggcagtcacccatctcctgaagccaggag

SEQ ID NO: 839188 - DNA, 619 bp, Homo sapiens
aagtgggtgggagtagatgctgggggcggcggagcagagaggcctcctctccacgcaccacagctgggatgtggcaacagagaggctgcccagagcaaacctgggtgctcctagatctcaccgtgacaccagtgtggacacccagggcctgctctcttgaggtagctgaggtcatgtccccagtctcatggccagcccccagagaggctcatcttgaggccactcttgggatgtggcagctgaccaagatgatgctgaagacggtcatgctcaccgtggccccctctgcacactgtgcaggtgctgcgctaacaacacggccccattcaaggcctcgctgccaccgcacagacaaggaacttggcggagaagcctcgatccaactgtgcaccttgggagtaaatgccgcctgtcccacacggggggaacaaggcaaggaggtccggcgtgacctccagtaggtgcgccacctggcacagagcagccaccggagacctgattgctcaggaatctgcggtggccacctggkggtgagccagccatgtctgccagggcctgaacaacagcctcactgctggggacagcacaccaagaccttccttccccatgtggattcaga

SEQ ID NO: 839189 - DNA, 528 bp, Homo sapiens
cggcaatgatgacagcaggagcagagactgaaactgaaccccagggcttgagtcatccatgtgttcatgtttggttaacaggctctgtggttgcaagcctggctccttaggccccaggtgtaattctcctgtcctgcctccttccctgtctacagtgtggccttctggcctccacagtggtgccatcaccagggtcgttccttgggagctgttaaggggagaagttgattaagttccgggcttgaatgttgcctctgtcggttccaggttgggctggtgtacatgtttaacctcatcgtgggcacgggcgcactcaccatgcccaatgcattcgccactgccgggtggcttgtcagcctcgtcctgctggtgttcctgggcttcatgaggtgagaggcagcggggacttccccacaggggccaggagtggagcaggagggagtcagcccaggaagcccraacatgagggcactgagggggtgggaagacacctgtctaccccgtatcgagctcagtgagtccttgcca

SEQ ID NO: 839190 - DNA, 417 bp, Homo sapiens
gcaaggacggcggagacagaggcgggacacccggggggttggacccacgcaggactctcggggctcaagragggggcggctggaggacccggaccctcaagaacctggccttgggttttgacccgggcggccggagagaaggcgaagaagaggccgagcagacaggcgcgcggcggacgcgagagaaggacgcgggcgaagcgtccaagacgttcgtccccagggtcgccgagccctcctcctccttcgcttggcgcggcagcaccgcgggaccaggggagtctgggctgccgcggacccaaactgttgctgctggaagccgccggggcggagagcggggaacagggccgggagtgggggccggggctgggatccaccagagcgaggggttggaaaggagtcgagaaggtgaaaggg

SEQ ID NO: 839191 - DNA, 612 bp, Homo sapiens
taattaatagtaactctgacagaattgaggtaaggattcaatgaaataacacatgtaaaatatttagyatattacttggcttattttaacacaaagtgtgtgttaatgtcacaatcctgtacaggaaaaactgaggtgtgaagtgcattttgttatgtaaagtataatgagtgttgtagaattgaagaccacagaaatgaggaagcatcatcacttctttccaaattatctgtgaatatttgcataactaataagatttcaaggtaatggagtgggtttggctaactaggaaggtagtaggtcaggagaacaaaacctggcagaaggtttagagtaagggatgggaggaaaggctgcatattataaaaatgtgccataggatttgatgcttgtgaagtgaaaatactcccttgtaataagttactggtggctgctgttaatttgaaatttagtgacaagccaagatgttgctacagtcagatgttgatctacagaggcaacgggtccaacttctggagaatgttttttttctatctagcagtaatttaagcagtgtgaaaacctgtgcaaatgctcttttgggtcattatacttctgcacatcatccataat

SEQ ID NO: 839192 - DNA, 641 bp, Homo sapiens
ataaatcattctattataaagacacacacatgtgtatgtttattgtggcactactcacaataccaaagacatggaatcaacttaaatgtccaccaatgatagactaaagaaaatatgatacatatacaccatggaatactatgcagccataagaaagaatgagatcatgtcctttgcagaaacatggatggagccagaggccgttatccttagcacactaatgcaggaacaggaaaccaaataccacaatgttctcacttataagggggagctgaatgatgagagcacatcaacacacagaagggagcaatacacactgggacctatcaaagggagaagagtgggaggagggataggatcagaaaaaagaactaacggatactaggcttaatacctgggtgattaaataatctatacaacaaaccaacacgcatgacacatgtttacctaggtaacaaacctgcacatcctgcccatgaagccctgaacttaaaataagtttttttttttwaaaaaaagaatcactgtatcatcaaatgctctatttatacttaaatcgtttggtttgcttggttcattgatttgttttcccccctttagtcagcccagtttctgttaacacagcatatctgaaaccacta

SEQ ID NO: 839193 - DNA, 610 bp, Homo sapiens
tctcataagaagtcgttatgatcaatgtcatcttaaaatgtggcactcaaaatcaagcacaattttccaaagactatcagatgtaaggagaacatggtaaaatagctaacctttatttcttatgagttgaaattgactcaggtgagccaagaaaacaccctgacgtcactctgagtgtagccccctttcttctcttcattcccttcaaatatacttgggcctgaacaaaaattttgttattgatgacaaggagaattctatggctaataatgattatgatgattgtcttaggccattcttgcattgctataaagaaatacctgagactgggcaatttataaataaaagagatttaattggctcacatttctgtctgcaggccagacaggaagcatggcaaaagcttcttctgcttggcttctggggaggcctcagggagcttttactcatggcggaaggtgaagcagaagtttgcatgtcacrtgatgagatcagtagcaagagacagatgttggcggtggcaggtgccacacacttttaaacaaccagatctctttagaactcaagatcgtgaggacaacaccaagacatgagggatcacctccatgac

SEQ ID NO: 839194 - DNA, 577 bp, Homo sapiens
cccacagagcaggtgagaaggctcagcattcattgcacaacgggcagcagcgcaggttctcagcagtttgttgtctgcttataataaggaacaatcattatcaacacctatgatccaggccattagggcttgcccagcgttcgctgcaggattcctctcttcatacaggactgggggttttctgagagggagagaaaaggaagaggaggaagaagggatgagagagaagtagagaaagtgtgcaagaatttcctgcagttggcaagaccaagtgaggatcccccgcctgagcatgggttcaagctggcaggggtgctgagtaataagaggcaattgtcacgccctgcatgacttatgttcagatgcagtgtgcttgactcactagcagagatcaggactactcagtggcatggggctgtgcatagggtgaaggagcagagagcaggacagaatgagaagcaaccygacagacaaaaaattaaagggatgcttaaccacaggtaattgtaggacacattagtacacaaaaaagtaccccaagtctgccttttaatattacagtcactagtgacttaat

SEQ ID NO: 839195 - DNA, 556 bp, Homo sapiens
tgtgggaaacacttaaatgtgttggttattagggttttcgtgtgttttccttttagcattacatcctcatatgcagtgttgttatagtagaggaggacattttttctagagggcagagagatctagggaatatgactgttaacatttgaacactttcaaatagcagtacgttttactgtggttttgataacctgacatagaataagctgctgagatgcaaggataccttggtatatagaaagagccttagacttcgtatgaaaaaaacttaggttttatcttcagcctagccatctaatgtctctgtaactttacagacatctggtgtttcacttaacctctctgagacttagtttccttttctgtaaattgatagttgtggccaggcaccatggctcatacctgtaatcccagcattttgggaggctgaggcaggaggatcacttgagcctrggatcctccaggatacttgagaccagcctgggcaacatagggaattaaaaaactttttaaaaatcagctgggcgtggtagtgtgcctctgtggtcccagctat

SEQ ID NO: 839196 - DNA, 352 bp, Homo sapiens
agtctaataaaattaggcagcttctgtctgcattcctctgaattagcattatgcctctttctgtgacattaggtatatctcagccaacccgtgacattatccacaacttgacatgatgscatccactagtcctaaaccaactctgtcaaccaagtttctttacccttttttctattcctggccgtatcctttctgctccccaccagcactatcaggagtaggaagtgacatgcttagatttggaaggaaccttaaggatcaactaatctgtaacacattgatcccctcattttacagattaaaaaatagaggccctaagataatttaaattcataggttatgagtgactagc

SEQ ID NO: 839197 - DNA, 625 bp, Homo sapiens
tagtaggagagtcctaatctaaggaatatatttagaagaatgtctctggtttaggatcgcttatggtcaacaaacaaacctaaattctaggggtctatgagtgacagattcccagagaatgtacatatctctgagggtatacaatggagatatttcataacttaaatagaagtctcgcatgtagatcatgcctaatattctgggctcaagggtgtatatcagatgcaggaggggaggaaggctctgggaggaacatgagatatctccgacttctctgatttgtctgtgggttgtgattatttgcattctagaaattattagtaaaactcgttacagggtaaaatctctcatttgcatgagactgatttgacagtccgaaacctaacaagctgaaggcaggaacactgtaagaaccttctctgaaaatattatgtgtaaactaatatctaaagaagatacagttattagcctataggaagaattctaaaatgacccctccaagattttctttttatttatttctttatatttatttatatatatatattttttagatggggtatcactctgtcatctgggctggagtgcagtggtgcaatcacagcwcactgcagcctccacctcc

SEQ ID NO: 839198 - DNA, 624 bp, Homo sapiens
ttggaaatgttcaattaaataatgagttaacaattagtattataatagtgaatcctgctattccttggccatatctatatggttctataaggtctgaagtgctatttgttagtggaactacaacagtgccaaragtaaatttgtatcagactcttcactggaagattataaagcatgttattggccaattcaaaattttatttcattatgctattgaaacagctcaaataaaaattaaaagaataatcaaagataaagacagtttactaatgttactatgtcaagtcatgtcctctgagagtcatccagtaagggcaaaagaaacccacaagatgatcatgaggtgtgtttccgcacagtatcattgaaacatgcacattgtgttttctttcacaagtggaatgacatgtttttaggaaggatatttgactgagtttaatcaagcaattaaataacaactatggcaataataccaacagcaccaacaacctcaaataagccactttcttcaggggttggggagtgacctactgtgtgttggggggaggggttatgatagagaggatgacttgcatcacattatacaggtgttgtgagtcagttatcttattacagataaaatgt

SEQ ID NO: 839199 - DNA, 520 bp, Homo sapiens
atgaagagacttccatgatataggaattgaagggcatatgtccatgagttctttgtccagtcacaaatgattgttatgctgttctttgtagaaaacgtaaaatgttggtgatgcctgctaggatgagaaactttatgagctccttatcaaacttgcaaactcttctgcatgaagaaattctgtggaaggaaaaattggttttctgactctcttttctgaatagcttgtatagtgattgatactgtttgcagttttattacatttgagttactttatcttattttattattaatattttattagattttatcacattgactttttgccattaagttataattgatatactctctggtttctcctgtttcccctttactctttgcatctgcatacacacagacacacatacacacacatctttcaaacaactatggatratttgtaaactacttttcatctcgttttccatttcagtctcattaaaatttccgaagtctactccagagttcaagtttctcaa

SEQ ID NO: 839200 - DNA, 622 bp, Homo sapiens
gacaccttttttagattttacacagtggttttggcaggaaagctcttcactagaaaactcyccaaaaattacaggtaggacagctggcaggaaccatgggtgggcttgctgctagattccttaggtagactggcctggtgacttggccagcagtggggcaagcatggttcttgggtccccaagagccagccctcacacctgaacacatgagtgtgcctggagcctgggtccacttgagtaggcctggagcttacagacatagaatctgggactgtaggaactgaccttgtccaaggatagccattgtgtctgagtcctcaggggccagactaaagccaaggggaccagcctggatcttggtgctacaggtatggactttgagacttggaaccagggtggctggtctggcactggggtgagcctggagcctgtgctcgagaggccagcctggagtatggggccataggggttggcctggcataaggactcactggattaggcctggtgcaggggtccaaagcaaaattgagtgctcactttactccccttcctctatgtgaagggtatctctttcatgctgtgcaggtctggggaggggtgatctggataatgtgaaactgtt

SEQ ID NO: 839201 - DNA, 599 bp, Homo sapiens
tgtcagatgcataattagcaaatattttctcccattctgtaggttgtctgtttattctgttgatagtttcttttggtgtgaagaagctcattagtttaattcagtgccatttgtcaatttttagttttgttttatttgcttgtagggtcttagttataaattctttgcataggccaatgtctagaagagttttttctaggctttcttctagaaattttcaggtattgatttaagtctctgatctatgtttagtttatttttgtgtatggtaagatatagggatccagtttaattcccctacatgtagtatccagttttgccaacaccatttattgaatagggagtcctttccccccactgtatgtttttgtccactttgttgaagatcagatggttgtaagtatttggctttatttctgggttttgttttctgttccattggtctatgtatctacttttataccactactatgctattttggttactacaggcttgtgttaggttggtgcaaaaataattgaggtttttgcattrcttttgcaacaacctaatagtacaatttgaagtgtaatgtcttcagatttattctttttgctta

SEQ ID NO: 839202 - DNA, 622 bp, Homo sapiens
ccaccactatcttccctgtgagtatcttcaagatctggccccgagcaatcttgaagggtgtggcatkcaccatgtgctgcttctggataccactccatctggtccagtagtccacagtgtggcaggggggaaggatgtactcatcataaagcacatctccgttgtagttgacaatgctacattgagccaagaaactaacatgcccttgggtcctgtgcccaccatctcagagtcaattgccaccatcatcttccttggcaacttctgggatgctctggagcatttattctcagaatgagcttgggtggagttctgtggtgcattcttctgaggatgattcttcttagaggatttcttccgggagcccttcttctgggagtgggttgggtggctattaatctttggaagggcactccagatctcccccaacaaatctagtttagcagcaacagaatcggccttcttcaaataggcaggaatcagtcaaaacactgcagctttctcgtccagggactgtcctgacccattgctggaggcagtgatcttcttcttttttaggaagggaggggtcttccaagtgccatccaccctaggagtttcccccttttctggaggttcagag

SEQ ID NO: 839203 - DNA, 622 bp, Homo sapiens
ccaccactatcttccctgtgagtatcttcaagatctggccccgagcaatcttgaagggtgtggcatgcaccatgtgctgcttctggataccactccatctggtccagtagtccacagtgtggcaggggggaaggatgtactcatcataaagcacatctccgttgtagttgacaatgctacattgagccaagaaactaacatgcccttgggtcctgtgcccaccatctcagagtcaattgccaccatcatcttccttggcaacttctgggatgctctggagcatttattctcagaatgagcttgggtggagttctgtggtgcattcttctgaggatgattcttcttagaggatttcttccgggagcccttcttctgggagtgggttgggtggctattaatctttggaagggcactccagatctcccccaacaaatctagtttagcagcaacagaatcggccttcttcaaataggcaggaatcagtcaaaacactgcagctttctygtccagggactgtcctgacccattgctggaggcagtgatcttcttcttttttaggaagggaggggtcttccaagtgccatccaccctaggagtttcccccttttctggaggttcagag

SEQ ID NO: 839204 - DNA, 584 bp, Homo sapiens
tatttgcatggctatactacacataataataataatacctaacatttacatagtgctgactatatgccaggcattgtgttaagtacattacatatatattaattatatgtatattatatcatttaatcctcacagcaacccaatgtggtgggcattctctgatccagattttacagaagaagctgaggtacagaaaagtgacacgcactcaacggtgatacagactcacaattacttgtcgaaggtcatatagctactaaatctgcaatctgcaagatgatctcctggaaagggttaaggatataagtgatattttgcccattatttcctcacttccacataggtttcaggaaaaagcctaaaaaacactaagaaacacctctgtcttgttaaacagtgggcagaccaaagaaaattgttgaaccaatgtttagggggccaccaaggacagggatggctttgtcttgtttcttcctcgcgtccacaactctagcccagccctcttcaacacagcttaaatmtataggtgccacttatttctttctcccttcccagcctgcataaaagtacacctttcatgaatt

SEQ ID NO: 839205 - DNA, 487 bp, Homo sapiens
tcaatcattgcaagattttttataagaagcacttttaaaaatttttttacagttttgcraagtatgaagaaatgacttagaataataaatttgaaaaatgaagggtctttaaatgttaaattcttgattttacagactcgtgaaattgaaagacaaagagataggtgacctgcacaaagttgtagttagaagtatactgagaactcagtattccagacagcatgtagcattttcttttttttataatttcaatttttattttagactcagtgggtacatgtgcaagtttgtcacatgggtatactgcatgattatgaggtttggagtatgaatgatcccatcactcagatagtgagcacagtacacaataggtactttttcagtccttaaacgcctccctctctcctgcctttaatggttgccagtgtctattgtttccatatttatgtgcacgtgtagccaaagcttagctcccacttataagtga

SEQ ID NO: 839206 - DNA, 487 bp, Homo sapiens
tcaatcattgcaagattttttataagaagcacttttaaaaatttttttacagttttgcaaagtatgaagaaatgacttagaataataaatttgaaaaatgaagggtctttaawtgttaaattcttgattttacagactcgtgaaattgaaagacaaagagataggtgacctgcacaaagttgtagttagaagtatactgagaactcagtattccagacagcatgtagcattttcttttttttataatttcaatttttattttagactcagtgggtacatgtgcaagtttgtcacatgggtatactgcatgattatgaggtttggagtatgaatgatcccatcactcagatagtgagcacagtacacaataggtactttttcagtccttaaacgcctccctctctcctgcctttaatggttgccagtgtctattgtttccatatttatgtgcacgtgtagccaaagcttagctcccacttataagtga

SEQ ID NO: 839207 - DNA, 620 bp, Homo sapiens
attacattttatattggtagaacaaatatcatcccaaakagtcaaaatggcatttgagttgattgatgaagtccatatattatttttcttttgattgagcttcctctgaattacataactttcttctttctggaatttcagcactctaggtattgtttagagttgtatattcattatgtaaagaatgcataatatgagttttcaaattctgaaatataattccagaagaaaatagtttgttatggttttcccatgatctttctgacataatttattcatcactttttaactggcttatttaattaatttaagtaattccaaattttatcatatatactccaattttccctttaagaattattagcttgtttaagcattcccttttctctgcagccttgccagcatctgctattttttgacattttagcaatagccatcctgactggtgtgagatgatttctctttgtgatggccatggcaggccatctggaatagctgctgggaggacaccaccttcagtgggggaggtgcgaccagggctgcttactccacggagctggtgggggccaggaacaggcaggaactgtgcctcctacctagtttgtgggcaggaactcctg

SEQ ID NO: 839208 - DNA, 663 bp, Homo sapiens
acttatttacaaagtaacagttttgagttttgtatgtattggtgctgctccattactctattttgttgttgttgttttgatacacttaatatttaattaaaagaaattgtgttgctctatcccatgccattgaactttgattagagatctttacagtcagtgaaattagaaagaatgtgttatactagcagtaaaacacaggtttttttttctccagcaatattcaataccaaataacaatgaagcggcatccaaaattttcttaggaaaaaatgtagcttaaatgtacgctaccataatacattaaaaaaaacataaaataacaaagaacactctggaacataaaaaaagatgaaagatttcaaaatcacagcacctatgagtcggatatgatttgaatatgtgtaccctttaaatctcatgttgaaatgtggtgtccagtgttggaggtggggcctggtgagaggccccatcagcattcacatgtttactgcagcagtatttacaataacatgtatggaattaacctaagtggttatcaattgataactggattwaaaaaaaagtggtgtgtataagtgttatatatatatgcgtgtgtgtgtgtgtgtgtatatacacacatagtatgtgtatatatatatagtatgtgtatatgtatat

SEQ ID NO: 839209 - DNA, 534 bp, Homo sapiens
ggtggttcccgtactctcatcatagatgataaatcatattcaaaacaggattcaactgaaaaatatttttggctgggtgcggtggctcacgcttgtaatcccagcactttgggaggccgaggcgggaggatcacgaggtcaggagatcaagaccatcctggctaacatggtgaaacctcgtctctactaaaaattcaaaaacatcagctgggctctttttttttttttaagatggagtctcgctctgtcactcaagctggagtgcagtggatcaatctcggctcactgcaaactccgcctcgcagggccacgccattctcctgcctcagcctcctgagtagctgggactacaggttgtgccaccacacccggctaatttttgtatttttagtagagacagggtttcaccatgttgaccaggctggtcttgaactcctgatagagatcaagccactgcactccagcctgggcagcagagcaagactctgtcttaaaaaatacrcacacacacacacacacacacacacacacaca

SEQ ID NO: 839210 - DNA, 610 bp, Homo sapiens
gctgagcagaagcattttagtttaatatagtcacatttgtctatttttgattttgtttcatgtgctgttgaggtcttagccmtaaaattttggcctaggccaatgtcctaaaatgtttcacctatgtttcattatagtagttttgcagttttgggtcctaagtgtaagtctttagtacattttgagttgatatttgtacatggtgagagaaagcagtctagtttcattcttctgcatatggatattaagtttcctagcaccatttattgaagacagtttcctttccctctatcagtgttcttggtacctttcttaaaaaattatatggctgtaaataagtggttttatttctgggttctctattctgttccattggtctacgtgcctgtttttataccaataccttgttattttggttactgttagccttgtaatatattctgaagtcaggtaatataatgcctccagctttgttcttttggctcaagattgctttatctgtttggcctcttatatggttccatatgaatatgaggatagatttttttttctgtttctgtaaaaaatggcaatggtattttgataggaattgcattcaatcaagattgat

SEQ ID NO: 839211 - DNA, 610 bp, Homo sapiens
gctgagcagaagcattttagtttaatatagtcacatttgtctatttttgattttgtttcatgtgctgttgaggtcttagccatwaaattttggcctaggccaatgtcctaaaatgtttcacctatgtttcattatagtagttttgcagttttgggtcctaagtgtaagtctttagtacattttgagttgatatttgtacatggtgagagaaagcagtctagtttcattcttctgcatatggatattaagtttcctagcaccatttattgaagacagtttcctttccctctatcagtgttcttggtacctttcttaaaaaattatatggctgtaaataagtggttttatttctgggttctctattctgttccattggtctacgtgcctgtttttataccaataccttgttattttggttactgttagccttgtaatatattctgaagtcaggtaatataatgcctccagctttgttcttttggctcaagattgctttatctgtttggcctcttatatggttccatatgaatatgaggatagatttttttttctgtttctgtaaaaaatggcaatggtattttgataggaattgcattcaatcaagattgat

SEQ ID NO: 839212 - DNA, 606 bp, Homo sapiens
tgcagaaaaatatgtatcttctagttaagtattttctcttgcaaattgaccagttttattagggaattccaagtctggcctacattcataaaaagtaagtggtaagagrgtaaccatgtactctggggcctaccaatgggcagagggtgggaagagggagaggatcaggaaaaataactaatggttactaggctttatacctgaatgacgaaataatctatacaacaaaccccatgacacatgtttacctatgtgtcacataggtatatgcacatcctgttcatataccgttgaacttaaaatataagtttaaaaaaagtaaatggaaagactgaggaatcacttgaagagtaaaatgcaatctagtaaatcacatcaatcattgaataaaagttaaaaactatgttggtttattgggcctttctttaatttacaacaacgaattaagagatatataaaataaataaaaagaatctttacccaatgaaacagatattggaacaattatgttccaaaaattaagagccaatatttctaagaaatctttcctctagacgtaattgtaggtggaaaaggttgtcatgtacttgttcaataaacatttag

SEQ ID NO: 839213 - DNA, 524 bp, Homo sapiens
gctgcagtgtaggctttgcattcagctaaacctggaaaaatgcctccttggctattttctaaatatgtgaatttgcaaaagtgacttaaatactttatgccagtttgcacatcttaaaaatgatattcaaaatacttcacggggctgtcatatatttttaaataaataaggtatataaatgcttaggaatatctgaaaagttgtattgattaatgtagcaacagctattaatggtattataatttggtcatacactgaaagcttaaaagacctggagacaaaaatttcagacattctagaatctttcttctctgcaaataatcaaattgaatgtgctggtatgttcttaacaatatacatgtagaattcacgtgatagaagagccatatcaattaagcaagtattccacgtgttttcaaatttatacatgtttctttccccttgagatccaactattacctacacttacatgattagaaatcaatttcaatgaatawaattgctagacccaatagtctttaaca

SEQ ID NO: 839214 - DNA, 624 bp, Homo sapiens
agttctcatgagacctgatggtttaacagtggcatttccccctttgctgcctctttctctctctcctgctttgytgtgcttgcttgcccttcaccttctgcccacgattgtaagtttttttgaggccttcccagccatgtggagctgtgagtcaattacacttcttttctttataaattacccagtctcaggtagttctttatagcagtgtgagaatgggctaatacaccttcaagcctccccctacctgcaaatgagtaaacaagtacatttaaaccaaaataactaaaggagcacactggagaacagcaaaaaagcagccagaagaaatcctgtagagcacggaaacccagaaaggccacatagagaaggaaaagaaacaccttacctttaccacctcatgccccaagtggggatcagctcacaagcaggaaggaaggacagctccctgcaaggaaaaggtaagcaagataccccagcaacctctctcactactgtggacacttgcagtcattgcgactggagacccctgcagtctgcacaggctctgagcctggctgagggagctcccttccaccagagctgaggcagcactctgctctcagagcgcgcaggcctcctgaa

SEQ ID NO: 839215 - DNA, 589 bp, Homo sapiens
aaaagaagtaaattacataaaagggagctccaatacatttggcagctgaatttttagtggaaaccttacaggccagtagagagtgrcatgacatatgtaaagtgctgatggagaaaatattttaccctagaatagtatatctggcaaaaataccctttaaacatgaaggagaaataaagactttcccacacaaacaaaattagggattttatcaagaataaacctgtcctacaagaaatgctaatgggaatacttcaattaggtagaaaagtattttaatgagcaataagaaatcattttaaggtacaaaatttgctagtaatagtaagtacaaggaaaaacacagaatattataatactgtaactatggtaaattatggaagactaaaagatgaaccaatcaaaaacaataactacaatcatgtttcaagacatagacagtacaagaagatatggacagaaacaacaaaaagttaaaaagcagaataatgaagcaaagcggtagagtttaattagttttcattttgtttgtttgtttgtttatgcaaacattgttaagttgttatcagcttacaataatgggttataa

SEQ ID NO: 839216 - DNA, 534 bp, Homo sapiens
cagccttaagaacatgaaaggaatcacactgtgagtctgctactccactgcaattgtgractgccaaagggaagaaggaacaattctgtgccatctaagtaactcagcagcccagttcctcactcctgccctgtttctcctgacccctcacaaatatacaagtccgcaaaggctttatattcccttctgtgtacatgttatcctccagggcagtagcattaaagggttaatagctgaacaaacagaaagctcacattcattctaacttatcttctttctatcattccatgtttcctttcctcaaggcaggcctgatattactaactagatgtaagtataaaaacagaacaaccaataatgcatgacacatgaaagtagtatttatgtctataaaaaccactttgatgaccgaaaatgtgcatttgagaggctttatgactatttactgaattttcgtgctttgaaataccacctgtaattggcagtctttagtctcctgaaaaggatataatttcaaagagaaaaattgctata

SEQ ID NO: 839217 - DNA, 652 bp, Homo sapiens
tcaacactatggccttccaaggattagactggatggtgccagatctgccagggatgggccactttgtcctggtccatgatgacccccacctactttgagrtctggtcattgttctctctcccagtcctctctcacatgggcatcagttaggcatcaggtataggttgaggccctaagaaaggacttagcacatgttgccaaaacaactctgtgcaccgaactcagtctaccctgcatggactgttgcttccattcccaaaacaaaatcactgaaaaggaaatcatatatttcccaaccacagggctctgccactgagagaagttaattggcttttggaaaaaaaacaacttggcttagtgagatctttttgttctcataaactctaaccactcactgaggatgcaaagtttgacgtcaaaagaagaggacatttagatttataaaaaaattctgagaaagataagtagaaacaatgaggcacagattaagagacataaaacaaataagaaagattctgttttgaaagtgaaggaaattgtactgtcacttgattgaaacaaaagaaaacagtttgacaagcatttattgagtactacctgtgtaccaggccctgtgctaaaagttagagatgtgaattagtcacagtctttg

SEQ ID NO: 839218 - DNA, 652 bp, Homo sapiens
tcaacactatggccttccaaggattagactggatggtgccagatctgccagggatgggccactttgtcctggtccatgatgacccccacctactttgagatctggtcattgttctctctcccagtcctctctcacatgggcatcagttaggcatcaggtataggttgaggccctaagaaaggacttagcacatgttgccaaaacaactctgtgcaccgaactcagtctaccctgcatggactgttgcttccattcccaaaacaaaatcactgaaaaggaaatcatatatttcccaaccacagggctctgccactgagagaagttaattggcttttggaaaaaaaacaacttggcttagtgagatctttttgttctcataaactctaaccactcactgaggatgcaaagtttgacgtcaaaagaagaggacatttagatttataaaaaaattctgagaaagataagtagaaacaatgaggcacagattaagagacataaaacaaataagaaagattctgttttgaaagtgaaggaaattgtactgtcacttgattgaaacaaaagaaaacagtttgacaagcatttattgagtactacctstgtaccaggccctgtgctaaaagttagagatgtgaattagtcacagtctttg

SEQ ID NO: 839219 - DNA, 326 bp, Homo sapiens
agctccagtgttgcagatttctggtcacagaactcacacatgaaagattagaattttccctccactggaccctggagttactcattaattatttacccctccgcagggagacttcctagctcattttagatagcagtcgtccaaaaatgtctacctttcaagcttccaatatctattttccctcttcttcaatggragctaatacaaactcactcaagttccttcccttttatctcaaaatgttagtatattttcatctatcttctcctcatattccctcacccccatacacacttctttttcactttccagggtggaagtgccac

SEQ ID NO: 839220 - DNA, 523 bp, Homo sapiens
tgatctcaagatgatcaccgagctgtggctcttccttgcttcctgaacacagctagaagtggcctctgagtgtgggtgtggggtggcttgagcctgagacagacccrttatcttatagattaatgcagttggctgcagggactgagaacgtgctaatatggattcaaatccttcaccacttcaacttgaaatcatatttgctgaaggaaaagcaaggaatcattggtgtatacaaaaaaggttgaattataaggatctgaaaaggagaatcagtctctgtacactctggctaatacctggctactgtttcatatctgttgagcatttactatattctggacaatgtataaatattttcatatttattatatcattgtgggactgtgaatgttatattggttgtaattttctataccatcaggaaagagttcagcccaagtgggtgtgtatacgtgtatgtatgtgtgtgaattcattcagtgaaggggataagaaatttgctttagcacacaatggtaattaa

SEQ ID NO: 839221 - DNA, 299 bp, Homo sapiens
ttctatggcacgaagacacaccagtaaatatcagccatttctttcagatatagatagatagatagatagatagatagatagataaatagatagatttttttttcctgagacagggtctccttctgtcaccctggytggaatgcagtggcagaatcatggctcacaggagcctcagtctccctgggctcaggtggtcctcccacctcagcctcccaagtagctgggactacaggcacgccaccacacatggctaatttttgtattttttgtagagatgaggtttcaccatgttgcccagg

SEQ ID NO: 839222 - DNA, 299 bp, Homo sapiens
ttctatggcacgaagacacaccagtaaatatcagccatttctttcagatatagatagatagatagatagatagatagatagataaatagatagatttttttttcctgagacagggtctccttctgtcaccctggctggaatgcagtggcagaatcatggctcacaggagcctcagtctccctgggctcaggtggtcctcccacctcagcctcccaagtakctgggactacaggcacgccaccacacatggctaatttttgtattttttgtagagatgaggtttcaccatgttgcccagg

SEQ ID NO: 839223 - DNA, 638 bp, Homo sapiens
ccgcctcactgagtggacccaggttgaaaaccagatctacagggaaccagtccatgggtgagactgacccagtcttgagaatttgaactaaaagacctgaatagtcagatgaccacaagtggttggttgtgatcacttggagtctgtgttagggagtccatttttagccatgcacatatggatgaagcaaaagaatatttttctgcaaaataaatgtagctgtagggaaagaaaaacaagatgagaatccgtgatgcttcataacatggtggggggaaaggcagaaagattggggaagtctagtagatgatattctagttctagtccctatgtaggctctagataggggctcagggtcactcatctccaagaaacctgttcattttacagtaccagccttgcgtcctgaggtacttcatttcctaaccttgaatctcaaatccataccctgttctagccctgaaatattcttcacttgaactcacttctgtttcttacaaccacacctttcccaaggcagggaaactgcttttttaattaacattttgaaatgattattttacamtttaaataactagcgtgcaaggatgctgacacatagtgttgtaatatcttacctttattgctacttttcaagc

SEQ ID NO: 839224 - DNA, 517 bp, Homo sapiens
ttttgactttcaactcttattayttgagaaatatattttgcatggttatagttgccatatatagtgattcctctgctcgatctgagcaaggtaaattgaaaatcttttagaaaggactcactgttttaggtgtcattaagaacattagtgattcatgaaaggtcaaaatatccacattaacaggaatttggaagaagttgattccaacccccagggatgactgtgaggagtttgagacatcagtggaggaagtaactatagatgtggtagaaatggcaagagaactagaattagaagtggagcctgaagatgtccctgaattgctgcaatctcatgataaaactttaacaggtgaggagttgtctcttatggatgaccaaaaagagcagtttcttgagatggaatctactggtgaagacgctgtaatcattgttgaaatggcaacaaaagatttaggatatttcataaacttagttgataaaggagcagcagtgtttgagaggattatcccccattt

SEQ ID NO: 839225 - DNA, 517 bp, Homo sapiens
ttttgactttcaactcttattatttragaaatatattttgcatggttatagttgccatatatagtgattcctctgctcgatctgagcaaggtaaattgaaaatcttttagaaaggactcactgttttaggtgtcattaagaacattagtgattcatgaaaggtcaaaatatccacattaacaggaatttggaagaagttgattccaacccccagggatgactgtgaggagtttgagacatcagtggaggaagtaactatagatgtggtagaaatggcaagagaactagaattagaagtggagcctgaagatgtccctgaattgctgcaatctcatgataaaactttaacaggtgaggagttgtctcttatggatgaccaaaaagagcagtttcttgagatggaatctactggtgaagacgctgtaatcattgttgaaatggcaacaaaagatttaggatatttcataaacttagttgataaaggagcagcagtgtttgagaggattatcccccattt

SEQ ID NO: 839226 - DNA, 517 bp, Homo sapiens
ttttgactttcaactcttattatttgagaaatatattttgcatggttatagttgccatatatagtgattcctctgctcgatctgagcaaggtaaattgaaaatcttttagaaaggactcactgttttaggtgtcattaagaacattagtgattcatgaaaggtcaaaatatccacattaacaggaatttggaagaagttgattccaacccccagggatgactgtgaggagtttgagacatcagtggaggaagtaactatagatgtggtagaaatggcaagagaactagaattagaagtggagcctgaagatgtccctgaattgctgcaatctcatgataaaactttaacaggtgaggagttgtctcttatggatgaccaaaaagagcagtttcttgagatggaatctactggtgaagacgctgtaatcattgttgaaatggcawcaaaagatttaggatatttcataaacttagttgataaaggagcagcagtgtttgagaggattatcccccattt

SEQ ID NO: 839227 - DNA, 609 bp, Homo sapiens
tgtgtatatggatgcacacactcatgtgtgcacttgcatgcattraaaacctattctttgataccttcttttctgcccttgacggctctatcccccttggtctgttgtataagaaagatcattcctggaactaattaatccttaaagagatcagctgatacatctcattgttagcaatacatttttaattgttcattttactcaagcaccatttgaacacaagtcaatttgcaatttcattagagaaccaaaaaggcctggggtctattcctgtttttgtttgtttttttttaaagaaaaggataaaaagcaggcaaaatttcatgaaggatgttaatcctctaattaattttatgtaatcaagcaagaattaatgtgtgctgctatttgagccgaagtctttttgccaagaagtgcattttgtcataccttcccccccagagaaacgtctttacaagctttgcagccaaataccctggcaactaatgactagctttggagcaacattcacagaccatttgctttgatgacatttggaggctttgctctcctcattccaattctattgtaaatagagtacacatgccatacagcctttgaaaactaatc

SEQ ID NO: 839228 - DNA, 625 bp, Homo sapiens
tttttaaagcagttttaggttcacagcaacattgagcaggaagtaaagagagtctccacataccttctgatatagttggctctgtgttcccacccagatatcaccttgaattgtaataatccccatgtgttgtgggagggacccagtgggaggtaattgaaacatggtggcagggctttcctgtgctgttcttgtgatagtgaataagtctcatgagatctgatggttttataaaggggagttctcctggacataccctcttgcctgtcaccatgtaagacatgactttgctcctcctttgccttccgccatgattatgacttccccagccatgtggaactatgagtccatcaaacctctatttcttttttttttttttttttttttttttgagatggagtcttgctctgttgcccaggctggagtgcagtggcatgatcttggttcaccgcaacttctgcttcccagattcaagcgattcttctgcctcagcctcctgagtaggtgggattacaggcacctgccactatgcctggctaatttttttgtatttttagtaraaatggggtttcaccatgttacccagtcttgggtatgtctttattagcagcatgagaacagctta

SEQ ID NO: 839229 - DNA, 638 bp, Homo sapiens
gcatcaaaaagactaatgactgcaaaggactagacgatttacatatacatatatacacctgtaagttyttaacaatataaaatcaatctcactagacacggagatttctcaggtaccaactctttattctgaaaactgacctatgaagaggaacaatcaagcatttatcctgccttgcaaaacaaactctattttaaggataaccaaatagttgatcagggaaagatcttctgtaagaaaacttccaactacaaatagaaaggaaattacagaataagaaaattatcattttgcaactctaaaggattactacatgtagacaataatcgattgatgttaaaactgttaaaaaaaaaaaaaaaaaaaaagagtgaggagttcctgactcacagataagggtatgaagaaaaaaaaagagtgatgggaatatttataataaggctgacaacatctgagtctagtgatcaactttaacccctctaatagaggcatataatgtttaattgtctcacttcctatgaagcagtaggagaaatacagcaccaactgtgacaaattcctatttccccaagccatccccccaaaaaaaagtactgaatcaagggtccacatctaagcagccatgcgcaagaaaggaa

SEQ ID NO: 839230 - DNA, 638 bp, Homo sapiens
gcatcaaaaagactaatgactgcaaaggactagacgatttacatatacatatatacacctgtaagttcttaacaatataaaatcaatctcactagacacggagatttytcaggtaccaactctttattctgaaaactgacctatgaagaggaacaatcaagcatttatcctgccttgcaaaacaaactctattttaaggataaccaaatagttgatcagggaaagatcttctgtaagaaaacttccaactacaaatagaaaggaaattacagaataagaaaattatcattttgcaactctaaaggattactacatgtagacaataatcgattgatgttaaaactgttaaaaaaaaaaaaaaaaaaaaagagtgaggagttcctgactcacagataagggtatgaagaaaaaaaaagagtgatgggaatatttataataaggctgacaacatctgagtctagtgatcaactttaacccctctaatagaggcatataatgtttaattgtctcacttcctatgaagcagtaggagaaatacagcaccaactgtgacaaattcctatttccccaagccatccccccaaaaaaaagtactgaatcaagggtccacatctaagcagccatgcgcaagaaaggaa

SEQ ID NO: 839231 - DNA, 638 bp, Homo sapiens
gcatcaaaaagactaatgactgcaaaggactagacgatttacatatacatatatacacctgtaagttcttaacaatataaaatcaatctcactagacacggagatttctcaggtaccaactctttattytgaaaactgacctatgaagaggaacaatcaagcatttatcctgccttgcaaaacaaactctattttaaggataaccaaatagttgatcagggaaagatcttctgtaagaaaacttccaactacaaatagaaaggaaattacagaataagaaaattatcattttgcaactctaaaggattactacatgtagacaataatcgattgatgttaaaactgttaaaaaaaaaaaaaaaaaaaaagagtgaggagttcctgactcacagataagggtatgaagaaaaaaaaagagtgatgggaatatttataataaggctgacaacatctgagtctagtgatcaactttaacccctctaatagaggcatataatgtttaattgtctcacttcctatgaagcagtaggagaaatacagcaccaactgtgacaaattcctatttccccaagccatccccccaaaaaaaagtactgaatcaagggtccacatctaagcagccatgcgcaagaaaggaa

SEQ ID NO: 839232 - DNA, 486 bp, Homo sapiens
cacacaatcaacagaaatacagaaatgcccgttttagcacctcatgtaaaccctacacttttacatttcawgtcaatcctctagataatctttttgttgttattgaggcggagtcttgctctgttgcccaggctggcatggagtggtgtgatcttggctcactgcaccctctgcctcctgggttctggtgattctcctgactcatcctgggattacaggtgcatgccactacacctggctaatttttgtatttttagtacagacagggtttcaacatattggccaggctggtctcgaactcctgacctcaagatatccatctgccttggcctcttaaagtgctgggattataggtgtgagccaccatgcctggcctctaggtaaccttttatttgaagttgagatttgccttgattagtacaatggttcttgccctcactgggcgtcagattcacatggataacttaagaagtacagaagaccggg

SEQ ID NO: 839233 - DNA, 489 bp, Homo sapiens
ctctgaatttgtttggttaccagatagaagtgagaggatttgatatttaaatggactgctgaatttaaattattttttggtagtagaatggaaatttcacttgctgctgaaatttaatagattttcagacttgtaccaccagcaacagttttttaaaggacacggtagaatgagaattgatgatctacaattgcacacagcaatagctcatgttcagtgaaagaagccaatcacaggagcatacggtctgtgtaatcatttacataaagtaccaaaacaggcagaaccagtggatgctttcagaagccgaggaagtggttatgctgggcagcaggtagtgagtggagaggagcctctggaaccctggtaatttcctgtgatttggtgcagatgctgattacaagagaaaytcatttggtgcaaatttgtcaagctccatacctgtaccacatgtgccttcctgtaggtttaatatacctcagaaaaaaa

SEQ ID NO: 839234 - DNA, 489 bp, Homo sapiens
ctctgaatttgtttggttaccagatagaagtgagaggatttgatatttaaatggactgctgaatttaaattattttttggtagtagaatggaaatttcacttgctgctgaaatttaatagattttcagacttgtaccaccagcaacagttttttaaaggacacggtagaatgagaattgatgatctacaattgcacacagcaatagctcatgttcagtgaaagaagccaatcacaggagcatacggtctgtgtaatcatttacataaagtaccaaaacaggcagaaccagtggatgctttcagaagccgaggaagtggttatgctgggcagcaggtagtgagtggagaggagcctctggaaccctggtaatttcctgtgatttggtgcagatgctgattacaagagaaattcatttggtgcaaatttgtcaagctccatacctgtaccacakgtgccttcctgtaggtttaatatacctcagaaaaaaa

SEQ ID NO: 839235 - DNA, 456 bp, Homo sapiens
cccatgtaatcttcacagtattccaatgaataaggygacattattactcccagtttccaggtaaaaaatctattctccatgaagctaaacatttgtccagggttacccagctaataaacggaggagtcaagagatctgacagcagaatgtccactcttgatttctgcctaatatgctcccacctcttcttccagtgcaagaacatgcatgcttataagaatgaagaccactgaagcacctttccatcccccactataaatgtagggaagtatgttatgcagagcttacctgagacccagaaactgatatgaatgcttcaaataaattctgcagaagcaaagctggtacatttttgtcacaagagactttgcagttagctttgcctttaaaatcttctaccaactctttaagtccgatactgtgtctaaaaatcaaataaagctgtggaaactacca

SEQ ID NO: 839236 - DNA, 620 bp, Homo sapiens
taattctttatcacatatgctggaaatatttcaggttttttcttttgacttcatttagatgtaaaaccatttaattgcctttagtcaaatttatcagtctttttagcattggattttgttacrtatagtaaaagtttctttatttcaagattacaaaaataaattctccaatattttatcttttttgtggaatagtttttaagttttaaaaaacatttatgactttgatttattcagaatttattttgatgtacaatataagatatggatcctactttatttcatattgttactcatttgtcataatactatttattgagtaacctattttttatccactaatgttcacagccacttttttcatatatagaattcccatatgcattctggtatatttctggtctccttaatctgcccattgatttttcaattattttgccagtacaagtaccacatagtttaatgactgtgtctttttagtatgtgttactggtagcttgtagccatggtcagtggcatactgagggactgttgttgggagtggaccaccccggctatagacagtatgaggtggatgaactgcctgtagaaaatatttcaaaaatatgagaagggactaa

SEQ ID NO: 839237 - DNA, 508 bp, Homo sapiens
cgtgtgaaataatcccatcatggagaacggggcatatatcctcttaagcatttatcttttgtgttacaaacaatccaattaccctcttttagttattttaaaatgtacgattaakttattattgactatagtcactctgttgtgctatcaaatagtaggtcgtattcattctttctattttttgtacccattaaccatccgcacctcctccccagtggtgttgacagtattgtcataattatttctgctggtaatgttagaaaactttgcttccttgttttttaaatccaccctcattttttagacaacatttaactataaaacatatttattagttcggtttgttgaagcaaataaatgaagcaaatttgttatattttggaacacaatatatttttgcaggttacacaccccaacctccctctctctggtcttgtcattactgatgatctgttgggcctattggtgccaagtaagcactgataaatattagtctgtggccttttat

SEQ ID NO: 839238 - DNA, 573 bp, Homo sapiens
gagattagttaatttcacttaacataatggcttctagttccatccatgtttctgcaaatgacaagattttattctttttatggctgactaatatttctatacacacgcacacatatatatatatatatgtatcacatttctgtattcattcatctgttattccatatattggctattgtgtatagtgctgtaataaacctaagagtgcagatatctcttcaacatgctgatttcctttcttaggctgtgtacccagcagcgagattgaataatatggtagttttatttttagttttctggggaaggaacactatattgcttgtttttcatagtggctgtactaatttacattcccaccaacagtgtgcaacagtgtgcaagagttaccctttctccaatcctcgttaccattcataatttttgtctatttgataacagctcttttaactgtgatgagatggtgtctcaytgtggtttgattctaatttccctgatgattagtgatgtgcaacattctttcatatgcctgttgaccatctttatgtcttcttttgagaaatgtctgttcgggtc

SEQ ID NO: 839239 - DNA, 617 bp, Homo sapiens
catttgtgaaaaataatgtttggaaatgamttgctacgtgaagtaagtaaccagtaactcaagccatttctcccatgtggtctgttttaaaaatggaaattctgtaatctggcttcctcaccttggagtaatatacaaaatgtcaaaatgagaaaagggaccttggtagttgttgtgtctttcttgtttattctttcttgttaaatactcaaagaaagaaaaacagcatgcaatgtttgtagctcccattgtgttagctttttactgtcctgacatatgtcctaaagtttaaaaagcaataaaaggttgctgcttccacagtcattagctttcgttgctgcagtcaatcatccacagaggtcagagccgtatcagtttttcccatcctcattgcacaatccactctagccattgcactcatatatcattaaaggaaaaacgaaccaaggaaactaccgagactcaaaaatgaacttgcaatgtgaaaaatctcctatctccttatttgaggaaagatgctcctgtcacgctgagtaaacaataaaattataaggccaacactgtaaatggaagtattatcccatctattgatttataatgggttaattaattttcaa

SEQ ID NO: 839240 - DNA, 546 bp, Homo sapiens
atttaaaaattatacataagaaaatcagtaaaaataatctctaagtttccaagaaaatacttaggtatgtgagccgctagttttttatgacttgttttggactgagagaaaccttttatcataagaacttgcttaaatgtgaataagaattgtcacacatgaggggcattacgatgagctctaagtcagagtcatgtcaggaaccatgatggcaaggaggttctccctgggtgcccattctgattggttgaagagggatgccaataacaatgtgttgatgagtatgaagctacattcaggtttaggagaataatattaataatacctatcatttatttagcattgcctacatgcaaatacttctttagcactttgtattatttaattagctcattaacaactataagacagtgtagtggctcatgcctataatcccaacacttcgggaggccaaagygggtggactgtttgaggccaggagttcaagaccagcctggccaacatggcaaaaccccatctctactaaaaaattataaaaattagctg

SEQ ID NO: 839241 - DNA, 562 bp, Homo sapiens
tggagactttaaaaagggcattaatcctattcatgagggctctaccgttacaacctcatctaatcctaattacctcccaaaggccccacctcccaacatcatccactggggatgggaggtttcaacatatgaattttggggagaaacagtccacaacacctggttaactcctacaactccggaattcagttcacgtataatttcttgcagaaagctttccctgatttcatcagtcagaattggtactccatctctacgcgatcttacagtgttatgcgcctcgcttgtaacataaaagtttttattttgaattgtggtagcttacctctcttaaaatgagctaaaagacaaggctcatgtagtgtgttgattgaaagaatgaaacctgaatccttacctcatctctgctccaaactgttgttttctgaagcttrcctgcttcccacgtccagtttgtaattgttaagacacaggttttgaaccacaggtgatttccagctttcttagctttttcttatatcagtttggaatgtccaaacattttattcagtaagacttttgc

SEQ ID NO: 839242 - DNA, 611 bp, Homo sapiens
aactccaaactgctaaccaatgagtttctgtggatgctgactgcatgggagattgccccactcttaaaaatgcgcctttgaaatttcttacgataattcttaagagaatggtagtgcattgacttctcaagctttacttggcaatatatgaatatattatttctttatagtaatgcgaaatgacttactgatgcttactgatggctttgtcccaaaagtgtctgcctacagctgagatgggaaagaatcctaaagatacaagggcctcacgcccctattacttaatcccaacaatacagcagctatgtaatagttcccttttaaattaaatgggaggaaaaagactcctgaagaattgttatgtttatcaagcaataagaatgacatcactgccttgaaatgccagagagttcaagaaatgctccctgatgaccttttgcttggttccaggtgttttgtatgaaagatttcagggaagttttttgtttmgttttaatgggaaagactacagatcctacagtgacaatctacatgtttttaaaacaatgatctctctctcaggtaatgattcattttgtacttaggcactggccacaaagtttccagggttt

SEQ ID NO: 839243 - DNA, 594 bp, Homo sapiens
tatagtgtaaacattgttcatttaatgcttacctcaaacttacaagttttgcttcactttacagatggcaaaagaaaaaaaaaagctcaaatgctcgagagattaagtaagaagrgaactaaggtggactccagacacatctggcactgaaacgaataagctgatttcaatgatggataggtcacaaggtacagagggagaacctctggactccagaagcagaaaaggccacaaaggacagctaacatttgggatgccatccctttcaccactccttggacaaggtcaggatctgagaattctttccatatgatatctccttagtaagcaataatggtgctttctttttttaatgtggctcagcagtcaaagacagaaattagaagagttgaacaagagaaaagatgaaattagtgaaaaatagaaacccctgatttagaaaccttatagattccatttccaaaataagtctcactctaaaaatattgctcttgaaggctgaaatacttttttaaaaatctcaaatggtacattgatcttactaatggctttcaatttttttcaagagtttctaaaatccatacaatctaaacc

SEQ ID NO: 839244 - DNA, 438 bp, Homo sapiens
tacatctagataggtgagtgtcctttgtgggcccagaaagcaggatctgctcctcctaatttgggaaattttaagctgaatttccattttgtaggttgaacaaggccaactgactgagagggagaagcattctgactgtttcagtttggacatttttggggcttctttgtaattgtgtgttttgtgtctgggcaagtgagtgtcttttgtggataccagacaatgggatcagttcctcttaatttgagaattttttttttttttaagacagagtcttgctgtgttgcctaggctggagttcagtggcatgatctcggctcactgcaagctccgcctctcccgagttcatgccattctcctgcctcagcctcctgagtagctggggctacaggcgccagccacmacacccggctaattttttgtatttttggtagagac

SEQ ID NO: 839245 - DNA, 629 bp, Homo sapiens
cacaatgaaaaaatcaataataattagaaaatgcaaatcaaaataattgtacaatagctaccactacatatatactcaaatgactaaaaaataaaattaaattaaaagctgaaaataccaactgctgggaagaaggtagagtagctggaagattgatatattggtggtaggattataaaagaatgcagccattttgaaaaatagtttggtaatttattataaagtaaaacatccacttaccacataacccagaaatcccatatttacccaaataaaataataacctatatttacacaaaatctgtatgtaaatatttatagagacttaatgcatagtaactccaaactggaaacaactcaaatgtgtgttacttgtgaaatgaatgaacaaagtgaggtatgtttataccatggattattactcagtaaccaaaaaggagaactacctaatactaacaataatatagatgaactacctaatactaacaataatatagatgaatctcaaatacattatgctaagtaaaagatgtcrgactcaaaatactaaatactagatgatttcatttatatgacatactggaaaagacaaaaccattgagataaaaaccaatcagtgatcaccaaaa

SEQ ID NO: 839246 - DNA, 632 bp, Homo sapiens
cttgtgggctagaaattgttagcttacctcctaataaatattctctccttttcttattagtaagaaagtgtttagctcagcaaatagacaacactgcattttctttttccattgaaactgtatttctgtgatgaattctatgtgtggaagtactgtgaacaacaccctgattagagtcttagaaggaaattttctcttttcatcctgcttgctggtaagaataagtacctaatgttgagccataatggttcatgaaagaaagacaataactttgcaacggtggagaaaaagatagctacatcctggatccctgggaaaccttgtggagcagagccattattccatctgttcttcctacttccagattgatattaatgagagatataaacttaacttaaaccagagctattttggctcacagttacacctacagcttaacatatatcttacctaataaacaatacctcatctttgcttatcttttattaattattaaaacacacatttaaccaaattataggcagcrtacaataaaagtataaatatgggcttttgacgctcctggtcctaacaattcacagaaaataaaaagcatagaagagcttgtaaaacacttctatgatgtattcaga

SEQ ID NO: 839247 - DNA, 588 bp, Homo sapiens
ttcctctgtgtttttcagaattcattgagctttcttacaacaggtattttgaattttttgtctgaaaaaacattacacacatctctgtcactttaagatcagtctctggaaccttattttgtccttttgtttatgggttatgttctttacgtttttttttttttttttttgagagagagaatctcactccgtcacccaggctggagtgcagtggtgcaatcttggctcactacagccctcatcttctgggttcaagcgatcctcccaactcagactcctgagtaacaggaactacagattctcacaaccacatctggctaattcttatatttccttcttggtagagacaggttttcaccatgttggtcaggctgctctcaaagtcctgggttgaagtgattcgcccactttggcctcccaaattgatgagattacaggcatgagccactgcacccagctcccttaatgttcttgatgcttgtagacatgtgacaatktctgtacattgtggtatcaggtattctttccagtccttgcagtttggctttgtttgttcttgttcttctttaattcttcagattctaagta

SEQ ID NO: 839248 - DNA, 624 bp, Homo sapiens
cactagtttacagtcccaccaacagtgtaaaagtgttcctatttctccacattctctccagcacctgttgtttcctgactttttaataattgccattctaacttgtgtgagatggtatctcattgtggttttgatttgcatttctctgatggccagtgatgatgagcattttttcatgtgtctgttggctgcataaatatcttcttttgagaagtgtctgttcatatcctttgcccactttttgatggggttgtttttttcttgtaaatttgtttaagttctttctagattctggatattagccctttgtcaaatgggtagattttaaaaattttctcccattctgtaggttgcctgttcactctgatggtaatttcttttgctgtgcagaagctctttagtttaattagatcccatttgtcaattttggcttctgttgccattgcttttggtgttttagacatgaagtacttctccatgcctatgccctgaatggtattcccaggtttttttctagggtttttatggttttaggtctaacatttaagtctttaatccatcttgaattaatttytgtataaggggtaaggaagggatccagtttcagctttctacatatggcta

SEQ ID NO: 839249 - DNA, 639 bp, Homo sapiens
cctcctctattttcttttaatagtttgagtaggattgttattagttcttctttaaatgtttggtagaattcaggagtgaagacatcaggtcccagacttgtatttgccaggagacattttattatracttcaatcttagtactttgctttttggtctgctcagaatttgaatttcttcatgcttccctcatggtaggttgtatgtatctagaaatttggccatttcctctagattttccaatttatttgcatatagttgctcatagtagccactaatcatactttgaatttctgtggtattagtgtaatgtctctcttttttcatctctaattttatttatttgggtcttctctctctttttagtctggttaaaggtttgtcaattttatcttttcaaaaaaacaatttttattgatcttttatattctttgtttcattttcatttatctctgctctgatctttattattttttctattaattttgggttttgtttgctcttgcttttctagttctgtaagaggcataattatgttatttatttgatttttttcttatttttttatataggtgctaatagctataaacgtctcagtactgctttcgctgtatcccataggttttgttatgtcatgtttc

SEQ ID NO: 839250 - DNA, 625 bp, Homo sapiens
tgggcaaacaataaaattacagcagagaccaaaaaagttcttaartgaatgaagatagagacacaacatgccaaaacctatgagatacagcacaagcagggctaagaggaaagcttacggcattaaatgtctacataaaacatacagagaattctcaaataaactacttactgtcacaccttaagggactagaaaaacaaaaataaaccaaacctaaagtaagcagaagaaaagaaataacaaagatctggtcagaagtaaatgagattgagacaaaaaatacaaaggattaaagaaataaaaagttggttctttgaaaggacaaagaaaatggaaagactgttggctagattaacagaaaagagagagaagattcaaataagcacagtcagaaatgataaaggtgacatataatttatacacagaagtacaaaagattatcagagactacttcaagcatatctatacacacaaactagaaaaactagaagaaatggataaattcctggaaacatacaatcttccaagattaaaccaggaagaaatagaaattttgagcagaccgatagagagtaattaaactgaattagtaataaaaaatcttccaacaacaacaaaaaaaccc

SEQ ID NO: 839251 - DNA, 494 bp, Homo sapiens
tacataaaacatacagagaattctcaaataaactacttactgtcacaccttaagggactagaaaaacaaaaataaaccaaacctaaagtaagcagaagaaaagaaataacaaagatctggtcagaagtaaatgagattgagacaaaaaatacaaaggattaaagaaataaaaagttggttctttgaaaggacaaagaaaatggaaagactgttggctagattaacagaaaagagagagaagattcaaataagcacagtcagaaatgataaaggtgacatataatttatacacagaagtacaaaagattatcagagactacttcaagcatatctatacacacaaactagaaaaactagaagaaatggataaattcctggaaacatacaatcttccaagattaaaccaggaagaaatagaaattttgagcagaccgatagagagtaattaaactgaattagtaayaaaaaatcttccaacaacaacaaaaaaaccc

SEQ ID NO: 839252 - DNA, 566 bp, Homo sapiens
acaatcaacagagtaaacatatagcctatagaaggggagaaaatatttgcaaattatgcatctgatgaatgactaatattcaaaatcttcaaggawctcaaactcaacaagaaaaattcaaataaccccattaaaaaatagacaggctggatgtggcagctctcatgcttgtaatcccagcactttgggaggccaagtggccaaagtgggcagactgctcaagcccaggagttcgagaccagcctgggtagcatggtgaaaccctgtctctactaaaaatcaaaatattagccaggtgtgtgatgggcacctgtggtcccagatactttggaggctgaggtggaaagatcgcttgagcctgggaggtgcaggttgcagggagctgagattgtgccaccgcattccagcctgagtgacagagacccgtctcaaaagaaaaaaaaaaagtgggcaaaggacataaatagacatttcacaaaagaagatatacaagtgagcaacaaacatgagaaaattctcaacatcactaatcagagagatgcaaattataccacaatgatatacta

SEQ ID NO: 839253 - DNA, 601 bp, Homo sapiens
ttttatatatccaggtgctccagtattgggtgaatatatatttacaattgttctatcatcttgctaaattgacccctttatcattatataatgatcttctttgtctcttcttatagytttggatttaaaatctattttgtctgatataagtatagcaactcctgctcttttttctttagtttcctttggtgtggaatatgtttttccttccctttattttcagcctatgtgtgtccttataggtgaagtgtgttttctgtaggcaacaggtcactggatctttcttcttcttctttttttttttcagccactctatatctttatgttggagagttaggtttgatttacattcaatgttattattgatgaataaggacttattcctgccattttgttatttgttttcaggttgttttgtggtcttctctttcttctttctttcattcttgtcttcttctagcgacaatgattttttctggttatatgatgtagtgtcttgttttttagtttttgtgtgtctattgtatgttttttggtttgagattaccatgaggtttgcaaatactgtcttttaacccattattttaatcagatagcaact

SEQ ID NO: 839254 - DNA, 644 bp, Homo sapiens
gagtgtccactgttctaagtctcattttacaaactaggaaaaagaatcagagaggttaagtaaccggcctgaagctccacagcagaaaactgaagggacccaaaactcctgggctataattgccttcctctcgtgcctcaatcccccacattcttccaaccaggacccacccagagtaataatgcagcgtttcatggatttgaagacccaagatttctccccgttttctacattggggttattctaacccctaatggcaagttgtgctataaatgacaacagtcatggtatgtgaaacctacgacactggtgcgatgaaaaagttctgggccaggtgcggtggctcatacctgtaatcccagcactttgggaggccgtagtgggaggatcacttgaggtcaggagttcaagaccagcctggccaacatggtgaaaccccatctctgctaaaaacaaaaataacaaaaaattagccaggtgtggtggtgggagcctgtcatcccagctacgcggaaagctgaggcaggagaaccgcttgaaccccagaggcagagcttgcagtgagcaragatcgcgccactgcactccccctgggcgacagagagagactccgtctcaaaaaaaaaagagaagaaaagaaaaag

SEQ ID NO: 839255 - DNA, 577 bp, Homo sapiens
tattgaatatgtttataatgcctgcttgaagtctttttatgataaatactacatctagtcattcacaggcagtttcggttgtgtttacrtttttcagtttatgggtcatactttatttctttggctatctcataaattttgttggaaagtggacattttagatgatatagcaactgtaagtactacctcttcatgttcccccacctgccacttgttatttgtatttgcttgtttgtttaggaactcattagattattttagtgaagtctgttctactctctcaataataggcctttgatgttactgtcattgggcacccagagccactttgggatgataattgttttttcagggttttcttttctttaactgtctctttctctggccacatcctactaactgctggctcagtgttccagggacatagactcctctgtattctaatacaatcaaatgaagtttctataaagaaactttcaaaaaatagttatggtgattagtatttgagatttagtctgatcccaagaaggttctctggcaaatgaggcagccaataatttagcctttatttttagtg

SEQ ID NO: 839256 - DNA, 637 bp, Homo sapiens
tatttggttgaagtatgtactctgcctcagcttacctcccttcttccttayccaaacatgctggagtaaccttagcatatccctggagtttaagggctatgctgaaataatcgctgttctgtgtcatctctggttaaatttctccaagctggctcaggactcccaaaaacctctctttcagcaggtaaagctctcaagacgtaagatagtatggcaagaaatcagtagggatagaagaaattatttagtttcatcttaaatgtttatagcatattgcatcattaaacttttacatgaatttgtttgggatagttttactaatggtaaaaataatatctttacattgagctaaatttgcctccatgtaattcctatggattgtttcctaactgaattgcagggaagaataatgtaagtgtaattcttccaagttacaaatttttaaatatttagaagtgaccatctcaccccagttttctgttttacatgaaataattacaggtcctttacctgtctattttatggcatcagttctgcagcctttatcttcctcaataccttttgaaaatatggtacctagaaggtaatttaatttcccaggtgtgctctgagcattagattaggaatgctctccatt

SEQ ID NO: 839257 - DNA, 628 bp, Homo sapiens
ttcccatcttttcactattgtgaataatgtgctataaacatccaagtacaagtttttgcttggacatatgttttcacgtctccaatgtacatgtcattctaatgggcggaaagagctattccactgtggtttggatttgcagttcccttatgattaatgacatgaaatacttgcaagtgcttattggctttcatatatcttccacggggaaatttctattttgatcttttacccatttttcatgagatttttgactttcttatttactttattgagttgtaatagtatttaatatagataaaactttcagatcagatatatgatttgcaaatattttcccattctgcgggttgccttctccctttcttaataatgtctgttgaatggaatactatgcagccacaaaaagaatgagatcatgtccttttcaaggacatggatggcgctagaggccattatccttaacgaattaacacagcaacagaaaacgaaatactgcatgttcttgcttataaatgggagctaaattatgagaacacacagacacatagaggggaacaacgcacackggggaccctcagagggtagaggttgggaggtgggtgaggatcaggaaaaataagtaatg

SEQ ID NO: 839258 - DNA, 546 bp, Homo sapiens
ttggatccaagttgtattttagcttactagcaraggtcctggggttttcaaaatggtttcttgctcatttttttcctcggttaacattcagttcaggtgtgcatgtttagtaggggtacatacattaagcaaggcagatgttcagtgaaagtcaagtgtccttcaaagagtaatagcagcatcccaggggttccctttgagtgtgaaaccttctctaagactagcataatcacctgctgggggaatcctggtgcgtcagtctcatcatgagcttaccctagatcaagctatctgactgtggtatccattgtgggttactgtctctgtttgtagacatattgacagaaaagttgcagacgtcacaacaaagaatattttctatctcaatcactaattaataaaagattcacatgtctgaaagcaaattatcaacttattgaaaggaggacactttaaggcctagatgtgctatttgtgaaatatttctaagtgttactacaaagtaatctaaatcgagtgctatttaatttaacaaaaggaaaataa

SEQ ID NO: 839259 - DNA, 587 bp, Homo sapiens
agtaaggaattctaattaagtactaggtgtggagtctagcctagaacacamcaggcagaagtgcagataagggctaactctcctgcacagctagggggcatgaccaactagtccacatctccccaggccttatctagaatctaatatctccaaggtaggtaaactgaacaattttcaacagcctaagaagcagtttataaccttaaagcatttagtaaacttagtatctgacctgcataattaagaccaaatgtctttattttaccaataatttttattttattactattattttaaattatactttaagttctagggtacatgtgcacaacgtgcaggtttgttacatatgtatacatgtgccatgttggtgtgctgcacccattaactcgtcatttacattaggtatatctcctaatgctatccctccccactccccccattccacgacaggcccccgtgtgtgatgttccccttcccatgaccaagcattctcattgttcaatttccacctatgagtgagaacatacagtgcttggttttttgtcctggagatagtttgctcagaatgatggtttccagcttca

SEQ ID NO: 839260 - DNA, 576 bp, Homo sapiens
acaacccacagaatggaagaaaatatttgcaaactatccatctgacaagagattaataaccagaatatgtaagaagctcaaacaattcaagagaaaaaaataatatgatttttaaaagggcaaaagrtcagaatagacatttctcaaaagaagacatacaaatggcaaacaggcatataaaaacgtgctcaatatcactaatcctcagggaaattcaaatcaaaactacaatggaatatttcacttcagttaaatggcttttatccaaaagacaggcaataatgaattctggtgtggtgcaaagggaagcttcctacaatgttggtgggaatgtaaattagtacagccactaagatgttcctcaaaaaactaaatatagaactaacatatgaaccagaaatcccactgtgaggtatatagccaaaagaaagcaaataagtatattaaacagatatcttcattcccacatttattgcaaaactattcacaaaagccataatttggaagcaatgtgtctttcaattgacgaatagataaagaatatacacaatagagtactattcagccatacaaaat

SEQ ID NO: 839261 - DNA, 621 bp, Homo sapiens
aatcggatcccacgtctcccatgtttcgtcttcctatatttaagcatcaagtccagtagtttaaacctcttaatatttcctaagtcttcatcatttaactctatgtttccactactactgacttattctatttatttgtctttctatcacagcttgcttagtattctgtctttaagtacaatgtaaactatcttcgacagcctggctagtgattgtttaaattgcattactgataatgtcaaatttaaaatatttctttctctcctcatcacttcttagatcaactgaaagtttctaaacatttctcattaaaatatgacatgatttggtgctaggatctggtgcccagccttggatctcataactctactactccacccacttccccccaacctcctccaccctgatcccacttaagtttaggcatatagaactacttgatattccatggcttcatgacatgtcaggttcatctgttgattagtgatagggaaaagattataacacagaaatttaccttttcaatttagamgtctctccagtgtgccgcagtgttagttttatgtgtattacccacatcatgaactgccttgataatctttctaatgctgtcagttgggt

SEQ ID NO: 839262 - DNA, 625 bp, Homo sapiens
ataacaaacagatgggtcttttttttccttcaayttgcctctctgtgctttaagtgggggtgcttttctgggtgagcaagtgctttcaattccttgagataagcctgggaatagagtagagagggccatcatgcaccaggatctcaccacaggaggagtagggtgactcatgatgctgttctgggggagcaggtgctctcaattcctagagatctgcctgggaatggggcagagaggtcccatactgcaccataatctatgcacaggaagggtggagtggctcaggctgctgagtcatgtgagcacgattatagcatctgaatggtctgaatgcttgaagatctgcctgggtgtggagcagagaggacaccactgaaacacaatctcctcaacagaatagtgaggtggctcaagctgctgatccaggaaagtgtgtgctccaaattccaggatttctgccaagggatgaagtggagagggacctgctgcaccactgatcttaggggagcaagctggggcactcagaaatgatataagcagataggaaacaaagtgctctcccttggcatgggtggtttggatccccagtggaaaggtgagtcacagagggaagttctctgcctct

SEQ ID NO: 839263 - DNA, 636 bp, Homo sapiens
gtactaatgagttaaggctttctctttgtcataaactgactcttcctctgaacccctaattagtgcctctttttttaagttgaggtttatcaattatacctyaatataaaataaagtttataatctcaagtgtacagtgctatgactttttgcacatgtacacatcactataaccatctcccagatcacaatatagattatatgcttcttttccaatcacataactcataacacctcacattacagtaacttatgtatatttttatctctttcattgaattgtaaacaaaagacaaggtcctagtctttttcatacttgtagttcctgcagtccctggcatgacatatggcttatagcaggtgtttcacttttttaaaattgatgaaaaattatctatgtaattttgaagtcagagtaggtctttaaaaatatctcatgtacctagtatggccttaacaaacaggaagccaatgaaagaagaaaatacaagaaaatggaataaaagaaagcctccccacttcccaattgccaacatttagtttccatcagcaaatattttttgaggaagtgctaggtacaggctctatgttctcacaataatcagtgaacaaatctctgccctcatggagtttata

SEQ ID NO: 839264 - DNA, 593 bp, Homo sapiens
gaggagtgtaagaatttatatgagagattattacaagacaacaaaaaatcctagacatatttgaattgtgtgttagccaaattttaatggagtctgatttactcttctattccatagagaggtcattgcaatacaaatactgctagcccaacactgaaggaaaggcagaagtaagaaatctgcatattgattttaattttatgtatgaacactttggtcatggcatatcaaaacttagtccctggatggagactagtaaatttaaaatcattgccagtaacgagatggacccaaaccccataaagtgtactcagttgattgccaaatgtccctattaattgatttttaggaaagttttatatttctccagtagaatagttcttttctatctctgctttcatttcttcttccttggtcttaacaaagttccataaaatggtatctaccctcataactcccatgtggaaggaggcccatcttatttttcaagctagtcttgaaagacattgtttaaaaaaaaacttcagacaagttaaatttgaaggagtataattgagcaaaaaaaaaaraaattatttgcaaatcaggcagcc

SEQ ID NO: 839265 - DNA, 631 bp, Homo sapiens
cattatttaatccattattcacygttgccttagcttaagtgagacatcagattacaacagtggcagtcccttaatatttcatagtgtagctatctcattagagtgtttggaaccagtgaatgtatcagaagatggcaaggttttctcattcttgattggtactgactcttgcccaactttccttagaataattggtctaaagtcaatttttatgacatcttgacagattgttctactgcactacagattttaagaagaattcaggagaccgaggcaggcagatcacctgaggtcaggagtttgagaccagcctggccaacatggtgagaccagtctctactaaaaatacaaaaaaaaaaaaaaattagctgggcatggtggtgcatgcctctaatcccagttacttgggaggctgaggtaggagaatggcttgaacctgggaggcggaggttgcagtgagcagagattgcgccactgcactacagcctgggggacaagagtgaaactccatctcagaaaaataaaatagaaaagaagaattcaatttgatgtccaggtgagatgaaaatgtggtatattattttaaccctgatgattgtatcttttgatgaaacatacggagttaatcaca

SEQ ID NO: 839266 - DNA, 517 bp, Homo sapiens
tagagaagcctatataactgcaggtcatctcagaacatttaatatactaaaatgtagtgtaaatcgaaggaggtwtatagaatgcaacattttcacatttatgtgttcatggaacttgtatacagctttggattttaaactgatagtaatgagtatccactgaagccaggagtgacaagagcgattgatgttttagagagcttcctccgggcactatagatgtcagaggagcgacaagaacgattgatgttttagagagcttcctctgggcactgtagacgtcagattggaagtcagagatcaggggcagtgtgggggactgtccagagaagaagcaagtgaggaggctgtagtaattgcctggatgaacatttataggacctgaaaagggatgatttgaaagttgtttgtgaaattcaatcaacatgattaggtagacccaggaaggcccagtttctggcttggcaactcaatggattgtagtggatctatcaatgagtgaacagcctcgttaagg

SEQ ID NO: 839267 - DNA, 517 bp, Homo sapiens
tagagaagcctatataactgcaggtcatctcagaacatttaatatactaaaatgtagtgtaaatcgaaggaggtatatagaatgcaacattttcacatttatgtgttcatggaacttgtatacagctttggattttaaactgatagtaatgagtatccactgaagccaggagtgacaagagcgattgatgttttagagagcttcctccgggcactatagatgtcagaggagcgacaagaacgattgatgttttagagagcttcctctgggcactgtagacgtcagattggaagtcagagatcaggggcagtgtgggggactgtccagagaagaagcaagtgaggaggctgtagtaattgcctggatgaacatttataggacctgaaaagggatgatttgaaagttgtttgygaaattcaatcaacatgattaggtagacccaggaaggcccagtttctggcttggcaactcaatggattgtagtggatctatcaatgagtgaacagcctcgttaagg

SEQ ID NO: 839268 - DNA, 503 bp, Homo sapiens
aaattattaaacaaacaaacaaagaaatggcaggaaaggatgaggctgttagtaaagatgaagttaccaggagttttgttgattacaaaaggaagctctaattcctggcttactgaaaatatttgatatattgagtagatatggacttggcatcctgccctctaaatataggaagatatggcattttaagaaaaaaaaattatggttaaatttcagataaaaggaatgtttataaaaactaacagccagtcttaggaataaactccaaaaatgtgatctctacctgcattatgccacttgtctgcaaaggtggagagaggcacttgaaaggactgttcgtgcataaacacatgatgggcaaagtccaaagatgacatttccttttccagattcgggacccctagtcggagggtgatttacacgtcagttgcagcgygttggtcaatgttccaggctgtcagctcggcaccgccctcagggctcaagctacacagggcattgaa

SEQ ID NO: 839269 - DNA, 605 bp, Homo sapiens
tattgaacagtgccgagaccacctcggtcggggagaccctaacccagcggcactagagaaattaaagacacacacacagaaatatagaggtgtgaagtgggaaatcaggggtctcacagccttcagagctgagagccccaaacagagatttatccaagtatttattaacagcaagccagtcattagcattgtttctatagatactaaattaactaaaagtatcccttatgggaaaccaagggatgggccaaattaaaggaataggttgggctagttaactgcagcaggagcatattcttaaggcacagatcgctcatgctattgtttgtggcttaagaatgcctttaagtggttttccgccctgggcgggccaggtgttccttgccctcattcccgtaaacccacaaccttccagcttgggcgttagggccattatgaacctgttacagtgctgcagagattttgtttatggccagttttggggccagtttatggccagattttggggggcctgctcccwacagaacagcaaaagcatatcaattatagtattcaaaatcttctagattatatctacatgttgtaagtcattttaataaaatgat

SEQ ID NO: 839270 - DNA, 615 bp, Homo sapiens
ctggtctctttgctgactctctgtccactatttcagttgagaatgtatttagctgtaggtaacagaaaaccaaatttatagtgacttaaacaaatacggggtcatttttctcacctaacaagttcagcagtaggcaagagtcaaagggtcaatgatgttgacaagtacccagaccaggttttttctgtcctcactctgccagccttagcctgtcccgtcatggctgtgaggctcctgcactctcaggtgtcctctttacatttcaggcagggagaagggcagagagctgcgccacgtgactgtgtccctttttatcagcaaagacaaactttctccgaaggtctcccacctctccctcactggccagaccagggtcttgcggcccatcctcaacagagaccaggaacaggagggaaactgctgggtcagccccaaatcagcatctgccccacctgcactttctgatccatcttccatgtaacagctaggataattctttttttaaagttttatttatttatttttgagacagtcttgttctgtcactcaggttggagtacagcrtacttcactgtaacttcaaacttttgggctcaacagtcctcttacttcagc

SEQ ID NO: 839271 - DNA, 537 bp, Homo sapiens
  misc_feature 278: n = A,T,C or G
agatacagctttgccctccaacaaggtatatctcgttgaggtgaacaggacatacagctgccccttcccccacaaaggttatgcccaaggtctcaataacctggagaagcaaatgtgaagtgccaaacgagtgtgtttagagcaggtggtatgagagtgtgatcgaaaaggcagcataaactttggagcctgatgaatctgaatttgactttggttccaccactttgtgactttgaggaaacctattaacccctctaggctcagtttctgtctgttanaagtaggaataaatgccaccctcataggttggttgtggtaggggctgaggataatttacataaagcgtttagcacaatgcctggcagagaaggggtgtttaacaaatggtaatcagggttctgattattgttattgttgatggaagaggaggaaggagggtgcaccaaggtmtgcatggtagaggaggtaggatgaaggccaggtacaattttaataggcaagaactaaggaaaagcgctcatccatctgctggggtgt

SEQ ID NO: 839272 - DNA, 519 bp, Homo sapiens
gcccgctaaacaccaggtcaatacattgcaagattttttttttcttttttgatggaatctcactctgttacccaggctrgagtgcaatggcactatctcagctcactgcaatctccgcatcatcccagtttcaagtgattctcctgcctcagcctcctgagtagctgggattacaggtgtccaccaccatgcccagctagtttttgtatttttagtagaggcagggtttcactgtgttggccaagctggtctcaaactcctgacctcgtgatctaccctccttggcctctcaaagtgctgggattatggggtgagccactgcacccagctgcaagatggattttatcatgatacacactttagagagttgactgtctaaagtcaggatgaaggaggaaatcctaaaatcagtaaaagaaaagcatcttctctgctcatctataaaggaaatctcaaaagattaacagtggagttctcagcagaaaacttacaagccagaagagattaggatcctatttt

SEQ ID NO: 839273 - DNA, 533 bp, Homo sapiens
atcaaaaaaaaaaagctattacatcatgataaggttgattttattcaaggtatgtaagggtggttcaacatacacaagtcaataaacatgattcattacataaatagaattaaagacaaaacaatatgattatctccatagatgcaaaaaaccatttgctaatatccgacatccattcacaataaaagccctcaacaaactaggcatagaaggaacatacttcaaaataataaaggctatagatggcaaacccacagccaacatcatactaaacaaagaaaagctgatagcaattcctctaagaattgaaacaagacaagtatgcccaatttcaccacttctattcaatgtagtgttagaagtcctagtcagagcaattagacaaaagaaagaaataaaaggcatccaaatctgaaatgaggaattcaaattatctctggttgaacatatgaktttatacctgaaaaacccaaaagacctccaaaacactcttagatttgataaatgaattcagcaatgtttcaggatcccaa

SEQ ID NO: 839274 - DNA, 301 bp, Homo sapiens
ttttacatagaaaggcagagggaaaggcagagtaatacttttaggttttatagctggctttgaggaaaagggtttctaatttctaagactagccttggggaggagggattctagtttctgcggctagccttgagggagagcgggactgagagacaggagagaaggacaaagtcaraaaaacttttgctcctgaggctgcttctcaggccttcattttgggatattgtttgctgagccgaacagcactactggaatccatcgtactgtcagaggcatttgaaccagagcaactccatcttga

SEQ ID NO: 839275 - DNA, 606 bp, Homo sapiens
agaccctgtctcaaaaaaaaaggggggtgaggtgagagtgggcaaatgacatgaacaggcatttmtcaaaagaagatgtacaaatggacaaaaaacgtttttaaaatgttcaacatcacgaatcactagggaaatgctagttagaaccacagtgagatactaccttgccccagccagaatggacattattgaaaagtcaaaaaacaatagatggcatggatgtggtgaaaatggaacacttatacactgctggtgggaatgtaaattagtacaacctctatggaaaacagtatggaggtttctcaaagaaccattcaatccagaaatcccactacagggtaagtactcaaagggaaaaaaaaatcattatatcaaaaagacactagcatctttatgtttattgcagcacaattcacaattgcaaaaatatggaatcagcccaagtgcccatcaacctgtaagtaaataaaatgtggtataaattccatagaatactactcagctataaaaaaaaggcaaaataatgtcttctgcagtcacttggacggaactagagactattattctgagtgaaataactcaggaatgaaaaaccaaatactgtat

SEQ ID NO: 839276 - DNA, 538 bp, Homo sapiens
tctccttcttctctactggacaaatagctatgtactactttatgaatcctttctatggcatcttgcgttgccaattagatgtcttattgcacggaactcgcacaatctgtctcatctccccaygtagtgagctcacagcacttcaccaagagtgctgcccaccaagaactcacagcacttcaccaagagtgcagtcaatagtgttttatgaacgttgggaagaatatggttaatgcctgagaacaaagaccagaaatgtcatcttttcgtgtgaccatcatgatacagagaagttaacagagctgccccattgtccatggggcatgttctgagtttttccagtagtggtgatagattttggctgatttctctgaacttttccctgagttatttttgtgactttggccaggatgaagggtggggaacccctcatctttaaatctctgagcagagacttgctaggcatctgcagcagtggtggggaagaggtcattaagctcagtgcagtccacgtggggccttggcctgcgatcttcag

SEQ ID NO: 839277 - DNA, 625 bp, Homo sapiens
tgcaattaacttaatccaattacatgacccggaaaggtctatctgcacagcccactctaagatcatgtccactgctgacagacattctaaaacctacgtgtacagctgcaagctttgaagaatagatgttccccgtcagacatgtaacactggtgcctgtacccctgtctttttttccatcttttttgtttttgtgttttgttttgttttaaaaaatgtggtaaaatagacaccttttaattggaccatatttactctacctcgacgtaggcctcagtgtcttcaaggagattctccttgacatgcagtcatggccatgatccatcttcagagtttctctttcttccccacggtaggtctgtcagcagagaaccctgaccacaccctcatgtgttttctcctccaggaggcgcttggaaaccaccgtcaattggaccgcactgggaaacacagatgaacaaagtcaacaccgctttgtcctgcagtgcctggctcctttttcagctcgtcttgcgactcyaggtattggagtccagggaggggtacgtcgcctttaccctgtgcttgccacgatcttgtctccttaatcctcactgcagttctctgccatagagtcttatactgc

SEQ ID NO: 839278 - DNA, 671 bp, Homo sapiens
cctgactggagctgcagaggggtggagcttctggggaaaggatccctcctagggggagtgtcttgggcctggggccacgtggcagggacagagacgggtccatggcagtgtctgctcttctctgtgaaggcaaaaagcctctgagggagtattacagccgcctcatccaccagaagcatttccagcagatccaggtctgcaccccctgactgcagggccaaggactacccccgcttctaggtgagaggccagcaggaggctcagggaggaggcggggccttaagcagggggagcaggggtgggcatgatgtactttttctgaaaaggtggctctggaggccacttggggacaggacctgggctctggctgaactcccgggaggaggctacttcctggtgtgccagcccctccctgccaggtcgccccagaggccctttaccaaggggtttgaggaggccacgtcctttcagtctgccacgccctccattgcatcctcttccttcctccaggaggctgggcctgggtttggggccactgttgcccaggtgkgggagggcagtggctttgggaggaacagggacgatgtgtcaaacagcatcgcctctcccagtgagatggttctcctttgcctccgtctctttccccattgatttctccaagtggggagtca

SEQ ID NO: 839279 - DNA, 554 bp, Homo sapiens
acgcggggccagggcgggcccaggatccggagcttcgtgcggggccgagtccaggtttggggcccgggaggcggggcagcttagggcgastgtccctgggatcgtcgggtcaggccttgggctaacgtaggcactctcgcagttcctccgccttcaggaaggtcttttcagcaggggccttacgggtgcatgcttcggtcctggaggccttatcctagcctcctctccatcagcgccacccgtctgggcccgaaaagagggagctttccctctgtcccccagcctttggactgtcaccaaacaagccattcgttcatcaaatactttttaagcgcctaccatgtgcctgacaagggagatgtaacggtgagaaaaactaggtgtggtccaggccttcaggggctcaggtgctcgtggaagaagtggacattgaagtacttatcacacaaatgaggataaaagtacgatagcgatatctaccacgaaggtgagcagacagagctagcggggcttgcaggaggagttttgatcttgcagggacaggaaggaggagt

SEQ ID NO: 839280 - DNA, 554 bp, Homo sapiens
acgcggggccagggcgggcccaggatccggagcttcgtgcggggccgagtccaggtttggggcccgggaggcggggcagcttagggcgackgtccctgggatcgtcgggtcaggccttgggctaacgtaggcactctcgcagttcctccgccttcaggaaggtcttttcagcaggggccttacgggtgcatgcttcggtcctggaggccttatcctagcctcctctccatcagcgccacccgtctgggcccgaaaagagggagctttccctctgtcccccagcctttggactgtcaccaaacaagccattcgttcatcaaatactttttaagcgcctaccatgtgcctgacaagggagatgtaacggtgagaaaaactaggtgtggtccaggccttcaggggctcaggtgctcgtggaagaagtggacattgaagtacttatcacacaaatgaggataaaagtacgatagcgatatctaccacgaaggtgagcagacagagctagcggggcttgcaggaggagttttgatcttgcagggacaggaaggaggagt

SEQ ID NO: 839281 - DNA, 428 bp, Homo sapiens
ataggctgcaggtttcagatggatctctgtgggccaacatcaaggtgtyagcagggctgagctttcttctggaagctctgcagttttcttcctgcacctttatcccagcaatgacaggctactcctgggaaccatagcttccttcatccattttcaaagccagcaatggagcattgagtcctcacattccatcattctgaattcatcttctccccactcttccattttttaggactcatgattacgttgggcccacctggataatctaagataatctccctattttaaggtcagctgattaacagccttaatttcacatgaaacctcaattcccctttgccttacaaggtggcacattcacaggacccaggagttaggatgtggatagctttggcaggagacagaggggacattattctgcctacaac

SEQ ID NO: 839282 - DNA, 504 bp, Homo sapiens
  misc_feature 141, 142: n = A,T,C or G
gttctaccttaaaggtgaatggatattttgcaaracttaaagtaaaatttcatatcaagtaagtgctagatcaaatggaagaattaaccatatatttatatgttcctgtcataccatttaagaaaaataaagggaccgttnntattcaaacctgtaaattactcctgtcatctcattgagcatcttaaaagttttgaaacaaaacttcatttcattgcaaagaaggactaagacattaagatatatttgtcttaagtaataaacttttctatctccaacacaataatgaacaaagccattggtgaaagggtgcaattgagggattgttgtccctctattactctgatcagtgtaatcaatatgtttacaaacagtacaggaaactggaaagagaatagaaggaaaaaacaagaaaatttgtttgtactgttcgttcaggcccctatagctgtgggatccagggattactctaagtagaacttccaaaggcccttttttcttatt

SEQ ID NO: 839283 - DNA, 594 bp, Homo sapiens
tgaagccatctagtcctgggtttttctttgtcaagaggtttttgattatgttgttagtccccttactagttatagatttgtttagattttctgtttcttcatgactcagtcttcataggttgtatatttttgagagtttatccatttcttctagtttatccaaattgttggcatataatggttatagtagtctcttataacaatttttatttctgtggcatcagttataatgtctcctctttcagttttttattttatttatttgagtcttctcccttttattcttagtccagctaagggtttgtcaattttgttgatcttttttattttttattcctattctttatttcatttatctctgctctgatctttatcgttcgtttccttctgctaacttttggcttagttttattttttctatcttcttgaggtgtaaaattaggttgtttacttaagatccatcttcttattaaatctagacatttaccactacaaatttmtctcttaatactacttttgctgctacccataagttgtagtgttttgtattttcatttttgtctgaagatatttttgaatttcccttttaatttc

SEQ ID NO: 839284 - DNA, 568 bp, Homo sapiens
aattatgcattttattaaactaattgrtgatgatgttaccatggaaatagtttccgtttcactctttgctcaaaggaatttcatatttcaactttagcgcaggaggcatgggggtgtgatcggcaatctgtggaagtagcgcatgatgctgcttaaggtttatcccatcagatttgttgttaactcattatgagtgacccgtaagaagacactcgggaatagagcagttatgaaataaggcagaatacggaaagaagaatggaaagagaaagaatggccaaaaatcaattcaaaactggggaaaattttagcaaactaagcaaaaagcaggaaccacagatgaggaagaataactaatgaattgtacagtcttggcatcttttctgctttatagactcattcagcaggttcatgcctctgtgggcccaagagcctgggatcacagctgttcttagaagccatgtgggtgggagctgggaaagtacccaaaatatgacagcattggctgacatgttgttgtctctatgtcaaaggcgatggctagcagtaaggtgctatctctgtgtgg

SEQ ID NO: 839285 - DNA, 568 bp, Homo sapiens
aattatgcattttattaaactaattgatgatgatgttaccatggaratagtttccgtttcactctttgctcaaaggaatttcatatttcaactttagcgcaggaggcatgggggtgtgatcggcaatctgtggaagtagcgcatgatgctgcttaaggtttatcccatcagatttgttgttaactcattatgagtgacccgtaagaagacactcgggaatagagcagttatgaaataaggcagaatacggaaagaagaatggaaagagaaagaatggccaaaaatcaattcaaaactggggaaaattttagcaaactaagcaaaaagcaggaaccacagatgaggaagaataactaatgaattgtacagtcttggcatcttttctgctttatagactcattcagcaggttcatgcctctgtgggcccaagagcctgggatcacagctgttcttagaagccatgtgggtgggagctgggaaagtacccaaaatatgacagcattggctgacatgttgttgtctctatgtcaaaggcgatggctagcagtaaggtgctatctctgtgtgg

SEQ ID NO: 839286 - DNA, 626 bp, Homo sapiens
ggtgcatttacaatccctgagctagacacaaaagttctccaagtccccagtagattacctagacacagagcactgatkggtgcatttacaaaccttgagctagacacagagtgcttattggtgtatttacaaaccttgagctagacacagagtgctgattggtgtatttacaatcccctagctagacataaaagttttccaagtccccaccagattagctagatacagagtgctgattggtgcacccacaaaccccaagctagacacagagtgctgattggtgtgtttacaatcccttagctagacataaaggtttctccaagtccccaccagattagctacttacagagtgctgattggtgtatttacaaaccttgagctagacacagagtgctgattggtgtatttataatcccttagctagacataaaggttctccaagtgcccactagattagctagatacagagtgctgattggtgcatttacaaaccttgaggaagacacaggatgctgattggtgtgtatacaatcctccagctacacatagaagttctgcaagtccccactaaactcaggagcccagctggtttcacctagtggatcctggacgggagctgcctgcca

SEQ ID NO: 839287 - DNA, 585 bp, Homo sapiens
ttgaattatgagttctctaatggggatatatatatatggttttgatttgttcatttctttaagcaaagataagcagtattgtaagaaatacaatcaagaaacccagccatgaatatgracttaagtgttttccctttactgtcatccaacaattcaatgaggctttgaaatttaaaaccacacttattttaatagccatttgtatatatttccatttataatccaatcatattttaagtaaatcaacttgctttatatttcttacttcttgttcccaaatgcatctcttctaccactagagttatactgacataaatcataagttacaggaagagtttatattcttactatagaactagaacaatcagctgtgcctctaggttgcttgaggcagatgtcattccaactgacttgaaaaggataatgaccttctgggaccttaacattaattgcacaacctgaatgaaatatgcctctttggaaaattctatacttgtccaatattggatagtaaccttcttgtaagaaagttaatgcccagatccccaaatgacttggcctcctcacttctgtgcagcagtgaag

SEQ ID NO: 839288 - DNA, 566 bp, Homo sapiens
ccttgtaaattctggatattagccccctatcagattcacagtttgcaaacattttcttccactgtgcaggttgtcggttcactctattgttattcttttattctattatttattttgytgtgcagattttcagtttaattaagtcccatttgtctatgcttgtttttgttgcttgtactcttgaggtcttagtcataatttttttttttttttttgcctaatccactatcctgaagaattttgcctaggttttcatctaatattttaataatttcaggttttacatttaagtcttattccatcttgactagatttttatatggtgagaaataggggtctagtttcatttttctgcttatgacagtcccattttcccagcaccattcgttgaaaagggtgtcctttcctcagtgcatgtttttgtctactttgtcaaagataagttggctgtaggtatttggcttcattttgaggttctctattttgtttaatttatctatgtgtctatttttacaagtaccatgctcttttagttaccaaatccttgtaatttattttgaatttgg

SEQ ID NO: 839289 - DNA, 605 bp, Homo sapiens
gaatgcatttcccaggttcgtttgccctctggcttctgattggatttgacaaatggagttaccagcaagcaactgaagggcagagggaagaaattatgtgtttattccctggctccatccccactggacaatagttagacatggtctctgtttttctacccaaggtcacattgccttttgggaaggtcctctccagcagctatagctcttgccaacttcacatcaccactaaccctttgcctgtcaggaaaggcaatgtcttcccactgattttgatcctatagtgccttgctactctttgttagtgcccttcaccctatctacatctttgcaaacacctcttcgttaaattctcctaaattataattgcttgcaccatctgttccctgcaggactctgaccaatccaccactgttaagataaactgagcacaaagccacttcaacaaagtatttgagtagcaaacaacaacttttttcatatgttcatggagcaagctccaagttagaatgaatatctgtctccacattgcatactaggcttcctaattaatctatcgcatcatttccaatttgtrttatgaaagcttgtgctaaacagaaact

SEQ ID NO: 839290 - DNA, 623 bp, Homo sapiens
ttcagattagtacccactctttatacctgactgagccactccaatttggagtttgtcgctgtttctgcacaaaaattgtacctgctctgaagatctgtctaattttcaatgagtccacccagtcaasttctggccctattatcctaaactacatggccctcccagagctactaggagggaagatgtggcagatcatctgtatggggctgcagcatccatactcagccatctcagagtgtggacacagagccctccactttctcagttccttaagcagaaaacacaagagagtaagagtcaaaagagttgcaaaagaaggctgatcttcccaggacagggaaaatccaacagatatgggagcccaggattttttcaaatgttctttttgttgaactatagcatatgtatagaagagttcaaaattacacacgtacaggttgatggctcatcacagaaaaacacacccatctatcaaccacccagattcagaaatacaacattaccagcattccagaaatccccctcaagtgcccccaattagcagcctttcctcctcctcgaaagaaacctgacttctttccccaggcattagtttgtctatgtttgaattctatataaataaa

SEQ ID NO: 839291 - DNA, 582 bp, Homo sapiens
actttgttttgtaccttaagtaccagctcaatcatagagcaaccattgggctcttgaggtccccaaatcaaagcctagggtcttgaatgctatttctggacttgtcctggaccagaggagcagacttcctgaagggtgactcccaggccagggagcattcaccacaagctgacttaagaggtattgggcctgaagataacatcagctgtagtctggcagtactccccatgggcctgtggtggtggcggccatgggttgaggctcctctgcctatggaaaaggaagggaatagtggaaaggactttgtcccatggttacagtgccagcttagccacaatataatagaacatcaggaatatttttaaggtttttgactccagtcgctggttcccagatggcagctctgaacccacctagaggctgggaaaacttgctgccctgaagggaagtgcaaaaatctgactggctttgccacctcctgattgtagagccttagagccttaaccaaacaaaggttacagtcagatagttgttacactgggccttgggcaaraccaaatgatgtgctggcctcaggtctga

SEQ ID NO: 839292 - DNA, 523 bp, Homo sapiens
tgacctgcctaaagactgatgacaggccatccttcctgctgttctaggtactggcctgggtgacagagcaggacatgagacatagatacagtggggaggagaagtggggaaaggtggagcagagagttcttacttattgaagattatacagccctttcggttatgaagtccctgcttgaaggcaatggacctggggaagagactatcacaaaaagtctccattttcattttacatcctctctattggaggcagcacttttccctcatgctgtcctataggactccactttgaaggttgtgcctacgttgcagggaactaggaacatggaggggaaccaacaacagcatcttagaagaaatgtagccaaattggagtccattcttctttagggcagtatatgaaatcctagcagatgtaaaatggaaaagaatcctaatgcttcttccttcwgaaagtagaggaactaggggcccaattagcatcatctaggggaatctctattactctgtacttatactaatg

SEQ ID NO: 839293 - DNA, 650 bp, Homo sapiens
ccacaatccaagaggatcttggactgtttttactttctccctttctaacaccccagtccaactttttgaagttgctgagttcatttactactggttaggatttcccttacactgtgacccttctgtttcaaaaatctttatttagcacttagatgacacattctcataatctatccttaacttagatttatgtacaagtgttcctccttctccaccctctctctttacttcctcttttctcatattgaaatttctgccgtatttctttccttgcttgtttacaaatttttttcgctgaagtattgtccttggatggaatgaaggggtgctcttagatttcttacatatgcttgaatatctttctttgctctgacacatgaatgacatcttgctcagatataagattcttgaattattgttcttttttcttaatgatctgtatgtaggggctattcctttgccttgtggcttctgatattgctcatgacaagtccagtgagagtccactgtaagtaacttactcttttctgcacataaactttttaactttgaaatttagaaatgtttgcctttgtgtttcccttatttcattaacttagtctggaacatggacagcrcttttagaaaaatttttatttttattttttacc

SEQ ID NO: 839294 - DNA, 623 bp, Homo sapiens
aatcaagaagagatcggagtgggagaaacatggacagcactttttagtctttcttcctaccagaaaagatttccctattgtttatttaatttttgcctctgttctctgtctytccatttttacttctggtagttccattgttatctatcctctcagtctatcttttttcttgtagttgtcttatttatttgtttgtttatttacttattttttagagacagagtcttgctctcttgtccaggctagagtgcagtggcaggatcatagctcacttcagccttgaactcctgggctcaagcgatcctcctgcctaagccttcttagtaactgggactgcaggcatgcaccacttgccttgctttagattgtatctttttataattttgctttaagactttttttttttttgcacccagtttgttcagaccacaatctcaggtctcaacaatgctcattatctttttcaaatccccttttgaatcgttcagttgttaaattgtgtgtggggtgggatttgagttttcttaagttgaatcgttcagttcttaaatcgtgtgtggggtgggatttgagttttcttaagtgctctccttatttattttttatttatttgtattttttga

SEQ ID NO: 839295 - DNA, 637 bp, Homo sapiens
atttcttgaattatacagatgattttgggtggctgtcactatattgccatggtaaggggtctcagagtatagtggaaaccctgcaattacacaggaaagcagaccaagaataaaggaacaccattagttttttgatagatgacctctgtactcaagagggtcaaacttaaagctttagtcgggggaggtaagttttagatatatatatatagagagagagagagagatagatcgatagtttagatatatagatcaaccttttgctgttttgcagttcaaggttccattaagctcaagatttttcaggaccacattccccgtgacagctgaggtaaattcctgtaggtcatcattttcataaaatattttttgttaagtaattatctttactgatttttgtttttcactgatcacttatctgatgaccaaaacctcaatgtttgtcttaaaatccaaaggaaggctcattggaaacttttttttttcttcatcgtaagtgtcatgatgcagtcaacattctgagtgttagtaattatttyatgtacaaccagatgacttgataaaaaaatctccattttgggttccttacagatattgatcaatgggaccatctttgcaagaatgtctcctgggcaga

SEQ ID NO: 839296 - DNA, 539 bp, Homo sapiens
atgtatattatcaggttgaatgaggtaaaggtaagcttatcaatcttcaactgacacctagctataagggaagaacaacaatataggtgacagaatcaagattcaaaaatttgtctaggctggattgtaggtgagaaattggcaagatgcaatgtaacagacctcattattgagtttttgttttaagttattttcaaaaaacaaggtgagggtatcagtgacttgggtttggtagttgtacatgaaaaagtaattgaagtgctttatttgatgtgctgaattttatttgccaatgtgatgtagctataaaaaattagccctggaatgccttagtaaaagcctgttcttcagaatagaagaaataaataaaagttctgccataatctgtatttttttaggaaaaatctaggaagttacatttaattctaaaactcatacttagagagaaatttcaagaagtatagtgtatttggaggaatatctgcatatcrtaagtaagaactgtttaaaagaaattagaaacagtttcccaaagaaca

SEQ ID NO: 839297 - DNA, 546 bp, Homo sapiens
gtatttacaaagttgtatacccatgattacaatgtaatctcagaaaatttttaacattctgaaatgaaccccgtacccgttagcagtcactctccattttctttttttttttttgagacggagtcttgctctgtygcccaggctgtagtgcagtggcgtgatctcagctcactgcaacctctccctcctgggttcaagcgattctcctgtctcagcctcctgagtagctgaaactacaggcgcttgccaccacgcctggctaatttttgtatttttagtagagacagggtttcaccatgttagccaggctgttctcaaactcctgaccttgtgatccccccgcctcagcctcccgaagtgctgggattacagacatgagccactgagcccggccggtagtcactctccattttctatttcctctgtcctttggcagcgactaatctgctttttgtctgtattgatgtgcctcttctggaatttttgtttttgttttctttttaggagacaggctcttgctctgtttcctaggttggagtgcagtgg

SEQ ID NO: 839298 - DNA, 545 bp, Homo sapiens
ctttcaggataatgcaaaatagtaagtgaagaaggaataatggaattggaaaatcaccatttgataaccatcatrataattgattcagttatcaatgcatcactgtacactgtacaatgctaaaactagtgagtaaaagtttaaggagtaagaggatgtttacacaatctcaactatctccctacaagatacttattaactataaaaggtaaaatagtaacttcacagtggagaagcctggcaaacatcacctttaccaagtgatcaaagctaacaaagttaacatcactgataatgatattaattgataacatgtgctttctgatatgatgcactgaaaagaactcagcatcacttctgcggaattactgctaaattaatctaaaccaaatctaatcacgagggaatatcagagaaacaaattgagattcattaacttgcaaaataacagggttttgaggaagacacagtagacaaacttttccctagtcctcccactaaatacaactaaaactcctagacattatatttaaattcaacataag

SEQ ID NO: 839299 - DNA, 319 bp, Homo sapiens
aggccttctcccagcaaaaggtgagtgccccttgcttttgccttgcccatccttygttgcctgccttaactctgtccacactgcataagtaattccttaattaaactctcttcttgtatgtgtgcaaagagccacctaaattttggttgcattttttcccaaaatctattgaatatctttaatcaaggtattcaatgaataaagaaccaaaatatttaagcttttaatcaaatgtaataattgaaataaagtctgcagatggaagtcattaaaacattggtacaaacacaagagacaaaccaaacaaaatacatgatga

SEQ ID NO: 839300 - DNA, 319 bp, Homo sapiens
aggccttctcccagcaaaaggtgagtgccccttgcttttgccttgcccatccttcgttgyctgccttaactctgtccacactgcataagtaattccttaattaaactctcttcttgtatgtgtgcaaagagccacctaaattttggttgcattttttcccaaaatctattgaatatctttaatcaaggtattcaatgaataaagaaccaaaatatttaagcttttaatcaaatgtaataattgaaataaagtctgcagatggaagtcattaaaacattggtacaaacacaagagacaaaccaaacaaaatacatgatga

SEQ ID NO: 839301 - DNA, 670 bp, Homo sapiens
ttctttgccttcttcctttctttttctccccttcctttctttccttctcccagcctcatctccctcctcaagggctttaagacagatttttgtccttctcatctgcactgcttggttttctggactgctctgtaggtttctggctgagataatttcgctcatgagatatacttttctatactgaatttcatgacgcatatgggattgggggcaggcgtgtagcactctttcccattccctgcactacagcctcaaatctgaaatcccccactccaaccctttgacctaaccctatgctgtaattcacctcaagggttctcctcaagccctcctcaatgtcctgcctaggccattccccattgcgaaggtcctaagcctgtgcacccatctgcaaaacagagaggatctcctctgctggtgtctgccttcttcccagcccaggaaatctgggtaccgatgactggaatctgttatttactagagtaattgggttctacacacctttgaggactgcctggtgtggccaggtgcaggcaggtgctrtaaaagttgcttttaccccattccatggatgctttcaccccttaaagtccccacagaccttcttccagagatcactcagggctggctgtgcttgtccatcaaatcccaactgggtaaatagttttcc

SEQ ID NO: 839302 - DNA, 625 bp, Homo sapiens
ggtatatctcagagatactgacttctcagttttagaccaccacagtaaactcaatatcgcaataatatrtcacacacatttttttggtttcccggtacatataaaactcatgtttacactatattttagtccatttagtgtgcaatagcgttatgtctaaaataacaatgcagatactttaattaaaaatacttaatggcttagaagtgctgcaatcatctgacacttcagcaagtcctaagctttcttctgatggaaagtcttgcctgagagttcatgactgctgacttatcagggtggtggttgctgaaagttgaggtgactggcaatttctttaaaaaagacaatggtgaaatgtgctgcgttaatggttattttcacaaaagatttctgctgtagcatgcaatgctgtttgatagcattttacccacagcagaacttccttcaaatttggagtcttttctctcaaaccctgcttctgctttatcaacttttacctaatattctcaatcatttgttgtcatttcaacaatgttcacagcatcttcaccaggagtagattacatctcaagaaaccaccttcttttcttatccataagaagcaactcctcatttcttaaaattt

SEQ ID NO: 839303 - DNA, 630 bp, Homo sapiens
gagaaactcaattttgtgtagtatctgtgataatatgtaggaatgcctttagttttgaaggcagacttaatagcmtgcatgtcatttatgtatcaaagtaaaaattaaaagcattaaatataagccaaatcactgcagtgattattagaaaaaactattctaaattgcaaagcactattcaagaaacaagaaagctttggttatagcttggcattcaggatagttgggtagaatattgcatgaatctgttaaatgtcagaggagaatgagaatagctccagcaaatacttttcttagtctgtaacatacatgtttttttttatatatagtattttaaaattttctgttacctagcaccaaagaattcttatttatcttttttgctggataataatcttaggatatatttgtctttcttttgtctcctttttctttcttttctttttttcattttgaggcagaggagctgaaataaacattagcttatagtgccaccataaataaataacttccagaattatctgagacttcttggagaaatagttctcagaatatctattactgtcatccctccatatacactggggattggttccagaaccactacagtacacccaaattcatgcatac

SEQ ID NO: 839304 - DNA, 583 bp, Homo sapiens
tgaaatgatttataatagggwtaaaattaatatccttcatacattcaaatccttactccttggagatagttctttgaaaataataaatagcaagtgtacaagtcttcaggacattaatcaagggacaattttctcctctagaaataagaggttaagtttctgaatgctaatgcattaaaaaggagtgacatgtcaaggtttacaacccacaaaatataataacagaactccttcctgctctctggacaaattcaatgagaagataaaacaaaagtgaaatagaattaaatgccccaaatagaaacttcaggaaacaggccaaatattaaaattgtttctttttccttttgaaactgccactttttctctccttctgctcttaaaaatatttagtttagatgaatattattgcttgtaatcaacagtcttgatattattttgacatttttggtagtctttactactaagtattgaaggaaaggacttttgcgtttgttgaaatgaatgcattaatatttagcttaaacgtgtatgccatttgcctttgcctaaagactcacacacattaaaaatacatattttt

SEQ ID NO: 839305 - DNA, 628 bp, Homo sapiens
aaaaaacatcaatttagaatagtacctggaacatagtaaaatctataaatattagctattgcatgtatacagcratagccaattgttccaccacgatttgtagaatccttttccctctgattttatttttatttatttatttatttatttatttatttatttattttgacacggagtttcgctgttgttgcccaggctggagtgcaatggcgggatcttggctcactgcaacctccgctttccaggttcaagtgattctcttgcctcggcctcctgagtagctgggatttacaggcgtgagccactgcgcccggccaacatacaaatttttcttatatatttaaggtatgtttccatcactgtattcttttaagtaggaattgttttaggggagaatagtttggaagccaagactcctctcaacttttctcaattcactacataagaaagaaagattttacatctgtttcattttaggtatctagggagaaatcacccagattcttcctacctctcagagggtgctgtgaggatagatgagatgctagacagaaagttcagaaagctgagtaacataaagctgcaaaaggagagaacagagattccatagataatattttaagtcaac

SEQ ID NO: 839306 - DNA, 553 bp, Homo sapiens
gtagcacaaacttgtgttgttcaagggtcaactgtatacccaggaatggtatcatgaggccaaatggcrtaggaatacccatttttactaagtaatgctaaaaagtctatgccagtttatacttctacaagaactgcacaagagttcttattcccccacacccttgacaactcttagcattatccacttttctcattttgccattttgatggatgttagttggtatgtcacttacatgtacatttctctgattactagtgagtttgagcattccattctatactcgttagccatttgggcttcctcttttgtaaattaactctgcatgtctctcgcctgtttttctcttgggtcttactgatttgcaagagttttttgtatattgtagatattaacgcctcaacagttttaaggactgtaaatatctccttccagtctaccatctatctatgagttttattaatttttcaatgttaaatatatatagtgtataattgaagagtgaactgatatagtcatgttcatatttttttttacagtttgcacttcaagg

SEQ ID NO: 839307 - DNA, 584 bp, Homo sapiens
agggagtccaactgaatcatttcttaaatcccctcttagtktagaaagccaagcttttggcttggccatagggagcctgtggattctgaagaaggcagatgacagacaaaatgaaggaggctttcttagaatacagttatgttgcagggtgccttgcggactggaaggagggtgaccaggaggcagggaggttacaccaccagtagtcccagagatgtgttgtgtaaggttctggactgtagcatcgcaggaggggaccagccagataggcaaaagctgtgaggtccacaacaaaaggaaaatgaccaggagagcaatcccatttggccactggccttcccagatagatagaaactgatatattaatcatcaaggctgagggcacagggcctatttccaaggaggcactggggaatggatggggtagggggaggatgaggtcaatgtgtagattaaaagaaccaaagaaggcttgcttctaaaaatcatgtaattgcctctggagtagaaagtgagcaagaaaagcctgggagggttttctccaagtacaccacagctccgcaccaccccacggactgctaaac

SEQ ID NO: 839308 - DNA, 627 bp, Homo sapiens
aataactacagaaataactccctttcctttgagccagaaacggaaccccacaaccctcctgtgcatctgccctgccaagacccagacactgcacctgaccctagaaccctcagctatagcctcaagccctgtggggtggggatgctcttccaattcctgcccagacctgccacctgctggctgacagtggcctcgcagtaacaagacccttgctgaggctggggtgattggtgctagaagtagcttctctgggcttggggaaaagaggatttgaaaagcaaaatgtgaaatccccattcacctacctacgtgttcttatgtctctctgcacaggttaaaaagactctgtccctaggccgggcacggtggctcacccttataataccagcactttgggagcccgaggcaggcggatcacgaggtcaggagttcaagaccagcctggccagcatggtgaaaccccgtctctactaaaaatacaaaaattagctgggcatatttgcacgcctgtagtcccagctactcaggagamtgaggcaggagaatcacttgaacccgggaggtggaggttgcagtgaaccaagatcgggccactgtattctagcctgggcaacagagtgagactcc

SEQ ID NO: 839309 - DNA, 615 bp, Homo sapiens
atagtccctcacgtctgggtccctggcaatactccctcatgtctagtttttttctaggctttacatcctttatttcactcctgtttactttcagctgattctatttgtgtgttttctatatatcacacctgttgctaaagagatttgtttacacattgatatggcctggctctgtgttaccacccgactctcatgttgaattgcaattcttaatgttgggggaggggcctggtggtaggtgattggatcatgtggacagatttccccctgctgtgctcatgatagtaagtgagttctcataagatctggttgtttagaagtatgtggcacttcccccttcactctctctcctgctgccatgagcagatatacttgcttcctcttcacccttctgtcatgattttaagtttcgtgagggctccccagtcatgcttcccatacagcctgcagaactgtaagtcaattaaacctcttttattcataaattatccagtctcaagtacttctttatagcagtgtgagaactaatacagaaaattgataccaaagaagtgaggcatygctataaagatacctgaaaatgtggaagtgactttggaattgggtaatgggcag

SEQ ID NO: 839310 - DNA, 531 bp, Homo sapiens
ccagttatctggaacttcactcagagttaacctaaatactgatggtcaaatactgatcccttctaattgtatccaaccaattccaagttccatgactatcatagtaacatgcttctcctcccatctccttctctctatgctcgtgtcactggaaacatcttttataaatgcaagtcagatcatattcatatcctggccaaactgttccaatggctttctttaatatttaggtttcacagcctacaagatccaacattccatcacctttcaaacccctccacactcatcttgcactgtgctcttttgtgccgcctagctatgctggccttctctctacagcttgaccacagttcattcttttctcaggagcactgacctactgtcacttctgcctggaaatttctttctcccaaacaattgcatagcttgtttcttctcccacattctacatcactccctatttagtcacagactctattactacataaaamtatatcatatgttatatgtttctttattatcttcctactt

SEQ ID NO: 839311 - DNA, 609 bp, Homo sapiens
tagttgcgattcaaaaacactgtttcaattttaaattcaagactttttatttgaaaaccatcagactcaaagaattatgaggctcagttaatatkattatgccacattatttacatttgttaactgtcatttacctgctctatgttaatctttttagaaaaaatttgcatttcagaaacaaaaagcacggatagatatataatatcaaaatattcccaaaggattttgatgttccatctatgcttgttaaaatgtatgattatgattaaactttttatcattcttattttccttggcatccataatcatggaaaattacaagcttgcagtaaacatcctaacttaacttaacttttaaacgatagcatttattgtatttggttttgatctgccaggcttatagatggtataaaattttcaggggataatttttcacatcaaaattccttctctcccacattatacattttaaagtatgcacaaggcagaaaatatagggtttgggtttttttccttcgttttattccacctgatctccttatagtcccagagaaggaagactcaatgtacatttctctcagaaatatgacaggtctgtgtttttgttgg

SEQ ID NO: 839312 - DNA, 538 bp, Homo sapiens
aaaaaaatcaagacagtggtcaaatattaaataagtgtggctcttattttctgtggtgccctaattctaccttctcctctgcctctattcagatcacccattytgatccatactaaagtatacactggcagtccttttctattcctttaagaaatctttggaaaaagattcaaggggacaatatcataagcctagtaaaacatcatgatcagaataatgcttactctttactgagatggttttatttttaaaatgaacataattttttttatttttaaaatgaaactaataaaactgcttattctttgagatggttttataaaataaaatttataaaatatttatatttatttacatatttaaaatatttataaagtaaaaccatctcaataaagagtaagcagttttattagtttcattttacaaatgaagacactgatttagagaacttaaaggaaaactttaaaagcatacagttaataaagaggcaaaactagaagtaaaacttgggtcctaaatacctacctctaaggtatac

SEQ ID NO: 839313 - DNA, 561 bp, Homo sapiens
ttactctttactgagatggttttatttttaaaatgaacataattttttttatttttaaaatgaaactaataaaactgcttattctttgaratggttttataaaataaaatttataaaatatttatatttatttacatatttaaaatatttataaagtaaaaccatctcaataaagagtaagcagttttattagtttcattttacaaatgaagacactgatttagagaacttaaaggaaaactttaaaagcatacagttaataaagaggcaaaactagaagtaaaacttgggtcctaaatacctacctctaaggtatacaaagtttctcagaaaacagttactattctagatcatattacttgtaatgaaggttgtactccctttaggctctagtttcttttgaactaaatattacaatgcaaacttaattttaaaagacttactttggctattccgtatagtcattaaactataacaaaaaagacatcatatcattgtcaaaggcactgaaaacacaaatctctgaaataaaagtcactgaataatcacagatgatttatc

SEQ ID NO: 839314 - DNA, 692 bp, Homo sapiens
gtacctgtagtcacagctactctggaggatgaggtgggaggatcacgtgagcccgagaggttgaggctgcagtgaaccgtgatcatgccactgcactccggtctgagtgacagaataagattctgtctcaaaaataaaaataaaataaaaatcgtttctttttcaaatatatttgtaaaggtgccccgccccgccctgccgtttatatttttttacattaaggaaccgccaaaaatccttgcatgtgtgtgctatgaattgccttgttgtgtaaggcacttagaggtccgtaagaacagccatttgaaatgtgatttcatacatcaaaacaatctattcccacggaggaagctatgaatatctctcaacatcttttggccacccgtgaacatctcagcatcaccaactatggaaaaggaaagattagtaatacataacacatttttcataccaaatctcacttttctttaagtactttttctttgcagggatgtaaactgaccctgacaatgaataaaaaataaataaataaataaaagcactaacttcatatttcaaaatgtcstgtcagctggtgtaaatgtctacctatcaagttaagatcaaaaaagtgaatgttagtggggctagttagctattaacagtgttgatttggttccagtttatggatcctggttttcaaataggtagta

SEQ ID NO: 839315 - DNA, 474 bp, Homo sapiens
ggcttctcttctttcaactaaaaattgagtgatttaaactaggttagccatgtgatgacttctagaaaaaaaaaatgtaaaatcctgtgctgactcagacaaggttgaccccatgaaagaagaagaatatcatagaacaaaaatataacacaatataacacatagtgcttggccttgaaaaatggattgaatttagatagattggtgtataaatataaaattatgtgactagaaggtcagagaagaaatcaaacatctgtaccaatagatagtgtaattatgtaaaggaaagctctatatcatcttgtatgtagctccttgagacatgctactgccaaaaggaacackccaggtatgttcctatttgatgagacttaaaatttattccatcttaaagactgccctttcccctgactacctctgcattctgagattataaagtgtggaacctcttctattacatttttagaaaat

SEQ ID NO: 839316 - DNA, 634 bp, Homo sapiens
ttatctctcatcctttccttaggagtcattttcctttcctctgttacctttttcatttgactctcatggccataaagcattcccaaagatatgcatgaagtgaattccatgaatttgactggcagttgattggggtgcacacattaagagaagaaaaacagaaaggactcagaaatacatttacccatatcttttcctcaacattataatttcagctaaagatttacacaaaagtgacatataccaaagtatgtcatggcttaaaacaaagttcttgtattgaatatgagttctgtgattgacatattacccattgtttgaccacaggtcaacatatctgagctgaacatgatccctacaacctgcctgagatcacattaccacgccacacatgggtacataaagctgtcggactgttattttagaagatgtgcaaggaaggacatgatgacacgggtcaaatgttgccaggaatatagttctatggcataatatagctgtttaatggtccattgatagttcctcaagacacctgaggagtttaaagctttasccacccagggtgtacaaaaaagcaatagtcaaactgtaaagctttacataacctgctttcaaagtatttttttaatatcaa

SEQ ID NO: 839317 - DNA, 605 bp, Homo sapiens
aagctggacatgaggtgcatggatatctatggctcacctgaacatgcagtgcatggatatctatggctcacctggacatacggtgcatgggtatctatggctcacatggacatgaggtgcatgggtatctatgggtaacctggacatgcgatgcatgtatatctatgtctcacctagacatgcagtgcacggatatctatggctaacatggacatgcgatgcatggatactatgggtaaccgggacatgcggtgcatggatatctatggctcaccttgatacacagaacgtaagccagtgaccctggcagcagcatcacaaagttcaacctatgaaactaaccagcatccaccgtaaactactaagccaattaatttagaatatactattttgagtagattagaaaggatctttctggatcattacaataatgttttcccatgggaaaaataaatgttaagtattataatacagagtccargaaaaaaaaaagagtaatgttttatttaaaggaataacttagtcatatgttgagtaaagaaatgtttggtattttagttgtttatttgttgcagaccatttggagtgtagattaactgaaaatt

SEQ ID NO: 839318 - DNA, 597 bp, Homo sapiens
gaatccttccattttatttaattttgaggataatttattcaactctcactattcagataataaacaattatcctatgacagacacagatgtgagaagtaagactcaagttaaataacttgcccacacccaactcctaaatgacacggttgagatttgaagcagttttctgactgaccacaaagctcacattctcctaaccactctgcagtattgccattattcactgtcctaccttctaacaattagaattcagtttgataaaaacatatactattgtgacctctatgtatgccaaagttctgcaaacttctccaacttcagtgtaacttaatgaagtagaacaaatcagtttatccatgttatgttctattcagaatttgtggcattcactgttgttatcttagctttgtttactctctgttgttcttactgaaactgcttctcatcttcagacagttctcagcagcagtaaaatcaatctttgtgaggccatrctattaaaaaaaattgggaggtaagatacagaaagatgtatttaaagtacatgatattttccatcctttctcttctaccttcaaagatagaatccagcgtat

SEQ ID NO: 839319 - DNA, 648 bp, Homo sapiens
ttcccccatttctgtaggttctctgtttactctcttgatagtttattttgctgtgcacaatctgtttagttatgttccacttgtcaatttttatttttgttgtattttcttttgaggacttagtcataaattattttccaagactgatgtccagaatggtgtttcctaggttttcttctaggattcttataatttgaggtctgaggtcttacatttaaatctttaatccatattgagttaatttttgtatatggtgaatagtaagggtccagtttcatgattctgcctatggcttaccagttatctcagcactatttattgaatagggagtcctttcaccattgcttatttttgttgactttgttggagattgcatggctgtaagtgtgaggcttcatttcagggttctgtattctattccactggtctatacacttttgtacgaggaccatgctgttttggttactgtagccttcttgtatagtttgaagctgggtagcatgatgactctcactttgctctttttgcttggaattgctttggctatttgggatcttttttgcytccatatggattttagcattgtttattccaattctgtgaaaaatgtcattgatagcttgataggaataatgttgaaaatgtaga

SEQ ID NO: 839320 - DNA, 545 bp, Homo sapiens
catgttttcctggatagtcttgatgcttctggatgttcatcaatgtctaggcattgacaagttaggtatttattctagtctttgcagtctgggcttgtttatacctgtctgtcttaagraaacttcgcatgtattaaaagggaattgcattgtgacctaagtctttggtccctgcagccatatgtgcattaggaggcaccccaatcccagtaatgctgtgactcttgcagactcatagaggtaccaccttaatgactttgggtatgatctgggagaactccctggattaccaagccgagtcccttgttctctttccttacttcttcccaagcaaatggagtcacaccctccatgctgagctgcttggagttgtggggagggggatgcaatttctcccatggctgccactgctgggactgcactgggtcacacctgaagccagtatagtactgtgtcttgcctaaggcctgtggagactatttcctggctactgctgatgtttattcaaggtccgatcactctttaataaacaggtgatgaatccc

SEQ ID NO: 839321 - DNA, 531 bp, Homo sapiens
ccttccttacaccttatacaaaaattaactttagatggattaaagacttaaatgttagacctaaaaccataaaaaccctagaagaaaacctaggcaataccattcaggacatagacatgggcaaggacttcatgtctaaaacaccaaaagcaatggcaacaaaagccaaaattgacaattgggatcaaattaaactcaagagcttctgcacagcaaaagaaactaccatcagagtgaacaggcaacctacagaatgggagaaaatttttgcaatctactcatctgacaaaggactaatatccagaatctacaataaactcaaatttacaagaaaaaaacaacccgatcaacaagtgggagaaggatatgaacagacacttctcaaaaaaacacatgtatgcagccaacagacacatgaaaaaatgctmatcatcactggccatcagagaaatgcaaatcaaaaccacaatgagataccatctcacactagttagaatggcaatcattaaaaagtcaggaaacaacagctgt

SEQ ID NO: 839322 - DNA, 600 bp, Homo sapiens
gctgcattgcactggggatggcaacaagccctccttgtccccctgcctcctgtctgctgggacagwgcacctgcagctgaattctccagccagagcctgccccgtgcagtgtgttctggtttctgaatgcaccattctgcttggggatgacctcagagaattctgaatccaggaaacttcttggtcctgcaggctttagctctcctctcaactatccatggtatccctattttttgacacggataatcgacattttctcagtcttgtgtagagtattatgcaaatacagcttctctagttcttttccaaccaaaatgctccctgtaagttcttcctacattgaaattctgcagccactactgccagtgcccttctgactggcacttgtctcatggtgtccttgtggatgtccttaaacctgagccctgattgccttcccagatgctactggcctgcttgccagggcttctgctgtagtggaccctgctttcccattgctgggctctgcccactgctgtgattgctcctgttgatcagccctgatggtttgcctgagctattcctatagcgctctatttgccgagactcagtaacagttgc

SEQ ID NO: 839323 - DNA, 593 bp, Homo sapiens
gaacatgtgctttcttagctcacacaactcactcctgaccccttttttatatwgcaagtgcatagtcattagtaaaaagaaggatttttgatgatactgacctcatcttgaatttaattaggctcatatgacagaattccatagatggaattgacatcctaggtcatatagtccaagtccttgtttatatttgatacctagtgagattaaagggacattaaaaagtaaagaaaggaaagacctcatatttcttaccttccagtagagaaatctttctatgaaatcagaggaaagaattagaggaccagaatttttcctaaaatcaactttcatacatcttttttcatataaaaggcatagctgcatacaatgctaaaatattgcattacatttcctttatattgatgggaggaagggggtaaattgcagaaaacattgtaaatttagatatgcttgggcctctgacagtgcctagcaaatatcaggagatcaataatgaaataaatattatcaaagagtagtcttcttgatgaaccttctctgagtatcacaactgctttaggaacctctagattcaaggtctagtaattgca

SEQ ID NO: 839324 - DNA, 622 bp, Homo sapiens
tgaacatgtgctttcttagctcacacaactcactcctgaccccttttttatattgcaagtgcatagtcattagtaaaaagaaggatttttgatgatactgacctcatcttgaatttaattaggmtcatatgacagaattccatagatggaattgacatcctaggtcatatagtccaagtccttgtttatatttgatacctagtgagattaaagggacattaaaaagtaaagaaaggaaagacctcatatttcttaccttccagtagagaaatctttctatgaaatcagaggaaagaattagaggaccagaatttttcctaaaatcaactttcatacatcttttttcatataaaaggcatagctgcatacaatgctaaaatattgcattacatttcctttatattgatgggaggaagggggtaaattgcagaaaacattgtaaatttagatatgcttgggcctctgacagtgcctagcaaatatcaggagatcaataatgaaataaatattatcaaagagtagtcttcttgatgaaccttctctgagtatcacaactgctttaggaacctctagattcaaggtctagtaattgcaaacagtgagctgataagaaaaacagact

SEQ ID NO: 839325 - DNA, 527 bp, Homo sapiens
aggcaagttgcacagcaagagttatagtggcattttataaagcatttgggaggcctaacgacttttgaattgtacaacatttcttgcataaattccctttcacaaatccttttatgacttacacagaccatctgagatattcttggacttcctgacttgccttaaacatccctccttttaaacaaccagtcattttactttaggacaagaatttaccatgcaagatcctttcttatataaaatctctttctttatatttttctttgtataggtaggggacatggctaatttcacatatccccatgccttatctagaatctaatggcttaaaggtaggtaaactgaacaattttttatagtcagagaaaacagtttgaccttaaagcattccacaaatctgatatctgaccttaatttagacctaatgtctacattttcaagacwttttattttaccaacaatctttaaaactgtctttatttccaaaagattactaaagtcacgtgaacaaaaaggcattacatttt

SEQ ID NO: 839326 - DNA, 597 bp, Homo sapiens
atcagctcactgcagcctccacctcccaggctcaagcaatcctcccacctcagccccccaaatagctaggaacacagatgtgtgcccccacactaagctaattttttgcattttttgtagagatggggttttgccatgtttcccagactgatctcgaacttctgggcttaagtgatctgcccacctcagcctcccaaaatgctaggattacaggcgtgagccactgcactcagcctagattcataagtttcaagtatgttaaaacttatgaataacaatgcaataatattaagaagcagggcctatgggagttgattagatcatgagagtggagccctgatgaatgggattaatcaccttattaaaaaaaacctgagggaacttgttcctcacttccaccatatgaggacacatagaaggcaccatctctgaagcagagagcaaaacctcatcagacactgactctgctggcaacttgaccttgttcatttctgcttccagaactgtgactaatatatttctgtcctttataaattactcagtgtaaggtattttgctatagtascctaaacagactaagacaggagattaaatgag

SEQ ID NO: 839327 - DNA, 626 bp, Homo sapiens
cccacaagttgtggggacactataatgctgcatcatctcattttagtagctggagtaattatttatgttaaataaccacaaagcgattattgccaacataatgattaaggtttatggtgcaatgtaraaggccaaacttgttatataaatggtaaacctcaataattcagtttttaaataacactttgagatttaatcaacacagagtaattgcattaaatctgaattaagttcacatcggagacatgataatatcaagcaaagcatctcattcttttttctaatatataaaacagatctcgtgatctcacgaatcaatgcagttcagttcaagttcactgcaaaagcagttttctactaaaggccatggattgtatagccccatcaatcttgacatatggagcttaccagtaaggcagagatatgtcttgggacattactcaaagcatgagttttctctatacattttattcaaatacattaaaattgtttttagcactatcaggtgttatttttctaatctaggccaatgcagctcaaattttagcacaaaaaattactgatcacataaaagaaatatactgtttccccaggaatttggatatacagctcaccaaaactttacc

SEQ ID NO: 839328 - DNA, 568 bp, Homo sapiens
aatgggaacaaaagtgcaagagaaaaaagaacaatgtaagattggtgacagtttaaaaagcttttattcagtgaagatgcaaatcgtatggtgtgcttagattgtttgttctaaatgccatttatgttttgactaacagaacaaaacaaaacaaaaaacttgtctgttggaaaaatggctgattctgggtctgcagcagagcatttataaggtgaggcttgccatgcctgaaagaaaggtgatattaaagaccactagggtcacatcaaaagaagacaaaagctaacagaaagaaatttctatggtcaaaaatggaaaaatctgagcaccaaaaagaataatgaccacaatcgattgaaacacatataaagtctagaagttcacagtgaccaaaaaaaaattcatttataaccatggaaggttgccagggcaacaactcattattctgaaaactgattaagggaacacatcaagtacttgtcttgtcttttctactgacctgtttttcaaagtaaccaaatagttgataaggaaamaatttttataggaaagcaggaataataaatgc

SEQ ID NO: 839329 - DNA, 595 bp, Homo sapiens
tcagaaaactgtaatataaagaggtttagaagcttgctggcaagcagcagaactggaattctaatccaattccactacattgatctgcctcagatataygccttcaataaatcctttgtctttaaagtttgaaaaccctcaaaatgatctccaatactagtatcataaatctgaaaatctactttctttgaccaaacttcttttttgttccaatattagtgggaaatctacattccacaatttggcaaaaagtaagttaaaatagctcgatcacattccaagatttattgaatatattcaagatttaatttttttgcatactaaggtaaaatgtaagcgaacagttttttaaaaacttgtgatgggaaaagatctcttcaggcaggaatccaaaaatagtaacataaatagacatatttatatgattatctaaaaattcaaacctcctgtacattatacaagacagaatgaaaagcaagtaaaatacggaagatatgtatgacatgcatgataaggttaacagttttaaacatgctaagagattacataatacctttttaaatgagaaagaacatattataataataggcaattc

SEQ ID NO: 839330 - DNA, 655 bp, Homo sapiens
ggtaaattataataaatatgatttatgtgatgggatatttttatactgtgtaaaaatttataatctatgtgacgtatattgattcccaattaaccagaatatttgtattatgagggatattatgaaaagtataccaattaagctatttaattttcataaaggacctatgatgaggtatcattattatccttttttttttttttttgagatggagtctccctctgtcacccaggctggagtgcagcagtgcagtctcctacctcagcctcccaagtagctgggattacaggcacgcaccaccacacctggattttttttttttttttaactttagtagagacatggtttcaccatgttggccaggctgctctcaaactcttgacctcaagtgatccacccacctcagcctcccaaattgctgagattacaggtgtgagccagtgcgcccttttaaaaattaaatcaccttatttccttttcctgcatttccagattactagcagaatctgtcagtttgggaataagcgacatatatggtatgttttaaggactagatarctctggcagtacctatagtccagcaggactcatctcaaagtcattgagtttgatgacatttggagttcagtgtcctttgccctgcctgtcagtgcta

SEQ ID NO: 839331 - DNA, 523 bp, Homo sapiens
ttcacagttgaattataattgactaaatttagtatatgctaaaactagggcaattcttgtccttaatttctacatgtaaatatttggtcacaatccttatagtgatgttacatcttgtaaactacatttcygtttatctgacataaaggatttatttcagaggtgggaaatatagggatcttgtaggccttcgacaaattatcagagtaacttcagttttatttccacaacttcacaacattgtaatgagaatctgctctgctcaactcctccactagactttaggtaaaatttgattagattctagatattagtcccttgtcagatgtatgctttgcaaataccttcttccattctataggttgtctttctgttgacgacttttttttgttgttcagaagctttttagtttagttcagtcccgtttatttattcttgcttttgaggcatttgcttttgggatttactcacaaattctttgcctaggccaatgtccagaagagtttttcctccagaagttttt

SEQ ID NO: 839332 - DNA, 665 bp, Homo sapiens
ataaactgggatctgatgttgaaggtttttaaaaagtagtttgaaataaatattaaatacaaaaagtttcmatactagtacaaagaatatgcatacaactttcacccaggctcacctagtattaacatttcaccactttgctctatcatttgtgttccgtttctcacacacatataatattctttagatggggaaggtttacaaaattttatcatatgctcagaggtagggaaaatcacttctaaccaggaggaagtaatggagaaactggctttcagtaaagatttgctgggaagtcaaatgttcagagctctgcttgtggaagatgacaactacaagggtgtccagtgaagtctagaaagaaggccaggctggagacagagggatcagtcaggaagctgctcagaggtccaggcaccaaggacttctactaatggacagagatactgatgggtttgagcaaaaataaaataatattcttttagtgcccaagttagataagagtgtctcacattttcttgactatttgacctaacttagtaaggtgatttacgtctaggatttttcacatctcttttataaaatagagtcctttgatcacatccatcttctcatcttggttgtttataaatgaaatgttaaaatgaaagattatgggaagaatt

SEQ ID NO: 839333 - DNA, 636 bp, Homo sapiens
ttgacagctgggctgcagccatggagaagacaggagcattcttgactcttacttcccctcttcaccaaaaatggagctggctttgtctcccagaatggagtgatgtgtgctgcagtgtgggcacaagaaaggaggtgaggagaaaagggctggggaaggaggaaggttcctgctctgtcagcatggggctggtctcaaagatggggagcatcttccctttttggccctcaaaattatcttctacgtgctcctttctggcctcctgacaggttgtttactgaacaaggccaaagggcaaagaacaaccctgtgtcatcaccttctcctgatcccctttcccaagacacaggctggccactggagagcatcacagaaaaatgatacactcccttgaggcactgctctgaaatccctccccaactcacaaacaagaggtaatctggagggacttgagacatctgcgtgggcactttctgctgactgggatgcttagttgaggtttcctggttagtgttttgttttccccactgcgcagtgtatttttggtgattcaactctttctcwtaaataataagaccttgtatacattttataatggcatcctcttccaaagggctgacagcactttccagagct

SEQ ID NO: 839334 - DNA, 519 bp, Homo sapiens
ctgacctgggcggagactggaaggggcaggtggggcrgggcccaagagtcctacccgactaatggggacagccggagccaaggggctctcagggcagcaggagggccatgcaggggtgagccacagcccccaggcgcccctcctgccagcttcgctgcgcccatgagcttgggtttgcctctagctgagggcatggggcaggcctggggagccggtaggcctgacccagcggtgacccgggcccaggggaggagggcgccggctctatttgggaaggggcttcgtaaaggggcttggttaatttatgggagaacctcggtgtccccgccctgtgagggctgtgggcgtggggtaaatgcagggcggggaggggagaggggtcagggctgaggaggagaagcaggggcaggaggcagggcggggagggcagaggggtcagggctgaggaggagaagcaggggcaggagcggtgaggaagaggggcatttggtcgaggttgggtcaggtaaggacacggtg

SEQ ID NO: 839335 - DNA, 575 bp, Homo sapiens
tcctcgtgtagacctgctctcctggcagacgtcttatttccattctcttcaaacagaagctgcccagcgactgcgacacttgcggagtttggatgaaaacggctctcactgtcaccttccagccctcctcactttacccaccctctgcctgggctccctgtcgcttttgatatcctttttttttttcttttttctttctttttattgtggtaaaatacgcataattcaccatcttaccatttttaagcacacagttcagtggccctgagcacattcacctgacgctgcggctgtcacctccctccatccacagaagtctccatcttccccactgaagctctgtcctcatggaacactcacacccctgccccagcccctggcacccacctttccacctccagtctctgggcgtgaagactcacacgcgggtttgtcctttggctgcctgcacctggctgcggcatgccagtgtcttccttccagggacrtcaccctcccagcttccagccaggtcacagctcagcagctccccagggccttcgggccttcccttcccaagacagactctcctgagc

SEQ ID NO: 839336 - DNA, 551 bp, Homo sapiens
cagctttaagaccccttttctcctggtaggggcaggcttccaaatgctatggaggcaaccctcagcaaaataaatggtactaggcaactatttccaaataactactgcctcctagggtaagatactcacattcgttttactgccctaattgtagaatttctctccttatctttaatcaattcgggggaagtttaaaagcaattcaaactatactttttttttcagatgtatttcaaaatcaaagaaaattttctctatcacttcagagatggtagaagagaaggagaaagaggattaattcttatgtatctgcaattggcctttctgagaaccaagcatctctataactggctgtaataatttactcttgtgtggaagtgcacataaatgacagtcatttttattataggccttgagaaagcagaattcrtgtttattagacatatttaatttagtgtctcacacagtgctcattcacaagcatccataacacattaccacatagaaggaaaaccacagggcacctgaattcagaaaatacatgcaacata

SEQ ID NO: 839337 - DNA, 435 bp, Homo sapiens
cacttctgtcgtgtcgtgtctgagaacagcatttgtgtgaataccatagaccttccaaatctgagcctctgggagcagtagccaccaatctaaatgtgaacccaatccctggtcattcttatttaaccagcctaatgtttaggaaacacttggcaagagaaacaaaagacaaaagaagaaaaaggatggaggaaggggaggtacaaacatatagttaatagaagaaataagtcctagtgttcgacaacacagtagggtgacgatagttaataataatttattgtgtatttcaaaataactagaagagaggatttgaaatgttytaacactaagaaatagcaaatgtttgaggtgatgagcctcctaattaccctgatgtgatccttacacattgcatgcataattcaaaatatcatatgtacctcataacaacat

SEQ ID NO: 839338 - DNA, 435 bp, Homo sapiens
cacttctgtcgtgtcgtgtctgagaacagcatttgtgtgaataccatagaccttccaaatctgagcctctgggagcagtagccaccaatctaaatgtgaacccaatccctggtcattcttatttaaccagcctaatgtttaggaaacacttggcaagagaaacaaaagacaaaagaagaaaaaggatggaggaaggggaggtacaaacatatagttaatagaagaaataagtcctagtgttcgacaacacagtagggtgacgatagttaataataatttattgtgtatttcaaaataactagaagagaggatttgaaatgttctaacactaagaaatagcaaatgtttgaggtgatgagcmtcctaattaccctgatgtgatccttacacattgcatgcataattcaaaatatcatatgtacctcataacaacat

SEQ ID NO: 839339 - DNA, 642 bp, Homo sapiens
tggccaaagtccatatcgtggggtattgccagtggactagccagctaacactggatttcctcaatttgatgtggctatttagtagccayttgttttttaaatgggagagaaactatattatatatgtaatatatataacaattgtaagacatctaatttatgactctttaacatatgccaacaaagagtactttgttggaggaaataaggcatttagtaaatttgatctgttcttttttaaaatttgagactaatgttaatatttcttaggactgttttaatattaaaacttactgtgtgtatgcaaaggataatgtggatgttaagtgacattattaatagcaggccagaaaaaaatatatatataggatagtttaaaagacttaatgtgttatcccacctggaggaacttgaaaagaggtcacttgtcacctagtgacaaaaatgcaatttcttagagcaatggatgtgtgctagtgggaattttaggtccacttaagaagagagaggatttacgtttgagcaggtcagacatttattgttggcttgaaatcttgcatgtccatctgcatttgagacctgctctgatctttgcttctccacagccactgtatcccttgagatgacaaaagaagcttctta

SEQ ID NO: 839340 - DNA, 579 bp, Homo sapiens
tttccctaaaatgtgtgtcaatatcacctgggatttgaaaatgaaattcttaataggtctccaggtcrgccaatgcccagcagtccaggaagcccagtctggctagcttatgctgttggctgatgttgagaacatgagatttagggatctgtagacatgctctgaagcttcagagtccacccaggattaagcaggcaaggagagagggtttgatcctaaagggtatgatgaaaggaaacagacagtatatggtagcaggaaggcactcccgggttcaataagcagtgacccacaaaaaaggtaggtgatgggattcagagacagtgatatggaaatgtgagaagacaaacaggtgaccatcactgtgtcagtccattttgcactgccataaagggatacctgaggctgagtaatttataaagatcttttatttgtttggtttatttggttcatagttctgcaggctgtccaagaagcatggcaccagcatctgcttctggtgagggtctcaggaaacttttacttatggtggaaggtgaagggggagcaggcttgtcatatggcaagagagacaagagg

SEQ ID NO: 839341 - DNA, 591 bp, Homo sapiens
atggtggtgtttgcttggagagattgtctgaaaaataacctctttccctagcatccagaaatagcttttgatgttatcttaraaaaaacaattttgggaccaaaatttagaataaagctgagtgccagtaaatgcctacatgactgcttccaagggaaatcagaaaggatttctagagacgctaaagctgtatattattgtaagcccgtggagctgaaaagctcctggactgagtgtcagaagacctttcttttcgaattccaactctcatcacagtagcagcactgaacctctttgcggtacagtgcttctgtctataggaacacagtcatcctcctttctgtattaaaatcatgagaccagggagaaggtgaataaacatcatactcatcatgtaccaaacacctaggatgtgccacatgctatattaggcactttgcagctcttaactcatttaagtttcacagcaatgctatgaagtaggcattttctctacttaagtaacaactaaaccaaaacttagaatagttaagtaggatgctcaccaggcagtaaatcaagggtagaactgggatgcaaacttcagctttt

SEQ ID NO: 839342 - DNA, 549 bp, Homo sapiens
ggggaagcctggggtatagaggtgatacaagactcaccattttaaaaaatgttttttagtgaccggatctcactctggcacctagactggagggtactggcatgaactcctgggctcagatgtcctcccacctccaccttctgagtagccggaattacaggaatgaaccatcatgctcaggtaattttttaatttttttttcttttgtaaacacaaggcctcactatgttgcgcaggctagtcttgagctcctggcctcaagcaattctcctccttcagcttcccaaaatgctggaattacaggtgttagctgccacacccagcccaaagctccccattttttacttactttcatctccgtatctttgatgcaagtcacccaaaaaagcagcatggcaattatcccaaaaataggccaccaaggaccagtgmacagcccctgcctttgtcaagatctgatagagggaggcctcctgggcactgccagcccctgggtccttctaagctttggaattctcacacctgccaaatgcagtgtggagcagctta

SEQ ID NO: 839343 - DNA, 549 bp, Homo sapiens
ggggaagcctggggtatagaggtgatacaagactcaccattttaaaaaatgttttttagtgaccggatctcactctggcacctagactggagggtactggcatgaactcctgggctcagatgtcctcccacctccaccttctgagtagccggaattacaggaatgaaccatcatgctcaggtaattttttaatttttttttcttttgtaaacacaaggcctcactatgttgcgcaggctagtcttgagctcctggcctcaagcaattctcctccttcagcttcccaaaatgctggaattacaggtgttagctgccacacccagcccaaagctccccattttttacttactttcatctccgtatctttgatgcaagtcacccaaaaaagcagcatggcaattatcccaaaaataggccaccaaggaccagtgaacagcccctgcctttgtcaagatctgrtagagggaggcctcctgggcactgccagcccctgggtccttctaagctttggaattctcacacctgccaaatgcagtgtggagcagctta

SEQ ID NO: 839344 - DNA, 504 bp, Homo sapiens
cttcactggccttgtccctctttaggtcctctgccccaccaggaacccaggggctttctgtggcttcaggcttcccaagacatttcctcactcctgtgctctcctcttctaaagacttaaagtgtgactctccctgtactctgggttttcccaccccatcaaaacttagctttgctacaccccatcttctgctttaaatggtgataataagccagagcctaggtaacttactgaagtcttcattgttgcaaaaatgaatgaatgaatgaaaggagaaagggcttccttcctcctctcccagtgattccttagcttcagtgggttgtgtgcctttcagcagggctcttggggaaagagtgttttgactcacaagagtagctstacaggattagcattttagtccacacagcaggccagaggaggaggggtttggcggtagatggaagagtttaggggtagatgaggcctacccctgagctcccgctataccggcaatcacctctg

SEQ ID NO: 839345 - DNA, 639 bp, Homo sapiens
gaggaagccctcagccctgatggattgacttctctcttacacagtaccaccagcttcaggacgagtatttcaccagcgccgttgtcctcaccctcatcctggctgccttatttggccttgtctaccttctaatattcccacagtgagtatttctatcaacgaggtgaggaactcaccaagaagtcccggtttctggggttcgtggttgtgtttctggggttcgtggttgtgtttctgttgtatgctcaagcttcgtctcccacagttattgtcccaatgtgcccaacatggctgacattagccagccatcatttcctcattttctcaagtcagtagtgtaacaagccttgatggtatatggcatgggactggtcactttccattttaaattttgaatttacttaattctaagacacaatatattttcatgctttttcatccatgcaacatgcaccattgctgtaataatagcttttggctgggtgtagtggctcatacctgtaaccccagcactttgggaggctgaagcaggaggattatttgaggccagtagtccaagaccagcctgagcaatatagcaacactctatctmcaaaaaaaaaaaaaaaaaaaattagccaggcatggcagcacttgctt

SEQ ID NO: 839346 - DNA, 588 bp, Homo sapiens
ttccaagggagaatttgtcccttaactcttacatcttctgttggctgttggaattccttggcttgtgggccagtctccctctgtcttcatattgctgygtgttcctcttcattcttctgttttctctcactctctgccttttccccctccctccctctctctttccctttttctgtatgtgtgtaaaatttcctcctgcctcatttttataaggatacaggtcattgtattcagggcttatctggataatccaagatggtttccctattttaagatccttaatttattacattagaaagatctttgtttttgtttgctttgttttgtgctttgccatgtaagtttgcatttacagattccagaaatttgactgtgggtatctctgggggtctcgggaggcatggaatttcagcctaccacacactgagagcagccatccaaaatctctctggatttcagtctccttattcaaaaataagactaaatatgactattttggttggttagtgagaagtaaaataatggaaagtaaaataataaaaggtctaaagcatctagcacagtgcctaggacaaggtttacactcaa

SEQ ID NO: 839347 - DNA, 482 bp, Homo sapiens
aaagagctcacaataatatgtttcaggaaagttaaaaacatgatatcttggagggaaaaattcaaggacaaaaatcattgatgttcttatattatttcacatatgcatgttgcagaagtcatagagaccctttaaataatattcttggattatttgtttgcctccagccatcttcaattgtcaaccttttcctcaaacagtagtgcattgaaaacttttatttttaaagaaaatttgaaagtgttaactgattaaactaattttctacttgaggataatccatgaagctaaaataatactgctttgattgattgcaaaagaaaaataagacaattgaatattttgtcttttttctagatcaaacatcaaactgccaaagacagaaaattatttactgatgtayattatttgacaaactattcaaaggtacctttgatagtatttatttctttaatctacttttttatgttcaaacaaatgtg

SEQ ID NO: 839348 - DNA, 482 bp, Homo sapiens
aaagagctcacaataatatgtttcaggaaagttaaaaacatgatatcttggagggaaaaattcaaggacaaaaatcattgatgttcttatattatttcacatatgcatgttgcagaagtcatagagaccctttaaataatattcttggattatttgtttgcctccagccatcttcaattgtcaaccttttcctcaaacagtagtgcattgaaaacttttatttttaaagaaaatttgaaagtgttaactgattaaactaattttctacttgaggataatccatgaagctaaaataatactgctttgattgattgcaaaagaaaaataagacaattgaatattttgtcttttttctagatcaaacatcaaactgccaaagacagaaaattatttactgatgtacattatttgacaaactattmaaaggtacctttgatagtatttatttctttaatctacttttttatgttcaaacaaatgtg

SEQ ID NO: 839349 - DNA, 616 bp, Homo sapiens
gttgcagtcctgtatttcatgaataggtttgttcaaccaatttacaaaactaatgtgtaccatttcattcttgtattactataaaggaatacctaaggctggataatttacagagaaaagaggttggcttactgttctgcaggctgtacaagcatggcaccaacatctgctcagcttctggtgaggaactcaggagcttacaagaagtgggaataggcatgtcacgtgataagagtgggaacaacaaggtgggggcgaggagggaggtctcagacttttaaacaaccagatctacagtgaactgaatgagaactcacttatcaccaaagtcatagtgcaaaaccattcatgagagatccaccccatgattcagttacctcccacaagaccccacctccaacactgggaatcacatttcaacgtgagatttggaggggacaaacatccaaacaaaatcacagtgctttcaaagttcatgtacattggagtctctgaaaatttgrcctcaaggcacagaaatatatttgtattactatgtacagtttttgtcatttcttttataggtttctatttataccccataatagataaccacttatttcactgcttcttaaaa

SEQ ID NO: 839350 - DNA, 612 bp, Homo sapiens
gctactttttcctaattgtacattgcattttcacaactctcttattctttcttaggtctcctccatgttaaggagaaataagctcattaaataatttcaagattctgtaatatttctttcycattgttcgaacaaaaaacattcacagtccagttaggaataattttatttacattttaagagcttaaagtgacactttcaatttgtttctttaaaataattattgtctttttttgttaatgtgatttattgctgtaattataaaacttccatatttttaataaaaagtataaacaaatatgtttatataagtggagaattttactgagataaatatctgctttggtttcaagagttttttagtagcctttaacaaaaataggtttaatattcccttcagcttgactaaactttagacaattcttccgactgtaagctcctaaaaaaattagtgtaattttttcattggcagcatttgacatagtataaaaaaggaaaatttctgatttttaattcatactgtgggtgtattagtttcctattgctactgtaacacattctgacaaaattattggtttaaaacaacacaaatttattctcttacagttttga

SEQ ID NO: 839351 - DNA, 529 bp, Homo sapiens
atgaaatcccagcgcttttgtaggctgagctgggcagataacctgagctcaggaattcgagaccagcccggccaacatagtgaaacctcatctctactaaaaatacaaaaattagcctggcgtggtggtgcatgcctgtagttccatctacttgggaggctgaggcacgagaattacttgaacctgggaggcggaggttgtggtgaactgaaattgtgccactgcactccagcctgggcgacagggcaatactctgtctcaaaaaaaaaaaaaattctttgaactgaacggtaatagtgacacaatttatcaaaacatctgggatacaggaaaagcgttgctaagagaaaagttcatagcgtcaatctaggaaaatgacaagcaaaagcctcaatcattttaggaaatttatttgccaaaattaaggacrcccctgggagacaattctatgcctttctccgaagatgattttgagggctccaaatttaaaggggaaaagatggtatattgagaagcatacagttttcat

SEQ ID NO: 839352 - DNA, 607 bp, Homo sapiens
cagacgcattaagatacactgctgataacctggggaaactcygataccagccaccagtaacatatagtatgggaaaatatagtggtcaaagaacatgacctctgacaacacattgcacagtcctttgatatcatgagttcacttgacagctgagttgaagaatctacttctctctgttctggtgttcttctctcttctcgtggtgactattaaaagtgcattcagaatagacattgtttatagcgtagctgagggaatgataatgaagttgcacataaaactttatcatgttcatcctctgcctcatatttttccaagtttcatactacctatagctacctgatatactgcatgaagtgacagatcatatcatttggtagtgacatgttcttttatttataaatctacctgatagggaaaagcagcactcacattctactttctattatatttgcctcgagcttagttgacatgcttgtatgattatttttccagaagaatgttaaaataaaatttttagttttaaagcaaaatatattagtaagtgttgggttttaaggaaatttaacaaatatcattcctgatgggaacaacacatttaagcaga

SEQ ID NO: 839353 - DNA, 651 bp, Homo sapiens
agatatacatttgtgtctggcgggctagagtgactgcacctgtaaagataagctatcaatttgcatcgtcaaggtgaagttttaaagctcaccaggcatttccttgtgggcaacatatcggggaggcatgttgcttttcatcttggagtcatcttatttagaaacctaaaagggaggcagatttgtgtgaaccagttcccagcttgacttttctctttggccaaatgagtttggggtcccaaaatttaatttcttttaataatagcattaaatgcctacatcaaaaagtctaaaagaatacagatggacaatctaaggtcacacctctagagctagagaaataagaacaaaccaatcccaaacccagcagaagtaaagaaataatgaagaccagagcaaaactaaatgaaattgaaacaacaacaacaaaaaacaatacaaaagataaatgaaacaaaaatctgcctctttgaaaagataaatagaattgatagaccagtagtgagattaaccaagaagaggagaagagctaaataagatcaatyggaaatgaaataagatccaaataagattaattagaaatgaaataggagatattacaactgatactacagaaatgcacaagattattcaaggctactataaacacct

SEQ ID NO: 839354 - DNA, 539 bp, Homo sapiens
ggcaacatatcggggaggcatgttgcttttcatcttggagtcatcttatttagaaacctaaaagggaggcagatttgtgtgaaccagttcccagcttgacttttctctttggccaaatgagtttggggtcccaaaatttaatttcttttaataatagcattaaatgcctacatcaaaaagtctaaaagaatacagatggacaatctaaggtcacacctctagagctagagaaataagaacaaaccaatcccaaacccagcagaagtaaagaaataatgaagaccagagcaaaactaaatgaaattgaaacaacaacaacaaaaaacaatacaaaagataaatgaaacaaaaatctgcctctttgaaaagataaatagaattgatagaccagtagtgagattaaccaagaagaggagaagagctaaataagatcaatcggaaatgaaataagatccaaataagattaattagaaatgaaatmggagatattacaactgatactacagaaatgcacaagattattcaaggctactataaac

SEQ ID NO: 839355 - DNA, 648 bp, Homo sapiens
gaggttaggggtttttgagaatagttaggtgggcaaaggactatggaatgggtgctgctaattggttggggatgaaatcatagggatgtggaaagtagttatcctgcattgagtcagtctctgggtagggagkgggtattcactattaggacacgagtcacaagtccaggtggaattagacagtcttcagaaatgcaaaagtctgaaaagatatccaaaaggcaaatcttaagttccacaatagtgatgttatctaacattaggcatcattagagaaggtacaaatcttgtgctttctggaacaatggccggttgtcatttgctgacacctagatcttagcaaaattcagatccctctcataatcctaactttgtgacctttcattagctcttttttctttttctttcttttttttttttttttttttttgtctgagacagagtttcactcttgtccaggctggagggcaatggcatgatttcagctcactgcaacctcttcctcctggagtcaagtgattctcctgcctcagcttcctgagtagttgggatcacaggtgcctgctaccacgtctagataatttttgtatttttagtagagacggggtttcatcatgttggccaggctggtctcaaactgctgacttc

SEQ ID NO: 839356 - DNA, 624 bp, Homo sapiens
agatggagggactcatgcaattcaggaaatggaattcaacactagaaaagggtgtgatgacmtgtttctacccgaggtgaaaagtgattagcctgcttgcagagaaggttagccagagtggaacaagtcaggtagcaccatgagggatttcatcaaaagatacggaactgattaagagataattaatttgataacactaagaggagttttataatactgagggggcattagtatagaattgctactaagaacatgaaaaataaaaccaatatgtaaaactagaaaatgattatctctaaggaaaacaaaatgtgggggaaagaaaaagcaatcgcaatgtaatgcattactaaagttcaccctagaaaaacatgggggttagtggcacttagccctgcaaagtcaaaaatccacatataacttttgacttcccccaaacttgactactaaaaatagcctactatttatcagaagccttactgttaacatacatagtcaattaacacatattttgtaggttatctgtactacatactgtattcttacaataaagtaagctagagaaaagaaaatggcattaggaaaatcataagaaagagaaaacatatttactatttattaggt

SEQ ID NO: 839357 - DNA, 655 bp, Homo sapiens
atatggatccccactgggacmccgactcagatcatggggactggagttgaaaacatctgttgacctgttttctagaaggactaaggagaattaggaaaaagcccatgaagtattcaatgatgaccaccataactcagggaaaggaagaaaatccttctgccttcctcgagcggctacgagaggccttaagaaaatatactcccctgtcacccaactcactagaagctcaattgatcctaaaagataagtttattactcaatcagctgccgatattaggagaaagctccaaaagtgagatctgggccctgaacaaaatctggaggcattattaaacctggcaacctcggtgttctacaatagggaccaagaggaacaggcccaaaaggaaaaccaagatcagagaaaggctgcagccttagtcatggctctcagacaaacaaacattggtggttcagagaggacagaaaatggagcaggccaatcaccctgtagggcttgttatccagtatggtttacagtgacactttaaaaaagattgtccagtgtgaaacaagccaccctcttgtccatgtccactatcttgaggtaatcactggaaggtgcactgccccagaggacaaaggttctctgggccagaagcccctaaccagatga

SEQ ID NO: 839358 - DNA, 655 bp, Homo sapiens
atatggatccccactgggaccccractcagatcatggggactggagttgaaaacatctgttgacctgttttctagaaggactaaggagaattaggaaaaagcccatgaagtattcaatgatgaccaccataactcagggaaaggaagaaaatccttctgccttcctcgagcggctacgagaggccttaagaaaatatactcccctgtcacccaactcactagaagctcaattgatcctaaaagataagtttattactcaatcagctgccgatattaggagaaagctccaaaagtgagatctgggccctgaacaaaatctggaggcattattaaacctggcaacctcggtgttctacaatagggaccaagaggaacaggcccaaaaggaaaaccaagatcagagaaaggctgcagccttagtcatggctctcagacaaacaaacattggtggttcagagaggacagaaaatggagcaggccaatcaccctgtagggcttgttatccagtatggtttacagtgacactttaaaaaagattgtccagtgtgaaacaagccaccctcttgtccatgtccactatcttgaggtaatcactggaaggtgcactgccccagaggacaaaggttctctgggccagaagcccctaaccagatga

SEQ ID NO: 839359 - DNA, 586 bp, Homo sapiens
tgtcaaaagataaaatgaacaaacaaaataaaataaataagaataattagcaactttgaaatttttrctttgcagaagggaggaatagcctggctatcacgtgaggagattcatgaatataatgacaatattaaaatgaggaattcttaacattttatatcttccttgaataagaacacaaagaaaagctatctatgtaattaaaatgtaatcaaaccctcccaactattatataaaataggttaaagaatacttggaatatttaagcatacgcaaatttaaaaagcgggatactcataggaagaaaatcaataaattgaggtagtcatttgtaattgtttttgaaaaattgtgcaggattgaagaaatagtataaacttaattaatttatttatttatttattttagccattttaggtggtaggaagtgatagcccattgtgattttgactttttatttttaaatttttttgagacagagtcttgctctgtcacccaggctggagtgcagtggtatgatcttggcttactgcaacctccacctcccaggtgattctcctgcttcagcctcctgagtagctgggat

SEQ ID NO: 839360 - DNA, 648 bp, Homo sapiens
ttaacctggaacaatttccactctctactgactggcagctgatacctttatcaatgccagaaaaatgccattttcttaaggtgcagtttgccccctttcaatcgctacttcgtcttttggctttactgtgaacatgatgaactggcagatacagtaactgatggcagcagactagactgggcagcagagagattaaaggttgcttgcagcctgtgatacggatttgaaggcgcactgccttggggttaagtaacccaaaaacacactctgctatggctgtgaatttcagcagccaggcaccagctgcaaaacttgctagcattgtttaaagaggtacacctgctctgaatgacagttgcaatgcactggggaaaagcattctggacttggtgtcagaaaaccaggctttgagttacagctcagccaggtaatggcaggggcacctaggaaagtcccttaaatttgaactcagttttcttacctataaagtaaaggttttaatacctgttttgaagtgcatgatgatggagagaaatgatggatgagacttccaaatgataaagcaatatagagactaagtatggttaataccatcagtctattatgagagayttatgtattagactgttaggcattgtgtctgcatat

SEQ ID NO: 839361 - DNA, 649 bp, Homo sapiens
atctcaaatgccaaactgtagagctggtttttactctataactacactgtccattacagtccctacgcatggccatgtaggtagtctgaactggcatgggctttgggcataaattgacataggatttctaagacttaatgtgaaaaaaaacctcatgtaaaatacctgattagtaatttttatattaattcacattgacataatattttggatgtactggattagagaaaatatattattaaaattaattttacctttttttagatttattttttaatatggcttctaaaaatttaaaattacatttatggttcacattgtattcctattggtcactgatgggatgcattataaggcatggtgagggtaaggctgggactggctgctgctgggactaaactttccttacacacacacacacacacacatacacacacacacacactctctctctctttctgtctctttctctctctctctttcttaaccccatattattattttattattattattttcaacctccagcctccttaggaataggccactcaggactctcatcccgctaggaaaaactctgaaataaaaataatttaaccaaactcttttgcaaraaataaggatggatccatttagcaccccagggagc

SEQ ID NO: 839362 - DNA, 529 bp, Homo sapiens
aattattattctttgaaaacacagtttatatagtgtcatataaaatataataagttactacataagtaaaaatattaggtgtctttcagtttttactatgttaaatatttctgcaaaatatatctttatatctgaatctttctgctcttctttgacggtttatttctatcagataatttcatatactaagctggtttactacagaaacataaagtggaaaaaagacaccttattcaacatatggtgctgggataacagcaagccacatgtagaagaatgaaactggtcctcatctctcaccttatataaaaatcaactcaagatggttcaaagacttaaatctaaggcctgaaaccctaaaaattctggaagataacatcgggaaaactcttctaattggtgtagtcaaagaattcatgaccaagaacccaaaagcaaatgcaaacataaatgawtgggacctaattaaaataaaaagcttctgctcagtaaaagaaataatcgtcagacaacacacagagtgggagaa

SEQ ID NO: 839363 - DNA, 583 bp, Homo sapiens
ttgtccatgaaatcttcacaatttatgttcagagattcagtaaagacaggcgtaagacattataaaagtattaatttggggaactaataaatgtccktgaaatcttcaccatccacgttcttctgccatggcttcagccggtccttccattcggggtccctgacttcctacaacacagaatcttcaaggaactcaaagaaatcagcaaggaaaaaacaatcctatcaaaaagtgggcaaagggcatgaatgaacaattctcaaaagaagatatacaaatagccaacaaacatatgaaaaaatcctcaacatcactaattatcagggaaatgcaaattaaaaccacaatgagataccaccttacttctgtaagagtggcaacaatttaaaaaaattaaaaatattattaaatgttggcatggatgtggtaaaaagggaatacttttacactgctagtgggaatgtaaactagtataatcactgtggaaaacactatggagattccttaaataactaaaaatagaataccatttaatccactactgggtatctacccaaaggaaaaaatgtcattgtataaaaaa

SEQ ID NO: 839364 - DNA, 378 bp, Homo sapiens
attctctactgttgtatgtcacattgttaggtttcttagactgcagtgaatttcccaatgacaggcagcatgctgtattcatgagttctccggagaaacagaaccaataagrtttctccaatttctctggggaacactgattaacacggcatgctatgtatcatatgaaattcctaagccatttccttataataacaaatctcttatacatatataacatataaaattatccttcatataatattaatatataacacatcttatatctttatgtatcttatttatacatgtatatgtatacatatatcttatttatacatacataaataagatgtatataaagagatttatatacaataaaattatggaagctaggaa

SEQ ID NO: 839365 - DNA, 601 bp, Homo sapiens
tggacccttattttacatcatatgcacatataaatcaagtcaaaattgagaaaaaacttaagcacaagacctagaactataaaacttctagaagaaaacacaaggaacagcatcatgagattgggcttggcaataatttcttggatgtgatgccaaaagaacaagcaacaaaggcaaaattaggcaagtgggatgactacaaactaaaaagctctgcatagcaaaggatactcaaacacttttaagcccactctcttcatctataaaatgggaataatggtacctacctcacatatctttggctccaaaataagtaaaatatatgataaatgacttagcacaatggctggcaaataggaactcaataaaaggtgtctattattactagtgaaattgattttttaccccagtgtaattactggacatttcaggaatgtgggagttatccacagcaagttgaaaagagaaataaaatgaaaaaacccaaactgtgatatttttcactcaaccattacttcctgagagtgatactatgaagaaagggaagattcaagttaaaccagggaattccttcctattytcaatttttataaagatagaa

SEQ ID NO: 839366 - DNA, 530 bp, Homo sapiens
aaatgaacaccagattttgaaggttttatacaaaaaatatgtatatataaaaaataccttaatttttctatttattacatgatgacatgaaaatatattagatttatttgtctaaataaattatataaaatatctaatatatataacttaaagtaatttaatataaacatattattagaatcacttttaactattcctttttttgcctttgcatattgatacataatatttgtacatattcatggcatacatgtgatattttgatacatacaatgtgtaatgatcaaatcaggacttttagggggtccatcaccttgaacatttatcatttctttgtgttgagaacatttcaaatctaggtattttcaaaaatataatgttgttggctatcatcaccctactgtgctrtcaaacagtagaacttatttcttctatccaactgtaggtttgtacccattaaccaacctctcctcatgtcccctctccaacacacctctccaagcctctggtaagtattatgctactctctg

SEQ ID NO: 839367 - DNA, 345 bp, Homo sapiens
ctccacagggctgcctgttaggaattttgaaggagcctccctagttcagggaggcataggaggtgaatttgtcacaagggacactgcttaacaggaaaaggcaagttagccttgaaaatcatatcatgcagcattttccccggaagatgtcaatgaagggagaaagaaaaaacctcgccgaatcttgttatataatgggtagctcaaagggctttccagagtcaaagacttaagaaaattagatatcttttgcatgagcactgtcaagcttgtrtcttcttctggagtccatgtattcaactaaaaatggttattcctgatacttctagtatgtccttttctgat

SEQ ID NO: 839368 - DNA, 630 bp, Homo sapiens
tggaactagaggtattgccaccatgcctgggtagtttttgtattttttgtagagatggggtcccactctgtcatccaggctgragtacagtggtgccatcatagctcactgcagcctggaactcctgggttcaagtgatcctcctgcctcagcctcccaaagcactggaattacagacatgagccgccacacctggcaactgcttgtcattttaaacacattgttgattcatcagtccatcaacaccatatttcccaccctcaggaaaggtgggagatgggctgtgactatcagagatgtatatgggcagttgagtgagtgtgcttcatgtcccgaggtggcacacctcatcccggccagctctccttcctgtaggtcctgttttagtccattctcacgttgctataaagagctacctgagtttgggtaatttacaaagaaaagaggtttaattgattcacagttccacaggctgtacaggagacatggctggggaggcctcaggaagcttataatcatggtggaaggtgaagggggagcaagcacatcttcacacagtggcaggagagagtgtgaagaaggaaatgctacgtacttttaaacaaccagatctcatgaaaactctctcac

SEQ ID NO: 839369 - DNA, 618 bp, Homo sapiens
ttttttaatttccaatttttattttaagcaggggcacatgtgcaggatgtgcatgtttgtcacatagataaacttgtgccagggtggtttgttgcacagatcatyctgtcacccaggtattaagcccagcatccattagctactctttctgatcctctccttcctcccaccactcactctccaacaggctccaatgtgtgttgttccctcccatgtgtccatgtgttttcatcatttatttcccacttacaagtgagaacatgcaatctttggttttgtgttcctgcattagtttgctaaggataatggcctctgcctccatccatgttcctgtgaactcctctctaactcattctatgaggccagcatcatcttgataccaaaacctgacagagatgccataaaaacagaaacctttaaagccaatgtccttgatgaacatagatacaaaaatcctcaacaaaatactggcaaactgaatccagcagcacaccaaaaaccttatgcaccacgatcaaatagtcttcatccccaggatgcaaggctgattcaacatacgcaaatcaatcattgtgattcatcacataaacagaactaaagacacaaaccacattataa

SEQ ID NO: 839370 - DNA, 564 bp, Homo sapiens
actgggagaaaaatcttctcaatctatacatccaacaaaggaccaatacccagaatctacaaggaactcaaatcagcaagaaaaacaaacaaacaaacaaacaatctcatcaaaaattgagctaagggcatgaatagacaattctcaaaaggagaaaatggccaataaacatatgaaaaaatgctcaacatcagtagtgatcagggaagtgcaaatcaaaatcacaatgcaataccaccttacttgtgtaagaatggtcataataaaaaaatgaggagtataatagttgttggtgtgaatgtggtgaaaagggaacacttttatgctgctggtcgattgtaaactagtacaaccactatgtggagatcccttaaagaactaaaagtagatctagcatttgatccagcaatcacactactgggtatctacccagaggaaaaaagtcaytacaggaaaaaagttagtggcacactcatatttatagcaactcaattcacaaaaatatggaaccagctcaaatgcccatcaatcaatgagtggataaacaaaatgtggcatatatat

SEQ ID NO: 839371 - DNA, 564 bp, Homo sapiens
actgggagaaaaatcttctcaatctatacatccaacaaaggaccaatacccagaatctacaaggaactcaaatcagcaagaaaaacaaacaaacaaacaaacaatctcatcaaaaattgagctaagggcatgaatagacaattctcaaaaggagaaaatggccaataaacatatgaaaaaatgctcaacatcagtagtgatcagggaagtgcaaatcaaaatcacaatgcaataccaccttacttgtgtaagaatggtcataataaaaaaatgaggagtataatagttgttggtgtgaatgtggtgaaaagggaacacttttatgctgctggtcgattgtaaactagtacaaccactatgtggagatcccttaaagaactaaaagtagatctagcatttgatccagcaatcacactactgggtatctacccagaggaaaaaagtcactacaggaaaaaagttagtggcacactcatatttatagcaactcaattcacaaaaatatggaaccagctcaaatgcccatcaatcaatgagtggataaasaaaatgtggcatatatat

SEQ ID NO: 839372 - DNA, 438 bp, Homo sapiens
agcatgtattttgtaatttcaagtcctctgatgatatctttaagcccagatatttcatcagagtttatctttttcatcctagggttctttgttgctttcattattygcttacaaactgtcactctaagaattttgttcatttcttttaagactgttagaaatttatcttcaatttgttgtcagctggcagtttctacattctgtctggaaatttccttagctagaccaatgaattcattaggcacatttcccatttgtcacattgttgcaggaaacagtgctgccagacaatccacctgctttcttttatgccttcagcataaccccaaacttagtggattgaaataaaaataattattttatttatatccgtgacttttccagatcaggaaggggttcagatgagccgatcttatttaagatctctcaggcggtcac

SEQ ID NO: 839373 - DNA, 610 bp, Homo sapiens
cacacacacacattctaaaacccatagcaatgtagtaacctacatttatataagagataacaccgcattactctaaaagaccatttttatgggttttgcgtctcagacttctgcacatcctttagtgggacacccctccctctgtttcagactatcttttccagatgcctgtgtcatgagcagccttggaagaaaggaatagcatcttcctgatgtgcaaaggttgggtttgtctgcagctctggaagacagagatagtatctaccttagcagctaaggcaagcatgctgactgcccaatatagcagagcctccctctggagcaagggtcggcagatcactgccctttacgaaagattcaggtccctaaagcttaggttccccttcccgtaactgagcccactgcatatgcagctgtcaccgaggtctgctcatactgctctgtggcagtgttttgctcaaggcactggcacaaaggtgatggcattctggctgccactgttggagctcgtgataaaccacctgtgtctctaagccaggagtcttgtgtctcctccagcayccctgaaactgtggcaggctaacaggttggtgtccaagcagggaaactc

SEQ ID NO: 839374 - DNA, 417 bp, Homo sapiens
atgagtgttttggctctaacataacacacgcgtcactgttggcatcacacasagccctgcactgttcaattgctaaggcagaagaaaaatcatccaaatctcctttgtatttatttatcaagtgagaattcactattgtcactaatttatgttccagctttagaatggatcagctggagttggtggtccttagtgttttctatcctgctttcaatgcaaatcttctaaagaaataaacaacgcttgaaaaccacaactcctgtttatctctgagaggtattgctttcagaattatttaaggtctggccaccgagtcatcactaaatcagcataacagataaactaatcacatagacaacatctgcagaattcaataagcatgttggtgcctacattatatgctgctgtgcaaagaag

SEQ ID NO: 839375 - DNA, 455 bp, Homo sapiens
ttaagacggccctcaaggggaggcaattctgcaggaatgccctggtaagmaccagttcctccgaacctccgtgaaaagtgtcctacatggtgtctccacatcatatgaccagggcacccccaaagcagaatggccctcaacagcaatgggaacccacacccccagagcccttgcacctgcagaggtcaaaggttacctggtattcaaggccccagttgactgatcaggatgttcccggtaagagtgtcttttctgaccctccccagaactaggttttacacacaaattcaagttttgaagatttatagacgagagatgatataatatctgggccacaacagaaaaaagcataagcagccaggcatggtggctcatgcctttaatcccaacactttgggaggccaaggcgggagaattgcttgagcccaggagtttgagaccagcctgggcaacat

SEQ ID NO: 839376 - DNA, 455 bp, Homo sapiens
ttaagacggccctcaaggggaggcaattctgcaggaatgccctggtaagaaccagttcctccgaacctccgtgaaaagtgtcctacatggtgtctccacatcatatgaccagggcacccccaaagcagaatgrccctcaacagcaatgggaacccacacccccagagcccttgcacctgcagaggtcaaaggttacctggtattcaaggccccagttgactgatcaggatgttcccggtaagagtgtcttttctgaccctccccagaactaggttttacacacaaattcaagttttgaagatttatagacgagagatgatataatatctgggccacaacagaaaaaagcataagcagccaggcatggtggctcatgcctttaatcccaacactttgggaggccaaggcgggagaattgcttgagcccaggagtttgagaccagcctgggcaacat

SEQ ID NO: 839377 - DNA, 617 bp, Homo sapiens
cagaaactgcagcccagagaggttagttacttgcctaaagttacagtcaataaaaggcaaacccaggtaaccctgatctagaatctgtactgttaatcatatttctactgatagwtcaaaaggcatggacccccctcactgaaccccccattttgttttcttttttacagatcatctcatggaacacactttggcaaatgctgttacagaagttccttcatttatttacttacatttatctatgagccagcattgttctgaaagttctaggcattgccaaaggcaagaaatagaaatgagacattatcatttgaaaggaagcaaaattatttttatctataaactggataattatatacctagaagatgcaaatgaatcaagtctaagagctactagtatttattagtaccagtataaaaatttagaaagatggccagttaaaaatgaaatacataaaagcccatagctagaaaccaccaacaaaatatgatatggaaaaaatccttttcataataccaacaaaaatataaaaacttaatacagactttaatataatccttaatactataaaagattataaagcaaggcagaaagtacattattcaatgattaggac

SEQ ID NO: 839378 - DNA, 499 bp, Homo sapiens
agtcactttgcaaaacagcctcgtagtttctcaaaatgttgaccatagcattaccatatgacccaccaactctacccttaggcagatacaccaagagaatcagaaaagcttatgttgacataaaaatttatacgtgactatttatagcagtattagtcacaataggcaaaaagtgaaaaccactcaaatgtccattaactgatgaatggccaaacaaactgttgtgtatccatatactggaatacttttttatatgaccattaaaataaattaagtacagatacatagtacgacatggataaatcttgaaaacattattgtaagtgaaaaaagccacacacaaaaggctacatattgtataattccatctatatcaaatgttcaaaataggcaaatccataaaaacagagcagaatagtggttgycagggactggggaaaagggggaaaatggtgaatgactcccggtggatatggggttttgagagagagagataaaa

SEQ ID NO: 839379 - DNA, 415 bp, Homo sapiens
gtagtcccagctactcaggagactgaggcaggagaattgcttgaacccygggaggcggaggctgcagtgagccaaaatcgcaccacttcattccagcctgggcaacaagagcgaaactccacctcaaacaaaaacaacaacaacgacaacaactaaaaagagatataccatattatccagaaatctgactgctgggtatatatcaaaataaaggaaatcagtatatcagaaagatatctgccttcccatgtcttttgcagcattattcataatagccaggatatgaaatcaacctaagtgcccatgaatgaatgaatgaatggatacagaaaatatggtaatcatacacaatggaatattgttcagccagaaaaagaatggaatcctgtcatttgtagcaacatggatagaactg

SEQ ID NO: 839380 - DNA, 638 bp, Homo sapiens
tacctttttttttcttacttaaaaaaatttttttttaacaagaaaactcagaaaatgcattatttgcggtgcatccattccatcccgccttctggtttgattttttttatcccagacaaagggatacccagaggtagacaaactctggcaaacctctcacctcaacctcactggcttagaaagcagacaggtgttttcaccgggcgtctcttccaccggtggatgtgtgtgtgcaacgccaaacatccaaatgaaaagttgaaaacaaaacccaaatagtttccagatctttctcctatgtagcgcaaaaaccccaggtgtttcccatgatagagatattgtggagttggggagacatggccaacaatccactggagttagaggaagtggagtcaactttaaaaccaatttttgtgtatgttatagtttttattaaaaattcttttctgtattggaaatacgtatcttcggggttctgccttaaataaaatagggtctcttctgtgttctaacaaagcagtaatcartcatgatacgaggcatgtaagcaaatggcctgtgtgccccatagctgtcatcgtttatgtgatcactgtgtatgctgtaatcatcatgaaaaccattggctgtgcagtcaa

SEQ ID NO: 839381 - DNA, 605 bp, Homo sapiens
aacttttgtaggatcctttcacccctttgctcaatacctactgcattagtttgcaagggttttcataacaaagtaccatagactgagtagtctaaacarcataaatttattttctcacagttctagaggctagaattccaagatcaaggtttcagcagcattgattcattctgggagcttagaaagagaatctattccatgctttctctcctagtttctgttggtttgctggaaatatttattttgctgggaaagcatcaccccaatctctgcctccatcttcatatggcattctccctatgtgtgtctacctccaaacttcccctttttataaggataccaatcatattggatttgggcccaccctaatgacctcatcttaattaattggatgggcaatggccttgtttccaaatacggtcttattccaaagtactggagctcaggatgctaaaatatgaattttgggggatacaattcaacctgtaatgcttactaaggcttgcttttcacacagagtaaagagccaacatccttagagaggctgtaaagtgggtgcttcatgcctggaatctccattacctgtctcatctttactctccaac

SEQ ID NO: 839382 - DNA, 464 bp, Homo sapiens
ttcagtcactattatgatggcagaaagatcaagggcttacccaaatacgtaagctttttgtcttttgtttttgcgtaagacatcacaagtaaaggttcattactttttaaaaatcagattgcatgtcctatggcttagaaattggtgaatgaatcagatttcatagcttagtttttctgagctggatgtttggtttatagatcccacctactgcttcatgtaaccattaccgtctgtctccaaccatgctaatatgctcagggcaagggttactcctaatcatattcttcataacctgaggggcttgctcctcagatctaattatatgtcattgttgtttccyaatgacaagactgaggtagaactcacattgggagcagaaatatcagctcaatcattttcttctcattctctcctgctggcatcattcatattatcttaaattagaagtttccttgaaagag

SEQ ID NO: 839383 - DNA, 624 bp, Homo sapiens
tggcccataaaataggacttccaagtgctacatgtatttaaaatttatactgcagaaagttacagtagcarcttgctctcttccccacatcaccctccttccagtgctggaggatgaaagctgctgttgagatctttctggagccatcactggagggtttgctctttcttcaggaggaactgatagaaatagagctgacaaagaggctgcagggattgaaattcgacaatataataagtattttttataaatttttatatgaaaattcctttgtatccatgaatcgttggtgacacaattggagagaagtgaagggatttttcagatatcatatttgaatgtttttcttaatgtgaattattctgcttttccattccattgttgaagtggatcagcctctcctttccataattacttgatgattttaatcacaattgagacctgttaatcagtctctcttttgtgctttgcatccaggtaccactaatttctttgcagaaacactgagttcgataattgtattgcaatttaaaaatttattatgatcaattttttacaggaaactactgtctttcacaataattttagacattaattcttttcatattggcaaaattatttcca

SEQ ID NO: 839384 - DNA, 472 bp, Homo sapiens
cttgggaggctgaggcaggagaatggcgtcaacccaggaggcgaagcttgcagtgagccaagatcgcgccactgcactccagcytgggcgacagtgcgagactccttttcaaaaaaaaaaaaaaaaaaaaaaaagctgcagtgagctgagatcatgccaccgcactccagcctgggcaacagtgttaagaccctgtctcaaaaaacaaaaacaaacgaacaaaaaactcagggaaaaaaatgtcagcaaggccaggcgtggtggcttgctcctgtaatcctaccagtttgggaggcagaggggggcagatcatttgaggacaggagtttgacaccagcctggccaacatggcaaaaccccatctctactaaaaatacaaaaattagctgggcgtagtagctcacacctgtaatcccaggtactcaagtggttggatcctgggtggcagaggttgcagtgagccagatcacgc

SEQ ID NO: 839385 - DNA, 465 bp, Homo sapiens
tttgtattgattacttttcttctttctttgtttttcagaatgtaatgaataagatgcacacaatcagcgtaccctactctgttatgaaaacctgtcctctctcttgggtccaaagagtacatgctcacaaaggtagtcacctgcaacatctgagctttaattatgtgactgtttgaattaagatttcagggatttcagagattttcaaattgcccttgtatgcccctgtcccttaacagattgtagagtttagttactacagaattaggtaccttgcctgttcatctcactgatgtcctctcttaagcattgagatgaattttttccaaatgcgagccttgaattagatttgastgtcttggtattcacagtttccttggctgggacactgtgacctgcctagagggtctcagtgaacaaacaattgtaggtccagtcagttgtctaaatgtgataatttctgcc

SEQ ID NO: 839386 - DNA, 521 bp, Homo sapiens
agcaaaaatcctgttatgaaaggaacttgtttatatctccattaatctatagttgtgaactgagtatagcctcttgcataaggagatrttaatagctaaatctatgagcagttattagtgccaggcatattccacttgttttacatgtattatttctttaatcctgataaacctatgaagtggaaataccattgttatcttcattttaagattaacaaaactaagacatagcaaggtcatttagccaataaatggtagagtcagaatttgaacctaggcagtctgatcccagagtccatgccctttacgactacaatataactgccaaagaatccctgactaccaatactgaactcgtagcaacgttttctttccacttctactactaataaagtgggagcatttctttttacacaattattgatagattctcccattgacgtttttacacttctgatggtgcaactaatggcagaggacacattggggtaaggcagacatttagcattgtttcattttta

SEQ ID NO: 839387 - DNA, 528 bp, Homo sapiens
taatgatacacttatactccatagtcctcttgggtggggccatatgacttgctttgaatagtgggttgagaaccaaagggacagatgtttcttccaggccaagtataattgctgacttcatgcacttytctcttttccactgcacagtgaccagcaactgctgagatggtagctgcttcgtcaggtacatgagtcctcagttgacccacatggatatattgttgtttctgtttctacagcaaaacctagccttccctgacatccaaatctccaaaggacaagttgtatgtgaaaatggtgagcagtacaatttaactagaacatgctaggccatgaggagctagaggagataaaatcagaaagagaactggaggtcagataatacaaacccttgaaatccagactagtctagaagatatattgcaggaggaaggtactacagatggaaaaaaacaattaggttggtaagcccaaagaaatgtgtcaggaaagaaacaaaaaacaaaaaaattctcagttaatatcaga

SEQ ID NO: 839388 - DNA, 528 bp, Homo sapiens
taatgatacacttatactccatagtcctcttgggtggggccatatgacttgctttgaatagtgggttgagaaccaaagggacagatgtttcttccaggccaagtataattgctgacttcatgcacttctytcttttccactgcacagtgaccagcaactgctgagatggtagctgcttcgtcaggtacatgagtcctcagttgacccacatggatatattgttgtttctgtttctacagcaaaacctagccttccctgacatccaaatctccaaaggacaagttgtatgtgaaaatggtgagcagtacaatttaactagaacatgctaggccatgaggagctagaggagataaaatcagaaagagaactggaggtcagataatacaaacccttgaaatccagactagtctagaagatatattgcaggaggaaggtactacagatggaaaaaaacaattaggttggtaagcccaaagaaatgtgtcaggaaagaaacaaaaaacaaaaaaattctcagttaatatcaga

SEQ ID NO: 839389 - DNA, 565 bp, Homo sapiens
tgaagcaaagatttttgtacatgaagatttcttctaaatattaaggaaagccatctgtgtatcagcattcccacaaaatctcaatagtttagctcataaaatctctgctcaaatgtcaatttttaaaaattgactaatcaatgacttgccaatatttccttaggatctagattctcaaggatgtcctctctaatttagcccagccgaccttcattattccttaatgcaaattagcaccctacactttgtacacattcatagactatgatgtcactgggcagaatttagatcatgctataaaactgttcttatgtattcgtccttgtgtttgccttcccaattagattacatgacccgcaagggtaagagcaattccttttatttctttttctattttaccttacctacagcctctcacccaatgtcaagttcaacagacatcaggcctaccaccatcttgtttgcttagggagttagatatggaggtttgacaaggagctgaactcttctattctagttaaatataaygttgaatttcagttatacataaatataaccttgaatt

SEQ ID NO: 839390 - DNA, 607 bp, Homo sapiens
gatctgatcacagcagattccaggatcccctgtccactgtgaacacctgggctgaacccccatgagtacagttgctgggcatcatgattttgcacactgtactgcatgttccacatttggcagtgaaggctgattaaaaatagctgggctaatgaacggtctcagactactgcttggggcggtctgtagggctggctctcatggctgtgccccagaactctaagccaaatattaaaaataataatctcttttttggcaggaaaaaaaagaagcaagacttttggtaatttcagattctaaacccctagaaaggataaggattttctacccctgtaggatattaaaaatgcttgctattatgataattctcaaagaggaattcaaaatttgttttggcaagaacagcattgtcagaaagcctcctaatcagacatgcatatttgaacgtatacattcaggctttgtttgggaaaataccaggaattattattttgcagtttcaaaactgaaattakcttgggtagttttatcaatatttgaagaaaaaatttgatataactgttcgaaatcccagcgaaaactccaagtttgagttccaggaaaggtt

SEQ ID NO: 839391 - DNA, 533 bp, Homo sapiens
ccacactctgtatctagctactctggtggggacttggagaacctttgtgttgacactctgtatctagctcatctagtggggaggtggagaacctttgtgtctagctcagggattgtaaacgcgccartcagcgccctgtcaaagcagaccactcggctctctgtaaaatgaaccaatcagcaggatgtgggtggggccagataagagaataaatgcaggctgcaggcaccagcagtggcaacccgctggggtccccttccactctgtggaagctttgttgtttcgttctttgcaataaatcttgctgctgctcgctctttgggtccacactgtgtttatgagctgtaacactcaccgcgaaggtctgcagcttcactcctgaagccagcgagaccacgaacccaccgggaggaacgaacaactccagacgcgccaccttaagagctgtaacactcactgcggaggtcccagcttcacacctgagccagcgagaccacgaaccccaccagaaggaagaaactcccaacacatcc

SEQ ID NO: 839392 - DNA, 592 bp, Homo sapiens
caaaacaagaaacaaaagcccccagctagcccccaactacctcccggccccagacttgacgcagccaacagcgtccctgcagcatgctcccggccacccygccgcaggggtgagggaggctcgtacctggaggatctggctggcctctgtactatgaggctctccagggggacgtgggaggtgtcttctgagctgtgactcaggttccagagtcttgttttttcaccaaatgcaggacaggagaggcaacctgtcaacaccacccctggcctgcaggctcctcactttgtccccatgtcacatccctgcactttccagcctccagctcttaccagtgcccttgaccccatctggaatacccttcttctccccgctgtcccccacccccaaccctaggcctcacatcagctctggggcttagacatgacagaggaggaaactgagcctcagggacattctgatgttggtgttttttatgagaatgtgttctgtgtgatatattgtgtcacttcttaaaaggcaaaatgaaacaggttgcctgggttacagtggatctggaatggaaacaaaggtctgcaggactccaaatgtc

SEQ ID NO: 839393 - DNA, 585 bp, Homo sapiens
tagatgagcagttgtataccaattcatgggctatagccagtggtttggctggatggtcagggacatgaaaggaacatgattagagaactggtgacaaagcaatttgggaaggagttactggctagacctctctgagtgggcaaaagacatgaagatatttgtgtcccatgtgaatgctcaccaaagggtcacttcagcacaggaaaactttggtaatcaagtggctagaatgacctgttctgtggataccaattggcttcttaccctagtcacccctgtcaatggccaatgggctcacgaacaaagtggccacggtgggagggatgaacaatatggattgggctcagcatcatggactttcacccaccaagatgggcctggctacagccactgctgagtgtccaatatgccagcagcagagaccagcactgagcccctgatatggcatcattccccagagtagtcaaccagttacatgggacacttccatcatggaaggggcagcaytttatctttactggaatagacgctctggatatggatgtgccttctctgcacacagtgcttctgccaaaactaccatcc

SEQ ID NO: 839394 - DNA, 548 bp, Homo sapiens
ctgtagcctcagcttcatcaagatctgccttgttcccataccaaattccaggatcctgttccttctcagtcaaggactcacttttgtatttaattcagcccttggcagatggagactygggggttggttttcagaaatctttgccatgtggctacaggagatgagggtttatttcaggacagacatagaagcgttcaggttttttatgtggagtatgacctgagaatttgaaggcttgagctcatccttttcttttcctactactcagtgaagttaggaacaatcagccaatcttattatattccgtagtttgactaaaagcaaatacttggacacccagaaccttgcctccagtagatattttattagaagtatccagtggccatgccttgcatatctcttaccatatcataatgtggactaccagtgccctctttaccactgaaaatagaggcattggtgcctttaaaactaaccagattagaaaaccaactccaaaaactcattcttatgattctgtttctctataaccacttccactaccaaaa

SEQ ID NO: 839395 - DNA, 548 bp, Homo sapiens
ctgtagcctcagcttcatcaagatctgccttgttcccataccaaattccaggatcctgttccttctcagtcaaggactcacttttgtatttaattcagcccttggcagatggagacttgggggttggttttcagaaatctttgccatgtggctacaggagatgagggtttatttcaggacagacatagaagcgttcaggttttttatgtggagtatgacctgagaatttgaaggcttgagctcatccttttcttttcctactactcagtgaagttaggaacaatcagccaatcttattatattccgtagtttgactaaaagcaaatacttggacacccagaaccttgcctccagtagatattttattagaagtatccagtggccatgccttgcatatctcttaccatatcataatgtggactaccagtgccctctttaccactgaaaatagaggcattggtgccttyaaaactaaccagattagaaaaccaactccaaaaactcattcttatgattctgtttctctataaccacttccactaccaaaa

SEQ ID NO: 839396 - DNA, 645 bp, Homo sapiens
ttgggaggctgaggcgggtggatcgtctgagctcaggagttctcgrccagcctgggcaacacagtgaaaccccgtctctgctgaaaaatacaaaaaattagccgggcgtggcagcatgtgcctgtaatcccggctactggggaggcggagacagaagaatcacttgaacccgggaggcaggggttgcagtgagccgagatcgcaccattgcactccagcctgggtggcagagcgcgtctccatctcaaaaacaaacaaaccaacaaaaaaaaaccataaacatttagtctgggtgcagtggctcacgcctgtaatcccagcactttgagaggccaagcctggcagattacttgacatcaggagttaagaccagcctggccaacatggcaaaaccctgactcgcctaaaaatacaaaaatgagctgggcatgggggtgcatgcctttaatgctggctactcgggaggctgaggcacgataattgcttggacctgggaggtataggttgcagtgagctgagattgtgccagtgcatttcagcctgggtgacagagcaagactgtctcaaaaaaataaaaataaacatttacacaagatattttagttttctcttgcttcataaaaaaaaaatcactctaaaatttag

SEQ ID NO: 839397 - DNA, 568 bp, Homo sapiens
gctccattaggattctactcttctattgattatttgtagcatgcttattcctaagaattgtgtgactrgggggaaagagtctgaatagaggctcacatattttattttttattataaaccaactagagattactaaataaaatgttatattttcccattttgacagatatatctttataacaacctggatggccaggtacaatgttagaacttttggagtcctcaggaatatgttggcatggagagaagtggctccagtctatagcctctcttccacccacttctatcctgtattgtgagaggtcttacatgcaagtttttgaacactctagcctacatgtccaggatctgtacagtttcccatcagacattgacacctggaccacctattccttcctaaatgtatgcacattggtggcacaatctgctctctggggatggaactggggaagatgacattacagtttctgggtaaagacttggggttatttgcaaagggaattctgggatcacagggtctggaaggggagagtgcagaatctaaatgggcctttttcttcactccaca

SEQ ID NO: 839398 - DNA, 494 bp, Homo sapiens
aagctttaccaggtttccgggtatttcttaatccagtcaaggtgacatctaaagttaaccatcactgtaggttactatgattctttctattttgaagataagtaaactggacttaaaaatattaagtaatataccacaaggagggcatacaataatttatagagttcagatttgaagctaggtagtataactgctgattttctttttatcacaatgctatagggattctgagaagaaaggggatcacatgacactaaacttttgtcatcctctgctatgtgtgaatgagcaggggatgcataaaattattcatgtggtccaggtgtcacctcttcaaggcagtttttttttttttttagctgaatgagactttgcttagtgtagattttttacttaggaaatgaaatgattctaaaagagatacagattgtataattcgattaaattatttcttayattgaaaagtatgctatcaggctacttaagcttatttc

SEQ ID NO: 839399 - DNA, 460 bp, Homo sapiens
tatataaataaaacatatttgagtaaaaatatcacacatataggtttttcagtcacctataaggttcctaatagtgaagtttaaattgaacattgtcttgataattttatttaaaataataaacagaatattcatcgttgagctcacaatataatattttatactgtagataccagaacctctataactacttgtgaaaagaatactgaataagtgtatgaacaaattcgtcactcaaaacaacttctaatgtaggaaaagaaatttcaaacctatttatttttagcagccacattaatagtgaattattataaacacaccatttaaaatgcatcaaaaactttctagttggtaaatattaaaaatcagtgtacatgatgctaaatggtgggcacaatctttcaaaatggaatatgaatctcctcccagaatattamaacatgttttttcgatattattg

SEQ ID NO: 839400 - DNA, 621 bp, Homo sapiens
agcctcaagtgatcctctcacctcagcctcccaaagtgctggaataatagacaggagccaccrtacccagccttaagtaattcttttgatgctagtgtaaatcgaattgttttcttaattttatttttggaatttcattgcttgtataaagaaatacagtttatttgttatattgtcttatgttctgcaatcttgctgaacttgtgctaattctaatagtttttttgtgtatttcgtaaaatgtttatataagatcatttcatctacagatagagaaacttttcttcttcattccaatctgaatgtttaaaccgaacaccttttaaaaataaacttaatggctctaattagaacctccagtacaatatttaatagaagcagaaggagtaaacgtatttgccttgttcctgatcgggagtggggaagcattaagtctttcatcattaagtatgatgttagctgtgggttttttatagatgtccgtttcaggttgttagtttcactctaatcctagttcatttaatttttttataatgatgttggatttttcttaaatgctctttctgtaccaattgagatgaccatattgattttttattaatgtgatgaattacattcatt

SEQ ID NO: 839401 - DNA, 630 bp, Homo sapiens
ttaaaagctttttttttaaatcataaaatttgagcttttattgtcagtgtctctttatcttcataattccagtgcttaagatagttttagagtaatggtaaaaactccatgcacatgtaaaggaagcaagaaagaaagaagggaaggatggaagaagggaggaggtgacatggaagaataaaagaaaagagcatggtggaataaccctgagctccttcctaaaaccctcagttgtggttcaaattgtgtcaattagccatataacctgggtaaattatccaaaccttcttagtctttcatctctaaagtggaggaagtcttggagtccacagcatctccaagactccttccagttttaactctactgtaagaaatctttattggccaggagcaatggctcacacctctactccatatactttgggaggctgaggtgggagcatctctggagccctggaggcagaggctgcagtgagccaaggtctaagattgttccactgcagtcccacatgggygacaaagtgaaacactgtctcaaaaaagaagaaaagaaatttttctcatcatagaaaaatatccatagtagtttaatgtttgctcatctaaataatattttaatcatgcagaata

SEQ ID NO: 839402 - DNA, 630 bp, Homo sapiens
ttaaaagctttttttttaaatcataaaatttgagcttttattgtcagtgtctctttatcttcataattccagtgcttaagatagttttagagtaatggtaaaaactccatgcacatgtaaaggaagcaagaaagaaagaagggaaggatggaagaagggaggaggtgacatggaagaataaaagaaaagagcatggtggaataaccctgagctccttcctaaaaccctcagttgtggttcaaattgtgtcaattagccatataacctgggtaaattatccaaaccttcttagtctttcatctctaaagtggaggaagtcttggagtccacagcatctccaagactccttccagttttaactctactgtaagaaatctttattggccaggagcaatggctcacacctctactccatatactttgggaggctgaggtgggagcatctctggagccctggaggcagaggctgcagtgagccaaggtctaagattgttccactgcagtcccacatgggtgacaaagtgaaacactgtctcaaaaaagaagaaaagaaatttttctcatcatagaaaaatawccatagtagtttaatgtttgctcatctaaataatattttaatcatgcagaata

SEQ ID NO: 839403 - DNA, 638 bp, Homo sapiens
attactttattcatttacacttatttccaagtttccactattataaaaaaaaattccccattgaacatactttgtatatatatcgttgtgtacttttgtgtattgttttgtggagcagagtgaaattgctggggcagtgggcttgtacatttaaaaagcagatgaatgccaccagattgtcttctaaaattgtatttatttatgtccccatgaacaaagaatgagaacatccttctacccaaacgcttgccatctgtagttaccatccatctttaaaatcttcccaatctgataaaagaaaatgatattttgttattttaatttgcttgttcattcagaaggctgaatatattttcatatgtttattagtagtggttctcaacaggggatgattttatacccaggggacatttggcaatgtctggagacattttttgattgttacaactggctggaggggctgatggtagtgatgatggggatggtgctttcaatagtgcacagactcaaaaatcctgttttattagctatttgtgttttttctgtgaattgcttgttgattttttttttggttgggaagtcttcatattttagagatgttttcytttgtttatagtatgtattaccaacattttccc

SEQ ID NO: 839404 - DNA, 590 bp, Homo sapiens
tatagtcttcgtcatgtgatgagttaaattatagataagcaaaaatagttatactaagacaaattttaaaaccaaaacaaaatatatgtaattattatataattatttaattccgtaaatggcttttctatgcctaaaataagtgatgtaattttatgggttagtcagatatacactaacacatttgaaaaataggcaaaggatatggtaattggcagaaaattatgctacgatactctttaattttaacaccaatcagtggagtattttaatgagtctaagataccctttttcaaggtttctggaaaagtcacatggtaacatttgctaggatattatgaaccttattagaaagcaaatttcagtagattttgagtatttggagtattgactctcaatggtggtttttcttgactttcatgtcttttttgagaaaatcattgaatatgtacataaatattttcttcccaggttattacggtagtkttatttttaagagggaaaattggaatcactgacctttgaaataatgtaagcactaaaggaattatggtgtatccatgaaatggagtactacgtactctataatg

SEQ ID NO: 839405 - DNA, 563 bp, Homo sapiens
  misc_feature 32, 35: n = A,T,C or G
aatggaagaagagccccacatggctgtgcttnctncatcaaaataaacaattttcaatattaatggccaattatrtaaaatactttgttgaaatttagctagtaaatttccatcttcagatgaataagtcattcctataaactaagaggtgtagcgttttattttttaacaaaaggattttaaaatcaatttaaagattacatttgaaagatcttaaagtaagttataacattatgttccaagttttacaaaatatgccaatatatttttgtacaattttcaatgtatatagaaactagttttacaaatacattggtttttggcaagaaaatcacattgtaatgaaaagaattacaaacattcaatatgaaatgttttctccataaccacaggtccttcaaaaagcagttaccttctcactcattattagtactactactttaaaaagacagatcgaatatgttatttttcaaaaatatacattagagcgcatagtatggacagtcacctgtcataacagaaaaggtgagtaaaattagaaccttgtcattctgtaaaagaaa

SEQ ID NO: 839406 - DNA, 582 bp, Homo sapiens
tcaagctcccttgaatccagaacaagactccagctcctatcttcctattcatgtgtggcatgaacttttaccctggagctccatgacatcccatctctcttatcgctaaatgaatwctaataaaaacccccagtaagtccatggctggaaattaaaataactaacaaaacagccattgattacatgctctattgtgtcttttgttgcatgttgtatgcctgtcttcctatctagtgagactattagctccttaacagcagaaatatctatcttctccaggaagctaacacagacatctaacacattgagatcctcaggaagaacataaattggattgacagcagtcccaaaattctctctaaaatcaattttaaaattataccaaaatgtatttgttatgtgctattttcaaaaattacagctgaattctttctttcaggtgtgggatgtcctacaagatggcttccttgacagcagaaagaacagaatagtttaactaatctattattttctccagcatttgacttacctccactagagcagagactaggccagtaacttccttagaccacttctacgtgt

SEQ ID NO: 839407 - DNA, 636 bp, Homo sapiens
gatggagtcttgctctgttgccaaggctagagtgcagtggtgtgatcttggttcactgcagcctccacctcctgggttcaagcgattctcctgcctcagcctcctgagcagctgggactagaggcatgcaccaccacccccagctaatttttgtatttttagtagagggggtttccctatgttggccagtctggtctcgaactcctgaccttgtgatctgcctgcctcggcctcccaaagtgctgggattacggtgtgagccactgtgcccggtctcatttttcacttaagccaaaagatttgttttccttttaaatttagctctcaggttgttttttagaaaagagccttcatggtcctttatattccttttgattcctgctggtagaaaccaaatacgtcttctccttgaataaaaacaaaatgaaacaaaataaaatacctagaaccttattttaaaaattcagaaaatacaaatatctaattcaaatccatctgtcaaactctaagktttatgtgtttttttaattgacatttttcttaatacattttaataaagcttcggagaaacaatagggcaatagtagaaaagcagagctgccaggccaaatagtgaggaggagatacatgctggta

SEQ ID NO: 839408 - DNA, 506 bp, Homo sapiens
gattatcccaaaggagtaaatactgcatagttttgacagggccagatttsatggtttacattttctttataataatagcaatcattacaacaaatttcaacacaaacataaaagcatgattagctgtaagctagtaagagaaggaggtggaggaagagaggaaatggtccaagtaccgagaagagcccaggaagaagcctcaacgtagaaacaggaacaagttgggaatgggttgcaggatcacaccttgtaaaggagctctgtgagttggcttgggcctgaaagtagtgatatgtcattgaccgctcttaagggaggcagacgcctgatgagatgtgaattttagaaataattctaactggattgaagacggcagaaagtaagaaaaggagaatggtaggtaggctgctacaggagttcagttaaaaatgctgaaggccgtggcagggcatagtggggatggggcagcagaaaaacatgtgaggaccattttggagggaaagcct

SEQ ID NO: 839409 - DNA, 505 bp, Homo sapiens
tatagcttatggccaattgaggatctgcaaaacagccgtttccacggtgtgatacagttcaattgacgcyattggcattccacagcacacagaaacatatcaaagacatttgttatgctttgagcatgaaagcgaagtaaaacacagataatttgagaaactagaaaacttatcagggatgggatccacgagctgcctgtcagttggcagacacagtgccaccgagtgcttggcaggacagtgcatgcatgcaaatgtgggctgtgcatggcgacagcaggttttcctccaactggaggatgttgctattcaagggggctgatgaatgaaaccagaattgcatcaactgcagtggaaaggcggacaggagcacgagacagctgcgcgggtgaccgctttacaactagaagctatcaatcagaaggcgtgaaaggcccaaatccagggaaaccaggatcccacccccttgataccaatcctaatagagtgccagtcaccgatgcaa

SEQ ID NO: 839410 - DNA, 611 bp, Homo sapiens
atcttgtattttaaagccatctaaatcaggtatgagtgagacttggggtataatccatcttggagcaaagtcattattcatttgtgaatctgtgaaactaaaaaacaagttatcttcttcaaaaatgccatrgtggaacaaacattgaataggcattctaattccaaaaggaaaaaaaaaagggaagggataaagaggttactggtcccaagcaagtttgaaatccagcaaggaatgttccactaggttacaagacatgagaataatcctctgtggctcaaggctctaccctctgggctcacagcagctctgtcctctgcctctgtgcctgctgtctcttcctcagccccactggcttctgctccttccatgtcagactcggcctctgcactggctacatcagacccacaaacccaggtggcctctgttcacagcagttctgtcattggagttattctttctgtttcttgaaggacagaataggtttgtagccaagtaattctgttagttcactcctgtttgtacaatcctagaaatctgacagccttctgtatttcatctcttctctgtctccttcagctcaagctggcagtatttctgctgatacaaca

SEQ ID NO: 839411 - DNA, 597 bp, Homo sapiens
  misc_feature 60: n = A,T,C or G
gtctgtgtgggtatctgccctccctcctcccctgcttttaatagtagaaattaggtatanaagctcagtgtttatattaacttcatcattacctctcagaggagtcagatgatcagtcaactracatataaagggagcagaatgtctttggggacaagatataatattaattactggggtgtacttcctgttccctttgtaatatccatatgcagcccttgtcaagtgcctctactggagcctggagggatgctcatcactctgcaagcaggaaaaagctgagattaccatctacatagtcagaaaagcctctcagcagcagaagggctatttgtgtgtgcagtttcctgcacatgggctgtgggttacctgtgagcatcagccagttaaggccacatgccagtgaggagactcaagtcttcacttccttccacagatgggtatagacacagatctgaaacacaggggatttgaagcatgcagggctgtaccaacaaagataacggtccctcacaaataactgagccctctccaggcagctcaagccaacaatacgttttatgtgtctttcatttttataaggcactggcgagttct

SEQ ID NO: 839412 - DNA, 629 bp, Homo sapiens
tccataaaagaatgaactttcacttatagttataaaatttttttttaatattttacattttgattcatgagaaaacattagttcacattagttcaattctattgtctgagttttccatacctgctacaatataaacctagtttttaaaacgacacttagagatttgcatgggaatatattaatgtcttcttcctcaggcctttcctaaacagattttgttttctttagctttcaacttttacttttaggaagttttcacaaccatcattggtacactattcattgaatgacaatcctcccattatcaaactgtttattttgaatctccaatattctttagtggccttccgtggattgctttgcctgtattataggcttctactctagatatatatttactaatgtgctaaatggcacattatttttcagaattttcctaagccatcaaatctgttagcattcctcagggtcacacttgatttttctaccttctgccatctcttttctaatrtggcaccataaaatataagctgcaaactactctattccttgcactaattaaaaatttattgtaaatcccacatcttctaagagtctcccaccactccccttcaccccacacgtaatca

SEQ ID NO: 839413 - DNA, 635 bp, Homo sapiens
tataaatcaagttgggaagaaacaactgagaatacacattttctaatttagcttgtcatatgcaaaaattcacatwtgttcaaagaaaccttacaaatgataatatcccaccttataaatgatatccctataaaataacacctggaaaacatattttaatgttttcactgaaaactcaccaaatgtttattttcagtttccaaatcttaaagtactaatctatggccatttattatttgtacaatttgaatgtgaaggccagctacttttgcctgaggccacatgggcagtgcatacagttgtgagtgtgcagagattcagtatcttgattcattgacctatgaagtaagaaatccttgattttctttctgtaagtagaggcaaaggggagaaagagaaaacacgagagccagaacaaaaataatgtctttcggaatttctttttccccatggatttctaaattctctgaaatggatatcttccatgtgttcttaaaaaaggatttttgttagccagagaaactttccatcagctttcttgcttgccagcattattaagacctcctgacatgatgtgtgttagcccaataaaaacaaactctacttctaaaagtttagctgtatgtagaaaagca

SEQ ID NO: 839414 - DNA, 523 bp, Homo sapiens
ttaagttataactaaagaattcagagaagcctgaaatataggtgaataaaaataaatgtttaaataattcaattttgattgactttggagttaatactcatgcactaaagaggtccaatatatacctttaatgatacatatgatagatatacttatgacatttacttatgtcagtataatgatatatatacttatatcattaaaagtatatattggacctctgatatgagtgtattctattactaaaaattacttcccataagtaccaatcctgtacttactatttactatgtcctgacacatcacagagaaaatctctagtagtccttgtatctctgaaaaattttcaggtgatcagctgtaatgtggcagggtctctctcagcctgtcaggttgcagcaggcaaagtccaacatttgtattttatgttctctgccaccctaggmtaaattattcatgtgaattagtcctaaagatttaccactgaaacacatgaacaaagtcactatatgtattagtcagg

SEQ ID NO: 839415 - DNA, 605 bp, Homo sapiens
aatcagtccataacagatgctacaggaaaatgaagagttaacagtctcaagcttctaccctaatgctttaaggatttaagcagcaaggctccawgaggagttttgtttttaattaattcaaagaatcatctgataaagtacatgatcagtgatagtaaagggtggttttcacaggatcttaaactttttctctcgtcaggttccttactggagtttggcacgagggaagtgaattcactctgggtgggaacaaaaaagccatttaggagccctgccatcccccctgcagcctctctgatctctgatagcagctcaaggagttggctgcccccaactgtcccctctacctcctaatattagaaatgaagctgagatggaaattatttccttttttgaaatctcacttctgtaggtgatctgccaccttgcaaagagctctctattgttacacaacatcattaatgagagcagccttgtggaggattaaactgttatcgatctttcatttttaagaacgctttagatttgcaacatagaatagtaagtttgcgacattatagaaaccaaataaaagattagtgtgattaaatgaaaaccaccaccaa

SEQ ID NO: 839416 - DNA, 541 bp, Homo sapiens
agctgcatgaataaatacacaaacccaaaattatagtcaatccatagaaatgcatttaaggaactgagaaactgccaaaagtggaagtactattattttatgatctcacactactgtaggatagattctgytctgctacatacttgtcaacatttagtatagtcttttaaagagctggggtatgtgtcccctctaaatctcatgttgaaatgtaatccccagtgttggaggtggggcctcgtggaaggtgattggatcatgggggcagataacttcacaggttggtgctgagttctctcaagatccggttttttaaaagtgtgtggcacctctcccaacccccttgctcctgctctgccatatgagatgcctgctccttttcatcgtccaccatgattataagctgagtcctccccagaagctgagcagatgccagtgccatgcttcttgtacagcctgtagaaccatgagccaattaaacctcttcattataaattatccagtctcaggtatttccttatagcaatgcaagaacagacta

SEQ ID NO: 839417 - DNA, 422 bp, Homo sapiens
taataaggtcatcctggattaccatggtgggccctaaatccaagaataagtgtctttataaaagacatccaggaaagatttgactggcagaagaggcaaaggcaatcaggtcatggaagcagagactggagtgatgaagctatcagtgaccagaagctggaggagtcaaaagttggaatccccactagagcctcttggggaatcagggccctgctgacacactgacttcaaaccactggcttcagaacaggcagagattaaatttctgttgttttaagtcacccatttgtagacatttgttacmtcagcctcaggaaactaatacaggtggtaaaccattttacaactgatacactgaatgacgattaataaaagtactaagagttgtagggacaagagaacaaggaagaatgtaaaattaa

SEQ ID NO: 839418 - DNA, 578 bp, Homo sapiens; identical to SEQ ID NO: 829702

SEQ ID NO: 839419 - DNA, 557 bp, Homo sapiens
ttcttctattctttctcaattcycccccccacagatttgggagcctctttccattgctcccttttctttctaagaggaacggaatttaatggaatgaacgacaacccttttatttatttatttatttatttttttgcagctgttcccctcatctttctttttactatccattctgaattcctcacatcttcagctatcatgtctgctggtctttgtggtttacgacccacaccttcatacctgaagggacagaacctttgataggcacactgttctgtttggggttgtggcacatgtccatttacaattacagtggaacaagggagtactagggtgctcccatgaggatcatctgggttgcacaaatatttctctttgtttctattttgtaaaagagtccctacccaccactgattggggtacattatccctgacagtatggtgatttctgttttttcatgcttgcccttgggtacaatgtgccttaacttgtagttcactgagactctggctgtgtctcttggtagaagtttgtcccttttaggaatcagaaccta

SEQ ID NO: 839420 - DNA, 609 bp, Homo sapiens
aagaattcagcagtggtgctatccggtactgatcttcttcaatgggagatttttaaattatttattaaatatcattacttattattggyctgtttaggttttctatttctttccatttcaattttgaaaggtaatatttgtccagagttttatttatttttttttaggttttccattttttggtgtatagttgtttgtacatgggttaatgatcttttgtatttctctggtataagttgtaatgtcttcttttttttgtttctgattttatttatttaggtcttctttctctttttagttagtctagctaggagtttaccaactttatctttttaaaagagtaactgttgcattgatgttttgtatttttttttagtctgtatcttgtttagttttgctctgatttttattatttctttcctttgacaaattttaggtttggtttgttcttgcttttcaagatccttgaagtgcatcatttgattgtttacttgaaacctattttatatataggcacttgtctctataaagtttgcttttagaactgcttctgctatcacatatgttttgatatgttgtattttggtttttattgtttcaagaattact

SEQ ID NO: 839421 - DNA, 508 bp, Homo sapiens
ggagctccagtacatctggaagcagacttttcagtggaaaccatacaggctaagaaagagaggcatgaaatattaaaagtgytgaaggaaaacaacttttaccctagaataatatatctggtgaaaatattcatcaaacatgaaagagaaacactcttcccaaacaaacaaaaactgatagattttatcaataccagaccagtctgacaagaaatgctaaagggtgtacttcaatcagaaagaaaataacattaatgaacaataaataatcacctgaaggtacaaaacttcctggtaatagtaagtacatagaaaaacacagaatattttgacactataactatggtgtgtaaactattcttatcctaagtagaaagaataattgatgaaccaatcaaaagtaataactacaacaacttttcaggacataatcagtacaataatacaaaaattaaaaacaaccaaaattaaaaggtggagggatgaagttaaggtgaatttttgttag

SEQ ID NO: 839422 - DNA, 508 bp, Homo sapiens
ggagctccagtacatctggaagcagacttttcagtggaaaccatacaggctaagaaagagaggcatgaaatattaaaagtgctgaaggaaaacaacttttaccctagaataatatatctggtgaaaatattcatcaaacatgaaagagaaacactcttcccaaacaaacaaaaactgatagattttatcaataccagaccagtctgacaagaaatgctaaagggtgtacttcaatcagaaagaaaataacattaatgaacaataaataatcacctgaaggtacaaaacttcctggtaatagtaagtacatagaaaaacacagaatattttgacactataactatggtgtgtaaactattcttatcctaagtagaargaataattgatgaaccaatcaaaagtaataactacaacaacttttcaggacataatcagtacaataatacaaaaattaaaaacaaccaaaattaaaaggtggagggatgaagttaaggtgaatttttgttag

SEQ ID NO: 839423 - DNA, 497 bp, Homo sapiens
aggctgtttgccaagcctcaggatcctcatctgcaaactaatgatcctatgatactgttgtagaggcactaacagtgcaaagcagataagcagctataagggatgtccgtgtctcattccctccaagcccgtctatatagccagccaccacaggcaactttctacaacccagactgatcagctcattccctgctaaaagccttccacagcaacctggatcaaggacacatttcttagaagctatattggactttgtgttggatgccacgaaaacaatggtggcctgaccgtagggcactcacatccagctaagggaacaaccacatcaagagttagtgtcaggggactcaactgtgaaccagagagatwtggtgtcagccaagatggggcttacagtacagtagagaagccagtaagtagacagtgttagtgcagtatgtccaatagggaccataacctattggttatggcaatagcatagcattgcaggccaccac

SEQ ID NO: 839424 - DNA, 652 bp, Homo sapiens
attgtaaattgtaaatttacagttaatttwcaattaaataaatacacagatgtaagaaataacatggaggggtcgcatgtactctttatgcagttttcccccaataataacatagaatatactctaaaattaataaatataataaataaaataataaaacataaaatatactacaaaattacagcaggatattgacattgatgcaatccatggatttctttttttttttttttttttttgaaacagagtctcattctcaatggctccatctcggcccactgcaacctgcacctcctgggttcaagccactctcctgcctcagcttcctgagtagctgggactacagggtgcccgccaccacgcccagctaattttttttatttttagtagagatggggttttactgtgttagccaagatggtctcgatttcctgacctcatgatctgcccgcctcggcctcccaaagtgctggagttacaggactgagccaccacgcccagccttaatctatggatcttacccagatttttccagttgtgtgtatgtgtgtatgtttagttctatgctatttatcatgggtaagtttgtgtatctactgctacaataatgatacagaacagttctgtcaccacaaggatccctggtactgcc

SEQ ID NO: 839425 - DNA, 516 bp, Homo sapiens
tttaccaaagccttgagctaattggtacataaacttgtccccccaagacaagaatcttgacttgctttcatttccatctctcttgacttctaactcttatattatgatcatctgatattttcattccagattgctatttaaaaaaaggaataagtttaactggcttttttgttcttctgcaatacattctcagaaaatccaagtttcgaatcccctactttattctttaatatttattctactctatggcttatattgaagtttcatttgaatgatcaatatcttgaatttacaaatctctagtttattctgtttcatggaaacactgtctttttgcattgctctgaagacatcagtcttgcttattcagaagccttctgttggccttgttactgcaccctctggtattagttcttttgattgcggttgctgcctctctgccctggtgttgatgctcctcctctggtgggtgattcttgggggtctactcmtcatctgtctgtcctattgactgag

SEQ ID NO: 839426 - DNA, 546 bp, Homo sapiens
ttcagcgctgtgcaaccatcaccacagkcagtgtcagaacattctcatcattcaacaaagaaacctcatattctttaattatcaccctctgcagtctgcccacccccacccctaacccctggcaactacaatctatttcctgaccctagggatctgcctatttcatataaatggaatcatacaatatgtggttttttgtgtcttgcttctttcacttagcatcatgttttcaaggttcatccacctggagcatggaggtacttcattcttttttattgccaaatagtattccgaagctgtatgactagaccacattttatttatccattgatcagttgatggacttggattgtttctactttttagctcgtgaataattctgttatgaacatttgcatgttagattttgtgtgttttcatttctcttgtggacatacctaggagtagaattgctaagtcatatggttactcagtctttaaccttttgagaaccgggcatggtggcacaagcctataatcccagcactgggaggtcaaggcgagagg

SEQ ID NO: 839427 - DNA, 604 bp, Homo sapiens
ggagaggaggctgctgtttagtaatatgctctcacaaaaattaacacaaatttctcctctcagaacatttctgaaagtatttttaaacctggagatcctttcccctttctaakaaatcttccttttcctttttgctatccttgcattgcccaaaacagacttgaaaaagaactaccagtagccctgggatagacagccactgttgaaaaagacaaatgaaggaacagggatggagctaagtaaatcaagaacgatccctgacctcagagcatcctcagtctagtgagaatggcatgcaaacaacagcctaacttataagtgctttacttgagacatatgcaagttactatggaatgcaaaggagtgtctgacgtctttcctggggagtaagaggaggcttcacagaaaataaggatgagtcggagctcacctggcagggagggggaagatcattccagtcagagagaacatcatgttcaaagccacagaactggttctttaagaaagcaggtaagtaggtggaaattaagagtgtatatggaccgggcatgatggttcacgcctgtaatcccagcattttgggaggcggaggcaggcggatcac

SEQ ID NO: 839428 - DNA, 624 bp, Homo sapiens
gtgtgtgtgtatatatacacatatatataaatatatatgtatgtatatatatatgatacatcgatataaaagcatgtgtatatatatgtatgtatatatatacttatacatataaatatacgtgtgtgtgtrtatatatatatatatatatataggctcaaaaagaccttgagcccagctcatttaactccccatttcatagatgaggaagctaaggatgacaaggaggaagagacttagttgcccccaagccacactgtctcaactgcagaactgacaccagataagaccccctttccagtgctctttccctacccagaaagccacttgccccctattaactcttctccattacagtgaagagaacaaacagcgtgaacagaaggaccctgggctaagagccaagccactgtcaccctagacagccatcccagagacacctcacacccacctccaagcctcagccccctctgtgaagtggggtcgtgccacctacctccaccgtggctgggctccctcaggaacacagggacagtgcctgcagggtgacaggcacacagcagggcctcacaaaatcagtcactttcccttttttttccccacaccactggttgtgttttaggt

SEQ ID NO: 839429 - DNA, 515 bp, Homo sapiens
gccactgtactccagacctcaraatggtaaatccactgacagcttgcaccatgtgcctggaaaagccacaggcactgaatgccagcacatgaaagcagccaggaggggggctgtaccctgcaaagccacagaggtggagctgcccaaggccatcaaagcccatctcttgcatcagcatgacctggatgtgagacatggcatcaaaggagatcattttgaaactttaaggtttgatgactgccttattggacttgggacttgcatgaggcctgtagtccatatgttttggccaatttctcccatttgcaatgggtgtatttacccaatgcctgtatctccattgtatctaggtagtaactaacttgattttgatttcacaggctcataaacagaagagacttgccttatctcagatgtgactttgaacgtggacttttgggttaatcccggagtgaattaagactttgggggatggttgaaaaggcataattgtgttttgaaatgtgaggacacga

SEQ ID NO: 839430 - DNA, 515 bp, Homo sapiens
gccactgtactccagacctcagaatggtaaatccactgacagcttgcaccatgtgcctggaaaagccacaggcactgaatgccagcacatgaaagcagccaggaggggggctgtaccctgcaaagccacagaggtggagctgcccaaggccatcaaagcccatctcttgcatcagcatgacctggatgtgagacatggcatcaaaggagatcattttgaaactttaaggtttgatgactgccttattggacttgggacttgcatgaggcctgtagtccatatgttttggccaatttctcccatttgcaatgggtgtatttacccaatgcctgtatctccattgtatctaggtagtaactaacttgattttgatttcacaggctcataaacagaagagrcttgccttatctcagatgtgactttgaacgtggacttttgggttaatcccggagtgaattaagactttgggggatggttgaaaaggcataattgtgttttgaaatgtgaggacacga

SEQ ID NO: 839431 - DNA, 515 bp, Homo sapiens
gccactgtactccagacctcagaatggtaaatccactgacagcttgcaccatgtgcctggaaaagccacaggcactgaatgccagcacatgaaagcagccaggaggggggctgtaccctgcaaagccacagaggtggagctgcccaaggccatcaaagcccatctcttgcatcagcatgacctggatgtgagacatggcatcaaaggagatcattttgaaactttaaggtttgatgactgccttattggacttgggacttgcatgaggcctgtagtccatatgttttggccaatttctcccatttgcaatgggtgtatttacccaatgcctgtatctccattgtatctaggtagtaactaacttgattttgatttcacaggctcataaacagaagagacttgccttatctcagatgtgactttgaacgtggacttttgggttaatsccggagtgaattaagactttgggggatggttgaaaaggcataattgtgttttgaaatgtgaggacacga

SEQ ID NO: 839432 - DNA, 515 bp, Homo sapiens
gccactgtactccagacctcagaatggtaaatccactgacagcttgcaccatgtgcctggaaaagccacaggcactgaatgccagcacatgaaagcagccaggaggggggctgtaccctgcaaagccacagaggtggagctgcccaaggccatcaaagcccatctcttgcatcagcatgacctggatgtgagacatggcatcaaaggagatcattttgaaactttaaggtttgatgactgccttattggacttgggacttgcatgaggcctgtagtccatatgttttggccaatttctcccatttgcaatgggtgtatttacccaatgcctgtatctccattgtatctaggtagtaactaacttgattttgatttcacaggctcataaacagaagagacttgccttatctcagatgtgactttgaacgtggacttttgggttaatcccggartgaattaagactttgggggatggttgaaaaggcataattgtgttttgaaatgtgaggacacga

SEQ ID NO: 839433 - DNA, 604 bp, Homo sapiens
aggaagatctataaaacataagcttccctttatcaaggcctatgttttttgggaaacaattttccattcatctttcttttttctgcatgtcttatgatcagaagcatcataatgtaacctccaacgatttacactccaacataatctcctcctgctgagggtgaaaaaaaacttttgacttccctctagccaacagaatatggcaaaaggatggaatactcaatccctttattaacttacgttatatggcggacctgatgagctagttactcccatggttttgtataggactatttcagcagactggagtgagagactctcctgttggctttaaaaagaaaatgagctgccatattgtgaaaaggcctttgagagagcaatacagcaaagaactatgggtaacacttaggaggtgagcatggctcccagatgaaaaacagaaagaaaagggagttctcatttctgcaatyaccagcacctaaattctgctaacaaccaactgacgctggaagaagattctgcactctagaaaagaattcatcctaactgacaccttaaatttggactcataagattaaaaacagaggactctgttatcatgcca

SEQ ID NO: 839434 - DNA, 571 bp, Homo sapiens
taaaaccttaaacatcctccaatatgggttacagcaatctttttactattgacaaattgatatatgattatatcaccttccacacccctacttaacagccttcagtgacttatcattgtttttaaggtaaggctgaatctttaacatagacaataagacccttgatatttcttaagcatcctcttatatttcggccttatctatcaccactttttacccttctctggactgttccattccctctttagccacagaccatttgcacatactgttttacactgtttgaaacattcctccatgaacaaccctcttcccaacacacacacacacacacactcacactcacaaacactcacaaacactctttgcctttttaacttgatttcatcattcagaacttagcttaagtgctttatcctccatgaccccctcttctggcctaattgagcaaagctttccttgttaaacattctcatagactacttatctcaagtggcaattaaacttcattagtgtaactaatatggatccrtctttccagagtatgtctaagaacatatgatatgatttg

SEQ ID NO: 839435 - DNA, 677 bp, Homo sapiens
tccctgcttttcttcttgtcttcctcaagtatattttatatcagatataaaacaattttacatcttttaacctataaatcagatcactaatcttctttgctcaaatatctccaatggtttctcatatcaatcagaataaaattaaaagtccttatctagacctactacaaggcacttagaccatctatctgctacttttctgatatcatctcctaggatgtttcacttactcagatctggccacaggggccaccttacttgtctttgaacattgctataaaagtttcaaaatgctgattatcaatttatggatttatcttgtgtaccagtaacagactagcattgacctgtgtatgacactttgagtagcatcatttcaaaacattatattttttatcacttatcaccagctgccatattatatcttcatttaccatgtaagccctatgagggcaggaactctgttttgttcattactatatttatagcatttggaagtacttgacccatagtaggtactcaataaatatttaatgaatgaatggatggatggatggatggatggacgcataaatgaatgactgttgatattttggaattctggctagaattcctcattcattakaacccaaatgttatttctgatgctcagaatgttaggaccagaaagatcttta

SEQ ID NO: 839436 - DNA, 519 bp, Homo sapiens
aggagcaatgagaagaaagttttttgcaaatgtgcacagagattatggtcaacagtatacatgagaagacttcattcttaaaagtaaagaaacaatttaactattcatactcattcctgagatcatccagggccaaaatgtgctcgctatcagatgagtaactcatagttcagaagaaaattactatgaaacaaagagaattatttttctctctgattacaattttaaacctttacttttcaggcactttagccctaaatttgttttcactatttgtttaatttaattccttagaaaagctatgtcataagccatctgatgactttgtaaatgcaaagggccaatgttgtggaacagacaatctaatgacatagtgtttagtgttccctaaagcaggagacagatgaagagaaacggtgaaccggcaaccttagcataattaasacaagcctgagtgcttgccatggtgccattacattaatctcacatcagtggcacctggctaaaatttatgagata

SEQ ID NO: 839437 - DNA, 555 bp, Homo sapiens
agataatgaatgagatgtacaaacataaatgttatattgccaaatatccacatattagactacttttacacataaccacaaccaacacaattagggagagtttcctcttattttcctcttgattagttttatatttttttttctttttcagatatctgattaatttcaaattactttttatcagggagcacaattgttggacaacatcttgtggacatcagaggtctgttcattttaactcctcatcttttacaaaaaggttagtaaaaacatttccccattgggaacctagtgggagattttttcagatcagtaattttacctaccgttcatggagctagaaaataattcaatgtgcttcaagtagtcttacaaacagaactaggtactcttctattagcagaaactaacgatttatggcattagcctttgtgttgtatgtcaagttgatgtttttatagcctgtacatggcttctgtctgtacagtcatgcatccctcaagaaacggatacattctgagaaatgtactgttaggygattttgtcattctgcaa

SEQ ID NO: 839438 - DNA, 654 bp, Homo sapiens
cttccctaaatgtccttgtaaccaattatgtcatcctgctttattcaaaaccttgaccatccaaggaaattatttaccattgttgattaatcagcatatctttgaacttcaagctacctctttattccaggcagggtggaaaactagatttgctacttggccggaatgacttctgtttcctattgtctttctgctactaatgtgcctctcgcactcatattctgaatgaggctatactgttgcagtattctatttctgtgcataactgggatgtgaggggttgtctataatgtgggctcattttctgcttcttgataactgatcctgggtattgagcaaaagtaagtccatctggcctcattataattcctagggtgccattttttcccccaaataattctttatctttcatataagaaatatagaaaggctttgaattcagcaactcacagctacccatggatttgaattttgagtctgtgtttcagctatctcagccctgtggctagaattgatacaaggttcttatcacttagacacagaaattccatkattttctatctttgccttgaatgtaagactttgtgcttgtcatcatttttaatttaagttgtccagaacagttagaagaaaccatctcacactagaatcctt

SEQ ID NO: 839439 - DNA, 654 bp, Homo sapiens
cttccctaaatgtccttgtaaccaattatgtcatcctgctttattcaaaaccttgaccatccaaggaaattatttaccattgttgattaatcagcatatctttgaacttcaagctacctctttattccaggcagggtggaaaactagatttgctacttggccggaatgacttctgtttcctattgtctttctgctactaatgtgcctctcgcactcatattctgaatgaggctatactgttgcagtattctatttctgtgcataactgggatgtgaggggttgtctataatgtgggctcattttctgcttcttgataactgatcctgggtattgagcaaaagtaagtccatctggcctcattataattcctagggtgccattttttcccccaaataattctttatctttcatataagaaatatagaaaggctttgaattcagcaactcacagctacccatggatttgaattttgagtctgtgtttcagctatctcagccctgtggctagaattgatacaaggttcttatcacttagacacagaaattccatgattttctatctttgccttgaatgtaagactttgtgcttgtcrtcatttttaatttaagttgtccagaacagttagaagaaaccatctcacactagaatcctt

SEQ ID NO: 839440 - DNA, 313 bp, Homo sapiens
tgaaaataagttaaagtgttgctgcttccagtagcatttgcatttagccaacaataaaaaataaagaattatcaattcgataattttaagtaatgtgacttcatgggaggggatagatttactttcctgaactcctcaaactatacaaatgtattttcttatgaaactagtgctaataacaatagctactaattttggggtgyttaattgtctgcttgccatccagccaaactctggatagcttatttcaataaacatcccagatagaacaatgtggtgggcacatttatcatttcataggtcaggaaattta

SEQ ID NO: 839441 - DNA, 312 bp, Homo sapiens
cccatacttagcatgccttccggaggatcccattagcagactatcagagaaacagggatggaaggagtggtgaggggtctgctccattgtgaccccacccctgcctcgccctgaggaaggacctcagctcmtagctcaaccgccgccctccagcagccccagtgatatgagcagcacccacccgtgacccacagctcggcctccaatcaccctcctctccacatcggccacccacaactgtgaacccaacttccagcagccacatatctctaagcacactgcacaatgtggctgctgaaagaggcagcattg

SEQ ID NO: 839442 - DNA, 644 bp, Homo sapiens
ctgaatctttatatccattgaaaagcaataacccatttcccactctctgctkccactggcaaccatcattctactttttgcttctatgagtttgactatgtttgatacctcatataaggggaatcatatagcatttctttccatgactggattatttcacttagcataatgtctcaaggttcatccatgttttagcatatgacaggatttccttctttgttgaggttgaataatattccattgtgcatatacaataaaacatatacattatatatatgtgtgtgtgtatatacacatatattttttaaaagtttgacttacagttctgcatggctggggaggcctcaggaaacttacagtcatggaggaaggcagaggaggagcaagcaccttctgacatggctgtgagggaagggagaaagagtgcaatgtaaaagtgttccctgttcactacatccacaccaaaatctattattttttgatttttagattatggccattcttgcaggagtagggtggtatcacattgtggttttgatttgcatttccctgatcattagtgatgttgagcattttgtatatgtttcttggccatttgtttaacttcttttgagaattgtctattcatgtccttagcccacttt

SEQ ID NO: 839443 - DNA, 494 bp, Homo sapiens
aagaaacagattctaaagtacggatttgactaatttatcaaaraagtgctccctggagaaatgagcaagggagtggggaggcacaacaaggaggctaagaaaccaagcaaagttgtgatttttaggtaaaattccagcctaggcttaccctgattgaaattgtgtagaatatattgcatctcagagtttgtcttaaggcaaggaatatgggctgttttgtgttcctttattagtcattcattggcttggggccatggggaggttggtgcaggggaatataccccatgttgcaggagtctggcaaatagaaacaaacaaacaaacaaacaaaataaaagttaactaaaaacaaaaacataaattgatttggccaataatacatttggctattaatgacaaggaccatgagtggatagagacccagttatcaaaagcctaatacattttcagatactaaatgatatgttttacttaaatttctgatacatcaagtt

SEQ ID NO: 839444 - DNA, 595 bp, Homo sapiens
acttgctttctgtattccaggcagtatccagtgctttttaaggcttaaacaaataagtgggtaaatgaccgctgttttaaatcaatattgcatttagagataaactacattccctctaatgatgagtcaacttaactttgctaatttgatagcttctgattttagagtttctcattcttttctttccttgttataccttgttaattaagctttcagtggtatagtgtaaattgtgtcaactggaccctgaaatagaaaattatttcaacttagttgagttttattgcttttgcatagttttaaattagttctaaatatgctgtatccctgagaaataatattccacccaaaatgcaagtgtatataatattggaagaattaagctgtaaagtcacattacacagtatatctaacgtcaaagcctctagtgcattaactgaattacttgaccctggtttagtgtttcttttgtctctgtagrttagtcaaactttgataccatttttacagagtgttaaagagacagcattagaaactttgcttatcctatcaagaagcagaattctggaagatcattacactgtttgaaagatca

SEQ ID NO: 839445 - DNA, 620 bp, Homo sapiens
acataaagcaatggaaactgtgtgatacaggcttttggctctctgatctaaagtttataatatcctttggaaataaataaaaatgtatattattgccaaataaagtgctgctataattaatgattattattaaagcagctaatttttttctataaaaccaattatttggcattttcaaggaactgaacagggaaatggatttatagttttgaggaatatttacaaagtgttggataaataactttagaggaacatatccttttttcaatcaacacatacttataaaatttaaattataaaaggcaaaataattgatattaaaataaattatgattttagtctgttaaattttttaacatagtatttataacattagacaaaattgtatttaagtattttatttagtatttaactaagtctatttaagccaagatgcctgcgaagaaaaattcctatttggaatttttcataatttttgaggatgaattaaaagcasatgtcaactttggcacctcaaaattttcatgaggaaaatttcccaagtcgtttatatttgatccagaaatcataattaaaatggaataaaggaaatgaaaaaatacttcacacattttgttctc

SEQ ID NO: 839446 - DNA, 602 bp, Homo sapiens
ctctggggcagtgtgccttccagggattgcctcggcatagtggacatggactggggggtggcttgtttctcattrgacaatcttttttaaagtgtccttgcaaaccacactgataaaaagccctactgggtgattggccggctccattttctgtcatctctgaaccaccaaggtttgtttgtctgagggccatgactaaggctgcagcctttctctgatgttgcttttccttttgggcctgttcctcttggtccttattatagaacaccgaggttgccaggtttaataattcctccagattttgttcagggcctagggctcgcttttggagctttctcctgatatctgcagctgattgggtaataaacttatcttttaggatcaattgaaccttgagtgagccgggtgacaggggagtatattttcttaaggcctcctatagctgctcaaggaaggcagaaggattttcttcctttccctgagttatggtggacatcattgaataattcatgggctttttcctaattctccttagtctttctagaaaacaggtcaacctgtgttttgactgcagtggccctgatctgagttgaggtcccagt

SEQ ID NO: 839447 - DNA, 636 bp, Homo sapiens
tgctaaaggcaagggatttagcagcaggaggagagcacagaacaggagcccaggagtscatggccctggatttttttcaggttttatgctgtcaacccttatcagcctttgggtatgtttctgaacgtccctgcagctcagtttatatatgtgtggaaatagtgaataagcccattaaaccagcatctctcaaactatccgtggtgaaggaccacacttgtgttttactgtttttaaattttcaattttaaactgtgaattgagactttcttaaaatacaataaaaaaataaacagaaactacagaactatggtcctgacactatattgggccccgaggtgatgatccgacaaataaatatacaagcaggtttcctgagtctatgacccttatattctagcaagaaggaaaaaaaatagtacataagtaaacaaataatggaaaagatcatttgaggagacgatgagagatgtgaggaaaataaatcaggtaatgggccagacagtgacggagaatgatgagctgctttttaactggatggtgcctgaatgagtctctgaggccaggactttgaaagttaatactggatggctgggcgctgagaagagccgggcatgccagctcttggggaggggt

SEQ ID NO: 839448 - DNA, 642 bp, Homo sapiens
tgagatcgtatatttttccagccacctgaaattgaggtttaatctgtatttttatctgtgtttaatgcacattcctcacttcgtccccagggttctccttaatagkttatttcctgagtcttcctccacttactctaaccagggatatatcttcaaaggtccaaatgacaacaaaattttgtgtatatcttgactctttgataacacactcagtgtccttctctctctcttatgttactgtctgaactcaaggcttaatttatcaaattacatctgactactatttaggtcctccattttcttagatagggaagatcaccagttataccaactataattatttttataccacaccttttacaagtaaactttaaaatactataggaactttaaaaattaaagaaaaaccaagacaaaatgtgtcaatcattaaataagtttttgagattccagttagccaaggcaaaaagagaaagctaatgaattaacattatccaatgttaatggatcgtatccattaccaaaggaaggcatcagttcctcaaatagcatttttctaaattttgatttcttaatgtaattgatagattacaacatttcaataaacctagtatctcccatgttctccgatactctcatata

SEQ ID NO: 839449 - DNA, 642 bp, Homo sapiens
tgagatcgtatatttttccagccacctgaaattgaggtttaatctgtatttttatctgtgtttaatgcacattcctcacttcgtccccagggttctccttaatagtttatttcctgagtcttcctccacttactctaaccagggatatatcttcaaaggtccaaatgacaacaaaattttgtgtatatcttgactctttgataacacactcagtgtccttctctctctcttatgttactgtctgaactcaaggcttaatttatcaaattacatctgactactatttaggtcctccattttcttagatagggaagatcaccagttataccaactataattatttttataccacaccttttacaagtaaactttaaaatactataggaactttaaaaattaaagaaaaaccaagacaaaatgtgtcaatcattaaataagtttttgagattccagttagccaaggcaaaaagagaaagctaatgaattaacattatccaatgttaatggatcgtatccattaccaaaggaaggcatcagttcctcaaatagcatttttctaaattttgatttcttaatgtaattgatagattacaacatttyaataaacctagtatctcccatgttctccgatactctcatata

SEQ ID NO: 839450 - DNA, 633 bp, Homo sapiens
tttctgattttcctcctgcaaacgttttctactcccttggcacatgcctcatccttcccacctatgcgtctctgtccrccttcccccactggctcaacccagagcctcaagttcttcttgatacctccctcattttcactcttgaattcatcactaatttgtatattttatctccaaatccattttatatttgtgtacctctgttcctccattgtcaacatgacctctctcctgggtaccttcagaaatgctcgtgtcccatctcaccctttcaacctgcttcacacgcagcatccagagtgacctttatacatccaggccatgtccctccactgttcaccctcctcagtgcattccattgcacggataatagaattcagactcattaaatggttaagaaggtgcttctagagatgggtccttctggctttccaatgcacaatccactcactgctatatactcactgtctttgactttctctcaaaaaactcagaaattgaaaaaaaaaaaaacaaaactcagaaaactttgctcatggctctcttaagacacattaatgtttggccttgtttcaccatctctcactaggctgcaagttacttacagtgtcctgtaacatccatttcacacat

SEQ ID NO: 839451 - DNA, 346 bp, Homo sapiens
gctgttgctgtctatattataccgcatttaataaatggacgtgtgcttcccatgctttactatggataccatgtttcagggggttaagccaccataaccagaycatttactgatatggagtcatgtaactcaaacaaagcctctaaaatgttatatccacatgagaagttctaaaaatcaaaaatagcctaacaatgaaggaaggcaacttgcggcttacaaaaagagttagttaacaatttttaaagataaggataaaatagacatgatcctggcaaaatcacacctgttaagaccataaggcatttctgatcactaattcaaatttaaaatagcagatttggag

SEQ ID NO: 839452 - DNA, 772 bp, Homo sapiens
cccccaagactgcatagtctgagggatccctgcttctccctcatgtsctgctgttctgcccaccttcacttttctcccagcacactggcctcttgttttagaaatcttgcaatttctgttctctgtaacaagcatgttctttcccagatgacccatttcctcacttacttagatactgctgaaaatccatcttttctgcaagactttgcttagacacacaatctttgactgctcacttcaacatttccatcctcctttgcaactttagtttttatactaagcacttaccactctccaagatactacacattatttattttgcttaatgtctgtctcactcactagaatacaagatccttaagggaggaatttgtgtctgctttgttcactacacaataccaagcgcctaggagagttccgcatataatatatgatcaacaagtaactgttgtataaatgaaagagctagcataccaaatacaagaagacaggcttctgtaaagaaaaaacagatgtgataagctaaaacagaacttcacattgctcatatactgaaataaaatccatctttcatgggacaagcctttacatggacatgtagtatactcagttttaatgagaaaatcacttacatttcattgtatgtaaagtctagctctaaatttctatcatgttagtattttaatagtcaaggtacataataaagcatactgaggcagaaatctttcataatattctacattaatatattagcaagaacataacatattta

SEQ ID NO: 839453 - DNA, 624 bp, Homo sapiens
ggtatgatcgactgaccttgctggcattacttgatcggtaagccactgagcatgcacacacactgtcggaaggcacacyggggacgtgacagtgcccactgcatgctttcaaagagaacattgtcacttgcacattttcaagttgtacgcttcctttgctgacaacccaaagttaaagcaaaaagatcctgacaacaaattgtagttcagcagttacaatgagaaataagagagttacaataagtaactcttattaataataaattaacatattaataataagagataatgagaaataataagttacaataagaaataagaaatggtttgtatttaaggtttgtttgggcacagtagcatgctttggtgtactcacgtcttgccctatttttgtgggaaagcttgaggcccatctgtagcacagggcctggcttgactgggtgtgggcatggggagaggagggaagatgaagtagggtgatttctgcctctttcccggacaccttggattcttattgctcacttgtatctgatgtacactcacttgaatgttaatttttcctttaatctcctttcccctttctcacctcctcctaccactgttccatacagcaaaacgttgtgg

SEQ ID NO: 839454 - DNA, 584 bp, Homo sapiens
tttttttttttagagagggtctcacttggtagcacaggcaggaggagtacagtggcatgattatagctcactgtaaacttgaactcctaggctcaagagrtcctcccacctcagcctccccagtagcaaggactataggtgcatgccaccacacctggctaatttttaaattttgtagagatcggagggggggtctcactatgttgcccaggctgctcttgaactcttgggctcaagcaatccttctgccttggcctcccaaagtgctgagattacaggcatgagccactatgcctggcggaatatcatttttatataacaataatctgttttcacggacatctgcaggttttcttttccttcttaccctcttcaaattaactctctagatttagcttaaatttttgaaacccaaaactattagtagtatttaatttagtggtatttaaattagtagtattttaacgtattagtagtatttaggatgtaaatataaggtttatatttacaaatgcaccttttgtaaatataaaccttatctgctgccaggtagtggacctggctttatatctagcttgtatcat

SEQ ID NO: 839455 - DNA, 638 bp, Homo sapiens
gtacgtattattattattattcccattttacggagggggaaactgatacaccgaagcttcctcaagattacaaaagytctaactccagtgtctgtggccttaatagctagataatattgcttcttaagaatcataattttaatgggtacatatttcatcatatttctacataattatttgtttaacttttgccatatttttcattcagcttttcaaaaattttaagataaacatctttatatataaatattaatttgaatttctgatgggaataccaaaaattcttccattccttgcttaatcacaacattaatttattatataattgattagctctttctaatatctataccaatagaaataatacttttataaacaggatttacagaattacaataaaattttgattctgctctaggtttcaaacattattaacctctgataatcatttcatggcagtgaaaattccaactcagaatactatgagatatatgcttagaaaatctcagctagaatgtcatgatagcaggaaacttctctatcttgttcattacgagtctccattgcttagatcatgtgtgcacagagttaacaatcaataaacattgaagaaggaagggaaagaaagagagagagag

SEQ ID NO: 839456 - DNA, 633 bp, Homo sapiens
gtacaaaaagtatgtttaggaagtaattagatcccatgtgacctcactattagcaaccagggtactacttctcccacactacggaagaaaagtactaaggtccaatktattagtccattttcacactgctgataaagacatacctgagactgggtaatttataaagaaaaagaggtttaataaactcatggttccacgtggctggggaggccacaccatcatggtggaaggtaaaaggcacgtcttatatggcagcagacaagagaggaggagaaccaagtgaaaggggtttcccccttataaaaccatctgatcttgtgagacttattcactaccataagaacagcaggaggagaaacagccccatgattcaattatctcccactgggtccctcccataacacatgggaattaccagagctacaattcaaggtgagacttgggtggggacacagccaaaccatagcatccacccttagatagggtgcgataaaaggtccaggtaagggtagagtatcttgacaaaaagagactgattcagtatctgcttttttgcaggccagccctcaagctcctttccccgactcagctcccagagctttggctgctaggttcacaccctgaatatttatt

SEQ ID NO: 839457 - DNA, 567 bp, Homo sapiens
ttaaacatctctttttaagcatttctgcaatatcacaacaaccatgtgatgttgtgattttcctcattttatagcagatccttctgtctccaaattccatccttttctcataatagcacactagttctcaggttctaagtctagatatagcagcagtgaatctgccaacccaagaagaaacaaataaatatttcctacacatttctttttccttcattttaattcccttttcgtattgactgaccctgtaacattaactttgcctgtactttatgtttatgcaaccagtaaatgtgggtgattctcaggaattccttgaacctatttatgatactgtggagcagcgtggccaactccttttctgtcaaggatctcagaatcaatatatttaagatcccaagattttgagatgtacagataagtgaacattggttgcctggctattsgatttttatcttagagaaaaacctgtgagtcttggtggggaagaaccagcactttggaatcagattacctgaatgtgaatcacagcccagttccttgtgagctgcatgaccctggtgaagt

SEQ ID NO: 839458 - DNA, 611 bp, Homo sapiens
agaagcagcagaaagtgtccacttttaaccacacagacaatgacctcactcctgaatgaaggaggacactggcatttgcagtccctccgggggagragtggaatttgccaagttggcatttaaccaaaatgatggagtaaaatccctgaagccctcactcatgttgacgtggaaatcgagcagagaaagattcaaaacatgacataacttaatgacacttaaagttctatctacgtcacccagttggtgggggagggggatcatacacatattgggaaaaatgctcaagtgctaggatggcagcatgaacagcatttgggaacttgttagaagtgtgcattctcagtccccaccctagacctactgaagcagaaactgtggtgtggagcccagccatcctccctcaccaggtgattttgacgcacaccaaggtatgaagagccctgcattagagtcacctagggagcttctgaaaatagcaattcctgggccccattcttgacttctggtcaatgttataaagtggaaccctaggattcttatttttaaaagctcccaggtaatccggagacataagcagaaataggcacagaatccaaagaaaataaatg

SEQ ID NO: 839459 - DNA, 611 bp, Homo sapiens
agaagcagcagaaagtgtccacttttaaccacacagacaatgacctcactcctgaatgaaggaggacactggcatttgcagtccctccgggggagaagtggaatttgccaagttggcatttarccaaaatgatggagtaaaatccctgaagccctcactcatgttgacgtggaaatcgagcagagaaagattcaaaacatgacataacttaatgacacttaaagttctatctacgtcacccagttggtgggggagggggatcatacacatattgggaaaaatgctcaagtgctaggatggcagcatgaacagcatttgggaacttgttagaagtgtgcattctcagtccccaccctagacctactgaagcagaaactgtggtgtggagcccagccatcctccctcaccaggtgattttgacgcacaccaaggtatgaagagccctgcattagagtcacctagggagcttctgaaaatagcaattcctgggccccattcttgacttctggtcaatgttataaagtggaaccctaggattcttatttttaaaagctcccaggtaatccggagacataagcagaaataggcacagaatccaaagaaaataaatg

SEQ ID NO: 839460 - DNA, 585 bp, Homo sapiens
cagagacaaggcaagtctcttccctctatgagcttgttacccagtaccaaagttgtgtccacattttcaagtatcttttcagcaatgccccactctactggtaccaatttactgtattagtctgtttttatgctgctgataaagacatacccgagacaaggaagaaaaggaggtttaatttgacttacagttccacatggctggggaggtctcataatcatggcgaagagcaaaaggcacttcttacatggtggcagcaagaaagaataaggaagaagcaaaagcggaaacccctgataaacctatcggatctcgtgagacttattcactatcacgagaatagcatgggaaagaccggcctccatgattcaattacctccccctgggtccctcccacaacatgtgggaattctgggagatacaactctgtggagatttgaatggggacacagccaaaccatatcacttacaagcatttgcattttacggggaacaaaagcttaagccaaagcttctaagggtaaaayttctgccactgaacatctctgtttaggaaaaaggtgagggtcattgacagtctcccct

SEQ ID NO: 839461 - DNA, 619 bp, Homo sapiens
gcttccaacaattcatcaaaattatcatttaaatcttcccataacctcagttttttcaacttttgtttcatttttaattgacaaataataattgtatatattcatgggtacagtgtgatgttttggtatatgtttacattgtggaatgattaagtaaagctaattaacatattcatcacttcacatgcttatcaattttttgtgggaatatttaaaatctagtctttaagcaattttgaaatctaaagtacattattattaactacggtcaccattctgtgcaataaatcactaaagcttattcctcctgtctagctaaaattttgtacccttttaccattgtcttccttttccctatccatctgcctcccatagcaccattctactctttccttctatgagttctactttttggattccacatataagtgagatcacatgttattcatctttctgtgtctggcttatttcgcctagcataatgtccatgttgtcccaaatgacagaatttccttccttttaaaaagtgatagtattccattgtctatatgccacattttctttatccattcatccgcttatggamacttagctccaacctcagttttttgatggatcc

SEQ ID NO: 839462 - DNA, 617 bp, Homo sapiens
tattacaaaaataaccatgtaagaacctttaaaaagtataattctatttacttgctgtcctttgctttcttctggtcatgtattttatttacttataggtaacgacacaaaatgtgttactatttttgctttaaacagtcacaagtttttaaaatatgaatagataggtaggtagatgatgatagatatgtaggtaggtagacagatggtaattttttaaaaggtcttttatacttatccagatatttagtcatttatccactctaataattttcagttctccttgtagattcaggctttcagcaagaattcaccttgaaaactttccttgtctcttatagtatgtatttgctaaaaataaacactctcaacctttctcatcttatttcaccctcatgttgaaagatatatttgttgaacatagaattctagattaagagttgctttccttcaatactttgcagatattgcatcgtcttaaggcagtcaatattttagttgaaaactcagacatcatacctaaggttgttgcctgtgtgaaatgtctttttcctctrgctgcttttaagatttaccctttatccttgtttttcaatagtttaatcacaaaatgcctc

SEQ ID NO: 839463 - DNA, 540 bp, Homo sapiens
tctggaaaagagagtatactaaaaaaaaggggggggagaaatatggaaaaaaatagtttcctaatgcttgctgtctatagctaggcaagcataattttttattgctattgccctgcaaataaaaagctaatcaaatatgatatctcataatatatgctcctgttcttccaaaagccttatacttctttcatctcctaagaggataaagattaaaaactcatcaaaacatctgaggccaaaatattcttaattaaaaacttctctctagctaattttatctttcagattatatctttaatcaggctctttcaaaattaaggtttggatttatgcattgtttggaatttttttcagtataattataaaaatgcattgatctacaaataaatatggaaaagctccttgcatttgagactagcaaaactccataccacttaaataattattttaagtaatgtttttcaatgatgaaataatagaactagtgtgtatccacatgagcatgagccatggggcaygcgtaattagtagtaccggcag

SEQ ID NO: 839464 - DNA, 575 bp, Homo sapiens
gagattagtgcccttataaaagagaccccaagagctgcctagccccttctgccatctgaggttacagtgagtaaatagccactgatgaaccaggaagtgggccctcatcacacagctaatgtgygggtgccttgctcttggacttcccagcctccagaactgtaagaaataaattcctattatttataagctatccagtttatggtactttgttagagcagcctgaactaagacagtcacagtactagcttatcaatcactattacaattcatgggaatttcaagatcttacaatggacatattagccaaattatcttatccctgtgtcaagtaacaggacttggtaaaataattatttctaatctataagaatgtaaaaagcatgtaaacatgtgcaatcatgtgtaacaggcccttgcatgagctgatattgttgctagtcccatcacatcatcttccacgtcaatccatgcagcaaaaacctcaacactatgaaaactggtaacagtcctaactgccagttttactgtgtgtctccattacccctgaagtgaatattgctttaatttcaaag

SEQ ID NO: 839465 - DNA, 575 bp, Homo sapiens
gagattagtgcccttataaaagagaccccaagagctgcctagccccttctgccatctgaggttacagtgagtaaatagccactgatgaaccaggaagtgggccctcatcacacagctaatgtgtgggtgccttgctcttggacttcccagcctccagaactgtaagaaataaattcctattatttataagctatccagtttatggtactttgttagagcagcctgaactaagacagtcacagtactagcttatcaatcactattacaattcatgggaatttcaagatcttacaatggacatattagccaaattatcttatccctgtgtcaagtaacaggacttggtaaaataattatttctaatctataagaatgtaaaaagcatgtaaacatgtgcaatcatgtgtaacaggcccttgcatgagctgatattgttgctagtccyatcacatcatcttccacgtcaatccatgcagcaaaaacctcaacactatgaaaactggtaacagtcctaactgccagttttactgtgtgtctccattacccctgaagtgaatattgctttaatttcaaag

SEQ ID NO: 839466 - DNA, 575 bp, Homo sapiens
gagattagtgcccttataaaagagaccccaagagctgcctagccccttctgccatctgaggttacagtgagtaaatagccactgatgaaccaggaagtgggccctcatcacacagctaatgtgtgggtgccttgctcttggacttcccagcctccagaactgtaagaaataaattcctattatttataagctatccagtttatggtactttgttagagcagcctgaactaagacagtcacagtactagcttatcaatcactattacaattcatgggaatttcaagatcttacaatggacatattagccaaattatcttatccctgtgtcaagtaacaggacttggtaaaataattatttctaatctataagaatgtaaaaagcatgtaaacatgtgcaatcatgtgtaacaggcccttgcatgagctgatattgttgctagtcccatcacatcatcttccacrtcaatccatgcagcaaaaacctcaacactatgaaaactggtaacagtcctaactgccagttttactgtgtgtctccattacccctgaagtgaatattgctttaatttcaaag

SEQ ID NO: 839467 - DNA, 485 bp, Homo sapiens
catgtggacctgtggcgcaacctcttgcttggccagggtgagcagggcatcagcattccaaagctaagagaataagatacacacacacacgcacacacacacacacacacacacatctccaaaactcagacaggaacatttatttttattttgttaagtcaatgcagttttcatctagaaatatagcaagagctctaccatttttttatttgaacaattgcttaaaaaaaaaaagaaaggaatgattatgtagaaatgtttttgatgcagaattactgagcctggaggcaagggggcggggcggggcggggcgggtggaagatagtgcccatcttctattagcagcaggatgtatgagcacagatgacaatccggtccatgctgttcatcagacaaagcctgaatcctggaaaaagccaactctttgaacaggaattagagtgtgatcggstcagttgacgtacaggggtaggtgagtgcgagag

SEQ ID NO: 839468 - DNA, 388 bp, Homo sapiens
ggaaaccatcttatcaagctgtccataacttgcagtgaacattgggcatgtatctcaggcttttcactggcaataattacactcgctaaattttgagtgctatgccaggtgttgggcagtgtgccatttgccttatctgtgttacctatgtcagggccaagggaaatcttcccttttgcccctgaagtttggctgaaaatcactgacaagagacagatgaataggagaaaaggcatacaaatgtatttgatcatagttttatgtgacatgggagccttcagaacgaagttccaaatatacaggggaacttgtctatgtttatgcttaggtttaacaaamtacggacatccatgtacaaatattatgtacaaaaggggtgtaatctaat

SEQ ID NO: 839469 - DNA, 668 bp, Homo sapiens
gtgtgtgtgtgtgtgtgtgtgtgtgtgtgtgttttaactctcttatttttttcattgatttatttttctatctctgtgcacataccacactgtcttgttmttaagaaagttcatttaacagaagaatttttccctcaaagcccattttcttaaacactgtgttatggtgtcataaagaaaaagaagagtaaaacctccatgccctgtacctacactgatattcccagttgtaccgcaaataaggatattttagaattttacaacactactaactgttgcttatgtctttaacacccttgtgaatcttaggcagtcctcccatgccacttccaactttgtttttttttagtacattctcgctgaatttcattcaatctctcgcctcctcatttcccttccctgctttctggagccttaggaactttctactctgagagcagcagccagcagggaaggaacatacacagacacctctgcgtgtctcccttggaagcacagatgctccgatggttggtcctgctccttctctggaccacatctgccaaggatggggccacagcctgtgcatctgagctcagagcctgttgtgggatctgcaggagcaagaccagttgccccctgccttctctctgaggtcgattgggcaattccattattttgcataaaga

SEQ ID NO: 839470 - DNA, 571 bp, Homo sapiens
atcctaaaagattttcactctattgttgaattcaggcctgccaccgtttaccttgatataacttagtataaagagcaactctatattccatgctaactacgtggactgtggcatttgtgtagtgaaaggcaaaggaagatgatttcccaatttaaatgaaactggagtttttccggggaaataaatagaggagatacgccttactggtttctccttcttttgttgataattgtgttctgctcttataaatagaaagctctacttaaatgtattaattatatagtctgctactcaagtaatgaaatccttagtataatggtctttaaattattctggggaaatgagagacatttgtacaagatttatgagatgttagcaacaaacagagaaagagcattttaaacaaaattttttcgaggcaagccccttgtctttcttttagagacaactctattgttgaattcaggcctgccaccatttgccttgataaaacaaggtaaatgttactcttttttgacaatagtaatatcagscatacataactaaatatagtctttttaaatatcagcca

SEQ ID NO: 839471 - DNA, 449 bp, Homo sapiens
ggccaaataagggcataaaagctggccacccgagccagaagcggcaactgctggagtccctttccaggtgtgaagctttgttctttcgctcttgctgctgctccctgtttaagtccagactacctttgtgagcttgtaacacagtgagggtctgtggctttattcgtgaagtcagctagaccacgaacccaccaagaaacaattctggacgtgccacctttaagagctgtaatacttgctgcaaaggtttgtggcttcactcttgaaatcagcaagaccacaaacccacggaatggagaaactccagacacaccatctttaagagctgtaacactcaggrtaagggtcagtggtttcattcttgaagtcagtgagaccaagaacccactggaaggaataaattctggacccatgagggacggtcgttctccatgatattttttttccta

SEQ ID NO: 839472 - DNA, 449 bp, Homo sapiens
ggccaaataagggcataaaagctggccacccgagccagaagcggcaactgctggagtccctttccaggtgtgaagctttgttctttcgctcttgctgctgctccctgtttaagtccagactacctttgtgagcttgtaacacagtgagggtctgtggctttattcgtgaagtcagctagaccacgaacccaccaagaaacaattctggacgtgccacctttaagagctgtaatacttgctgcaaaggtttgtggcttcactcttgaaatcagcaagaccacaaacccacggaatggagaaactccagacacaccatctttaagagctgtaacactcaggataagggtcagtggtttcattcttgaagtcagtgagaccaagaacccactggaaggaataaattctggacmcatgagggacggtcgttctccatgatattttttttccta

SEQ ID NO: 839473 - DNA, 608 bp, Homo sapiens
ggctttgtaggcatggttgccagaaacagcccggtgctccccagmagagtgctgtggtctgtgaacaaggagctgtgtggtgagtgggtgggcagccctgcttgctgtgagattgcttagctagcacatatgcagagtcaccatttatcctatgtccatctcttagacccgcgcatggaggtttgagaatatgttgtaccatgttgctcttttgtttatttcaccaggatttctttacctgtgcacaacacaatctgaatcactcactttcctaaacctgataaaaaccttgtgtctaaagcttcattttcagatatgagtaagcagggactggcttaaatgaacatgattgcaaatacttctctttttttacaccaagacagcccacctgctaccaagactatacttttttgtggttttagggcttggtgctggttaatgtaatttcatgatgtggctgttaacagaatacgtggtcccaaataattcctcatggagtctctaaaatgaaaagagcttaattatcacaggatttttcaaaggcttgaaggtacagatgtgtttttaaatcttaaggaaggaaaatctgtaaccaaacaagaaaaaaa

SEQ ID NO: 839474 - DNA, 587 bp, Homo sapiens
tataaatgcatgtatttatttatggtctgtatattctgtttccttgatctatgtgtccgtttttgttttgttttcttttttgggayggagtttcactcttgttgcccaggctggagtgcaatggtgtaatctcagctcaccacaatctctgcctcccaggttcaagtgattctcctgcctcagcctcctaagtagctgggattacaggcatgcaccagcacacctggccaattttgtaggttttagtagaggcggggtttcaccatgttgatcaggctggtctcgaattcctgacctcaggtgatccgcccacctcggcctcccaaagtgctgggattacaggtgtgagccactgtgcccagcctgtgtgtctgtttttatgtcagtatcatgctgttttggttactatagctttgtagtatatttgaaagtcaccacagatttatccatctttgtcctttttgctcaatatttcttaggggttttggagtttttcacagttccatgcaaatttgggaacttttttctatttctgttaagaatgtaagtgatattttgataaggattacattgaatttgtcagttgt

SEQ ID NO: 839475 - DNA, 667 bp, Homo sapiens
ctctctcctctcgggtgttaaatagcttgcaaactccagccactttggttcttctgtattctcaactttatctccttaacataggtagtttgctgagatccgcctggttctcccaccctawctcatagcctggaaactgttgtataatcataaggcttacttgatttgtttcccgtctcagtgactgctgatattggttgcctatctagtgtctatacagaagttgtttaaaatattttatagcctcttatggttgctgcatttgagggggtgggatttattccttgttactgcatctaggacagagcaaaaatttatcagctataaagtatctaaggaggagtgacattagaaagatggcaaaatagaaaatgttagtctattaacattaatagactagttaaacagaaagtttaactagcagctacccacagaccaaaacatctttttgaaaaccttaatacttgaaaacaagcctgatacactagtatgatctgcagcagctgcattcaaccaaaaaacccacccaatgattccacccacacaggctgacaaaaactccttggaattttcaagaagcatatgtgctagaactgcttgacccaggaagtaaaacagctgttcaactcaggcagaaaccctcacgatacctgcaacctgatggtga

SEQ ID NO: 839476 - DNA, 584 bp, Homo sapiens
gatgtattggatatttcctggatcctcaaatgcagcaattaacactattgaagtttgggtggggttataaatcaagtgcattttttttggtaaggttaagatggtttgacactgaatgaatgccttttatgtttattttatgtatatgaattaattcaatatagatttattaattacctaccatatgccagatgtgatggttaatactgagtgtcaaattgattggattgaaggatgcaaagtattgatcctgagtgtgtcagtgagggtgttgctaaaggagattaacatttgagtcagtgagctgggaaaggcagacccactcttaatctgggtgggcacaatctaatcagctgccagtgcacccagaatataaaacaggcagaaaacatgaaaagactaggctggcttagcatcccagcctacatctttctcccatcctattagttctgtcccactagagatccctgactaatatactagacatacagttaggcactgatgatgcawactgttaagaaacaattagacattatagatatatgtatatgtatacacctaaacacagaagagagagattggaa

SEQ ID NO: 839477 - DNA, 606 bp, Homo sapiens
cttgttataggtctgtttcttctttagtcagtttaggcagtttgtgtttttctcagrtcttgtctatttcattctggttatctaatttgttagcactgctagtagcattctcatgagttttgctatttctgtcagattagtattagcaatgcctgctctttcattccccatcttattaacctaagtcttctttgtcctgtattttgtagtcagaacgtagctaaatttttgtcaattttgttgatttttttaaaaagctcactattttatttattttctcctttcttctactccaatgtattcatttcttattttcgttaattccttccttctacttttttatttagttaatttctcttttcctcatttcttaaggtaaaatattagttattggtttaacatatttttttctttttggtataatagtttctaggtataaactttcatcaaagtacttcttttagttgtattccataaggtttggtatgttataaacattttgagataatgtttatttaggtgtgagattttaatttccaaatattttttgaatttctcaaagttatttctattatttgtttgtaatttaataacattgcagatgaa

SEQ ID NO: 839478 - DNA, 643 bp, Homo sapiens
aataaagctgatatgaaaatttttacacaagttatatatgttttattcccatttgtyttttttacctagaataaaatttttaactattagagcgtgtgtatatttatctttaaaagaaactaaacagtccaaagaattgcagcatttttgcactcccactagcaatgtatagcagttctagttgctccaggtctcttacaaaaaacaatatatgtctagaaaaggttagtgaaaagtaacaaaaaaaggtcatacacacacacagtaagttaaaataagttagatattatctgatcatattctcttataataatttgaaagaaacaaaattataagaaaaataaacattttttcttagaaattacataatggtgttctatgtaatctcttaatcgaaaactataattataaattttctacacttatatcacatgataataattaccaaaaagcttgttgacagaagttgaaactagtaccagaaggtaattgatagaattcattttttcattcattcattctttttttagtgctattgttataaaagatactgaagatccctgggcttaaatcattttaagaggctagagaagaacccattcccaaaccaaaacaaatctagagaaagaaattattatgatga

SEQ ID NO: 839479 - DNA, 359 bp, Homo sapiens
gaatgatgagtatataccaaaaagagacagtgtgagaatctgaaggtcagagatgactgagccagaccacatgggcaagttggagtccatgctcrtgacaaacccttggctgagcatgagatgagcaataagtgagtggtagctcctttccagcctcacctcagctgcagaaacaagaggctcttcacgctagatttgaatgttggtgcctaagagttgatcagaaggcaagtagttgacaagaactagaaaaatacaaaagcctctgtgctgagtaatgcctgagcccccagagtcccagcaaaaacagaaattagctgaatttcaggaagtcaagatatcaggcaaccaggggagtc

SEQ ID NO: 839480 - DNA, 607 bp, Homo sapiens
gttgaataactaaaattttgtaggatccaggattaccaggacttacattcctatgctttaaatttatctttataatctttttttatcaaagaagatgatgatataatagtcgtatgcatttatgccacatctataccatctcatttagctagacttccttggtttgaatcagtataacatttactagctgtgtgactttgaagaaagcacctaacctcggtgtctcctctgtttcctctcctataaaatggggatattaatattgcccacgtcataaagttgttgtagaaattgaagtaatacctaacagcatttagaagagggctttacacttagtaaataataaatttgaactcacattattgcaaacctatcagacagatcctattattcccatttttcagatgaagaaataaagcttacggaggttaagtaaatgacctgtttccagtgccggtgagtacacaaccagcttgtaccaggttggaaggacaccagaggccaagttcttatccatgattctgtgttccctccagcaacacaggarggaaaccaagtagtcctttcctattagctgggaaacggtgtcaatgaagattttagagat

SEQ ID NO: 839481 - DNA, 599 bp, Homo sapiens
tattatttaggtttagacaatataataggtttccattcatagcatctggatgcacgagtgggagccaggccatttgcttctaggtaataattaggtttttcctttctcaaaaaataaagaactttttgatattagcacttctctatggctttatactagggaatttatatgaacaaagaggcctaacggttctgtggctttttggagtctctttctttatcaaatccctgtcaatctagttttatcatcaaagtatattctttagaggcctttggtgacagctggaagtcagagttgcagttggttatatttatgcaaagtattttctaaaagattcttgatgggaaaaatttaaattgaaaaaaaaaaaaactctggagaaattactattgctttggaagagtgtaagtagtcatgatgactctgaaaaagtatatcctatgatgagggtttctcttacaatggaagttccagacagactyttctatgcacatcatcagtacttctctgtacccatagaaatttatggcctgaacatctattcactttaaaatcaaagaattatcattatacctatagattcctgaaaggctttaaaa

SEQ ID NO: 839482 - DNA, 599 bp, Homo sapiens
tattatttaggtttagacaatataataggtttccattcatagcatctggatgcacgagtgggagccaggccatttgcttctaggtaataattaggtttttcctttctcaaaaaataaagaactttttgatattagcacttctctatggctttatactagggaatttatatgaacaaagaggcctaacggttctgtggctttttggagtctctttctttatcaaatccctgtcaatctagttttatcatcaaagtatattctttagaggcctttggtgacagctggaagtcagagttgcagttggttatatttatgcaaagtattttctaaaagattcttgatgggaaaaatttaaattgaaaaaaaaaaaaactctggagaaattactattgctttggaagagtgtaagtagtcatgatgactctgaaaaagtatatcctatgatgagggtttctcttacaatggaagttccagacagactcttytatgcacatcatcagtacttctctgtacccatagaaatttatggcctgaacatctattcactttaaaatcaaagaattatcattatacctatagattcctgaaaggctttaaaa

SEQ ID NO: 839483 - DNA, 615 bp, Homo sapiens
catcaggaactgggtctgtaggcactaattctcgggcttcttatgccattgatctcttattacagtttctccacaaatgtaacatgaggtgacatttagagactgggctrcatgctcggctaattgcaaaaacaaatttctggtttttcctggagtctctggtactggcacatttagttaatcatagaaagtctgaaatactggttccggagagagtttacgaacctcctcttttactaaggtatttactctaggagctagtccttttttatcgacgcccagagatacgtgtacttctttttttctaccttgggtttaagggatttgtaattactaatttcaaggggttgcagcttccactcgtacaggaggggctgccttctcctttttggagctaaacagggtctttttcatcctttttctaagtagcctagatgacacaagaccagtaattacacacatttgcacatgagcttaattcgtggcagatatacttatttcctgctgtgtaacttttttttttttcagtttaaagaaccgcatcttattctatgccgattgctattgatagtggcacaagcattaaattttagtgttacatgcttggggatccct

SEQ ID NO: 839484 - DNA, 627 bp, Homo sapiens
aaatactatttctaaattttatacatttgtttactttgtttacttgttcaataaatgtttatrtagtatccgttatgagcttttttttttgagacagagtctcactctgtcgcccaggctggggtgcagtggaacgatctcggctcactgcaatctccgtctcctgggctcaagcagttctcctgcctcagcctcccatgtagcaaggattacaggcatgcaccactaccgcccagctaattttcatatttttagtagagacagggttttgccatgttggccaggctggtcttgaactcctgacctcaagtgatctgcccgcctcgggctcccaaaatgctgggtttacaggtgtgagccactgcacctggccctgttatgagctttttaaaacacaatcaggtgtcttctctatttaaaacccttcagtgtcttttgtgtcttaattttaaaaaactgaaattaaggagagattctggttacataatattgtgaatgcactacaggccgctgaattgtatactttaaaataattaattgcatgttaggtgaatttcacttcaattaaaaaaataaatatgatacataatcctggactggatcctatactggaagaaaagagaatgt

SEQ ID NO: 839485 - DNA, 594 bp, Homo sapiens
taacgtctgctggtatcccttccatcagcacctccacctgagtgaggccacagctctactatttctcttatcagaatttttcacctgttcagaaggctatcgactcgayaaactttagagactttgtaaattccctaaatgtcgtatcacaaaacagtaatcccatggccgaccgtcccacacaccttcagtaattccagtcaggggcaaacatttttaatttagctgttctttctagtcattacctccatatactaaatggtatattaacattgcttttactgatttttaagaaaatcaaattctgacatctgttttctggctatggcagatgaggatttaactctgttacaccactcctcggcccctctcccctatattgtcatataactggcattagataagccaatgaagtgtttacattattaagactatgtaaatgttgtccattacaaaccaagtaatatactgtgaatagatttcttaacaaatgtttatttttcctagggttactaggaaacgttttttttttgcagtgtcttccttaaaatatcctgctttaatctatcctagacagatagatactctgtctat

SEQ ID NO: 839486 - DNA, 655 bp, Homo sapiens
ggcgtgacctgcagcctgctctgttgtcatggaggtgctcagcctgaagcaagctcttgggattcccgggctatctcctggctctttacttgtggaaaagcctctgcygaatgcactgaggtaagactgctgtttagctctctgaacttatcctgtctgcaaccctcaggaaggatctgagtcaacagatgactccaacatagttaacaagtctttcatcaatggtttaaggggtcctgcagctgttttcatcactttctcaaggtagatttattgctgaagcagtctggcaaagcttccttgtttggagccaagctttagcaatacctttattcccagcatgcagctccatggaacaatttggggttgtctttcaactaggggctctggaaggcttcgggcctgtgtgtgatggatcacaagacttctgcgagctgcttctcctcctgcctccagccagcctcactttccctctctgctcccgttcattatttccatccttggtgtcactgggccaagagtcaattgcccacaggtggggctactccctccctccagctctccttcctttgcccactggctcctgaaggccatgctagatgtgaactgaggctgagtgttggtggaagaaatacaggctcaggctcaggttcag

SEQ ID NO: 839487 - DNA, 550 bp, Homo sapiens
ctctacccatatacaactactgcaaatattttggtgtatttgctttcatgtatatmtaatgaatatcatatttccatataattgattagtgtatattcaattttaatctacttttatattacaactttcccatataattaaatattcttaatttttttttttattcttagagacagggtctcgctctgttgctcagggtggagtgcagtggcatgatcacagctcactgtaactttgaactcccgggctcaagggacctcccacctcagcctcctgaatagctgaggctacaggtgtacaccaccacacccagctaatgttttaaaatttttctttttgtagagacagggtcttgtcatgttgctcaggcaggtctcaaactcttggcctcaagcaattctcctgcctcaacttcccaaagtgttgacatgacaggcataagctgccacgcctggcctaaatgttcttaaaaatgattttaggctagatgtggtagcttatgtgtataatcccaggactttgggaggctgaggcaggcagatcgcttgag

SEQ ID NO: 839488 - DNA, 485 bp, Homo sapiens
cattcacaccatagtagcatgtgataaatgaagtcttggactgtgtcttaaatgtttgatttctttagaaaatgcatgactyaggctgggcacagtggctcatgcctgtaatcccagcactttgggaggccaaggcaggcagatcacttgagttcaggaatttgagaccagcctggccaacatggtgaaaccctgtctgtagtaaaaatacaaaaataagctgagcatggtggcgtacacctgtaatcccagctacttgggaggctgaggcaggagaattgcttgaacctaggaggtggaggttgcagtgagctgagatggtgccattgcactccatcctgggcaacagagtgagactctgtctcagaaaaagaaagaaagagagaacgacatgcatgactcagatatggcaaaatgttaccattttacaaaactaagtggcaatgagtatacagtattttcctatactgtgaacgcttaagata

SEQ ID NO: 839489 - DNA, 618 bp, Homo sapiens
ccctaccctgctccaggatagtacaggtaacagacaacagacctaatacacaagcagagtrtgtagcatgttcaaaggtgatagctgctaaggaaatgagataagaaagtgactcacgcctgtaatcccagcactttgggaggccaaggcgggcagatcacgaggtcaggagatcgagaccagcctggctaacacggtgaaaccccatctctactaaaaatacaataaattagccgggtgtggtggtgggcacctgtagtcccagctactcgggaggctgaggcaggagaatggcatgaacccgggaggtggagcttgcagtgagcccagatcacgccactgcactccagcctgggtgatagagtgagactctgtctcaaaaagaaaatatggagcatctaagaacgcagaattcaaagtggggaattttacaataattgcttgtatatttagtatccacaatgcttttgtattacactttttttgtccagcaattttggcacagtattatagaaggaaaagtgttgtcatccctaaggcccactttcctgtccacctccctcaagactcacagaaatggcaactcagcctgcttccaaaggactcacgaagtacacg

SEQ ID NO: 839490 - DNA, 603 bp, Homo sapiens
ctgaaaggcagaccagggccagaccagggaaagccttgtatgccaggagagagccaaaatgctgctgtttaggcaacaaggaatcacagatgtttgaggagggatgtcatgcaacccaacacgtgagctagcatgaaggaacagacaagagaaaaggcagagggctcaggctactgcaaaatcagccagacaacactgggtgagggccctggtgcaaggcagtgagcagccatgcctaaaaggcatgctccctagggccactgactggacgtgagcatctcaaccagcactctgagatctgggtcgcccatgacaagactgtttgcagatcctctttataaaattggctacaatgctcatctccaatcttctactcaaatccgctcttttttttttttttttttggagactgagtttcattcttgttgcccaggctggagtgcagtggcacgatctcggctcactgcagcytccgcttctcgggttcaagagattctcctgtctcagcctcccaagtagctgggactacaggtggtgcaccaccacgcctggctaaatttgttgtatttttagtagagatggggtttcactgtgttggtcagg

SEQ ID NO: 839491 - DNA, 488 bp, Homo sapiens
atatttctcttcttgcataaagcgaataggagaaatacccctgaattattttgccagcaaggaataaccctgggaaaggaatgcattcccagggggagatctctaaaatggacgctctgggagtgtctgtcttatgctgttgaatataagggatgaaatacgccctggtctcctgcagcaccctcaggcttgctaggattaggaaattccagcctggcgaattatagtcagaccagttgtctgctctcgatccctgtttcctgttaagatgtttatcaatgacaatgtgtgcccagcaagacatggaacctcatcagtaattctaatttcgccctggccttgtgatcttgctctgcctttctgcccttgtgatcttttattgccctttcaagcatgtgatctttgtgactcactccctsttcgtacccccttccctttttaaaatccctaataaaaacttgctggttttgcagctcagcgggcatcat

SEQ ID NO: 839492 - DNA, 527 bp, Homo sapiens
tattcatccatcagtagagacttgagttacttttattttttgaatattatgaataatgctactatgaacataggtgtataaatatctgtttgaatccctgctttcaattcttttgggtatatacccagaagtgagattgatagatcatatagtagttccatttttaatttttggagaatctgccatactgttttctgtagtggctgcaccattttacatttctacccacagtgcacaaggatttctccacacccttattaacacttgttatttctgtataccagaacttaaagtaaaataaaaaaagagtcattttaatgagtgtaaagtagtgtcttaaaaaattcatatattctgattaatttttggtacagatctgaatggatttacaaaccttgattttactaaaataatattttatcctttcagagtaggtttcttttcrgcattagtgcctggcagatctatagctatatatctctaaactaatgactacaccagcaggtggcttaagtcacttcctggtc

SEQ ID NO: 839493 - DNA, 590 bp, Homo sapiens
aagaccaaaacctacagtggctgctaaatgtcagtwctatgagcccaggattctcctacatccccttccatggtcagggaggaccactgggctatgtgtcttctgtgattctcccctggctctgagccctttgcatctgcacctcacagcgccgctcaaatccctgggggtaaagtgcagtggcagatgttggccagttgtagtctgataagataaaagccacaggagagttctgaaattctcttttcctctcgagtatgtatttctgcatctttacggagcctcgtaaatgctttttaaacctaccctgggatttgaaccagcgcccatagacacagaagtcttgtcaggtcagccaggggctgctactgaggcagcatctctccctagcccccgacccacaggttcagaagggaaacccttccctcaggcggcttatgagacccagtacttctagtttcacttctttaaaaacaccgtacaaaagaaaaaggctgtcaaaacacaagcagtgtttgaaacgaagctttgtaggtccccctgcactaccaccatcatgggcagcatagcagatgggttctgggacacca

SEQ ID NO: 839494 - DNA, 590 bp, Homo sapiens
aagaccaaaacctacagtggctgctaaatgtcagttctatgagcccaggattctcctacatccccttccatggtcagggaggaccactgggctrtgtgtcttctgtgattctcccctggctctgagccctttgcatctgcacctcacagcgccgctcaaatccctgggggtaaagtgcagtggcagatgttggccagttgtagtctgataagataaaagccacaggagagttctgaaattctcttttcctctcgagtatgtatttctgcatctttacggagcctcgtaaatgctttttaaacctaccctgggatttgaaccagcgcccatagacacagaagtcttgtcaggtcagccaggggctgctactgaggcagcatctctccctagcccccgacccacaggttcagaagggaaacccttccctcaggcggcttatgagacccagtacttctagtttcacttctttaaaaacaccgtacaaaagaaaaaggctgtcaaaacacaagcagtgtttgaaacgaagctttgtaggtccccctgcactaccaccatcatgggcagcatagcagatgggttctgggacacca

SEQ ID NO: 839495 - DNA, 556 bp, Homo sapiens
tagccaagcaccatggcatatacctrtagtcccagccacttgggaggctggaggatcacttgagttcaggagttcaagaccagcctgggcaacatagcaagccctcatctctacaaaaaataaaaaattagcagggcatggtggcacatgtctgtagtcccagatcctcgggaggcaggaggatttcttgagcctaggagttcaaggcaaacctgggtgacatagtgagattccatttcaaaaatatgtatcagtaggttaatccagatgttgtcacatgggccaagcaaccaaagtcacatcttagagttgtggactgtgtaatcagataagtgtggctacagtcacagaaggtcagggtagaaagaggcttggagaggggcacacttctagccagagctttcctactgagctccttaaagctcaggggaaagtgggacagggttggggggcgacctaaatcccacaccctcccatcttcaaccagagcaaccccatttgtatctgctcagcagtatcatgcatccatgtaaaattttatttgaaaatggccttc

SEQ ID NO: 839496 - DNA, 556 bp, Homo sapiens
tagccaagcaccatggcatatacctatagtcccagccacttgggaggctggaggatcacttgagttcaggagttcaagaccagcctgggcaacatagcaagccctcatctctacaaaaaataaaaaattagcagggcatggtggcacatgtctgtagtcccagatcctcgggaggcaggaggatttcttgagcctaggagttcaaggcaaacctgggtgacatagtgagattccatttcaaaaatatgtatcagtaggttaatccagatgttgtcacatgggccaagcaaccaaagtcacatcttagagttgtggactgtgtaatcagataagtgtggctacagtcacagaaggtcagggtagaaagaggcttggagaggggcacacttctagccagagctttcctactgagctccttaaagctcaggggaaagtgggacagggttggggggcgacctaaatcccacmccctcccatcttcaaccagagcaaccccatttgtatctgctcagcagtatcatgcatccatgtaaaattttatttgaaaatggccttc

SEQ ID NO: 839497 - DNA, 487 bp, Homo sapiens
ggagaggatgctatgctgtgttgggcgggaagtcacttcctccctccaaacataggtgtccagttctctcttcctccctttgtcaagtaggagctgttatgccaagggcaggcaagaaacaggcccctgagtgctcagtttcatggccgggctttgaagcaggagtttcctcttggccctcaggccacacttctgtagggtgcctctgcagcatttccctccttgggcaggagcctggcttgcagaggacagacagcaggaagaatgctgcctcccccatgccaccagatcctgtcccaaggccagcaggaggggaggggaagcaatctgatcactggagcaggaggggccagctctggagtccacatggctgtggctgggctgtgcttytagaagcagcagctcttgccgcctctctctagggatttttgtctttcttttaaaaacttttttttaaccttcttttttaagacagggtcttgctatg

SEQ ID NO: 839498 - DNA, 598 bp, Homo sapiens
ggggcttgtcccagcccgctaagagcacgggttggtgagaggcggctggtttgtccctgaaggagcttatcttggctgaattctcctaatcctcttgcaggattaaggaaactcaatgcacgtcccgttgataatgccctttaaggatttaataagctttgggctttccaagagaaagccttggaagaggaatttgaaaaacttgcctcagctccagactttgcttctcactcactgggtgaccttgatctgtggctccgtttctctacctgcaaagaaaaggggtgagtggtggcctgtggtccctgtgctgttgtgtgtcttaggggagggctgcacacaacagctgggactacaggtgcacaccaccacgcctggctaacttttgtatttttagtagggggggcggtttcaccatgttggccaggatggtctcaatctcttgaccttgtgatctgccgcttcagcctcccaaagtggctataatgtgtattggtttgggaarcttccaccccacccgccctggggggaggtagggctgtgagtcaccaaagcatcactgaggccagtcatgggacagtatccattggaacacaga

SEQ ID NO: 839499 - DNA, 627 bp, Homo sapiens
tttactcctctgtaagccttaaaacctgtaagggtggactgaataattcactttagaaatcatgaattttgggttttgtattagccttaaatatagtcacatttggtttaagtaatacaaaacttgatgctaagcttagtgactctggtaaacattagaaacaattttttttttgagatggagtctcactctgtcgcccaggctggagtgcagtggcgcgatctcagctcactgcagcctccacctcccaggttcaagcgattctcttgcctcagcctcctgggtggctgggattacaggcacccgccaccatggccagctaatttttgtaatttttaatagagatggggtttcgccatgttggccaggctggtctcgaactcctggcctcaggtgatccacatgtcttggcctcccaaagtgctgggattacaggcatgagccactgtgcctggccttgtccagtgttttttagtcattcaagaatccagcctcatttcatcccagctggaagaaaaagttcaacatagtgtttataatgtattatttttaaaattttcaattagtacatagattttcttaaatayacttcttagaaaagaaattgcatttaaatattatagatgt

SEQ ID NO: 839500 - DNA, 610 bp, Homo sapiens
ttctcccaatacatatattcccaatccacagtttgtttgccagcccacaagcaggccctaatctttccagactcttcctcccttcctggcctgagcctctgagcctggctcagccttccccatcctccctaggcacaaccacactcccgtctgccactccactgagacccaaatgtgtattttgtttttcaaaatattgtacaacattttaatgattctttcttcctcctatattaatttttatctctgatgttgaagtttctaataaagaaactcttttttctaaaaaattataaaatttacttgtgaattccatgggtctgtgtagaaaatgtcttcatttacttctttaatctttttctttgcttaattcatcagaaatattttaattatgaattatagttttttggaaataaagataaaatttttttaaccagaaaggaggttgaggtaaggaaccaatgggacagtaaaagtggatatatatatatatatatatatatatacacacccacccactaattggtatatggaaaatatgsaaatatatatggtgatttcccataaaaatacctttagtaccccctaaaagtgccctttttttcaccca

SEQ ID NO: 839501 - DNA, 646 bp, Homo sapiens
ggaacagaatagaggatccagaaatatattcattcatacattatggtcaactgatttttgacaaaggtcagagrtaattcattagagaaaagataatctttcaacaaataatgttagaacatttggatatctatttaccaaaaacaaaaataaaaatttcaattagtacctcacaccatctacataaattaatacaacatggatcatagacctaaatagaaaacctgaaactataaaactactagaaaacacatagaaaatctttgtgatcttcaattagacaaagatttcttagataaaacaccaaaaaaccacaatccataaatgaaaaaaaaatggattaattggactttgtccaaattaagaatttctgttaatgttaagaaaataaaaatataaattacagacttggagaaaatatttggaaattgcatatctgataagaacttgtatccagaatatataaggaactgtcaaaactcacaaaggaaacagtcaacagaatgaaaaagtgacctacagaataaataaatatatagtcagcaaactatatatttgataaggagttaataccaaaatatataagaaacttctacaaatcaatagtaaaaaaaaaaacctaataactcagtttaaaaagtgggtt

SEQ ID NO: 839502 - DNA, 655 bp, Homo sapiens
gtccccacacacaggtcagaggttgatctcagagaggtgaagaaacatgctctcgggctctgtcacataagtggggtggagagacgctgcctcgtaactgtcacactgaacttatacttatcccatgcgtgctgtgtgctggaatcattagcactctgtcctagatcccttgtgaatattgttctcctggcttagcctcgcctctccccatcccaggttcatggttctgtgggtatgaacctgcaaggatgcccgacatcccagagcaaccaaaaacagacccaggacttggctgacttacagaaaactacaacacacaaagactccccctcctcagcccgcccccccccccctttgcaggcacacacacacacacacaaacacacacacacacatctggatacagccagaatacagggaggggagtctcagagtcatggcgctgatgctggctctgctcttcactgaccctcctagccctgctgcctcagtccccaccagtgtccacaatgcaaggttccactcagccttgcctggagctgggcgcgcacacacacacacaaaccygatccccatgtgtgtgtagatcacaggctgagttccagatcaatgcatgggtcctcacccggcgaggcctcctgcctgtctcctcccc

SEQ ID NO: 839503 - DNA, 550 bp, Homo sapiens
tcccctgaagtcctcaagacagtcggttgtaactaactaataaccatctacaaaaamcacagagtcctagaacagttaagaactggtcaaatgtcatgcaatcagaccattttagaactaggtttgtttatttttgaactttcatattgacttagatacgcttgggaccatttttaagggaatagcactactaagcatgtatctggctgagcagggaaaataaaataatgaattctcatgtacccatcacccaaattaagcaattttcaattcttggcctgtcttgcctcatccatgtgccatttgtttcttctattttgttactttgaagcaaatctctgacataaaatcacttcaaaagtgataaactttcaaggtgaaaaatcaatcaatagtttagattaagtagtatcaagtacatataacacattttaactaggaaaaatatgttcctaattagaagtgaaaattcaaatattttttcaaatttttaactttttctttctcctcaggaatgcctgtaactcataggtttcgttgctttacacaa

SEQ ID NO: 839504 - DNA, 628 bp, Homo sapiens
actgcactggtgtttatatttttcatgccacaatattaamatataattttaaatgtacattattataatccataaaagatttgcatacatgtattaggcttccgatatgatttggctctgtgtcccacccaaatctcatgttgaattgtaagccctaatgttgggggaaggacctggtagaaggtgattcgatcatggggacagatatccccttgctgttctcacgatagtgagtgagttctcacaagatctggttgttttaaagtgtgtagcacttcccccttctctctcttcctcctgctcccacaatgtaaggtgtgctggcttccccttcgccttttgctatgattatgagattgctgaggcttctccagccatgcctcctgtacagcctgcagaactgtgagtcaattaaacctcttttctttataagtcaccagtctcaggtagttctttatagcggtgtgagaacagactaatacagcttttaagtctttactggaaattatgcaaatagtggttgtaaaaagactgttttaaatagttttttactgttctagttttcagtttttatagaatattataatattctattataatagaacattataattaatagaactattta

SEQ ID NO: 839505 - DNA, 633 bp, Homo sapiens
tttccattatggtaaatgcatgatctaagcacaccttccaccagccagccacggatctcccaaatggtcttcctcagcctttgctctgtactccttctccttaagccccaatcccttcatcattaacactgawctaccctttaggatatagcagagatgctaaattaatctagaaagtaagctccccaaggatgtgctagatcatcactcccctgtgttcctaaagcaactgggaaaggaactgccataggctaaatttctactccctcctccccccagaatttatttgttgacatccccagtgtgatgttattttgaggtagggtctttgggaggtaattaggtcataaggatagaaccctcatgaataaaatttgtgccttttaaatgaggccccaaagagatccctcacccctcctaccatgtgagattatagagggaaaaagaccttctatgaatcaggaagcaagcccttaccataccctgaatttgccagtgccctgatcttggccttctcagcctccagaactgtgagaaataaatttctgttgtttataaactacccatcttattatattttgttattgcagcctgaaaataagaattaaatattaatttcctactgcaaattgc

SEQ ID NO: 839506 - DNA, 648 bp, Homo sapiens
aaacaccaaaaccaattgcagcaaaagcaaaaattaacaaatgagatmtaattacacttaagacttcctgcaaagcaaaggaaactatcaacagagtaaacagacaacctacagaatggaagaaaaatttggcaaaccgtggatccaacaaaggtctaatatccagcatctatatggaacttaaacaaatttacaggaaaaaataaacaagcccatttaaaaagagtaaaggacatgaacagacacctttcaaaataagacatacatgcaaccaaaaagcatatgaaaaagaagatcaacatcactgataattagagagatgcaaatcaaaaccacaatgagataccatctcacaccagtcagaatagctagtattagaaagtcaaaaaataacagatgctggcaagtttgcagagaaaaaggaatgcttatacactgttggtgggagtgtaaattagttcaaccattgtggaaagcagtattatgatgcctcaaagagctaaaagcagaactaccattcaacccagcaatcccattactgggtatatacccaaaggaatataaatcattctattataaacagacatgcacatgtatgttcactccagcactattcccaatagcaaagacatagaatcaacctaaaag

SEQ ID NO: 839507 - DNA, 534 bp, Homo sapiens
gttacccaaactccatgccaaggaggtggcagaactagtgtcacacattttatctgccctaaacctcattctctcctcaggtttcaaatmcattagtatctccatataagtaaatgaaaaggacatgctattttttgagcactcatgcactaaatttatataatgttcaatattttctttctcaattctacataatgtttttgattcactttaaatgcttagaaaaataggaaatacaacaaagatagcttttagcaactgaattactgtttatccagaaattagctgctcagaataagtgaaattgtatttacaactgccaagattatacccaaaatgcttttaagaagcccaaaatgcttttaatcagtcactctaaatttattcatgtgttgaaataagcactgaaacaccaacaggaataaaagagtataccaagattaaattcagaggcttcttaaaataacaatcgacaaggcagtcacagacactaacaagtcctggtttctttgggattatttccaagaaaggaaa

SEQ ID NO: 839508 - DNA, 586 bp, Homo sapiens
atcccagataaagtctacttgatcatagtgaattagctttttgctatgttgctagatttagtttgttagtattttgttaaagatttttatatgtctgttcatcagggatattgacctgaagttttcttttttcacttggctctgccaggttctgttatcagaattattctggcctcatagaatgagttagagaggagaccctcctcaatgatttttttgaaatagtttcagtaggattggtaccagctcgtctttatacatgtagtaaaattcggtagtgaatctgtctgctacagggatttttctgattggtaggtttttttgttattcattcagtttcagaactcgttgttgacctgttcagggtttcaatttcttcctggttcgatcttgggaggttgtatgtttccagaaatgtatctatttcttttaggttttctagtttgtgtgcatagaggtgctcataatagtttctgagggtttttgtacttccgtggggtcagtggtaatgcacmctttgtcacttctgattgtgtttatttggatcttctctttttctgtattattagcctagcaagcagtctgt

SEQ ID NO: 839509 - DNA, 561 bp, Homo sapiens
atactgttattgttacatatattacatctctccatacaatgttataattctttttagaataaaaatcacatattttgtcaaggaatttaaacaaagaaatgaggaaaatatattaataatctttcatgttaactcatatatttaccatattcaatgcacttcatttcttcttatggatttaagttattgtttggtgtcattttctatcaggatgaagaactttagaatgtctggtaaggcaggtttctagcactaacttttctgtgtttgtttcttgggaatgtctttatcttgcctccatttttgagatagttttgctgagtatagaatcctcagctgacatttttttcttttcttcagcatatggactattcccctgtttttggctctcattgtttcagatgagaagtcagttcacattaatggtcccttgtacacgatgaattatttttgtctttctatttaaatgaattatttctctctctttttgkctctcaatgatttgagtatgatgagataggtgtaagcatctaaatttatcctacttgagattggtttaga

SEQ ID NO: 839510 - DNA, 574 bp, Homo sapiens
gggggtcatctccttttaagtaactattttcacacacacacacacacacacacacacacacacacaaaatcagaactgcaaatgctaaaaattgggaggttaacaacaataaacaagaatattatgctgtatgyggcataaaagctgtccttagaggataataataattaatattactgtcatcaataagaatatgaagaaataatgaatgtaagaatttaggaagcgataagacaaaaacataaagaaaatagaggaatgagattagattaaatcaaattatttagaaattagaaaaatttaattgataaattcaataacttttcctttaaagagataaataataaattagtgttttattttaacaaatattatcaaggtaaaaatagagaaaatgaaatttaactgtgaccttagaaattaggaataaatttaaaatcgaatttagagaaaatagagctacaatatagatcttgttaatgatttggaattttatgtgaaatagagttcttcaaatattactaaatttatctaaagaacagatagagctcttgaataggtttcaatttcatag

SEQ ID NO: 839511 - DNA, 659 bp, Homo sapiens
ttattactatacacaatatatttagatggactaaagtggatatgtaagttttcattccattaaaaattaagaaagaaacaacaaacaggctcaacaatgcaccagatttgcaggtagcattgccttaatgtgttccatgtaggattaatatgtaatccagctagcaccaccagatgcattaaacatcttgtaatctttgatttcctattattcatttggggatttcccctaatttttatatttatatatatttattatatcaataaactcaaaatttctattaatattatgttttaatttttatacattataaggaaaagtattgctttatataatgtatcaatatccctaacaaaatggtgatatttcaggacaggacaatattttagtcttatttgtatgcctagtatccagctcagtgcttgaagacttgtgatagtttaatacatgtttgttatggcaatgaaataagtgaatttattcattaataatgtactcagacaattattttgtctaatcttttggtttcaatgtaagagaaaaaaagctggtacttaagggtactggcatgctcttgtagaagctcttcccctctgtgatgaaaaatgggtaaagtctggcttcctggmaactcattattctcttactttagacctccc

SEQ ID NO: 839512 - DNA, 592 bp, Homo sapiens
aatgtcttcttatctctactaaatgaagtgagatgagaacccaaagatcttcccaacctggtttcatttactgggwcccaacaaatagcaccttttctatgcatcccgctccacaggtactaaatatatgttccatttttgccctttttatctttccttgtttaccaagaggctgcttctatagaacacatcaccctgccttgttttctagatggcaacagccaatgagaggtagcaaccccaatttggaaggcatgaagtgagaaagattagggtatttattctgcgtaccaccacctcacccagaactacagttttgcagtgccatgtttctcttgttcttctacccacagtctcaagtgccctggacagctcttttccaatggctacagtgtttgtgagttctagtaatgttgttctccttttagctcttcaggcccttgggcttccactgttgctagtacctggctactttgctattcaagtttgtttcccaaatccaacccatgcttctgtaagtagtcactccactaagctcttattagtaaattctttgaatgtagcctgtttcttagtaggaattggaccatag

SEQ ID NO: 839513 - DNA, 592 bp, Homo sapiens
aatgtcttcttatctctactaaatgaagtgagatgagaacccaaagatcttcccaacctggtttcatttactgggacccaacaaatagcascttttctatgcatcccgctccacaggtactaaatatatgttccatttttgccctttttatctttccttgtttaccaagaggctgcttctatagaacacatcaccctgccttgttttctagatggcaacagccaatgagaggtagcaaccccaatttggaaggcatgaagtgagaaagattagggtatttattctgcgtaccaccacctcacccagaactacagttttgcagtgccatgtttctcttgttcttctacccacagtctcaagtgccctggacagctcttttccaatggctacagtgtttgtgagttctagtaatgttgttctccttttagctcttcaggcccttgggcttccactgttgctagtacctggctactttgctattcaagtttgtttcccaaatccaacccatgcttctgtaagtagtcactccactaagctcttattagtaaattctttgaatgtagcctgtttcttagtaggaattggaccatag

SEQ ID NO: 839514 - DNA, 592 bp, Homo sapiens
aatgtcttcttatctctactaaatgaagtgagatgagaacccaaagatcttcccaacctggtttcatttactgggacccaacaaatagcaccttttctatgcatcycgctccacaggtactaaatatatgttccatttttgccctttttatctttccttgtttaccaagaggctgcttctatagaacacatcaccctgccttgttttctagatggcaacagccaatgagaggtagcaaccccaatttggaaggcatgaagtgagaaagattagggtatttattctgcgtaccaccacctcacccagaactacagttttgcagtgccatgtttctcttgttcttctacccacagtctcaagtgccctggacagctcttttccaatggctacagtgtttgtgagttctagtaatgttgttctccttttagctcttcaggcccttgggcttccactgttgctagtacctggctactttgctattcaagtttgtttcccaaatccaacccatgcttctgtaagtagtcactccactaagctcttattagtaaattctttgaatgtagcctgtttcttagtaggaattggaccatag

SEQ ID NO: 839515 - DNA, 639 bp, Homo sapiens; identical to SEQ ID NO: 823489

SEQ ID NO: 839516 - DNA, 509 bp, Homo sapiens
aaaaatattgcaagaagaggaggctgctttctcattccctagttacatgttacattttytggtgtgctctttctgcctatctgaggaagatgaggaaagaaatggtaagagaagacccagcagggagcagtaggagcctggtagggctgggaagcttgagactctcaggggccagtgaactcggaagatgtcttgaacaagaggcagtagttgatggaagtcagaaagaggtggggtcggaggctgtctctgccttcagaagattgtgtcaagggagagcccaggccacccatggagaagcctttgcataccacaatatcagccaatccgtcttagcaggagacaaagacagccaagataaactaaatctgcagttaagtaacagatgcttttctttccatcatcttcctctgcaaggcaacactccaggagaaaaagggagccagaagatgggtgagagaaggagagagaggacagatgatgcccgtctacacatccggtcccttagt

SEQ ID NO: 839517 - DNA, 570 bp, Homo sapiens
atggatttgctgtctcctatgacaggatggcactgagttcaatgtcaaaggtcctctctgtaggcaggtcattctgtttgagtgttccgctctyagcagaaaggaggccctggagtaggtggctcctctctgcaagcaggtcatctcgacaagtgttcagctctcagcagagggtagctcctctctgcagctggtcatcctgttgtctgcaactctcagcagagaggaggccctgagaatggtagctcctctctgcagctggtcatccctatatctgctctgctctggctgagtctgggatttttatggtcttcagagggggaaagtgtgtggtgattggtctatgggctgccatggtgggcccaggaaaaataccatgaattccctggccccaggcttcaggccttcctcggtctggaggtggtgtttcacctgggacgtgtccccttccacccagagcctatctatctcctcccactgttcatggctgcccaggctgtttgtgccaaggggagcctacaggccagcaatgagctgcccttagcaccacctcagcttccctcctgtgcc

SEQ ID NO: 839518 - DNA, 570 bp, Homo sapiens
atggatttgctgtctcctatgacaggatggcactgagttcaatgtcaaaggtcctctctgtaggcaggtcattctgtttgagtgttccgctctcagcagaaaggaggccctggagtaggtggctcctctctgcaagcaggtcatctcgacaagtgttcagctctcagcagagggtagctcctctctgcagctggtcatcctgttgtctgcaactctcagcagagaggaggccctgagaatggtagctcctctctgcagctggtcatccctatatctgctctgctctggctgagtctgggatttttatggtcttcagagggggaaagtgtgtggtgattggtctatgggctgccatggtgggcccaggaaaaataccatgaattccctggccccaggcttcaggccttcctcggtctggaggtggtgtttcacctgggacstgtccccttccacccagagcctatctatctcctcccactgttcatggctgcccaggctgtttgtgccaaggggagcctacaggccagcaatgagctgcccttagcaccacctcagcttccctcctgtgcc

SEQ ID NO: 839519 - DNA, 483 bp, Homo sapiens
catgtggacctgtggcgcaacctcttgcttggccagggtgagcagggcatcagcattccaaagctaagagaataagatacacacacacacgcacacacacacacacacacacacatctccaaaactcagacaggaacatttatttttattttgttaagtcaatgcagttttcatctagaaatatagcaagagctctaccatttttttatttgaacaattgcttaaaaaaaaaaagaaaggaatgattatgtagaaatgtttttgatgcagaattactgagcctggaggcaagggggcggggcggggcggggcgggtggaagatagtgcccatcttctattagcagcaggatgtatgagcacagatgacaatccggtccatgctgttcatcagacaaagcctgaatcctggaaaaagccaactctttgaacaggaattagagtgtgatcggstcagttgacgtacaggggtaggtgagtgcgag

SEQ ID NO: 839520 - DNA, 597 bp, Homo sapiens
tccataaataaatctaacaaaagatatcatataagatctctgcattattatgttaatctaaatagaggtatatgtcatgtttgcatatcagaagacttaataaagacttacattctttcaaaaataatctttagagtccacactctaaatacagggtctcaaaccaattcccagaaaagctgtgtgttatagtaattaaggttgtgtgctgtgggcagtagcagagacaaataaaccaaaagaactaaacagaaaatctagaaacacatccccacactttattatggtggaggtaaattgtagtgcaaagagaaaagaaacgtctcttcaaataatagttctgggtcaattacaccttcacatgaaaaatgtcaacattgattcctacttcacagttgattaaaaagtagactccagatagactggagatctgagtatgaatagtagaacaattaaactaccagaagaaaacataagagaacatccttgtgaccttggaatgagygaagatttctcaagcacaacaaaagagctgcagttactaagaaaaacattgatagactggacaataatcgatttgtctctcaaaaggtacaa

SEQ ID NO: 839521 - DNA, 605 bp, Homo sapiens
ttgcttctcctcattttctcttgcctccaccatgtaagaagtgcctttcacctcccaccatgattctgaggcctccccagtcatgtggwactgtaagtccatttaaaccacattttcttcccagtctcaggtgtgtctttaccagcagtatgaaaacaaactaatacagtaaattggtaccagtagagtggagtgttgctgaaaagatagccgaaagagtggaagcaactttggaactgggtaataggcagagattggaacaatttggaggactcagaagaagataggaaaatgtgggtaagtttgaaacttcctagtaacttgttgaatggctttgcccaaaatgctgatagcgatatggacaataaaatccaggctgagggggtctcagatagagatgaggtacttgttgggacctggagcaaaggtgacccttgttatgttttagcacagagactggcagcattttgcccctgccttaaagattttgtggaagacagaacttgagagagatgatttagggtatttggcagaagaaatttctaaacagcaaagcatgtaagaggtgacttgggtgttgttaaaggcattcagttttataagag

SEQ ID NO: 839522 - DNA, 605 bp, Homo sapiens
ttgcttctcctcattttctcttgcctccaccatgtaagaagtgcctttcacctcccaccatgattctgaggcctccccagtcatgtggaactgtaagtccayttaaaccacattttcttcccagtctcaggtgtgtctttaccagcagtatgaaaacaaactaatacagtaaattggtaccagtagagtggagtgttgctgaaaagatagccgaaagagtggaagcaactttggaactgggtaataggcagagattggaacaatttggaggactcagaagaagataggaaaatgtgggtaagtttgaaacttcctagtaacttgttgaatggctttgcccaaaatgctgatagcgatatggacaataaaatccaggctgagggggtctcagatagagatgaggtacttgttgggacctggagcaaaggtgacccttgttatgttttagcacagagactggcagcattttgcccctgccttaaagattttgtggaagacagaacttgagagagatgatttagggtatttggcagaagaaatttctaaacagcaaagcatgtaagaggtgacttgggtgttgttaaaggcattcagttttataagag

SEQ ID NO: 839523 - DNA, 623 bp, Homo sapiens
cacctctgtgaagttgcatttttttccatcagagatagtgatttctggattatattaatcaagtcatgtcatttttggccacccatctattttattcataggaagccagtaataagcctccayagatttctaagtgtcagtaccctccgattgctactgcatctctgtggtctatcacagaaattgagccaactttgtctctgataattaagcctcacaactgggtccctgccaccctgaaatagcatcattgctattgaaatcagaacagccagatcaatggcaaaatctctcatcatcatttcaaggctacatagagtagccacacagagctcttcagagaccctgggaagactctcgccaatctgtttctctttgctttgctatggggtgaggttaggaggtagctaagcgtgttgcacatgagaggtccactctcccatgtccatctacttaagcctccagtttccttaatttacaatatgccaaggaagcttccatctcaactgtgcttacaggccaccacagatgcaggcttcaactaatcaaacaaccaaatcgttagagccactcccagctatgtgagctaaacaacaaatcccaaatttttgaggtagtacatc

SEQ ID NO: 839524 - DNA, 588 bp, Homo sapiens
atcctctgctttccttttaaatataaatttcatctttaagtcattttttgtctcccacatctgagcataggtttttagaagcagtcagaccacatctcgaatgctttgctsatggaaatttcttccaccagataccctaagtcatctctcttaagttcatacttcaacagatccctgaggaatggagataatacagccaagttctttgctaaggcacaacaaggatgatctttgctccagttcccaaaaagtttctcatttccatctgagacctcatcagcctgaacttcacagtcaacatcactatcagcatttcagttactaccatgtaacagtctctaaggatttccaaactttccctcatcttcctgtcttctgagctctccaaactcttccaacctctatctgttacccagttgtaaagctgcttccacattgtcaggtatctttataataatggagggatgacctaacacaaaaattggtatcagaagtgagttattgctgaaaagaatcagatcttgtgaaaactcattatcctgaagatagcacaaagccataaagggtctacccacatgatgcaaacac

SEQ ID NO: 839525 - DNA, 607 bp, Homo sapiens
atttggcctctgttggttactgaactgaagtttaccgtggtggctgcgaagtgacagttgcttcttcaygtttcccagttgacgcttagtgttctactattagtgagatccttcttttccctgcactgatttgtttacctattgattattggcatggactcattaacaagatcttgtaaatggtctgtaatttgttactgtccttaattattttggtgttcaaattatcccctattgggcctgcaggagcacctttcagctgcctcctgagtctgcatgacgtgcccctgctttggaatctacctcaggctgaaaagccaggggctagagaggtggaaatgagttttctaaatttctttcactttattagcatatctgtgaccagcctggatcacagaggggtattgtgagtcataggatggagggaaccagagtccgatcttagggaagtcctttccctgctgcagaggaggtggagaacccttacatcatggccaggcattgcagcaggtaagggagagagagacaggtagacacagacaagcatcgcagccgggtaagggagagaaaggcaggtagacacagccaggcatcgcagcaggtaagg

SEQ ID NO: 839526 - DNA, 607 bp, Homo sapiens
atttggcctctgttggttactgaactgaagtttaccgtggtggctgcgaagtgacagttgcttcttcatgtttcccagttgacgcttagygttctactattagtgagatccttcttttccctgcactgatttgtttacctattgattattggcatggactcattaacaagatcttgtaaatggtctgtaatttgttactgtccttaattattttggtgttcaaattatcccctattgggcctgcaggagcacctttcagctgcctcctgagtctgcatgacgtgcccctgctttggaatctacctcaggctgaaaagccaggggctagagaggtggaaatgagttttctaaatttctttcactttattagcatatctgtgaccagcctggatcacagaggggtattgtgagtcataggatggagggaaccagagtccgatcttagggaagtcctttccctgctgcagaggaggtggagaacccttacatcatggccaggcattgcagcaggtaagggagagagagacaggtagacacagacaagcatcgcagccgggtaagggagagaaaggcaggtagacacagccaggcatcgcagcaggtaagg

SEQ ID NO: 839527 - DNA, 607 bp, Homo sapiens
atttggcctctgttggttactgaactgaagtttaccgtggtggctgcgaagtgacagttgcttcttcatgtttcccagttgacgcttagtrttctactattagtgagatccttcttttccctgcactgatttgtttacctattgattattggcatggactcattaacaagatcttgtaaatggtctgtaatttgttactgtccttaattattttggtgttcaaattatcccctattgggcctgcaggagcacctttcagctgcctcctgagtctgcatgacgtgcccctgctttggaatctacctcaggctgaaaagccaggggctagagaggtggaaatgagttttctaaatttctttcactttattagcatatctgtgaccagcctggatcacagaggggtattgtgagtcataggatggagggaaccagagtccgatcttagggaagtcctttccctgctgcagaggaggtggagaacccttacatcatggccaggcattgcagcaggtaagggagagagagacaggtagacacagacaagcatcgcagccgggtaagggagagaaaggcaggtagacacagccaggcatcgcagcaggtaagg

SEQ ID NO: 839528 - DNA, 616 bp, Homo sapiens
ctgtggattgcttgaaaatattttataattccattttgacttatagtgttttttaagtgtatttccttgtatcaattttttagtggttgctctaggtgctacatcctgtacatgtaactcaggaaagtctatttgagttgatgttttatcagttcgaataaagtgtagaaacttcatctccctttagataactttaccctatcacattgataatataattatcttaaatagtttctttctatatctcgagaagtatattagacaatgttataatttttgcatcaaccatcatagtttagaaaacttgagaagctaagtgtagcatatatttacccatattttttctctttttgtcctttcttcctttctgctactagaagattctttctatcatcatttcctatccatctcaagaaatttccttagttattcttttagggtaggtctgttggcaataaatcctgtttgttttcctttatttgacaatatgttgattttccctgcattcctaaagkatatttgtgctagatatagaattaggggttgacaggtcttttctttcattacttgaaaaaaatctgtcacctctagtctctgttgtttctgatgagaaaca

SEQ ID NO: 839529 - DNA, 589 bp, Homo sapiens
tgttacaggtggatagttttaaactcaattatattcaaacgcttagggtctattgattactaatagttttcactaatcaaagcaagaattgtttctactactattactaaggttagtattaacccaaagcaagcaactgtcagatatttactgggagcatttgaatgaactaaaaagaatgaaaagatcaaggagtctactcctgaaaatcagtttcaggtgtatttaacacacagatacatttccataaatctaaaggccccatcgcttgcctcatgtaagtcagaatcacttctacactgttaacgagtaactacaatttccttgcaatcacaaatcctgctgatagaaagccaccactgtgacatcacatagctgtgcggtcccaggttttcaaaactgagttggtacaacaagctcactcagcaagcacacgtcaacttctacatgtacatgtggtgccagtacaaaaacaggatggctgctggcctcaggaaggcaacaggccacacccctaggaaacaggagacagaggcactggaaaggaaatgtgayctgatgctagggaagagagaacaaggtcctgagc

SEQ ID NO: 839530 - DNA, 598 bp, Homo sapiens
tgtgttagcctaaaccacgttgtttgtagttcaagcacggtaaacacagrtatatacattttgttttaaagcaaccggttaatttacttggaatcagattgtcattctttcttggttgctagctctaatcttggtgcacgtctttatcctgtgggctgttggagtctgccctgtgcacacatggttcatggatcaggcagacatttgcacagaatttatatacagagcttggggccctgtctctgtggctctctcctttgtcatattctgtcctcacctcccaatgggtgtggtattttcctgtatcctggttgttaaggccaagaaggttatgagcttttaattgtagcttttgccatctttcttggcgcagatagacctgctttcagagcagaaaccgcagaaaggaaaatgtatctagtggtgttcctctcttccatggatcgactctcccctctagaatctgcttgcttttgtcctccagtgtcttgaggtcaggagttggtgaattaagcccacctgatttttagaaagaaaattttattggaatatggccatgcccatttgtttacttattgtctgtagctgttttttgtta

SEQ ID NO: 839531 - DNA, 540 bp, Homo sapiens
ttccagttttgttaatcactgatatgaaagaggtgaggaasaattgttttaaatgactcgctcatttgttaccataattttaactctagcatattcagatgtcagagattttagtttttttgaaagtgctctttgaaatgtatattgtaggatgaaatactttttctttcactccttcattcagcacatactcattaatcctctgtaaatgcaaggcacgtgctaaactctgtaatacattaaagatacatcagacatatagagtgttctcaaaaaactttagtttattaaatgcactaagttcagcttactgagattaaacatgtgtacaagtaactgtaattccaaagtggaaagtataaattcatgtcagagagtggtcttttttgcggcctggtgtggtgactcgtgcctgtaatcccagcactttgggaagccaaggtgggcacatcactcgaggtcagagttcgagaccagcctggccagtgtggtgaaaccctgtctctacaaaaaacaaacaaacaaacaaaaaaacacaaa

SEQ ID NO: 839532 - DNA, 540 bp, Homo sapiens
  misc_feature 1, 2, 3, 4, 5, 6, 7, 8, 9, 10, 11, 12, 13, 14: n = A,T,C or G
nnnnnnnnnnnnnnaaatacttatcatttagtgtgatcttggttaccatgtaaaacaatggtttttgcctacttcaggagcttttgtaattaccaaaccgtctrccttcctaacttgctatattaatgctgatgcttgaaagtaagatctttggcatttatgcttacactttgcatgaggaataagttgagtacaagacgttatgccatgtctttagtctattaattaaaaacaaattctaagattcaaggagttttcagtgttccacatttctccctttagaaaaagtaaatgtgtgcagaattaacaaagtgtttaaaaatagatatttattactttactatttggatgaatgtgtagggcagtgcttccttggcactggggatatttcattgagcaaaactaaaaatatcttccctcatggagtttatgttatagtaagacatacatgtacatctataataactattacattagaaggtgtgaagtattgtgaaaaatatgtagagctgtagtggagcgggaagaaatgttttgaaa

SEQ ID NO: 839533 - DNA, 616 bp, Homo sapiens
attcttttttttttttaactaaaactacagaatctatttttcttggtctcatactcagktttttatgtaggcacttcgtaaataatgaacctaatttgcttgttttctccctattttgttgaatgttcacggtttgtaacttttatttttaagcttgtaatgaccagcctgcagtcaattcttgaaaatgtggatacaccagaattgctttgcaaatgtgttaagtgcattcttttggtggctcgatgttaccctcatattttcagcactaattttagggtgagttcctcattccgctgttcagatcatggggtgagggggatggttgtgtgtgtgaggaactgaggaatcagatggaaaacagtgcctctgctcctttgaatataatcagtgatatttgaggttccagggttaaatgccgcatttttctttctgacgttcgtaccttaaaatatttgaagaaaataaactatttcattgttgtcagaaatgtagttcttttattttcctgcccctctcccctttctaagtttctagaatgtcaagtaggtagaacatagatgctccttttaggatcttttgctgtgaaatggtccacaggtggattgcagtaata

SEQ ID NO: 839534 - DNA, 490 bp, Homo sapiens
aaactaacacaggaatagaaaaacaaatactgcatgttctcacttataagtgagagctaaatgatgagaacacatggacacatagaggggaacaacacacaytggggcctatcgggggtggagggtgggaggagctagaagatcaggaaaaattactaatgagtactaggcttgatatatgggtgatgaaatagcctgcataacaaacccccatgacacacatttacctatgtaacaaatttaaccctgaatttaaaataaaaggtttttgaaatccagatttctaccaacatttaggtcatgaggatatatgtattttctaagaaaatagaggctttctctccaatattgttttttctttctgagacctcatgagaatcatctctaataattcatatttctacgaacagtcccttcacagcagtctagacttttactaccacgaaactccaaacctctccaccctcctactcattacccatttccaaag

SEQ ID NO: 839535 - DNA, 559 bp, Homo sapiens
aatgttaccttatcacatcctgttcctgtccatgtgcatattctattttttctatttgtaataggcagaaatttatattcttcatttttctgtctcgatgattccttaattggatgtagtttttaatttttttctgtatattcttctctattctccagtaccccgaaacccctcaatccatgttaattgcctagtttttacacccttcaaccttttcctcagccttgtacaattacatagattcaaatgcacatgtatagaagttcttatcattttctcatgtaactgtacaccttgggagtctaactagattagtttataaatatctggtcaaatttttaatgattgccttatrtacatgaatggaaaaaaatgtattcaattatttctctattgatggctattcagggcattatcaattccacaccttttcttttcactaaacattacatttagtacaattcttgtacaaatattcttacatactatcaagtttgtttctacacaatagtttctgctgatgttaatattttccttatctttaaaccagtgtttctca

SEQ ID NO: 839536 - DNA, 427 bp, Homo sapiens
gagagtttaaaggaaactttagaaagaatgagcctgaaatgatgggaggaacacaggtgtgtatagagaaggagggatggaaccatttatggtgaaattttctcagaaatggcacaaagaaaggagctcaagaatcacagtcaacacccaaggaggagggtaattcattggattgaaaggatcccagaggaataaaaagttgtagaagaaaagaccaaactattgcatttgctcaccaagttctagagaattattttatcctctaggtcacagagatgggctgcagggggtggatagataagatgtggtgtgcaagttcttaaaatatgtacygcatatcatacattttaggtgggtattggacaattttcttagtgaataaagaggaaattcatttagcaaaaatcaaaattaaggtaactctagc

SEQ ID NO: 839537 - DNA, 613 bp, Homo sapiens
gcattggttccctgctattaacctctttggttctaatctagatgatggcatctgctggtcagtgtcctggtccaatgtggatcccatccagcatgctctccacccyacatgcagagcagtctttgtaaatcacaaatctcatcatgtccccccttcactcaaatgcttagatacagcctttcaggataaagtccaaactttttagccgtctataatctgactcttttcttgttacttgctcaatttgggacatgtactctggacaaatgaactgtgtcataccccaagcacgccatggtcttgtgtgccttcatcttttttactctccactccttaccagggatgaactgcctcccattctcagtctagatccgtggttctcaaggttctcaagggaacagtggcgacagcagcaaacgggacatgtcagaaatgcaaatgatcaggcttcatctcagatctcctgagtcagaaattctggagaatggaccagcaatctgcaaataaggactatagaagatcttataccacagaaaagctaggcagcgtgcagagaactagcgggccatcgatgacttctttgcctgcagttcagcaaatacacagcagaagt

SEQ ID NO: 839538 - DNA, 526 bp, Homo sapiens
gttctttgttctcctcaccctaccccaccactcaatttatcacttgtctttgcacgaagtgagttgtttcaggcgcagccattgttgttgttagtgaggttctttgcggtgcagagttgggtgaaggcagctacaggaggctcaagggcagatcctccttcaccacagagctcacaactatggcaatggctgtgtcctttctcattcacccaaacccactgagtatcccttttccaccagcccacacacctcaccactgctcccaacaatgggtggttgttttgcccctcctgttgcgccgctagcattgaagatctacgttctgttggctttgtctacgaactgccacgtggcgcatcctgactcggcatctctgcacacctccttttgacttctttcactgcacttgtccactcctgttcagacactgacatttaggatggcacacrccttctagttccactgaaaataaatcttatgtttcctgtttctaatctccttattttctggagaaaagaatggaagc

SEQ ID NO: 839539 - DNA, 397 bp, Homo sapiens
agcagtgggaggaggtgtggcttctgaaagagacatctgtgatctggaacacaaagctgtcctacaacaacgcggaagccctacttatgttccagggcaggccattcattcattagacagaatgtagaggacaccctgctggtgaggtgggcacctcgggcaaatggccgaaaatctgggactcttgatttcttcaattgaaatgagagatgggtctgaatgatatccaaggtccctgagattcttattcagtgctgcagtcagatgcaactgagtactaccctcctgtgcagacagctaggagcttcctcctgtaagcccamcttttcctccaactctcctaccctggcagcttcagattcagcttttattcacaccacaggactggctacataat

SEQ ID NO: 839540 - DNA, 544 bp, Homo sapiens
gtcttgcctctgtcttactgagtaagtgtaaacaaggcactttgccctgccacatctccattttctcaaatacaaaacagggaaaataatttctgcccagcctcctccacatgacccctacaggattcagaggatgctgctggcagtgcagcactttgaaagtttatgaagttttccacataggcaagatgctgtacatgtctaagatctctcccctcccactttctttgcttacacaaccaggaagtgaaaagcagatgtggaaaccactctcaaactttgtgccagaccctcaaatcttgtgcctaggaaatgtcctccaactttccctcacaccaacagcatcattatcttggcatagaagaaaaaaaatctatacatctcttcaaatagacatctaatttccaattggcttcacctggactgtgaaccataggaaacagaccacaaccaaattttccacaagcactgttttccatgcacacccaaaaccaagcaggaaagagaggaaatggaaaaytcccctgggcacttagctcttcat

SEQ ID NO: 839541 - DNA, 551 bp, Homo sapiens
tataactatatatttctccagattctaggaactgtccactgaaatcattttacattttaaatccattgtatttaggtttygtctttcccctacaagaactgaatctatctataaactaactacctagtattttcttggtgagtagccacttttattttcctaaagtgtacaggatggaaatttgaagaagatgtgcaaatcacaactacaaggcaggcaagtgagtaggggaggcttctaccctttcttctgttcctaatagaacccccttaaagctcaagaaagagatgtaagcagctagacattagagttcttccttcttttgcaaggaaaaaagggggaggggaagagagagagagactgattttctgagcactgacaggctttgtccttgatgaatttcattcttcctttgttctatgtgtgtaagaaggagggagagaattagaagaaagagtgacaaagaaattgacatccaatgggtatgcaaaagagaccctggctgaacttaccatttgagggcagggcgccaatgatctgtggccacccgt

SEQ ID NO: 839542 - DNA, 576 bp, Homo sapiens
ccctttcagggacttattagggtcccatgcaaggggccctgaagcttaagttcactagcatccactaaacctgggagtatagtcaaagtattacatcccccagagcaaccaccccagatggtttcacagawtaattccaccaaacctttaaggacgaggctaatccaatgtgacttaaacagttccagaacatggaagtataaagcagtttttgaaattctcctttttgaacttagcataatattgaacctaaaccatatataaagagaaaaaaaaagtaaattgcagaacaaactaatttacctgtattgataacaaaccgaatccagaatgcattaaataagtaatactataatcaagggggtcttaatcccagggtattgaaatgttagggaatccatccatgtaattcatcagagaaactgatcaaaagaaaaaattatataattatttctaaagctactgaaaagatattggataaaattcaatagttcaccttaataaaactttaattaataaaaagagaaatgcttatttatatgacatacaactatatgaatatgtattttaaatgta

SEQ ID NO: 839543 - DNA, 516 bp, Homo sapiens
aaatactagaagaaaatatagaagaattttttaatattaatcttggagaaaggaagtcatttcctagaacacaaaaccaacatgaaacataaatttaaccacataaatgtaaaaatagaattccgcaaagaaaaaaataagcataaattcaaagacaaaacacaaagtaggagcaaatatttgcaactcagactgcaaatatagaaatcatctatctaatagagagaatctacaaatcaacataaaaaaagataaaaacacctaatagaaaaataggcaaaacagtttataaaataggaaatacaaatgggttttacacatacagaaagatgctcagcctaataataaaataaatgcatactagaagtacaatgaggtatcactttttgcctatcaaattggtaaagttaagaacatttaataacattgtgtgccagcatggtgtggggaaatagaaactctcytgtaatgggaaagtcacctgtacatcttccttggagggcaatttgacaatat

SEQ ID NO: 839544 - DNA, 493 bp, Homo sapiens
ttgactctgtttcccaatgctatcactttcccctttccctaggaatctggtgtctcttattttcactttgagtaccctataagtatgtgttggtwtttttattttgagcacatctcaatcctaggcaggatctaaatcaaacaagtaaacgacaaatatctatacatgtgtatttggatatagcaaaggttgcatacagtatctaaatcctaggatgcttcctggtagttatattttactcaaatacttccagtatgcatatatgcatgtatgtgtattttaaaatatacttatatattacataaaatatataaaaatatattttaaagcacagtatccttaatcccttagggcaatgagttatctttgtgtcatagcacagaatacttctaactaacgtaaatttaaaatatttgcttcttatttaataaaattcaatgtctaacactatgtctgacatccatgaagcactcaatacacatttattagattt

SEQ ID NO: 839545 - DNA, 573 bp, Homo sapiens
ctgcccactgcttgatcctccctctactaccacagctgatgctgtcttgaaaacgccacttcctgggaggaggccaaccagcacaaaactagtgcattaaaccaccaaagctaagaaccctcacagagtccatttcaccccctctgccacctccactggaacaggtgctggtatccacaatggagagacctgaagatggttcacatcacaggattctgtgcaaacacccctcagtaccagcccggggcctggtagtcctgctgggtggttagatcctgaagggaaataataatcactacagttcagctctcaggaagccacatttctaggaaaagggggagcgtaccacatcaagggaacaccccatgggacaaaagaatctgcatggcagccttgagccccagatcttccctctcacatagcctacccaaatgagaaggaacccggaaaaaaaatactggtaacatgacaaaacaaggttctttaacacccccaaaaagtcayactagctcacctgcaatggatccaaatgaagaagaaatccctgatttacctaaaaaaagaatttagaag

SEQ ID NO: 839546 - DNA, 582 bp, Homo sapiens
tctcaagggcaggtatggcactgtgttcagcttgatctctcacagtcctgagcccggatgcttgtacttgataggagttaatgtctgaaggatttacctaaacagccagtgggaacytcaaagccgatgaaactacgattgattaccaagaggtagggtgttgttgctaggagctactcatcataaataagatgccactggggttctaaaggaaacacgtaagactgtgtatttctcaagcattgtccctctctactcctgagaaaaggagaaaccttttttttaaaaaaaaaattctacatctgaacccttctgttagaaccttctgatttctttttaaaaaacatttatttatttatttagagacagggtctcattatgtcgcccaggctggagttcagtggcacgatcacggttcactgcggccttgacctcctaggctcaagctatcctcccacctcagcctcctgagtagctgggactataggcatgcaccaccatgcctggctttttttttttttttttttttttgcagacacagggtctctccagtgtggtctggaactcctggactcaagcaat

SEQ ID NO: 839547 - DNA, 647 bp, Homo sapiens
tctggaactcctggactcaagcaatctgcctaccttggcctcccaaggtgttgggattacaggcgtgagctatcacgcctggccttaaaaccttctgctttcygatctaccatagaaattaaaatgataagcaaatactattttagtgaaactctttagaaaccagcttccaaaacaatgagcaaacttggagggactgtttcttccacccaagcttagccctggggatgtgaatagccaaattctggactctctcttcctacctaccccttttccagccagtattgggggcagggtggcagggggtgggggaagggcaataggaagccccggcccaggaaagggctctcctgggtcctgcctacctgcattgctcccccaacctctaccacatgcctcataccatgctggggagaaaagtggagcctgagccaaagccacctctccagaggggcctgggctagtgcagcaggggatggcaacctgatggcactttgcaaggtaggaagtggcagggcttagcagcctggaaaagaggtgctgagagcgcatggcagaagctataagcccagccacatgggagaagcaagtcttccacctggccagacgcggtggctcatgcctataatcccagcactttgggaggc

SEQ ID NO: 839548 - DNA, 647 bp, Homo sapiens
tctggaactcctggactcaagcaatctgcctaccttggcctcccaaggtgttgggattacaggcgtgagctatcacgcctggccttaaaaccttctgctttctgatctaccatagaaattaaaatgataagcaaatactattttagtgaaactctttagaaaccagcttccaaaacaatgagcaaacttggagggactgtttcttccacccaagcttagccctggggatgtgaatagccaaattctggactctctcttcctacctaccccttttccagccagtattgggggcagggtggcagggggtgggggaagggcaataggaagccccggcccaggaaagggctctcctgggtcctgcctacctgcattgctcccccaacctctaccacatgcctcataccatgctggggagaaaagtggagcctgagccaaagccacctctccagaggggcctgggctagtgcagcaggggatggcaacctgatggcactttgcaaggtaggaagtggcagggcttagcagcctggaaaagaggtgctgagagcgcatggcagaagctrtaagcccagccacatgggagaagcaagtcttccacctggccagacgcggtggctcatgcctataatcccagcactttgggaggc

SEQ ID NO: 839549 - DNA, 606 bp, Homo sapiens
ctggggaggcctcagaatcatggcaggaggtgaaaagcacttcttacatggtcattgaaagagaaaatgaggaagaagcaaaagtggaaacccctaataaaccccatcagatttcatgatacttattcactattacgagagtagcacgggaaagactggcccccatgattcaattatctcccttgggtccctcccacaacacatgggaatagtgggagatacaattcaagttgagatttgggtggggacacagccaaaccatatcagatggagataaggaacttgttgagaactggagtaaaggtcactcttgttatgcaaagagactggcagcattttgcctctcccctagagatctgtggaactttgaacatcacaggcctgaaggcctaggaggcaaaaatggttttgtgggctgggtccacaaaatcctactgtattcagcctcagaacatggtgtcccacatcccaactgtttcagctccagctgtggctaaaaggkgccaaaatacatctcaggctgttgcttcatgtggttcaagttccagccttggtggcttacacatgatgttagaactgtgggtacacagaagttaagaattgagg

SEQ ID NO: 839550 - DNA, 642 bp, Homo sapiens
ctcaatgaagagaatgacttagttttgttcactcttgtaccccccaatgatgtagtgccattttggcrtatgtattagtttgttttcacattgctataaagatattacctgagacagggttatttataaacaaaagtggtttaattgacttgaagttccacgtagctgtggtggcctcaggaaacttacaatcatgacggaaggtgaaggggaagcaagcacctccttcacaaggtggcaagagagagacagcaggtgaggaactgccaaacacttttaagccaacagatcttgtgagaattcactaactatcatgagaacagcatgggggaaattgcccccagaattcaatcacctcctaccaggtccctccctcgacatgtgaggattgcaatttgagatgagatttgggtgagtacacagaggcaaaccatatcagcatatattaaatgataaataaatacactttggatacatgaatacatagaggctgggtatggtggctcatgcctgtaatcatgcacatctccagatctttgaataaagttaatattttggaatatgctgtaatttggataacttctagaataccactgtgtactcttggtgctgcttacgtaggttgaaacaagaagtagagtt

SEQ ID NO: 839551 - DNA, 638 bp, Homo sapiens
tatatgtccccttctctctctctgatttaaaacagagcaaggcaactgggcaagttttcagatgatcctgataggtatatmgatatcctacagggtctagggcaaatgttcaacctcacttggagagatgtcttgatactggaagaacaaaccctggcctttaatgaaaagaatacagctttagctgcagcctgagagtttggagatacctggtatcttagtcaagtaaatgataggatgacagctgaagaaagggacaaattccctaccagtcagcaagccatccccagtatggatccccactgggacctcgactcagatcatggggactggagtcacaaacatccgttgacctgtgttctagaaggactaaggagaattagaaaaaagcccatgaattattcaatgatgtccaccataactcagggaaaggaagaaaatccttctgccttcctcgagtggctacaggaggccttaagaaaatatactccccagtcacccaaatcacttgagggtcaattgattctaaaacacaagtttattacccaatcagccacagatatcaggagaaagctgcaaaagcaagccctgggccctgaacaaaatctggaggcattattaaacctggcaatcttggt

SEQ ID NO: 839552 - DNA, 638 bp, Homo sapiens
tatatgtccccttctctctctctgatttaaaacagagcaaggcaactgggcaagttttcagatgatcctgataggtatatagatatcctacagggtctagggcaaatgttcaacctcacttggagagatgtcttgatactggaagaacaaaccctggcctttaatgaaaagaatacagctttagctgcagcctgagagtttggagatacctggtatcttagtcaagtaaatgataggatgacagctgaagaaagggacaaattccctaccagtcagcaagccatccccagtatggatccccactgggacctcgactcagatcatggggactggagtcacaaacatccgttgacctgtgttctagaaggactaaggagaattagaaaaaagcccatgaattattcaatgatgtccaccataactcagggaaaggaagaaaatccttctgccttcctcgagtggctacaggaggccttaagaaaatatactccccagtcacccaaatcacttgagggtcaattgattctaaaacayaagtttattacccaatcagccacagatatcaggagaaagctgcaaaagcaagccctgggccctgaacaaaatctggaggcattattaaacctggcaatcttggt

SEQ ID NO: 839553 - DNA, 509 bp, Homo sapiens
caaattatgaaattttttatgtaggcaaaagacttgaagagacactccatagaataagatagacgtatggccaataaacatgtgaaaatgtgatcaacatcctragtcattagagaaatgaagatcaaaattacaaagagatattatttcacatgctctaaaatagctaaaatgtaaaagtctgacagtaatcaaatgttgatgaggatggaacaactgaaattttttttacattgctgataagagtgtgaaatgatgcaatccccttagaaaactatttggcgatttctttcttttcttttctttttttttttttttgggatggcatctcgttctgtcacccaggctggagtgcagtggtgtgatcttggttcaatgcaacctttgcctcccgggttcaagcgattctcctgcttcagcctcccgagtagctgggactacaggttcgcaccaccacgcctggctaattttttttttgtatttttagtagagacagggtttcaccgtgt

SEQ ID NO: 839554 - DNA, 517 bp, Homo sapiens
aaaataaatacttaggtataaatctaataaaatatatataaaatatgtacaaagaaaacttcaaaactctgataaacaakaactaaataacatgttcatggataggaagactatattaacaaggtgtcagttcttcacaattttatttgtagactgaatataattctagtcaaaattgcagtttgttgtagatattaacaaactgattccaataagtttatatggagaggcaaaagacccagaataggcaacttaaaattgaaagaaaagaacaaaattggagatccaacattgcctgacttcaagacttactttacaactacagtcatcaagcagtgtggtattggtgaaagcatagacaaatattttaatagatcagtggaacagaatagagagaccaggaatagatccacatcagtacagtcatgtgtcacttaatgacagggatacattctgagatgagaaatgcattgttggatgattttgtcattgttcaaataacatagagtatatttac

SEQ ID NO: 839555 - DNA, 410 bp, Homo sapiens
attggtcagctgcttaatcgatcacaggttcatattactactaacaggcttcagaagtacctaatcacaagaaacactgcgcttgggcgtgactgccctcagcattccttctggtggcagacgcagtttgtcagtttgccaacattctgcgtttatgagaacagtttgctgtttactcatatagcctccagtggtatactgagttgatcactaccctcaatctttcggcctccaacacacttaggtacattattttttgcctgtgtttcctcaatgtaatgtgagctacatgagggcaaaaatttttgggtttgtttttattgctttgtttgcagatatayccccagcactagtaaagtgcctgatatatagtagacactcaacatttattaaatgtatgactctgttac

SEQ ID NO: 839556 - DNA, 613 bp, Homo sapiens
ttcagtgcaaaatgtagcccatagtaatagatgaaaaaggatggactttagcttattaggttaataagttacttcttaytactttaagtactttagcttattaggttaataagtttcatcaccctttcccacctaattgtcatggccaaattgaacttccagtcctttcttcttctccatctgaaattgtccatagagtttccttctatgattttgcttttaagacatggaaacaaaagggaaaaaatgaaatccatcacgtgattctctgtatgtgcaagcaaaaccagaaggattctcctttaccaaactcaggaagtttatacagggcacatttgtggaaagaacacggaaaacacaatgcttactaatgatatttctcctcctggatcagacaagaagatcagattttttataccagttttgatcagtttaatgccttataaaaggcgggaaatataatatattatatataatgccttatataatgccttatatataaaaggaccttatataaaaggacctgtttccaactctttacacgttacccttctgaaacagaagaatagcaatttatgtgttcaacctaacgtacttaacatctgctatatgg

SEQ ID NO: 839557 - DNA, 538 bp, Homo sapiens
gaggacgtgtaggtagtacaagaatccaccagccagaaggcctgtgaccaggtttcacagaatccaacatggacataacaagtatattatagaacagacatatactcttgatacagaagacacgagatctgatgggatttctactgattcatctttaagctcactgactcttctgtcatctccattgttactgagcccatgcagtacatctgtatttcatatattgtatttttcagctctgaaatttccatttgattatttcatatagtttttatttttcagagaactatttttacactcctttcagaagtgttcacttttacctcatgaacatgagtactttaaggcttttttctgataattccatcatctggatcatctcagagttgtcaactggcttatgttctttttcctttaaaaatggtcagattttactgtttctttgtatgtcaagtaattttggatyatatcctggacattctagatattaagttatgagattctaggttccattaacatcctctaaagcagcagtcct

SEQ ID NO: 839558 - DNA, 617 bp, Homo sapiens
actttctccccaggaaatgggtttttcttttctaccacatggccaggcagcaaattttccaaacttttatattctgcttccattttaaatataagttctctttgcttatgcaaatgagctaggcttttrgagcaaccaggccacatcttgaatgctttgctacttagaaatttcttctgccaggtaccctaaatcatctctcttgtgttcaaaattttagagatccctggagcaggggcacaatactgtcagtctctttgctaaagcatagcaagtgtgacctttgctctagttcccaataagtttttcatctccatctgataccacccggcctggacttcagtgttcatatcactatcaacattttggtcacaatcattcaacacgtctctgggaagttccaaactttcccacatcttcctgtcttcttctgacccctccaaactgttccagcctctgcctattacccagttccaaagttgatttcacattttcaggtatctttatagcaatgccccacttctcttataccaattttctgtattagttcattctcacactgctataaagaagtacctgagactgggtaatttataaagaaaagaggtttgactcac

SEQ ID NO: 839559 - DNA, 600 bp, Homo sapiens
agatactttgtagactcatttcactataatacaaattactacatagaatgtcaacctaaagtacatcttgcctccaaatcccttctgggtagccatataagctattcagcgatttcattagcctctgaattgtcataatccacatactattaatagcatttaggtacttgggtttaagtaaaatataaaatctaaaaaaaagaaagacaaaggaggttaaaagtgctatgaaacttcactatagttaatagtacatgggttctttttcatcaataccatcctaaccctcctattgagtgattattatgttggattattaattcaatgattatggcttccttttatactaaaaagttcaggtgtaaattatgatggatataattctgcaattatttgcgaaattcagcctgatattccttgtgactcatttattatagaattaataggtgattttccaagattcagtatttatgataaacaagattgttctkgaatgaaacaacttcccgtaaaagtaaattacatacactaaagcacagaaccccacaatgacttttttctccctttctatgactgtaaatcagatgaaatcatactatg

SEQ ID NO: 839560 - DNA, 487 bp, Homo sapiens
actcaagtattttgcattctgaaattcataaggtaagacaccaagggcagtgctgattacaagaaagacaagaagaaagattatagagttaataygattgctcaatcttctgagaaacatctctcagccttcaatgtttagtaccctacatcaggccagagagctgattttaaaaactggttcctcctcagactcaggaagaggctgctgtgtttctctgtggagttagggctgtatttctcagtcactacatttctcggtaacaggtaactatttctgttaatgaagaggagaacaagttaccatttaaaaaaaaaaaagccctgcataaattgcaggagcattaattactatggcccttaggctcccaggaatttatgcagactttccatggtgattattgtgattatgtggtatttaactgtatatttagttctctacagatattgcagacatttttcagctcttctagaggagtttttaatca

SEQ ID NO: 839561 - DNA, 645 bp, Homo sapiens
ttgaatagaatgggaggcaggctcaccccaagcagctcccagcttgaaktaacactgacattttaaaatatctagcaaagacaaacataaaattcagacaaaacatatgctgacaattctaaaggcatttctatttttcttccatcaataattttaaagctagcttgtttagtaaagtgatactttaagtcacgtgaacttgaaaattgcttagactcatttactaatttatgagtgctcttttacttataagccaacttggtagacacaacatgtaacagtaagtgtatatacaaataaacatatctagacatgtatacacacacataaacaaagatctaatagcttgaaaccttagccatgagacagcaatagaagcttcccagttttactttgccccaatagataatccaatgaaggctgcgaaccaaaattttgggtaaagcagtctccatggcagtttcatttttaaaggccaaacctccccagactcaaaagagcactgggaccaaaccataccaaaggagggcatcacacgttaaccaggccccctgcttagaaccacagtacaaaagcccggatatatggaataccattccactttcccattagacagtaaactccagattccaaacaatgctaggg

SEQ ID NO: 839562 - DNA, 389 bp, Homo sapiens
atagaatgggaggcaggctcaccccaagcagctcccagcttgaattaacactgacattttaaaatatctagcaaagacaaacataaaattcagacaaaacatatgctgacaattctaaaggcatttctatttttcttccatcaataattttaaagctagcttgtttagtaaagtgatactttaagtcacgtgaacttgaaaattgcttagactcatttactaatttatgagtgctcttttacttataagccaacttggtagacacaacatgtaacagtaagtgtatatacaaataaacayatctagacatgtatacacacacataaacaaagatctaatagcttgaaaccttagccatgagacagcaatagaagcttcccagttttact

SEQ ID NO: 839563 - DNA, 351 bp, Homo sapiens
ttacagccctgtattgcctaaatgttccggaaaaagcagaaaggggagaattttgccaaaatcagagcatttccccaggaatatatctagtatgtgaacwttatttcccatgtattatggcagaatacagggttggaaccattattttagagtgccaagtgcctatattgtaatatgatcttgcctgtatggtactcctaaaagctgaacttctaggttcatgtcatggtaataacagcagtacctccaaactcttctagaacaaataacaatgaaactattttacattacttgtattaaaaatccccttgttctatcttttattactaaattgtatcaataatttatttt

SEQ ID NO: 839564 - DNA, 600 bp, Homo sapiens
tgagggaaaaggatacaccaggaattaaaaaaaaaatcagggaaaaatatctgcctaacaatctgtccttctacagcagtcgttctcaactgatggttaattgtccctcccccaccaggggacatttggcaatggctgaggaccattttggttgtcacacctggaggagggggcttgtgccactggaatctggtggggagaggctggggatgctgtcggacatcctacaatgcacagcagagcccctacagtaaaaattacctggtccacgcatcaagagtgctgtgacagagaacacttctataagaatttgttctatttttatttttactttattttatgctttaatgtattattattttttgagatggagtctcattctgtcacccaggctggagtgcaatggcatgacctcggctcactgcaacctccgcctcccaggttcaggggattctcctgcttcagcctcccgaatagctgggattacaggcatrtgccaccacgcccagctaagttttgtatttttagtagagatggggtttcatcatgttggcctggttggtctggaactcctaacctcaagtgatccacccgccttgg

SEQ ID NO: 839565 - DNA, 610 bp, Homo sapiens
tatggtatttatctatttaatatttttgttagcttctgtaatcataacttttattaaaataccatcaattaagaaagacaaattactttttaaaaatacacttagtcaatggtcagaaaacagaattccttcacgacctgattgaaagttgaaatgactttttgtgacaataataactatacggtcttctgaaactttgacaaaaaacattaactctgtatgatgctgtacttacattttaatttatttgctatttctttttttaatttttgtaggtatatagtaggtatgtatatttatgagatacataagatgttctgattcaggcatgcaatgtgaaataattatatcatggaaaatgaggtatccatcccctcaagaatttatcctttgtgttacaaacaattcaattacatacttattttaaaatgtacaattattattgactatagtaaccctgatatgctattaaattcttactcattctattttttttaaccagttcacattttgaagttttaaattacaagtaaaacraaacactaattcaattctaaaatactcttgaaaacaattttaagttggtattctacttaataaaaatacatta

SEQ ID NO: 839566 - DNA, 420 bp, Homo sapiens
gaaaagcaagagcaaaccaaacccaaagttagtagtagaaaagaaataataaagatgacacaataaataaatgaacttgaaatgaagaaaacaattaaaaagttggttttctgaaaagataagcaaaattggcaaacttttagccagactaagaaaaaaagagagaagtctcaaataaattaaatcacagataaaaaagaagatattacaactgatcctatagaaattcaaaggatgattagagggtactataagcaactttatgccaataaatttgaaaacttaggaaaaagcagataaattcctagacacatacaacctaccaagatcgaacgayaaaatcccaaacctgaacataccgataacaagtaatgagatcaaagctgtaataaaaagtttcctagtaaagaaaagcttgga

SEQ ID NO: 839567 - DNA, 603 bp, Homo sapiens
gcataaataaaaaactatcacaacttctggaaatcaaggaaacacttagagaaatgcaaaatgtactggaaagtctcaggaatagaatcgaacaaacagaagaaagaacttcagagcttgaygacagggctttaaaattaacccaatccatcaaagacaaagaaaaaagaatttaaaaaatgaacaacacctccaagaagtttgggacaatgttaactgtcgaaacctaagaataagtggtgttccagaagaagaagagaaatccaaatgtttagaaaacatatttgagagaataatggatgaaaacatccccagccttgctacagatctagacatccaaatacaagaagatgaaaaaacatttgggaaatttatcacaaaaagatcattgcctaggcacgtcgtcatcaggatatctaaagtcaagaggaaggaaagaatctgaggacttgtgaggtaaaaggatcaggtaacctataatggaaaacctcatcagagtaatagcagacttctcagcagaaaccctgcaagctaaaagtgattagggccctatctttagccttcttaaacaaaacaattatcagccaagaattttgtatctag

SEQ ID NO: 839568 - DNA, 619 bp, Homo sapiens
  misc_feature 615, 616, 617, 618, 619: n = A,T,C or G
tgcctgtctagttactccacctggatatattttactatagcagaaacaaggtcgagaacaatacctaccagggaagaaaatggtaattcaaagaagttttgctgtctcccagcctccttttttcatattttttttttactagaatagctttctccagttaactcattgcacaaattcgggattttacttctagaagtttccatgaatagttaagagtcactcatagcatgatggaacagttcagactgaggaaattgttggttagctatggtaggaggcagggatggagggagggagggaggtttgcctcaggaaccatacctagcccagggaaggtaaaaaggcaagagggttctcttaccaaaactggactttttcttctagactttcccagaactgcagttaaccacctagttcagttttccaagaaagacaccataagtgttataattattatactaacaaaattagtataataattgtgggatcatcccaaaataagcaacaagcaaatttatttctcttcttagttaaggaaactgaagtagaaataataaaattaagakgaaaacaagagttgcaagaatgtggcaagggcggtggggagcctgtacnnnnn

SEQ ID NO: 839569 - DNA, 583 bp, Homo sapiens
atggaaatagtcatgaaacaaaggagcgctaggggagaggtgggtaactaaatgctagtttttaaataatgttatatcagacttaaaagatacatggaagataagacaggcctaagagtttgctagcagctggatcagattgcaaggaagaatctcagtctatcctttattactcaagccagagcacaagactagtttccacattttataaatatagagtcttttttggagactgtgaaatttggatagaatgttttatttctcattactgtttacagattcgttatgaccttggcctgtatacactttcatgacaggttaagtgaacagaggttaaaggaggcaaactgagagtatttaaataaagtttacttgctatatttgtcttatctccccatgaataataaaaatatcatttattatatgtattacaaaatgttctaagtgctttatacacctaatattagtatggttatttcacacaaattttatgatgtctgatttctttttctttttatagatttrgaggtacaagtacagttttgtttcatgcatatattgcataatggtgaagtgtgggctt

SEQ ID NO: 839570 - DNA, 668 bp, Homo sapiens
tggataaatctaataataagctgcataaaattataagcagagaactttagcatcccccatcaacacrcttttccatatttttataataatcatgcaatatggaatttattgaaatccctgtattttgagagcatattctgtagaatactacaatcataaattctgaagaaccatgcaaaaaaagcctaaattacctattttctcagttgaaaatcttgagattttgttgtcatgttaagaaggaatcaaagtataatttattttcatttctctcctcattgtaaatattcacttttttgaattgtaaatattgtattacttctttaaattttaaaaatatttttccctagttccagctctttatcgccaagattgtaatttttatttttctttttttaatggaaactgccaatactttctcaacatacctccccctatcgtgttcaagttgattccaagatatgtcattatttttcacttcagtaactaaatagtgctctttctgcttcttcatacgtactttcccccatgtgctcaagaagtttatgttgtttaaacaagctatagggccggcatggtggctcatgcctctaatcccagcactttgggaggctgaagcgggtggatcatctgaggtcaggagttcgaaaccagcctggccaacatgg

SEQ ID NO: 839571 - DNA, 550 bp, Homo sapiens
taccctgagaaaatcagtcagcaactcaatatacatccttccagaccttttcctgatcatatatattaaaatatatgtttgtgtatagtatgaaatatacttcgtctttgtcccagttcctgtcacaagctcttaaaacccttgggatttcctgagcaggaggagtatcttttattgttcatcatgagccccttttgatcatacctgagtttatgctaatgaggtgacttaagatagtgcacagataacccaggatgaagctgctcaccagagagaccaggttattagaagattaaaggattggaaccttcaaccccacccatcaatctacaagaaaggtaagggagggaaagtgtagagataaagccgtatgaaaaaaattttttttttttttttttgagatgggagtctcgctctgtcgcccaggctgcagtggtgagatctcggctcactgcagcctctgctcccaggtttaatygattctcatgcctcagtctcccaagtagctgggattacaggctcaagcttccaggttgctgaacatgtggag

SEQ ID NO: 839572 - DNA, 624 bp, Homo sapiens
tgattgtccagtggttctcccccaaccccaatttctcgttttaaaacttacaacaatccatatccccactttggcagacaggagaacgccccttatctgtagtgcagccacaccrcctgaccgcttgggttgtggatggcacacgttttgtacacgtgctgcctccaccagcatcaggcaccgccgagtttgtgtggaagggcagcaactccacctaacaaatgtaactttaacaacagtaaaacaacctaatagcttagcatgccagggggctaatgtggcgggccatttactgctgcactaaatagccccggtttgattctcattgccaagtgtcgaactgagaattgcaaggcaggagtagctcctaattcattagataaagggggtcattgctcatagggctggggaaactgtagaagcataagaaaaaaaaaataaacaaggcattcccttttcaaaggccatcaaaacccaggctaaccatggtcaggaaaagcagaggctgctttcttggcactcatatgctaacttctaactttgggtaaatgtgctttgttttgcaatgttcatctggaaagagactagaagaggaagggatcctaatattgagccatgtcattt

SEQ ID NO: 839573 - DNA, 538 bp, Homo sapiens
gaaaaaaagaaataaaaagcaatctacaaaatgtttaaaataaaaaccctaatctcaaaacaatgcgagaayaatgtcaggcacaagaagcaagaagcataagaaaaactagaaacaaaaaaaaaaaaggtgttgcccaatttgaacaggaaaacaatagataactcaaaaaagctgattcttttaaatcaaaaattagccttaagagattttttagtgttatttaccgagcactattctaagtgctttacacttagatccattacacttcatcttcacaaaaccctcgaaggatggtactattagcgccgctcccatttcctagtgctgaggcgcagggaggttaagttaattagggcagtgctagatctgggtcttgaccccatctgaagccagcacctgcaagcatcactactgctaatacttgccatccattctttaaaagccatccatgttgacccggttgaaaaatttcttctgacctgtgtagacagctttacctttgcataaataaatcacactgtgttttaaacatcta

SEQ ID NO: 839574 - DNA, 622 bp, Homo sapiens
ggaaacaaagagcagtagagtaaaacggcttgctccttgggtccctacatccccttgctccaattcatgcccttttctattggaacttcagttcayttcaggtaagctaaactgaggacacaaaataaatttatttatttatatatataataggtatatattatatatatatgagacagacatagattaatatggacataaatataaagtatattagatagaatacatatatgaagccatctaagatatctgtggaactaagccaggtactgtatcacgcagtcttatgtctttaatctgcactcagcttcaaaatttggtagatttttggcttttccattattatatccccaatcccaaggacagtataggtacatagcacataattatttactaaactaataattgaatgaatgttcctgccaaaaaaataagctgctctgactgagtcacaggtaagaagttggaggggctgatttgtggggaaggaccaaggcagaagtaggaagtgaagaaaggtatttggtgaggacaggagaagcaatgctgtagccagaaagccgactgtaagttgtgataattgttaacttggggaattttggcaaaaaatcttagtactact

SEQ ID NO: 839575 - DNA, 586 bp, Homo sapiens
ctttttcacaggcccacagctggccggtacagtggcagagaaggcgaggctgaggtggggctggggaagccagcaggggcctgatcatggagcgccttgagctgcatcccacaggtactgagaaagcatggagagctgtcccccagcccccagcatcttattagaaaatattgaaacataacagaaaacatgaagggttttatgttcatattttcattttagagagatcattctgcttgaaatataacacctactgagtactgctgaggacttaccatgtgccgggttctgttcttagcatgtgacatgtattggcctatttgattctcctacataatcctggaagattggttgtgggagtgggtgatcatgacctgaacagcctaaccatgtttagggaacactctgtgttatgcgttccaccacacaattcatgtcacagctgaatgtcccagtttcccttgcagctaggacacaacrggagacccaagctttccaaacatatgccccaggcaacactttgatacacaaggaataacactggatgctgggtgtgcacagaattcaaattcaggaatggagggaa

SEQ ID NO: 839576 - DNA, 632 bp, Homo sapiens
caaggacacacagcaaaatggtgttagagytaggaattgaatccaggtctttctaactattctctgctgaaatacatcagcccttgtggcttctgagatttaacattgtgactttgtgtattgaagcgaagcatcaatacaagggaccaccaaatctgtatgtcattgtaagcatttaatctgagaaaacttcctttccccccccttttaccctcaccccttttgctttttcctccccttccccttctctttcctcgcttcgtccttcccttccatctccctccttcctttctatccttgatcactcagtatggacactgacaagtcagaagggatcctgctgtggcactacaggagggggtctgggggtaccctggaagatctgggggaaggaaggggccagggacacccaaggatgctcagggtagtagctatttaccagttggtacaggattgttacaacagtttaccaaccaccatggccctcccagagatactagtttgtgccaagcagtgcatccagagcgcaggggtccccaagccggtaggacccaggactttgcagggctgtgctgagaggggaaggcccaagcagcctcggcaaggcctcatctggtcgccgctgagggcca

SEQ ID NO: 839577 - DNA, 554 bp, Homo sapiens
tggagtttaaaaagtatctctaatgggaaagaaagaacgccacatcctgtaaatattttttgcaagataaggattgaagaaaaagaactacagaacacaagcagaaattaagttttcttgaaattaaaaataaaatttaataaacacaatcccagcaccctaagccattcataattttgatttcagcatattcttccctttgtataatacatataaatatgtataagctatcaaaacataaaaatatatataactatacatataaaacagtacatacagtatatatacaatacatatgctgatatataagttttaagtatatgtagtataagttgcttgtgtttttttaccttcttaatgactgtataagattcatttagattgataacctaaataagttttcctatttaaaataaggcagacatgaacatatttgtatatawgctattcaatgctgttttaaagaaaatttgctagtgtaagagtctgaattaaagtttattaagaactttatagttcactccatgttgccatacagatttttttttaaaaaa

SEQ ID NO: 839578 - DNA, 518 bp, Homo sapiens
accaaaccattgctaggattagctattgtgtgtgtgtgtgtgtgtgtgtgtgtgtgtgtgtgtgtttccatttcagcaggtataaaacagtattttaaaactgttgtttctttgcctaatttcctcatgtgaattatgtttacatcctttgcctatcagaaatcttcccataaatttgagctctttagatttatataaaccacattttatataacttcaatttttcccagtttgtttgccatttagtttactttcttctgtaaatgaaattttaagttctaaatattcaaagtctcactcaacttgttttctcaacagaacactaacagaaaaaaaaattagtacaattattcagatccaaaaaaagacaacaatagcttgcaaaaacaagcatttaaataasggtattacaaaacagactccaaaaatgctaggaaatcttcgaaagttagtgaagtagaagaaactgtcagcaggggacactggatatgaaagtcggcatctctaaagtgatggca

SEQ ID NO: 839579 - DNA, 607 bp, Homo sapiens
gagttaatttttatgtatggcatgaggtacaaatttaatttcatctttataaatgtggttatccacttgtcccagtaccatttgatgaaaagactatacttaccagttgaattaccttggcaccgttgtcaaaaatgcattgctgacatggtggcatgtacctgtaatcccagcgactcgcgagctaaggtgggaggatcacctgagccccatgtgtttggggttatggtgaactatgatcgcgccactgcactcaagccagggtgacatagcaagaccctgtctcttaaaaaaaaaaaaaaaatcgaccataaaagtaaagatagttattaggtctggtctgtatgtctcttcttatgccagtgccaatgttttgattgttgtcgcgtttaaagtaagtgttgttcttttacaaatttttctggctactctggatcctttgcatttccatataaattttaggttcagctggtcagtttctaccaaaaaaaaaaaaaaaaagcctgcagggatttcgataggcattgtgaatctatagatcagtttgaggaarattgctatcttaatgatgttcacttccaatccatggatgtggaatgtgtctccg

SEQ ID NO: 839580 - DNA, 518 bp, Homo sapiens
tctttatgctgtctagcaactgctctgaggaagaactataatacaagctttaaagagtctgttcagaatcattacaaataagttgtgttatttaaaattataattcataagggagaaagatgaaaaatgttaccagattaaagaagatttttcaaaaggatgtaaggaaagaggcagtgttaaacactgttaagaggacagtttatcagtattttttactaaactttaataaaacttttctatttgaatttctgctatgaatttttcttcagcatttgtcctcagtacaggtggttccttgaaacattgtttctaataaaactagaacatcctgatattttatccattctatagagatcattgatggtacacagacatacagtggattatgtttgttgagtgaatggaaagagagattgttaggtttacaacgatgcagctcttgagacyggagtttaagatcagcctgggcaacatagtgaaaccccatctttagctgggcatggagatggatgcct

SEQ ID NO: 839581 - DNA, 614 bp, Homo sapiens
cttgctgatctggcttcatgcacagccacagagggactgaaactgttcctaatcacttcagtcactgaaatgggccctagatcaaagtactgcagccttaaatttcatcagtaacatcactcctcaaaggctttttgaaaaaggtctgcatgttgaccatattactgcaatgtgttatgtgggagaggagcatttaatttattataagtctgcaggactgggggggccctggaggaaccagagagggattctgatggaagaaatagaggaaggaaacaaaggaggggcaagacagcattgacaggttggagccccctgaagaacctgaaggccagataccaggttctgagagagtcccgcattcatgggcattccgtgatggtgccatgcactgacatctgccaacccaacaacaggccgttgcagaaaaatattattgtcctgaatctgctaaagaggaagtaaagtcagtttcatttttcatgagaaaagtggaaatgataataatcttttcctccccacttgcttcccatttttcctattcgctgtattttgagttttkgtttggcttgtttaaactgttgttaacagaagtattaatattttcctcaaac

SEQ ID NO: 839582 - DNA, 575 bp, Homo sapiens
aacaaatatgttactggcttatacattcactataccacccttttaatcattactttagagtatwctccttctacttattcaaaaaacaaaaacaacaaaaaaaaggtaactgtaaaacagccccagacaggtccttcaggaagtattccatgagaaggcattgttgtcataggaggtgactgctccatgcctgttaattcccctgaagaccttccagtgggacaggaggtggaggtagaagacagtgacattgatcatcctgactctctggaggcctcagctaatgtatgtggtgtgtgttcatttttaacaaaaaagttttaaaaataagaaatgtttgaaatcgtaaaagcttataagaataaggatatgaaagaaaatatgtacagctatatgtgtttgtgttttaagctaagtatgagtacaagagttaaaaagtttaaaaatttttaagtttataaagtaaaagttacagtaagctaaggctaatttactattgaagaaaaatattttataaatttagcatagcctaagtgtgcagtgtttgtaaagcctgcggtgttctacagtaatgc

SEQ ID NO: 839583 - DNA, 490 bp, Homo sapiens
attttttcaaggttctgaatgatggattatttgcttgtgcttagagattgcctactttttcttgctttcagttatgttaaagaaggcgagggaaatgttacttattggcygaaatcatctaatgtcttttttgtgaacaagaaattaatttgttaggacttttgtactataaattagaggtaatcttaagatttaaaaaaagaagaaaacacccttaaatgataactttattggctccctgtgtctttatttcctgtatttcctggtggaggtacttatatttggcttttactcatttaataattccagaccccaggagaaagcctggcttttgatgtctggtctggtctctgatgataacaaggaattcccctcccaagggagggaatcccatcacaataaaaaggacctctctctttcgtctctccagccctttcattttaaagcagctatggttggccacaacgtgtttctgtttctcccaactcag

SEQ ID NO: 839584 - DNA, 622 bp, Homo sapiens
tatagataggaatgaagattattgagatataggagtatgttgaaacctaatccaagaaagctaagaatcacrataaaataatacaggggctgacagacaaaatagccagtattgaaaagaatgtaactgacctgatatagctgaaaaacacactataagaattttgtaatgcaatcacaagtattaatagcataatagaaaactgaggaaagagtctcagagcttgaagactggctttctgaaataagacagtcaaataagaatagattaaaaagaatgaaaaagaacaaaaaaaccctctgagaaatatgggattacataaagagaccaaatctacaacttatttgtgtccttgaaagagatggggagtatggaagcaacttggaaatcacattttgggatatcctccatctagatagagaggccaacattcaaattcaggaaatgcagagaacccagtaaaatacttcacaagaagatcatccccaaagtacttaatcatcagattctccaaggtcaaaatgaaagaaaaagtgttaaaggcagctagagagaaaggtcaggtcacccaaagggaagcccatcagctaacaatggacatttctgtagaaaccccacaagc

SEQ ID NO: 839585 - DNA, 617 bp, Homo sapiens
acaagcattcccttttcttcacatctttgccagcctctgttgttacctgtgtttttgatacragacattttaattgggatgagttgatatctcattgtggttttaattagcatttctctgatgattagtgatgttgaacattatttttataatctgttggccatttgtcttttttcaagaaatgtctattcagatctcttgctgatttttaaatcagattgtattttttttctgctattgagttgtttaagcttcttctatattctggttattaaatttatttttagatagtttgcaaatattttctcccattctgtaggttgtcttttcattttgataattgttcctcttactgtacagaagctttttagctccatgtaatcccatttgtctattttctcttatgttgtctgcactttttgggttttatacaaaaaaaaatgttgcccagatcaacgtcctgaaacacttacccaatgttttcttctagtagtttcatgtcttagatttaaggctttaatttattttgaattgatttttgagtgtggtgagagacagggatctagtttccttcttcagtgttgagttatacggttttcccaacactgtttattaaa

SEQ ID NO: 839586 - DNA, 611 bp, Homo sapiens
tagtctttacatagacaagactctatataagaaaaacttaaaacaaagatagtgcatttcttcccttgctttctgaggacactctactctgtaatgatgtagctagctttcactaaatggtctcttctcactgagaggcactcctctgcttgctttctgaggatgccctactccgtaacagaatacttttcaataagcttgcttctttcactgcactttgcaactttccttgcattccttcctgcaggagatccaagaaccctctttgggggtctggactgagactcttttttctggtaacagaattatctggtcaaatatacacatttaataaatatagctgaattgctttccaaaatgttttgatactttacattcacattattgagtgtatgtttctttatacctatgaaaatactttttaaaaaactctgctaatttcatggacaaaataaatggtttctcatttttttcaatttagttattgagctaaatttaatttctatttaattaaattgaacaaatttcaatttaggtcttgagctaaatttaaatttttaatttagttactwgctcactaactataaaattggacattgttttataggttt

SEQ ID NO: 839587 - DNA, 678 bp, Homo sapiens
gaattcagtcttggccaagtgtctccagcatgaaatgtggaccgcactacagagagacttggaactttggaatatgtgtataattaaaatgtaggcacatcacactactgcttgcaaagtgaagtggtgttcatttattaaaagccccgtcgactgtggaagtgtgaatgtgtttcagggcagttctgactactcagaataggaatctattgctgcattgcttttaaagaaataggtggaaaaaagataatccaaaccatatattacaatgtaatatacagataatacaaacatgtattctatacccattgtatagtttttagatgtacatttattttattgaggttatggtgttggaaatttatataaactgtttttgatcagaggtggatagaaggtcatttcaatcgaatcaaatgtaaaattacactatcataaatgtacaaaaaatttaggagagatggctctgggcaagatgatataagagttcattttaaaactctgtctattaaaatgttttgtaaaatatcaatacatgcagcaactttaatgtaaagttatttatttatatatactagcctagatatctttgacaaatargagtataaatcaaacaaaaattcttcacaaaatgagctttaaatttgagatgggggagaagatatgcatttagataag

SEQ ID NO: 839588 - DNA, 494 bp, Homo sapiens
ttacatgtaaatcttaatccatcttgagttaatttttgtatagggtataaggaagaggtccagtttcagttttctgcatatggcttgccagttttcccaacaccrtttattaaatagggaatcctttccccatttcttgtttttatcaggtttgtcaaagatcagatggttgtagatgtgtggtgttatttctgaggtgtctgttctgttctattggtctactttatccgttttggcaccagtaccatgctgttttggttactgtagccttatagtatagtttgaagtcaggcagcgtgacacctccagctttgttctttttgcttagcattgtcttggctatatgggctctttttggttccacatgaaatttaaagtagttttttctaattctgtgaagaaagtcaatggtagctggatgggataacattgaatctataaattactttgagcagtatggccaatttcatgatattgattcttcctatccatta

SEQ ID NO: 839589 - DNA, 602 bp, Homo sapiens
tagatcccaggaaaagacacaggctgtggcttcagagtgggtttgaatcccagtgctatcacttattatctttgcattagttattctctgagcattctgagcctcagtgtcttcctctgtaatgacatacacagtggatcaggtttttccatgaatagaatataaagtgttgggtacattggaacttaaatagttatgtccctggcaggatgcttactctatgcaaaaggactttcatggtacatatttatagaaatctagacacaaacatttttgctttcatatgcaatgttggattctattttttaaaagcacatgatatcccaacatatagtgagtattttaggtagcgtctaaatactgataccataacaaataggctccatttcatacttgcactttctcttaagttgatgtggcagtaattggcaacttgtgtagctagcaatagatggaaaggtaggaaataagtcattggtagtgactttgagcrcttgtgatttttttttgcctcaatactgcataacaatctttgttaggagtatagataattccagtaatgatatatgatctggaagcactttttgagagatcataagatc

SEQ ID NO: 839590 - DNA, 602 bp, Homo sapiens
tagatcccaggaaaagacacaggctgtggcttcagagtgggtttgaatcccagtgctatcacttattatctttgcattagttattctctgagcattctgagcctcagtgtcttcctctgtaatgacatacacagtggatcaggtttttccatgaatagaatataaagtgttgggtacattggaacttaaatagttatgtccctggcaggatgcttactctatgcaaaaggactttcatggtacatatttatagaaatctagacacaaacatttttgctttcatatgcaatgttggattctattttttaaaagcacatgatatcccaacatatagtgagtattttaggtagcgtctaaatactgataccataacaaataggctccatttcatacttgcactttctcttaagttgatgtggcagtaattggcaacttgtgtagctagcaatagatggaaaggtaggaaataagtcattggtagtgactttgagcgcttgtgatttttttttgcctcartactgcataacaatctttgttaggagtatagataattccagtaatgatatatgatctggaagcactttttgagagatcataagatc

SEQ ID NO: 839591 - DNA, 634 bp, Homo sapiens
actgtttaaaagatccttttgttacccaattcacaagttcagccagtgagtcaccatcattgatcagtcaatccttgcccctgagcttgccagtcaacagaacaattatgaagacaatttaagtttgttgtgtttgagagagagatagtaatggggtgggactctcattgccccacaatgtagtcttctttagatatctcagggagaaagaccacaccggaattctaggcccgaggaaagaccacgccagaattctaggcctagctttgccctgactccctggtgactttagaaaagcgtgtatacttgcaatttctcatgttttccataataaaatggacgcaaattaatatagtgatagtcactacttctatacatcaactctttcttgctgtctgccttccaggtacatggtaggatcaacttcctgaccttgtgacagatcctgccagtaacatgagaggaaatgagaacgaggctttggagcacagcattggattgctcatgcagaacaccacccagtgccctttccctctgycacaatgaacagccatgctgcaggtgacggctgctctgtcaacatggatccggcagggcagatgagtggatcccccagcggactcatgagagagca

SEQ ID NO: 839592 - DNA, 600 bp, Homo sapiens
aaggcccacttgcaagattggccgttggctggtgtctgagaaattggattttaggagtgttctcatcccatatttgataagaatggtgaactgtgtctaaactgtttgtacaatgtgatttatgcagaatacctgctttcttgaagtctagaattttggtacatgccaggcagtgggtgcctatgtgaccaggccccaataaaaaccctgattaatgaatctttcatgagatttcctggtagacaatatttcacatgttgtcacagtttgttgctggagaaattaagtgcatcacgtgtgactccactggaagagaactcctggaagtttgctctggtttcctctgcacttctccccatgcaacgttttcctttgctggttttgctttatatcccttcgtaataaataatagctatgaatgtgagtctttgccgaatctaatgagtgcttctagtgattcatcaaacgtgggagtggtcttagggaccmctgacacagttccttataccatttatgtaaaagaaagtacacaagactatgagttgctatgagtgtataatgtatgcacatatttctttaaaatctgaaagtttacacaca

SEQ ID NO: 839593 - DNA, 531 bp, Homo sapiens
tttttttagattcagagacggggtttcaccatgttgtccaggctagtctcaaactcctgagctcaagmaatcctgccctcctaaattgctggaattacaggcgtgaaccactgcacatggccaggtatttcaacagagagagagaataaacatacccacacaaagacttgtataacaatgttaatagcgctttaatttcacaatagtcaaaacttggaaacaacaaaatgcccatgaactggtgaatgcataaacaaattgtggtatatccaaacaattaaatactacttagcaataaaaagaaactaaccactgatacacacaacaatatagatgaatctcaaaaacatcctgagtgagagaacctagactcagaagagaacatactgtatgattcgtgtgatattctggaagagacagaatggtgtgtatctgatggatctgatgatagaaagcagatcagtggttgcctggggattagaataggggaagaagcatgaaggaatgttatgcagtcatggaaacatgttt

SEQ ID NO: 839594 - DNA, 614 bp, Homo sapiens
gcccatcaggttggggcagggccaggcatgtctgagctcagactctccttgggcatatcttgcttcagctgctgtsgggaatgggggtgagcttcccaggtcactggagttgcgtacctaagaggattatcactacctctgttgagtcatgcaggttgtcagggaagtggggaaagctggcaatcacaggcctcacccagctcccacgcaatctgaagggcggtctcacttccaccatgaacccccacaaacagccccgagtctgtgtccaggcagtgggcaagcagggcttgagaacttgccccaggctacctgcctcccagcttggaaagaaaaggactttggttcttcccctgcttgtggagtctgcatgccggattcttgttctgccccgagttctggccaggaggcttcttgcctggttcaaattgttacaaagtttagctaaagatttccttctgtttgtggcatttccccccacacctctggctgccctcttgaaggatccctgtggtaacaggcaagagtggcctacttggggacccgggaagctcccagggcctttcccgctgcttgctctacccctgtattttgcttggctctctaaattgact

SEQ ID NO: 839595 - DNA, 614 bp, Homo sapiens
gcccatcaggttggggcagggccaggcatgtctgagctcagactctccttgggcatatcttgcttcagctgctgtggggaatgggggtgagcttcccaggtcactggagttgcgtacctaagaggattatcactacctctgttgagtcatgcaggttgtcagggaagtggggaaagctggcaatcacaggcctcacccagctcccacgcaatctgaagggcggtctcacttccaccatgaacccccacaaacagccccgagtctgtgtccaggcagtgggcaagcagggcttgagaacttgccccaggctacctgcctcccagcttggaaagaaaaggactttggttcttcccctgcttgtggagtctgcatgccggattcttgttctgccccgagttctggccaggaggcttcttgcctggttcaaattgttacaaagtttagctaaagatttccttctgtttgtggcatttccccccacacctctggctrccctcttgaaggatccctgtggtaacaggcaagagtggcctacttggggacccgggaagctcccagggcctttcccgctgcttgctctacccctgtattttgcttggctctctaaattgact

SEQ ID NO: 839596 - DNA, 535 bp, Homo sapiens
agctccattaatatgaagaaatatgcaagtactggacatcagacaaggtgaaaaggctgccaaagatctggcaagttatattagggatttctgctgttagcactgagcccagtggtatgagatgracattggaaataaaataaaaaactagaataacccagatagaccccaattcaccaattcatatttgggggaggatttttttttgttggggaggctcactgcaacctccgcctcccggggtcatgctatcctcccacctcagcctcccgagtagcgcaccaccacacccagctaattttttgtagagacagggttttgccatgttgcccaggctggtattgaacttctgagctcaagcgatccacccacctcagcttctcaaaagtgttgggattacaggcgtgagccactgcgcccagccttaggaagatttttcattgcatatttaaaataccccaagaggaggatgattttttctgaacaattttgtatgaccattcttccaaaaattaaaaattaaactggaagacag

SEQ ID NO: 839597 - DNA, 577 bp, Homo sapiens
tatagcaacctgagctttacatagctcatcaatgatcctatgactttaagatatcaaaaagttaaatttttctcctgtatctcctgattgagaaggcagatctctctgtaatacaarttagaaaagaaataatccaaatgaatttgaataagagagcttttataattaaaatgagaaaactacagttatctcaaaaagttttaaaaagcaaggttctgtgctttgataatgcaagctataccagtatgttctaccagtctccactggcttcccaaatatggctatattatagctactggggaatgaaaacatctgcttctccttgggagattcatagcattaatagtcccttactaaggagaagaacactcttcataattccccattccattgtgtataaaaaacattccatcaagtatataaactaacttttttttgtttcaccggaataatagatttctggaaatagaacatacagaagaagcccctcttcttacaaaggtcagcacaagaaccttgagagacgcatgcacagctgcacgccagagctaagtattatcagttacttgcacagtat

SEQ ID NO: 839598 - DNA, 577 bp, Homo sapiens
tatagcaacctgagctttacatagctcatcaatgatcctatgactttaagatatcaaaaagttaaatttttctcctgtatctcctgattgagaaggcagatctctctgtaatacaaattagaaaaraaataatccaaatgaatttgaataagagagcttttataattaaaatgagaaaactacagttatctcaaaaagttttaaaaagcaaggttctgtgctttgataatgcaagctataccagtatgttctaccagtctccactggcttcccaaatatggctatattatagctactggggaatgaaaacatctgcttctccttgggagattcatagcattaatagtcccttactaaggagaagaacactcttcataattccccattccattgtgtataaaaaacattccatcaagtatataaactaacttttttttgtttcaccggaataatagatttctggaaatagaacatacagaagaagcccctcttcttacaaaggtcagcacaagaaccttgagagacgcatgcacagctgcacgccagagctaagtattatcagttacttgcacagtat

SEQ ID NO: 839599 - DNA, 406 bp, Homo sapiens
aagtaatatatgttgacctgatttattcttaattgcatgtggtaagttcactgaagacagagactataccttatttgtaaaacaatgtcaggacacctaacagcacagaccctggagtcagacacacctgaatttgaatcttggctctgctgctactccccagttaaataccaagtagtttttttgtggtggttgttgtgtaatcttgtttagactcagtacactcatctttaaaatttagataatgcctatttctcttcgggcagttgtgaacattaaatgggaagatgtatgaaagtgtttagcacacagtgcctggcacccacaagtrttcatcccacagtaactattattacttgtatgtctagtttattatttgaatctctaccatgtagcacagaaggca

SEQ ID NO: 839600 - DNA, 528 bp, Homo sapiens
tgtttaaatgtgatctaatgaggacttagttgtgccaagaaaayctaatgacaagagaggggcaagagaatggagagtgtatgcaatggagggattataatggttggcctagaatttaagctgtgaaaggagagaaagagaacatcaaggatgtgagggagaatgacaaggtggtagaattaataaattggagttactgagaatattgaggaatcaggacccagtatattagaggaggtgaattagaaagataggagctagtgatcagataacttgctgcatgaaattgagactatagagggttgttgttattagcattgacaaggtctagagtgtgaccctaggtgtgagtggccaaggtagaatggaagacaagataattggagtagagagggtcaaagagctaggaggccacggtgttggaagaatcatctacttatatactaaaatcactaattcttataacagcaatagtgtgagagggaccttaattcatccaggttttagcagagcaagggtgaagccaaa

SEQ ID NO: 839601 - DNA, 596 bp, Homo sapiens
catcaggggctagttacagagaaagcagtagcttccagtataacaatattatccagtcctgttccatgaaaataaaataatgaagaaagagaatatagccagcagatagaaccatatgtggaatagctagctstctattatcattgctcatgatgtctttgggccaataatcaataatctagtgccttagagatggtgtgatgtgcttatttttaagagatgcaaggtacacaggtctctaaaagaaaagggctcttatttactttacttgtagataaggcaggggaggatagatggcagactgacaaagcaaaagacttggttgcagccatatagtgcctacgtgtttggctgtgatgggggaaaattaaacaaaagtgtgtaaaagtttaattggattttagtgcatttaattagatttaaatgcatcttggttttgacaggtagactctaacactgggttttaactctgttgctgactctgttcctcctcaaaagctgaaaaaaagtatttcaagtaaatcaacatctgattctaaattatatggaaacataaaaatcctatttttacccacttatctttgattgcttgctta

SEQ ID NO: 839602 - DNA, 537 bp, Homo sapiens
gtataagactttttggtttatacttataatttctcaaaatttacttttatacatacctcttatcctcttaacatatacatgcaatgatacaaacccttacagccctatattatttgtattattagaaaaagaatacagctccaccatatcaatgctgtgtagaacaaaaatacatcatccttgtagtttaaagtattgaaattatttagttattcccttcccaagaagtgaaaaatatctgaattgtaaagagaaaatttccaggttggaacattttaatgaagagaggaaaaacacagcttctgagcaggtttgaggaagagtcaaagatgtatttgaaaattatgcactatatttgcaaagtgaagcatgtccactaaaagtacattctttatacacatgctaacaaaattaagggcacaccatcctttattgaatgagagcytgttagaagagctagtgtgtaccatttccttttgttccctggaggaaagctaagggatgaaaaatactttgttaatgaataatattaagctg

SEQ ID NO: 839603 - DNA, 622 bp, Homo sapiens
tgtacagataagaaactgtggcaggtacagcctggtaatctaaggtttaataagtcctcctggtggttctgtataggctaatgtttgaaaaacactgatctrggattgtgttctttaggttaattcctggcacccttacacatgttcagatgcatagaagccccatctactgaagcctctcagtaacttagttttacttttgatcaaagtactttataaagtcacatactcaattgcctgactattaacagaagcatttattttgagactattgtcaaagtaacaattaaatagctagcatttattgaatgcttattatgtgaatattacttgacatgcataaacctatttaatttttacaactgcatgagggacccgagagctcaggtgaattgttgaaggtcacaaagccagcaattgggagatacaggtattacagcctgactccaaagctttcaccagtattcttttttattagggatactttgaggaaattacttaatacaaatgattatagacaaataaatattgattgtttccccaatttcatcaaagacagatgatggaaaaaagattgatctaacttacaacaaaatgattacactttcaagagaaactagat

SEQ ID NO: 839604 - DNA, 563 bp, Homo sapiens
accatctccacctcccctccaggcccctactacccttccccacctctggtaattagctctctactctctagctccatgaatcarattgttttgatttttagaccccacatatgagtgagaatatgtgatgtttggctttctgtgcctggcttatttcatttgacataatgacctccagttctgtccatgttattgcaaataacaggatctcattcttttttattgctgaatagtactccattgtgtattaaagtaccacatttttttaaaacccatgttgatggagacttgggttgcttccagatcttggctattgtgaacagtgctgcaacaaacataaaagaacagacatctctttgatatactgatttcctttcttataggtatatacccagcagtgggatcactagatcatatagtagctctatttttagttttttggggaactgccaaactgttctccatagtggttgtacaaaaatggaatttttaatcctatctcacataaaaatgccctaaatctaggttgagaggaaagcacatcattgctatctgagagaaga

SEQ ID NO: 839605 - DNA, 563 bp, Homo sapiens
accatctccacctcccctccaggcccctactacccttccccacctctggtaattagctctctactctctagctccatgaatcagattgttttgatttttagaccccacatatgagtgagaatatgtgatgtttggctttctgtgcctggcttatttcatttgacataatgacctccagttctgtccatgttattgcaaataacaggatctcattcttttttattgctgaatagtactccattgtgtattaaagtaccacatttttttaaaacccatgttgatggagacttgggttgcttccagatcttggctattgtgaacagtgctgcaacaaacataaaagaacagacatctctttgatatactgatttcctttcttataggtatatacccagcagtgggatcactagatcatatagtagctctatttttagttttttgrggaactgccaaactgttctccatagtggttgtacaaaaatggaatttttaatcctatctcacataaaaatgccctaaatctaggttgagaggaaagcacatcattgctatctgagagaaga

SEQ ID NO: 839606 - DNA, 480 bp, Homo sapiens
atgcaagactgggttatgattcctgcctctgggtcctcatgaaaccctatgctacttgaaggcattttatctacttgtcagattctcccattaggctgaactccctgaaagccggratttggccttaagcattccaatgttagcacaatgttttgcacaagctatcactcaaagtctactttttaaattgatgatgcataatgcatgcatgaatgaataagtcattatatgaataaactaataagtaaatgaataaaagccaaatcactcttcatatctttcatctatctggatcctggattgtatctataacaaacacccacctatctgcttttgagtggatcagaaaaattttaaaaatgctttcttccttaagatacttcactcccatctcttccatcccatcaattcattccataattatgacaattataaaaatgtcataatacattgattttttaaaaaatgagacatttgact

SEQ ID NO: 839607 - DNA, 493 bp, Homo sapiens
tatatatcttgtgcctcccatraggttataagtcatgaagaagtaaacttattgtgatctgatactctgtacccaaagtataaacacaatgtgattgttgccatctctgagatagtaacagtgtgagaaacttaagtcttggaagagacaggaggaaggctttagggaggcaacatatatgatttagaccttagatgaatagaggtttccaagtggggaaataacaggtgggttggcaagaaaaaacatgtcaggtaaagggaacaacatggacagaaaggggagtaaattttggaaatggaaattaaatagaaccagttggattctgcctgccaagtttgcagttactattccagctccctcctgcactgctttgagaacagtcaacaccccttctctctctactgtacaaccacaggcccctggagggcagggatcatgtcatctgtcacttcaacctcctttcttttatatggcctgagacatagttcac

SEQ ID NO: 839608 - DNA, 602 bp, Homo sapiens
gtatggtagctatattttaattgtttgagaaactttcatgctgttttccataatggctgtgccaactgacatccccaccagcagagtacaagggttctctcttctccgcatccttgccaactcttayctcttgtccttttgatgttaaagacaacatgctatttactatgaaatcctctgcctctagaccccagagggaagaccctggtgacttgaaattgccttggcatggctcaatgaaatctgggatactcaggatctggccctagtccagagttggtttcctatttgtgtcatgaatagtcagtccagcaatggttaagagtcttaaaacagccagacagcccaggtttgaatcttatctctgcatttactatctatgagcccaggaaaagttattacatctctttgtgcctcactcttcctatctttgaaatggtgataatagtagtactagaaagtattgctttataagaacaacatgatgttaaatgagttaatatgcgtgatttatggaaaacaatactggcacatagtagacagtattactgctcagctgtgagttacatatgtgtgtatgtatatatacacatacacgtata

SEQ ID NO: 839609 - DNA, 515 bp, Homo sapiens; identical to SEQ ID NO: 832789

SEQ ID NO: 839610 - DNA, 614 bp, Homo sapiens
  misc_feature 426: n = A,T,C or G
tttcaggtacatattatgagtactatagaaccactgctcaaggcttctttcctaccatrtaacacattaagctcatttcatatttaggagttatcttgactattccccttgtctgaagtgctttttacctaaatttttgcaagattggcttttgctcatcatttaagtctcaactcaatgtcacctccttagaaatgttgttactgacttcccagtctaaattaggccgtccacagtatggtatttctgattccattatcctaaattattttcttcatagcatgtcttaatatttgaaattaccttactaatttatttgcatgctttatattcatttcatcttcttcctatagaacataagtttaataaggaaggaacttagaatttgaatgaatgaatgaaatagctagtaagacacatacatanaatagttttatatttacaattagttttgaaattttgaatatgggtgaagaagtaatgaaaaagattatatatggaattatctttcattgaaaatcttatctaattgtatcataaagggttcatgatgtttccagtataatttattaaatacatatcaagaaacaaactcagattttagataccaatac

SEQ ID NO: 839611 - DNA, 641 bp, Homo sapiens
ctattgcacatcaatgcctcagcttagttgcataaaatatatgtgcagaagtattaccatgcttttttacaaatgaggaaaataaaggtcagaaaagtttaaataatttggtccaaagtcacccaggtagtaaacaacaggaccaggtcccaagccaggtattctgatcctaaatccagtacatcttctatcatagactctgctttgaaatctacttgaagatggctaaccaagagcccctcatctgcactcattacaacaaataaaattaaagaagactggaaaagtttgggcaagccaatatagctggggtatttttaaacctattactcattcagttggattccctaaacacgagcttcagcacagtcatggtgattttaacgagaaagaggacttagttatgaaattagatgaagattcagaagccaacttatctgtagatcacagtgattaaatagttcaaaatgaattacaacttagtaatattgcttcattcatatttatgagataaaagttggagttcagctcccataatatccagtaatttaagayacaaacaaattataaggattaatcattttaatatcttcccgttgatgttggctaactaaacaaaaacatggctggtggaggagaga

SEQ ID NO: 839612 - DNA, 606 bp, Homo sapiens
gggtatgttggggatcaaaaaaaaataacgtataaagcacctagtacaaaagttggtacacagaaggtactcaatttcagccatgattgtgattacatttttagaaagtaaggaagatttctatcatatattatgtatgtggtgtcttgtgcacatgttgtcatgaatgctttaggccagaaactacaggcttaattgcctgtagttgcctgcagataatatgaatactaagtaggctggaagtaaacaacagggattggtgaggactatggcaagctggagagcacatggctcatctaaatgtcactacctcgacacagtaccagctgattgttgccagaaggaaatacagggccagagttgccagatattgaagttttccaagaaaatccagagaccaggagtgttatgtaaaatttctaagttttccagggttgataattacttttatttattttttcaaagctcaaggtactcccaacaacacatcgttgggccaactttgacctgtagctatcagattatgactctgaattcaggatgatgytcaagtctctagctttggtagagattaatgccagtcaagaaaacaggtaatggcagaga

SEQ ID NO: 839613 - DNA, 641 bp, Homo sapiens
tttaaatactggtgactgaacaattaaacagatgaatgaatgtgcatatttgataatcaatatttaaatattaaatatttaacaaaaattaacatgtacattaggtgctctgagtgatacaaaagattctaagtccagaatggcttgaaaatcaggcttaggaaatataagaatctgtgtgcacctcagcactaagcaagggaaagggcaccctaacacaactctatcctctactacggcccactaaaaccataatgcagactacccacagttttttggcatcagtccccagtgcccttttattttgcacctcttattttgactttgttcattgcctttgttgaaattaatgttaagaaataacgacaaatacaacactattatcttgtaaacttgccatccagaaattggtccacttgaacacaatcaactatgagtgagagatgagtctaacctgtaaagctggctgagacattcaagattaatgttaccatatgagaaccctttttaacacaayctaacctttctgttttattcactctctcatatttcttacctttaaaattccccatataatgttttatataatataaattttatgcaattacacaagtattattctaaaaaagtaaactttggtg

SEQ ID NO: 839614 - DNA, 625 bp, Homo sapiens
ttgtgggatgatcaggtgaacaaaagtcacataataatatgttatcctcttccaaactccaccacaaattyaacatttaaagaatacttaaaagccaacaatctaggcagatttatataacatcactataaatttggaaataaaaaataaacacacaaacaactgtgaaaaagaaaggaatgaggaaagagttctgtatcttttaataaacttaataattctttatagaatcaagatctcaggatactatatgtgcaatcctagtaaactcttcaacatggaaaactaatacattaaatataaacacatttatattgaagtattacaataaatatattcacacaagacactgaaagactgacaaaagaggataaattccaagattagattctacttcctagaataaaagacccaattacaatttatgaataaaacaaacaagatgctgtaaatttactctgttaaaaaagattgtttcattttaatgttttctaatttgacaaacacttatgagtggatttcaagttctgtctctaaatggacaaaactagaatctcattgttttaataatatcaattctatgaaaaataaaatctggacctcataagcagatacactcactctt

SEQ ID NO: 839615 - DNA, 623 bp, Homo sapiens
cttcctgatgctgtttctcctgccacctcccatcctctaccaggccccagtttgtgttgtttcccaccatgtgtccatgtattctcatcattcagctcccacttataagtgagaacatgcratatttggttttttgttcctgtgttagtttgctgaggacaatgacttccagctccatccatgtccctgcaaaggacatgatcttgttcctttttatggctctgtagtattccacggtgtatatcaaccacattttctttatccaatctatcattgttggacatttagttggatttcatgtctttgctattgtgaataatgctgtaatgaacacacgtgtgcatgtatctttataataatgatttatattcctttgggtatatacctagtaatgtgattgctgagtcaaatgtatttctggttctaggtctttcaggagttgccacactgtcttccacaatggttatactaatttacactcccaccaacactgtaaaagtgttcctttttctacacaacctcgccagcttctgtttttgtttttttttccccccttttaataagctattctaactggtatgagatgatatctcattgtggttttggtttgcatttctctaata

SEQ ID NO: 839616 - DNA, 605 bp, Homo sapiens
taggaggtaggtagcttatgaggtaggtaggtatgtaaattcatattttacatatgagcaaaatgaggcttctgagagtctaggtaatttgcccaaagtcaggattccarctcaggactgttccaaagctagtacactttcgggtagtctttgagagccaagtaaggaatcaaattcaagttactagtggagagaaggactttggttactaaggcagttcctttgctctctctccgagttcgttcatttctgaggcagaaatttatttgatgaaggctaccttgggcctgctgatgataacgtataaataggagaactggcatggtgaagagaggaagtgtgtgtttgcacctgtgctcatgaatttggaaaagtatataggaaaagtaagacaaggaggtaaacaaggaatggggcaccagcttctggctggcatatattgactcaaggctcccattgtaggtcagatggttgacagtttattaatgttgaaaaaaattattcataatcattgggaacacttgtcagtgactggctgagcttactaattgtaaatcagtagaaaaacattgagcaaactcttccttgtagtgggcacaacttta

SEQ ID NO: 839617 - DNA, 619 bp, Homo sapiens
aaaataaaaaagaaaggaaaagaaaatcttatggaatataattggatatagaaattgaaaccttgagggaagggcaggacgttatttaaaatcacaaaacaaataaggactgtaacatcaatttctttacttgaagttgagggatataccactgggccagaagaaaataaggcatgctttaggaggcattccagcatcagatgggccctcctcccctgacttgctctaggtattcagatttcaaaaggaagaaagaggtgcttggaaattggtccagtgagtgaattgtagatgttagaatgtaaagctgccacctaagtttactcctaggtcagcaatagcccatgaggagatgaggcagaggaaaataggcaagaagagagtagaggatgctgagattcaaacattttgcaagaatctgaagtagctgaggttttcataaattgaactctgttttctcagaataagaatgaataggggccagaattcatttagygagctggaaccaacttatcattagattcctgctttgctctctaagtatctcagctccactttcagaaaagtcctgactccaggtaggcaaaacacatttttcttctttggttgtttggtaggg

SEQ ID NO: 839618 - DNA, 574 bp, Homo sapiens
cctggccaacatggtgaaactcggtctctaataaaaataaaaaaaactagttgggtgtggtggcgcrcgcctgtagtcccagctactcaggaggctgaggcagcagaatcgcctaaacccgggaggtggaggttgccatgagccgagattgcaccactgcactccagcctggcgacagagcaagactctgtctccaaaaaagacagaaaaaaaaaaaaaagaaacaccttggacaggaaacatgtctatgggaggaagtaaggccagatgcttgcaaaataggggggaaagtgagaccgggagggaacacttccaaaagttacccccatggggtctgaatttggggcctgggaaggaatttgggtgcatttagatccaccactgatagtctctattttggcaccctgttttgttcccgtatagcacttaccactgttctaactaaacaattaatttcattatgggttgtgcaaagtctatgattctcatgcgggaccccaggtgtgttttttgttcatgtagcacaaagctcattgcctaagtagtaggtaggattggtagataaaatacaaga

SEQ ID NO: 839619 - DNA, 597 bp, Homo sapiens
ttattctgatttgtcatcgaattctttctctccatggtgtcaagaacctggacactgctggggctagggtcccactggcttccagataccctcctgagccctctggcaacaaaagggtcactgaaaaatgagrggttcaacaggtctgcatagaaaaaaaaaaaactgctgagaatttccaagactcctttgatttgcgtagcctacacatgaccttaggaagcagctacagttacaaagcagatggagactctctggtcttcctaaagcagcagaaatatgttattttctctctctccttccctccctttctctgacacacacacacacaaacacatacacacacttacacgcttaaatgttgctctccttctcagtgcactgaggaataaaacatagcccattatttccaaccgatggattggggcctcatccacccttcctttctcctagaaaagaatatgaaccacgaagctgtaaagttgtgcccagagttccccagctctccttcctctgcatttacttgctgattatcacttgatcttagccaaaaggccgagaagcgatatgtgccgattatctatctcttaggtcccc

SEQ ID NO: 839620 - DNA, 636 bp, Homo sapiens
gaatcaaattttagagttagaagggttctaagtctaagttccttttcttgtgcttgggcaaacaagtttgcctggttaagggcagaatgggaataagaaccagagtttcattctctcatgccttgattttttttgtttgtttgttttttgtttttgaagtcttgtgtcccaaatttgaaagtctgtagttcagatgaataagaattgttttcatttcactgtttatacaagtaattgatactcccccaaaaaggccaaatctgtgtgagagctcaaagtatgctgaatgtgaataggtatttgctgttgtccaacagtaacccaaatctataaagtttaatgttcttttttttttttaaacaaaaaaatcaggccgcattactggcatatataaagtttaatgtcttaatggaaggatttgagggggtggtaactgaaatatgtgaaatgtatttaaaaaactcaatgtatttgtcatcctggttcaattattatgaatttgtgactgattttgagaaaaatttgtaatcttgataatttttaggctttaactaactrcaaaataaatctagatgtatgctaaatgacttaatggaaacacttatttttctgcagtgtttcctgaggttataggcg

SEQ ID NO: 839621 - DNA, 551 bp, Homo sapiens
acatgaagtgatgctcagtagtctcattggttatcagggaactgtaaattacttcttcaaagaaatactggctgggcacagtggctcacacctgtaatcccagcacttcgggaggccgaggtgggtaaatcacaaggtcgggagttcgagaccagcctggccaacacagtgaaaccctgtctctgctaaacatacaaaaattagccaggtgtggtggtacacacctatagtcccagctacttgggaggctaaggcaggagaatcacttgaacctgggaggcggaggttgcagtgagccgagacaggtccattgcactccagcctgggtgacagagcaagaccctgtctaaaaaaaaagaaatactaccacgtactgtctataactgccaacattaaaaagattgacaataccaagtggtgacaagattatggaacaatagaaaacacagattgtggaggtgttactttggaaaacaatgtgggattatctactaaaattgaagatmttctgtgactcagtaatctgtggctcagtaattttattcttaggt

SEQ ID NO: 839622 - DNA, 557 bp, Homo sapiens
taatgttagtccaagaggcagtagagcatagtcatgcttgactttgaattgtcactgatgagctgtgtggtcttaggaaagttacttaacctctctgtgcttcaatttctttatctgtaaaatggagataagattatctgcctcagtgttgttgagagaattaaaggagttaacatggaaagctcttaacacagtgcctatataagctttagctgccatcattatcatcatcctcaccaccaccaccatcattatcatcattattaatctgccactattttcaccaattcttctttaatttctctctctttttcctggcctttagagtcaggtagccccagacttgaatcccatccatcacctactaggtgtgtgtattagtctgttctcaagctgctaataaagacacacctgagactgggtaatttataagggaaagaggtttaatggactmacagttccacatggctgcggaggcctcacaatcacggtggaagatgaaggaagagcaaaagggcatcttacatggcagcgggcaaaaagagaataagagacaa

SEQ ID NO: 839623 - DNA, 564 bp, Homo sapiens
agagtttggatgaatgtcagcatcaggctactgtaataatggtttaagattatttaatcccattagttatacmcttcattaggctgagtgaattgttggcagtggttcagtaaacttcctcctttagagataaaaggacagaaagaaaataggaaaggagcctattcctcattttctttcatagttataattctttttttttttttttttttttttttcccgagacggggtcttgctctgtcacccaggctggagtgcagtggtgcaatctcggctcaccgcaagctccacctgccgggttcacgccattctcctgcctcagcctcccgagtagttgggactacaagcacccgccaccacgcccagctatttttttttttttttttttttgtatttttagtagagatgggtttcaccgtgttagccaggatggtcttgatctcctgacctcatgatccgcctgccttggcctcccaaagtgctgggattacaggggtgagccactgcactggccataattcttaatggataaaggaatgataattacccagctgtagcgtggac

SEQ ID NO: 839624 - DNA, 661 bp, Homo sapiens
cctgcccatattacactgacatcattaaaactatactgtcaccaagtactctaacagtaacctaagattccatgcaggcctaaaactaatgctaaattctcagaagccataggggtgagctgatrtcagaacagtctacatccatgtgataagtgcagtggacataataagcttcaagtttaattatttaatactaataatattgggtttgactaatccactgttggaccaactttagccatgtgttaagtacaattttgaatacaaaaactacttcagtttcttaagtaaatgcaaaagaaaacagcttttcaaaagaaagcaaagatgaaaatatatattgtatatatacataaatgataatatggcagagttcacagtatagcattgaagaaaaaaataactagggctaagaaagaacagttctcggtatctaattcactagaattaaaaggcagtctcttcaggatgatgggagaaaaattaacccgaaaaacttttcatctttttgtcactcaagggacaagtttaggacatatgaaatctcattggtcaaggttggattctgtgcccacctcttgcacaaggcaaatggcatcttgtttcatagaccaactaagagaactgtcatggttccacaaaagctgagctaatgttacag

SEQ ID NO: 839625 - DNA, 592 bp, Homo sapiens
ataaaataatgcatagcttacaacacaccatacaaatctggataatatgaataatcctgtcayttgatctctaattttttaatacatgaaaaactatatttcaaaatggtcaaaataacgtaagttttataagtagtattaaactcagcaatgctctcaagttaaagcactgggattctaaggagattaatgtcaatatttgaatttattcaaaagtggagggtcatttgcatattctttaaggagatatccctttgaggtaatatgttttgtgttcaccatatttgtataattaactcagtcatcttggagaataacaatcaaaagcaggaacagaaagctaattataacaagaaacagggactttgtccattttaacattttgagaagtcaatttaatagttaatggccaatattaagaaacgtattcaaagacatatagctacatgttcaccaataagcagcatggacttcactttctattaagctggaactaacaagctaaatttttctaagtattactttaaaaagtaatcctagataatcactttgatcaatcactttgatcaaagtgtccacagcatcgctgatc

SEQ ID NO: 839626 - DNA, 590 bp, Homo sapiens
gtagagattcaattctaatgaagataatatggcagaagtgatgagataccacttccaagattaggttattaaaacaccttcacttttatcttcagtgcttacactgtttatcaatctcttggatctcttgctgatatggtttggctctgagttgtaattcccaatgttgcaggagaggcctggtgggaggtgactggatcatcggggtggatttcccccttgctgttctcatgatagtgactgagttctcacaagaactgatggtttaaaggtgtatggcacctcccccttcaccctctctctcctgctccaccagagtaagacatgcttgcttcccctttgccctctgccatcattgtaagtttcctgaggcctcccagccatgcttcctatatagcctgtggaattgtgagtcaactaagcctattttctatataaaccagccagtctcaggtagttctttctagcaatgtgagaacagactaatacacttgccctgggggtaaccagttatgatatcgtgacgtattcctgtggcaggcccyagatgagtgtgattggaaatggattttctaaggcctatcaacaac

SEQ ID NO: 839627 - DNA, 598 bp, Homo sapiens
cacattcataaaacaaatactactagacctaagaaaagagatagacagcaatacaataatagtggagaacttcaacatcaaactgacaacactagacwtggactttagaccaaatggactgaacatacacagtacattctacacaacaaccaaagaatataattctcatcagcacatggagaattcttcaagataggccacatgtcaggccacaaaacaagtttcaacaaagtttaaaatatcaaaattttatcaaataacttctcagactacagtgggaataaaactagaaatcaattccaagaggaactctcaaaagtatgcagatacacagtagattaaacaacaccgtttctggaaaaatctttgggtccacaaaggaaattaggggagaaactaaaatttttttgaaataaatgaaaatggagacacaacataacaaagcctctggatacagcaaaacctctctcttagcaaaagcagtgctaagagagaaatttatagtgttaaagttctatgaagccagtattgccatgataccaaagctgggcaagaacacaagaccaataaaaccataggccaatatccctgatgatca

SEQ ID NO: 839628 - DNA, 528 bp, Homo sapiens
tttttgagacggagtctccctgtgtcacccaggctggagtgcagtggtgccgatggctcactgcaacttccgcctcccgagttcaggcctgaatagctgggattacaggcacccaccaccacgcctggctaatttttgtatttttagtagagacgaggtttcatcatgtgggccaggatggtctcgatctcctgacctcgtgatccgcccgcctcggcctcccaaagtgctgggattgcaggtgtgagccaccgcgccgggcctgagaaaaaaatcttataatcttcagatataagaaggttgcccagtttggagtgcagtggtgcaacctcagcttgctgcagtctttcaggcagtcctcccatctcagccgcctgagtagctgggactacaggcgcatgccaccacacccgcctaatttctgggctcacgtgatcctatcttcctgccccagcctccctaagtgctggrattgcaggtgagagccaccacacctggcctaattatttcttttatctcgctaattac

SEQ ID NO: 839629 - DNA, 611 bp, Homo sapiens
atggcccctctcaactcatgtgaactctgctcactcctagcagatggtattctctctccctgacttcctctcgggatgtttcaggcaaccactaaggtggcctccagggatccctgccttctggtacttactgcctgtatgatcccatccccgttgagtgtgggctggatttagtgactagcttctagcaaatagaaataggcagaagcaaaatcacttccaagattagataattaaaaaaagatcatggcttctgtcttagtctctctctctctctggctctctctctctccctccacccccgccaccacccctcattctgcagaagataagctgccatattgtaatactctatagagaggcccataaatcaagggaccaatgttcccagccagtgaggacctgagcctaccaacagccatgtgagtgagcttgggagtagatccaatcccggttgaacattgagatgactccagccctggccaatacyttaactgtaggtttgtgaagaacaggaagttatagccagatcatatagattcctaacccactgaagctgtgagataatgtttgttttaaactgctatgtttgggggtaatttgtaacacag

SEQ ID NO: 839630 - DNA, 565 bp, Homo sapiens
gtaaacactgctctgtgaagtaaacatgtgctgagaactgagatctaaarccgtttaagacttctgctgttcctgcctatagcaaggagcacattttcttcactgcttgaagtggagaaaatggctattcccagccattcctgaagctcccatggggactgaaatccagtaatgctgctaaatgaatgaaagaaattagggtacctgggttcccagatgtcctcaaatggggtttaggtcaggaagaagttgccacagaactcaggacctactttgctactggtggtgacgtgcgtaaatgtgaccacttctttttactccacagaaatttttaagtgtccaaactgatagattgctcaccagcaaacactgaaatctcttgctctagtcatagggcgaggctttggaaaaattaagaacagaactcagagctcctcatatttcctagtgatttccagtggactttacatcctgccctcaaagattttctttgaagagttatgatttcataatctgacccaccaaaggctgtgaacaagatcatgtaatgatgcttcatatccaa

SEQ ID NO: 839631 - DNA, 656 bp, Homo sapiens
tgtcggacactgagatccaacaaccactgagtaagtgtccttagctggctgcaggtgacccaggatgtggggtcaggcatgtgctccagagccaggcgcccggaactgtaatcccagctcgcacacgcagcygcggaagcccaccatgccttactgcctcctcctcgtaatctcagcctgcaatgatccctctaaccatgatgatcagaggagttcacacacatgaaggcacatgttacaccaggcccagcacacaagaggtgtgtgacaactcctgtcacacactctcacaggacccagaaacagactgcaggcaaaggctggtcactgttcctctacatccagaaggtgctgcatttgaggaaagataaaacaggaagaacattctaagaagataaatactggctgggtgagtgagaaaattaattaatcaagcttgagcaggccaggactgtgacatatgagccacagacagagaggatcaggacttgtcaatccagaaagcagagatagagaacaaggtcaccggcaagagagagaacaaacggactgcgactcatccagatgcgcctccctccggctctgccatgcagcacgtgggtgcgggtaccggatccacctgccctgaacctgctgcctcccccaccaaaatgggc

SEQ ID NO: 839632 - DNA, 579 bp, Homo sapiens
accccttccatctctactgaagacttaatgagcttggttttggaagaaagggatacaaacagatttcaatcttctggccaacacttggcttttagggaggcagcgggaatgagctgtcgtracatagaataggtgctttccaccatataaccagggagacccttccacctccaccccctagggtttgccattgaaggcccctctcaggcaaagattgagtacaacgaccagaatgatggatcgtgtgatgtcaaatactggcccaaggagcctggcgaatatgctgttcacatcatgtgtgatgacgaagacatcaaggacagcccgtacatggccttcatccacccagccacgggaggctacaaccctgatctggtgaatcagctgctgtgcttctgtcttcttgtccctggcccctggttcctcacccccatgcccgaagttgccttaagcagcatgttgagagatggcagagaggaatcatttggattttaggaaggaaacaggcctgcatttgtttgtttgtttgtttgtttgtttgtttgttttgagacagactcttgctctgtcgcccaggct

SEQ ID NO: 839633 - DNA, 488 bp, Homo sapiens
gccacatactgcaaagagcctatgagaaatgaaaattaagaaaaggagccatgggcattgggagactagaggctataatgatattggagcagtttcaatggttgagtggtggatgtagaccaagttgcagttggttgtaaagcaagagaatagaaaattttcttcacatatattacaaatgaataaattgaaggagaccaactgacatacaggagtaaataaggggacacagaatagatatatcctcttcaatgaaacgtggaatatgaaaatatgactttaaattataaaaaagtagcattatacatttacagaaaatcccccataaaacaaaacaaaatttttttatttctttgaatagcttttytaaaatgattcatttactgaaatacattatataggcatctctgctgaattatgttagcagagaacagcaaactatcgatataacttaatttttattacttcttcattcgaataaatacctt

SEQ ID NO: 839634 - DNA, 599 bp, Homo sapiens
gatgttgggctggttgagggtctcgtggttagaggatacagcttctcttaaagctagggtcttcatgtgatattaaacagtttcccctccttcactttcttccccagtaggcaaatgacagaaaacaataactatagaaatctcctgtgttgggcagaattctgttgtggggaggtggcccattaaaaagaaatatatagcctggaatccatggctggcagaagacaactgcacacatgtggactcagacaccaactgctgcacacacctcacctaggtgaacaggagtccgtctctttgcagttcttttttaacaagtcttgaaatcgtggtccgctgatttcttctctaggtcacactgaataaccccaagcagacggagttcttgacagagttttgaaggcccacaaaaggctgcacaggtgattacaggccaagtaggaaggtctgtggcacacccaggcatctctggcagtgctgtcctgaagaagcctttctttattgatctgccacagtccacctggccaaactcctcctctgggctcttcaraccactggcaggaaggaaaaacaggttaagcactgtgggccacaccctg

SEQ ID NO: 839635 - DNA, 629 bp, Homo sapiens
tccaaatggccatgatcatgtatctcaccagctgcaaaatcttaaatcgataccactggaaaaaaaaaaagcatgaccatcctggcccagaatatcttgatcatatcttgttataactgggaacttctcatccatccattctttagttttactggcaatgtgttacacatcaaacaactttttataacagcccccacaagggattttataatttgttatttaaaagttatgcatcttcattgtataatttttggaaatacaaatatcctaagcaaatgacttgctgtcttatcactgagaagaaataacctgtgtttagaaaacattttacaaatgcttattatttttagtaggttgccttttttgtcttttgtataaaagatcatgtttctttgacttctttccccttttgtggtgatttagaatataaatactctttttaatttgtttacattttaaaaaaatttagtttattttctcaattatcaatgttaaaaatgaaatttgatgtgtcatttgataaaaaattagcatrcttacttcctccttctttttcttcccagttaccagtttttatttgtcatctgatttcatatcctcattattttatatataaaacttatatttca

SEQ ID NO: 839636 - DNA, 580 bp, Homo sapiens
attgcattgatttcagcatgaagggatcccctttcctgcctctcctccactccccctcttgccaggtcatcttttctgaccataggacactgtgctagcatcttcctcatcagctgagacctcctagagtgcagatcttttcgtagtatgttctttgcaaagtgaacactccagtctcagctgctcatttctcaacctgtttcctgagtttattcttgtaaaactatttgatcaggcagttaaatctggaaaaacacaagagaaaagggtgatatggtaggaccacgagaggtggaaggtgaacacttgattaagaaatctaatccatagtgtgtgaggccgactccttgttgtcttcttacctttttaaaaaaaaaaacaacaacctgtttttcaaaagtgatgctgtcatatcctgagagtgacgctgtaggaaaaaaaaaattwaaaaataaaaacaaaacaaaacaaagctaagctttcagacttgcagggctaacatagactagttcccaaagacatgtggggtagtggtggttttatgactttgttttggtcaaaggttccaacaaaagggctt

SEQ ID NO: 839637 - DNA, 628 bp, Homo sapiens
ttattacttcagaagtactgtaaattattcagtgacacaccagcagtcatctggctgacacaattttgcttgttatcmtaagattgctcaacaatattacctttctttccttaaaatcttatttaaaaaagatttaggcttaattgtgttatgtttgatgtgttttttatataaatgcaacatatttgatctttcttgatgaattatgcatagtagtcaagaagcaaagagaagaagcataaaaaccacttctgaaacatttaaagttaaagggacatatagccagcaggaaataacaacaaagtgttaagaaaaattttggactgctgttacaaagtccatacgctaggaacacgacaaaacaacctttgaaagaaattcttttgatgttaggttggtccatatgaaaaaactgacattagactgttttgacatataaaaatatcaatttcatatggttccacataatacttcagtataaactatgttaaatgaataggaacctcactggtcactgtatagcagaattcggtatgagttgaatcagggtcacaaatagcattcataactccagtcagccatctattgttgcataatattgatcacactgggaacaggcaatagagta

SEQ ID NO: 839638 - DNA, 510 bp, Homo sapiens
ggacagaagagggtggagagcaaaaagggagatgtcgagtacaaaaattcagttttgaaaggagaaacaggctgggcacagtggctcacgcctgtaatcycagcctttgggaggctgaggcgggtggatcacgaggtcaagagatcgagaccatcctggccaacatggtgaaaccccatctctactaaaagtacaaaaaatagctgggtgtggtggcgcatatctgtaatcccagctactcgggaggctgaggcagaagaatcccttgaacccaggagacagaggttgcagtgagctgagatcgcaccactgcactccagcctggcaacagagtaagactctgtctcaacaaaaaagaaaaaaaaaaagaatggagaaataagctttagtgatctattgcacagaatggtgactataataaataataatgcagccaggcacggtggctcacacctgtaatcccagcactttgggacgccaaggcaggcggatcacaaggtcaggagattg

SEQ ID NO: 839639 - DNA, 658 bp, Homo sapiens
tttcattttattctgataaagactaatgtatgcctgataacctagtgataatccacaagtttggtagttcacaacatttttagaaagcacgtacgattaacatttaaataaggcattatagaaagttttataaagaatgaagtgtgtactataattcttttaagaaactttggttcatcttgaaagatcaatgaatttttaaaatatcagaagaaaaggaaaataaatttttttccccaaaaatacataagaactgcttactggcacttgtattttaagtacctggggaaaaaatggaaaagatttttaaaggcaattaataacagcttgtacgagggcttgtttcatttgttctggcaccaagtaaagagtaaatacgccatggaagacgccatcaggttttccgtccacctctcctactgccccacttctcccagaccacacagcacatcagcagccatccttgctgccccactcaggaatcactttagattccaattttctttgtttgtttgtttttgttttttgtttttttttttgagacagagtctcgctctgccccccaggctggagtgcggtggcaygatctaggctcactgcaacatccaccttccgggttcaagtgattcccctgcctcagcctcctgattagctgggg

SEQ ID NO: 839640 - DNA, 657 bp, Homo sapiens
atcacattggccagaatggaaagatttaaactctcaaggatttggaagaatggaggggtattgccctttgtcacagcctgcctggagggcaatttgttggtgtgttggttataagttgcatttgtcggccaggaacccaacagcacaggcttgaacagattgaactttcattgctcacatcaacaattctgagggtggtcattcaaggagcaaaacggaggcttccctgagacctcagggatttggctcctgtctctgtcctgacttcctcagcctgtggctcccatcctgaaggtgacatggtagctatagagctgtgtcatcagtctgcattttaagtggggtgatgggaatgagcagaccagaaggatgtgggtcttatttgggtcagccccctgtaaagtggtgtcttcacagccccccaggattccagccagactcattggccacaccaaccacaaagggcactgacaaagactgttttttccccatctataatcagggatctttagattgctcctaggtgcagacgcgtgtgtgcaaaagtatcacctgctcggggaagggaggcctggcagagccatgagagtggtggccagcggtggggayggggaagatcgaagaaaggcgaagatttacattgtctggtgaaaaaaa

SEQ ID NO: 839641 - DNA, 586 bp, Homo sapiens
gatctcaggctcgtgggatgctgagctgaaaagtcagctctgctatgtctgtgcctggactttgacttgcagaaaccatgagacaatacatggatgtcattctaagtcccaagtttgtggctatttgttatgcagcaatagaaaactagtcccagaggctgggcatggtggctcacacctgtaatcctagcactttgggaggctaaggcaagcagattgcttgagctcaggagttcaagaccatcctgggcaacatggcaaagtcttgtctctgcttaaaaaaaaaaaaaaaaaaaaaaaagaaagaaaaagtaaaaagccagatgtggtggctcgtgcctgtagtcccagctactggggaggctgaggcgggaggaccgctttagcctgggtgatggaagttgccgtgagctgagatcttgccactgcactccaccctggataacagcaagacyctgtctcaaaaataaagaaaaagagaactagctccaggaagaaggcaagggaagagtttccagtgatgccaatgcagctggctgcagaggaggaaagaatgtgttcacagtggcagagatgggacctccag

SEQ ID NO: 839642 - DNA, 590 bp, Homo sapiens
agtaacccagcccctgtcagagagagaccgtatttgataaaagggtctttgcagatgtgttttgagatgagctcatcctgggttacccaggtgggccctgaatccaaagaccagtgtccttagaagagacagaagaggagagagcaagactacatgaactacaggaagacaaaggcagagattggagggctgaagccgcaagccaaggaatgcctggagccaccagcatctggaagaggcagaaaggagcctccctttgagcttctggagggagtagggtcctgctgacgccttgattttggacttccaggctccagaactgttagagaataaattgctgtcgttggccgggcgaggtggctcatgcctatagtcccagcactttgggaggccgaggtgggcgcatcacttgagcccaggatttcaagatcagcctgggcaacatggcgagaccctgtctctacaaaaagcacaaaaattagccggatgtggtggcggcttgcctgtagtcccacgctgaggcaggaggatcaattgagcccaggaggtcaaggctgcagtaagcyatgattgtgccactgcactccagc

SEQ ID NO: 839643 - DNA, 639 bp, Homo sapiens
tttcattttattctgataaagactaatgtatgcctgataacctagtgataatccacaagtttggtagttcacaacatttttagaaagcacgtacgattaacatttaaataaggcattatagaaagttttataaagaatgaagtgtgtactataattcttttaagaaactttggttcatcttgaaagatcaatgaatttttaaaatatcagaagaaaaggaaaataaatttttttccccaaaaatacataagaactgcttactggcacttgtattttaagtacctggggaaaaaatggaaaagatttttaaaggcaattaataacagcttgtacgagggcttgtttcatttgttctggcaccaagtaaagagtaaatacgccatggaagacgccatcaggttttccgtccacctctcctactgccccacttctcccagaccacacagcacatcagcagccatccttgctgccccactcaggaatcactttagattccaattttctttgtttgtttgtttttgttttttgttttttttttttgagacagagtctcgctctgccccccaggctggagtgcggtggcaygatctaggctcactgcaacatccaccttccgggttcaagtgattcccctgcctc

SEQ ID NO: 839644 - DNA, 624 bp, Homo sapiens
gctggtcatgtggtcatagctgatattaatgactacgttattccaatacccattctgtattccctttgccttcagcaagcacctaagcaggttgtgktttttttcctggtggagtgaacctaaccttcattcctgaagggtgtgggccatttgtagtccatcctggagtggggtgctgtagtttcctattgaccttaatcacagggcatggtaatgttaagagatgccctaatggatctcctgtattccatgcatactcttccttacctccgttgtggagtagtagactgatttcttcttgatagtctgtgtcagtcaccacagccaacactgtaactcccttcttagcctgttgacttaaaggtcggaggagcccaaagtgtccaggtggcaatcttaacttccagtttaatggaatcgtgtctcctggtggcagcgttcctcccccaggaactaagacgtctaggccagcagaacataatgtaatggaaacaggaagcaaaaattttgctagtggatcacttggggtgatggtgagtggtgccacttccactttcaccccttgatacctggaccgatgaatcctggctatgggagaaacagtaccatatattggatgctgat

SEQ ID NO: 839645 - DNA, 606 bp, Homo sapiens
gtgaagaatcagagatgcagcatttctggctttgaagatggaggagggccatgagccaaggagtgtgggtggcctctataagctggaaaaggcacgaaaacagatttacccctggagcctccagcaaggaacctagttctgctgacaccttgaatttagcccagtgacttctgtattggacttctaacctacagtactgtaagataataaatttgtgccacatttgtggtaatctgttatggcagcaataaaaaacgaacacaaaaagttaaacaatacaaggcaactggtgccagaagcatcatatggcagtgcctattgttccaaaagaggagcgtgaacagtgaggctgagagaaggatgaaatcatgaaacttgttccttcctcttgagcacagagtggtttgcctgtgggtgtttagagtagtggcttaatgaccactaaatataggcctgtggccagaaaccctcccaatgagstgagggtttgtatgaattttaatttacttgaaaattccatcagatttctgaaaattttagtgtgtataaaaattatctgggaaaataaaaagttaaaaaaaagatcatctgaggaatttgttcaaa

SEQ ID NO: 839646 - DNA, 480 bp, Homo sapiens
gaaaccattccccttatgggaaccatctgccgcaacccccaaataggcctgagggactgtgaacagagtacaggcgtctgctataggagcagaattcagagtgttaactgaattcccctgggctggattctgcctgtagggtacattccttagcatgctcaattttttttaagacaaagaatatgaaagaaaatctcaaattcctacattgctccaacttcctattttcttgcaaacatctggcctgcttcatccattttctcctctttcctggaccccaaaggcatcagcctgtaggaccctatgtaaaatgctctgtgatgtcccttctcgcaccacctgcagcaggatggttattgtttaggaatgttctggtagygatacctaggaacagaacagaatgtctttgaaagtacagaggcccggcacccctggcatcagctgagttcctgtgtgtccctgttgccccttagaactgct

SEQ ID NO: 839647 - DNA, 545 bp, Homo sapiens
atatatgcattcaatgctataaattcccgtctaagtgttgcgtttattatgtcctatgaattttgataagttgtattttcattttcatttagtttaaaatattcttaaacttacctttgagaggtgacagcctgctggcagccctcacagccctcgctctctctcggcccctcctctgcctgggctcccactttggcagcacttgaggagaccttcagtttgctgctgcactgtgggagcccctccctgggctggccgaggcgggagccggctccctcagcttgcggggaggtgtagagggagaggtgcgggctgcaaccagcgctgcacgtggtgcttgcaggccagcgcgagttccgggtgggcgtgggctcggcgggccccgcactcggagtggccggccagccccgcggaccccgggcagtgaggggcttagcacctgggccagcagctgctgtgttcaacttctcgccaggccttagctgccttcctgcgggcagggctygggacctgcagcccgccatgcctgagcctccccgcctcct

SEQ ID NO: 839648 - DNA, 593 bp, Homo sapiens
ttaacaaccatgacaggcaagtttgcattcattggtgttaggtgaccaaagagaaaggcaagaaccctggcttttctgggaaagaatgctcatcatttttctattttcataaaaagaaaaagaatcctgtgagtttttatgctgtttcagaacaaacataactgtgactcatgttttgcaatttatgtagctgacttcacatgcttttgacggttctatcatggtttagatgctgcgaaatatttgttttcctctgcagaaccagagtggcaaaaatccacttgcttcatgattattgatactctatcctgaggtttctcaaattcagccctatcgacatttggggcaagataattctatgtttgtttatggagctgtcctgttcattgcagggtgctcagcagtttccttgacctttccttacttgagcccttgtggtgacaacccgaaaggcctccagacattgacaagtatcccctggcccctggttgagaaccactgctctgcactttggtttctcatcatgyaatgtgctaggaaagggatccagggagaacaggggaggctgtggaataaggataaagcataaaagg

SEQ ID NO: 839649 - DNA, 542 bp, Homo sapiens
tccaaggctctttgaaaaaatcagcagaaagcaaagttggggtcaaagccctgctgaacaataaagtttatgaactgtaactttgttgtaattcacgcccagggtcctgctgagasgcaccgtttcaggggccttgactgagacatagctgctttgcaaatgctagttcctgccctgaaacttccatttcatacaagagggaccccagaggagactgtcctggatcaggaatcagcaaactaggacctatgggccaaacccagccctcagcctattttcttaaataaagttttattggaaaacagccacacccattcatgtatgtattgcctgtggctgctttcatgacaatggcagaatcctagaccccgtgggaggacagccaagaagcatcagagcagcctttgggcagccttggtgtgggtgaggctgagcgcttgctctttgtcaagcattcagcgtacttgatctcatttcaagcactctttccccaaatatttatagagcaccagctgtgagccaaacacacttctagaggctga

SEQ ID NO: 839650 - DNA, 566 bp, Homo sapiens
atgtaaacaaacctcccatgcagccagtcatatcaaagtagaacacatacaattatayataatacacaattgtatataaagaatgataataaagaactatgggccatgcacggtgcctcatgcctgtaatcccagcactttgggaggccgaggccggtgaatcacctgcggtcaggagtttgagaccagcgtggccaacatggtgaaacctcatctctactaaatacaaaaagtagccaggtgtggtggcaggcgcctgtaatcccagctacttgggaggctgaggcaggagaattgcttgaacccgggagatggaggttgcagttattccgagattgcaccattgcactccagcctggaacacagagtgagactctgtctcaaaaaaaaaaaaagttaacataaaatagcctcaggtaagtccttcaggggggattccagaagaaggcattgttaccataggacttgacagctccatgcgtgttactgcccctgaagaccgtccatggcacaacatgtggatgtggaagacagtgatattgacgagcctgaccctgtttaggcct

SEQ ID NO: 839651 - DNA, 610 bp, Homo sapiens
cataaaaaagaatcaaatcttgtcacttgtaacaactaggatggaactggaggacattaygtgaagtgaaataagccaggcacagaagacaaatgtcatatgttctcactcatatgtgggagctaaaaagtagataattaaatgcacagagataaagattagaatgatggttaccaggccaggcccggtggcttaagcctgtaattccggcactttaggaggccaagacgggcagatcatttgaggtcaggagttagagaccagcgtggccaacacggtgaaacctcgtctctactaaaaatacaaaaattagctgggtgtggtggtgcacgcctgtaatctcagctacttgggaggctggggcaggagaatcacttgaacccgggaggcggaggttgcagtgagccaaggtcacaccactgcactctagcctgggtgacaagagtgaaactacgtctcaaaaaaaaaaaaaaagataatgaatggttaatgggcacaaaaattatagtttgatcaaatgagtaagagctagtattctgtagcacaatagggtgaccatagtttaaaaaaatgtatgttttaaaataactgaaagagcggtattggaatg

SEQ ID NO: 839652 - DNA, 614 bp, Homo sapiens
acagaatccaagatatctggcacaaagccatgcttttaatcattctggtgggcttttttctgtgggccacatcctttaatggtgtgtagtgagggatgtaaccctgtggttatgaaaggtctaggtagtaaaaggggatgcttcattacaaagctctacggggccctgttcacatagcatacagcgtctgcagtgcccactgagtccagcaagcggtgaccggtagtgaagagctggatcataatcttccaatccaaacatacttgtaagttttgctctgggacaccttcatcgcataaactctcataaaacttctcagccaatttttaaatatttatgcagcacttactaaacacaaagcctatcttaagtgcagtgggaaatactgtacgaagacctaaaaacctcaacccttccctccagtggtttatccagtagggaagatgtcacttctataaataaccagagacatttgaggacaaggaaatcaccacatcgggtacagatatggtgctgaggaagtttagggattagagggcctacttcctgttggaaagattrgggaagatttcataaaggaaaaaagcaatgatataggttcctcaaatgcaaat

SEQ ID NO: 839653 - DNA, 621 bp, Homo sapiens
aaaggggaaggagcaataatgcttaaatgaccttaaaacctaagaagtttcaggctgtcracatgaaaaagcatttcatacagatgcctctccccacaggttcccacggcctggctactgcttcttaatctgtggtggtccaggcaagcgcttaatgcccttgaaatgaattaataacagtttcatctcaggtaaccacatgtggaatatttattaatcatctttacaaagagtgtagcttgctaaaaacatgactctaatttgggggattttaaacttgttggggtagctaacatactctgtcttcctgttaagaaaaagtgttctttttccttcactcactcctttcttccatttccacaccatcctccttagttccttttatttatttatttatttattttttgagcggtttctatctgcatacaaaaagcaaagataagtgaacaaaagctaagggggaaggaatgaacttattttctattaaagttggtgttaatgtgtttttgagtttataaatcacttatttgtggaccttagaatttgcctccttttctacctgggtgttattgaatttttcagttgaaataacacattcatctcaacctttcatttgaaatg

SEQ ID NO: 839654 - DNA, 621 bp, Homo sapiens
aaaggggaaggagcaataatgcttaaatgaccttaaaacctaagaagtttcaggctgtcaacatgaaaaagcatttcatacagatgcctctccccacaggttcccacggcctggctactgcttcttaatctgtggtggtccaggcaagcgcttaatgcccttgaaatgaattaataacagtttcatctcaggtaaccacatgtggaatatttattaatcatctttacaaagagtgtagcttgctaaaaacatgactctaatttgggggattttaaacttgttggggtagctaacatactctgtcttcctgttaagaaaaagtgttctttttccttcactcactcctttcttccatttccacaccatcctccttagttccttttatttatttatttatttattttttgagcggtttctatctgcatacaaaaagcaaagataagtgaacaaaagctaagggggaaggaatgaacttattttctattaaagttggtgttaatgtgtttttgagtttataaatcacttatttgtggaccttagaatttgcctccttttctacctgggtgttattgaayttttcagttgaaataacacattcatctcaacctttcatttgaaatg

SEQ ID NO: 839655 - DNA, 603 bp, Homo sapiens
tttttttttttttttttaaagacggagtctcgctctgttgcccaagctggagtgcactggtgcaatctcggctcactgcaagctctgcctcccaggttcatgccattctcctgcctcagcctcccaagtagctgggactataggcgcccgccaccacgcccggctaattttttgtattttttttttagtagacacagggtttcaccatgttagccaggatggtctcgatctcctgacctcgtgatccacctgcctcggcctcccaaagtgctgggattcagcttttttttttaaacaagtaggggtacattctaaaataatgataaaaaatctagtacagtaaatacataagccagtaacacagttgttatcaagtattatgtactgtacataactatatatgctctacttttatacaacaggcagtacagtaggtctgttgacaccagcatcaccataaacacgtgagtaacgtgttgcgctatgacattaggacrgccatgatctcagtaggtgacagaatttttttagctccattataatcttatgggaccatcatcacatgaggtccttctttgactggaaagttacatggcacatgac

SEQ ID NO: 839656 - DNA, 533 bp, Homo sapiens
gagaaagctcaacggcaagggtcatcgtatccaacactgactgaatgctggcaccgcrccgggccctgatcttagtgtgtattacctcactgaatcctcaaaacaatcctaaaaggatctgcagatgggaaactttggctagaggtgaagccgcttcacaccactaacaatgccaaagccagcattaaacctgggcagcctggtgtctgagtccgggctgagccctcagccactcagtgactgacgtttacggtcacacgaaggaatcactacaccaagcgctgaagggacgcgtgtgagccccatttcgctggtgggtaacaggctcagagatgctgtggggcagggccagggtcacacagctgtgccctgtgccagcatgttatgtaacacatgctgcacctgcccctggcgttcctttcctgaacgtgtgctctggatcccagccgaacgtgtgctctggatcccagccaatcgcagcacaccccctggtcattgttccactctcctcctcccgctccaccagagactga

SEQ ID NO: 839657 - DNA, 620 bp, Homo sapiens
tctccgccctggccctgagccaggtgggcggccaactccctttgaccacttcctggggtaactcccccggaaatgccccagatgcccgcagcccaagtataactccaacttccaggctcaggaccctcatccctcacctcctcctgccaagatcaccccaagcagaaaccaggtagggcataataattagtatgtgtgtatatatatatgtgtgtgtgtgtgtgtgtgtatgtactttgctgattagatattttatcagatatcttatctatataaggaaacaacaacaaaagtgaagctgacagtgcgttgagagccgggctttagcacaccacagctctatgtcttaggatccctcctctctgccagtgtggcgcccgcctcctactcccatcctctgcctccagtctcctctgccagcctgtcctccatccaagctccctaggcatcctcttcaaactctttgctgattgctgtaaggcagtggagcatgtggttaagattctgggcttcaggtcaagctgatttgggatytgaggacatttgctaacagtgtgaccttcggcaagtgactgtgtctccctaagcctcagttttctcatctgcaaaatagggatcat

SEQ ID NO: 839658 - DNA, 612 bp, Homo sapiens
taggggaaaccaccctcatgattcagttatctccacctggccccatcctttacacttggggattattacaactcaaggtgagatttgggtggggacactgtcaaaccatatcaatgcatgagtgyatgtgtgtttcaatgtaagattacatgtaaacaaagatttctaatgctaagaaaagcatttaatccaccaaactagttcagtttcctcaatttacagagtagattcctgaggctccaaaaggtgaagtgtgtgtcattctgatgcccagttctgtgtactgtatacaagtaatgatatctcactttgctctcaacatgagtgtcaatgatggtagcaaatttaaacttttaaaggtcttgtatctttctctttctaataaacaggtgagctcagtttatgagctgaaaaccattcaaatactatcaataaattttattatttatgtccttctcccttccaccacaaatatcagatcatgtagcttggaatttgttttaaagaacaagttttattatttttcattggctttggatgccagtttcagttagatgttgaacccaatttaaataatacacacctacatgtcagtcttccatatctgactat

SEQ ID NO: 839659 - DNA, 645 bp, Homo sapiens
aggggtattttctgttccctcttcttcccttgtgctcttttcttactattaattgttgtaatttctttgtgtttttgagttcaaattcttcagaagatcggatcagccaacttcttatttttagacactgctactctgtagatagttcatcctttgttacatgttcaccacagctctgtagccaagaccaggaagtggctgcattacaaggtacaaaacatgcccccacaacccccagctcccgacatgaggaagatgagcagagcagtttcctctaaaatctgcttggctggggcaagcatgatgatatctataggtaaaaggtaatgtgcaaggatgccgcgactcttgtttgtttgacgtttcacaattttatttatggaatcagttctgttggatagaatgattgctcatgatttttgaggcttggatattggaacttagaaaataaattgaattgggcactgcgtaaatggtccagtcaaaggaagtgtctattttggccacttcatttaaaacacagtaaaatttaattaaaggacaatattggtccaagaatgtaccttttaagacacagcagtatagtatcaaytctgtttgtgttgtgtcgaacaaaacaaaacagattaaatacacaaacaaata

SEQ ID NO: 839660 - DNA, 432 bp, Homo sapiens
gacctgcaagtaaatgggtttccttcttccttctcactgcagcaaaaccatgtttcctgttcctccctctgtttttggttaagggartgtaattccacaccttctcccgttcctggtgacagaaatctcccctccacagcatgttatcagaggcttccacagtcagccctcacatgttgttcccttctgatccagcacagatttcaaggcctatcagaataagcatttgtttgcacatacccgccattcctttgcaccacctctgttgagtttggccaaaaagatatcaaccctcactacatctacacgtctacctactctgcgtctacagttgaggagccaatgtggctggtggatgccatttaaatttacaccctcagacctgaactgggttgttagctggcttcttacatttttctgattgcttcctgc

SEQ ID NO: 839661 - DNA, 440 bp, Homo sapiens
tgatgcagaaactttagtcttgagtagaagtttgtccagtggtctactagaacaatgctcttcttttcttttcccatcacctggacaagaaagtcaagatactttaaaatgtatattttatttgacctaataaaggcaaaataaaaatgagtagctggtactcatttgttcgataccttgagtttcgtggtaacaatttgaagaggaccatagtatacaaagtaaagattaccagaatttaaagtgtcctatcacactgacaatttataagcagagatttctaagtctcaacattattaataatttgtgcaatctattttttaattttggaatwgtttaattttaaattatagtaatattctattttataaaatttatatattgcaaataagatgttttaattttattttatacagattaagagattctatagaatctct

SEQ ID NO: 839662 - DNA, 527 bp, Homo sapiens
ggtgtatgggaaaaacagtgccttcaaacagtgtttgtagcagtgtacactggcaaaatattttttacaattaggaaagacataatagatccttaaaccttgtcaacactttggcttagtgattttacttctggaaaaatacatataattacatctttttcatgtaaaaaaaattaaacagtagattcttctcaaggttggtggttatgggaggtgacaattgtagcatatcatctcccggcttcaagagtgggcctgtgttatactagtcatgaaacttcagcttcgttgactatgccagttggtccaggggctgaccacacaacccatgacaaagatccaaagggcttttcattctgaaataagcacagtaaatttctttctgccctgtgcaatttctgccttgttctttagatgggaacytacggttatagccacatgggaatcatgagaactgacagcctgagaggctaaatccaaaagacagccagaagcagggaaaaaagagaacagtgataagacagaaa

SEQ ID NO: 839663 - DNA, 636 bp, Homo sapiens
gatgatgacaaaaatttataggaaaaaggttttaattaccccaagtcgatttatataccattttgaatytcatgccattgattgggggaaaatttcctatcatcttctactctccagggtatacttccaaatggcataattctctgtcataaaatatttccaatttttcttcaaatttcagtagaaagggattgaatttgaagagtcatcaccgcagttctgctttcataaacaaaagcaaacaagcaaacaaaaatcactacgagtgttttgtaaagggagaaaggcaccaataggttattaaagttgaattaccagggccatttacgctcattcccagtgcctgtgtcacacataacccctgaagaaggaaaatagcaatacttagtgaagcaggtaaacggaatttccagccaaggagttcaacagacaatctgaattctggctggccttttaactcagaggtaattacagtagatttgggggcctaaccttagtttgcaatatttttttaactgatattatattttatgcaggccaagtcaaacacttgaagggcagagggcaagatgtaattaaattactaccttatttatgttaattattcattcttattaaatgaggacaaagatgtga

SEQ ID NO: 839664 - DNA, 591 bp, Homo sapiens
tagaacacatctgtagtcctggctactcaaaaggctgaaaagggaaaggttgcttgagcccaggagtttgaggctgcagtgagctataatcacatcattgcactctgcctgggtgacagagagagagtctatctctaaaaaaaaaaaaaaaaagtgctgttcaaccaaaaatcctataaactaaggtagtgaagttactgactgggggtagatatttgcaacatatataaacaacctaggatcagtatttcaaatttataaagaattcctacaaattaacacagaaaatgacaataactaatagaaacgtagacaaaagattcaagcaggcaatttccagaagagaccagattggactgaccaatcaagaaattaataagatgctcgacttttctagaaattgttgaaatttatgtaaaaacattgagataatgtttcacacctatcagactgctaaaacattttaaattcttaaaataacaygtgttggcaaatatacttagaaagggaaattcttagaccctattgtctgaatagattactaaaaccaatttgcagagcaattttttagtatctagtaagtaaaaatat

SEQ ID NO: 839665 - DNA, 584 bp, Homo sapiens
tgctacacacttttaaacaatcagatctcatgatagcttcctcaagagacagcactaaggagatggtgytaaatcattagaaaccacccccataatccaaccacctctcatcagggcctacctccaacactcaggatcacaatccaacatgagacttcaatgaggacacagagccaaactgtatcattccatccctggcccctcccaaatctcatgcccttctcacatttcaaaacacaatcatgccttcccaacagtcccctaacgccttaactcattccagcattaactgaaaagtccaagtccaaagtctcatctgaggcaaggcaagtcctttctgcctatgagcctgtaaaataaaaaaacaagctagttactttcaagatacgaatgacgtacagggattaggttaatagactcattccaagagagagaaatctgccaaaacaaaggatctataggacccatgcaagtcccaaaattagcagggtagtcattaaattttaaagttccaaaataatcttctttgactccatgcttcacatcctggccacagtgatgcaaggggtgtgcttccaaggcct

SEQ ID NO: 839666 - DNA, 502 bp, Homo sapiens
atttcagcagtgtgactttgggcatgctacttaacctctctaggcttcagttgtctcttttgtaaaatgggaacaatagggtttatagggcttctrgaaagattaaacatacatgtattcattttctatatatatagtgtttgtttggaaccatggaaagtgatcagtaaatgttggccatgatgacaatgtcagttaggataatggatcaaatatggctttgtgtttctttcctcccagaatagaggcacagaccagagaaaagagctttggcaaccagaaacccggctttcacttagagccccttgactcactgcggccatgtgaccctggacaagtgaattcatttctgagtctcatttcttcatctgtaaatagcacaggatgtttgcaaagatgagatgaaatcatgaatgttaacacctggcacatactaggtgattaataaatggcaattgttttcatcaatattggcctgccgattgcccatctcacttctgcc

SEQ ID NO: 839667 - DNA, 589 bp, Homo sapiens
tacatacagtttctaaatttgttttgtataatgtcttcttcctccacgggtgtttcttcttgaagacggaattttgaaaagcttctgattcttctgttgcatcatcctccgtgacacctcataatgcagatggccaccacgcccagccagggcatggacaggcaaccacctctctgcttcaagggcctaattgtaccatatgtcacacccactgaataatacaaaggcccccccatgtacctaccgcttttcgatagcaaatctggatgttttgctgtgtttgcttcagtgcttttctaataaagaaaatatcagaaatataatagtagacccccaagtatccctgaatctcagcactcttattttccacagataactacaacctgaaaattgatatactctattctcattatttttgatactttactatgtaaatctgtatctataaataataccattttcatgcttaaaacataaamtaaatgttatgccactctaggttttcttacaatattatttatcttgagacattaactccactcattttaattgctctatggtatttcattatacatacatcacaattcat

SEQ ID NO: 839668 - DNA, 607 bp, Homo sapiens
ccgagcattttaagagctctctgatgtggcaaatgcttccacagagcctcaccatgggaaagctgcctcccactgatgcatctgtcctcagatcctgggtgctgggaagctggaccaagctgttaggctgcctcatgtcaactgggaaccactaatgagcttagaaccatcattaattcaaggcctggtctgtgtcttcattttgcctcctacagtcttggttgtagaaatgcttttatattttatatatatatatatatatatatatgtgtgtgtgtgtgtgtgtgtgtgtgtgtgtgtgtgtgtgtgtgtatatatattttttttttttttgctgggggaggatactgactcacttgcctggtaccagctgcagtctgtgttggacccagcatgctagtgctctcctgttagtaaatctctgcatatgtacttttttgcctcttttagagaacagggatttctgcattggatgccacctataaggcatgctctcttactcactcctgaatcccagcaatgyctgacatgtgacaggtgctaatgaacattgactgaacagatgagtgcataaaaacaagctcttttggccgggcgcggtggctcg

SEQ ID NO: 839669 - DNA, 619 bp, Homo sapiens
gagcctacaaaaactcaaggagctatagagtgaagactgaaacacatacatgcatttggatgacagaagagaatatgagtgatatcagccctgacaatctagaagtgatacagctaacaaaaaataatggacaagagaaggcaaagaaggaaggagacatagtgtaggaattttctgttcacttcctctaggatagatgagagtcacagaatattatttaaagctgacaaatcaaggaatcaaggtgtactagatgtaataaaagcctactgacagttcaaatgtaaattgcaagaaaaataatgctattgactaaattcagaaaactaacaagagggaaggaaagaaggaagaacacagaaacatatcaggtttttaagtttataactgttcagcctaggaaacaattagacactgtaaagaaatagaaactgtgattatataaagttacaattaattttatgaggtagtgactagaataaaaataccaaccttcctgcatatcagaagaattacacacacacagagcaaagatcacagtgaaatactttttaaaaagaaactataaaaagagtrcaatatgagaaaaacccaagcatacatatcagtatggaaacaa

SEQ ID NO: 839670 - DNA, 655 bp, Homo sapiens
gaggtgtgtgtggtgggggccatctcatttaattttgttgtgcatgttttctatgggttttgtttttgctatcttaattactctatttttatgaggaggtttgataagattaaaaaacttggccactgctccatcttcctggaattcctctcccactctcctttaaatgtgacatcctaacacaaccgcagctcttctccttggaaagggatatgaaaatatttaaggggaagctaatggtgtgccacactgtatgaagggattgttttttaaggaagatggttggaagtgcttctgtgacatgctattttttaaaaaactatcagaaattcccaagtccttgacaaactacatgagaaagattggtaggagaccgaattcatgttccgaatttgaagagggattttagctagcatttagagaaggctccttgtggtggctgccatccagcaccaccatgatgggagggggatggtaccactgagagaaatgtgttggaggtagaagttggagagctttgccacagcatgatagttcttaaggtttgtgttttatctaaaagaattcaaaatattttatgrgaaccataacacagctgtgcatatctgaatattaaacttatttttaaataacctgtcactgggctaaatccatg

SEQ ID NO: 839671 - DNA, 641 bp, Homo sapiens
aggtacagatttgctcctgtgacacatgaggaatcacttaacattwtcaagctggggaatgacacaatcaaatgtacagtttaagaatattgtgtagggagttgaggttagagaattgctaatgtctttccagttcagtggaattgtattgacagtctattgctgtgttaacaagccaccctaaacttagtgccttaaaacataaccttttattcagctcccagttctgctgggagttcttcaggtctgagctggtcttagaggggctcactcacagatctgcagccagtctcctggaggagactgacccttggctggggccatggggagactcagtcatgtgtatctcatccttcagcagactaggccaggctattcacatggaaatgacatggtcccaatgacaatgacagaggtcccaagacaagaaagagagggcaagccccagtgtgcaagcactttgaaaatccactggccatatgattagcactgattcgaggggtgaagcaatagtcttctccacttaatgagaggagccacagagtcatattatagttgtattgtaagtgtgtgaaaaacggataagggtttgggaccatttttgtcatccatcatcatagttatttgatatattcccattt

SEQ ID NO: 839672 - DNA, 591 bp, Homo sapiens
gcctctccagccttgctctggctggggcagactggggctccagactcctgctgcagggggtagaaaaacaaaacaaaacaaaagctaactgggattttcatagggatttgtcaagtctgtacatcagtttggggagtatcttgtatcctataaccctgctgaacatgtttgttagtattaatagttttttaccgaattccttgagattttctctatataagatcatgtcatctgtcactagagatagctttgcttctttctttctaatctggatgccttccatttctatttcttgcctaattctcttgactagaacctccattcaacgctgaacagaagtggcaagcgtggaaatcctggtcttcttctcagttttaaggaggaagcattcagtctttcaccacttcatattaatattagctagaggtcgttcacagacaaccgttatcagattgaggatgttctcttctattcctagtttgttgtgtgtgtatttcattataaaaaygtattggattttgttaaatgcttttcctaggtctatggagacaattatatgttttttgtcccttagtccattaatttgttacg

SEQ ID NO: 839673 - DNA, 647 bp, Homo sapiens
atagctgtttcaaagtccttgctaattccaacatctgagtctcctcataggcagtttctattgcctgcttatttttctcatgtttgggtcacacttaatgtttctttggatgtctcataatttttcattgataactggacattttagataatatattgcagccactctgggtattggcctacctccttttcctggcttgttgtcgttgtttttgtttgtttggtcattggtttatatgtttattagtttggcaagacgaattctgtaaagtatatttcccctcgttgtgcagccagtgatgtttctgctcagatttatttgttctttttatctttaacttggcttcctagggtcttagtctccataaatcacttattggtcaagggtgaacttaagcatcgtgtatagagcccatgatgcattttctaatcaattagaacatgatttctaattaatttacttcttgcaatgacccactgcggtgtgtccagatgaaaatttctattttatacatttggaaactgaggatcatttttctcttaaacaatactcttgtgctcatacagcaaataaattgcagaacaagggctgraactggcctttgacctcatgtataggcctcttttcacaatactgtgttatctttt

SEQ ID NO: 839674 - DNA, 641 bp, Homo sapiens
gaaatactctttataattctagaaactttgttgtcctttcagctctcaccttgcctgtgggtggaagtagttattaaatgttttggtttaaaagagaaaaaaatgagacctccttctctcargctcagctgatatataaaccgaggtggtgacagcattggcactgattttgctgtgagctcatgggggcagaggtcacatctatgtcacctttcattgtatgatgatggatgactgaaggtcataggtagaagtaaattccacaggggaaacagcctggtttctgtgaacctccctccagcccagctctcaacttgagtgcatcagagtatacccttggggcttaactaatgcagatccctgggaagggcatgatgagctggtgggataaggacagtcaaggaatgatataagccaagaagaagaaaatgtggtacgtatataccgtggaatactatgcagccttaaaaaaagaatgagattatgtcctttgcagcaacatggatggagttggaggccattatcctaagcaaactaatgcagaaacagaatgccacataccgtatgttctaactcacaagtgggatctaaacgtcgagtgcacaaggatacaaagaagggaacaatacgagacactcgga

SEQ ID NO: 839675 - DNA, 369 bp, Homo sapiens
ttttaaatgatttagatcatttattatccttatagaactactgaggttttacttgaagcttgtaagttaaatttttgtattttatacagagttagcttaggccgtgattaggtagaaataatgrgcagttatcactgtatttatttgaaatgaaacttcttttacagctattcatggaagaaaactttaatattgtattaaagcttttattttatctttaaatgccaactttattatgtatttcttaaaattgatcttccagtattttttatgtatactttttagtgctttatagttattagcaggttccacagtagtaactgaaatatactctgattttcatttttattttataaaactttgattttt

SEQ ID NO: 839676 - DNA, 625 bp, Homo sapiens
tcattagtcaactaacagccaacttatgtcctctgttcaatcaagagcaagctaaasagctgcatcgttctgtttgccattattgccaatgaggtgggactttgttcaataattacaaacttaacaggttgtcagggatgttatgtaacagagagagcatcagtcaaccaggaagcaacagggcacttgttacctgtgaactgtggagatacaggaccaagttggacgctgaggaacaggaacactgaagaactgcttgttgccccgccactgctgtccactctttatttagtatcccccaatttcactgacatccgtcaggtttttttgttgtttttgtttttgtatttttttgagacggagtctcgctctgtcgcccaggttggagtgtggtggcgtgatctcggctcaccgcaagctccaccttgccggttcacgccattctcctgcctcagcctcctgagtagctgggactacaggtgcctgccaccatgcctggctaattttttctatttttagtagagacggggtttcaccgtgttagccaggatggtctcgatctactctgtcaggcttcttaaagatattactctaaaattcacaaatctcccctagcacataacaa

SEQ ID NO: 839677 - DNA, 625 bp, Homo sapiens
tcattagtcaactaacagccaacttatgtcctctgttcaatcaagagcaagctaaacagctgcatcgttctgtttgccattattgccaatgaggtgggactttgttcaataattacaaacttaacaggttgtcagggatgttatgtaacagagagagcatcagtcaaccaggaagcaacagggcacttgttacctgtgaactgtggagatacaggaccaagttggacgctgaggaacaggaacactgaagaactgcttgttgccccgccactgctgtccactctttatttagtatcccccaatttcactgacatccgtcaggtttttttgttgtttttgtttttgtatttttttgagacggagtctcgctctgtcgcccaggttggagtgtggtggcgtgatctcggctcaccgcaagctccaccttgccggttcacgccattctcctgcctcagcctcctgagtagctgggactacaggtgcctgccaccatgcctggctaattttttctatttttagtagagacggggtttcaccgtgttagccaggatggtctcgatctactctgtcaggcttcttaaagayattactctaaaattcacaaatctcccctagcacataacaa

SEQ ID NO: 839678 - DNA, 518 bp, Homo sapiens
gcatcaaacagacgcctcaataaatcagtctaatctcgaaaaaaaaaagacttaacagatatacaattgcacgttagaatgctaaagaccataaacatakaacaactcaaagtacatataaattcaacatatatccaatcattgtaactatgacacagtagaatattaaaatactattttcaaaatgtatacaagcttaatgttctatgtattcaaactattcaaaatacaaatcatcaacataaattgccactaatattcagtcccttcacaggacatgattcactgggagttaataaattagcagccggcaggcagtgacacaccgcaaaaatgaaaaccaagaggtgaaatagttctgaaataaaggttttaaagctaacagaaatcactgaattactaagtcattagcactaattttgagccaactaactaattaatatgagatgatacaatgtcctatactttggtaaatacagactatgtttaaacaatgtctgtaacgtgacttgtaaaat

SEQ ID NO: 839679 - DNA, 605 bp, Homo sapiens
tcaaactatttcccaaagtggctgtacccattcatgcattctgccattaatgaatggccgtacctattgttcttyaacctccaattgttactgttgagcttttttaagagtcccacagttgtactaggtgtgcagtgatatctcagcattattttaatttgcagtctcctaatgagatatattgagcatccttttgtgtgattatgtgctatctgtatattttcttttttttcttttttcttttttttttattgagatagagtctcattctgtcactcaggctggagtgcagtggtgtgatcctgggtcactgcaacctccacctccgatgttcaagcaattctcttgcatcagcctcccaagtagctgggattacaggcactcaccaccatgcctggctaatttttttgtatttttagtagagagggggtatcactatgttggccaggctgatctcaaattcctgacctcaggtgactcacccacctcagcctcccaaagtgctggggttataggcatgagccaccacacctggcctgctatctatatattttatttggctggatgtctgttcagatatttacccagttttatgtgggttttta

SEQ ID NO: 839680 - DNA, 605 bp, Homo sapiens
tcaaactatttcccaaagtggctgtacccattcatgcattctgccattaatgaatggccgtacctattgttcttcaacctccaattkttactgttgagcttttttaagagtcccacagttgtactaggtgtgcagtgatatctcagcattattttaatttgcagtctcctaatgagatatattgagcatccttttgtgtgattatgtgctatctgtatattttcttttttttcttttttcttttttttttattgagatagagtctcattctgtcactcaggctggagtgcagtggtgtgatcctgggtcactgcaacctccacctccgatgttcaagcaattctcttgcatcagcctcccaagtagctgggattacaggcactcaccaccatgcctggctaatttttttgtatttttagtagagagggggtatcactatgttggccaggctgatctcaaattcctgacctcaggtgactcacccacctcagcctcccaaagtgctggggttataggcatgagccaccacacctggcctgctatctatatattttatttggctggatgtctgttcagatatttacccagttttatgtgggttttta

SEQ ID NO: 839681 - DNA, 468 bp, Homo sapiens
ttcctggggccacccgtccctgcccctttaccccttggtccagcacccaccttccggtcctcctgttgggcatcatcaaacgtgaagctctgggagtgctgcagagagaactagtgaattcaaatccacagaggggtaggatccgcgtccgctgatgcggcggcctattggctctaactcaggcagcagccactgctcagaacggatggcagggtcggcactcgcccccatccctacacgcctgccacccaacggtcaccccccactctccccgcaacactgcatcccagacctgccccccgcaccccgccgcgtcccctacgcttgctgacacagcctctgcctcacccacgccctccctgcyacccgcgcacgaccctgccccaccccctccgtgcccgccccccggcctcaggcggccgcttacctcctggttgtatgaccgcagagcttccataatcacatcct

SEQ ID NO: 839682 - DNA, 603 bp, Homo sapiens
tggtgcactggatgttgaaaaagttgatgatgagcaagaacaaaattcctgctttcaggagacttacagttcaatatgggaaatataatttgttaaaatataaaagtgcaattgtgttacatgctgtacgaagtacatgttgacatgtgagcatataataaatgggctggaggccagaggattgccaaagagaatgggcctcctgctgagatgaaaagttgagcagggattagttggcgaaagtggagggacgatcctttctaggcaggaggaagaacatgtacagaatctctgaggtgtgatgcgacaaagtctatataaaaaactgaagaaaggtctaatgtggcttaaatacagaagctagtaggagaggagtcgaaaacaggctggagaagtagaaagtgatcgcattctgcaggaacttatattgtataaaatatattgtatattgtataaaaagaatttctctttattctaagtgcaatgtgaagccaatgaagtgctttaaacaggtgrtgtgatttgattgaatttattacttcacttaacaaatattcattacatgcccactgtttgtcagatattgctgtagcccctggtgat

SEQ ID NO: 839683 - DNA, 481 bp, Homo sapiens
agcgccactgctggcctcacgagcgccgctgggtgcctgagcacctgccccaccagagcgccactgctggcctcacgagcrccgctgggtgcctgagcacctgccccaccagagcgccactgctggcctcacgagcgccgctgggtgcctgagcactcgccccaccagagcgccactgctggcctcacgagcgccgctgggtgcctgagcacttgccccaccagagcgccactgctggcctcacgagcgccgctgggtgcctgagcacctgccccaccagagcgccactgctggcctcacgagcgccgctgggtgcctgagcacctgccccaccagagcgccactgctggcctcacgagcaccgctgggtgcctgagcacctgccccaccagagcgccactgctggcctcatgagcaccgctgggtgcctgagcacctgccccaccagagcgccactgctctgacttccacgctggatacc

SEQ ID NO: 839684 - DNA, 520 bp, Homo sapiens
gtgtggcctctgctgctggtcccagctccccctctcactgcagacacacattgaagcctgtctggcacgtcatccagccttggccttggtgagctcctgacctgcctgggctgcccttctgggccattccttctgtctcactacacactaccccctctccgaggcctccaggcccgctgctctgtgtggcaagggtctttctccccaggtggggctgctcttgcaagtcagggtgtgtgtgggaggcatattttgctcatctctgcaaaggaaaagccaactccggcttcggaggggctcccagcaccaatgcttggtgagcaggtggtggggacggcccctctgccactctccttcccctccccaggcctggcagccagtgctttctccagtcacattcttccactttaaagcctctagtgcctcccaytgctgctaggaaagagactgcatgctcaccatggcacctgcccggtctccagcttcccccaccccacacccacactcacacacagccccc

SEQ ID NO: 839685 - DNA, 598 bp, Homo sapiens
ggagctgtctcaattcatatgaaagaagcctctccagagtttcttatacatctcctaggagaggcaggggaggtaggatgaagggagtggagttgatgcctaagataggaaaagacataattattaggagaaatttcctttagcttttcaacccagttccctaagttaagaagggatttaggagtccagttttcctgatactttcttagtattaataaaagcatggaatttgtttaaattaacactagaggagtatcattgatatttcagcatctgtcagtgtcttataatgaagctatgtataccaataataatttttaatgtactttcattttaactagaggaggaggaaaaagagggagaagaagaaaaacacactgaagctactctgtttcattcaatttaatttttcaagcaagctacaaacaaggatgaagtcattatgcatctattatctcaaacatwcataatgttttactaagtatattatttattctcacagcaactgtttcaggaatgcaaaaaccagcagaattatctatagttcacagatgagttacaaaataattagataaaaacaatttagtttcctcactag

SEQ ID NO: 839686 - DNA, 555 bp, Homo sapiens
atcttctttcttagagaaaggatacactgtcatctggctggggtggcttaactatgttcactaaggttctcaagactgctaaactgttatttttgcaaaaacacaataactttaaaaattggctgtaagcatgcctgcttaagcactctaaatgcaaacaattactgcttatataacagtgactcataccctatggtgtcacctaaaacctgactattctccaaagctttctagttatagatggaaattctcatacttaaaaacttgtaacttacaagccatcacaggtgcaaagctattttccagagcaaaagcatatcaactccgtctggcaacaagacatgcagtaacaattatgcaccatccttttagttcaaatatacttttgcccgaggcattagcattattctagtgtgtatttgctatgtttacacttagttttgagrtactttatgaacatttactccagtgtctcaaataaatgcaaaaacaataaagcttgtaaaaaaaaatactagattgaagaagcggacaatcacaaatgaaacaaaagta

SEQ ID NO: 839687 - DNA, 612 bp, Homo sapiens
ttagctgagtcactttacttttctaagcctgaattctctcatctgtaataagataaaatataatatatgtcatgttttgtaggagtgaagtatttattacctccctcgtagggacacagagtgcgtgtacaaaaaaatgccaaaaatgacaacttcattagaataaagatgcttttaagatgatcacttcaaaggtcaaggtaatttctggcacaattttgtttaaaaataaattattggctgggcacggtggcttatgcctgtaatcccagcagtgtgggaggccgaggtgggcggatcacctgaggtcaggagtttgagaccagcctggccaatatggtgaaaccccatctctactaaaaatagaagaattagccgggcatggtagtgtgcgcctgtagtcccagctactcacagggaggctgaggcaggagaatcacttgaacctgggaggtggaggttgcagtgagccgagaacacgccactgcactccarcctgggtgacagggtgagactctgtctaaaaaaaaaaaaaaaaaaaaaaaattatttcttgtcagtctcatgcatatttcacttgcatggtaaaaaattttttaaaaaaataaggtg

SEQ ID NO: 839688 - DNA, 529 bp, Homo sapiens
ctaaaactggctgaaaaccaggtatgcacgtatggtttytaagtttagcaaaagaaaaaaggaaaaaaaaaagagggacaatttccaaacgtgtcgtccttgatctttctgccttccagctgacagaagtaacttttatggaagatagtctagggaatatggaacctatcccagtcttacttaattctatcccagtatcaaaaaaaaaaaaaaaaaaaaaaaaaaaaaaaaactacaacagttgcactatgttaatttacctccacattaattgagctgctttcactgagttgcatttaattatgctaaggtttttattgaaggacactaaaaatatagccatgtgaaatttgctactacatttgctactaaaataaaatgctggggagaattagttgcagcattattcagtatcttctcccaaaaaactccacttgaaaaattttgttaataatacagtgttagtaaaaacttttgttttctgccaaggaattgatgtgcctcctttttaaaaatgagaactaaatat

SEQ ID NO: 839689 - DNA, 545 bp, Homo sapiens
tcacactgatgggaaaatttctgcaggctgaggccaaactgccctcagtgaatcccattgtggttaccaaggtgttaaccaaaaagtgactgaggcaggtgtcttgattgatagaggtttattgagtcaaarcttgaggggacacctggaaacacatgagccacaggggtagctgcgacctgtgtttttccaaagagggttttgggaacttccgaatttaaagaggaaagaaccagcaggaaggaaaaaaggggggaaagagtaggcagtgtggcaaatgattacatttgtgtaaggcaccaattagctctcatcgaacctgcactttacatgtgaaaagacagagtagaggaaaaaatcaattatgcattcatgttgtactcagaaaatctacattttacatgagatatacatgtgaaaagaaagagtagaggaaaagtcagttacatattcatctcaaggtaggtggagggatgatttctggtcttgtccttattctgtacctgtgataagctggtaatttacatgatcaaggtgtgagtcaa

SEQ ID NO: 839690 - DNA, 636 bp, Homo sapiens
gtaagatatgcagaagacaaataacaaaatcacagtagtaagtccttccccatcagtatgttttaaatgtaaatacattagacccctcaatataaagacatagattgccagagtgaataaaacaaataggatccaactatattctgtctacaagtgactcactttagatctaaaaacatgcatacattgaaagtgaaagaatagaaaaagacattccctgcaaataataatcagaagatagaaggagtagctatactaacactagtgtcatacaagattgactttagttcaaaaactgttacaagaaacaaagaacattacataatgataaaagagtgaattaaccaaaaagatataataattataaacatatatgtactaaacatcagagctcctaagtatatgacacaaacattgatagaattaaatgagaaaataaatagctctacaataatagtaagaggcttcaacagtcaactttcgatattaaatagaacaactaaacagaggataataaggaaataagrgacaagaacaacactataggccaattagacccaacagacatatatagaacattccacccaacagtagtagaagacatttttctcaagtgcatatagaacattgttcagg

SEQ ID NO: 839691 - DNA, 555 bp, Homo sapiens
tgctcataaatgcatggcattatctccttcccacatcaatacactttcaattaaaagccaaaactcggggggtggagcaagatggccgaataggaacagctccggtctacagctcccagygtgagtgacacagaagacgggtgatttctgcattttcatctgaggtaccgggttcatctcactagggagtgccagacagtgggtgcaggacagtgggtgcagcgtgctgtgcacaagccgaagcagggcgaggcattgcctcacttgagaagcgcaaggggtcaaggagttccctttcctagtcaaagaaaggggtgacagacagcacctggaaaatcaggtcactcccaccctaatactgtgcttttccaacgggcttaaaaaacggcacaccaggagattatatcctgcacatggctcggagggtcctatgcccatggagtctcactaattgctagcacagcagtctgagatcaaactgcaaggcggcagtgaggctgggggaggggtgcctgccattgcccagacttgataaggtaaacaaagcagctggga

SEQ ID NO: 839692 - DNA, 611 bp, Homo sapiens
gactccctgataaaactgattaagttgtttatgattccccatagaatatgaactcaaaggaggtaagcaaaggggtgtgtgcgattctttgctactggctgcagctgcagccccrcctccttctccagcacataaacatttcagcagcttgacctaagactgctgtgcagggcagggatgctccaggcagacagcccagcaaacaacagcacacagctgaaagtaagactcagaggagacagttgaagaaggcaagtggcgatggacctcatcccaaatttggcggtggaaacctggcttctcctggctgtcagccttgtgctcctctatctgtcagtaactgtccagattcctctcctctgttaacttggacttggggtgctactcaggcccctgttccctcatctgttttaaagatcaaaagagatgttcaaggaggagtagcttcttggatgctacaaacacatagaggttattattgatcttatgcagatttatgaagaaataaataagcatttgtcccagccaccttctaattttggtgactaggagggtttggggacagcatttgttagtgggaatgatttgattagcttagatttgacctatac

SEQ ID NO: 839693 - DNA, 515 bp, Homo sapiens
acacgtggataaagaaactgtgtacacacacacacacacacacacacacacacacacacacacaatggaatactactcagacataaaaagggatgaactaatggcattcacagcaacctggatggaatgggatactattattctaagtgatataactcaggaatggaaaaccaaacatcatatgttttcactcataagtgggagccaagctacgagaatgcaaagacataggaatgataacgctggactttggggactcagcggggaaagggtgggaagaggacgagggataaaaagctacatattgggttcagtgtatactgctcaagtgatggatgcagcaaaatctgatgaatcaccactaaagaacttactcatgtaaccaaataccctgttccccaaaaacctactgaaatacaaactagaaataaatattttttttaaaaaagtaagtaaaaaccaaagatcagagcagcatatyctgcatctcagttttctcagctataaaatgaaga

SEQ ID NO: 839694 - DNA, 495 bp, Homo sapiens
tgacattgtgacattgtgatgtgaccatccgttagttttaaaatctgagactgttttatattagttatgggagtgagcagaaagcacagaaggaggtttttgcctgtgtctctgttgctttgaaacaaaatcaggaaaaaccgtatctccaaaagcagcctgtgtgccatcttctgtgctactgtaacttagtaacttttttaaagcaattagaaaccagggacttgaagtggcccagagactcataagacaggctgatgatttcgctggatagaattggactttgcagaaaggttttgataacctttttggcctggtgccctgccctcatctagtcctttcccatttgtaatagaagcatgaarttcaatgctattgacttcccaggagtcattgaattgccacacacacagtgaatttggagtttggttcttaagttgaaaggggataaacaatcgacattgaatttgtacctcttatagctttgttgactta

SEQ ID NO: 839695 - DNA, 498 bp, Homo sapiens
ctcccaagcagctgggattacaggtgcatgtcaccacacccaactaatttttctattttttttctwtttttttttttttttttttagtaatcatggggtttaaccgtgttaaccaggctggtctcctgacctcaggtgatccactcgcctaagcctcccaaagtgctgatattacaggcgtgagccactgtgcccagccatacccacaaagattttcattctaaaataccttactctttctacagcctcagaccccatgctctaccattccgttgagccccacataacctcatgctagagagaatctgtactatgttctacctcactcacctgttctagtatttcaaatacaacagtctttcccaaacaacaattggtgggaaacagtttcaggtgatctacacaagtattctttgcatgtaacaaaactgtttacaggatttaaaattttaattgtctccagaaagcaagggggcatttaagaccctaaaagtagtt

SEQ ID NO: 839696 - DNA, 596 bp, Homo sapiens
  misc_feature 536: n = A,T,C or G
tatagcagggtaagaaatggaagcggagagcacatcatggagacatggagaacagaggaggtgaaagaagccctgtaatgtgaagcasgggatggaggaccctggcagcagcctggggcctgcagaggaaaaagctccaagaggagctccatataagagggtggccaagttcgtggcatcagactttccactggaaatggattcctgctttgtcctataattaccctcttatctctatacctccaggaaaagaatgttctaacaatgttggtgttagaaacaccaaccttgggttagtagagcactggggcttgtagggatatgtaagaaacatctgctggtcaccaaggggaagagctgagcagaggtgctggcatgcacacagaagcaggaatccagagcaagagatggcagaagagcacaacagaaactcacacgtgtctgaaagtgctggggtagacagttggtctccccatggtaagcaggatcacaccatttgcacttagatcattagagaagctgaaaagactgaggancttagggagtacgaaatctctctaagtgaaatctcagtgcgaaatctcagtgagaggatt

SEQ ID NO: 839697 - DNA, 599 bp, Homo sapiens
tttctaggaagtatttttcgttttttgttttttttttttcaaaaaaaaaccacttttgaggcacaattgtcataaaatgtcacttgtagcatgaagcaaatatagaaactctgtccctttgcagataggactgcctgttaagtgatggccggtcagacttacttgatgactcagtacagtgagagacaagcattagagctgttagttgttactaacactaagcagaataacagaaaacaggcaaaatagggtcaagtagaattgtcaatttttgcctttcagagtcattaaagggaagaactggggctgagtcgttagaataggttagttgtttgagttattccatcaatccgaaattagaattaccttcataccttccttgcctttccaaacttctgggccatgtcactgagagtggccaggactcatctgatctgcagcagggaaaccacccccaatctgtggctactcctatacttaggcttaaactggacataaggccatttcatacaatttcagatgtttgtgttttgtctttgcaacatgatatatatggttaaaataatataattartttttaatattgtagcttattgaaa

SEQ ID NO: 839698 - DNA, 513 bp, Homo sapiens
cacatttggattgcttctacgttttggctattgtgagtaatactgctgtgcatatgattgtacaaatacctgttgaaggctgggtgcagtggctcacgcctgtaatcccagcactttgggaggcctagcggggcagaccatttgaggtcaggaattcgagactagcctggccaacatggtgaaaccccgtctctactaaaaaaataaataaaaaattagccgaaatggtagcggctgcctgtagtcccaactactcaggaggctgaggcaggagaattgcttgaacctgggagacagaggttacagtgagccaagattgcaccactgcacttcaggctgggagaccatgcaagatgttgtctcaaaaaaaaaaaaaaaaaaaaaaaaaaaaaaaacacktgttcacatacctgctttcacttcttttgattgcatatgtggaagtggaattgctggatcatacagtaatttgatgtttaattttgtgaggaattgccatgccatttgccacag

SEQ ID NO: 839699 - DNA, 585 bp, Homo sapiens
gacagacagaaggataccatttttaatcttggcacatacaaagtcagtcattatttggtgacattgtccacagccacctcttacctataagagtcatctactggcttgtaggttgaactgcacatcccaatataaaacctgcccaaagaaattcacagggctatagaagcaaagccagaagaccatacacagcattctgtacagtcgtatgcaccacctaaataaggagggaaggggaaagaaaaaacaataatattataagaaaattaagaaaaagaaaaattcccatccacacaaacacaataacaaaaattagaagtgccagcatctgtagaggagaagaaacctgaacaaaaattctagcaccatgaaaaatctgaatatagtgaccaccaaaagatcataccagctctcagcaatggtccccaaacacaatggaaactcagaaatgacagataaagaattcaacgcatgaactgcaaggaagctaatgagatcaagacaagcttaaaaatcaaaatgaagagacttctaaagcaatccaggaaatgaagaaagagatawacatcttaaaaagaaatcagt

SEQ ID NO: 839700 - DNA, 617 bp, Homo sapiens
ctgcgtgcacatatatgtttattacgtggttcccacataacggtgatctgcatgcttcttttcctagttgctgtggataggctgcctgtggacctgtctgtgaattggctgaataagttggaggtygaggaaagaacagcagggaggaagtttagagagtctagtgcttcaaattgagaagataaatgagccaaccttgatgaaggtcaaaggcaactcttactaggacagtttaggtgaaataatatgaaataagactcattgcagtgaggtaaagagagggttgataaacatgaataagttatagttacacccagtaacatggataaagctcattaaacataatgttaaggaaaggaagtcagtcacaaaagcacatttacccaatgtatgattccatttatgtaatgcagtagacattccatttatgtagcattacataaatggaattatacatttcagacattacataaatggaattatacattgctaagatattgtctttagcaatgtctactgcaacagtaaaagcacaaagagaataaaagaaacagtaaaagtacaaagagaataaaagaaatgattaccataccatcagaatcgtgattacatttagg

SEQ ID NO: 839701 - DNA, 623 bp, Homo sapiens
tctttattaaatgatttgcagccctgatattaggcattcctccaagactcactattcgagaatagaagttagtgatgaagtcccatgagaaatctcacatttttacctagtttgtccacttaaagattttctcacttgttgtgcagttacctaaggaattgctgatatcagtaccaaggacccgtggcttgctatctaacatcagatctgacaatgaatatgagagccataaataagaaacagaacaagtggcccagtgctgagagataagaaacacactgggaagtaaagggcaaggcaggattactgaaaacgtctctaagacccgggacatataggaagcaggggtgtctggagtttgtatttactgcgttgggcctctagagctacacaggcagaacagcctctctaaagatttagggcccaaccaccgaggcatcagcaagacagttttatggagctgcaatgtggtcacaaaactgaactccaggctgggggaaaggagtcaatgttagacacagattcccttctctacaactgactcaaagaagaagaagactgaaagaawtgtcaaaaatcaagagcatatgtttattatgagaatactgtaggctgtgtgcaga

SEQ ID NO: 839702 - DNA, 623 bp, Homo sapiens
tctttattaaatgatttgcagccctgatattaggcattcctccaagactcactattcgagaatagaagttagtgatgaagtcccatgagaaatctcacatttttacctagtttgtccacttaaagattttctcacttgttgtgcagttacctaaggaattgctgatatcagtaccaaggacccgtggcttgctatctaacatcagatctgacaatgaatatgagagccataaataagaaacagaacaagtggcccagtgctgagagataagaaacacactgggaagtaaagggcaaggcaggattactgaaaacgtctctaagacccgggacatataggaagcaggggtgtctggagtttgtatttactgcgttgggcctctagagctacacaggcagaacagcctctctaaagatttagggcccaaccaccgaggcatcagcaagacagttttatggagctgcaatgtggtcacaaaactgaactccaggctgggggaaaggagtcaatgttagacacagattcccttctctacaactgactcaaagaagaagaagactgaaagaattgtcraaaatcaagagcatatgtttattatgagaatactgtaggctgtgtgcaga

SEQ ID NO: 839703 - DNA, 598 bp, Homo sapiens
ctagaaccagaaataccatttgaccttgcaatcccattattgagtatatacccccaaaattataaataattctactataaagtcacatgcacacktatgtttattgcagaactgttcacaatagcaaagacttggaaccaacccaaatgcccatcaatgatagactgtacaaagaaaatatggcatatatacacgatggaatactatgcagccataaaaaggatgagttcatgtccttagcagggacacagatgaagctggaaaccatcattctcagcaaactgacacaggaacagaaaaccaaacaccacatgttctcactcataagtgggaggtgaacaatgaaaacacatggacacagggagggtaacatcacacactggggcctgttggtggggtagagggctaggggagggatagcattaggagaaataactaatgtagatgatgggttgatggggtgcagcaaaccaccatggcacatgtatacctatgcaacaaacctgcacattctgcacatgtatcccagcacttaaaggataatttaaaaaaaagcatactgcaacaacctcagtgaattaatttctactgcatttca

SEQ ID NO: 839704 - DNA, 496 bp, Homo sapiens
gggaggctgaggtgggtggtttgcctgagctcaggagttccagaccagcctgggcaacacagtgaaaaaccccatctctactaaaatacaaaaacttatccaggcgtggtggtgcgcacctgtagtcccagctactggggaggctgaggcacaataatcacttgacccagggagacagaggttgcagcgagccaagattgcaccactgcactccagcctggacaacagagtgagacttggtctccacaaaaacaaacaaacaaaacaaaaaccaaaaacaaaaccagaatgcacttacttcctactatgtgccaggccccagggacatactgttgagcaaaattaattgtattcaaatacagtttttgttaatgcatgccattttaggackttaagtatatttaggaacaggaggttgtttggaggccaccattctctcacaacagcaaaacagactatgtttcgaattcggaaactccccaaatgcactctggat

SEQ ID NO: 839705 - DNA, 580 bp, Homo sapiens
cagagttctctccttccaccatgtgaggacacagctagaaagtgtcatcagtgaaccagaaattgatccctcascagatactaaatatgttggtgccttggtcttggactttccagccctcagaactgttagaataaatttctgttgtttaaaagttacccagtatatggtattttgttatagtaacccaaaccacagtttctgcaggcatttcccattcctgggctggcaggactcacacttggccgggcttctatagacatgataggccagactgtggagttcctggtggtcctgagctgtgttagctcaacaaaggggatgggctacttgataccatagtgttacaaatttgagggcagaatgtttatagagatttcatctaaacagtctttttttttttttttttttgctcaaaaaagtttcaggaaaacctaggttaagcaatgtgaaacaactttcttgagtgactgcgggatctctcaaagactttaatatattaatgaatattttgaatctcaaagaatgaggtgatggtacacaatattttccatacttatttgatcagagaatgtccttt

SEQ ID NO: 839706 - DNA, 621 bp, Homo sapiens
aaaagagagtaaatgactttcactggactgactaggatgggcccaaaattcacctcctgagatggtcctggaaccactgaaatattctaaayactgacatctgacactacttaccactaaaatggaaactttgagagtattgtaatggggtcccagctcaccgttataaccagttatttttccattgtaaaaggggtctcaatttaccattataccccacagctgagaccttatttagaattacatagcactttagtaattataaaattgctaataattctaaagagaactgtaagagaaagacatacatttctttgaggatagaatgtgattggccctgggtatacaagcacaggatggctacactaaaaagcagaacaaggcaatggaatacatcttgcaccaacagtaaggataatttacattccagagcaacatgacttaaataacaaagaccacttggtcccttggtttgacaggcaaacgaaggcaagtccaaaagaacaggcagcatgagaaagcatctccgcgattctgaactgagataccttaaaagactaggattatattttgtttctgaagcctaaacctggctagaaggtatatattattctatttaat

SEQ ID NO: 839707 - DNA, 621 bp, Homo sapiens
aaaagagagtaaatgactttcactggactgactaggatgggcccaaaattcacctcctgagatggtcctggaaccactgaaatattctaaacactgacatctgacactacttaccactaaaatggaaactttgagagtattgtaatggggtcccagctcaccgttataaccagttatttttccattgtaaaaggggtctcaatttaccattataccccacagctgagaccttatttagaattacatagcactttagtaattataaaattgctaataattctaaagagaactgtaagagaaagacatacatttctttgaggatagaatgtgattggccctgggtatacaagcacaggatggctacactaaaaagcagaacaaggcaatggaatacatcttgcaccaacagtaaggataatttacattccagagcaacatgacttaaataacaaagaccacttggtcccttggtttgacaggcaaacgaaggcaagtccaaaagaacaggcagcatgagaaagcatctccgygattctgaactgagataccttaaaagactaggattatattttgtttctgaagcctaaacctggctagaaggtatatattattctatttaat

SEQ ID NO: 839708 - DNA, 529 bp, Homo sapiens
cagaccctgtttgcctgggtatcagcagcggtggctgcagaacagtggatattggtgaaccgcaaatgctgctgcctgatcgttcctctggaagttttgtctcagaggagtacccagccgtgtgaggtgtcagactgcgcctactgttgggtgcctcccagttaggctgctcgggggtcatggacccacttgaggaggcagtctgcccattctcagatctcaagctgcgtgctgggagaaccactactctcttcaaagctgtcagacagggacatttaagtctgcagaggttactgctgtctttttatttgtctgtgccctgcccccagaggtggagcctacagaggcaggcaggcctcctagagctgtggtgggctccacccagtttgagcttcctggctgttttgtttacctactgaagccttggyaatggcaggcacccctcccccagccttgctgccaccttgcagtttgatctcagacagctgtgctagcaatcagaaagactccgtgggcataggaccctcca

SEQ ID NO: 839709 - DNA, 582 bp, Homo sapiens
catttggtgtgcaatcataagaaagatacagcatttgcagacagccagcgatgtgttggggacttggcagtcagaaccatctagcatgccctgcggaggttgggggaataccagattcactgcaaagaagcaggatagaagcttcatttatatgatttggctaatacaggaaggtgtgacctcagaaggctagagaaatgagacactcgagttgccggctgtgctccctgcagaacatctcctaattgagattgttgctggcagcctgggccccttttcaatggtctgaacgtctacacacctgccctgcttcttaccagattcacaccagctttacagcttagatattccacctgccacccgccagggccaactgcctctttcctgcctgctcagggaaatcagcccagatcccctacggcagccaccacatgggaagactgtcctcagtttttggctcaggcgartatgcactaatctgtgtctccatccccaatccacaggatccccaaggagtttaatccactgcagctaacctgtgcatccgaggaagaaggcgacatctctgaaaatcccatgcct

SEQ ID NO: 839710 - DNA, 540 bp, Homo sapiens
cctaagcctggcaaaataaaaataacacagattaaggaaacaatgaaacattattttaaaagaaatgcacttcagttaatattattctatgggatctcctgagtcctttgaaggcagagcttatcttagaaaatatgtctcctttagtgggcaggaggttagttaagcaacctcacaccagatcacagattatactgaaatgatcctaataaggaaagactttccaaagctatactcattttagcatgaataaatggattcaagtcttatttgtgggattttaatttccaactttgaatttgcaaactatcaaattccttcaaagacacggtgtgcagagaaggctctgagtaataggattgcttatttttaaaggaagatgccctttagcaaagcacgaggctttgacrtgtgatcagtcaagggtccaatcagcacggatttccccacatggcactgtttcttgttgagttccaaccagatttaataactcatacaaaatgcaactccaccctgagggtgcctagtgcattcaaagca

SEQ ID NO: 839711 - DNA, 568 bp, Homo sapiens
cataattctttaagaatattccagatgttccaaattcttctatatacaaactatgatacaataaatattcttaatacttatgtccctatgcrttagcacttttgtttctgtaggagaggtttccagaaataagattgctgggtcaaagggtatgagaatgtttaattttaataaatactcctagattacttttgaaaagcttgttaggaattctggtcttggcaatagtgcaggaaggtccccatttccctgcacatttcccagcagtgggagtgagaaattttcaaaaaatttggctaagctgaacggggaaacattgtaggttattgttgttctaattgcatttcaggacttgttgtgaagttgagcaactcttcacatgtttaatggccacttgcagttgttccttttaattcactatttattacttttctctttttcctgttgctttatcgatcaacttacatgagctcttgtttactacagatatttagtttgcttatcaaatattttgcaaataacttctccaggctattactgtcttcctgttttgtttatggttttggtt

SEQ ID NO: 839712 - DNA, 676 bp, Homo sapiens
ccttgctgagaaaaagaattcaacgatatttctcccatttgcttttgaaagaagagaaatatggctctgttctgcccggctcaccagcggtcagagtttaaggttacctctcttgttttctgaacgttgctgttatcctgttctttttcaagttgcccagatttcatattgttcaaacacgcatgctctacaaacaatttgtgcagttaacacaatcatcacagggtcctgaggcgacatacatccccctcatcttacgaagatgatgggattaagagattgaagtaaaggcaggcataggaaatcacaagggtattgattggggaagtgataagtgtccatgaaatcttcacaatttatgttcagagattgcagtagagacaggcataagaaattataaaagtattaatttggggaactaataaatgtccatgaaatcttcacaatccatgttcttctgccatggcttcagccggtccctccattcggggttcctgacttcctgcagaaagcagccacccagatcctgcccgaagttgcccataaascacttttggagaggctagattatggatccaattaagaatccctgtactgcaaattctaaagttctggcctagagtcctgtgagctatcctgcttacaattgttactagcagcacacacatgtctctgg

SEQ ID NO: 839713 - DNA, 592 bp, Homo sapiens
gagtactttttcatatacctgttggccatttacatgcctttgagaaattatctattcaggtccttagcccrttttgtaatctgttttttgttttgttttgtgtttttttgctattgagttttttaattccttatatactttggattttaaccccttatcaggtgtatggtttataaatattttctgcccttcccatattgccttttcattctgctgatagttttctttgctgaccataataagctttttagtttggtgtaatctcatttgtctatatttgcttttgttgcctgtacttttgctgtcatatccaaaaaaatcattgcccagtccattgtcaagaagctttttccctatgttttcttctagtcgtttatagtttcaggccttatgtttgagcctttaatccattttgagttcttttttgtatatggtatgataagggtccaatttcattctgcatgtggatatccagttttcccaatatcatttatcgaagagactagtgtgtgctcttcccttccctagtgtgtgttcttggcacttctgtaaagatcaagtgactttaaaggcatagatttattttgggatc

SEQ ID NO: 839714 - DNA, 608 bp, Homo sapiens
gttcaagtcagaaaaatgaaagaaagatttgaaaacattagttttgggacctgtaacccagaaagaattcaggaatcagtctaaattgcagaaaataataaaaactcaaaagcagtggacaagactagaatctaacaacagaggtactatagctttctctgaaatacagtttgtctctctccagtccccatttttattaaaaacaaatttgcttgcaaaataagtgttagtcttatcatacttggcatgaatatttgcataaagtcagcaagaataattatttgccatataggcttttttgaaaattgactttaatggaactttattccataaggaatttcagcttagatttttcaaagccttgagcccagccatggatttatctgtgcctgcaaatatcagtatgacccttgggtgaattcctctccttgaggttccaagataacttggggctcctgggcttgtcagaaagtgatattsttcacttaccacagatcgagaaccctggacagggactgcatagaaaaggtttaaggccagtgtttaccaggggttttcttggccctataagtcaactttgatttcttaaagcagtctgtttgtatatg

SEQ ID NO: 839715 - DNA, 444 bp, Homo sapiens
acagccaaagccacaagggatccgatctgagtactttcgatgtgtcagcagaaggctcttcctctcacagtgatgatgcacatactgctatgtgtagtatggggcacacagtgtgctgggacctctccaggtccaggagaacataaagctgtcgtggactgtcttggccatgaaaacattctccatgtaggcgtagccaaagttgagggttctggcagaggtgatgtgttctttaaaaaataaaaattaatttaaaaaaaagaaagaaaaaacaagggctctctttccttccgtgtactcactcttttgctgacatccaagggacttgttaagtggcaaatcagtattaagcacaagcgtgtgcaagagacccagggactgtgacacagtttggggttggtaggygcttagagttgggtgggcagcaggccttgcatttagcct

SEQ ID NO: 839716 - DNA, 584 bp, Homo sapiens
ttataataggatgctaactttgctctttaactgttatatcaaataataaagactagggctaagttaaagccagagacatgcaatgcattaatkctcaaatcagagccctagttacatgactgtcatgaggcattaagcaaaagtgtgttttaattcagatcattacaaaaaaagatttttattatttttagattgaatcaatagagaaaattgcaggtataaaaataaatcagacttgtcagaatcggaatatttttagtacattttaaagaagctgtctcaacatgtcatctaacatgtgactttttcctgggcaaagaaagtatgaaaagaactactcaatttgcaattttcctttgttttctgcatcctaccctccacaaaacaatgaaaacagagggttcaaaattcattggatttgacattttcattgtctacagtgtaatttaatgggatgaattttgaaaaatgcttcatttttattgtgtttttaccagtcctaagactatttattctgggagtggccttgaaaagagggcaggctctgagattacgtgactttttttttttccataaatttttgg

SEQ ID NO: 839717 - DNA, 447 bp, Homo sapiens
atagcaaagttaggtgactgtagttagtaaaaatgtgttgtatatttcaaaatagctagcagagagcatttgagatgttcccaacacaaagaaatgataaatactcgaggtgatggataccccacatatcttgttcaatacacattctgtacatataacaaaatatcacatataccccataaatatgtacaaacattatatattaatacaattttgttttaaattggttaaagcaggtatgaaaaatgataactatataccgtaattacttgactttcacttaacgtatataaatatacactaattcaccagtttttttaccaaggggccaaggtyttttctaccagtgcagattctattggttagagtttcattgtttttcttgcatcagtttgagagcatctatgatttgcagttttgatttcttgatagcaaagtacaaactta

SEQ ID NO: 839718 - DNA, 601 bp, Homo sapiens
cgatccacccacctcagccttccaaagtgctgagattacaggtgtgagccactgtgcccacccgacatgtcagtgttagtatttgtaaagtgacaggcacagttattacatgcttcctggatgtggctggtaaaacctgttcaatgactggtaaaacctatactaggctgaccctctggaaacattcctaagcattgattaatgttatacaataacatttagcactgtgcttcataaatagctaggcattgtactaaacatgttatataaatgaacttactaattctcacaaaacactcgaagaggtaaatgctgtcagtatctccattttacagataagagaaaaaaaagtgctaggtcgggtatcttgtccaactcattcaggagcaggtaaatagcagcactggaattcagcccagtctgaggctgattccaaagccatctaataggtagatagataggtggatgggtagataaacagacagakggattgattgatggatagaaggacacagatagaaacagtgaatactctttgcctaccactgccaccacacagaggtccagcatgctgtgctttaagccaggcaggtgagcagat

SEQ ID NO: 839719 - DNA, 633 bp, Homo sapiens
cctcctaagatagtctaacactctcttccagagctattaatacaaagatcttcccatgatagtcaatttttgttaaagtttctccaaccacactggaagcaagaaaaaaattatttttttaaaaaagtttattttaacaaggaggcaagtaagacattcttttattcccttttttatttttggcaaaatatgcttattgtaaaaattgtcgtttgctcttttttatggtgtaaatgaactttgttagacctatgactgcatgcattatatatgggtcagaaaagccagactctaggtctaatttttctatttgttagcttggtaaataaaatgaagatggtggtgctagcagcttaaaaactacacccaatgggaagtctggattatttaatgatttactactggaaaattaaaaataaatttaaaagaatgctagaaagatcacaagttctataaagagagagatcactgggagcctgggattatattctcaaatgaaattttaactttcagctctctggcaagccaaggaaataatcattgcttttatgtacaagtaaagaagtgacatcatcaaaattgctgactagtgatgcttgatackcatccctcccacaaggaccaaggcaacaa

SEQ ID NO: 839720 - DNA, 599 bp, Homo sapiens
gtgtgatgttccccaccctgtgtccaagtgttctcactatccaattcccacctatgagtgagaatatgcggtgtttggttttctgtccttgcgatagcactaccatttttttaaggacacagtatctgcagtatcggaggaaggtccttttaggaagaatcatgtaaacaaagggtagaggagtattgaaataaagagtatgttgagaaaatggaaaatatttcagatagtttggagtgtgtgcttaagaagaataggcataaaaatgaaagcataggttagtatttgtagacaaatgttaatctttatattgcatatcctcttatttattactaagtcttgtattataaatgtttttataaatacctgagaatcaatagtgccttcatcattaggtgggagatagttggtcgagttttgtgccttagcatagttatctgggtgatttacacatagcggcttagtgcaaayagtacaaagatcagaagtcatttagagagtggggctttcagttaagaatataggctctggatttgcaccatctgtgtttaatttctgactccagcactttccagcttgatgaccttaggcaagttatc

SEQ ID NO: 839721 - DNA, 382 bp, Homo sapiens
tgttggccaggctggccttgaactcctgacatcaagagatccgcccacctcagcctcccaaagtgctgggattacaggtgtgagccactgtgccaggccgaagtttggacaaatgtttggctgtatgttctaagaagccatggtgtatgccagcaggagataggagcacagtaacctttagacatctaggcaggttggccttgaatatctagaaagttggtccatgggcagccaagccatagccactgagatttagggacagaattttgttgaataattcacaattttttwaaaaaaagtaaacatgttctgatcctctaaggacacaccaggcccagggaaaggaccaaacaatgtgtggtatacacatggattagtatac

SEQ ID NO: 839722 - DNA, 620 bp, Homo sapiens
attttgagtgctttgagaactattgtggaaaaggaattatcttctcataaaacctacactgaaggattctgagaaatttcttgtgatgtgtgcattcatctcacagagttgaacatttcctatgattgagcagtttggaaatattcttttcatagaatctggaagtggatatttggagccctttgaggcctattgtggaaaaggaaatatcttcacataaaaactacagagaagcattctgagaaacttctttgtgatgtgtgcattcatcaaacagaattgaacatttctttttttgtgcagttttgaaacaatcttcttgtagtatctgcaagtggatatttggagcgttttaagacctaaggtgggaaaggaaatatcttcacataaaaattacacagagagattctgagaaacttctttgtgatgtgtgcattcatctcatatatttgaacctttcttttcattgtgcagtttccaagcaatctttttctagaatatgtaagtggatatttggagcactttgtggactatggagggaaaagaaatrtcttcacataaaaactacacagaagcattgggagaaaattcttgtgatatttgtgttcaacccacaaagt

SEQ ID NO: 839723 - DNA, 576 bp, Homo sapiens
tggatatttggagtggtttgagacctatggtagaaaaagaactatcttcaccgaaaaaccacacagaagcattttgagaagcttctttttgatgtatgcattcaactcacagagacgaactgatcttttgatagagcagttttgaaactcacttttgtagaatctgcaggtggatatttggagtacattgcggcctatggtgaaaaaggaactatcttcgcatgagaaccaggcagaaacattctgagaaactagtttgtgatgtgtgcattcatctcacagagttgaaatcattttttgatttgagtagtttggaaacactctttttgtggaatctctaagggcatatttgaagcgttttgcacgctgttgtggaaaaggaaatatcttcacataaaaactacacagaagcattctgagaaactactttgtgatgtgggcattcatgtcacggttttgaaccttccrtttgattgagcagttttgaaatactcgtttggtagaatgtacaagtgaatatttggagcactttgaggcctatgatagaaacggaaatatgtttacataaaaactaca

SEQ ID NO: 839724 - DNA, 630 bp, Homo sapiens
gaaaactaaatgtcttcatataaaagctacacagaagcattctgagaaactcctttgttatgtgtgcattcatctcacagagttgaacctttcttttgattcggcagttttgaaacacggtttytgtagaatcttcaagtggatatttggagcacttttctgcctattgtgtaaaaggaaatatctttacgtaagaactacacagaagcattctgagaaacttctttgtgatgttcttaactcacagcgttaaacttacctttggtagagcagttttgaaactctctttttgtggaaaatgtaagtgggtatttagagccatttgtggcctatggtggaaaggaaaatatcttcacataaaaactacacagaagcattctgagaaactaccttttgatgtgtgtatttgtctcagactggaaccttccttttgattgagcagttctgaaacactctttttgtagaatctggaagtgcatatttggagtgctttgaggcctatggtggaaaaagaaatatcttcatttaaaaactacacagaagcattctgagaaacttctttgtgatgtgtgtattcataccacagagtcgaaactatcgtttgagagagcatttcgaaactttcttttt

SEQ ID NO: 839725 - DNA, 501 bp, Homo sapiens
ctttgcggcctattgtggaaaaggaaataacttcacatgaaaactacacagaagctgagaaacttctttgtgatgtgtgcattaatttcccagagtcgaacctttcttttgattgagcagttttgaaacactctttttgtagaatctgcaagtggacatttgaagcactttgaggcctattgttgaaaaggaaacatcttcatataaaaacaacaaggaagcattctgagaaaccattttgtgctgtgtgcattcacctcacagagttcaactttatttgatacagcagttttgaaacactcttcttgtrgaatctgcaagtggaaattgggaaatatttaggcatatggtggaaaaggaaacatccgcacataaaaactacacagacacattctgtgaaacttctttgtgctgtgtgcattcaaaccacagagttgaacctatcttttgaatgagcagttttgaaactctcttttcatagtatctgcaagtggatatttg

SEQ ID NO: 839726 - DNA, 631 bp, Homo sapiens
attttgagtgctttgagaactattgtggaaaaggaattatcttctcataaaacctacactgaaggattctgagaaatttcttgtgatgtgtgcattcatctcacagagttgaacatttcctatgattgagcagtttggaaatattcttttcatagaatctggaagtggatatttggagccctttgaggcctattgtggaaaaggaaatatcttcacataaaaactacagagaagcattctgagaaacttctttgtgatgtgtgcattcatcaaacagaattgaacatttctttttttgtgcagttttgaaacaatcttcttgtagtatctgcaagtggatatttggagcgttttaagacctaaggtgggaaaggaaatatcttcacataaaaattacacagagagattctgagaaacttctttgtgatgtgtgcattcatctcatatatttgaacctttcttttcattgtgcagtttccaagcaatctttttctagaatatgtaagtggatatttggagcactttgtggactatggagggaaaagaaatrtcttcacataaaaactacacagaagcattgggagaaaattcttgtgatatttgtgttcaacccacaaagttgaacatattg

SEQ ID NO: 839727 - DNA, 414 bp, Homo sapiens
atgctgagaaacctctttgtgatgtgtgtattcacctccgggagttcaacctatcatttgacagagcggttttgaaactctttttgtagaatctccaagtggatatttggagccctttgcattctaytgtgaaaaggaaatatcttcacataaaaactacacagacgcattctgagaaacttctttgtgatgtttgctttcaactcacagaattgaaccttttgtttgagtagttttgaaactctctttttgtagaatctagaagtggatatttagaacgcttggaggcctatggtgcaaaaacgaataacttcacacaaaaaatacacagaagcattctgagaaacttctttacgatgtctgcattcacctcacagatttgaatgtctcttttgattgagcagtttggaagca

SEQ ID NO: 839728 - DNA, 395 bp, Homo sapiens
tcaactcacagaattgaaccttttgtttgagtagttttgaaactctctttttgtagaatctagaagtggatatttagaacgcttggaggcctatggtgcaaaaacgaataacttcacacaaaaaatacacagaagcattctgagaaacttctttacgatgtctgcattcacctcacagatttgaatgtctcttttgattgagcagtttggaagcactctttcggtagaatctgcaagtggatatggagagagctttgaggcctgttgtggaaaactaaatatcttcatataaaagctacacagaagcattctgagaaactcctttgttatgtgtgcattcatctcacagagttgaamctttcttttgattcggcagttttgaaacacggtttttg

SEQ ID NO: 839729 - DNA, 621 bp, Homo sapiens
ggtgaatacacacatcacaaagmggtttctcagcatgcttctgtgtagtttttatgtaaacatatttccgtttctatcataggcctcaaagtgctccaaatattcacttgtacattctaccaaacgagtatttcaaaactgctcaatcaaatggaaggttcaaaactgtgacatgaatgcccacatcacaaagtagtttctcagaatgcttctgtgtagtttttatgtgaagatatttccttttccacaacagcgtgcaaaacgcttcaaatatgcccttagagattccacaaaaagagtgtttccaaactactcaaatcaaaaaatgatttcaactctgtgagatgaatgcacacatcacaaactagtttctcagaatgtttctgcctggttctcatgcgaagatagttcctttttcaccataggccgcaatgtactccaaatatccacctgcagattctacaaaagtgagtttcaaaactgctctatcaaaagatcagttcgtctctgtgagttgaatgcatacatcaaaaagaagcttctcaaaatgcttctgtgtggtttttcggtgaagatagttctttttctaccataggtctcaaaccactccaaatatccact

SEQ ID NO: 839730 - DNA, 626 bp, Homo sapiens
atgttcaactttgtgggttgaacacaaatatcacaagaattttctcccaatgcttctgtgtagtttttatgtgaagayatttcttttccctccatagtccacaaagtgctccaaatatccacttacatattctagaaaaagattgcttggaaactgcacaatgaaaagaaaggttcaaatatatgagatgaatgcacacatcacaaagaagtttctcagaatctctctgtgtaatttttatgtgaagatatttcctttcccaccttaggtcttaaaacgctccaaatatccacttgcagatactacaagaagattgtttcaaaactgcacaaaaaaagaaatgttcaattctgtttgatgaatgcacacatcacaaagaagtttctcagaatgcttctctgtagtttttatgtgaagatatttccttttccacaataggcctcaaagggctccaaatatccacttccagattctatgaaaagaatatttccaaactgctcaatcataggaaatgttcaactctgtgagatgaatgcacacatcacaagaaatttctcagaatccttcagtgtaggttttatgagaagataattccttttccacaatagttctcaaagcactcaaaa

SEQ ID NO: 839731 - DNA, 621 bp, Homo sapiens
actgctcaatcaaaagaaagatttaactctgtgagatgaatccacacatgacaaagaagtttctcagaatgcttctgtgtagtttttatgtgaagatatttccttttccacaataagacccaaaaggctccaaatattcacttgcagattctaaaaaaaacagtgtttcaaaactgctcaatcaaaagatagttcaactctgtgagaagaatgctcacatcactgagaagtttctcagaatgcttctgtgtagtttttatatgaagatatttcctttcccaccgtaggccacaaaaggctccaaatatccacttgcagatactatgaaaagagagtttcaaaactgctcattcaaaagataggttcaactctgtggtttgaatgcacacagcacaaagaagtttcacagaatgtgtctgtgtagtttttatgtgcggatgtttccttttccaccatatgcctaaatatttcccaatttccacttgcagattcyacaagaagagtgtttcaaaactgctgtatcaaataaagttgaactctgtgaggtgaatgcacacagcacaaaatggtttctcagaatgcttccttgttgtttttatatgaagatgtttccttttcaac

SEQ ID NO: 839732 - DNA, 601 bp, Homo sapiens
caaagaggtttctcagcatgcttctgtgtagtttttatgtaaacatatttccgtttctatcataggcctcaaagtgctccaaatattcacttgtacattctaccaaacgagtatttcaaaactgctcaatcaaayggaaggttcaaaaccgtgacatgaatgcccacatcacaaagtagtttctcagaatgcttctgtgtagtttttatgtgaagatatttccttttccacaacagcgtgcaaaacgcttcaaatatgcccttagagattccacaaaaagagtgtttccaaactactcaaatcaaaaaatgatttcaactctgtgagatgaatgcacacatcacaaactagtttctcagaatgtttctgcctggttctcatgcgaagatagttcctttttcaccataggccgcaatgtactccaaatatccacctgcagattctacaaaagtgagtttcaaaactgctctatcaaaagatcagttcgtctctgtgagttgaatgcatacatcaaaaagaagcttctcaaaatgcttctgtgtggtttttcggtgaagatagttctttttctaccataggtctcaaaccactccaaatatcc

SEQ ID NO: 839733 - DNA, 497 bp, Homo sapiens
gcggcctattgtggaaaaggaaataacttcacatgaaaactacacagaagctgagaaacttctttgtgatgtgtgcattaatttcccagagtcgaacctttcttttgattgagcagttttgaaacactctttttgtagaatctgcaagtggacatttgaagcactttgaggcctattgttgaaaaggaaacatcttcatataaaaacaacaaggaagcattctgagaaaccattttgtgctgtgtgcattcacctcacagagttcaactttatttgatacagcagttttgaaacactcttcttgtrgaatctgcaagtggaaattgggaaatatttaggcatatggtggaaaaggaaacatccgcacataaaaactacacagacacattctgtgaaacttctttgtgctgtgtgcattcaaaccacagagttgaacctatcttttgaatgagcagttttgaaactctcttttcatagtatctgcaagtggatatttg

SEQ ID NO: 839734 - DNA, 629 bp, Homo sapiens
gatattttgagtgctttgagaactattgtggaaaaggaattatcttctcataaaacctacactgaaggattctgagaaatttcttgtgatgtgtgcattcatctcacagagttgaacatttcctatgattgagcagtttggaaatattcttttcatagaatctggaagtggatatttggagccctttgaggcctattgtggaaaaggaaatatcttcacataaaaactacagagaagcattctgagaaacttctttgtgatgtgtgcattcatcaaacagaattgaacatttctttttttgtgcagttttgaaacaatcttgtagtatctgcaagtggatatttggagcgttttaagacctaaggtgggaaaggaaatatcttcacataaaaattacacagagagattctgagaaacttctttgtgatgtgtgcattcatctcatatatttgaacctttcttttcattgtgcagtttccaagcaatctttttctagaatatgtaagtggatatttggagcactttgtggactatggagggaaaagaaatrtcttcacataaaaactacacagaagcattgggagaaaattcttgtgatatttgtgttcaacccacaaagttgaacatat

SEQ ID NO: 839735 - DNA, 635 bp, Homo sapiens
tagggattttgctcactgagtagatgtagcaaggaagatgcccagggtttgcttcccatgtgaagagcccarcaggactctcgctgccttggcatgtctgaccactcttcagatggtgggggaacggtggggatgctgcagcttaagacagtcacagatccttagagatctaccactcaccagcagccacctcctaaaattccactgtcctggaacatcataaaagcccatgagaaacctagaatagtcttgaaccagagtgtccctgcactagctagaggttccattcactgggggaacccagaagcagagaggttcccttctgtagagcaggcccctagaccaccaccttattctcaagctcctcttctggattgagggaccccaagttctgtcctctgaggcagctatatgcaaagcaggaaatgatgatgggtcagggagccttggaaaacaggtcacagctaaattcctagcaaaaggcaggtatgcagcgttgttgtctccaggttggcccatctcagacctgtctgatgtccctctgtaaacctccacggtttattctccaggccagcagggctgcctttcagggttcttgaggagtccaagatactttctgcctaccctctgggaaa

SEQ ID NO: 839736 - DNA, 625 bp, Homo sapiens
ataaaagacattttattggaaacagaagaaaaaagttaattcatagagttgtctataaactagttctagagtttcaagttctggattttctggcwttgtacattttcctatactatagaatcaggtgttctagtgaactttttaagtagtccatgcatcaacagacacaaaggctgtttatattgcaagttgctgtggtgatttctctggaagtttatatcaagttttctagcttcagtttgtagggcattaagaaaagcagttttattttttagtgatttcaagtcagaaaaataggagaaaaattagaaaatgtcggtttggagacttatagccaggaaagaatttagcatttagatcaaattgtagacaaataataactaaaaaacaatggtcagggctagaatctaatgtcacatgtactatagttttcttctaaaacatattttttctctataatctcccatttgtaccaaagataaatcatagtgaaaccaatacatttgcaaaataagttttagtcatattgtacttagcctgattatttatataaagtacagcaataataatgattggccatatagggtcttttcaagttggttttgctggaactttttcataagga

SEQ ID NO: 839737 - DNA, 432 bp, Homo sapiens
taattagaaacatgtgcaaagattttaaaagaatgttcctcacagggttaaaactggaaaaaaatctaaatgttcaaaaatttaaaataagtcaaaaaaactatggygcaaacttacaacaaagtaccatgatgggaagatagtttggcagtttcttacaaaaccaaacaatcttaccaacccatccagccatcacactctttagtatttatccaaatgagtcgaaaacatatgttcacacaaaaatctgcatatgaatgtttatagcagctttaatcataattgccaaaacctgggagtaaccaagatgtcctcaaacaggtgaatgaataaacaaactgtggtacatttatttaccgcagtttagaatattatttagcaatacaaagaaatgagctattacctacaaaaaacatggaggaaaattaaata

SEQ ID NO: 839738 - DNA, 668 bp, Homo sapiens
atagcctatacatgacaagacatcactaaatcagactaattgagggcagagaaagttagaatcatcacaaagtaaaattatagcatataaagaaatgcagccttttcatatttttgcttatactgtatctccaattaaatagtaactaagtgttgcaaagtataggtcctgaagggtgggcctccttttaatgagtagttaagagccattttaatcagcaggttgtttgtaaacatatgaacaagtataaattattttcagtgggttaaatatttttgctgaaatattttccccctgaatttctgcttggtaagcttttggccgtagcctagcccaactaaactgcagcctcgtctaggttacataaggacacggggtttcagcttgaaccctagcctttcacatttgctaaggcccagacttccaggctggtggggagaatgtcaggcttgcttccccttgttgtcagccttatccagtcacattccaccttcttgtgagttcttgttgctcatgggaaatgccagtgtcctatttttagaagagcagccctcaaactggtaccctttgaaatctacttcaaggactttgaaatgcaggaactcttattctctggttcacagtttgcaatttcagatagccayacatctacagtgctatctcctagg

SEQ ID NO: 839739 - DNA, 532 bp, Homo sapiens
attggtaaggaatagcagaacccaaagccatctgttgtgactgtgaaacttaaatccctgatagatgagggtgccctccttgtctctrtaatgattgccagcatcagtttgtatgcatactctgatctgagagaagcctcagtgtcttacccatctctgagcctttagccaagacaatgcctttaatccattcattcatcattcattcattcaacagggccagttacagtgctgggtcctcagaagatgatgatgagcaagacagataaaatccatattcttgcactctagaggtggagagccagataaacaaatagaaagagaaccccaggaagaaaacaattcaggctaatgtaatggatagtgactggagattgcttctagattgggtggtcactgaaagactctctgaagagatgacttttaagctaacacttgaatggcagggaagcatcagctatgcaaatataaatgagaccattctacattgagggaacaacaagaggaaatgccccagggaaggaacaagctc

SEQ ID NO: 839740 - DNA, 609 bp, Homo sapiens
ttcaggtaaatgttaaatgtttgacagtataaaaaaatgtaaaaaagaaaatctgaaaacaattattttarcataaaataatagcatttagaagaacattccagatttgagtactgaagattacaattacattaagaagcttaaattatagaatttctataaagaaggggttgggaagggtttttatttgcttagtggtacctacattggcatatgaaaaggcaaatgctgtagtattaaggaaagcttttattagcacatgttaataactattttacaaatacccactgaatggaaagtactggcatcattagcagtaagtcaactttaatactaactgatggaggtgaggtgaggaaagatgtgggcaggttattgtcttgaaataaatttaaagagattttccttatgtttgcacgaaattaaaaagtaaaattttatttcaaaatccatgatattatttaatatagtaattaatttgggtagtctaatgcagtagcagaatagtatatcacattaactatagatttactatattttatgtagtcattcttctatggttggatacttaggcattttatctttgtctataaagcttttttatgcttt

SEQ ID NO: 839741 - DNA, 584 bp, Homo sapiens
aagtggtcatatgtggaaccaagtgaaatttatttgagatggatggaaaagcaactataagcgaaagcaacctgagggagaaaacgcctgggtcttctggcggcatgagaagatcaatgtggctgaagcatggtgagccaatggggagaggaaaagagcttaggtgtaagggctgcttaaggccaaatgtatattctaggcttagaaaatcttggtaaggcatttgaagtttattaaacaatccaatggaaacaactatatggataaatcttaaaaatattgtggcaaaaataaaaaaaccttaaatacataaaacataaacactactataaaaatcctagaacaggcaaaactgatggaaaaaatatcacatcagcagtcacctctgatggagtagggatggaatatttgtgaagagacaaaaatgactctttagagtgatgttctgtttcttgacagatgattgggttatatagacctatgcaagtctaactcattgaatrcacacttaaaagttgttcatttccttatatgtaaaatgcacctcaaaggaagacaaaaaaatcctaagcaaatgttgaatt

SEQ ID NO: 839742 - DNA, 461 bp, Homo sapiens
ctaacaaatagaatgtgtctttccaagctatattgtgcaacacaacacagcttatgccttcccatccccccatcccygaagtgtctgtgtctgtgtgtgtgagagtatgtgggcacacacaagaacatggatagttttcttgcaattctcctcattgaaataaaggcattgtgttgagaacaaattctatacacagagtttatagtcaagtacacatctgactcagaacacatggagaggccaaataggtgttccaaccacagccatagctgaggacccagctgacagacagcatccacctccagacacatgaatgagtgagcatgcagatgattctagcccaccctttgatgctgaggggagtagaggaaagctgtcttcactgagtctttcccaaattgcaaattcatgagcaaagtaaattttgctgtttctttaagcaactaagttttggaatggtt

SEQ ID NO: 839743 - DNA, 461 bp, Homo sapiens
ctaacaaatagaatgtgtctttccaagctatattgtgcaacacaacacagcttatgccttcccatccccccatccccgaagtgtctgtgtctgtgtgtgtgagagtatgtgggcacacacaagaacatggatagttttcttgcaattctcctcattgaaataaaggcattgtgttgagaacaaattctatacacagagtttatagtcaagtacacatctgactcagaacacatggagaggccaaataggtgttccaaccacagccatagctgaggacccagctgacagacagcatccacctccagacacatgaatgagtgagcatgcagatgattctarcccaccctttgatgctgaggggagtagaggaaagctgtcttcactgagtctttcccaaattgcaaattcatgagcaaagtaaattttgctgtttctttaagcaactaagttttggaatggtt

SEQ ID NO: 839744 - DNA, 599 bp, Homo sapiens
tcacccaaaatgcctgactgcaaacatattcttcactatcaaatatttcctatagtccccagaggattttgcrtgtgtggtcatgatgaatctatgccatctgggtactacgctgttttgctaggtctccactggaaatccgctgtgcccaccgggcatttcagcgctcactgagcagctttggttttctaccatggttctgctgagttggccaccccagctaattgcctgggaaagcaatgctctgcctgaggtggtgattcttggtgcttctaagggcactcgaatagcactgtttcttacacttctcataaaattttgtataagaccagttacttcagtttctgcctctacccttcttcttgaaggactgaaatgtagaggcagaaactgaaggacctggggccaggtaagggaaacaagaggtgttcttctaccctccttgtctctaaaacaaagaaacaatacagcaacaaaaaccgcttcccttggtcaaaataaataaacaaacaactgtacaacgacaatagccctaccacaacgaagtcagaaaaagatacacacatacaaaaatcatgcttatctactgataccactaa

SEQ ID NO: 839745 - DNA, 608 bp, Homo sapiens
catttattataaaagatattacaaaggatatagataaayaccagattgtggaaatacatagggtaatctttgggaggaaaagtacatagagtttctatgccctcactaggtatattagtctgttgtcacattgctataaggaaataccagagacttggtaatttataatggaaagaggtttgattgacttccagttccgtgtggctgtaaaggcctcaggaaacttacaatcatagtggaagacaaagggaaagaaggcaccttcttcacagagtggtaggaaggagaactgctgagcaaagagagaagagccccttataaagccatcagatctcatgagaacacactcacaatcaggagaacagcatgggggaaaccgccccccatgattcaattacctccacctggtctctccagtgacaggtggagactatggggattacaattcaagatgagattagagtgaaacagagcctaaccatctcaccgcacatgctaccttctaggcaacttcacatagtcaattattcagaagctctctaaactgttcttgttgggtttgtggcagtttcattacataggtatgattaattaaatcactaaccatt

SEQ ID NO: 839746 - DNA, 608 bp, Homo sapiens
catttattataaaagatattacaaaggatatagataaataccagattgtggaaatacatagggtaakctttgggaggaaaagtacatagagtttctatgccctcactaggtatattagtctgttgtcacattgctataaggaaataccagagacttggtaatttataatggaaagaggtttgattgacttccagttccgtgtggctgtaaaggcctcaggaaacttacaatcatagtggaagacaaagggaaagaaggcaccttcttcacagagtggtaggaaggagaactgctgagcaaagagagaagagccccttataaagccatcagatctcatgagaacacactcacaatcaggagaacagcatgggggaaaccgccccccatgattcaattacctccacctggtctctccagtgacaggtggagactatggggattacaattcaagatgagattagagtgaaacagagcctaaccatctcaccgcacatgctaccttctaggcaacttcacatagtcaattattcagaagctctctaaactgttcttgttgggtttgtggcagtttcattacataggtatgattaattaaatcactaaccatt

SEQ ID NO: 839747 - DNA, 500 bp, Homo sapiens
tgattaagtctcatgagacctgatggttttataaggaggagtttccctgcacaagctttctctttgcctgttgccatccatggtgacttgctgctccttgccttccaccatgattatgaggcctccccagccatgtggaattgtaagtccattaaacctctttcttttgtaaattgacgagtcttgggtatgtctttatcaacagcatgaaaacagacaggaagcaacaataaaatgaagcaggaagcataggcaagtttttagggtagatgagttatagttatgtagcaaatagtgtttctaccacaatgagtatatctatgctaattgtaattataaggccaatcactgaatcacgagattaacaacattggtcaacatatgcaaaaaatccattctatcattgcctatagcgctcagtttgaagttttatttctgctatatctgctatagtgaaagccaytagttaccaggatgaccagaaaaaaaaaaaaaaaaag

SEQ ID NO: 839748 - DNA, 554 bp, Homo sapiens
gacaaatctaccagtgccttgatcttggaattcccagcctccagaactgtgagaaataaattattgtttataagccacccagaataatacattttgttacagcagcagcctaaacaaactaagacagacaccccctggatagattacttattaccatttgacttatataaagaaacatgctccaaactaatataacatagctagtcttctggctgcatcattacaaatggaaactgaaaaatattcaacagctcagatgtatgccatcatcacaagccttctagattatccatttgttatctatgtactattgaattaaaaacaaaacaaacacacacacacacacacacacacacaccatttctgaacttactgctctttgaaagcacatattttatacctgagaataatcaagtgcaactccaaaaagaataggtctattcaatatgcaagctttcagaaaatatgcatgcccatgatgaggcctatgtgaggtgcaaarctccaattaccatagtacaatcaaacctgcatttaattcctttatacctctc

SEQ ID NO: 839749 - DNA, 612 bp, Homo sapiens
cacttggaaagacaaaatagtacgcagagattcacaccatgaacttttttttccaagaagcaacacaggagcttaacagaaaaawggaaagaaaccacagactctttgaaaggaagggtgggctgcagcattcaccatgagccaggtggaaaactgtaagtctctagagcatgggagtgcggataaaatgcctccaggatatacactcccactggggaacatggcaatccaggccgtaggggaggccttaaccctacccagtgctgggttgatttagtgagcagtgaggggtatttgagaaggagtggcatcaggatgtgctttgcatagattcccagtgccaagtggggaaggaggaaagccattttggatccttccttgcagggcacctcatggaagcctgccaaattactcaggtggcagttacacgttaagagaagctcccacctgagattcatgatataatctcgagtggagacaaattcatttgaccagaacccagggatgaataggaagtgtgctgcagccaagagtgcaggagttgggtgatcctgcttcttgggcatactaggagggatgtggcctgaaagccacagtttctgtctccatggg

SEQ ID NO: 839750 - DNA, 617 bp, Homo sapiens
tgtgtgattttggactgctgacctaacctctctgtgtttccattttttcctttgtataaaggagataataataatttctactttataagattgtgagaattcaatgacataatckagtggcacatattaatactaacagctaacaatgattgaacgtcttatgacagctatgctttaatcgctatttttggttaacactcaatattcatagtgacttcatgttatccattttacacataatgaaaatcaccagagagctttccttctcaattccacacagctagagagtgacagggccagaattcaaacccaggtgtattagtctgctctaataaatatataataatacataatacatacataataaagacataataataaagacgctgctaataaagacatacccgaggctgattattattttttttttaaagaggtttcatggaatccccattccacacggctggggaggcctcacaatcattgtagaatgtgaaggaggagcaaaggcacgtcttacatgatggcaggtaagagagcgtgtgaggggaattcccctttatgagaccatcagatctcgtgagacttattcactattgtgaaaacagcacaggaaa

SEQ ID NO: 839751 - DNA, 560 bp, Homo sapiens
ggccctacctgtttttttttaattactatgttaagaaatgaacagcctaatagaaaagtagacaaaggtcatgaacagacagtttacaaagaagaaatacaagaacatcaaatatttaaaaagttcaattttgttagcaatcaaaggcacaaatttaaaacactgtatcaaaatagtaaataataactattacacagtaaaataaatgcattttttcctactctcaaagggtctccttgttgagtgtagtgaataggcatgcttgtacgttgctagtgagcatataaattagttcaggcatcgattcggaagagcaatagattgtatgtgtcaaaaaccttagattttgcataccctttaatcctaatgtcatgtctcctcatttatcctaagataataactgtgaatgaaaatgaaataatattagtttagtgcttgctttggcagcacrtatactaaaattggaacaatacagagattagcatggcccttttgcaagggtgatacccaaatttgtgaagtgttccgtatattgaaaaagattactctttaaaataaag

SEQ ID NO: 839752 - DNA, 636 bp, Homo sapiens
agtgagctccttgtcagtggatgtrttcaagcagaagctaagtaaccacttgctagagatattttaaagagttaagatggagagttgtcttaattgatgtgatatccacttgaacccagggtgtctgtgatattagttattattagtctcctcagggaggttcttgatgcattgtaacctggggctcaggagttgagcaaggatgaataaattgaactttaaaggctaagtttgaaatattttttcttatcttctgaagtcagaaagatttcaatgtttatattattatgactgtaaaagcaaggtttattgttaagataaataataaattatgattgcttgagtttttatacagttctttgttttccctgaagtcaatagttgccttgtttattaatttttcttatttttaaatacatataactaatttgtttccagatgttctgttttataaaatactctgcattattattttatacacaaccaaatgcactaaatcatccatcaagtgcatgtagcaattggtacccaactgttagttatatatccaacatccattgtccttttttcttttactaatgggagccgcatacaagcttaaggtaacaatatgtccagctttagaaatcatttcct

SEQ ID NO: 839753 - DNA, 606 bp, Homo sapiens
atctaatacgtcttctgtgtcctcaagttttctcatccttaatgcctccatttttgcgttttccatttacttattcaaccaatatttgagggcctactatgtgtggtagggacacagtttgaacaggcaggtctggttaggtgaggctgagggtggggtgtggaaataaaaattatttgtctatgatatgtagactcaaccttacagacaattacctaaaagaaggcaagggtggctggtacctaattggagagaaagactttggtacaagatgagttcaaagatgagataggggacagatcgcaaaatacctgatctgctatggtaaaaaagttgtgattacagtgccatgggtctaacttacctagtcatttcttgatccaaatttcattttttactctgtttttcctcataattctcctcttaaatttcgggttactctcttttctttattttacattgtatgtgtttgtgtgtgtattttttttttaattttagaaatagggacagagtctatgttgcccaggctgtattcaastcctgggctcaagtgatcctgctgccttagctttccgagtagctggaactacaggtacacaccaccat

SEQ ID NO: 839754 - DNA, 552 bp, Homo sapiens
caccgtgttggtcaggctggtctcgaactcctgatctcatgtgatccacctgcctcggcctcccaaagtgctgggattataggcatgtgccactgtgcccagcctctttctgctccccccccccrtttttttgtagttgttgtttttagagagacagggtcttgctgtgttgcccaggtatgcctcaaactcctgggttcaagggatccttccacattggcctccctgggctcacgcatgtttttaaagaaatggtagataagagatctaaggtattctcagtgactaagaaactgaggtgaatgactaagggactgagacttgtgtgtgcaaacctgtttctgcactagtcttccaagccttcccagttactccaacctgaaaatgagtcatccttggctcctcattaccaaccctcaccccacccttttccatccatcagcagatctgtttattccacttccaaaatataccccaaatgtgcttccttttcctccgtactccaagctaccatgccgtgtaagttatgattgtgatttttgcgtgtctgct

SEQ ID NO: 839755 - DNA, 658 bp, Homo sapiens
tctctatactctgcctagagggggatttgtgacatatctctgccctgatcaccaaggtgatggaagtcttgtctaggctcagtctatgggggcattgtgtcaaatatctgcactgatcacccacgtgatgtatctcttttctaggctctgtctacagggatttttttctgacatatcactgcattgatcacctaggtgatgtaagccttgtatgggctttgcctacagaaggctttgtgaaatatctgcactgatctctgaggtgatgcaactcttgtctaggcactgcctacaggagacattggtacatatctctgcactgatcacccaggtgatggacttttgtcttagatctgcctacatggacattgtgacacacctatgaactgatcaaccaagtgatgaaactcttgtctaggctctgcctacaggggatttgtgacacatctctgcactgatcaccctggggagggaactgttgtctacgctctgactacagaaggttttatgacttatacctgcactgataacgtaggtgatgtaacacttgtctaggctctgcctacacgggamttttcacatatctctgcactgatcacccaggtgacggactcttgtcttggatcggcctaagggggcattgtgacatatctctgca

SEQ ID NO: 839756 - DNA, 572 bp, Homo sapiens
gctttgcctacactgagattcatgacatatcactgcactgatcacccaggtgatgtaactcttgtctgggctctgcttacaggggwtattgtgagatatctctgcactgatcacccaggtgatgcaactcttgtctaggctctgcctacagcggcattttaacatatcactgcactgatcaccgataagatgtaactcttgtataggcttcgccaacagggggcattgagacatatctctgcaatgatcaccgaggtgatgcaactcttgtttgggatctgcctacagggggcattgtgacatatctctgccctgatcacccaggtgatgtaactcttgtcttggcctgcctactggagacattgtgacatatctccgcactggtcacccaggtgatgtcatttttgtcaaagatatggctacagggacattgtgacatgtcactgcactgatcacacagctgatgtaactcttgtctaggctctggctacagggggcttgtgacacttctctgcactgatcacccaggtgatgtaacccttgtctaggctctgccaaaagggggcattgtg

SEQ ID NO: 839757 - DNA, 623 bp, Homo sapiens
ttcattattggggtcattttccatattragattttttaactgtactaattccaagaatctcagagctgtttctgccagcagagctatgttttctataaaataaaaaggaagaaaatttataattacaatcttaactctctgtaaagcttattaacttttcctccctgtctttatacataaataatcataagcctatgggaaaaacagaacttttcaatttagcatttaacttaatcagattttagtaacccagctcataatctgtaactgtctccaaaccactagtcttatttttgaaacacagcttaaaaaaataataatataaaaataatctaatacctcatctactgaggaccaaaaaaaaaaaaaagcctaattctctgcagggacttaccttttaaacagtatccttgacaagtgagagatatttattagactaacaaagaaacatccacattaaaataacagataaagctaagctttggcatcagaaagacctgggttcaaatctcaaccttgccacttactaacttgaccatttaagcaatctgagactgtttcttcacatataaatgaaaagtcacaactgcctcaaagagaaaccattgttagactgctttaca

SEQ ID NO: 839758 - DNA, 653 bp, Homo sapiens
cgccccctggggttcacgccattctcctgcctcagcctcccgagtagctgggactacaggcgcccgccacctcgcccggctaattttttgtatttttagtrgagacggggtttcaccgtgttacagatctctttttaaggaggatttaaaaacttttaggacatagaaaaactgtgctaaagataagagtacccacatgaactagaataaagaggaaaaataaccagaaaaccagacttatgagctggcaaattaggcagcatctgttcagcttggcagagttccttgaaataacttcacactaccccacggctgataataagcacagccaaagaggctcattgactgaatgagcctaaatctccagctagatctcaaaaacaaacttcctttgtttctctgagctgaacttctaacttcactgattattttccagatgggccttggtcctgccttgaacttgaccatgcttcatattcctggtcatgactttggaaccttccagtgaccaccttgcatttttttcctggcaatgaatccacagaatacttggtttaaacaccctcttgatttgacattattcccaggcctctcctctccaataccacctctaaccatgaagtacccccttggcttagtccaatagcaacttc

SEQ ID NO: 839759 - DNA, 617 bp, Homo sapiens
tactaaaagttaaaaaaaaaaatcagctgaacgtggtggctcatgcctatagtcccagcsacttggaaggctgaggtgggagaatcacttgagcctgcaagatcgaggctgcactgagctatgattgtgccactgcattccagcttaggcaacagagcaagactcagtctcaaaaaaaaaaaaaaaaaagaatcttttttgttttcggccagtttggttctacattttaaattgcttttgactgactttttgggagactgtcgtgcccttagagtatccataataattatgaagatgtcaagtcccttaggactgcatgtttgacttagctttcagcatcaaaacatgcatcagaatagcataatggaaagatcagtgattctggagtaaagtagacttggtttcaaattccagccctcctctaatgcccttggataaatttcttcacggccttagtttcttcatctgtaaaatggggattttttttttttttggagacggattctcgcactgtcacaggggctggtgtgcagtgatacaatctcggttcactgcaacctccacctcccgggttcaagcgattctcctgcctcagcctcctgagtagctggggttac

SEQ ID NO: 839760 - DNA, 566 bp, Homo sapiens
aaaactcattacacttaaaaactcattggaaatgcccttaaaaatggccaacaaagaaatctgagctagaagtctctgatgcaagaaaacaaccaaatttkatgttcccttgcctctaaggaggcaatttataatgttcaaaacactttatatacattctgtcatttgaccctcaaaaccctggagacatgtctgtcttccatcaggggagcatatatctaacatagctcaacttgaaagcctacaacttgtgaactctcaactatctttgcatagagggaatactgacatagataactctattcagctaagcactacagagcccatcacctcccatctcccagtggggatgctcaagccagatcctaccctggggagttatcgcccatgattttgctttgtggtagttgcagacagctcactatctgcaggcatttagatcttcatacatctcatccaccaggcctttcgtgttactccacaaggactctcccttgaactcactgcatctgctaagattgtctttaatgtttttgcactatcatcctatggaacctcccatttca

SEQ ID NO: 839761 - DNA, 628 bp, Homo sapiens
aactgaactggatcccaaaagagattcaccttaatcatgaattctacttactccacaggtgaaagtttcacagcaagattttaagtaatatctgcagttcatctgaaaaaaattatatcatattccatttaagaaccccaacacttaaaaactcattacacttaaaaactcattggaaatgcccttaaaaatggccaacaaagaaatctgagctagaagtctctgatgcaagaaaacaaccaaatttgatgttcccttgcctctaaggaggcaatttataatgttcaaaacactttatatacattctgtcatttgaccctcaaaaccctggagacatgtctgtcttccatcaggggagcatatatctaacatagctcaacttgaaagcctacaacttgtgaactctcaactatctttgcatagagggaatactgacatagataactctattcagctaagcactacagagcccatcacctcccatctcccagtggggatgctcargccagatcctaccctggggagttatcgcccatgattttgctttgtggtagttgcagacagctcactatctgcaggcatttagatcttcatacatctcatccaccaggcctttcgtgttactcca

SEQ ID NO: 839762 - DNA, 447 bp, Homo sapiens
ttattcctcattcttctctggataatccacttaccatctcacctgctttatccataaagcttctgcattccttcttagaatgttcaactttttgtaataaaaatgattatatctttgggctgggtgtggtggctgacgcctgtaatcccagcactttgggaggctgaggcaggcagatcgcttgaggtcaggagttcaagaccagcccagccaatatagtgaaatcccgtctctactcaaaatacagcaacaacaaaaatagctgggcatggtgacacaaacatgtagtcccagctacttgggaggctgaggcagaagaatcacttgaacatgggaggccraggttgcagtgagccgagatggaaccactgcattctagcctgggcaacagagtgatactctgtctcaaagaaaaaatgattgtatctttaatgcttgctttgtgtc

SEQ ID NO: 839763 - DNA, 342 bp, Homo sapiens
tacaaactgagcatacatgtcctcctagaagtcatatgttgcagtcctaaccccgccaacacgattgtatttggagtaaggaagtaattaaagttccgtgagttaataagggtggrgtccggatcagatacgaattgtgtaagatacacgacagcatttcctctctttctgtcccgttctgcaggtgcacaaagaagtcacatgagcacacattgagaagagcaagcatttgaactccaaagagagagacctcaccagacaaacactcctagcgccttgatcttgaacttccaatcgctagggctgtgagaaaataaatttctgttgttgaagccacccaat

SEQ ID NO: 839764 - DNA, 624 bp, Homo sapiens
ttagattatttctgttttcagattatttctgtttttatttctgtttttctttagttaatttgctacatttatttgctaggacttttattatataatgtgtagtaaagggtttcataacatgccaaacactatttaaattttccaatgataattttaatatatatttattgttataattacaatatgttcaattttcatctttgtgctgaaggtgcttgtttgtagttgtcacctctaaaaaatctcaaaccacgttagtttccccaaaatagatttggaagccatcacacactaaacttgtcaatcagattaattttaagaattacccatcttaatttttagctgatgaattaaaatatatggaggtttgctccatttaggattttagtctctctgcagctttctgtgaaaccttcagtaccaatatgtaattaattttatctgattatttctcccaagcactaaagccaatgtcaacatatgaaatctgtgcaatgtattccactaccatcacgaaatattgcratctcttcacccggtccttgaactttgaggcgacaggacctgtgaaaagagtatttttgctttccaagcctttgtgggaaaatcttatttatggttccc

SEQ ID NO: 839765 - DNA, 556 bp, Homo sapiens
tttgagagagcagttttgaaacagtctttttgtaggatctgcaagtggatatttggaacaatttgaagcctatgttgcaaaggaaatatcttcacataaaagcttgacagaagcattctcagaaactgctatgtgatgtgtgcattcaactcacagaataaaatatttcttttcatagagcagtactgaaacactacttttgcagaatctgcttgtggatatttggagctgtttgaggatttcgttggaaacgagatatcttcaaataacaactagacagaagcattctcagaaactgctttgtgatgtgtgaattcatctcagagagttcaacacttctttagaaagagcagttttgaaacactctttttctagtacctgaaagtgttcatttggagtgctttgaagcctaaggtggaaaaggaaacatcttyacataaaaactagggagaagcattctcagaagcttctttgtgatgtacgcattcaactcacagagttgagctttccttttgagagagcagttttgaaacactctttttgtagaacctgcagg

SEQ ID NO: 839766 - DNA, 655 bp, Homo sapiens
agttcaactcacagtgttgaatctttcttttgatagggcagttttgaaacactctttttgtgtgatctgcaagtgcccatttggagagctttgaggcctatggtggaaaaggaaatatctccacattaaaactagacagaaggaatctcagaaacttatttgtgacatatggattcaactcacagagttgaacattccttttgttagagcagttttgaaacattctttttgtaaaatctgcaagtggatatttggacagctttgtggtctgctttggaaatgggaatatcctaaaataaaaactagacggaagcattctcagaaatgtctttctgatgtgtgcattcaattcacagcgttgaaccttccttttgataaagcagtttggagacacactttttgtagaatctgcaagtggaaatttggagtgctttgagggctattgtggaaaaggaaatatcttcacataaatactagacagaagaattctcagaaacttcttcgggatatttgcattcaactcagagaattgaaccttccttttcatagagcagttttgaaacactctttkcgtagaatctgcaagtggatatttggacagctttgaggccttcgttggaaacgggaatatcttcacataaaaactagacagaag

SEQ ID NO: 839767 - DNA, 583 bp, Homo sapiens
gtggaggactcatcaacatagagatgaccaccaagccaagcagggtagctgaggaagacagggccggaaggtacactgaggctaagtagcttgacttatttcttatgcctcatcctagagggcagatacccgaatacggaagtgtggcattttagtatggatacaaaccaatgtgcaaattatgttatagttctgggatgagggaagtttagtaaatgtgtttacagatgcaatggcaatgagttttgagagctcagaatgggtggtgaaaacctttgggctttggccaggcatggtggctcatgcctgtaatcccagcactttgggaggcccaagcaggtggatcatgtgaggtcaggagttcaagaccagcctgaccaacatggagaaaccccatctctactaaaaatacaaaattagccgggcatggtggcgcatgcctgtaatcccagctactttgggggctgaggcaggagaattgcttgaacctgggaggcagaggttgcagtgagctgagatcatgccattgcactcccrcctgagcaacaagagcaaaactccatctcaaaaacaacaacaatga

SEQ ID NO: 839768 - DNA, 496 bp, Homo sapiens
cagagagttaaaactatttttaaattcagcagtttggaaayactgttttcatagaatctgccaagggatacttcagagagcattgaggcctgtgatgaaataggaaacatcttcagataaaaactagaaggaagctttctgagaaactgcattgtgatatgtgtattcatctcacagaattaaacctttctttggatacagcagctttgaaacacagtatttgtcaactcagcgaatgtacatttgggggcacttggaagccaactgtgaaaaagagaatatcccaggatcaaaactagaaggaagatatctgataaactgctttgtgatatgttcattcatttcacagagttaaatcatccttttccttcagcaatttggaaacactgtttttgtagaatctgcaaaggggtatttcagagagcattgtggcctagggtgaaaaaggaaacatcttcagattaaaactagaaagaagttttctgagaaactgcat

SEQ ID NO: 839769 - DNA, 294 bp, Homo sapiens
aagagaatatttcaggattaaaaactagatggaagctatctgataaactgctatatgatgtgtgcattcatctcacagtgttaaacctttcttttcattsagcagtttggaaatcttgtttttgtagaatctgcaaaaggatatttcagataacattgagacatatggtgaaacaggaaatatcttcagataaaaactagaaagaaattttctgagaaactgctttgtgatgtgtgcattcatgtcacagagttgaacctttctttagattcaggaatttggaaacactctttt

SEQ ID NO: 839770 - DNA, 379 bp, Homo sapiens
agagtttaacgtttcttttcatagagcagtttggaaacgctgtctttgtaaagtctgcaagtggatattaggacctctttgaggccttcgttggaaacgggatttcctcctataatgctagacagaagaattcccagtcacttctttgtgttgtgtgcattcaactcagagatttgaaccttcctttagagagagcacatttgaaacactctttttgtgtaatttgctagtgcagatttcaagctcttcgaggamaatggtaggaaaggaaatatctttgtattaaaactagacaaaatcattctcagaaactactttgtgatgtgtgcgttccactcacagactttaacctttcttttaattgagcagtttggaaaca

SEQ ID NO: 839771 - DNA, 379 bp, Homo sapiens
agagtttaacgtttcttttcatagagcagtttggaaacgctgtctttgtaaagtctgcaagtggatattaggacctctttgaggccttcgttggaaacgggatttcctcctataatgctagacagaagaattcccagtcacttctttgtgttgtgtgcattcaactcagagatttgaaccttcctttagagagagcacatttgaaacactctttttgtgtaatttgctagtgcagatttcaagctcttcgaggacaatggtaggaaaggaaatatcttygtattaaaactagacaaaatcattctcagaaactactttgtgatgtgtgcgttccactcacagactttaacctttcttttaattgagcagtttggaaaca

SEQ ID NO: 839772 - DNA, 379 bp, Homo sapiens
agagtttaacgtttcttttcatagagcagtttggaaacgctgtctttgtaaagtctgcaagtggatattaggacctctttgaggccttcgttggaaacgggatttcctcctataatgctagacagaagaattcccagtcacttctttgtgttgtgtgcattcaactcagagatttgaaccttcctttagagagagcacatttgaaacactctttttgtgtaatttgctagtgcagatttcaagctcttcgaggacaatggtaggaaaggaaatatctttgtattaaaactagacaaaatcattctcagaaactactttgtgatgtgtgcrttccactcacagactttaacctttcttttaattgagcagtttggaaaca

SEQ ID NO: 839773 - DNA, 555 bp, Homo sapiens
aatctactttgtgatgtgtgcgtgcaactcacggagattaacctttcttttcatagagaagtttggaaagagtctgtctgtaaggtctgcaagtggatatttagatttctgtgaggccttcgtygcaaacgggatttcttcatatactgcccgacagaagaattctgttactactttctgttgtgtgcattcaactcacagagttgaaccttcctatattcagagcagttttgaaacactctttttgtggaatttgcaagtggagatttcaagggatttgaggccaatcttagaaatggaaatatcttcgaattaaaactacacagaatcattcgcagaaactagtttgtgatgtgtgcgttcaactcacagagtttaacgtttcttttcatagagcagtttggaaacgctgtctttgtaaagtctgcaagtggatattaggacctctttgaggccttcgttggaaacgggatttcctcctataatgctagacagaagaattcccagtcacttctttgtgttgtgtgcattcaactcagagatttgaaccttcct

SEQ ID NO: 839774 - DNA, 555 bp, Homo sapiens
aatctactttgtgatgtgtgcgtgcaactcacggagattaacctttcttttcatagagaagtttggaaagagtctgtctgtaaggtctgcaagtggatatttagatttctgtgaggccttcgttgcaaacgggatttcttcatatactgccygacagaagaattctgttactactttctgttgtgtgcattcaactcacagagttgaaccttcctatattcagagcagttttgaaacactctttttgtggaatttgcaagtggagatttcaagggatttgaggccaatcttagaaatggaaatatcttcgaattaaaactacacagaatcattcgcagaaactagtttgtgatgtgtgcgttcaactcacagagtttaacgtttcttttcatagagcagtttggaaacgctgtctttgtaaagtctgcaagtggatattaggacctctttgaggccttcgttggaaacgggatttcctcctataatgctagacagaagaattcccagtcacttctttgtgttgtgtgcattcaactcagagatttgaaccttcct

SEQ ID NO: 839775 - DNA, 576 bp, Homo sapiens
ttggacacattgttatgtgcttattgaccatttatatgcattctttagtgaagtgactgtataaatattttgcctatttgtatttaactttttgartcgtacttttttgtgtattctgtatacaaatactttttttaggcctgcattgtgaatattttctcacagcctgtggcttgcttagtttcttaactgcatctcttgatgagttttatagttttttttaaataaatagcccgttttcttttagtttgtttcaagtagcagattcctcttgacttgcctgaggaaaattttccaagtgaatagactaaagtaaagatgtctatacaaggcttggagcatccatgcttcctgtacttagaattgttcattgtagttgaaaggctctctctctacctcctgaaaaataaaagagaagcattgttgatggtttttcttgggtctgtgcttcacgttttccatttcattgcatatctgggtctctatcaagagctagtctgactaatggaaagtgctctgggtattgtttgaaaaattcttggttttcacaggacacgactgcttttggaagaattg

SEQ ID NO: 839776 - DNA, 638 bp, Homo sapiens
agaaagacaacggaaagtctccagttctatagaaatctagggccatgggtggtcataaatygttgctccagaatgctacacaggagggcctccggagtaaaaatttttggttaaaagaaagggtaagttctttatactgagtttgcacaccactttcacttagataatatgttataggtgaacgaaataataaattcttaagatatttttgttcacactttacataaatttgacagaaatgccaactatctacatcacagaatgtttttattattaattatatttatggcagcttgtgaggagattgatatatatcatgggagcaaccttctgttagacctcagaaaagcaagtcacttaaccactctgcttctcagttttcctgtctataatctgagagcagtaacttccatgtctactttgaagaggaaagagtaggaatagagtcagaaggtgctcatgtattgcaatttgtcattttgctttgaacactttaaaactaagaaagccaatcatatgacagaagtaacaacaaaacatttctgaacattccttttggaagggtttcagattttgttaaatttatttgttttattaaaaataagtacatatggatcctgtttcctctcagacttgtt

SEQ ID NO: 839777 - DNA, 476 bp, Homo sapiens
caataaatttactgtttccagtgaatagatcagatgcatggcttggagtaatgagaaaccctcttccaggaagtctttcacatcccttycaatctgtgccaagtctctcacccactctaacctcccagtgaactaatgaaagtttcctttagatcactagtatcatcgtaggctgctgtattttcacgtctgtttctaccaccaaattggacgtccttcaacagcaaggattgttccactcatgcttatattttttgcagtgagtacttaaaggatatacattgaatagaattaaactagatccctaggatctaacaagttatagatccagaaacaaacaaaatgcacctgattctgtaaaactgagaccagatcctcaaacatcctggagccccagcaaagaacagccagcccacaggtgagacttggggaaatccctggattctgtacattttactccaagtcttttcacaaat

SEQ ID NO: 839778 - DNA, 624 bp, Homo sapiens
aggcaagagaacaaaccagtgaaggatccactcagtagctgacaattggagaaaagttagggagtttcaagagctgtaccgtgcaaagccaccagggtggggctgcccaaggccatgggagcccgcctcttgtatcggcatgacctggatgtgagacatggagctgaaggagatcatttcagagctttaagatttgacaacctcgctggatttcagacttgcatgggacctgcagcccctttgttttggccaatgtctctcattgggaacaggtgtatttacccaatgcccgtacccccactatatcttggaaggaaataacttgttttttgttttactggctcataagtagaagggacttgccttgtcttagatgagactttggacttggactattgggttaatgttgaaatgaataaaggctttgggggactgttggaaaggcaagatcatgaggacatgagaggaagggcaggggtggaataatacagtttagctgtgtccccacccaaaatctcatcytgaattataattcccataatctgcataatccccatgtgtcaagggagagaccaggtggagataattgaatcatgggggcagcttcccccatgctgttctcgt

SEQ ID NO: 839779 - DNA, 461 bp, Homo sapiens
aactgcaaatttcaggtaattctagaatttttacaggagcattatatctaataaattgctcatatcagagataaataaaactatttgtatcaacttatggaaattggaaatgaaagaattctgaaaattttggaataaccataattaaagagttcagtaatactgaatacacaataggcctagaggaaaagaaaacaaaactgttgaccaaaagcctgtagcatgttgggttactttcctcaatatacattaaatgtctgggagattttgcaatttattaaaagtttcacatagctttaggtcatcctgggaggcataattagtcagtttcttaatgtgatcaggccacaaaaatctaccaggaagccagaaatgttatagtaatctcttcccattaatacttaaaaaattattcwaatcaaatttttacagaaattttgatctagaagtgtatgtcactt

SEQ ID NO: 839780 - DNA, 664 bp, Homo sapiens
ccccgtcggcgcggacgcttgtcgagaatgcagattcctgggtactgccagatacggttggtgatcttgtagggctggagtggaagccatgaatctgcattttcatcatttctggccctctgcccgggctggggtgattcacggggattcgtagtggccccaaaggagcacgcagaacctcggctgctgtgcatttatcacctcttttgttcccggaggccgcaccccaggtccagtttacacagctgccaactccttttcttggttcccactggaatctaggaagaaaactcgccctttacttctccgccccacacccgacgacggagtgtctagaggtctggtcggccttggctgtgcggagggctaggcctgacgagcgggcgctgatgcggcgcagaccccgccggacctcttggtcggcccggggtaggctggggagccgcgggaacaggactggatagggaaagcggcaccgcagcgtccacgggcaagctgaaagtccgcttgatgtctttgcatcacagtggcgccctccccgcaggaacgcccggccgcctgcaccgaacgtttgcctgcagggaacggccaacccgccctgaaatactctttttgtgggctgcagctttcgggtattttaakccatggttctgtgcccttcctt

SEQ ID NO: 839781 - DNA, 546 bp, Homo sapiens
ttttcaagagtggaagaaatttacttggtttttctcaggttctggatgctggttccctcacggttaaggcaccccattgtctcctgcctctcttatgtttctccatatccactgcaaatttgctgactccagcagctggtgctcttaccctggcgtaatgtcagcaccagtccttctgtctgcaaatagggcatatggaggagacaacccatgggacaagggacaaggagcacgtaagcacaagtaggaggtgggagctactatggactttcatatccagtgtgaaggtaaaatgaaggtaaaatgaagacatttccaagcaagcaaaaaatggagacttcactatcagaagacccacagtaatgaaaatactaagaggattcctttaggcagaagaaaagtgattgcagatggagctcagagatgcagaagaatttaagaggacaggaagagcaaatatgtgatgaaaactaaatgaatattgactgtataaagtaatyaaaatatatcataagattttaattttaagaccgctcaccactggtt

SEQ ID NO: 839782 - DNA, 557 bp, Homo sapiens
gccatctcgggagaggctgcaaggggcaatcccagggaactaaaaaaacaaatcccagaggcatccccagcagaggagccagctccctccagccctgctcctccaggtccaccccatccyccctatccagcttcagtctctcacttgccccctcctagaaattctcaccctagacaagccccagtctcattctttcccctccaacagatgcctggtgaatttaccccataaggtccaggtactcttctctctacagaacttgaagcaaattgagggggatcttggcaagttttcagatgaccctgagagatatatagaggcttttcagaacttaacccaagtatctgagctctcctaggaagacgtcatgttactttgaaccaaaccctgactaacactgagaagcaggccactctgcaagtgacagagagatctggggatgaggtttgtatcatacgtagcacccaggaaagggggtgaatattatccaactggaagagaaggagtatcaatgaatctccctaaatgggatcccaatgacaagatgggagaatgca

SEQ ID NO: 839783 - DNA, 466 bp, Homo sapiens
cctctgggaggaatctgacttctgttttccccaaaaacaatgtcctctgtcagcaggaagtagctaagatwggtcattgtccatattctaatggcaattagatgggcctcttagaggggggaaatgatacagatacaggcaaggaaatactgggtagaagagggcagttccccaacaaaggcccaccctgaagcctggaaatccatggccctaaatgggagcaagcattcccattttcatgcccaaatgttgccttttccaagaccactctggcctgccacacccctatcctgtgcccatataaaccccaagctctacaagcagaggaacagaagagcagcagagtagcaaaatggcatggcagaggagagaagagaaggagcatctgaatgtcaggaggagttcggctgaggacggttggaaagcagataagccggggatggctgaactccaggggaagatcatc

SEQ ID NO: 839784 - DNA, 466 bp, Homo sapiens
cctctgggaggaatctgacttctgttttccccaaaaacaatgtcctctgtcagcaggaagtagctaagattggtcattgtccatattctaatggcaattagatgggcctcttagagggkggaaatgatacagatacaggcaaggaaatactgggtagaagagggcagttccccaacaaaggcccaccctgaagcctggaaatccatggccctaaatgggagcaagcattcccattttcatgcccaaatgttgccttttccaagaccactctggcctgccacacccctatcctgtgcccatataaaccccaagctctacaagcagaggaacagaagagcagcagagtagcaaaatggcatggcagaggagagaagagaaggagcatctgaatgtcaggaggagttcggctgaggacggttggaaagcagataagccggggatggctgaactccaggggaagatcatc

SEQ ID NO: 839785 - DNA, 584 bp, Homo sapiens
aaaaaagtgagaaactgtttattagatgaattgctctaaatccagaacacaagaataaatgcttcttwaaaaaataattcaggaaggtagttgaggcaagaaagttggtggctggcaacttgtgtcccttcaccttgacaagttcaattcttcctggtcttgatccgtgtgtccagcttcagcattctcacgcaaacctgaacttgcttatcactggggttggcacagaaacgtcgccccttcttggtgaggaagctagggaacaagggggagaaaagttacaaactgaggtgtgtccagcacatggggacagggggccccattctccctgcccctcagatttcccagtcaatatagccagtttttttttcttttttttttcattctctgctgatggcagctcagggccattgtgctcttgagaccccctcagcctgtgggactccctagtgactcatgggagcatccttgggcagacttgtgcctgctttcttcttccttccccacccttttccccctgggagtgtctcatccccgatgccctgcaggatcttcctaaggacacagctgccccatacctggca

SEQ ID NO: 839786 - DNA, 456 bp, Homo sapiens
acaccaaatatgtggtgtttttttttttcccatgccaaccatcaaattctccttctctccagaaaccaactgggtatccaataattcaattgaattcaattctgacactagttacctggtgttagtatcagatggcacagttgaaagggcccagtcccacaagactgcccacaagacttcagatgccaatcacaagctgagcctcccatacttctgtcttaatggctataaactaggggtttccacaaccctctcctcaggttcaataatttgctagaatggcttgtaaaactcaggaaatcattatactgacatttagcaktttatttataaatgatattataaaggctacagatgaacaggcagaggacaaggtgtgaaacgggagatgtgcagagctccagtgccctccctgggcaccccaccctctcggtgtaactgtagcagatccattgt

SEQ ID NO: 839787 - DNA, 592 bp, Homo sapiens
aggaagacagtgaatgcctaacatagactaaagattgggggccttgagtagtagggaatacaagacataaaacccagaagtgccagccattgatatcccagtaatttccagctttacatcccaaattcttcccatccctgcctagtagcctattccacaacagtcatggcaaaatctactgctacagccaaggctttaaggtcagcattctttaactcctagtttagcagggaagctcaaaatataaatttttcttgaaactaaagtactctattggaccagccagaggggatgagcttaagatggggaagtagatttatgtgccattcataaggagtatagatatttgaatttccaaaaaatataaagaggcttagacttaagaaataggaacagtggtgtgtttcatttaaaaaaaaaaatccctgccactcttggttaaacaggtgggttttaaagccagagctcctgggatcaaatgccagctccaccatttattagcaagctcatcactcttcgcttgtttcctcmgtaagaagtagataataacagtatgtaaagcttaggtttttgaagactgtatgtaagatat

SEQ ID NO: 839788 - DNA, 620 bp, Homo sapiens
aatggatgtaaaaggaacaccaggatgcaaaggagttcaaggcgttagtaagggtacagttgaaacctgtgattcatttcaaagtacacattctatgcagatttttcaagaaaaaaacatgcagcaacttaagaacagagactcttcccttccggggcctaggattactccttatactcagaagatattcagatatttttgaatgagtgaattaattaacaaacaaaaatctgactttgctaaacatttctgaatgtattaggtttacttttgtgatgaatatgttgattattttagagaattagaattctgtaccaagagccacattcctataatttacttatactaaaatgactagaccaatgccaaattcaatctggaacacaaaagtttattagaataaaaatacacatacagtatcaacactaaaattatttcacatcgcatttaggttttacctccattagttttttttaatgcttataaagtctatgctctaaataatttgyacatttgtaaacaaatcttagatgaccaaagatgcagtgtatctatcagatattgaatatcaaaacttaaggatgggaactgatagcgaaatccaattacactaaacattc

SEQ ID NO: 839789 - DNA, 632 bp, Homo sapiens
gaggtgaggcagagtaggaggttgggctgatcagtgtagaatgatcttattaagcttggaaggttttccctgctcttggggtggaacattttcccaaagaggaattttccagtttcctrtgggttgaagagggtaagctggttgcagaattctcagaaccgagttggagaagggagctaggttgtcactgtctaatattggctttcgtttaagtcccattttctgtaaagtatccctaccctcaactatggcttttttttcagtcatttttcccctttcagagatacctaccacctctaatacccaagcttttctggagttctgggaattggcttgctctgagtttttttcattaatagtttaatgggttatcactctgctaggtcagtttccacctttccatcggctttacaactcttgaagtgtagtcactgtcatcttcttacccagtttttttgtccttgttggtttatgcattttgaatatattgacattttagaaggctttggctaggcatcagcgacaagtgaatgtgctcattcgaccacatttaaccaggagtctgcattatattcctaagatcccctccaacttctaattctgtgattttaaatacattttaattaaggcaa

SEQ ID NO: 839790 - DNA, 594 bp, Homo sapiens
ctgctatgtctttaatgcctctccaacactggctcattgcccattcaacagagtgagggcttyaagctccaagccttaagcaagtgtgataaccagatgaagcttagtaactttttggttttaactgtgcttgttttaatgattactttctatctgtagggatcatggtttttccaattacgatagtgatgattacataaaaatgaagtgttataagtaagtattagcccaggtggtacctggttcagacagaaaccataaagatggttttcagctttgatgaagtttgggcggcactgattatcaactcaatccacgctacgtgccaccatggccccactgcagagctcaggggagaagggcccagggaagccaagggctttgcccacggtcatgggagatgggcctggcatgatcccggcttcaggatgcctgtggccatggctccccagccacagcacagaggagacccctgagaacggcaccagcatctcacagctccgagcaagagcctgtgggagcaaagcaccaccagacaggcctgggaagggagggctgctgcactagaaatggaaaaggggggcaaagggagaa

SEQ ID NO: 839791 - DNA, 606 bp, Homo sapiens
actgctctgactagagctgctagtgctagttttcttttctgtgatgtcttcgtttggttttgttatcagaataatactggcctcattgaatcagttgggaaggtttccccttgcttctttgttttggaagagtttataaggaatactattaattatcacttttttttttacttatttttttgagacagagttttgctctgtcacccagggtggagtgtggtggtgcgatcctggctcattgcaacctctgcctcctgggttcaagtgattctcctgtctcagcttcctgagctgctgggattacagcattgaatcccaggctggtcttgaactcctgacctcaagtgatctgcccaccttggcctcccaaaatgctgggattacaggcatgagccaccacacctggcctaattctaacttaaatccttggtagagttcacgagtaaagccatctgggcctagtaattcaatttctttacttgttataggtctattcaaatttatatttcttcttggktcagttttggtagtttgtgtctttgtggaaattcttatatttcatctaaagtattcaatttgttgacaggcagttgttcataatattcc

SEQ ID NO: 839792 - DNA, 509 bp, Homo sapiens
ggtttatcttaaaaaaaaaaaaaaaaacaaaaacatatatctgtcacctttgagcagtaggaattggcttgctgcccatgggcacctggctggagtaggcagtgtaggctgagggctgtaraaggccgggtttcattggtttgtacccaggtttccagaatagaaaaatgccacaacctcctgagaagcccagttcatggtctctcacctaagttgtggttcctcactgatgacttttctggccccaccacagatgataccacctttataagcacaaatgttgtctgtggatttaatgtaaatgtgaaaaacaaaattatttcaaaaactttacctgtgtttcttcctgcagctagaaagtttgggtcagagtgaactggcttcaagacttaccttgaattgtcaaaattcttatgtggaacctcataaaattcgggacatacctgtaactattatggatgtaagcttccttttaagtaaaatagctgctttactttttaaaatgtgta

SEQ ID NO: 839793 - DNA, 630 bp, Homo sapiens
acaggcacgtaccaccatgcccagccaattaatttttttatagagacaggtctcattatattgcccaggctggtcttgaactcctgggctcaagcgatcctcccaccttggtccctcccaaagtgttgagattacaggcatgagccaccattcccagcctctatgggagatttaaacagtccattcttaaacaccagtccaggataaggtcttcaccagtcatagcaaatcagaaaacagggacaacgtatttttcatgaagctacatttgtttttttgtctttgtttgtttgtttttgagacagggtttcgctctgtcaccaaggctggagtgcagtggtgcgatcacagctcactgtagcctctacctcctgggctcaagtgatcctcccacctcagcctcctgagtagctgggaccacaggagtgtgcctccacgcctggcttatttttacgaaaatgtctgtagagatgggggtccccctattttgcccagtctggtttcaaactcctgggctcaagtgattcwcatctcagagtgttgggattacaggtgtgaaccaccacacccagttatgaagctttatttgtcaagtatatattctaagattggttccttacaaattttttc

SEQ ID NO: 839794 - DNA, 645 bp, Homo sapiens
agtaaacttttgtctttacgcaaccagtctatttttcttctcaatcagttcttgttaatattttcagtggtcaattgattaagaaaattgcccatgasgactcttgctaggaacaatgagggctactaaaaaaaataaaactactcggtaacctcgagtagcatatgacaagtatggttgaaacaacccactaaagaacatgaatggcagcatgacgttctaaaaatgaatcacaactaaagaaataagaagcagagtagcaaatgtagtgtagctcacttctgctgtgtgatgattatgaaaggcttttctattttggagaaagcatggatgaaggggaggcaaagggcattattgcaggtgtcatgtgaagactgagtaaagccgagcatgagtcttactgagagtagtggagaaaggaagaataaagaagaaagaggccgggcacggtggctctacgtctgtaatcccagcactttgggaggctgaggcggctggatcacaaggtcaggagctcaagaccagcctggccaagatggtgaaaccctgtgtctactaaaaatacaaaaaaaaaaaagaaaaaatagccaggcatggtgacaggcgcctgtaatcccagctactcaggagtgtgaggcagaaagt

SEQ ID NO: 839795 - DNA, 634 bp, Homo sapiens
tcatccatttccctcaatccttccgtcttctacagctgtggaaaaccgctaatctactttactccgtatacatttgcctattccgaacatttcatacagatggatatattccataygtggtcctttgtaagtggtttcattcacttagcataattttttcaaggttcatcatgttggagtattcatcagtacttatttctttttgtcaataaataatattcaattgtgtgtttccaccattttctttatccattcattagttgatagagatctgtgctgtatccatttttttctattatgaataatgctgctatgaaaatgaacgtatacatttttaagtatttattgttgttatttgcctggggagtggaattgctgggtcaaatgataacttcatggttattattttatgtcactgccagacttttttccaaagtgactactagtttacaatcttttattacatatatggttgtagttgttataactttctgatgaccctcttttcattctacaatatgttttatctttaacattttataattttttaatttaaaatttatttaaaaatttaaatcagttttgcctgatgttagcatagccactccagtataattttcttcctttgagacag

SEQ ID NO: 839796 - DNA, 511 bp, Homo sapiens
actgctttactttcagtctgtatgtgcctttacagataagatgagtttgttgtagacagcttatggttaagtcatgttttttaacccatcttaccaatgtataccttttaaaagcagtgtttaattcttttatgttcaaggttagtattgataggtgaggttttgttcctgtcatattattaattgttgtctagttattttatacattctcttttctctgtttttctcattgttcatttttggttttgtggaattctgtagtggtgtcattgtgttcctttcacttccccttttgtattattgcattaacaatgagttttatgtttgtgtgttttcatgatggtgaataccattctttcactttcaagtttaggaatcctttgatcatttcttctatttccaatctagtcgtggcaaattctatcagsatttgcttatctggaaaagagtatttctcctaaagcttaattcttgctgtatacagaattcttggctactagtttgctttttt

SEQ ID NO: 839797 - DNA, 470 bp, Homo sapiens
tggatcccaaaaaagagggaatcagcccatctcccatggragtcttatttctcagtgggggtagggatatttctataccttttaggtgaccaagagcatgcttctctaatccaaacatgcaaagagttgagtatctctcccataactgccattagacatccctaaaattacatttcctacttagttattacacatcaatgttctctcataatgcaaagtaatacctgatactcccaaaagtaaaaaaaagtcaggtaacagaatgtaaaatcaaactgagccttagattttgagagacctctatctgctttcaattcccagggttccatgaggaaaacagaggttttttttctcagaatggaaactgttagcaattatctcaagctctctcatgtgagcatcaagaacagcaagaaggcaaaatgtagaaataattaagtcaactgagaagaaaaaagctatttttccag

SEQ ID NO: 839798 - DNA, 570 bp, Homo sapiens
ggtcagcacaattataggaaagaagggatatgaacaggtttccataaaggggaaaggggagccgtacctaagctgactgagatgggctgagccattgtggtcaagaacaaacagcaatcaatatttcctgggcaagaaaagcagcagggagaagagggttcattcaatatttaaagacagtgataagcaagggacaactttgatgtcatcaggccagaacagacgatgactatgaagacaagaggtaagcccatacatatctggcagttaagaaagacagactggcactgatgtaagatcaaaatgaggaaacaggccaggaacagtggctcactcccagcactttgggaggtggaggcagcccaattgcttgagctcaagaatttgagaacagcctggaaaatatggcaaaaccctgtctctactaaaaatacaaaaattakctgggcatggtggcatgtgcctgtagttccagttactggggaggctgaggcaggagaatcgcttgaacccatgaggcggaggttgcagtgagctgagatcgcatgccactgcactccaacctggtga

SEQ ID NO: 839799 - DNA, 673 bp, Homo sapiens
tggtcagaaaagacaccagatactatttcaacattgttaaatgttttgagactcattttgtggcttaaaatattgtctacactgaagaatgttttacatcctcttaagaagaatgtgtattctgaagctgttggctgaaatgttccctagatatctattaggtcagtttggtctgtagtgcaaatttagtctgatttttctttcttgatttgtagataatttctagattgtagatatttctagataatctgtaccatggtgaaagtgtggtgttgaactcccaactattactgcactggggtctgtctctctatttagctctaataatatttgctttagatatttgagtgcttcagcactgggtgtatatatatttacaattgttatgtccccttgctgaattgacccctctatcattatatagtgaccttctttggttttttttacaggttttgtcttaaaatctattttatctgatataagtatagctactcctgctcttttttgttttccatttgtatgaactatctttttccatcccttaattttcagtctatatgtgtctttataagcaaagtgagtttcttatagaaagcatatctygtaaaacaagtcagatcttgtttttacagtaggcatagtgatcatgtcctcagataaaaacaggctactg

SEQ ID NO: 839800 - DNA, 673 bp, Homo sapiens
tggtcagaaaagacaccagatactatttcaacattgttaaatgttttgagactcattttgtggcttaaaatattgtctacactgaagaatgttttacatcctcttaagaagaatgtgtattctgaagctgttggctgaaatgttccctagatatctattaggtcagtttggtctgtagtgcaaatttagtctgatttttctttcttgatttgtagataatttctagattgtagatatttctagataatctgtaccatggtgaaagtgtggtgttgaactcccaactattactgcactggggtctgtctctctatttagctctaataatatttgctttagatatttgagtgcttcagcactgggtgtatatatatttacaattgttatgtccccttgctgaattgacccctctatcattatatagtgaccttctttggttttttttacaggttttgtcttaaaatctattttatctgatataagtatagctactcctgctcttttttgttttccatttgtatgaactatctttttccatcccttaattttcagtctatatgtgtctttataagcaaagtgagtttcttatagaaagcatatctcgtaaaacaagtcagatcttgtttttacagtrggcatagtgatcatgtcctcagataaaaacaggctactg

SEQ ID NO: 839801 - DNA, 580 bp, Homo sapiens
ctgaagacttaaaaaaaatgctactgaacatttaatagtcaactgattaccagttgaagagamcatgtgtctcttttagctctcttttagtaatatgtcccatttaagacaatatagaatagtgtattaggccgtttttcaggactacctgaggctggataatttataaagaaaagaggtttaattggctcacagttcggcagacagtacaagaagtgtggcgctggcatctgcttctggtgagggctgcaggaagctataatcacggcggaaggtgaagggggagtagacatctcatatggtgagagcagatgcaagagagagagagcaacagaaaggggccaggctctttaaacaaccagctgttgcctgaattcactaatcaccaaggggatagcactaccccattcatgaaggatccgccccatgggccaatcacctcctaccaggccccgcctccaacaatggggattacatttcaacatgagatttggagggaagaaacactcaaactatatcaaacagggtccagcttatcgtatacaacaattaataaaacactgcactgggaaaattattc

SEQ ID NO: 839802 - DNA, 603 bp, Homo sapiens
tgcacttcccatcccatgctcttacttctgtagcatcttagctgggcggggttctcaacctgggggcataccgtgcaggattggaatgcttgttagtttgtcttactgcatcgttacagtttacttctttctttttgagacaagagtctcgctctcgcccaggcgggagtgcagtggcgcgatctcggctcactgcaagctctgcctcctgggttcacgccattctcctgcctcagcctcccgagtagctgggactacacgcgcccgccaccccgcccggctaattttcttttgtattttttagtagagacggggtttcaccgtgttagccaggatggtctcgatctcctgactttgtgatccaccggcctcggcctcccaaagtgctgggattacaggtgtgagccaccgcgcccggccatcgttacagttttctaatgaacaggactattaggtaaaggagccagtgrattctctgattttcaaatattgtctttcttgcccccattgtgtaatagaaatttcaattcttgtaatcagaataaattcctcagtcagtacagtgacttttctctccacctatcagacacaaccagttgagaa

SEQ ID NO: 839803 - DNA, 627 bp, Homo sapiens
gcataaataaaatgagtcttacacatttgaaaattgttttggaacttgtgaattaatgaataccacaaatgtttatgatgcgactgatccatgccaagtggcaggacacacactggtgcttctaggactgttaacaacagcctgggtttcctgaggctgcaagaccagcaagaagggggtatacttatcaatgagttcagaaaatattacattaaaaaaagcaaaaccagcctgtggtaaactcatcatagctattaccaaatgaagaaagaaaagaaaatctaaaccttacttaatccagatgctggcttttttaaaataaagaagtgtgtcattctaatttgaagaccagttaatctgcttattaaagaaaagctagggtaatgaattagattaaagtctcaaacagtgcaactcctaggcacctgaagaaatcaacaaaaatggggaaaagagtctttggaatggcttttcattctgactattcccatgtaaaaactgaaaaacccagaaatcagggttttggtagcaaaacaaatgaagatataactcctctatattttccattagaytctttttctccccaaagttcaaagttaccactgcatggaatattacttattgggg

SEQ ID NO: 839804 - DNA, 484 bp, Homo sapiens
tataagttgtaaatgatacataatatattaaatatataattatatattagaattaaakattataaatgtataattctgctgttataaaaagtcagttatagttataaatatatttgtaatgtatatatttatataatatatttatatattaaaatacttataatgtatacatatttatataaaattaaatatataaatataaacataaataaatatattttataatataacataaatatatgtaaatatataatatagaaatacattaattaattaaatatatttaataatattaaatatatgtaaatatatttaaatgtattatgtaaatatatttatataattatatattataacaacataattctgctgttgtaaaaatatcagttatagacatttcacaaacgaatagacaagactgtgttttcataaaacttatttatacaaccaggtggcaggatgtggcccaggggccatagtttgc

SEQ ID NO: 839805 - DNA, 484 bp, Homo sapiens
tataagttgtaaatgatacataatatattaaatatataattatatattagaattaaatattataaatgtataattctgctgttataaaaagtcagttatagttataaatatatttgtaatgtatatatttatataatatatttatatattaaaatacttataatgtatacatatttatataaaattaaatatataaatataaacataaataaatatattttataatataacataaatatatgtaaatatataatatagaaatacattaattaattaaatatatttaataatattaaatatatgtaaatatatttaaatgtattatgtaaatatatttatataattatatattataacaayataattctgctgttgtaaaaatatcagttatagacatttcacaaacgaatagacaagactgtgttttcataaaacttatttatacaaccaggtggcaggatgtggcccaggggccatagtttgc

SEQ ID NO: 839806 - DNA, 517 bp, Homo sapiens
tgggcaatagagcaagactctgtcaaagaaaataaaagaagaagaaggatttgccagatgcagtggctcacacctgaaatcccagcactttgggagactaaggtgggcagatcacttgaggtcaggagttcaagaccagcctggccaacgtggcaaaaccttgtctctaccaagaatacaaaaatggcccagaatggtgacagctgcctgtaatcccagctactcgggaggctgagggaggagactcgcttgaacccagatggtgggaggcagtgagctaagaccacgccacggcactccagccttgacgacaaattgagactccgtctcaaaaaaaaaaaaaataaaataaaaataaaaataaactctcccccaccaaagaagggtgaggggattttcagtttctggaaaccttatgtgcattcaggcaggaaggctggctgaggggtctagggggcaacaacaggagtggcaraggcgggcttgctgggatcctcgcacaccccactgaggtgct

SEQ ID NO: 839807 - DNA, 469 bp, Homo sapiens
ccaaagaacgcatgcaaaggaaggaaattcaagtgtttccttcctgcctgctgggtggccacccacaccctctctcttctcttgggccacttgtccctaacttcttttcttcatgaagatccttggcagctccatggaggtgaaaagggctatgaatgctcttcttcctcataactctctaggcttcctggtgaacatggagaagaaaccattttcttcattcatcagtggctcagggatctgtgaaccttcccacctgccaccctcatgcctggagtgatatgtgcctggtcattagggagcactcttttcccagctgccaccctcatttctggagtgatatgtgcctggtcattagggagcactctyttcccagctgccaccctcatttctggagtgatatgtgcctggtcattagggagcactctcttcccacctgccgccttcacgcctggagtgatgttgcctg

SEQ ID NO: 839808 - DNA, 469 bp, Homo sapiens
ccaaagaacgcatgcaaaggaaggaaattcaagtgtttccttcctgcctgctgggtggccacccacaccctctctcttctcttgggccacttgtccctaacttcttttcttcatgaagatccttggcagctccatggaggtgaaaagggctatgaatgctcttcttcctcataactctctaggcttcctggtgaacatggagaagaaaccattttcttcattcatcagtggctcagggatctgtgaaccttcccacctgccaccctcatgcctggagtgatatgtgcctggtcattagggagcactcttttcccagctgccaccctcatttctggagtgatatgtgcctggtcattagggagcactcttttcccasctgccaccctcatttctggagtgatatgtgcctggtcattagggagcactctcttcccacctgccgccttcacgcctggagtgatgttgcctg

SEQ ID NO: 839809 - DNA, 469 bp, Homo sapiens
ccaaagaacgcatgcaaaggaaggaaattcaagtgtttccttcctgcctgctgggtggccacccacaccctctctcttctcttgggccacttgtccctaacttcttttcttcatgaagatccttggcagctccatggaggtgaaaagggctatgaatgctcttcttcctcataactctctaggcttcctggtgaacatggagaagaaaccattttcttcattcatcagtggctcagggatctgtgaaccttcccacctgccaccctcatgcctggagtgatatgtgcctggtcattagggagcactcttttcccagctgccaccctcatttctggagtgatatgtgcctggtcattagggagcactcttttcccagctgccrccctcatttctggagtgatatgtgcctggtcattagggagcactctcttcccacctgccgccttcacgcctggagtgatgttgcctg

SEQ ID NO: 839810 - DNA, 469 bp, Homo sapiens
ccaaagaacgcatgcaaaggaaggaaattcaagtgtttccttcctgcctgctgggtggccacccacaccctctctcttctcttgggccacttgtccctaacttcttttcttcatgaagatccttggcagctccatggaggtgaaaagggctatgaatgctcttcttcctcataactctctaggcttcctggtgaacatggagaagaaaccattttcttcattcatcagtggctcagggatctgtgaaccttcccacctgccaccctcatgcctggagtgatatgtgcctggtcattagggagcactcttttcccagctgccaccctcatttctggagtgatatgtgcctggtcattagggagcactcttttcccagctgccaccctcatttctggagtgatatgtgcctggtcattagggagcactctyttcccacctgccgccttcacgcctggagtgatgttgcctg

SEQ ID NO: 839811 - DNA, 620 bp, Homo sapiens
ctgcagaagggacaacacagccggaagtccaaggagagcgcatgcacccatgccttggggaggctgccatacctccagcatgccagctgccatgacaccttctggtaaggacggacagtcacagggctcacacayggtggccaggctcggcattcccttggcttttcttgccactgagggcactgggcggagcagccctgctgtggtctgatgtggaaggcgagtggattctctgtggccatgtccactttggtcagagagtgctggggaatgaagaggggggagtccagccttctctggagaggtcccttgtggactgttgtccatgacctcctcctgtgtcacccgaactctcacctcatggtccaggaaggctcctgctttgcaccttcaactcccatctccctccatcacatcccagcggtaccaagaagttaccactggaattttctttggaactgaaaatttctgtgggcaaaagtccagcagcttcggttcagaacatgtataaatactttttccttcttcacctgcctcatggatattttatgcttggatcatgtccggtcagtggggggagaatcgagttttactaggacttccgatgggtgaatactgga

SEQ ID NO: 839812 - DNA, 621 bp, Homo sapiens
ggaccctcctgtgatgtgggggtctgtgctgatatctggatttttttttaacatttattgtcaggcttcatacaggggggactggtttgcagagccctgaatttaggctttgacaggtaagaatctctgaaatgaacaagactagtttggttagcatttattagaaggtcagtttgtaggtccttaattgtctcctgtttatagaactggataatatctgtgtgtgtatgtgtgtgtttcgtgtttaattgtgatttgctgctcttgacaggttttgtgaaactgacaacagctctttctcagcctgtttttctctagtggccaaaatgttcactgttaatttattctgtttactcttcattcattcaacaaatatttattcagtcctactatgtgccaagtactctctagcctataaagatgtcaagacatgtaccaactcttccaataaatatttctaagttgtaaaaatattaagtgatataaaaataagaaaggttctattaagaacagattgctttttttaaatatgtaagtttattttggatgcaatatgagactgaattccaatgcaaagttgttttaagagaatgmgaaaatctcaccattcactgacttagg

SEQ ID NO: 839813 - DNA, 601 bp, Homo sapiens
ttgagacagtgagttaagaaagagcggtcacattaggagaacccagaaaaggatgtctcagaagcccagggaggacagtgatggagtaaggaaaggaaatgatggagtagttaatattttacgacrtaaatgccccaataaaattcaaattcatctctataaaggtaattgataaccgtaccacagtttcagtgggattaagaggtgtgcatgactggagaggaaacaaagatgatgtttgctagccacttctctagaagcttgactacaaaagccttccttaacaaatagatggagttagaggggtgcagggtcaagaaatgaatatggtcataagatgaagaaagtggagaaattaaaagattcaggacagagaaaaaaattgatagagaaaggcacaacggagactgtaaagacaggagaattgcatgagaaaagataaaattacttcattttccaaggtggaagtgaagtttaggtagagttacagatttgctattgagacagaaagttaacgaaattgaaacttgattaattcggcattgtgggccctactattcttgtcctaaagtcttaaaagtgagtagagagagaacaaaaa

SEQ ID NO: 839814 - DNA, 601 bp, Homo sapiens
ttgagacagtgagttaagaaagagcggtcacattaggagaacccagaaaaggatgtctcagaagcccagggaggacagtgatggagtaaggaaaggaaatgatggagtagttaatattttacgacataaatgccccaataaaattcaaattcatctctataaaggtaattgataaccgtaccacagtttcagtgggattaagaggtgtgcatgactggagaggaaacaaagatgatgtttgctagccacttctctagaagcttgactacaaaagccttccttaacaaatagatggagttagaggggtgcagggtcaagaaatgaatatggtcataagatgaagaaagtggagaaattaaaagattcaggacagagaaaaaaattgatagagaaaggcacaacggagactgtaaagacaggagaattgcatgagaaaagataaaattacttcattttccaaggtggaagtgaagtttaggtagagttacagatttgctattgagacagaaagttaacgaaattsaaacttgattaattcggcattgtgggccctactattcttgtcctaaagtcttaaaagtgagtagagagagaacaaaaa

SEQ ID NO: 839815 - DNA, 601 bp, Homo sapiens
ttgagacagtgagttaagaaagagcggtcacattaggagaacccagaaaaggatgtctcagaagcccagggaggacagtgatggagtaaggaaaggaaatgatggagtagttaatattttacgacataaatgccccaataaaattcaaattcatctctataaaggtaattgataaccgtaccacagtttcagtgggattaagaggtgtgcatgactggagaggaaacaaagatgatgtttgctagccacttctctagaagcttgactacaaaagccttccttaacaaatagatggagttagaggggtgcagggtcaagaaatgaatatggtcataagatgaagaaagtggagaaattaaaagattcaggacagagaaaaaaattgatagagaaaggcacaacggagactgtaaagacaggagaattgcatgagaaaagataaaattacttcattttccaaggtggaagtgaagtttaggtagagttacagatttgctattgagacagaaagttaacgaaattgraacttgattaattcggcattgtgggccctactattcttgtcctaaagtcttaaaagtgagtagagagagaacaaaaa

SEQ ID NO: 839816 - DNA, 629 bp, Homo sapiens
atctctataaaggtaattgataaccgtaccacagtttcagtgggattaagaggtgtgcatgactggagaggaaacaaagatgatgtttgctagccacttctctagaagcttgactacaaaagccttccttaacaaatagatggagttagaggggtgcagggtcaagaaatgaatatggtcataagatgaagaaagtggagaaattaaaagattcaggacagagaaaaaaattgatagagaaaggcacaacggagactgtaaagacaggagaattgcatgagaaaagataaaattacttcattttccaaggtggaagtgaagtttaggtagagttacagatttgctattgagacagaaagttaacgaaattgaaacttgattaattcggcattgtgggccctactattcttgtcctaaagtcttaaaagtgagtagagagagaacaaaaaaacttctagatcatctgggagcttttcttccagcaactctcataccatagcaaatacagtttgaattactcaaggtagacacagattgtacaaggctccrggtaagtctcccaggctccctatagctttatttttcactaatcattattattaatgtttatcatagctggtacctattat

SEQ ID NO: 839817 - DNA, 593 bp, Homo sapiens
taggacacaggcagggtttttttttttttttggtgcctcccccttcactgcccacgttccctcccacctctccctactcccaaagtcagaaatcttcttcccttggaagcagcagttccctcctattcccccctcccacctaccacttcttggtagcctatgaagatgagattggaataaaaggtagctacagggttcatgtaaggtgacaaatctggcacatgctaaacacttagcattatacagccgccccttaagagtgctccaaatccatcagtcatcatggaaaaattagaagctttgctggattcctgcctctccaaacagatcttctgaactccttaatggacgctataattcagcacttgagaatagagcctcagaccagcaggactgtctttggaacacactgtcaggcaacttgaaacaggcagagaggagcaagtcaaaacaatcagcaatttcattaagaggataagattaattctsaatgaggcccaactctgactcacattgtcaattattatatatgatctctatgagcaggccattttcccaattcactaaaacatctgtgcatttcaatgggctaa

SEQ ID NO: 839818 - DNA, 476 bp, Homo sapiens
aaaacaccatgaacaataaagacaaagataacaaattgggaaaaaaatatgtaacacacatgtattagctttttattgctgtcctaacaactaccacaaacttagcggcttacaacaacacaaatttatacacttctgtgagttggaagtccaaagagtttcacactgggctaaaatcaaggtactggcagtgctgcgttcctttcaagaagctctaaaagagaaaacagttttcccttgccttttccagttcctagagcccatccacattccttggctcatggctccctccttctaccctcaaagtcatgaatattgcttctctctgaaccttcttctgtagttatatctttctctgacyacagtcctatacagtcaggaaaggttatccactgaagtgctcatgtgattagcccaggttcatccagataatccaggataatctccctatatcaaagctcacaaacttaatcaca

SEQ ID NO: 839819 - DNA, 467 bp, Homo sapiens
aataaacccaatctaaaggaaatatgtagatccaactagagaacccattattttcaactccacagtcattaaagaaaaagaaaaaatgcaaatttcaacaatgatcaaagaatctttatcatacaatttacattatttaaacccaataaaatcagaaatcaaggacaaaaaaaatcttggaaatttatggacatagttttaaaaaatcacaggtcagagatgaaaccataaaggatattaggaaatacttacaactttaatgacaatgaaagcactaactattgaaatatatgggattcagctaaaccactacttagagagaaatgtggagttttaygtgtgtattagaaaagaagaaagcctgaaaaccaataatttaaatgtatgactcgggctgagtgctgtggctcaggcctgtagtcccagctctttgggaggccgggggaagtggatgacatgaggtcaga

SEQ ID NO: 839820 - DNA, 606 bp, Homo sapiens
ttcattgtgagcttttggaacaaaaaagtctgatttcctatttaatgaagaatggcttttaaacaccacaacttaatgcatagctgtatcaatattacgtaaattgacaaatgtcacacaaaatgtggtgcctaattgattttgacatgcacgtacataaagtaggaccattcaggtaaatacagagctaataattacaagaagcaaataataccaatgaaaaccattttttaagggtattagattttcattctcttcctcatcaaaaagaagcatgtattgaacatctgcctgtggctagggttgtagtaagcagaaaagtgacttgcctaaaggatgagaaatcctattacataaagattttttattttaaatgtaggcccactctccacacacccacacccatcagttacctagcagttccttataaggagtgtgaaatccaagtctggcaactcactggggacttcaagcaaaaccttctactctgtcctgttargtgtgcagccctatgataaggcactgtggccatccgcagaataggcagaagataagcctctaatctgtacttttcaaccaatacctgggaggctttttaagagtgat

SEQ ID NO: 839821 - DNA, 579 bp, Homo sapiens
taacatttccctcctcctctgtaaagaacagcccttttaagaaatagatgatcagcacattaatattaacaaaatttatattttggaagtatctgcaattttaccccaaatgaattgcaaataaatactttgtaagactcttgtatgatgaatgccagtttttaatttttgaagtttttattattggttaagatttagctatgcctctcctaggaatagcttgtatatttccatggcgtcatggtaattggagaatcactggtctatataaataagtttcataaactagtggagtttttcctggagatcaaggaaagaagtgtgagtaatgtgcaccatactgtgaataaaatatattagggaccaaggagtcatggattcaaatttccacacttttagaaattacagctctaacattttaatccataattctataatcccaaatccctgaaaatagtaagcatttccataactccttcrgaagccaatttgacctgaacctctatgatgttatttgtggtcctgaaaactcctttccgtgtcactgttcgtgcattttagtgccgaaatgttaatgtg

SEQ ID NO: 839822 - DNA, 605 bp, Homo sapiens
ttaaccagagtgggggcaatggtctgcaagcaggccagagtacagcggtgccctggaggcaagttgggcaagcatgtgtgacaaggtgaattgggagacgagatgccagaacattagcatctcatgagaaaccaggtaagacttgcaaagaaaggactagtgttcagcaaattgaaatgagaagacatgaaaattaatgccattctagctaaagtccagcatgtaggatattggagcatcctaatttgggggaagttatgtaaatttacctacattgatactcatataaaaggaaatactaattactctaattttgtgcaacgaaaagtaattctttttttaattgagacaagagatttcatatatttatggggtacatgtgaatatttgttacatccatagaatgtttaatgatcaagtcaggttttttgggatacccatcaccttaagtatttatcatttctatgtgttggtaacatttcagtacaacaagagtaattytgatttaatacattgtttcaattgtgctgaagtacaaatgcctcattattcaacaatgtttagaataaactagagacatattaatatttacatcctattgaagc

SEQ ID NO: 839823 - DNA, 517 bp, Homo sapiens
acttacagtgaaattacttttgacaaaggtgccaagaacctacattggggaaaaaaaccatctcttcaataaatgatgttcgggaaactggatatcgatatgcagaagaatgaaacttgacccttctctctcaccatatgcaaaaatcaaatcaaaatggattaaagacttaagtctaagacctcaaactgaaactactgcaagaaaacactggggaaactctccgcaatactggtctgagcaaaaatttcttgagtaatacccaacaagcacaggcaaccaaagcaaaaatggacacatggaatcacatcaagttaaaagccttctacacagcaaaggaaacaaccaacaaagtgaagagacaacacataggatgggagaaaatatttgcwaatggcccatctgacaagtgattcataaccagaatatataaggagttcaaacaactctacaggaaaaaagtctaataatgcaatttaaaagtgggcaaaagttctgaatagacatttctcaaaag

SEQ ID NO: 839824 - DNA, 525 bp, Homo sapiens
ttcttttctatataccaataataaagtggaatttaaattaaaacaacaccatttatgttagcaccccccaaaatgaaatactttggtataaatctaacaaaatatgtacaagatctttatgaaggaagctatactctttgaaaacaaatgaaagaaaaactaaataaatgaatggatattccatgcccagagataggaagaatcaatattgtcaaaatgtcagttcttcccaacttgatatatagatttaatacaatctcaataaaaatcccagcaaattattttgcatatatccacaaactaattttaatgtttatgtggaaagagaaaggactcagaataaccagcacaatatttgaggaagaaaataaagttggaggagtgacactacccaaatattggtaaaastatagacaaatatatcaatggaacaggataaagagctcagaaacagacatacataaatagagtcaactgatttttgacaagcaacaaaaggtgttcaaacaactatacagccacatg

SEQ ID NO: 839825 - DNA, 608 bp, Homo sapiens
tgacacagatgttatcattagtagacgagtacattgagcaattataaccatattccagatattcaaaaagttaagtagagaaaaatgatttaacaaaaatactctaattgaacttctgtraataaaaaactacaatatcaaaaatttaaaaaattgatgggattaatagtagattagacatagcaaaaaaatagatctgtaaatttgaaaccatggcaatggaaactatccaaaataaaaacactgagaggaaaaacaattttttttttctttttttgacatagaatctcactctgttgcccaggctggagtagagtggtgcaatcttggctcactgcaacctccggctcccaggttcaagcaattatcctgccacagcctcctgagtagctgagattacaggtgtgtgccatcacacctggctaatttttttgtgtgtttttttagtagagatggcgttttgccatgttgaccaggctggtcttgaactcctgagctcatgtgatccacctgcctcggcctcccaaaatctgggattacatgtgtgagccaccacgcttgtctggaaaaaaaatttttaattaaaagaggatcagtgaattctgaga

SEQ ID NO: 839826 - DNA, 609 bp, Homo sapiens
tgtggtggatgaagaaacttttttggtttgttctctttttttgagacagagtctcactctgtcacccaggctggagtgcagtggcacgatcttggctcactacaaactttagctccggggttcaggcgattttcctgcctccgccttctgagtagctgggattacaggtgtcctccaccatgcccagctaatttttgtattgttagtagaaatggggtttcaccatgttggccaggctggtctctgaactcctgacctcaggtgattattccaccttggacttccaaagtgctaggacaaataggcataagccaccacacctggcctgaaacaatttttaagaagtgatttagttgcaagttggctcagatcctctgtttaaacattatgaattctcctcaagttatcagaattgactaacttttagttaagccccattccatggcaaatagaacataccttaggctagggacaaatttattgcatctttatatattwgtgaaatttagcattctgcctctaaatttcctgtaataaaaatactcttagaatgatccttcttgaaaggacgtgattctaaggaagtcactgaacataaataactaagta

SEQ ID NO: 839827 - DNA, 607 bp, Homo sapiens
gttaggaataatagaattcaaaatactggagctagagcctgagatatggctcttcatttctatgttttaaaagaagttatcaataaaaaaactttaaagatctcagatttttagggactattttgatttttcgtatcagtggaatcattctttatcacccaagagttcctggagatttgctgactggtacaggaatgttatgtgtgacccacagactgatggctcagctggggctacagaatatttcctgtgctgtgtgggggaaaatttcccagagccaaagattccctctggtcagagccttctttactagactaccaccgtatacctcttcaatttccttctgtaatcttcacattaccaaaataaaggcatgagttggagagataagagggaccacttttttttcttttgatacttagtgctacctgtctgctttgattaaactcttagtctgtttgaacaaaacatgacacacttcctagcctgtagatggctagagcaccagagccatgctcacagtttatastcatattaaagtatatttgatagtaggtagatgctttttcgttactgctatttttaataaaactagtcattttccacc

SEQ ID NO: 839828 - DNA, 607 bp, Homo sapiens
gttaggaataatagaattcaaaatactggagctagagcctgagatatggctcttcatttctatgttttaaaagaagttatcaataaaaaaactttaaagatctcagatttttagggactattttgatttttcgtatcagtggaatcattctttatcacccaagagttcctggagatttgctgactggtacaggaatgttatgtgtgacccacagactgatggctcagctggggctacagaatatttcctgtgctgtgtgggggaaaatttcccagagccaaagattccctctggtcagagccttctttactagactaccaccgtatacctcttcaatttccttctgtaatcttcacattaccaaaataaaggcatgagttggagagataagagggaccacttttttttcttttgatacttagtgctacctgtctgctttgattaaactcttagtctgtttgaacaaaacatgacacacttcctagcctgtagatggctagagcaccagagccatgctcacagtttatactcatattaaagtatatttgatagtaggtagatgctttttcrttactgctatttttaataaaactagtcattttccacc

SEQ ID NO: 839829 - DNA, 585 bp, Homo sapiens
ttataacaattttgtgtaaatttttgaatagctagatgagtgagttttgaatattcccaacaaaagaaacgatgcatgtttgaagggatagatatgctaattaccctggctggtttattacacatagtatacatgtattgaaataccacagtgaacccaagaaatatgtacagttattataggccaattaaaacattgaaaggaaaaaaggaaaaagaaaataaaaagctattacataaaactatccaggacctctccctactctaaatcttgcctcactgaatagtcagaaacacctactctatcaagcccccagttatttaatgtatttatttgagtatagagtttctagagaagttgtaagttcctcaaatccacaacagaagctattttcctgtggatccctcctactgtaaagagagctttaaatttgaattccaagcagagggcaacggtagaaactcagagaccttacaaatggctctgacacaagggaattctggtatcaggggraactcttcctgacacaccctgggagtggtcacatataaagtcctctttcacaaacagcttggcaaactgtgc

SEQ ID NO: 839830 - DNA, 643 bp, Homo sapiens
tttacacctaataaaacacttctataatgcaaaatatttttaaaaagctaagtccaaagacaaaactaggaacaaacattttaacttatgccaaaaatatacacaaatatgtaatgattttctataaattgatttttaagaccaacaactcaatatgaacaggctgttcacagtaatggaaatagtttccttctttcttctttcttcttctttcgtctttcttcttctttttttggtgtcacccaggctggagtgcaggagtgcagtggtgcaatctctgctcactgcaacctccacctctggggttcaagcgattctcctgtcagcctcctgagtagctgggactacaggcatgcgccactatgctgggctaatttttgtgtttttcaaagagaggaggtttccccattttggccaggctggtcttgaactcttggcctcaagtgatccacccgcctctgtctcccaaaatgctgggattacaggcgtgatccactgcacctggacagkaaatgcaattttcttttaaacatacaaaaaaattatgattaacctattataaatatgctaatgtataataaaataattgcaaattaaaacttcactgaatcatttgggatccctctgttctctgctccaattt

SEQ ID NO: 839831 - DNA, 451 bp, Homo sapiens
cccaaaatacaattatggagtagaaaagagaaaactgtgacaaagtgtcctggcttggagttggaatatactcagttctyggtttattctatgaaaggagcccccttacctgttcttttttgttgttctggactttactgtccatgatagtctttcttgtccattttcctccatggtcacatatgccatagactttgaagtcacgtcttggcgactgctttctattaatctggttttgaagcttagccatggcttcagaagtcaagtaacgagaggctactacaagccagacttttcatttctttggcgccacccctcacaagtttctgttctatatgcctctagatggttacatattcacgttaccacagctgaagttctcaactgggatcatttttaaacccgagagctctgatcatttatatactggcctctgctgttcttactactc

SEQ ID NO: 839832 - DNA, 512 bp, Homo sapiens
ctcttattaaatactcaccttacacagtggctataagaacggaatgcttaatagatgttgtcactacaccagtcccygacacaggatgagagctcaatctatggggataaccacaattgtttttaattttcctcacagctcttacagtctactcaggaatgccagaattttaattaacaagaagaagtgtttatggtttaagagaaaatcacaaggcagcatttgaatcatttgtaaagttgtcctcatatttcttgcccttggcatgttatgtttgtaatataataatttactcatgtacagtagagacccctcagcccaagcagggctagggtaaatgtggcgaaggaaagttacagctggaacttgttgaatctgagcagtaggtgcctatttagggtccttcttccactttgaggtatgatttgaggctgggctctgaggaaactcatcattaaaagggagggtgctggtctcatttggattcttgatctgcatgagcagatgtattc

SEQ ID NO: 839833 - DNA, 557 bp, Homo sapiens
ctcttataaagccatcagacctcgtgagacttattcactaccacaagaacagtatggagcaaaccaccyccatgattcagttatctcccactgggtccctcccacaacacgtgggaattatatgggagctacaattcaagatgagatttgggtggggacccagccaacccacatcaatccccattttacagatgagtaaactgagactcagcgaggtgaagcaatttgcccagtcaagtagctacaagaggctaaggctaagcttccaattctggtttatgtgactccagagccttgagttctcctctctaaatagtggttcttaacctttttcgggttcaccaaccccacatagaatctgacatctatggacactctccccagaaaaacacatgcagtcacaaaccttttctgggattcacggactccctattctagcacaaaaccccacaattccatcctggcactatccacccagagttagtgcagaccccacaggtgaagagcttccacatctaaatcagatcccacaagaccgccctgatttagatgccagt

SEQ ID NO: 839834 - DNA, 592 bp, Homo sapiens
ggataattgggtaattttcrttaggggagttaagataggcctcttttaggaagtaaattggagctaagaccagagtgatgagaaagggaaaacttaatgaagacctgggccaagaacattccaagtacaaaggagaaggaactcagtacggcctgagaacagacttgggaggtttaaggtcaaaggttgcccagtgtaataggaggtaagatccttgctgtacagtcttatcaactgaagtaaagtttaaattttatttgattgcagtgggaaatcactgggcagttttaagcaagcagttgatacctggttttatgcttaataaaaaaactgaaaagaagttaagggtagctgggcatggtggtgcatgcctgtaatccaagctactccagaggcaggagaattgcttgaatccaggaggcagaggttgcagtgagccaagattgcaccactgaattccattcagggcaacagagcgagactctgtctcaaaaaaaataaataaaataataaaaacaaaaacgggcagggcgggcgggggggtgcaattagagatggaagccaggaaaccagttaagatattgttgtggtc

SEQ ID NO: 839835 - DNA, 592 bp, Homo sapiens
ggataattgggtaattttcgttaggggagttaagataggcctcttttaggaagtaaattggagctragaccagagtgatgagaaagggaaaacttaatgaagacctgggccaagaacattccaagtacaaaggagaaggaactcagtacggcctgagaacagacttgggaggtttaaggtcaaaggttgcccagtgtaataggaggtaagatccttgctgtacagtcttatcaactgaagtaaagtttaaattttatttgattgcagtgggaaatcactgggcagttttaagcaagcagttgatacctggttttatgcttaataaaaaaactgaaaagaagttaagggtagctgggcatggtggtgcatgcctgtaatccaagctactccagaggcaggagaattgcttgaatccaggaggcagaggttgcagtgagccaagattgcaccactgaattccattcagggcaacagagcgagactctgtctcaaaaaaaataaataaaataataaaaacaaaaacgggcagggcgggcgggggggtgcaattagagatggaagccaggaaaccagttaagatattgttgtggtc

SEQ ID NO: 839836 - DNA, 601 bp, Homo sapiens
gcctcccaaagtgctgggattacaggagtgagccacagtgcccggccccaaactcatcctatgagataccaaaaccagacaaagacacttaaaaaaaaaacaaacaaaccaaaaaaaaaaactatagtccaatatactgaagcatactgtataaacatcttcaacaaaatactagaaaactgaatgcaataatacattagaaaaattatttattatgaccaagtgggatttatctcagggatggaaggatggttcaacatatgcaaatcaattaatgtgatacactatataaccagaataaagaacaaaaccaaatgatcatttcaactgatgctgaaaagcctttgataatattttacatttcttcatgataaaaaccctcaaaaactggatatagagagaacatacctgaacataattaaagccatatatgacagacacatagctagtatcatatgtatgaggaaaaactgaaagctttcctttaagttcagaaataagacaaggatccacattttcaccactgttattcaacagagtactgaaagccctagytagagcaatccaacaagaggaaaaaaaaaaaagaacatccatcttg

SEQ ID NO: 839837 - DNA, 502 bp, Homo sapiens
tacgtctatatatgtatcttacctgtgtgtatatctacttttatatatgtatcttgcctgtgtgtatgtctgtgtgtgtctgtgtctgtgtgtttatgcacaaattgcttgcccactctgttccctaccaccctcatcaccaaaccccctaattcgagatcttccccacaatatccacatggacttgcaagtcagttctgtcaattaggagagaggtcactaatgtcaaaggaaacccccaattagctacctttcttaatcatcaggatttcaagaatacttaattatggttactcaatagaaggtaagtgctgtaaaccataatagtataaaattaatggtctatctattcatgtttggaagtaataaaaagaaataaacatttattttctttttttttttttgacagagtcttgctytgtcacccagactggggtgcaatggcgcaatcttggctcactactgcaacctccgcctcctgggtttatgcaattctcctgcc

SEQ ID NO: 839838 - DNA, 614 bp, Homo sapiens
ataacatgaatttgaaagccctctcattcctttcttggcagctacaaactgctgactcacagacctttccctgttgagtgtgtttaacttcatatcrcagtttaatagtttcattccaaaacaaagactggaattggaaagttcagggagagagtgcagtaggtgaaatgaaagtttcaatatatgttaccatatataggaatattaaattacctctaaataatacacaagctgtgacatgaagctgaaatgaatctgtgacagaatgtttcatccagacgcaacttctcatcttctcttggagaaaggatagaaaaacaagctgactttgtgaaatgttttccaattaaggcatttccatttcaaattcaaacttgtcacctgagtttctggataatccagtgaaaagcgagttcatcctccaatcatttcagacaaaatcaagactttttattaatgaagcacaatgtcattaaactagttgcctttccagaatgaagttcaatatcttataattatgcccttggtttctcaggcatccaaattatcatgttaaagaagagggagagttgatttctggtggctatacagtaaacttccttcaatccacactc

SEQ ID NO: 839839 - DNA, 615 bp, Homo sapiens
attagtcataaatgctatcactgaaggtaatgattagattttctttttccacattctacagaatcatcacagtaattttgtgtagatggaagtggctcctaatgtatcactttacatgttagagtgccarttaaataacactattttgtaatgaagataatggcaatgtcaaattagtctgtaattcactatacttctaaagccctggaaacaagtttcactgtttttaagaagtatttaaatatttgacactgacttatgataaaaatgctcatcaaaataagaatgggaaggaacttcctcaatctgataaaatatacctccaacaatgtatggctaatatcattcttaatggtgacagactgaatgctttccccttaagatcatgaataaggtaaggatgtttattttcaccacttctattcaacattgtgttgaaggtcctagtcaatgcaatcaggcaagaaaaacaaataaaaatataaaagaaataaaaagcaaagactgaaaagaagtaaaactgtccccatttacaaatgacatgattgtttttgctgagaatcttaaggaatcaacacacacacacacattctctctctctccaacagaatttct

SEQ ID NO: 839840 - DNA, 623 bp, Homo sapiens
tccacaagtgatgattagaaacacactttgagttggaatygtgaaaatgcaccatgtgagccagcaaagccctgggatggcagcagaaggcagtagagccgatggcgctgtgctctccacgggtggaagaagggcggcaggagcctgcagagcctaggggttggaatcctcgctactgcctggccccaggccctccccatgtatcctctcagtcctaacttgctgtttaggaacatgctgtctccaccctgagtacccactgtcttcctggagtctggcctcctgtctgaggtgggtttcatggtggaagaagtaggaaatcctcaaaggcgttagccccacacgtccagggcgtgtgtaggatgaggcttagccctttctacatgtgtctgatcaaagataaatgtcaaatttgttttcccgtttgttcctgtggttcaaatggaatatgtcctttgtgtcctgcacaaatgcttaacgtcgcacagggatggcccagccttctctcctaggctttcgtgaacagtgcccaggctgttctgcctgactgcacggaagtgccctcttgctggggagctggaggtgcttctgacagcggagagttctccatccaggctgagttc

SEQ ID NO: 839841 - DNA, 716 bp, Homo sapiens
tctaaaaattacaaaattatacagtaaacaggatctcacttgggtgttgggtattatttgtacaggtggatttgccgctgcagtcaccacccctctagacgtggcaaagacaagaattaygctggcaaaggtaagtggtgaaataatgtaatggagatacttcagatgctcatatctgttagcactaggactacaggtgtataaagtgaacacaaatggctaccatttacctgtaatagcatcttatgctgcctgtgcaacctctaacaaaactgccattgatggaacaatgtccccagtgtctacataatattgtaccatttcacagtcattttcacatagggctggtagagccactgcctggcagtaccatcttcaaataaactctgtttttactggtgacaaacctaagggtcagtgaggttgacgagcctcctgctatgtggcaggtaagtgacaggctttgaacctagggtcatggttggccttaactggatgggttaagacagttgtcagaaatgttgaaaccattttgtttaagagaaaaattgttttaaaaaaccctgctagatagagagttgaaagaatgccatacgtataacatacctgaactgaaccaaaacaaaaaagtcctatctttgtggaaaagtagaacaaataatgggccaaattttagtatggaggtggcaggatccaacctaagaatgttaatcacg

SEQ ID NO: 839842 - DNA, 608 bp, Homo sapiens
taacaaaactgccattgatggaacaatgtccccagtgtctacataatattgtaccatttcacagtcattttcacatagggctggtagagccactgcctggcagtaccatcttcaaataaactctgtttttactggtgacaaacctaagggtcagtgaggttgacgagcctcctgctatgtggcaggtaagtgacaggctttgaacctagggtcatggttggccttaactggatgggttaagacagttgtcagaaatgttgaaaccattttgtttaagagaaaaattgttttaaaaaaccctgctagatagagagttgaaagaatgccatacgtataacatacctgaactgaaccaaaacaaaaaagtcctatctttgtggaaaagtagaacaaataatgggccaaattttagtatggaggtggcaggatccaacctaagaatgttaatcacgttttaaatggaacatttaaacggcactctattaaatatgcttattagctgcttatgcaggtttcrtagttgtaccatttacactaatgattccccgccctcctcacattgcttcatagtgcttctgtctttctgctgttaaatagttcatcagtca

SEQ ID NO: 839843 - DNA, 522 bp, Homo sapiens
tggatccaagaaccctctcttgggctctggattgggacccctttcctgtaatatcttcctggcaaccacagaagggactagagtgcagaaacccctgacccaaaggctaagtggtggggtcctgtaacattagcatgctaagaggcactccctccagcgtcatgacagttcacaaatgccatggcaatgtcaggaagttaccctatatgggtctaaaagggggaagaaccttcagtttggggaattgcccactcctttcctggaaaacttatctaccccttgtttagtatattatcaagaaataactacaagtatccttagtccagcagcccatgctgctgctctgccatggagtggccattctttattcctttacttttttggtgaggggacaaggtctagttctatcactcaggctggagagcagccrcaggatgtcaactcactgcaacctctgcctctcaggctaaagtgattctcttgcctcagctttccgaggagctgggactacagatgtacacg

SEQ ID NO: 839844 - DNA, 540 bp, Homo sapiens
cttcttgagtagctgggacaacaagtgtgtgccacctgcttagctacttttcttatttttcatagagattggggggaccctcagtatgttgcccaggctggtcgtgaactcctagcctcaagtgakcttcctgccccagcctcccaaaatgctgggattacaggcatgagccactatgcccagccccagatcttattttgacttcaccagttatacgtgcactcatttgtatgtgtgtactaagttgtatatggttttctcacctatgtaggttcctatatcccctaccaagtcaaggtactgaacagtttcaacaccacaagcctccctttgttgcccttttctaacacccatctcccagctaccttccattatagccccccattccctaatctctggcagctactcctttcctaaacaattttcccctttaaataacattgtatatatagaatcacaaatctggctttttggtattagagtatctttccataaaattatttttttcaatataattccctggagatttgctcgagttgt

SEQ ID NO: 839845 - DNA, 662 bp, Homo sapiens
ctggaacttccccatggtgtgggttgtactgggggatccgatgaaggtaggtctgctgcattagtctgttttcacactgctgttaaagacatacccgagactgggtaattcataaagaaaaagaggtttaatggactcacagttccacatggctggggaggcctcacaatcacagtggaaggtggggaaaaaaccaaggcacgtcttacatggtggcaggcaaagagaatgagagccaaatgaaaggggtttcccgttgtgaaaccatcagatctcatgtgatttattcactaccgcaagaacagtatgggagaaggtatccccataattcaattatctcccactaggtccctcccacaacatgtaggaattatgggagctacaattcaagatgagatttgagtggggacgcagccaaactatatcaatctgccttgaccccagtgcagggtcttcactcactcgttcatgtaccatttgtccatgagcacctccctcatgccagacactgatgtggtccctggtggcaccatggtgaccatgacaatcaaattcctgccttcaggatagccacatacaatggaggggttagacaacgcacaaggcaactaataaacayaccacttcaagttgtgataaaatgctataaaggtactaaacaa

SEQ ID NO: 839846 - DNA, 551 bp, Homo sapiens
gattttacttatgtcagtcaatgctttaattttccaccaggatggtaactaaactccgcttttaggacaaactacgtcttcttctgtctgctgagcaatttagcttacatcttgcaggaaaccaagcccaatcagaaggagctgtggacagtttagtgaaggtggttctaaatatgggatttgctgggtttaaaggaagcaaagtgaaatgaaaggctgatacaatgatttatgaatataaaatataaaatcccacatgtatagaagagatttaaaataggttcacatacttgcaaaaacaagtgcttattaggcctgtgataatataaatttttttatcattttagacatgatatggtcttgtgatcatgtttgaaaaatcgtccttttcaaagaaataaactaaaatatttacagattgttttctacttttatttattttcttaaaagaaggtgtctcactgtgttgcccaggctaaccttgaactcctgggcttaagggatccwccagtctcagcccccagagtcgcagggattttaggcatgagtta

SEQ ID NO: 839847 - DNA, 589 bp, Homo sapiens
gcaatggtattgctgttgcctagtgagttcctataaatgcatttgtttgtatccttgcgaatcttgttcctgcagagacagtgtgtggcagcctgttcattccagccctttytataacatctgctgacacaatagcctttttctacatataactggatattgtggcatctccccactctctcattcctatcaccacactgctgtggttgagctcaggcttctattcctgaacgtcgtctctgtggatttgatcctatgtggcttgaaacttaagtgggtggtggccaaccacagagactaagccagggaactggcttttctctccctccaaccttcaggaaaacccaggtcctgatgttgcagtctcaccaatgcaccttaacctagcagttcctcattgtctgaactagtatcctgggttctgtgtcctaaatccaagaaaattaaggaacttggacacaaacttggggttggagcaaaaatttaataagtgaaagaagaaaactctctgcagtggagaggggagtgcaagtggactgccagtttacagctgaattcaaaagcttttttttttttttttttttgacat

SEQ ID NO: 839848 - DNA, 688 bp, Homo sapiens
gaggagagagagagagcgaaagagaaagtgctacacacttttaaacaaccagatctcgtgagaactcactcactatcacaagagcagcaagaggaaaatccaccctcatgacccaatcacctcccaccaggtccctcctctgacactggggattacaattcaacatgagatttgggtggggacacagagccaaaccaaatcaactagtaaggatttgggaaactggtaagctccaattggtgagcaagggtggtgggcaaaattagtcctgaagttgcagcaggttatctcagaagctatagacgaaacacttcaggttacaacaagcagttttagcagttttatcagtcaggcttgcagagaattatattctcagagcaatattttgtaccctgtgtgattttccccctagcttttcagttctattttagttgagcatgacaagaatgacccaatttttataatcaactttcacatactgccaaggctgagagtggattcaagactgcaggtcacactcagggttcctctccttataaatgacttggtgagagcaaaaagcacttctactagattggatcagacttctgctgtcttcctttagttttrggaaaaggaaaaataaaaataaaaatgacagctaaagatgtattcacaacagaatgtgtccctaacaagccttttcttt

SEQ ID NO: 839849 - DNA, 578 bp, Homo sapiens
gaacactagtcattcattaaaccatgtaataaatgttacaagttatgtaatatgtacatgattcctttatttgcatgtctctstgtgtgtgtgtgtgtgtgtgtgtgtgttttgagacagggtcttgctctgttgcccaggctggagtgcagtagcatgaacacagctcactgtatcctccagctcctaggctccagtgatcttcctgccacagcctcccaggtagctgggactacagatgtgaggcaccatgcctggctaattttttttgcaaagacagggcctcactatattgctcaggctggtcttgaactcctgggctcaagtgactctgcctcagcctcccaaagcactggaattacaggtgtgagccatcatgcctgatctgtgttaggtttttgttttgtttaatgttgcttaacaaatcacaaagtaaatggcttgagacagcacaagtttatctcacagagggtcaggagtccaggcacagcttcatgaagcactctgctcagagtctcagaaggctgcacagtgtcagccagggcagcagtctcatttaaaagctggggttctcttcc

SEQ ID NO: 839850 - DNA, 626 bp, Homo sapiens
gttcagttgggtgagttctctgctttcctctaaacatgttatgctcacacttggcccccrgggtttgcactcagggtgcccaactcacagccatactgcaaagtcccatttcctccttgagtcctttgctgatatgccctggtttacactgattcctaccctggctttctttagacccaaagacatttaggcaagggcggatgggccatgttgctaaggaggcttacacttgagggccccttaacttggacagtcccctccaagactgtgtggctaatttttatttataattttgtattgtcttaagaagatcatttaaattgtaaaagcctcaggccccacgcaatctgggtctgtccctgaatttagacattaatttatattcttttcttgaaggattttctaactggttaatgtacaacaaacctgttttctcaacttagtatgagcttctttgctaaataatgctgtgcagtatacagtgtggtggttgaaagggtcatcagtagagtcccacagacctgtgtccaaaggtcacttctgccgtttcctagagatgtggcttttgggcaagtttaaattttcatcttcattgatcttcagcttcctcagctgttaaatgggaa

SEQ ID NO: 839851 - DNA, 488 bp, Homo sapiens
aatgggaatgattatggtgaagcttgcattatgactttcagaggcccaaggmacttttgccttcataggcccctttctccatgaaaatgattaccaactatattttgtgactgtgttggtaaaaaggctaatataattcaacagggattctgttctttttttttcctttctgatgctaaaataaacaaaaacattttcatgagcccctaatagtgtcatggacccttgacatagtgcctagtgagcctaatggataagttgaccctgattatagagcacacagagaagcctggtgaataataaatgagacagtgtacatacaacattcgacaaagtgctggtgtgtattaggtgttcagcggacgtcagatattacttttgttattattatatgcctctttcatatagaaatgcttactaaatgggattgaatagagcttattttacactaaaccatttgtagcaatgggagtttggaaacagatatc

SEQ ID NO: 839852 - DNA, 474 bp, Homo sapiens
gctttgccaccccatcctccacccactctttcgatttagaaacaactgacgagacttgtgccgtagggacacttgtgtggtatgcccagcactwgtggattaccatcctggaatgccttggtttccttccttctgctctgattttttatttctactcacccttcagttatgaaccacataatcctttctagaatgatacaggtctggttattcctggccctagtctaatcattgctccctaattactgctttaacttcacatttatcgttggtgaagttttaaattccctcccatgtaataccagggatatttcatgcggcatctacgcttttttcctgatggtgtgtcctagtaggactccatgtgcctctgctgcatgaatcttcccagatcaatcccagcttctgtactcaggacactaatgtttattgcagcaatcatttttataatatcccccaatgagcagttattca

SEQ ID NO: 839853 - DNA, 658 bp, Homo sapiens
  misc_feature 238: n = A,T,C or G
aaagtgtattagaggccatggatggtggttcacgcctgtaattccaagactctggaatgctgaagcgggtagatcacttgaggtcaggagttcaagaccagcctggccagcatgaccccgtctctactaaaaatataaaaattagccggctgtggtggcgcgggcttgtaatcccagctactcaagaggctgaggcagaagaatcgcttgaattggggtggcggggcagacaccctgngagacagagcgagactccatcacaaaaaaaagcatgttagagttaatacggtgctgaatcatataggtgaagaagctaaagccttatacatataagtggggtgttgtgactcaaggttagataactatttagaattggagttgagattgagatccagtattgtttctacttatgattgagagtatgacagcatgaaattttatgaatgtctttgttctcaaattttgctggatctggaatcaagatggaatctctaaagttctgaaaagttctaaaattaatgatctttggactgtaatctggaaactgctgatctactsctggaggagttaaagttttaggtttatgtgaaatattctttttctgacatttttaagttttcactaagtataggatccatatagaaaactacatagattg

SEQ ID NO: 839854 - DNA, 586 bp, Homo sapiens
atggccctgtgtgttaaatgccagtagaaccccagagttcttaataataacctaaaatgcctacataattttgctttcaaaacagtggcttaagacagtatttacagttactcccagtggttgtgaatcacttgttttaagaaagaaccatggactttgggaggctgaggtgggccgatcacctgaggtcaggagtttgagagcagcctggccaatatggtgaaacctgtctctactaaaaatgcaaaaattagctgggcatggtggtgcacacttgtagtcacaggtactcgggaggctgaggcatgaaaatcgcttgaacccgggaggcagaggttgcagtgagccaagatcgagccactgcattccaacctgggcgacagagtgagactccatctcaaaaaaaaaaaaaaaaaaaaaaaaaaaggaagaagaaagggagagagagagaraaaaaaaaaagaaagaacaaaccatgggagcgagtgactgaggtagggtcttagaagacaagatctttggcagagaggacaccaaggaactgagataccagaatgttagaaagataatctatgtggatattgaa

SEQ ID NO: 839855 - DNA, 561 bp, Homo sapiens
ggaactcagatcatcttaaggctcaactggggatggatcctcttctaagatcactcaaattgttcctggcaggattcagctcctcacggttgttggactggaggcctcagttcctcatgagttgtttcccaraggcctcctctgatgccttgccccatggatctcaccatgaggcagctcacagcatggcagctggcttcatcagagtaagcagtaaagtgtcagtaagagagagtgctggcaaacagaagtcagtcttttgtaacctaatctcagaagtgacatcccatcacttttgcttcattctgtttattacaagcaagtcactaggtccagcccacactaaaggggcggtgattacacaagaatgtgatgtagagataccggaggcaggaatcattggagactatatcagaaggctacctatccctaaaccaactactgatacaagaggattagaactggctcacaccattcaggttctccacacccctggagctggattcaggtcgctaaatcacaaggttaccacacagctatggcatccgcctgtagtcccaa

SEQ ID NO: 839856 - DNA, 550 bp, Homo sapiens
gctcagtcagcatgattctacctcattgaatccagaaataatttattacattactggacatcttaataaaaaaaagtcaaagtcttgcttgataaactgaacacataaatggactttgtgtatggcaacttcacttttagaagaatttgtcgtgaattattagactctagcttttgaccttccccagtctttgactctatgcttaagaaataactgtgggctaagctgcctggtattcacatcagctacttgatgctaatcagggcttgcctatacttatttttttgggcaggggagaaagggtctctcactgtagctttggcttccaggctcaagtgatcctcccacctcagcctcctgagtagctaggactacagccaccatgcctggctaatgttatttttttgtagagacgggatstcactatattgcccaggctagtctcgaactcctgagctaaagtgatcctccagccttggcctcccaaagtgctggtattacaggcatgaaccactgcactcagctgcctatactgtaataatgccagaag

SEQ ID NO: 839857 - DNA, 373 bp, Homo sapiens
atttcctttcattatgaattgtgaaatttcacatttccttccattataaatgtaggcaacaaatcacagtggcacagcagtacctttgacttttgtcaccaatagaaagcaragacattctcataccaaataccacatacactgttatagatatgttgaaaaccttttatccttatcactaaaattaaaattatagtagttttcagaccctctggtttctcctactgaatgtgctaatatacaagtatgtatgtgctatctcacaatttttttttactgttttgatgatttcagtggagtgtttcatttgcaatcctagcaaagcctaggatttgattttaattcactgtatattatctatgtatatgtgtgg

SEQ ID NO: 839858 - DNA, 373 bp, Homo sapiens
atttcctttcattatgaattgtgaaatttcacatttccttccattataaatgtaggcaacaaatcacagtggcacagcagtacctttgacttttgtcaccaatagaaagcaaagacaktctcataccaaataccacatacactgttatagatatgttgaaaaccttttatccttatcactaaaattaaaattatagtagttttcagaccctctggtttctcctactgaatgtgctaatatacaagtatgtatgtgctatctcacaatttttttttactgttttgatgatttcagtggagtgtttcatttgcaatcctagcaaagcctaggatttgattttaattcactgtatattatctatgtatatgtgtgg

SEQ ID NO: 839859 - DNA, 373 bp, Homo sapiens
atttcctttcattatgaattgtgaaatttcacatttccttccattataaatgtaggcaacaaatcacagtggcacagcagtacctttgacttttgtcaccaatagaaagcaaagacattctcataccaaataccacatacactgttatagatatgttgaaaaccttttatccttatcactaaaattaaaattatagtagttttcagaccctctggtttctcctactgaatgtgctaatatacaartatgtatgtgctatctcacaatttttttttactgttttgatgatttcagtggagtgtttcatttgcaatcctagcaaagcctaggatttgattttaattcactgtatattatctatgtatatgtgtgg

SEQ ID NO: 839860 - DNA, 636 bp, Homo sapiens
aagcgctgtagcaccatcatggctcactttagccttgaactcccaggctcaacaaatcctcccacctcagcatmccaggtatctgggaccataggcacatgataccacacctgactaatttttgtattttcttgtagagatggggtcttgccatgctgttcagcctggtttacaaactcctgagctcaagtgatcctcttgccttggcctcccaaagtcctaggattatcggcatgagccgccatgcccagccagcatgcatttagaaacattattgtgagaaggtagtccacaggctgcaccagacagtcataggagactgtagcacagaaacagattaagaacccatgcattaggctatttgaattgttgaaaataatttatagattctccccagcccaaatcacctatcacctttggtgataccagacagattttatgagctaaactatcaagtaggcttgaattttgtttctagttgattacactggcaattctaactacttttgttaccatattcaagtgacattatagtatagggattaagagaatggatactgtgttagacttggaatagatccctgctctaccatgtaccagctgtatgaccttgggcaagttacttaacctctccaa

SEQ ID NO: 839861 - DNA, 639 bp, Homo sapiens
tgttatttatcccattttaggcacaaggaggcagaggtgtaaggaggtaagtcagtgtaccatgatcccccaacaggtgactgaaattcaagttcagatcgacctgagcccaaactgtgtgcttctaagtgctcttccacattgcctcactactgtctaaggtcactaacctccataagaacacattgaacaggtgctttattctatatttgtaattccacaagcaagtggcaaacctaaagtgtgactctttgacattaaggatatatgtttatagttatgtgcataaactctatggctgggtttgaatctgacccctgccactaactggcagtattatcttaattgagttagcccatctagagctcagtttcttcatctgcacaatgggtataagaaaagtggccaggcgtggtggctcacacctataatcccagcactttgggaggccgaggtgggcggatcacaaggtcaggagatggagaccatcctggctaacacggtgaaaccccgtctctactaaaataaatacaaaaaaaaaaaattagcygggcatggtggtgggcgcctgtagtcccagctacttgggaggctgaggcaggagaatggagtgaacctgggaggcggagcttgcagtga

SEQ ID NO: 839862 - DNA, 620 bp, Homo sapiens
agtttctcaaaagttttcttctagtttttggctgaagatgcttcttttttcaccatagacttcaatgcaatccgaaataactctttctagattatacacaacagtgtttccaaactgctgaaagaaaagaaagttttaagtctacgagatgaatgcacaaaacacaaaccagtttctcagacagctcccttctcgtttttatcctggaatattcacaatatgggaaaaaaacagtgtttccaaacttctgaatccgatgaaaagttaaactctgtgagataaatgcactcaccacaaagcagtttctcaaaaaacattttttctaattttttctgaagacattttcttttgcaccatacacctcaaagcactcccaaatatccttcacagattttagcaacacaggggctccaaactgctgaatgaaaataaacgtataaatatgctagataaatgcacaatcacaaaggggtttctctgatagattccttctagtttttatcctgtggtattcactttttcaccattgacctcaatgagctcccaaatgtactttcacagaatggacaaaaacattgtttccaarctgctaagcccaaagaaatgattaactgtgttag

SEQ ID NO: 839863 - DNA, 643 bp, Homo sapiens
acatcacacagtggtttctcggatacattccttctagtttttatcctgggatactcctttttctccattggcctcaatgaactcccaaatgtccatttgcagaatgaacaaaaacaatttttccaaactgtgaaccaaaagaaagttttaacactgtgagatgaatgcatatatcacaagcagtttctcagtaagcttctttctcgtttttatctgaagataattttctttttcaatataggcctcaatttgctcctaaatacaccttcacagattctacaaaaacagtgtttccactttgctgtatcaaaagaaagttttaactctcttagatgaatgctcacatcacaaagcagtttctcagaaagcttctttctagtttttatctgaacatattttgtttttcaccctagtcctcaatttgctcacaaatatccattgactgaatggacaaaaacagtaattccaaactactgaatccaaagaaatgtttcactatgtgagacgaatgcacacatctctaagcagtttattagaaagcttctttctagtttttatctgtagatgtttcctttttcaccataggactcaaggaacwcccaacgatcccttcacagattctaaaaagagaggcttcccagta

SEQ ID NO: 839864 - DNA, 598 bp, Homo sapiens
aaaccagtttctcagagagcttccttctagtttttatcctggcatattcgatttttcaccattggcctcactgagctcccaaatgtccatccacaaattggacaaacacagtgtttccaaactcctgartccaagaaaatgtttaactttgtgagatgaatgcatatataacaaagcactttctcccaaacttctttctagtttttatctcaagatgtttctttttcaccatagacatcaatgtgctccaaaatatcccttcacagattctaccaaaacagtgtttgcaaactgttgaatctaaagaaagttttaattctgcaagatgaatgctcataacacaaagcagtttctcagatagcttccttcaagtgtttatcctggaatactcactttttggccattggcctaaataagctacaaaatgtccactgacagaatggacaaaaacagtgtttccaaaacgctgaatgaaaagaaaagtttaattctgccagatgaatcaacacatcacaaagtggtttctgagagggattccttctggttcttatactattgtatttgcttttttcctttggcctcaagttgcacccaaatg

SEQ ID NO: 839865 - DNA, 623 bp, Homo sapiens
gaagagatattttggagctcattgaggcctatggcaaaaagggaatatcccaggataaaaactagaaggaagctatctgagaaactgctgtgcaatgtatgcattcaactcgcagagtgaaaacttttctttctttcagcagtttggaaacattgtttttgtagattctgtgaagggatatttgggagcgcattgtggcctctggtgaaaaaagaaatatcaacagataaagtctagaaagaagctttctgtgaaactgctttctgatgtgtgcattaatctcacagagctaaacctttctttggatccagcagtttggaaaaactgtttatttcaatctgggaatggacatttttgagctcatgaggccaaagatgaaaaaacgaatatcccaggataaaaactagaaggaagctatctgagaaacagctttgagatgtgtgcattcatcttgcagagttcaacctttcttttcattcagcagtttggaaacactgttttggtagaatctgcaaagggatatttgtgagctcattgaggcctatggtgaaraaagaaatatcatcagataaaaattagaaaaaagccttatgagaaactgctttgtgatttgtgcattcatc

SEQ ID NO: 839866 - DNA, 636 bp, Homo sapiens
ttcagacagcctgcccaggctgtggatccacatttcctgggggtaccacagccagacctaggggcctgggcacgtggtcagccaaaagctgggggcagcartacagtggggtagtgggggtgggtttggaaaggaaacagtcacccagaacttctccccaggatgagaccacccttccaaggtgggggattgccagggggagaaaacttatttattgctgtaagacaggacccctcctcccaacctcataccccaccgcacaccagagctaaattcaaagctgaaaggcgcacgtttctatacctacattcattcctgagggaccctccagagggtcaaggtcccagccccaggcagccctgtcacagtgagaagtagttcctgtccttaaggaatttccttctaatccaggtgcttgggcaggaacccgatggccttcgggtcaccaaggctgtctgggagggaggcacagggccgccctctgtgctgaggccgtggaggaagccaggaggagggtggcttgctttgcttccttgtctaattagcttgcttgaagatgtggccttggcagggagccagacccatggggccaaggaagaggaagagcatcctcaatagactcactcccccttcctt

SEQ ID NO: 839867 - DNA, 521 bp, Homo sapiens
atatatatacttggtaaaagtaaactcctgcaataaggtttacaataagcatatataaattcttagccagctcactgggaggtacctaatggttcatwtttctttgtcagttttactagatacgcattgtcttagaggcaatgtaagtttggaattaggccaaacaaagtcaaatcctgattctgtgcatccattgaaggttaaccttataatatttacattttgagataaatgatttcatgctcttatttaggaaacttgacggtatgttacctcagggattgttccttgcctgtctttccccaaagaacttgagtttgaagtgattttcacttggcagtaaattgaaggttttcttcattgcttaccaccatgtgccttattcctgctgctcttgatctccaagtgcccttactgctacagaaaggaaagctcttgaactaagagcttggcagccacttgatcaggatggccaaataatggcagtacaggttgagcatctgaaatgcttcaagatgggc

SEQ ID NO: 839868 - DNA, 645 bp, Homo sapiens
agtgatttataagatttatcttataaaatttttataaacaatgtaattcagacatgagattatactatcccattcatcttaacctttcttgatttgaraaaaattatataaacattttaagcataaatttgacttaaaattaaattaaaaagttgtatattttattgttatcatatgaaaaatctaactcatgctatttgtggatgaagcctaatttttatatttaaattgttataactatgtacatttttttcttaggtcttcttttcaaattcatttttcaacttaaatattgagatgctgatgcacacaacttgtacttgcatgtattatgtaaataatgaaatgcaatattttatcttttattggattccagatatagataaataatttttgtatacttaagaataaagaaaatattcccccccagaaatacttcataaataaatttaaactttttaaaacgacacttagagaggagaagaagaatcaaaagtatatgcttagtaggtaaatgtgccagcaccatatgtagaattttagggctggaggggaggtgaagaggagattcgttttaaattaatataccagagagtgacacagaatcactagttattcaaaagcaaaactctagagaaattgaga

SEQ ID NO: 839869 - DNA, 556 bp, Homo sapiens
tctgtatgactctttcccatactccccggctggtgccttcagagccacaraaacttccttactagacttgtgaggaaggagggagccttggtaagagggaatgtgtaagaccagacatcagaagagaggaattctagttttggctctgctggcaacctgtcgagtgaccttaagcaaaccattcaatatctctgaatctgctgcttcatctgtaaaatgaagggttgggccagatgattttatttcattattattttttaatgtttagagacagagtctcactctgacactgaggatggagtgcagggctgatcatagctcactgcaaccggcaactcctgggctcaagtgatctcacctcagactcctgagtagctgggaccacaggtgtgcaccatcatgcttggctaatttttaaaaattatttgctgacacgaaacctcactatgttgcctactttcctgagattacaggcatgagccactgcatctagcctaggacacatgatttttaagatgacttccagtttcctatgtttatctctttagtttctata

SEQ ID NO: 839870 - DNA, 585 bp, Homo sapiens
tggtgttttagtcataaactctttgcctatgcctatgttccgaattttttttttttttttgacaaggtctcattctgtcacccaggctagagtccaggtgtgatcacagttcactgyggcctagaactcctgggcttaagaaacccccccatctcggcctcccaaataactgggactacagggacatgccacagtatccagctacttttttttttaactttttttgtagagacagggtcttcctatgttgcccaggcttttagcctgttgatgtggtggattaaattaattaatttagtgaatgctgaaatagccgtgcatccctaaaataaatcccacttggtcatgatgtataattctttttgtaggttgttgcatttcatttgctaatagtatcttgaggatttttgcatctatgttcatgagtgtcaactaccttgtaatttatggattttaaaatgtagctgtaacagtatcataaaattgcttcatataacttgcagtttattgtggatttattcattttaacatgaagaactcaggatgttatatttaatttgtattatcccagaatgttgcaagctg

SEQ ID NO: 839871 - DNA, 490 bp, Homo sapiens
tcttttaggatggggctatgacatgataagattagtagtatccttataggaagagacaccagaaagctctctctctctgcctctcacatggaaagtccatgtgaaggacgtagtgagaagatggccatctttaagccaggaagacagcctcaccagaaactaaaccacctggaaccttgatcccggacttttaacttctagaactgtgaaaaaataaatgtctgttgttcaagtcatccagactgtggtctttgtcctggcagcccaagctaatacagcttgttaagaagctgtccccctgatagagaccacaggcagttccctacggtcatgagggcagttactgccttcatttggttcaccgytatattcccgagtactcaacacagggtccacatagcaagggctcactaaacattcatggaaaaatatgcagttttaaattagattgttctcaaatgaattctgggaaacctttaaatattttcat

SEQ ID NO: 839872 - DNA, 654 bp, Homo sapiens
ttctctagttaaactactacacaatcttactgtaccacgattaattttggcctttgtatcagtccattttcttgctgctaataaacacatacctgagactgggwaattataaagaaaaagagatttaacggactcacagttccacgtctggggaggcctcacaatcatggtggaaggcaaagaaggagaaagtcatgtcttacatggtggcaggcaagagagcttgtgcagggaaactcccgtttataaaaccatcagatcttgtgagacttattcactaccaggagaacaaaccacccccatgattcaactatctccacctggccctgcccttgacatatggggattattacaattcaaggtgagatgtgggtggggacacagctaaaccatatcagctttcatctaagcctaatacattatttataagtgcatcgtatttcatttatttctagtctttaatcattgaagtattattagttggcgttaatatgaccataactgtgcccattgaactgtggaatcccatgacaccacctggctagaagttgatcccttagataacccctaattgcttctcttaatttttgaaaattgtgattaaaatttataaatatggaatttttggatcccaagaatatatccataagcctc

SEQ ID NO: 839873 - DNA, 632 bp, Homo sapiens
tagtaattggtataataagcagatrgaaaatcaataaggttcaagaacagtctggccaacctggtgaaaccccgtctctactaaaaatacaaaaattatctgggtgtggtggcacacgcctgtagttccagctactagggaggctgaggcacaagaatcgcttgaaccagggaggctgaggttgcagtgagcagagattgtaccagtgtactccagcctaggcgacagagtgagaccctgtctcaaaacaaacaaacaaacaaacaaaaattaataagaatacagaagacccgaacattactgtcaaccaacttaagaacactcaacccaaaactgcagaacacacatatttatcaagtgcatatgaaaactttacaagtaaaatttgtgtttcttaaatacaataacaacaaatataataattaatatatacttataagtatactaattactttaaaagcacatgaatcatgcaaaatatgtctttgaattaagctaaatgataaaattgaattaaattaaactaaaatgatagtggaaacatatttggaaaacccccaaagattgggaaattaaacaaggcacatccaaataactcaagtcaaagaagaagaaaataataataatataag

SEQ ID NO: 839874 - DNA, 638 bp, Homo sapiens
tgatctaaaatggcatagtgtttatgtataacctacacaaatatccctgtataccttaaaccatctctagatttcttataatacctaatacagttaaaagtgatgtaaacaattgttatagtgtattatttaaggaataatgacaaggaaatatgtctgtacatgttcagtgcaaatacaattttttcctccaaatattttcaatgcgtagttggtcaaatccacagatgcagagggctgactgtgtgtgtgtgtgtgtgtgtgtgtgtgtgtatgtgtgtgtacttataatctctgcaaaattacacacaagtaagagtgattgcctccagaaatgaaaactaagtgcccatgagagagggacataccattttaacattttggattgtatactgtatacatataacctatttaaatatcaatatgtcattaattacaaaatagttatttaaaaagcttagtaaatttagtgttgatagctcatgacatgtcattcaagtactctgagatatttaraaatgtaccttatatattttaatattaactgacagaagacaaactggattgtctctgtcagagaagaaacactgaagtggatgaatttttgagctaattgtcatggctttccttatattcta

SEQ ID NO: 839875 - DNA, 606 bp, Homo sapiens
ctatttcttttcccaaaagcaggcctcattccctaatcttagcccaaccccttctttcttatctcaaggccccaagaatctttctgtatgttagcatattttacaatattttcttcatttttcatcccataaccctgtgttagtttgtgttaagttggagataagataatctattttaagttaaacagaaaggggtttaatcaccaggtactgttggggctacatcagcaggctgcggagtaaacttccaggcaactcccagccttcagaatcacactgcacctttcaatgattgggaaagcagccctgctacaacagaaagctgcaagtacagaagcaggctgactgtctcaccaccgagcttatgaaatggatgtcttgccccttgccttctcccggtataacccagacccatctccacatcttgccaaaaagtgccaattggcagagcctaaacacatccagaaagctatccacaaaggaatcttggaaatgcagttttttgctttttggtctctgcagaagaggaagaacactagacaggacstggagtgctgtatacataaatcagtccattataagtatctgccaaaaacattatgaaat

SEQ ID NO: 839876 - DNA, 644 bp, Homo sapiens
agttttgaactttctgtttcccatttccacatgctgaaaagactatgttattgtcacattttcctctgtgcaaatatatatgcacacattatatgaatatatacacatacaaaaacacatacmtgcacatatttcagagatgtttggtagcaccggctctctacattgctaaattctgttttttaaaactggatgtgtttgtgcctaatatatacatctttttttttcttactatttacaatcatatttaatcctgaaagttcattctgaaatatctgtcagttctttcaattaaatgtattatacagtttcatgaacattatgtccttgactgtttctgtttattcaccctctagattgccttctacttagaattttaggcttaataaactcattttattgaagtaaatgtgtctggagattttgttcttcaggaagaatagaggtaattaggattttgtgtgtaggaatagaagagccttcattaaactcagtagtcttattcagctgagattaatggctaaaaattatattttgctgcaaattatttatatttcttatgcagtcatgcaaattatattatttgttaattttacataaaacaactatgtagacagataaagatggggcatttatacttatgt

SEQ ID NO: 839877 - DNA, 618 bp, Homo sapiens
gaagagttattgggcaccctcttttctcttcatttttcaaaggaaaaaagaacaaaagtgtttttatgaaaagtgagatgtgttttattttagctaaccaaggatggcagattttyataacaacactaccatctgctggaatttaagagtattgttgctaacattttggaagccttgggttgcatttttacaactattggcctaaagtggtttttattatatactttttaacagcactacgtgactatttccaaagggaagtttactggtaggtgcaatctccacctccttacaagtcacacaaacacttctacactgctgatgggaatgtaaactagtacaaccattatggaaaacagtgtggagattccttaaagaactaaaaattaaattggacttcacctttctctggtgcctccttgattagcttaataatcaacattctgaattctttttctggcaattcagggatttcttcttggtttggatccattgctggtgagctagtgtgatttttggggggtgttaaagaatcttgttttgtcatattaccagatttgtttttctggtttcttctcatttgggtaggctatgtcagagggaaggtctggggctcaa

SEQ ID NO: 839878 - DNA, 601 bp, Homo sapiens
  misc_feature 29: n = A,T,C or G
ttttttccattttttccttctttttggtntctcttttcccttttcttcctctcttcctttgtttctacctccttctcttcttctcccctccctttcctttcattctctccctcagtcatgttgcaaacatttgcatgatatgtaaatgacaaagtcttaactgtaacttatgagcataagttacatatgacccaaaaaagacatgacccaaagggaaaatgggcacttctcaaaagagggatttttaatggtccatacacataaaaaattgctcagagaaattcagatttaagccacaagaaaataccatatacgtccaggtgcggtggctcacgcctgtaatcccagcactttgggaggctgaggcaggcagatcacaaggtctggagttcgagatcatcctggccaacgtggtgaaaccctgtctctactaaaaatacaaaaaattagctgggtgtggtggcacgygcctgtagtcccagctactctggaggctgaggcaggagaatcgcttgaacccaggaggtggaggttgcagtgagcccagatcatgccactgcattccaacctgacgacacagcgagactccatctcaaaataa

SEQ ID NO: 839879 - DNA, 472 bp, Homo sapiens
aattttgactttaggtttagttttcatttttatgcttactggaaaaactcatacaaactggcctacagggagatgcctttatttgaaatataaagtataacataaatctttggaataattctagcaatatgacatttattcctctgtgtacacattgaaaacagaaggttaagtttccatagaaaacaaaaaggaaaacatttcattttattactcccctttgcatctcaagagaataattcttcacattgttttgaggtcaataatggagctacagaggcataaaatgtcatattttccttatttttataattgacatgtatagtgtctaacatcctttcatgcttgtggtctggcatagtttactgtaatgtatacyaatacataattaggatatatttcagcctgagacacctggccaaataccagataggaaatcctatcattcgatacatctgttctgaaagcaaat

SEQ ID NO: 839880 - DNA, 630 bp, Homo sapiens
ataagcagataattaaaataggttgctgtgatggaggacaaatgagtggccacattagattggatggttaatgtaggcctctctgttgaaatgacatttttaaacttaggtgtgaatcaggggaaagagtattccagttaatagtaacagaaggccctaagatggcatgatggttaattttaggtgtcaacttgtctgggttaagggatacttatagagctggtaaacttatttctggatgtgtctgtgagggtgattctgtaggagactgacatatgagtaaatggtctgagtggggaagacacaccctcccaaggtgaggcagcttccagttggctgagggtctggattgaacaaaaaggcagaggaaaggcaaatattttctcacctagagctgagacacccttcttcttctgcccttggatgtgagaacaccaggtatctagcctttggactctgggacttgcatcagcagtccccttgggttctcaggccttcaacttcagactgagatttatacctggacttccctgtttctgagrctttcaaacttagactgagccaggccaccaagttccctggttctccagcttgcagatggcctatcatagaaattttcagcctccataa

SEQ ID NO: 839881 - DNA, 550 bp, Homo sapiens
cctttggttgtaatggggtatcagttatatggaatttaaagctaattcataaattgggaaaaatcttggattttgtagccaatcagaactcccagggtttcagacaggtagaagcttctctcaggtagatgacaacacacatattcaacaaaaacacgtggtggaacatcatgcagccttagatcttctttttgctcaagctagaagcctatgtttggtgttaaacagaactgaatgatgtacttatctctcccctgattttgttaccaaagaaaacttaattaaaaaggtggctgatactgctgtttccttagacactgccaccaaatacattaaagaactttctcaagagagaggaacctatgatgtgtttacaggatcaactaacagttggtttgcaggcatcctaagtggtggatracaagcttgggttttccaagcatttctaatctttatatttcttctaatatatttccaggttattatgacttgtattaccagggtaacaatgaaaatgagtacctctttgagtcaggctactttacagtga

SEQ ID NO: 839882 - DNA, 612 bp, Homo sapiens
taattgggagacacctcccagtaggggccaactgacacctcatacagccaggtgcccctctgagacaaaggttccagaggaaggatcaggcagcaacatttactgttctgcagtatttgctgttctgcagcccctgctggtgatacccaggcaaacagggtctggagtggacttccagcaaactccaacagacctgcagctgaggctcctgcctgttagaaggaaaactaacaaacagaaaggacatccacaccaaaaatccatctgtacattgccatcatcaaagaccaaaggtagataaaaccacaaacatggggagaaaccagagcagaaagctgaaaattctaaaaagcagagtgcctcttctcctccaaaggaacatagctcctcgccagcaatggaacaaagctggatggggaatgactttgatgagttgagagaagtaggcttcagatgatcggtaataacaaacttctccaagttaaaggaggatgtttgaacccaccgcaaagaagctaaaaaccttgaaaaaagattagaygaatggctaactagaataaacagtgtagagaagtctttaaatgacctgatggagctgaaaactatggcatg

SEQ ID NO: 839883 - DNA, 565 bp, Homo sapiens
gaaaagctaatggaaagaagaaagataagaagagatttcatgaaaaataaatcacttgagtttagtgttaagggtcaaagggtatgcagagtcagagaataaaagataagtctgggaattttgagcatggagtagaaattgtgaaagtgatcttttagacagaggtaatgtctttgagagaaacattaaatgccaaattttagcatatggaaccaggcagacatcagagctgaattggcctctgaccagagacctacactgatgcctctttctgtaaagtctgtgagttaagatttctattttttatattttttaattgttagaaacaattcaaaaggatgatatttcttgatacataaaatttgtatgaaattcaaatacaattttattaggacacataatactcataaatacaattttattaggacacataatacacataaatacaattttattaggacacagccacactaatacctacaagtatgtctatggctgcrtttatgtcacaaaagcgtagttgagtcattgtgacagagatcacatggcccacaaaagtaaacta

SEQ ID NO: 839884 - DNA, 599 bp, Homo sapiens
cttagccaatactgctacttctttccacctttcagagtcttcttataattctttaaataaataatgttgagggtttttactggtacatggtgggagggatagggaaaagcacattcattccatcttcctgtaagcaatagtcccatatgtacgtttaaagtctctgcttgtgtaaggtagctattgtctcactagtcatacctagttacaagaccaaccctaagtggtggagaaacagacgacatgcttgatgggagaatcttcgaagtcacattgcaaatgtatagacacaggaaggggaagaattgccagccatttttataacctattgaaacctgtcttatgaatgaaggatgaggaggcacgaagagaaatgtggaccaaaagagatcaatagaaaaagaaagaaatagagaaagaatgggggtgggggagatcaacaaagctgttgaaaagatcaaaagggaaaccattaataacaccattgttgagaaaaaaaactctatcrgtaaaaactgcagtattacacaagggaataataagaaagtgtaagaagcaattgaaaatgtaaaagtgtcaaattgaacaaacacgtcatt

SEQ ID NO: 839885 - DNA, 618 bp, Homo sapiens
aatgggctttataatttgggtgcctgcgcagacttttattgctatgtctttattggctatctttgttgccaaggtagagttatatcctcccaaaatataatggcaggctattccactttgttgttgtttcttcctcaaagtattagactccctcaagacctcccacctctatcacttccaaaattaaggtgagtaattagagaaatattggttttatcgaatgactatcaaagaaaagagacactcctcctgttatgcaatacgttggtctagaaaatggagcatatttttacatttaagtatttttatggcaaatttaattatttgaaatacactttgaaatctcaatgacagcaaaaaatacagaacttcttttatgatgtaaagtcacatttattgatatagatgtatagatatagatattagattctcttagagtaccatacctacattcatggataattcgtagcatcaaatgctggtagtaagtcattgaccctcaaatgagagcaacatacaaaataaaacccaaatctagaygacgagttaagttcttctgaggcacataagcccatcagattaccttctaagttttccaagaaaaagcgataccagtaa

SEQ ID NO: 839886 - DNA, 618 bp, Homo sapiens
aatgggctttataatttgggtgcctgcgcagacttttattgctatgtctttattggctatctttgttgccaaggtagagttatatcctcccaaaatataatggcaggctattccactttgttgttgtttcttcctcaaagtattagactccctcaagacctcccacctctatcacttccaaaattaaggtgagtaattagagaaatattggttttatcgaatgactatcaaagaaaagagacactcctcctgttatgcaatacgttggtctagaaaatggagcatatttttacatttaagtatttttatggcaaatttaattatttgaaatacactttgaaatctcaatgacagcaaaaaatacagaacttcttttatgatgtaaagtcacatttattgatatagatgtatagatatagatattagattctcttagagtaccatacctacattcatggataattcgtagcatcaaatgctggtagtaagtcattgaccctcaaatgagagcaacatacaaaataaaacccaaatctagacgaygagttaagttcttctgaggcacataagcccatcagattaccttctaagttttccaagaaaaagcgataccagtaa

SEQ ID NO: 839887 - DNA, 468 bp, Homo sapiens
gcgctccttgggaggctcgggcagcacaggagcccagggagggtggggggtggggtgcggggggaggctcaggcatggyggctgcaggtccagagccctgccccacgggaaggcagctaaggcccagcgagaaattgagcacagcagctgctggcccaggtgctaaatccctcactgcccggggctggtggggctggccgccactccgagcacggtgtccgccgagcccacacccacccggaactcacgctggcccttaagcacccacgcagccccggttcccgctcgcgcctctccctccacacctgcccacaagctgagggagccagctctggccttggccagcccagaaaggggctcccatggtgcagtggtgggctgaagggctcctcaagtgccgccaaagtgggagcccaggcagaggaggccccgagagcgagcgagggctgtgaagactgccagcacact

SEQ ID NO: 839888 - DNA, 598 bp, Homo sapiens
aagggaagaggaaaacatgaagaaaacagatttataaaatttactcacaaggctgggcacggtggctcacacctgtaatcccagtagtttgagaggccgaggcaggtggatcacgaagtcaggagttcaagaccagcctggccaagaaggtgaaaccccgtctctactaaaaatacaaaaattagccgggtgcggtgggagatacctgtaatcccagctactcaggaggctgaggcagaattgcttgaacctgggtggcagagattacagtgagccaagatcgcaccactgcactccagcctgggtgatagaatgagactccatctcaaaaaaaaagtaaaataaaattaaatttattcacttatatttttctttagtgaggaaaccaaaggaaaagataatttaggttatattctgaaagaaataaacagtcactggctttctggttcttcatgtaaagaagattcaggacaagatatttcttttgaaaaagataatcttgtaaaaatgagtgtgccaaagaagttgacattttaagtaagttaatattttacacaaaagctcttcwtctgttacctcttatgcttactggaagaaa

SEQ ID NO: 839889 - DNA, 630 bp, Homo sapiens
gcctagagaaaaacttttccttctttataattttcctgcttctattctgtttcacctaaatcccagagctgaaatcagcaatttaattgtcttcctttctcttcttccgtaagggtttgcagaatacagagctaacaagattacatggggcttagggggtcatgctgccaacaacataaggaggtctactactactgcctttattcaccatttttctgtgggcactagctgatgcacttggacaaaagagaaaaaggtatacatgcagaaagagagaaattggcttatcatgtgcatatgatatgcttatatgctatacaatatgctatttattacaaatgataaggtaatacagtgaggtggcttgacatagaattaatatacaaaaataaccgtagagaaaaacaacaaggtagaaaatagaatggaagcaaatgcttcattcatagtcaggataagtgagaataataaagatgaactacctctgccagatattgcatattttaaaycatattatggtttaaatatactgaatatagtttaatatatttaaactatatttaagtagtatagaattgatactgtgtagactgagaaatcagtagtacagaatagaaatggaaaattggc

SEQ ID NO: 839890 - DNA, 437 bp, Homo sapiens
tcaatcaatcatctatctccctacccrtcacctatctttttccatctatttatctatacatgggcacatgcatgtaaacatagataagtatgtattttggaaagttttacttgcaaaggaatcctacattgggttccccctaaagcatatggcatgtcttgtgcatatctgcacgttccctggagcaaaatacgttccttctaagttctgtaatctgtcttgactgcaagaagaggatcctgaggcttttttcctaatagtttttgtatttaatggtgatgatgatatttaatttagcccgccatagtagtctgcaagggatgtccagactttttcttctgcccctgttttggggactcctgagggtcccttacccactggtctggctacttccacaaaccggtcattaatctttgagcaaatgagagtcaaactgc

SEQ ID NO: 839891 - DNA, 437 bp, Homo sapiens
tcaatcaatcatctatctccctacccatcacctatctttttccatctatttatctatacatgggcacatgcatgtaaacatagataagtatgtattttggaaagttttacttgcaaaggaatcctacattgggttccccctaaagcatatggcatgtcttgtgcatatctgcacgttccctggagcaaaatacgttccttctaagttctgtaatctgtcttgactgcaagaagaggatcctgaggcttttttcctaatagtttttgtatttaatggtgatgatgatatttaatttagcccgccatagtagtctgcaagggatgtccaractttttcttctgcccctgttttggggactcctgagggtcccttacccactggtctggctacttccacaaaccggtcattaatctttgagcaaatgagagtcaaactgc

SEQ ID NO: 839892 - DNA, 630 bp, Homo sapiens
agtaaatactagagcaatcacattgggcagaagactatcattctgaatcgaacmtgttattaaacactaaatatatttaaaagtctcataaagtcaaatttttccatacattttactttgaaaataaagaaaataattccataactactaaaaactgggtttcttgctactttggaacttggacttctcacattctctccagttgctcagcaactgtacttgtaatggaaggatttttagtagatattggatctttccaagctttatttttctttcttataaaaggaaagctattgttaaaccaaatgatttcttcaaggataaaagaatctgaatggtcgcaactgtatcttctaacctgcctaattgaaatcacttttaaacagatataaaagcatgcagttagtgtcttatgtgatgagatctgaaaagaaaaaaaaaaaagaaactggggactaacataaaacttttttcaaaacctgtaaacagtacctggttgatagaattatttaaaggacactgtatgagagagatagccacgggaataaataaattataagatcacggatttttaatgaaacttagacttttgtcctgttttgttttgttattgaggggaagggctatcta

SEQ ID NO: 839893 - DNA, 593 bp, Homo sapiens
accatgctggcttttacacagttgtctaatgtgaattatgggcattattaataataatctaattattattccaatatttgccttaacacaaatgatacaacaagatgaaaaatttgatagaaatctgagtgtgtctatttatttttgtacttatataaatatattaaatacatatgtagcaattttggtggactcaccaaattgagcaataatgaagttgtattagtccgttctgacgctgctgtgaagaaatacccgagactgcgtaatttaaaagaaaaaaggtttaattgactcacagttctgcatggctgggaaggcctcaggaaacttagaatcatggcagaaggggaagaaaacaggtccttcttcacatgttggcgagagaggtgccgcgcaaagggggaaaagccgcttataaaagcatcagatcttgtgagaagtcactcactatcacaagaacagcatggaggtaaccgcccccatgattcaattacctcttactgggtcamtccaatgacagatggggattatggaaactacagttgaagatgagatttggattgagacacagccaaaccatatcataagct

SEQ ID NO: 839894 - DNA, 581 bp, Homo sapiens
tctatgatgccaagtcctccgccaaaatcctggctgaccagcaggataagtacatgaagtgagatggctgaggttttcagcagtaagagactccccaggtgtgcctggcctgggtccagcctgtgggcgcttgcccctgggcttggggctgccgtccccactcaggcgtggtctgcagcgctgtcagttcagtgtggaaagcatttctttttaagttatcgtaactgttcctgtggttgctttgaaagaacccttccttacctggtgtgttttctataaatcttcataggttattttgattctctctctctctctctctaagttttttaaaaataaacttttcagaacagttttagatgtacagagtcattgtgaacatacaatagggagttcccatgtatcttgtacccagtttcccttcttgttaacgtgttacatcagatagcacatttgtcrccgtgaatgaccaatactgatgcattattctactgcgttcacattttctcagttttacctaatgtcctttttctgtcccaggatcccatccaggataacccattacaactagttgtcatgtctcc

SEQ ID NO: 839895 - DNA, 556 bp, Homo sapiens
tgtctgtatctggaacttacaggcacataccattgtgcctggcctagaatctgcatttttaacaattcctcagggtttttcagctgcaggtggtgaaacaaacataggttttaaaatattgttctaaaytaagactgcttgacataagtatttttaaaagttactctgctatcgatattttggcccatagcaactgtaaaactagatagatattttcccagaaaaaattgtttaatgccaaaaccagaattatttcctcagatatttgcaatcctctagaatgatttggaactgtgcctgtgtggtgactcatctttctctaacaagttggcaaaggtgaatgagggggtgtgaatgtgcatatttatgcacatgattcagaaatgagaatgagaaaatctggcatctcatttattttctcggttgcatcctaaagaaacacagccagtggttaaaagcaggcatgtccttccaatcaagagggcatcctgcccatatgcttcttgcctgtctccgcccagggtaaaaaagaaacaaatattttcttttttttttt

SEQ ID NO: 839896 - DNA, 581 bp, Homo sapiens
aagctcaatcaattcttttgccatgctcaraatgtacagctgatattgtgaagtgctaaaccctgtggaaatgatagttgtcatcagttcaatgaacaaaatgcaagcttgaaaaacaggactttcaacatgtgtttaccatcaattgatatgaaccgaacagccatatatctctttttagtgggctgaaactgactcctgtcacaggaagaatgggaaaaagtttgattttgcttgaaaaaaataacattatgaaagctaaaactcatgattttagaaaatgtaatatcttctatttaaaacaaatatagtttattacagcattatattgcaataatgttggagagataattgattaaaataaaatgaaaatgtatggagtaagcaaaattgaattaattgcttctgaatgtaatgttgttttcttaaattgaatgaaatgttttgagtctttattcatgctttttcgtagccctttcagacattttaactaatatatattagtgagatagagaaaccaatataaattagtgaaattaatatttgttatatctcaaatggatataaaataggtattttaa

SEQ ID NO: 839897 - DNA, 558 bp, Homo sapiens
acagcataaccattgccacaggatcgaaaatgcattccgaaggcagtggaaagtcactgaaggatttaaaagaggcaaagcagtgacagaaacaaatatgtgttctcaaacctgttcttggagcaacgtagagggtggatttggtgagggtgggagtgtggtgtgaggataatgatggtgctaaagtgagggttacaaggctcatcagaaggttattgcaatcattccagcacaatatgaaagtgcaccccaagggagaaacagaaggaatacaggggaggggaaatgactgtgggcagggactgtgtatgtctaagaccccatggtttctggttggcccttttgtgtggaaggtcactgtttccagcaggagtaggttgagggaagggctgaggggctcactcctgcccatgttatgattaaggagattgagtgcaggaagacagaggwctacatggctattccatggctatggagcttaggtccccagcaggctgtagatctcatggatatattttccctgttggtacttgaggtcagaaacagagactgagaact

SEQ ID NO: 839898 - DNA, 561 bp, Homo sapiens
agccctttctatgaaggatactaaggtcagagagaatcacatagtgagggaagctgtaaagccccatgctacttacaaaagaaatgtgttaaaatgaagtcaaagccagatttaatgtccaaacactttgccaaaatgttttgtaatttctcataaaggtagacacccacccacccatgccacactaatcccattcttgagcatctatccaagagatagaaaacatacgtccacacaaaaacttggataagaatgtttatagcagctttattcatattagcaaaaaaactggaaacataccaaatgtccatcaacagaataaacaaattgtggaatgcatacatataatgagataatttctaaccaaaatttaaaaaaaactcttaatttgatacacatagcacatatgaatctcacagacagtatgctgarcaaaagaagctcaactctgaatacatactgtattatctatggtatgaagccccagaacaggcaaaactacagtgaaaaaaagtagaactgtggttactcgaggaaaggaagggaaaatggattaaaaag

SEQ ID NO: 839899 - DNA, 557 bp, Homo sapiens
caactttgttcttcttcatcaagattatcttagttattcttgatcctcggaatttcctattaagtttcagaatcagcatatcaatttctacaagaaaactttctgaaatttttactgggattgcactgaatttgtagaaaatttgggaataattgagatttttacaatattaaatcttccaatccagaaacatgatccatttcaaaatttatttaggatttctttaatttttcacagtaatttttgtagttttccagatagataccttgctcatctttagattgtttttcctggttatttgacgttcttattaaaatggaatattttttggcagcgagtggtggctcatgcctataatcccagcactttggaaggctaagggaggaggatcacccaagcccaggaattcgagaccagcatgggcaacatggtgaaaccccaytgctacaaaaaatacagtaattagccaggtgtggtgacgcatgcccatagtcccagctactcaggaggtggagatggtaggactaacagagcccggggaggtcaagccttcagtg

SEQ ID NO: 839900 - DNA, 609 bp, Homo sapiens
tttggcctggactaaggtagtatgacctattccttggtatttttgctagcgcaattacaatgacaaaaaaaggtatgcaagcaaaattagggaaaacattctagtaaatattgctccaggttacatgtggttaaaaacttctgcaccagttcattcttaggaaatgtgtcctttgatttggaaaaattaattttaattaaaaacatttctcagatcatttagggagaaatatgaactgcttagacacacgatggagacaatttctctggacatactccagagcctgtgtagagttaccgagtgagaagcaatctagcaggaatgcagtatgtgtgtatgtatttacatatatatatatatatatacacacacactcattaatatatttttggctaattgaatatataatgcttctcctgtcaagtgtctgtatgatatgactgggagtttcttccacagccacagactatgttttactcaagcagagataggaatggggggaaaatgcagagtggaccttttctttcctattctcttttgaggattaaaaaaaaagyaaagcaaatctctgtgttgtgtatggcaaacactcagcatgtgacaagtcat

SEQ ID NO: 839901 - DNA, 636 bp, Homo sapiens
aaaattaaacaatgcaaaaaatgcaccaagacaaaatgttgatgcaaataacaaaactgcctaattaactgatgcaaataacaaaagcagtctaatttgttgagatggtaggactttcaaactttcagagaagtaacaattcatcatcaaacaagatcaataactttctaatgaagtaactcaaaggataggattttcctaatgatttaatactccagaaacattctcaggaccatagagttgatgagactaatgatgctatctgaacttaatagaaactgaaagactggcgtgtgtaaaccaaagtaccaagatattgatttagatcaataatgtaagttacacgaaagttttaagttgacatgaacattctttgctcaaggaaaagtatttggaaagtcaaattattaaatgattgcatggcctgcagaaattcacaacaatcaattatataattcaaaactgtaatggcattaaactgattggactgccttaacaatatgatttatgcccatcaaactgaacagatgttttccttgcaatatagggcatcattgctctagggcagaatttcaactagcaargatagtgtttccctctgtagttgactactgttatttgtaacagtcccaaaag

SEQ ID NO: 839902 - DNA, 642 bp, Homo sapiens
ataaaataaaatcaaattaaatataatctagattttgtaatatattctataaggaaagttaaaccagagaattttgtaatttacacmcatcagaactgaaaaaaaaatgtagcacttctattattttctactgcttgtagggatgaaattagaggagaaattgtgtttgataattgaaggtaacaatgagttttgcaggttaaacaatgttttttgatttaaaagtttccagacatatgataaagcaatttacatttacagcattgttaaagatgtttatcccacatcctcttcctacttagaatggcttctgggtcacatgtcttcatattgcctaaacgctgttaagaagttgcactagaatttgttgatgtccatgacaagtgaaccttttcttctgtttgctggtcatggtttacgtattttctcagccctcctcccttgccccagtgcttgccattgcaagaggatgtgccccaacatcatttagtgctttctgacctataagttcagagaagttttagcttgaaagattcgtctcataatttttgcttccagcttgccttcaccatagccactcatggttgttctgaagattttcagcttttaaatactacaaaagtttccagaaagatagaggaa

SEQ ID NO: 839903 - DNA, 642 bp, Homo sapiens
ataaaataaaatcaaattaaatataatctagattttgtaatatattctataaggaaagttaaaccagagaattttgtaatttacacccatcagaactgaaaaaaaaatgtagcacttctattattttctactgcttgtagggatgaaattagaggagaaattgtgtttgataattgaaggtaacaatgagttttgcaggttaaacaatgttttttgatttaaaagtttccagacatatgataaagcaatttacatttacagcattgttaaagatgtttatcccacatcctcttcctacttagaatggcttctgggtcacatgtcttcatattgcctaaacgctgttaagaagttgcactagaatttgttgatgtccatgacaagtgaaccttttcttctgtttgctggtcatggtttacgtattttctcagccctcctcccttgccccagtgcttgccattgcaagaggatgtgccccaacatcatttagtgctttctgacctataagttcagagaagttttagcttgaaagattcgtctcataatttttgcttccagcttgycttcaccatagccactcatggttgttctgaagattttcagcttttaaatactacaaaagtttccagaaagatagaggaa

SEQ ID NO: 839904 - DNA, 550 bp, Homo sapiens
tagcataatatgtcctgttctattttgactaacagggatagtggtattgtcattggaagtgaggctgccatcacagaagcctaaaagagatgacattattttaaggatcaggtggtggtaagttaagaaactgattcctgggaagggaaaaataatatcacatgtcactcaatggtaacatatttagtaaaactctcatcagacttaacttggaaattagatcacatacttaatgcacttttagctcctagagaagatattgggaaattgaattgtaatactattggtcatgattgactggatttgaccaggtattacatgaaaatgatgagctcagaaaatagactggtttcaagccaaaatatatgtaatatagaaattcgataaattcagggtctttaaagttgaagcagtcagctcaaactcatgcaagagatataattaagaaaacatatgagcaactaagkcctttgaaaatcagcgttgaagcaaagatcagattaaggatgtggccaccttttctattaccaaaatttctcacctgataaaa

SEQ ID NO: 839905 - DNA, 518 bp, Homo sapiens
ctgaaggttgcatgttacttgtcttgcaactatatgtcttggggatgtcaaaagcttaagaccctgaatgattgtgtggaactgagctccttatatcaacccatgtgaaacaaagggtgaaaaagaattttttatatgctaagtctctgagaacctggagttgtatagtaccatagtacaaacctactaggcctaatacaattttactaaaattaaaaataaatttccaaaataaaacaaatcatacaagcccgtttttcttactggggcaaaacaaaactggtaattaacagaaatgaagcaaaaattttaaatagcagcattttataaagtgtaccctggatttatgaaggaattaaattaaatatgcagattaatcttgaatggaaacaataagtgataacytgttttagctacaaaatagccatcagcaaagcaaaaggatttaaatgaatttatcgaaaataaatataagagaaaacaatccatttaactataaaaaattgaaaaatatgtat

SEQ ID NO: 839906 - DNA, 636 bp, Homo sapiens
aaagcctattaaagggcctaccctagagtgaataaggatggagttctctacaaactgtaacaaacacacatgcttctccctttctctctcacgcagggaatccttgactctccttccccagaacgctcatcatctcaattttctgctgcttttcaaatcatgtttaattagaggatttcacattcccatgtgatacgatattcatgagtaaaacttgcaattggagtgactgtgaattagtctattaagtgccagatttgtgattttaaacaatgatggagattattgttattatctgctctcaatattgtgctctgagatgtgaggactaccttaactaactttacatctgaaatacaagctattaaccatttatgtccagacttagtttttgttccccccttctttcttgatttgcaaattatgctgggagaaataagagagttatttttctatagtggtcctcagggcatggctcatggccagtggtgtgctgggtgggtttgcatgtataccctcacttcccaaagttctggacttatattcatctgcgttggataaagtttttaygagtacatcagaaacatgatttctcagtagttactttttatacaacctatttaaacgagacgattt

SEQ ID NO: 839907 - DNA, 629 bp, Homo sapiens
aagcagaatacatatacatcaccatatgtcttagtcattttgggctactgtagctaagtagcacagtctggatggcttataaacagaaattcatttgtctcaattgtggtcgctggaagtcccmaccaagatcagggtgccagcatagttcagttctggtgcagactctttttgcaaatagcagtcttacatcgtatccttgtatcgcagaaagggagtaagaggactctttggtgtcccttttataagagtactaatcctatttgtgagggctccatcctgatgatctaattaccttccaaaagccccactgccgaatatcatcacattcgggggtaggatttcaacgaatgaatttggaaggaagggaacagaaaacattaagtctattgcattatataataatgtcccattcagcacttatcttttgaaaatatttttttaaaatagcgctatatggagatttgtaaaatcctgtttcttggttttatatatttgcagttagcctcagttttcctcaaatttcccacttcataaatatgttcaggcttactttattctagtcttccttcatgcaagtattggtaaactctaaggatagaatagaataattatttactatactctct

SEQ ID NO: 839908 - DNA, 627 bp, Homo sapiens
gttttctgcctatggctagacagttttcccagcaccatttattaaatagggaatccttcccacatttcttgtttttgtcaggtttgccgaagatcaggtggttgtagatttgtgatgttatttctgaggtctctgttctgttccattgctctatatgtctgttttggaagcagtaccatactgttttgtttactgtagccttgtagtatagtttgaagtcaggtagcatgatgactccagctttgttctttttgcttaggattgtcttggctatatggggtcttctttaattccatatgaaatttaaagtagttttttttctaattctgtgaagaatgtcaatggtagtttgatgggaatagcattgaatctataaattactctgggcaatatggccattttcacgatattgattcttcctatccatgaggatgggatgtttttccactcatttgtgtcctatttccttgagcagtggtttgtagttctccttgaagaggtccttcacatcccttgtaaactgtatttctaggtattttattctctttgtagcaattgtgaatgggarttcattcataatttggctctctgagtgtctgtccttggtgtaaaggaatccttgtgatt

SEQ ID NO: 839909 - DNA, 640 bp, Homo sapiens
aggcatagcaaaaagactaacaaaaatatctaggctttgagcatagaaaaatatctagactaagtgagctcataccctgtgcatataaaagttattttcatgagagagaaataaaacaggttcgtaattaataaaaaataaacattatacttattgtttttattcatgtcaataatcacacaaagtctattattgctatgccatatataaagagttctcatatctgctattatcagaatgttcctgtaacaactctattacataattttttttttttgctgatgtagtaacctatttacagatgaagattctgaagataacatttaattgtcttgaccaaaattgaacagctactaagtgttatattcaaactccaaaattaattttttggccccacaaaataccatctctagtaaccatttatagtttaagaacaaaaacatacttttaagatctaccaaggcaagtctttccttatcattgctctttatcttaaaagaagactttatayaataagttatgcttctagtctctcccttaaaacaatacaattgctattttatttaactccattacatttataaattaatttgtaaagttgaatcgctacaacatatagtcctcccacagaaaggtaaac

SEQ ID NO: 839910 - DNA, 602 bp, Homo sapiens
taaaagtgggatggtttctaattaaaacagaattaaataattaagtttaaaaaaccatgtttttaattattttgtagtactaatctcaaaaggctaacatctaatgaattaggttatgttatagttttgccaagccaaaggattctcctaagacttatctttttactcatggttaagtgagaaaagtagagaagaagctttccactaagggaagtggaactagaagagtacctacaagggacatgtcttaccaagatggagttaatccaatacatgttcctttggggggtgaggaaacatattagaatttagcaaatgtcactcttcaaatactgaaaggcagtgcttctcagtgtatgctgaaactacctccatgaatcagctctagatttttttgaaaagtcaggttcctgatctcaccagaaacagaatctgaataggtgggctccagactctgcatttttgacaaatgtccstaagtaattctcaaagttgtcacatttaaagaagcactaaaaatgatataatacataatccatttatagtatacactctaccatttcgacatgacagatctaatagtggaaatttagtgcaaaata

SEQ ID NO: 839911 - DNA, 491 bp, Homo sapiens
acggagggatgaacttaaggacataatgaaaagtacctcaagacatttgccgtcagttttyttcggtattttcttctgtatttggataagacttagaatatcagcaagactctttacctaaatccattggttcagaaatgtacagatcatgagtgctgtaagattgtatatgaaaccagattttattttcctattgaattatcaccattagaccatttaactgttctaatttattcactggtttgaacccaaagcaaagtctacctcttaaggaaaataaaacagcaaacagtacattctgagataaatcaaatttattggatagtttagtgagaactttttcataaaaataagaattcctataatttaatctaccctagtttaaagagactcaagaagtgttagaaaatctctggcagcataaaaatggctctaactagccccagcatctagacactcactaatatgtgatttctaattacttttgtagt

SEQ ID NO: 839912 - DNA, 622 bp, Homo sapiens
agatctttatttttaacattcagctgtgcattcctgacttgtccagttaatattctattgggactggctctctaragtcttctttttgaagccttaggtagattctttggttaactcaaagggtataaatagactgccataaatttgaaaatcctctttatggaatgaatgactacctctttaattaaatttaaaataatttatattctgggcatgattttttcaaaacattattagtttatttaaattttcttgttgttttattaacttcattagtctcatcataaacagcatctccaaatgtaacatatgctagaaaattttgtgtcttgaaagcatagctatgaagtaatctcaggcagggtcagaaaaagtagttgggctatcatttacttgcttcagccatccttactcattcaaattattagtctgctcaaggcaaagtagtaaaggaatcaaatgtgatcgttagtggtcctccactctttcacccaatagcatccttttgtcttgagagcctcaggattcccctaatcaggcaaccacctttcagctttactccttagacaatatctcaaaagctgtatcatataatacttcctccagctactgacaaaattcc

SEQ ID NO: 839913 - DNA, 641 bp, Homo sapiens
taaataagggatttttattatttcactccaaaccatgttattctctgaaaaattagcttataggcttcaaattatcttaggttcatctcataataattaggatgkcttcagtcaaaagttgggggaagtctgggtgacctacttaagaatcaggaacctggaaatttaggcaatgtttctactccctaataacttatgttaagcaattatacagctcttgaatctgctctctattaaacagaagcaccctgtgatagtctcaaagcgttttgtcttagaacacttaccaacttattccaaagtgatatgagggattgctatctcaacctggagaacggactgaagcactaatgcattaggaaagcctggacaaatcaagatagacaggtggatgctgaagaaaataagatgccacatctggaaaaaaaaaatagatggagtttagcagggtgatgagtagtttactacagaatataacgtatccttcattcttccaatcctttattcacccagcagcttaattgtattttcaaaaatctttctcctttcaatttctttcttattattttccatcactttaggataaagtacaaactttgtaaaatgttctatagaatcttgaacaattctgcttacacctg

SEQ ID NO: 839914 - DNA, 624 bp, Homo sapiens
ataacaatattagccttaaatgtaaatgggctaaatgccccaattaagacactggcaaattagataaagcgtcaagacccatcrgtgtgttgtattctggagacccatctaacgtgaaaagacacacattggctcaaaataaagggatggaggaatatttaccaagcaaatggaaagcaaaaaaaagcaggggttgcaatcctggtctctgataaaacagactttaaaccaacaaagatgaaaaaagacaaagaagggtattacataatggtaaagggatcaattaaagaagaagagctaactatcctaaatacatatgcacccaatacaggggcacccagattcataaaacaagttcttagagatctataaagatatcttcaaatcttagagatcaacaaggagagctaactatcctaaatatatatgcacccaatacaggagcactcagatttataaaacaagttcttagagatctacaaagatacctacaaatcttagagatcaacaagaagagctaactatcctaaatatatatgctcccaaaacaggagcacccagattcataacacaagttcttagagatctataaagagacttacactcccacacaataatagtggg

SEQ ID NO: 839915 - DNA, 521 bp, Homo sapiens
tgcctgtaatctcaacaccgggaggccaaggcagaagtatcacttgaggccaggagttctcaacacagtgagacctgtttctctaaaatatttaaaaattagtcaggcatggtagcacatgcctgtagtcccagctacataggaggctgaggcgggaggatcccttgagtccaagaggtcgaggctgcagtgagctatgcttgtgctactgcactccagcctggagtgaatagaccctggacagagtgagacgctgtcacaaacaaacaaacaaacaaaaacaaaaagaaaacttcttggctctgtgacttgatgccagacatatcttcaagagatctgcctcttctatttccaaataccaccctttcaccatgaccacagtaattctgctttytcccctagtcaaattttcccactttggtgaatggacgtggcatactcagctctgggaatttgctgcattttgttaaataaaagtgtgctttgtagtcggcagaattgttggttcctgtgtcggtcta

SEQ ID NO: 839916 - DNA, 559 bp, Homo sapiens
ttaagaaagctaaaagatttaccttacctgatttaaatacttaatataaagctacagtaattacagtatggtwttaacaaagatgatagttcaatagaataaaatagagagttgagaagtagaccattcatgtgtgggtttgttgattttcaaccaagtaacaagtcaattcaatgaaaaatttagtattttctacaaatgatgcagcaattggatattcaaatgagaaaaacatgaaacttagcttctgccttatgctgtactccaaaaagttttgaaaacaagtcatagacctaaatataaaagctaaaattacaaaacttttagaagagctgggcgcggtggctcacaccagtaatcccagcactttgggaggccgagacgggcagatcacctgaggtcgggagtccgagaccagcctgaccaacatggagaaaccctgtctctactaaaaatacaaaaattagccgggcatggtggtgcatgcttgtaatcccagctacttgggaggctgaggcaggagaatcacttgaaccctggaggcggaggttgtggtgag

SEQ ID NO: 839917 - DNA, 646 bp, Homo sapiens
ctgttgtcccagctacttgggaggctgaggcaggagaatggcgtgaacccgggaggcggagcttgcagtgagcygaggttgcgcccctgcaccccagcctgggcgacagagcgagactccatctcaaaaacaaaaacaaacaacaaaaactaaccaaacaaacaaacaaaaaagatttgaataataatgatatctacttcacagctgtcatggggatagaatgagaaaatacatgtaaagcacataaactattccttacacatatttagtactcagtaaatgttagctattattaatgctttttatataaaacaaggcaccactgggaataatcatggtatacaatccatcccaccaattatttatgaacaactgttatacattcttttgtgaaaacgttattgtgtacgatatatttgacatatttacttcttacgataacaatgaagtttcagaaaatccacagtgtgttatcaaatgtgattgtcttcaagagctatggggtatgatctcaatcattagagtggaaaaagttcactttgagatcacatggaataccccatgaaattctctgataaatacccacctcttaaacaatacctacaccttcacatatatagcgaaaggtactgtttgtctcatcgta

SEQ ID NO: 839918 - DNA, 516 bp, Homo sapiens
actagctcttcattaggacaaatacctaatgcatgcagggcttaaaacctggatgacaggttggtaggcgcagcacactaccatggcacatgtatacctatgtaacaaaccagcacraagttttgcacgtgtatcctggaacttaaagtaaaataaaataaaaatttaaataaaggtataaaaagactagctcctaataataattaaaaacaaaatttgatcatatctcgatgtcccaggctgtcagccagccctctcctgtagcatggggcttatttgcctccagactctgctatctgggctatttccctcaccttccatgtcacagggaatttgaaaggaactgaagactgagcaggggcaaaagaggcagcactgaccatcaggaaatggtgtggcaagcctagtgtcatccagaatgggatccaggggagaacagtttgccagaaaggaaaatcggataatattattaatcggttgagttgtggcagccgccaacaagtggctgcctatcaa

SEQ ID NO: 839919 - DNA, 627 bp, Homo sapiens
atggctgctgtaggtcctggaggcattgatataaggatggagtctcccagggtcyttcccagcagatggtgcctagcctcaggggaaccaaggcctgctcagctgtaccaatacagtggcacttgcctcaggaggccatgtgtttcccttgcccctctgctagacagtgagcttccttaacaggaggcagatatcaggatctctacatcccacttcccaaactgaagcagatctgaataatgatcatatgatcgtggaataaaggaaacccaagctgtgctactggtgagctgaataaccttgaggaagttcccttgagtccctatgccttactctccccctcagtaaatggagaaaatgccatttctctccaggtcttagatgatgagtggaaatgacgtatgcaacatgaactgctgttctatgcccagggctctgagggagctgccgaaagccacagctgcccttggcacagtggcaggatggaagggttgggagctgctgtcctccctgcaattgtcagccaagtcctctgcagcaccactgggtacacaccctgttccttggcctagctggcggggtcattctgaagtgtgttttgcactgatccagggaattaagtacaac

SEQ ID NO: 839920 - DNA, 570 bp, Homo sapiens
gtctcaacatcatgaaggatagtaatgtccaatgaagaattctatgtccactccaactatctattgagtgtgagtggagaataagtgcgttttcagcacccatcttatctcagggtgcctctgaagattgtgttccacctaagaaggagaataaaccaagaaaacgtagagacataataaacaggagatccaaaatcatagaaaagacaaagctacccacagggtaatgttgaaaggggccagtagggtagtacaaaggcaaccagcccaaagtggaggacatcagaaggcactgaaggatacctccaaagatgatgtaatttacatagtgcgttacatgtctgtatgcctacagagtagaattagataaatgatgaaaaatttacattgatgagaaatacttagaaaagtaagaaaacagaaaacagaaacatcaataattccaggaaaaccaaaaatagtggaggacataaaaatcrtagtgttttatataactcagatgacaaaaacatttatattgtcatgaaatttgcacactgaatatttatgtaaccaaaagtactacataac

SEQ ID NO: 839921 - DNA, 601 bp, Homo sapiens
taatgaggaatctttgcagtgatagaaatttttgtatcttgaatgtatcagtgtgaatatcctgttcatgatattakactagaattttacaaaattttatttttggagaaactgggtaaagagttcataatccttctgtatattatttcttataaccacatgtgactctgtaattatctcaataaaagtttcaaataaaaaggacactaagaaagtacataagaggcccacagaccgtgggaaatatatcctttgccaaaatatattatgatatgtatgatatatatacttctttgacaatgctagtattataactgtgattttatatgtacacatatacttgtccattacaaggaacttgtaaaattattcaactttctgaacctaaaggaacttattaaaaaaaaagtcaaagtcaatcattgaacagatatttcactgaaggagttatacagatggccaacaaacacatgaaaagatactcaacatcatcaatataatgagttttatgaaaaatatattctagctagtcacaaaaagagtacaaaccatatggcagtatttatatgaaattaggtggtagataaaagtaagctatgat

SEQ ID NO: 839922 - DNA, 648 bp, Homo sapiens
aataaaaacaaaccatatatcctgggaaaattctctaattctcctctaatttctttctttttgcttcattctctctcaaactagttcctcaacttcttactccakgagatatgtcatgtagagtatattctttagctttcaagtttatatcttccccattcaggatcccagctgtttggctttggtctggtgtctacttctggtccaactgacagaagcaagttggtgagggacacagagcacagttacgacagctaggggcagttatcagagaaaggaggttacttcatttgtgtgggataccagcaaatgtgtttatcatagatagtaccttaaaaacagtgatgcattgctcaagtgggcattcaatgtgggggaagcctggaatagtgtcaggcttccagctttgagaatggtctttgggagcagatctcagaaccatgagaaagaatttgataaacagcaaggaaggcagctagaacactcttaggaaaatacttaaggcataacaaaaaaatgtagcttcagataaaacaggtacttgttatgaagtgcactcattatggatttgtttctaatttgctttactttgtatttacttatttgtttatttaataattatttttgaacatttaatatataagaaat

SEQ ID NO: 839923 - DNA, 610 bp, Homo sapiens
tatgtatgtaggtatatatttattttgagatggagtctcgctctgtcacccaggttggagtgcagtggcgcaatctcggctcactgcaacctccgcctcccgggttcragtgattctcttgcctcagcctcctgagtagaccacacccggccaagaacatcgtatttatatttcatttcagaccctggaacagtaaacgtttgagaagtaaactatttaggtagatcagtctgtacatactgaaggaatcctgtatcatgatgtctgctattacttaagaaaagttattaactgaggagtaatatattaaacaaaatccagtgcatacaactctcatataaaaataaacttactttaaaaaaataaaaactgggtccttctctctctgaaataattcaagatttgaattgagtaaattactattaatagctataatatgttctgactagaaaccaccagcaaccataaggagtaaggaaaattgtaatatgtgttgatggagaagatactaggaaaacagccactcacactcacatgctactggtgtaaatatattttcaccactctgaggagtaatctggtaatactcatcaaaagctttaacatggca

SEQ ID NO: 839924 - DNA, 302 bp, Homo sapiens
aggttgtagtgagctgagatcaagtcactgtactccagcctgggcaatagagtgaggcttcactttgtctcaaaaaacaaacaaacaaacaaaaaacaaacaaaaaaagtgtagcayattaaaaacaaaaagagacttcaaagtttggtgaaaaagttttaggttgagtgtgatgtcacatgcccataatcccagcactttgggaggctgaggcaggaggattgcttgagcccaagggttcaagaccagcctgggcaatacagtgagactccatctctacagataaattgattaataaaata

SEQ ID NO: 839925 - DNA, 538 bp, Homo sapiens
gctttcacttatttcaaagcagtaggatattaatctcacattcatattacttattttcagcccatttctttccttttttaaaaatcctaccctagaattgactgacmagtcacaacaatcagcagataccttacacctgtccacctcttccatggactgcctcaattgcaaattgccttgtttgtggtctgccctttgcagggcagttcacacctaggtactgaatatgtagggaagggtgtaaatgcttagccatttcaactcagcgtaggacgctgtgatgggcaatactcaacagaggttttatcaagcctgcatcacagttcaactctcttccccgcccagtatgtgtttttagagaacccaacatctgatgaataaataatgcatgaattgctcatacataagtttgaacaaaagaaaccagacacaaaaaagtatatattatgtgattcatttaaattaatttttaaaacaaaactaaaccagaatgatagagatcagaacaatgactaccttcaaatggctattgactgtg

SEQ ID NO: 839926 - DNA, 633 bp, Homo sapiens
ttttccagggtcatgactatagttctctagcaggttttactttacacctaccttcctctcatttgtattttcttcttccacttcttctcatgtttctcttttccatatttctgcatcctttggttgtacttttcttctgacactaatctcagcttctgcattggaactgtgagtccacagcattgtagagctcagcagagactcttgggagtgaaaacatgggctctggcttggcacggtggctcacgcctgtaatcccagcactttgggaggccgaggtgggaggatcacgaggtcaggagttcaagaccagcctgaccaaaatggtgaaaccccatcattactaaaaataaaaaattagcctggcatggtggcacacgcctgtaatcccagctactcaggaggctgaggtaggagaattgcttgaacccgggaggtggaggttgcagtgagctgagatcgagccattgcactccagcctgggcaacacagtgagactccatctcaaaaaaaaaaaaaaaagaaaagaaagaaagaaagaaaacatgtrctccttcagtaaggatgtccaatgaccaggaatttgaagggtgtatagtctgcgcagttttcaatctctccctttccatggaa

SEQ ID NO: 839927 - DNA, 537 bp, Homo sapiens
aaatttcccaacttttaatgtttgttgtgtatctcttctactggatcttttgttttgttttgtttttggagacagggtcttgctctgtcacccagcctggagtgcagtgatataatcatgggtcactgcagccttgacctaccaggctcaagctatccttccacttcagcctcttgaatagctgggactacaggtgtgtatcaccacacctggatttttattttattttatttttgtagagacagggccttgttatgttgcacagactgttcttgatctcctgggctcaagtgatcctcctgccttggcctccgaaagtgcttagattataggcatgagccaccatggctggctgaccttttaagactagagtcatagttattttgaagcccatgtctaatatttttacstgggccattcttaagtataatttttttgatgtttttatcctttgaaatgagtaattttgttcttgctttttgggctgtatcatattttttattgaattccagaattggtataaaagtatagtagaat

SEQ ID NO: 839928 - DNA, 581 bp, Homo sapiens
atcaaaagcattgcgatacctttctgactaattatactgcacatcttctggaaatggatattttgtcctctttggtgtctatgtaaatgttataaaagtttratttttttgaaaattgtttttactctttgtatcacttattgtttctaatacggtgattgttcaagcactgtagccctgtatctgaaagtagcacttggtgtagaagacattcttgtttaaaaacattggcagaatttatcgttttgtttgttttttgtttttttcttgtcttttggtacagaactgaaaaaatcacagtagtatgtcaccaatgttatgtaatcagcaatggtatctcttgttacagatttttaaacagaagttattattaaagaaaagatctgcagctttaagtattataacagtgaatttccatagtaagaaaaggcaaaaatatctctttctactgattctggagtttttccataatatttgccttacatgagatagattcatttgcttcagtgcttcttcatatatgccaagaaacatgtgaagtatatacttattccatattaatttacctcctgtcacttaca

SEQ ID NO: 839929 - DNA, 655 bp, Homo sapiens
caaaaagaaaccctttgaaacaaattacaaaggaaaatatcaatatattgaaaaatataaaacttscgtgcctcaaataaaaatgaaaaggaaaacaactaattatgggtaagtgtttgctaaatatgtcagtgagtattggtcttgttatataaattttattgatttctcatacatcaataagagcattataaatggccttataggcaaatggacaaaaagacataaacaagctggagtcacaaaagaggaaatacaaatgtcccataacatatgaaaaatatgcaaacaattaaaaattaaataattaaacaattaaaaaggtagttactaccgttccctgtttaagtgacaaggactcagtgtgagacaatgtgttaaagtagactcactcatataatactgaagggcgtgggaaattagtgctatcttcctggaaataaagatgcatacttgtctcaagagcattaaaatgtgcataccatttaatccaagaatatattagagaaactcatcagaaatgctacaaatactgatgtgcaatgatattcatcataggattccttgtaatacaggaaaaaatgagaatgatctaacattagggaaaggattaaattgtggggcatacgttggttagagtatcctctgcttctat

SEQ ID NO: 839930 - DNA, 558 bp, Homo sapiens
gtctctttaaaacgttaaaagtaaaaaaattagcctggtgtggtggcatgccacctgtagtcctagctacttgggaagctgaggcaggaggatcacttgagcccagaagttcaaggctgcagtgagctatgattgtgccacttcattccagactgagtgacagagtgaaaccttatctcaaaaaataaaaatagatcaagcatggtggctcatgcctgtaatcccagcactttgggaggccaaggcaggtggattacttgaggtcaggagttcaagaccagcctggccaacacggtgaaacccgtctctactaaaaatacaaaaattagccaggtgtggtggtgcatgcctgtagtcccagctacttgggaggctgaggcaggggggttgcttgaacctgggaggtggaggttgcagtgagccaagatcacgycactgccctccagcctggggaactaagtgagactctgtctcaaaaaaaaaaaaaaaaagaataaaaaataaaaagacacaaaataaagtctctgcaatgttgtgcaaaaatatatgccaatcatt

SEQ ID NO: 839931 - DNA, 491 bp, Homo sapiens
gaataaagaggctaaaatatcacaaaatactttacaaactataatgtcctgtattgaccaaacaaaaaaagtgttatcacttgtgaaagcaccaaatgttacttcaattgttgaattaaattttcactaaaactcaagagactgccatgctagtctgtaatgggcaaatattttaaatttataccaaaatggaagcactgcctttactgcaatcttttgatttagtctttaaataatagtcattaatctcctctatgctgatgtgatttagaaggcagtgtgttcatttttcccacctagcatttagattaatgccattctggcatttctttgtgcagggtaattcaagggacagccataccgcagagatggttattttatattgctctgtccagattactttatctacttgtaggtactagagtccaatcattcctgcttaraaaaattgaggaaggggcaagatttattttctcaagtatttttctaag

SEQ ID NO: 839932 - DNA, 656 bp, Homo sapiens
gggtcactacactagttactgcaggggaatttaaagatgattgctatccagcccatggattgaagaagggtatgttcctgccaagaatgcaataaaattccaggaacaaaataccaggcaaagcatggatgtttcctgagagaggtataatgtgatgctgcatttcaggaaaggataagttcacatctgtgttgaagtatcccagatgtgttcataataaagtatgatatgtgatttatctgaaaggagtgtaggaatcaaaaaaggatggatattgtgggtgacgagttctgctttggccatgtggttctgagtatgttataatgtattagagggaattcatgagaaatgcagacatagaaaggtagatcaagattatatggtggaaggcctgtaatgacagactggatagtatgtattgaatcccattgaaattttggaatcttcgagaaactttttgactcagaatcaggcacattttggcatggccaaaggtgtgggaaaatatctgtagaatgaattggaatcagatacagaagtgcaagcwctagttcaagattatggaggtcattaggagagtaatgaaaacctatattaggttggtaggaaaagtaagaaaaagaataataaaatcactgttatgaatgccatctgaa

SEQ ID NO: 839933 - DNA, 606 bp, Homo sapiens
cagtaagaaaattttggcaaaccacctcacaggaaaaaatgggcaaagttataaacaaatattttatagaatatgataaacaagcaataaatatgtagatttcaagcacgctagtaaacaggtaaatgctaattaaaatatatgatatattgacaaaaatttaagtctgaaagtgtcaagtttcaacaaaaagtaaaaacaagtggaattcttttatactgctatgaaaggtaaattgagtatgaccatttggaaaacaatttggttacctaataaatttcaagctgcttatgtcagttttctaaaattgccaaaataaattatctcaagtttagcagctaaaataatgctatctcacagttaggaagtcagaagttgagcgagctcagctgggaattctgcttaggatctcacaatgctgaaatcaaggtgtcggccagcttgtgttcttatctggaggctcaggttgatagcaaacataatttaattccttctcacggtttccacgtggcctccatgtcttcaagtcagcaacaagtaggttgagtgcctctcactctacaagtgtctaactttcwcttgcattgcatctcttctgcctttaaa

SEQ ID NO: 839934 - DNA, 523 bp, Homo sapiens
ccggcgtctgcgtccccagcacctgcccgctctgcagacgccagaaaggacccgcggcgctccctgctcccgaagtttcacctctcgctctgctctgccccggggacactcacccgcccgaagtcatcccgaatcccgccgccctcagactgccggatgtcacggagcctagcagccaggccgccgactgccccgccctggcaccgacccgggcaaattctcggcgagtagggcaggtgcaggacgcttgggacggcccccgcccttctctcctgaccgcccccacaccagcgcccccatctctaccctggacttttctcctccgctgccggtgatcgggcttctctctcccgcttaaagaaaaacacaatccccgcgtccacccctagtctatcaccacggtccctaccgttccttcctygctatgctgtgtccccgtgccctccaacctcgcggccttgacccacccgcagctcatgctgggggtccctaaattcggccttggtcccacctccaccctcca

SEQ ID NO: 839935 - DNA, 540 bp, Homo sapiens
aaggaatggaaaggactgcttggatccttgtccatagaggraacatgcctttccatgctaggagaatgagctggtttgcaagcctcattctgtctcatctgcaggtggtcactcaacatctacacagaccgaaatgatacccagagtagcattttcagttagtggcatagggagtgggctctggaatcagatttctgcgtttgaattcaggctctgacactagctaggagacttctgggaaagtgacttaacctttccaaacctcagcttcctcactgtgaagtgggcatgggactcgcctcaccggacttcagatgaggatgaagggaggccatgctggtaacatgcctggcccaaaagaagggtccagagcattttaactgctgtcattactgactgtctttaatctgccatttcccatgagcacttgttactcatttacttcttttttcaacattcttactatgctacaaggtccctgtgcctgttctcatagtttggttagtacaggttagaaaaataaagttttgcccaaggggt

SEQ ID NO: 839936 - DNA, 624 bp, Homo sapiens
gcctgacaacacaatagaaaagaaaatcctggctgggcatggtggctttcagtcttcaaaactttctcaaatctgtctggtctcatacctgtaatcccaacactttgggaggctgaggcaggcagatcacttgaggtcaggagtttgagaccagcctgtccaacatgatgaaaccctgtctctactaaaaatacaaaaatcagccaggcatggtgttgtgtgcctgtaatcccagctactcgggaggctgaggcaggagaatcacttgaacccagaaggtggaggttgcagtaagccaagattgcaccactgcattacagcctgggtgactgagcaaaacaccatctcaaaaaaaaagaaaagaaaagaaaagaaaatcccattttctgaggagaaattcaagccagctgcagaaatttgcataagtaatgaggagccaatgttaatcgccaagacaatggggaaaatgtctccagggcatgtcagaggtcttcacggcagcccctcccatcacaggcctggaggcctagaaggaaaatatggtttcaytggcctggtccagggtccttgtgctgagtccaccctagggatttggtgctctgcatcccagctgctccagctgag

SEQ ID NO: 839937 - DNA, 577 bp, Homo sapiens
catatactcttaagaagctctgatttattttttaatttcatatttaatttggtaaattattttactattatttaaaagttcaaatgcatatttcactgttattcaattactgagsattgacatttgcttgaaatatgtttctgaatatatcagtaaattttaaatttttttttgtcttagcaaggtactatatatgaaaataatcagaatgaatactaacaagctccttctgggattgttattataaacttgtttatattttaaatagtttatgtatatggttcaaaatttgaacactcaaaacattcaaataaggcagtgtcttccattcagaggtagtaactcatacattgggtggtgaaatatatttgctatgtaaaaacagattgctttttctagcgctaaaatgagacagaatagaacagaatgaaatagaatgtattataatatatataaacctctttcctacatgaattacccagtcttgagtatttttcatagcagcctaagaatggagcagccatcccctgctccccaccacaaacacacacacacacacacacacacacacacactt

SEQ ID NO: 839938 - DNA, 613 bp, Homo sapiens
tgaaccctgcaaagccacaggggtggtgctgtccaaggccttgggagcccatcccttgcacaagygtgccctagatgtaggacatggtgtcaaaggaaatcattttggagctttaagatttaatgactgccttgctgggtttcagactcacgtggggcctctagatctcttcttttggctaacttttcccttttttaatggcagtgtctatccagtatctatactccaatagtatcttagaagtaaataacttgttataattttacacaatcatagatgaatggaactcatcaccagatgagactttgaacttgggacttctgagttaattctggaatcagttgagactttagggaactttggaaaggcatgattgtattttgcaatgtgagaaggacatgagatttttttgggccagaaatagaatgatacagtttgaatgtcttctccaaatctcaggttgagatgtaattcccagtgttggaggtgtggcctggtgggaggttcttgggtgatgggggtggatatgtcacggcttagcactgtccttatgatagagggtgagtcattgagagatctggttgtttaaaagtgtgtgacaccacccctcttt

SEQ ID NO: 839939 - DNA, 580 bp, Homo sapiens
tcaccatgtgacatgcctgcttctgcttccctgakgtttacccagaagcccagtagatgccagtaccatgcctcctctacagcctgcaggaccatgagtcaattaactcacttttctttataaattacccagtttttgttattattttttttttggtaaagtaaaaaagtcctaacacacctattcagatgttaatttctggtttcctcacttagactgaaattagagtgcaagaaaacaattatttttctaaataactgtttaagaaaagaagcactatgtttatttctttgttcccaagtgcttgtctcagtgccttacatgtaataggcatattataaaagagtttataatatgatagaagtaacctgaaaactttgaaattaaagcatgtaaaacaaacttattttgctgagccataatatggagatatgctctttcatttatttaataagagttcaaccaatgttatcagtatgaagaactctacagagaaattagatatttaggagaggtctaaattctatcataattcaattattaatttattctcaaatatttataacccatcttctctgac

SEQ ID NO: 839940 - DNA, 558 bp, Homo sapiens
cttgttctctgaatctgtcagtcaattatgtgcatagttcgcaactaggacgggwtgtcctgtgaagaaaagataggcattaagcccctgtaagtatgaggattgcttgcgacatgtcccaagcaattgtagttcatcgctgagatcaagaatgacatgtttggctgggctcggtggctcacacctgtaatcccagcactttggaagggtgaggagggcagatcacctgaggtctggagttcaagaccagtctggccaacatggtgaaaccccatctctactaaaaatacaaaaattagccacacgtggtggctcactcctgtaatcccagctactcaggaggctgaggcaggagaatcatttgaacccgggaggcaaaggttgcagtgaaccgagattgcgccattgcactccagcctgggtgacagagtgactccgtctcaaaaaaaaaaaaagaaaacatgtttggctttgtggtacaaagcaaagttttcattagcaaaggtgaaagtgcccaatatcctgttatatcaaactcgattgattaatgagagggat

SEQ ID NO: 839941 - DNA, 617 bp, Homo sapiens
acaatgtacaattcaaaaaggaaattaaaacaattccatttataaaacatcaaaaagaataaaatatttggggataaacgtaaccaaggaggtaaaagacttrcgtacagcaactacaaaaaaaaattgctgaaagaaattaaagacaataaataaatggaaaggcatcccacatttatggattggaagacttaatattgttaaaatgacagtactacccaaaatgatctacaaagtgaatgcaattcctatcaaaatcctaaattttgtttaacagaaatgggaaaaatttattctcacattcatatggaatctcaaaggacatgaaataaccaaaacaaattttaaaaagaaagtcggaggtctcactacctgatttcaaaacctcctacaaagcataaagctagacatagagattcatgaaaatagacccgagggcccacaaataaacccttgcatatattttcaagtgattttcaccaaaggtgccaagaagtaccaaagatcctcattcagtaaagaaaggactcttcaacaaacggtattgggaaaattggatatccacaccagaaaagaacaaagttggatccttaccatacaccatatacaaaaagtaa

SEQ ID NO: 839942 - DNA, 617 bp, Homo sapiens
acaatgtacaattcaaaaaggaaattaaaacaattccatttataaaacatcaaaaagaataaaatatttggggataaacgtaaccaaggaggtaaaagacttaygtacagcaactacaaaaaaaaattgctgaaagaaattaaagacaataaataaatggaaaggcatcccacatttatggattggaagacttaatattgttaaaatgacagtactacccaaaatgatctacaaagtgaatgcaattcctatcaaaatcctaaattttgtttaacagaaatgggaaaaatttattctcacattcatatggaatctcaaaggacatgaaataaccaaaacaaattttaaaaagaaagtcggaggtctcactacctgatttcaaaacctcctacaaagcataaagctagacatagagattcatgaaaatagacccgagggcccacaaataaacccttgcatatattttcaagtgattttcaccaaaggtgccaagaagtaccaaagatcctcattcagtaaagaaaggactcttcaacaaacggtattgggaaaattggatatccacaccagaaaagaacaaagttggatccttaccatacaccatatacaaaaagtaa

SEQ ID NO: 839943 - DNA, 637 bp, Homo sapiens
tctaatgtttaacaaacctcaccactgggaaatcctttatttccaagctagctccccgctgcagaagttaaagataatttccttttgttctcttctcagcrgcaggagaacagctggtcgccagtctccatataataacctttcatatacttgaaaacttttattaagccacccactagtttctcttttccaagctgaataatcctagctcctttaacctttcttcataagtcttatttttccaaccttttaatcagttttgttctccccactgtattctcttcttgctctaatttatgtaaaagccctagactactggaagtgaaatctgagctgttaaggcactgaagtggactggagaggtagttcgaggcctgtgaagcaggagctagagatggcaagctgggatgacacagaaaaaactggagaaagaattcacatagtcaagatagtcttaggagtggtcttaacagccattctgaatttcccctgacttcttgcagagtcatcatatttccgaagctgtcattggataacattacatccagctttaaattctgtgaatgtcagtcttgaccaacatttggagaacatgttttccaaggcacccttcagtacaactttagactgcaataaa

SEQ ID NO: 839944 - DNA, 670 bp, Homo sapiens
tcttcatctctgtgagcctcagtttccttatctttaaaatatagataatagtatttacctcaaaagggtatgcatgaagcatatatgaaagttcttggcacatagtagccaggaactaaatattgttagtttccttttttggtgaaccagtgtatggcaagagaatttgtgatgtgattttggtgtagagtcttaagcaagcatggcaagtattttttgtttgttttcaacttcacagatgttagaaaagcttgtgttgtacatttatgtttagacattaggagagagattctttcttgggttgcaagattgtaggatttgtttgcagagtatctgtatctggacagagaggcattctcaagctcctggcccatcctacccaattcaggtagcaacaggaggggaaagaggcagttgtttgtataaggcatgtaaatgaaggctgaaaatcctgtagggtcaattcgtgtgtcctttggagctgaaattaatggatattttcctttgaaggatcgactctccaggctatatccaatacaatacagggacctcacactgtctttttgtgagggatcatatttrttttttcaggccttgatgaaaaccaatttgcctttcctgaaactagacatttaagctttgatgagctgacaaaggggggatgggcaga

SEQ ID NO: 839945 - DNA, 597 bp, Homo sapiens
cagccctttttccagggaagtgaatggttctgtcttgctggggttccaggtgccactggggtatgaaaaaaatactcctgccactagcttggtgtctgcccaaacagccacctggttttgtgcttgaaacccagggtcctggtggtgtaggcacacaagaggatctgatctgcagattgcaaaagccataggaaaagcatagtaacccagcctgatagcagagtccctcatggcttcctttggcttgaggagggaggtacccagcttgctgcatttcccaagtgaagtgacaccccaccctgcgtctgctcaccctctgtgggatggacccacggcctaaccattgccaatgcgatgaactgggtatctcagttggaaatgcagaaattaaccaccttctgcatcggtcttgctgggagctgcaggcttaagctgttcctattcggccaccttggttattgtctttagtgaagtacctsttcaagtcttttgcccatatttttatttggttatgtgtgtttttcttattattttgtaacagcgccttttataacctgaatgtatatatattttgtttaaatttatgtacagtaaaca

SEQ ID NO: 839946 - DNA, 608 bp, Homo sapiens
tctggttgctccagggttgggtgcagagatgtttaggatagttaagtcttcttgttgaattgagccttttatcactatgtaatgcccttctttgtcttttttgatcattggtgacttaaagtctttttttttttctgaaataaaaacagcaatcccttctcttttttaatttcccatttgcttggtagcttttttctccatccgtttactttgaacctatagatgtctgttcatatgagatgggtatcttgaagacagtgctactgggtcttgcttctttatccaacatgccactctactttttaagtggagcatttagcctgtttatggtcaaggttaatattgatgtgtggattttgttctgtcatcatgttgttaggtggtttttatgcacatttgattttgtagttgctttatagtgttgatgatctatgcacttaagtgtgttgtgtggtagccagtaacagtcttttgtttccatggttagcactctcttaaggacctctggtatgtcagatctgcttcttttagcatttgcttgcytgaaaaggattttatttatctttcacttatgaagcttagtttgactggatataaaattcttgact

SEQ ID NO: 839947 - DNA, 555 bp, Homo sapiens
tatgtgaagataattccgtttccaaataaggcctcacagcgctacaaatgtccacttgcagacttttcaaacagagtctttcagaactgctctatcaaaagaaagtttaaacactgtgacttgaacgcacacatcagaaagtagtttctgagaatgattctgtctaggttttacatgaagtgatatccttttctaccataggcctcaaagcgctcaaaatatccacttgcaaattctacaaaaataatgtttcaaaactgctctaacaaaaggaaggttcaactctgtaagttgagtgcagacataactaagaagtttctgagaatacttctatctaatttttatgtgaagatattcccgtttccaaggaaggcctcaaagcgctccaaaaatccacttgcagactttacaaacagggtgtttcaaaactgytctatcaaaagaaaggttaaattctgtgagttcaatgcacacatcacaatgtagtttctgagaatgattctgtctagtttttatatgaagatatttcgttttctaccatagggttcaaagccc

SEQ ID NO: 839948 - DNA, 562 bp, Homo sapiens
catacacttcaaagcgctctaaatatccactcggaaattctacaaaaagagtrtttccaaactgctctatcaaaaggaaggttcaactctatgacttgaatgcacacatctcaaaatgtttctgcgaattcttctgtctagtttttatgtgaagatatttccgattccttctaatgcctcaaagagatccaaatatccacttgcagattctacaaaaagagtgtttcaaaactgctctatcgaaaggaaagttgaactctgtgagttgaatgcaaacatcacaaagtagtttctgagaatgattttgtctagtttttatatgaagatatttccttttctaccgtaggcctccaagtgctctaaacgttcacttggaaattcttcaaaaagagtgtttcaaaactgctctattgaaaggaaggttcaactttgttagctgaatgcacacatcacagagaagtttctgagaattcttctgtctagttttatatgaggaatcctctttccaacgaaggcctcaaagaggtccaaatatccactttcagattctacaaaaagattt

SEQ ID NO: 839949 - DNA, 585 bp, Homo sapiens
atgggaaaaggtgaggagttggtggaagaattgatggcagccatttttagagactagctccacaatgtctacagcaagactttccatctcctgtaagccctgttcaaactctattaaagtgatcaaattcactttaggaggcaactaaatagctgaaatagtttgtatattagttcctgcacaaatctcacgttaaattgtaatttccagtgttggaggtggggcgtggtgggaggtgatctgaccatggggtcaggtttctcatgatggtttggcaccatccctttggtgttgtccacacgatagcgagtgagatctggtagtttaaaagtgtgttgcatccacccgtttctcacacctgctttcaccatgtgatgtgactgctccccttttgccttctgccatgattggaagcttcctaaggcttccccaggaaaagatgccgctctgctttctgtgtggcctgcagaaccatgagccaattaaaccacttttcttagaaattaccyggtctcggatatttctttatagcaatgcaagcatggcttatacaataactttagattcagttttgaggtctgcatc

SEQ ID NO: 839950 - DNA, 585 bp, Homo sapiens
atgggaaaaggtgaggagttggtggaagaattgatggcagccatttttagagactagctccacaatgtctacagcaagactttccatctcctgtaagccctgttcaaactctattaaagtgatcaaattcactttaggaggcaactaaatagctgaaatagtttgtatattagttcctgcacaaatctcacgttaaattgtaatttccagtgttggaggtggggcgtggtgggaggtgatctgaccatggggtcaggtttctcatgatggtttggcaccatccctttggtgttgtccacacgatagcgagtgagatctggtagtttaaaagtgtgttgcatccacccgtttctcacacctgctttcaccatgtgatgtgactgctccccttttgccttctgccatgattggaagcttcctaaggcttccccaggaaaagatgccgctctgctttctgtgtggcctgcagaaccatgagccaattaaaccacttttcttagaaattacctgktctcggatatttctttatagcaatgcaagcatggcttatacaataactttagattcagttttgaggtctgcatc

SEQ ID NO: 839951 - DNA, 632 bp, Homo sapiens
tttgtagcccaaaatacacttgatatgatttcaattttcttaaagttgttaagacttatcttgtagctgaacgtatccttcctggaaaatgttctatgtgtacttgagaaggatgtgtattctgctgctgttggatagaatgttctgtatatgtctgttaggtccatttggtcaaaagcgtaattcaaggccaatttttgaagtttattttctgtttaaatgagctgtccatagttgaaattaaggtattgagtttcttactattattgtattgcagtctatctctttcttcatttaataaatgcgttatatatttaagcgctctaatgttgggtgcctatgtatctacaattgttatatcctcttagtgaatggactctttatcattatacaatgatctttcttgtttctttttatagtttttttactgaaagtctattttgtctgatataagtagagctatccctgctctctcttggttttggtttgtatggaatatctttgtccrttttttcccttctagtctatatgtgtccttattagtaaatctcttgaaggcagcatatagctgaatttttaaatgtcttttgattggagacatattgtaaatggtttgattaatccatttacat

SEQ ID NO: 839952 - DNA, 631 bp, Homo sapiens
  misc_feature 1, 2, 3, 4, 5, 6, 7, 8, 9: n = A,T,C or G
nnnnnnnnnaacttccctttcttcttctggccaccagtaggttaacaaacatttattgggccaaataactaacctacgatatgcaactaaccaaatacccttttgccatcrctggcatctgtaccatcctcagctgatttaatcttatatgtcattaaaggccatgaccaagggcatcctgctccctagaccagcctttaccttctcccttggtgcccccacaccccttcgggtatgctatgtaccttatctgtgaattatgtctatgcatgcacacataggtctgttctggtggtcagtgggctgaaggacagggaggacagtttgttcattttaaattttatccatttatctgttgtgttttttatctcacccctttacctattttgtattttttggctttttttcatctttttctgttatcggttatcatagtgcctcacgcatggtagattgtaaatgttaaactgacagtagcattttagagctgtaatggacattagaaaaggtgctgtcaggcatttttattttgtagatgataaaaatgagatcttgagatggtctctgatgccaactcagagtttgtttttccttgaaggatgcttgcttgtcctctagtataacccatggg

SEQ ID NO: 839953 - DNA, 554 bp, Homo sapiens
gctggaattacttagaggtattgtttcaatttcttccagtccggctggaaatctcctgttgatgataaataactgaatataatttctgatgtgacmtctcatttcccaaacagaagcaggatgcactccctcaatccatgtcttgcagctcctgctgcccagtggaggaaaaaaatatcccacacagacagctctgctcggatttcagcaccctctctccttcctccaggtctgcagaggcctgttacccgttaggcgcagcaggcgcagtccctcctcccgcttctgttccagcaaaacacttacacaggctgaaacatcctacaccccagagtcaaagttcttaataacattttccaaaggactgagtgcttttttatgaatgcatggagaaaatatggtgcgggtttaatattgtattatgagcctctgacgaaggattttaaaaatatgctttatgcatgaatatataaaataggcatatgttgcagtaaagtttcactgttgtacataaagcatattataataaaagttgtaaagttagcccttagtgg

SEQ ID NO: 839954 - DNA, 586 bp, Homo sapiens
gaggcggaggttgcagtgagctgagatsgcatctcaaaatcaatcaatataattcaccacattgccaaaccaaaaaattaaaaccgtaggatcatctcaacagatgcagagagatactcgatgaaacccaagaccattttctgatacgaagcctcagtgaggcagctgccgagaggaacacgctcaacccgatgggcctgccttgaaatgccgacatctaacaccaaggcgcaaggtgaaggagtgagtccctttcccccaagatgaggaaaaacagagggtttctgttctcaccactttgactgaactttgtattaaagatttcagccagcgtaataataaaagaaaaagaaacaaaaggcatgtgatttgttaaaaggaagcaaactgtcttcattcacagacaacatgatcatctaagtagaaaatctgacagaatgtacaaaaaagcttctagaacgaatgagtaaagtgataagtgagtttcaaagggtggcaggatataagattgataaatgtacatcgactggacaactggccattacttacaagttaaatgcatacctactctagggtccagatactc

SEQ ID NO: 839955 - DNA, 567 bp, Homo sapiens
gttttcttcataaatcccttagggttttgtcatgctttttcaatcttataaaaaacctttttctcctctgattggataatttgaaataacgagtctttgaatgtgcasattccttctcctcctcctcctcctcttcttctacttcttcctcttgcatgatcaaatatgctgatgaagctctctattgaatttttcatttcattcattttattaatctctcctagtttcaacttgaccctcaagaagatggccatggtgggcctcactaattcctcttgaaaaaatccagcacaactgtctggaacccatctcaagaagctatctgtatccataacctgccaaggcagagagggcaattcccagggaggtggtgtcacctttgcctgtgaagcagcatacagaaggccctccttctgtagaacaggcctgatggggaggacaggacatggggtggaacctcttgcattgactctggatttaccacaaactcacgagcccccaggggccagcatctccttgatccagctgtttcctccaggtttgtctctaaccatctgcttgtcagtc

SEQ ID NO: 839956 - DNA, 471 bp, Homo sapiens
cacccctccagagcgtccgtgccaaccttccaaatcctacacacaggccagtgcacttcagcacatggcagagagaaacacacacccctctagagcttcctgggggagacctggctggttgttttggaattgctgcttccctatcaccagtgccttgtagaagtgtccccacctctctgtagcctggcaggtgcttggggagggctgagcacctgggtcttgctgcgggtcccagagcagagtccccccttcccctgacaccaatctttgggctgaagcccatgacaggggccccacaccaaggcagaagcaattatttgagagatcaaaacgttgctccctggatagaaagcctgctgatggtgtggctgaatccaaggacgacgtcgtctgtagaaacggacgtaggaggwgtgcttaaggcaggatttctgttcctagggtgtgtcttggagactccaacgaggaggg

SEQ ID NO: 839957 - DNA, 675 bp, Homo sapiens
caggcatgtcttccaggcaggatccccagggcaacagtcaaggacgggaagggaggacacrtgagcagttgatgtgaaacctggacgtcctacgcactgtgttcactctgaggaaggctctgacatagaaacagaagccctcagaactaccagcaattcacgaggtttactgtccatagtcgtagctaatttcctcattgatctggtgaaacgtatgcttggccctggttttttgttttttttcttttcttttctttttgagatggagtctcactgttgtcagccagggctggagtgcaatggcgcgatctcagctcactgcaacctctgcctcccgggttccagcaattctcctgtctcagcctcctgagtagctgagattacaggtgcccaccactgtgcctggctaatttttgtatttttagtagagatggagttttgccacgttggccaggctgttcttgaactcctgacctcaggtgatccacccacctcggcctcccaaagtgctgggattacaggcgtgagccccagcacccggcctgtgtggccctggcttttcactgagacactattttgtccagcatccctcctgctaagagtttccatcgtgtcccgtggaaggcggtggctgggaagtggctgcctggctattggatctgcagggctgtggcc

SEQ ID NO: 839958 - DNA, 580 bp, Homo sapiens
cgccatgagccactgtctcaacaagcacgaggagaacctgaagggcaagaagcagcagtggaaggagtggctgtccccgctgaggaaggaggaaggagcrcctgtccctgctgaggaagtacacggtcaaggcctgagtggtgcattgtcagtaaagcacagctggctgagaaacaaaacaagatgtttagagcgttttgtcattcctcagtggagggtgtaactgtaaggcgcgttccatttctttggagagagctgtgctgtcaattccacctaccacatggttctatctcccaaccctgagagcagtgagaggggctggagcagatgacccatgagggtttttgtagaagatttctctggagatctgcgcggtgagtcccatctaggggagaggtggggatgtgacacctcctgagactaagtacagtggactcagggacaccgtcaaaggtgatgatcgagagatctgagggtgtcgtaagttctgcctgaagaaaggctacaggacaaatcccctttacctcttggcaaagaagagaggctttgataataccctccacaagggttaatacagagc

SEQ ID NO: 839959 - DNA, 564 bp, Homo sapiens
caagccaaagaggaaattctcatggaacctgcctcgctgggatttggacccgcttgggacttgtcatcctttcctccttccattcctccctgcgggagggagcgcctgttcagtggctgtcmtgacattgtgttttggaagcacgtcgcattgggtttgcagaggcatggctggagaggaatgctgcctcggcatggctctggcctcggcctcccttacttttgatttaggcgatgttaaggcaggctctgggttttaaccctcacagcagctggggtgagttatggctgtgggggctgttgggatggaatgaatgtgttttgcctgtgaggaggacagttggggttggtggcagaattagaggctgggtgtctgcactccccactgccagcatcacatgctgaaatcctaatgagcctccttgttatttccctgttttctcaatccctgaaaacatctttggaatttccacccgacagatactgtgataatagaagttatttcatctccagggaatgtttccaaacttctaatgaacccatctggaatgtaccaattaaccag

SEQ ID NO: 839960 - DNA, 509 bp, Homo sapiens
aactctgtgagatgaatgcactcttcacaaagaagtttctcagaatgtttctgtctartttttatgtgaacatatttccttttccaccacaggcctctatgagctccaagtatccacttgcagattccacaaaaagagtgtctcaaaactgctcaatgaaaagaaagcttccctgtaacataaatgagcacatcaaaaagaagtttctcagactgcttctgtctagcttgatgtgaaaatatttccttatccatcataggactcaaagtgctccaaatatccacttgcagatactacaaaaagactctttccaaactcctcaatcaaaagaaaggttcaactctgtgagatgaatgcactcatcatgaaaagtttctccaatttcttctgtctagttttcatgtgaagatatttcctttttcaccatatgcctcaaagcactccaaatatccatttcaggattctacaaaaagactctttccaatctagtcaatcaaaagaaagtttca

SEQ ID NO: 839961 - DNA, 672 bp, Homo sapiens
  misc_feature 1, 2, 3, 4, 5, 6, 7, 8, 9, 10, 11, 12, 13, 14, 15, 16, 17: n = A,T,C or G
nnnnnnnnnnnnnnnnnagtccaacgttttttcccagtcagtcacatcctgggatccagtgtgtaaatccaatatcgtatgtcttgtgcataattgttccaaaggatcttattttgtgaactatatgtatcagcagtgtacattaccatataatgtaaaaagatctacatgtaaacaatgcagctaactatccaagtgttataccaactaaaacccccaataaaccttgaacagtgaaaaaataaataaataaatgagttaatgcatgtaaataaaaacgtacataagagtgtatatgttcaataataatttgctgtcctcaatcatatctcaatgtataatatttctatgtattcttatcttctccaactagactgtaaagtttttgagagcaggcactaggtcctactcagcacttggcctacacttaggttcagtaaccctcgttgaagggatcagcatatttctgtgaggcacaaccagtgtgtggcttcagcttcagctttccaaacagtctgtgattttgttagtagaattgtgaaatttactcctaatrtgtggaacgcatctttgcctgtggttttattttgttaatttcattgtgttctaacttaggctaagttgccatgatgtttttgtgcgaaaactgattttatttttatttttcatcat

SEQ ID NO: 839962 - DNA, 639 bp, Homo sapiens
agagtctgaatgctctaagcatgaataagcatttcacagaatcagaaaacgcaaaacaacctttgaggcaacgctttyccctgctaccaaagagcctatgtccccagccagggttcaacagcctagaccaggaacaccagtctctcaggccacgttcaccatagccccagggtctgtctcggggagtgtgcttctctggtgagccagaaaattctccattattccctgcttccagaaaaatctctcaaagaaatgcaattagggaaaattagttcttacattatcacatcttctgaagaggttggtctctatttctcgtaaccagaaataattattttcaaatctatttgttttttctaaacggagtggtatcttctgtctctggtgtgtgtggagcaaaaaatttaagggaatttcaataacttaggcttagacaaaacaagtgtttgactttagctctcaagagctggctttggctcccagaaggtgactaggtttagggaccaggttagggaagggagttgacagggacatggcacacttgccaccatcctgaattccttcattttacctgtgaagattatcccatttattttattattatttattttaatgtattatactactgcattataaata

SEQ ID NO: 839963 - DNA, 617 bp, Homo sapiens
tcaatttctatcctctgttggaaagaccccagggaaataattaatcagcctgcctgcttgcaacacttccagggcttgggtcacaagaagtgcactgttcgcaacagatggcagagcaacaggctgragaccctctccctcctccagccgccaccgcctctgtggtcagcagtgcccgcctggttacttccataaaccttctcccagcacagccctgtgactctaaggagaaatccttcctccacacatccctaggactttcctctgatcctcctgggtaatttgtgttttagttcaaggtcttggccaaggaagtatggtgggcaatttcatttacagcctggaattaggcacagagttgtcttcaggtggtcaggccccattagctgccttggtcttgtctattaacagatgactggcacctaagagctcctgaagcaggagcacccagacccaggccctgttagaaaccaaaggaggcctcagatgttctcatatttttaagatctcaggatattttaaaaatgaataattcccaaaacaaagtggtatatttaaagttgcatgagggatgcctccttctattgatcctttcagtatgcctgcccatataacct

SEQ ID NO: 839964 - DNA, 542 bp, Homo sapiens
ttttgcaactctaatcattgttgcatagctgcataccaactgtattacttttcaatactttctaatttgctcatgattatattctaaatgtatcaatttcatcaaaaaaactttgtagcactacaatcaatgaaaagccactatcatttatcttagagttggaaaaacacaacctttttttttataactcacctgtatcccattttgactctgtacatagcacccatgcaaatcttcttggcacctgagaaacactgctgcagtgggctgggctaagcactagggtgagaccccaaggttctggtttaggctgtgtcacacattgtgtaatcttggacaactttctcagtttcctcaaccattaaaagaatttatactagaaggccctatccagctttaacattatatcatatacaattcagagctgtgggtcctactcttcctctctgcyactgtggctgataacaatctgtatttgtaaaatcactaataacctaaatgggaaaaggagaattcagctaagctacaggacggttcccatt

SEQ ID NO: 839965 - DNA, 572 bp, Homo sapiens
agggtctagtgctctactctctgggtgtttcccatgacaacaggaagctgcaccctccagctgaatttacacacaagtgggaccactgggctgaaggctccagcaaacattgcccatttggctaccagtgacaggagtaggaggggtggccagccatgtttggcctgaagcaggactgctggcactgagtcctggccagcaagtggtggtggagcaatgttagtgctctcaggcaccacaactgtggcctctgttcggactacggtgctggtgcagttcttctccaggacccaagccttgtagaggtcaccttggacttgggagttacccccgaaaaacatctgggtggatctttgcctcagtctagaagcatgatggggttgtgtgggagagccagagtgattctcccattcctagtcatgcacaagtccctgtggagagcacgaatctctctgggcgttctcactcactctttctgytttggaaaggttctcctggctttgagctgagcccagacaggctggtgcccagcttcaatcctctctgttctctgtctttccttgctaccttga

SEQ ID NO: 839966 - DNA, 403 bp, Homo sapiens
gtgcccgaccaccttgagtgcatgtcatcaggacctcctgaggctgtgttatsggtgtgtccttaacctgggcaaaataaactttctaaattggttgaggcctgtctcagatattttgggttcaaatacccaagggaggtatgaagctttttttttttcttccagtctttgcagctgtcttatatagggataaaatgggaggcaggttgcctgatgcagttcccagcttgactcttccccgtggcttggtgattgtgttctgggagcaccgtcgtaggtgtgttctgtggtggactgaaacatcgcgatgcagtgcatggtaagcattaaacacgggtgaacggtgtgctttcaccagctcccagctgctctttcccaacacgggctttcatccaggaaatgg

SEQ ID NO: 839967 - DNA, 546 bp, Homo sapiens
gctgtagtctccacaaaccagcagacttagtctttcctcctgctagttccgaggaatctgggcagtgcaaaagagtgggtttccccccagcatagccaccccctccatcaaggggcagccaaagtgctttgktaaactggtcctgctccccttgccacccaactgggtgagatcctccaacaggagttgtcagacaccctatacaggagcattcctgctggcatcaagttggtgccccttgaggtcagaaatcccagatgaaggagcaagcagccatctttgctattcttcagcctccttgagtgtcatctccaggtgcaggagtgaaccagatgaatagggcctgaagggaacccccagcaaaccacagcaatcctacagaagagagatctgactattgaaagaaaaacaaacaaacagaaagcaacaacaacagtgtcaacaaaaaagtccccacaaaacctcatctaaggatcagcagcctcaaagttcaaaactagataaacccatgaagatgagaaagaatcaatgaaaaaaaatgctgaa

SEQ ID NO: 839968 - DNA, 544 bp, Homo sapiens
catagccaccccctccatcaaggggcagccaaagtgctttggtaaactggtcctgctccccttgccacccaactgggtgagatcctccaacaggagttgtcagacaccctatacaggagcattcctgctggcatcaagttggtgccccttgaggtcagaaatcccagatgaaggagcaagcagccatctttgctattcttcagcctccttgagtgtcatctccaggtgcaggagtgaaccagatgaatagggcctgaagggaacccccagcaaaccacagcaatcctacagaagagagatctgactattgaaagaaaaacaaacaaacagaaagcaacaacaacagtgtcaacaaaaaagtccccacaaaacctcatctaaggatcagcagcctcaaagttcaaaactagayaaacccatgaagatgagaaagaatcaatgaaaaaaaatgctgaaaacccaaaaggccagagtgcctcttctcctccaaatgattgcaccacctctccagcaagggcacagaattgaacagagaatgagatgg

SEQ ID NO: 839969 - DNA, 636 bp, Homo sapiens
tattatcatactgactcctggatccccaaaagagaaatgctgtggaacaagacagtgcaatcattttcctgtgcatttgattgcaaagtaacccaaagctgatcagtccattctgtgatcagcccatcccccaggggagtcttatctctcagccggggtgggggcatttccatactttctagctggccgtgagcatgcttttctgatccaaatgtgcaaaaagctgtgtgtcccccatagttaccattagccatccctaaaattatatttagccatagattttgagagggatctatctactttcaattcctggggtttcacgaggaaaacaggtttttcccaaagcaggatctatggcacctcctccattttccccaaggagtcccaagctgttagaagaagttctcttagatcctctcttgtgtgcatcaagagtggcaagacaaaatggagaaaagctattcagccaactgagaaggaaaaaaaccttttttctccagaaaagaagattcaagaagagaaaaaatcataaagaccctttaaatatatgcgtggcttagatatctgcttttaattaagctgacttttaaccatagcgctytttaaaatttcttattaccctactttagccaggcc

SEQ ID NO: 839970 - DNA, 609 bp, Homo sapiens
tacatgcctaatcctgtcccccacagccatcaggaaaaagtagaaggcagattaatcccaataaaatagcagttaacatcccatagtaycaaatccatttttaaccgagagggactttactgaagggagagcctctaacccattcctatcttttaccccggtaaaatgtaccccactactttcccagagtcagccagttggtgctacagcctatttcctttggctcgagatcacaactaagccaaaagttagcagatttaattttttttaatcaaagcttttatttgacttaagctttttatttgactttcataaagtctttaaataaaaatactgaaatccatttagaagcttctgcctatcaataggcatctctagatgagactaatttgggagccctcattttcaaacgcacttcagtgcagtgttgttcatttggaacattccactataagttatgtttagtaagatttcaccatttctgtcagactttgtggcttctggggcctaatacttatgcatgtataagccagaaggaactcagttcttcagaaattaaggatcccattttcacctaaaatattggctttctctcaggtaccctttatc

SEQ ID NO: 839971 - DNA, 402 bp, Homo sapiens
attaaagttatatttacatgacactgcattctgttgagtgtgcaatagtattatgtttttaaaaacatgtacaatcatctaaaccttcaatgactcatcatctttttgctggtggaaggtctttcgtcaatgttgatggatgatcagtgatcagggtggtagttgctgagaattgaggtgacttgcaatttcttaaaataagacaacagtaaagtttaccacgtcagttgattcctcctttaatgaaatatttctatatagcatgtgttgctggttaagaagcattatacctacaggagaaattctttcaaaattcagtcagtcttctctaaccctgctgctgctttattaaytgagtttatgaaataatcacaatcttttgttgtcatttcaacaatgttc

SEQ ID NO: 839972 - DNA, 498 bp, Homo sapiens
  misc_feature 169: n = A,T,C or G
cgtaatttaagcctcataggctataggtacattagttgaaactgacttttttttttaactagtcggattctaatttcatgcaggttggcttcctatcaatcccttgctttaayagagagttgccattttgagttcactttatagcatggtctagtcattatttttcttngcattaggaaggatttgtgtagtggtgagactagccaagtgttctttttttttttttttttttctgaagagatttgatggtgtagcctataacttgtacttctaataatatcaagaagaaagaaaattgatttcatttctgagttctccctctatggtttctaaattaagacatgatggttaacgggattaaggttgtatagtcttggctgggaacactgagggagcatttactccctttaaaatatgaacttatataacaaaagaaacaggcttccatacccttctgtgacagggaatgtgtagaggatagagaaggtaaggaaaaag

SEQ ID NO: 839973 - DNA, 560 bp, Homo sapiens
agatcataaattgaattaaaagttaataacaggtctttgagaaacattttgttttataattggcccacacgtattcaaatgtaggaatcactgttagagcacactgcttataagagaaacctgacccaagtatttgactgctcctgcacacagctcttaagtgtagataattaaaattgctagtcacactatgaccgttgtctctgtagaaagggtaggctgtgtcatctcactcctttgttttgataacttcttgacaccattgtgctactaacccttgtctcgttgaaattcagactcctgttttaaaaacactgggtctctgtgatttcagtgctgtcatgaatacatccagtattgaaaggaacattcggaaacttccagtacaataatttcccttaataaaagacaaaaattagatccagggagcaagtaagttgctcaagasaaatggaaaactagaattgctatctaggatgtcatgttaagcagatttcattaggggtattgatgacatgatttgtgagatagaggttgttattggagaaccaaacatcaaa

SEQ ID NO: 839974 - DNA, 505 bp, Homo sapiens
cagatgagctcagcctgcagaccacactttgagcagcactgcccaagcccacggaaattccacctttccttgttggatgcactatcagaaaagggaccagaaaaggtgaatttgatgagttaggaagaaaggcaataccggatgacaaccttgataccagagagactctccattcagtctgcctccagccggggaaggaggagagtgagttacagaagcagatacaaggagggaacacaaccccggccttccggacccagctccagtgccagagagtccgtgggctgtcaacctcccctcaccacctggactggtttatctgacgcttgatcgaagtgagcctgccttttacccccaggttaagaaggtcactgcaactcatttcttagacaccagagtgtgtcaaaaggctggtwggcttatcacgagaaaaccatcagacacagtgcaatagatggagaccctaccaaatccctgacctgtactccttaaaactgtcagtcat

SEQ ID NO: 839975 - DNA, 400 bp, Homo sapiens
attttactagccactttactccagcctgggcgacagagctagactctgtcttaaaaaaaataaaataaaataaaataaagaaagtgaacagttccatggcatttagtactcatgstgctgtgcaacccccactgtagcttcagagcatttccatcattccagaataaaagcccttgcataaagcatcttgtaagctgtaggaataagaaagcctcataaccatggcttaattgggaaggaattgtctttttgtgataaatccaaaagaatgtaaaaatgcatttaaaaaagatttgaaagaacatgaaaaggcagttcacaggaaaaggccaataaacctatgagcagatgctcactagtatgtcaaagatgcaaatgaaaacaagatatcattttttca

SEQ ID NO: 839976 - DNA, 571 bp, Homo sapiens
tctgcatttattattcctgctttcctataaaaattktttccttatcaactatttggttactttgaaaaacaggtcagtagaaaagacaagacaagtacttgatgtgttcccttaatcagttttcagaataatgagttgttgccctggcaaccttccatggttataaatgaatttttttttggtcactgtgaacttctagactttatatgtgtttcaatcgattgtggtcattattctttttggtgctcagatttttccatttttgaccatagaaatttctttctgttagcttttgtcttcttttgatgtgaccctagtggtctttaatatcacctttctttcaggcatggcaagcctcaccttataaatgctctgctgcatattctgaatcagccatttttccaacagacaagttttttgttttgttttgttctgttagtcaaaacataaatggcatttagaacaaacaatctaagcacaccatacgatttgcatcttcactgaataaaagctttttaaactgtcaccaatcttacattgttcttttttctcttgcacttttgttcccatt

SEQ ID NO: 839977 - DNA, 556 bp, Homo sapiens
tgttgaaagccaaggcaaatgaaaagctagacctcttataccaaatarccaagttgtaaatacaaaggaaaagttcttgagggaaattaaaattgctactccactgaacacacaaattataagaaagcagaacagccttctgacagatatgagaatatcagaggtcctcatagaaacccagaccagccacagcacttctttaagccatagcctaatccagagcaattccctaactctcttcaattctgtgaaggctgagagaggcgaggaagttacagaaggaaagtttgaagctagcaaaggttagtttatgaggtttaagaaaaatacaagggaaggaacaagttctgatgtagaagctgctgcaagttatccagaagatccagctaagataattgatgaaggtggctacactaaataacagattttcaatgaagaagacatggccttatattggaagaagatgccatctaagacttctgtagctatagaggagaagtcaatgcctggtttcaaagcttcaaagaacaggctgactctcttgttaagggctaat

SEQ ID NO: 839978 - DNA, 648 bp, Homo sapiens
aaaatgttttactttcattttttggttaatgtagttattacagtttttaaaactagggtgaaaggactaaatacctacccccccacacacactttagagatgtcttcctatttttttaaaactccagatcagaatccacttttattttacttaaagccatagtttatccaaggtgtggcttaggcctttctctcaaaacccattctcagaagagggacccttgactcacaggtgttctcctctcacctgccgtgactcacgggatgcttttggatagaacccaggaaaccttacttcatttctctgcctgagcagtggtgtttacgcccaccagctgtagagatctgggatggtgattcattggctggttttggtacagttttgttacatgtagagatgaaaagggttatgtgtgtatatttaagcagtatcactcagaaaaaagctgcatttcattaagtgtgtttaggtgaaaagcttagctgtgggtttcccgaaattgtaccttgccgtctttcccagtagagcacacttgtcttcccggccagatgcagggctttagcacgggaagtattaaaatctsttgtttccctgctttatgtagggtaggtcataaaaagcatatgaccttcataaagtatctgaagg

SEQ ID NO: 839979 - DNA, 506 bp, Homo sapiens
cagcaccatctctgctcctgagaggatgtccackgcccagtggcgagggcacatgtgggtgcgtcactgcacagctgtgctgtacagcgctgggagcgtgcgaggaggatcacctggcatgcaccgtgtgcagtttcaccagagccagtgggaggagtcacacacaacagacgtcaaataggaacgctgcaaaacacacaaatagcatctccacagctaatgtaaaatagttttctggataggttcccttcagttaatgatgaaaggtgatgcagctatcggcaatggctggagactagctctgcggtctgctcgtggataaccgcgctccctcgctgccgggccacccgcacagccgggcaaaccaaaaggcccactttttcatgctgtacccaccacttctgtttccccgcaggcatcctactttctaaactaacaccttttcactcccgagaattctaacaaatattatacaattcctacccgcatctaccctccacctggac

SEQ ID NO: 839980 - DNA, 644 bp, Homo sapiens
ggttctaaatgcagtgacagcatattataatcacagatatcataactagcctgccaactatataactttgctacatatcactagtacatatttccaattgatttaattttaaaatctggtatcagattaaatatttgtagacagtaagtaccaaaaaaagtcttttttttcttaccgcatttaaattaaaagaaaatattatctttttctaattataaaaggttagtagagaaaatagaaaatatagaaaagtcctaaggaaaagaaaacacagatttgtcaatacacctcccagcaacgatcattaaggttctggtgcttcttccctttggtagcttttctatttctgagcatgtttcggatgaaattaggcgataagcatttttcctatttggaatatgcttccactcaatgactttggaccgccgttcccactcagcaccacgtcctccacaatacacgcaagtgctgcccgcggtttgttgcctggtgttaccgtcccaacgcagaaggcctcctgcaggaaccctgcatcatgcctggggccccagcacactccgcggaggcagggctggagtcaccgggwgttgagggtgccggaggcctggcccacccgcagccccgcaccgcgcctcaccttgatg

SEQ ID NO: 839981 - DNA, 645 bp, Homo sapiens
  misc_feature 58, 143: n = A,T,C or G
agatctcattgtattttcacatggctgagggagagggagaggaagcaggctctctgtnctctcgtttataattccgtttatgaaggctctactctcatgccctaattagcttccaaaggccacacctccaaatgtcatcactntgagggttaggatttcaacatacgaatgttggagggacacaaacattcagtccataacagcattctgtgacctttttactataccaaatatctttgcagcaatgacaacaaaaacagaaataggccaggctcagtggctcatgtctgtaatcccagccctttgggaagttaaggtgggcagatcacttgagcccagaagtttgacaccagcctgtgcaacatggtgaaacttcatctctacagaaaaatacaaaaattagctggccttgtggcacatgcctgtagtcccggctactcaggaggctgaggcgggattattgcttgagcccaggaagcagaggttctagtgtgccatgatcatgccactgcactccagcctgggtgacagagcgagaytccatttcaaacaaaaaacaaacagaaacaaccagaaataatataaaggcaattaaattttgagcagtgttccagatcctttcaaattattccccatggcttatgt

SEQ ID NO: 839982 - DNA, 645 bp, Homo sapiens
  misc_feature 58, 143: n = A,T,C or G
agatctcattgtattttcacatggctgagggagagggagaggaagcaggctctctgtnctctcgtttataattccgtttatgaaggctctactctcatgccctaattagcttccaaaggccacacctccaaatgtcatcactntgagggttaggatttcaacatacgaatgttggagggacacaaacattcagtccataacagcattctgtgacctttttactataccaaatatctttgcagcaatgacaacaaaaacagaaataggccaggctcagtggctcatgtctgtaatcccagccctttgggaagttaaggtgggcagatcacttgagcccagaagtttgacaccagcctgtgcaacatggtgaaacttcatctctacagaaaaatacaaaaattagctggccttgtggcacatgcctgtagtcccggctactcaggaggctgaggcgggattattgcttgagcccaggaagcagaggttctagtgtgccatgatcatgccactgcactccagcctgggtgacagagcgagactccatttcaaacaaaaaacaaacaraaacaaccagaaataatataaaggcaattaaattttgagcagtgttccagatcctttcaaattattccccatggcttatgt

SEQ ID NO: 839983 - DNA, 358 bp, Homo sapiens
aggtgtggtgatgggcgcctgtaatcccagctactcaggagtctgaggcaggagaattgcttgaacccaggggktggaggttgcagtgagctgagatcacaccactgcactccagcctgggtgacagagtgagactccgtctcaaaaataaaaaatatatatatagatatatatagtcacatttattgatcttttcaaatcttactaatgctgtttatattacagcctaggctgttgattctgttccattgttctgttccaatttcacactgtcttcaaacatcatgtttttaaaaggtatcttagatccctgagtctgtaataagactgaaaaaggggaaggggggacataaaaaat

SEQ ID NO: 839984 - DNA, 598 bp, Homo sapiens
agttgagttttaggatgattgaggaggagagatgggactatgagtgtttatttattacatatgggcatacacatggcgtatacrcaaggaggtgcacatcatgtatacaagactatggatgtttgcatgtgtttctttgaaggtgagtatgttttaagttttttaatcagcaaacagtttttcagaacctactaagtacaggaccccaagtgtgttttagacattaaacagttcctgccctctaggaattcaataaagaatgcagaaagaaagagcctgtggaggtccctcagctaatgaaacctcctgaactccagtctatattagttttaccacctcttttccctgaaacacccaaagcctccttgtatggaactacagtcacatgtcactgaacaacagggatatgttctgagaaatgcatcgttaggcgattttgtcgtcatgcagacatcagagtgtacttccacaacctagatggtgtagcctagtacacaccaaggttatgtggtatagcctattgctccaaggctataaacctgaacagcatgttactgtactgaatactgtaggcaattataacacaatggtaagtatt

SEQ ID NO: 839985 - DNA, 613 bp, Homo sapiens
atttggacatttcatctgattttccttagactcatacataatcgtaacactgtaatgcacatcaacctaayggtttttcaggaagaacaaatgaaaaaaattgcatctcagaatctagtattacattctttcatgtcctttagcagcgacgttttcatatcatcttttcgtatttctggttacattatttcaaggcattttaaattttttgtttgaaatgcgaatgagatatttactgatgtctgagcagattactgctggcacattgcaaagctactgatttttacatacaaatctcttatacacataccttactacattcttgttttgtttctgttagtttttccgtttattctctggaaattttttggaaattatatctgtaaataatggcaactgtatctattccttttcaatatttactgccaagaccagctgggtcatggaaaccctaacccagtggcactagaggaagtaaagacacacacacagaaatatagagtgtggagtgggaaatcaggggtctcacagccttcagagccaaaagcctcaaacagagatttacccacgtatttattgacagcaagccagtgataagacttactgaaagtat

SEQ ID NO: 839986 - DNA, 579 bp, Homo sapiens
attaactcaaaatgggaccatagacctaaatgtaagagctgaaactggctgggtgcrgtggctcatgcctgtaatcccagcactttgggagaccaaggcaggcagatcacttgaggccaggagttcaacaccagcctggccaacatggtgaaacccgtctctactaaaaacacaaaaattagctgggcttggtagcatgcacctatagtcccagctactcaggaggctgaggcaggagaattgcttgaacccaggaggtggaggttgcagtgagccaagattgcacaactgcactccagcctgggcaacagagcaagactctgcctccaaaataaataaataaataaaaataagtcaatcaaatttaaaactggacaaaggatttaaatagacatttctccaaagaagatacacaagtggccagtgagcatgaaagatactcaacatcattaatcataaggaaatgcaaatccaaaccacaatgagataccaccccacatccagtaggacggctaagataaaaaataaaacagcaagtgttggctgggtggggtggctcacacctgtaatcacggcact

SEQ ID NO: 839987 - DNA, 579 bp, Homo sapiens
attaactcaaaatgggaccatagacctaaatgtaagagctgaaactggctgggtgcggtggctcatgcctgtaatcccagcactttgggagaccaaggcaggcagatcacttgaggccaggagttcaacaccagcctggccaacatggtgaaacccgtctctactaaaaacacaaaaattagctgggcttggtagcatgcacctatagtcccagctactcaggaggctgaggcaggagaattgcttgaacccaggaggtggaggttgcagtgagccaagattgcacaactgcactccagcctgggcaacagagcaagactctgcctccaaaataaataaataaataaaaataagtcaatcaaatttaaaactggacaaaggatttaaatagacatttctccaaagaagatacacaagtggccagtgagcatgaaagatactcaacatcattaatcataaggaaatgcaaatccaaaccacaatgagataccaccccacatccagtaggacrgctaagataaaaaataaaacagcaagtgttggctgggtggggtggctcacacctgtaatcacggcact

SEQ ID NO: 839988 - DNA, 452 bp, Homo sapiens
agatcacgccactgcactccagcctggcgacagagcgagaccccatctcaaaaaaaaaaaaaaaaaaagcaagtgttgaagtgttgctgagggtgtggagaaattggaaccctcatacactgctggtggaattgcaaaatggtgcagccactttgaaaatcaatttggggagatgaggtggcagcagaaaagaataaaaaaaaaaaagaaaaaaaagaaaaaccttttgacagtttctcagaatgtaaacatagagttgccatatgacccagaaaccctacttctgagcctgtagttaggagaattaaaaacacatgttcacacaaaaacctatcaatgaatattcatagcagtgttattcataatagccaaatagtagaaacaattcaaatgcccttcaacygatgaatggctaaaactaaatctggtatatccatataatgggatattac

SEQ ID NO: 839989 - DNA, 616 bp, Homo sapiens
ccctgttgtttttgggagagttgtgctgtgggaggagtatgtggtgggctctcctggttcccctattgctgagaccttagaggggacccttggaatagtgccagctgyccctgtagatggatttcctgtgacaagcctagtggcagcacctgttgatgttgagggcagttctgtttgtgaccaagttgtgtggcctttgctggagaatgaggaaggccatgttgttgtttcaagtagagtaaatatttcttgagacacacctggagagaatgagctcctctcatgaggccgtcctgtggtctctgcaccttcactctgctgggtgtggaaagctgtggatatttttggaggtagagaactgggggagagtgctgttgacagagtgtctgaccaccatatggttgaaactttggaagtgattgcagaaatggttccacttacagatagtgatgtctcctctgtgtttccaagagtagagtctctggaggttggcattctgaacacctttgatgttaccaggaatgtattgctgacactggaaggggatgaggtggttgtttcaccagaagggaatgtctcctgagaaactgttccacttgggttgaatccacttggt

SEQ ID NO: 839990 - DNA, 575 bp, Homo sapiens
aatacgtaatgaacttcccctaaaaataacagcttcctaatagtgctttttctaarcagaaaataatgactgcaaaataatttaaaaaaaaaaaatgtaaccccaaaaatgtcaccttaactgttaagatccccaaccagcctctatctagtctcaacattaccaccatataatctctggatttctcagtttaatcacttctaggggaaaaaacccagactacctctatatgctcactacgcaaatttccagtaagaaatcaaggctttgtaacctggctgggtgcagtggctcatgcctgtaatcccaatactttggaaagctgaggcagaagactgtttgagtctaggagttcaagaccagcctgggcaatattgtgagaccctgtctctaccaaaaaaaatttttttaaattagccaggtgtggtggtgcacatctgtagtcccagctacttgggactctgaaggttgaggtgttgaggactgcttgagctcgggaggttgaggctgctatgactgtgccactgcactccagcctgggctgaccctgtctcaaaaaaaaagaaaaaagacta

SEQ ID NO: 839991 - DNA, 594 bp, Homo sapiens
agatgttgggctggttgagggtctcgtggttagaggatacagcttctcttaaagctagggtcttcatgtgatattaaacagtttcccctccttcactttcttccccagtaggcaaatgacagaaaacaataactatagaaatctcctgtgttgggcagaattctgttgtggggaggtggcccattaaaaagaaatatatagcctggaatccatggctggcagaagacaactgcacacatgtggactcagacaccaactgctgcacacacctcacctaggtgaacaggagtccgtctctttgcagttcttttttaacaagtcttgaaatcgtggtccgctgatttcttctctaggtcacactgaataaccccaagcagacggagttcttgacagagttttgaaggcccacaaaaggctgcacaggtgattacaggccaagtaggaaggtctgtggcacacccaggcatctctggcagtgctgtcctgaagaagcctttctttattgatctgccacagtccacctggccaaactcctcctctgggctcttcaraccactggcaggaaggaaaaacaggttaagcactgtgggccac

SEQ ID NO: 839992 - DNA, 547 bp, Homo sapiens
acccacaaaggtgccaactgtcagcacagcatattgatcacagctacacagttcatttgcaaataccaaaaatattcacatcttgttcacattaagaaactcttcaaacaaagggaattgaaactatgtgggagagagattaaatttagaaagcagtttgttataagatatggggtttaaatgagactcctttctagtgcacattttctccttgaccaaagagtcttgctgttatcagcaagtttttttgagagtatttcttaaatacattgacacgatctgctataatttgattataatgtcttggttgtcttagattatactttagtctaaaagtcacccaaatttatagagaaggcagagtgccagtttcacaggtagaagtcattctgtttttagaatgattaatttttgttkaagatttaaaatggtgttcagttctcttaatattcttctgacatttgaaatgctaaaactgtataggttagcacttagcagctgacaatatagcagctcttaggaccatatgccaagttaggaaagacca

SEQ ID NO: 839993 - DNA, 627 bp, Homo sapiens
cctacgaagtaacccgtgtgcttctccgagatcttattcctaggtttggactgcccttacgaattggctcacataacgggccggtgtttgtggctgacttggtacagaagacagcaaaggcattaggaatcacttggaaactacatgccgcctactgacctcagagttctggaaaggtggagcgaatgaatcagactatcaaaaatagtttagggaaagtatgtcaggaaacaggattaaaatggatacaggcccttcctatggtattgtttaaaattagatgcatcccttctaacaggatactccccttatgaaatactgtatcataggcctcctcctatactagggggacttccaggcactccccgagagttaggtgaaattgagttacagtgacagctacgggctttgggaaaaattacacaaacaatctcaacttgggtaaatgagaggtgtcccgtcagcttattctccccagttcaccctttctctccaagtgatcgcatgtggatcaaggactggaacgtagyccctttgcggccacagtggaaaagacctcacaccatcatcctgaccacccccacggctgtaaaggagaaggaatcccagcctggatccaccacagcc

SEQ ID NO: 839994 - DNA, 500 bp, Homo sapiens
agaaaatcgttgcataagaacccatgtactgaccatccagttttgtttaaatatgtaggttagtaatcatctagtgattattaaaatcaccacagatcaagcctgtgcagtatctttaaatttgtcagccctggtattcgttgtcctcatgactttattataactgcattctgttcagcattttcttttttttcttttttctctttttttgagacagagtctcactcttgtcgcccaggctggaatgcagtggctcattgcaactgctgcctcctgggttcaagcaattctcctgcctcagcttcctgagtagctgggattacaggcgcctgccaccacgcccagctaatttttgtatttttagtagagacggggttttgccatgttggccaggctggtctcgtkacctcaggtgatccgcccgcttcagcctcccaaagtgctggaattataggcgtgagccaccacctggccctgttcagcattttcttaaggtcctt

SEQ ID NO: 839995 - DNA, 521 bp, Homo sapiens
gcttcccaagtggctggcattacaggcgcccgccaccaagcccagctgatttttttgtatttttagtagagatggagtttcactatgttggcctcgaactcctgacctcgtgatccgcccgccttggcctcccaaagtactaggattacaggcatgagccaccgcgcctggccttttaaatgttatataaatggtgtcttactattttgtatcttgctttatggctacaccgtgaggttttctcatatgttcttttcactcacttattttcactgctgtctacgattccactgtatgactatgccactccactcccctgttgatgtttatttgtggttttcaccattacaaacaatgcctctcatgctccacaggtcctagtttctctagaagtcggatttcttattgatagggtatatgaattttacctaacattgttaaattgttttcttgagctgatgtgccagtttaccctttcaccaaccatgttaagagttccccyctctccatataattggtaa

SEQ ID NO: 839996 - DNA, 617 bp, Homo sapiens
  misc_feature 316: n = A,T,C or G
aagtatcttttccaaccacaatagtataaaactagaaatcaataacaggaagaatttcagaaaattcctgaatgaatacgtggaaattaaacaagatgctcctaaactagcgatggttcaaagaaaaakaaaaaaataaacaaaagtatcctgagatgaaagataatggacacgcaacatactgaaactcataggatgcagcaaaagcagttttaaggggaaagttaatagtaataaatgtctacataaaaaagaataaagatcctaaataaacaatcttatggtacatcttaagaaactaaggaagggaaccaancgaagttagtagaaagaaggaaacaataagaatcagaggagaaattaataaaataatagaaaaacaagaaaaaatattaatatatcagttggctttttaaaacagataaagataaccaacaaacattacctaaactaagaaaaaaaagagaagactcaaaatcagaaataaaagaggagacattacaactgatgtcacagaaatacaaagtgccataaaaattactatgaacaattatatcccaacaaattagataacctagaagaaatagataaatttctagacccatacaacctaccaa

SEQ ID NO: 839997 - DNA, 637 bp, Homo sapiens
ctgggacattggacaataatatctggagacaatttttattgtcatgagtggagggtttcttgctactgacttctaggaatrgaggccagaggtgaggcttaatagtttaccatgcatagaatgacccctgacaatgaagagttatctggttcaaaatgttaacggtgtatgaagttgggaaaacccggattagatggtttgcattgaagtctagagttcattactctttagcagtgtgaaatcagatacagcttaacttccttgtgactttctttccctttcccataaaagttgaaaattgaaaccccaaataaataatcagtgatgcacaaaaatgtttatgcacaaggatgcttacaaaattttacttataatagtaaaaggtagaaaacaagctagatatctaatgatgcaagattttatagagttaaattattgttaattcataattaaaataatatgtagcataaaaacatattttaggtgaatgttgaaataatgtagaaagtgttcagtgcaaaacgtgaataaaattatcataacatgtgaagtatacagagtgatctaatatcaggaaaacatatgtgttgtttatttattctcacagaaaaaaactgaaaacaaaatttggttgcct

SEQ ID NO: 839998 - DNA, 552 bp, Homo sapiens
aagcagggttttttgtagtgagagaaaccataatgagattatggagtagactggacataagcaacacatttcrggtgtcactgtcttccatcacccccagatgggaccatctagttgcaggaaaacaagctcagggctcccacatattctgcattatgtgaattgtgtaattatttcatcatatattacaatgtaataatagtagtaacaaagtgcacaataaatgtagtgtgctcgaatcatcccctccccatccccgcagtctgtggaaaaatggtctttcatggaactggtccctgacaccaaaaaggttggggactgctgatgtagagattaaatttttttcatgtccactctaatgacgaaaacaagcaaattgatggagaaagtcatttcacaattttgttaccattttctaactttgcaaaccttcagcacactgattaatatctctaagcctcaatttttctcatctgtaaaataggtagattagtaactacctcataaagttttagaaggattgaatgagataatgccagtaaagcctttagc

SEQ ID NO: 839999 - DNA, 571 bp, Homo sapiens
gccagtgacataatttcgagtttaaagaaagaactgtgtggtaggtaaatagcaaagcaacagctgattaagaaatgtattgagaagcaattttgtaaacttttttattatggaaaatttgcaaacttgcacagcaataaataagatagcaaaagcaacatagcttgtggttaactagtctgctgctcacaatttgcgtatgttgtttaagccagatactgcattacagaactttcctcatgggtccctgctgtaattatgtataattatgtattttcagtactgtaactgaggcttccttggagttagcagaggccttggcattccaatctgaaaagtttagtgacttgttcaaggttgtagacccaagacaatggttattgttggtgctagggatatactctgttcttcctggttctcttgacacagaatacggcctcatagtggctcaattgtcctggtcaaatcaatgccagttttgtgcaaggcatcaaaatgtgcttttttkgggggaggggaccgtgtttcgctcttgtcacctcatgctggagtgcagtggcgcaatctcggc

SEQ ID NO: 840000 - DNA, 577 bp, Homo sapiens
ttaaaaataagtttactttaaaactcatttctagtgaattttataaccagactttctaccacaaaattttaaattatggctgtagtggagtcaaaaaaattcttgaagcccamattttcaattcttctctgcttctctactgaagcataagggggctatggcccaaagtatcacattcaaaatgcaccacattcattcaggaccaggagagaagagattctttggaactacaagaatgaattatctttaccccaacagacactgtaaaattgaggcatcaataacactttgtctctgcagagcatttaaaactttcatcctgctttaaaatatattaatttagctggtcctcacaaccaccttgtaaggtgctatttcagggtttctcaaccttggcactattgacctttgggctagatcattctttgttgaaggggtggtcctgtacattgtaagatgttttggaccctgggttgtacttaccaatgttagtaatagaacccctccccctcaacacacataaacaactaaaaatgcctccagaaattgccaaatgtcccgggaggaaacagagagg

SEQ ID NO: 840001 - DNA, 616 bp, Homo sapiens
agcactaagataaatgtcaattatgacaatacaacctgctagaaatcacacctatataataggagaggaagaagaggatgtggggaggaaaaaagaataatttcatcattgctcatagtggaaaatgaatagatactatctacagaaatagatgactaaaactattatataaaataataactataaccagaacaaaattacaaacttttttaattcttaaaatactccaatgaataaagaaaaataagcagatcacatagtgaaatttttttaacataacatgtcagaactaggtccaaatatattgttagcaacctaagtaaacaggctaaactcacctatttaaaacaaaaagacgttcagattggatcctaaacccaaatgcaactcttattttatatgtaagagtcacctcaaatcaaaataattcaaaaatgctaaaaaataaaataagcaatggtataccaagtggaaaaaaaacaaaaaacaagatatcaatgtattgtacaaccaactttaattcacagcaaaagtattaaattwaaaaaagaagcctccttcacaatgtagaaaagtatagttcacaatgatgatttaaccagtacaaatatctatg

SEQ ID NO: 840002 - DNA, 638 bp, Homo sapiens; identical to SEQ ID NO: 839403

SEQ ID NO: 840003 - DNA, 463 bp, Homo sapiens
caataataagttacccttagcttactgtaacttttttacttcataaacttttcaattttttaactttttgacgcttttgtaataacacttagattgggctgggcgcagtggctcaagcctgtaatcccaacactttgggaggccgaggcaggtggatcatgaggtcaggagttcaagaccagcctgtccaagatggtaaaacctcatctctactaaaaatacaaaaaaattagccaggcatggtggcgggtgcctgtaatcccagctactcgggaagctgaggcagagaattgcttgaacctgggaggcagaggttgcagtaagccgagaccacaccactgcactccagcctkggtgacagatcgagactccatctcaaaaaactgtgtatattatatataatgtaaaatagcctcaagcaggtccttcaggaggaattccagaagaaggcattgttaatgta

SEQ ID NO: 840004 - DNA, 463 bp, Homo sapiens
caataataagttacccttagcttactgtaacttttttacttcataaacttttcaattttttaactttttgacgcttttgtaataacacttagattgggctgggcgcagtggctcaagcctgtaatcccaacactttgggaggccgaggcaggtggatcatgaggtcaggagttcaagaccagcctgtccaagatggtaaaacctcatctctactaaaaatacaaaaaaattagccaggcatggtggcgggtgcctgtaatcccagctactcgggaagctgaggcagagaattgcttgaacctgggaggcagaggttgcagtaagccgagaccacaccactgcactccagccttggtgacagakcgagactccatctcaaaaaactgtgtatattatatataatgtaaaatagcctcaagcaggtccttcaggaggaattccagaagaaggcattgttaatgta

SEQ ID NO: 840005 - DNA, 463 bp, Homo sapiens
caataataagttacccttagcttactgtaacttttttacttcataaacttttcaattttttaactttttgacgcttttgtaataacacttagattgggctgggcgcagtggctcaagcctgtaatcccaacactttgggaggccgaggcaggtggatcatgaggtcaggagttcaagaccagcctgtccaagatggtaaaacctcatctctactaaaaatacaaaaaaattagccaggcatggtggcgggtgcctgtaatcccagctactcgggaagctgaggcagagaattgcttgaacctgggaggcagaggttgcagtaagccgagaccacaccactgcactccagccttggtgacagatcgagactccatctcaaaaaactgtgtatattatatataatgtaaaatagcctcargcaggtccttcaggaggaattccagaagaaggcattgttaatgta

SEQ ID NO: 840006 - DNA, 599 bp, Homo sapiens
cagagtagaatttaatatcactgtattagtatgcaaagaggcattgcctattaataggatatcaaatcaacaggaagatataacagtcataaatgtgtatactacaaaatacaygaagcaaaaattgacagaatataagggagaaagaaacaatttccatatgagaatttccattctcagagatggatattttaacagacctctttcagcaactgatacaataactagaccaaagaaatcagtaaaaatatacatgatatgaacaataccattatcaaccactttgacctaattgatgtttgtagatcactgcacctagcaactgtagaatacacacattctttctgagcatactgaggatgttcaagatacactatatgctggaccataagacagttttaatacatttaaagagcttgaaatcattgaaaatatgtcctctgaagacagtgggatgaagttagaactcaatattatgtatctacaaattcacaaagaaatgagaaaatattttgaactgaaaagtattttcaatgaaaatatagcatcaggaaacaacagatgttggcaaggatgtggagaaataggaacgcttttac

SEQ ID NO: 840007 - DNA, 564 bp, Homo sapiens
gcaaaataattttttacttttattgtctattggggataattattcacttttagtaaacttttatctaaaaatagatatttaaaattatattaaaatcatcctgactagaaataagtgtttattaacaatggattgtagtataaattttaccctaactggctaatactcttttattagtgcttactgggggtctatgatgtagcagacacaggaggtgacacataggttccagttccatgtcttcatctgttacttataagaagtaaattctatgataagttcactccacatttgctggctgatctgagccttaaagagtgtttatagcacacagaaatgttgtatttcatttttagacttcattgctggatcttacgtgaacatttcgtctcacacatacaaacagctacatgtggtttttggttcacctttctcawgttctgttaggtcagttcctctttggttcctagtctgctaggtgggaaaaatgattccacagataatttcctatacccacatcaataaaccagtacaaaaacacccaagccaaaaatccaaaaccaa

SEQ ID NO: 840008 - DNA, 564 bp, Homo sapiens
gcaaaataattttttacttttattgtctattggggataattattcacttttagtaaacttttatctaaaaatagatatttaaaattatattaaaatcatcctgactagaaataagtgtttattaacaatggattgtagtataaattttaccctaactggctaatactcttttattagtgcttactgggggtctatgatgtagcagacacaggaggtgacacataggttccagttccatgtcttcatctgttacttataagaagtaaattctatgataagttcactccacatttgctggctgatctgagccttaaagagtgtttatagcacacagaaatgttgtatttcatttttagacttcattgctggatcttacgtgaacatttcgtctcacacatacaaacagctacatgtggtttttggttcacctttctcatkttctgttaggtcagttcctctttggttcctagtctgctaggtgggaaaaatgattccacagataatttcctatacccacatcaataaaccagtacaaaaacacccaagccaaaaatccaaaaccaa

SEQ ID NO: 840009 - DNA, 564 bp, Homo sapiens
gcaaaataattttttacttttattgtctattggggataattattcacttttagtaaacttttatctaaaaatagatatttaaaattatattaaaatcatcctgactagaaataagtgtttattaacaatggattgtagtataaattttaccctaactggctaatactcttttattagtgcttactgggggtctatgatgtagcagacacaggaggtgacacataggttccagttccatgtcttcatctgttacttataagaagtaaattctatgataagttcactccacatttgctggctgatctgagccttaaagagtgtttatagcacacagaaatgttgtatttcatttttagacttcattgctggatcttacgtgaacatttcgtctcacacatacaaacagctacatgtggtttttggttcacctttctcatgttctgttaggtcagttcctctttggttcctagtctgctaggtgggaaaaatgattccacagataatttcctatacccacatcaataaamcagtacaaaaacacccaagccaaaaatccaaaaccaa

SEQ ID NO: 840010 - DNA, 571 bp, Homo sapiens
  misc_feature 229: n = A,T,C or G
acagccctccaaggtgctgagattgatgataaaaatgaccactgctggaaaggtgttgttattgatgaacctctgccagtggaggtccccatgctttccattcagtgccagatctgtttccgaataacccgagaaaagtaccgtgcaaaaattaatcttcatcgtaatagcttgcactccacaatagacactgatgtctctttcagctgaaataaaaatatataaaaancaaacataagtcagaaaagcagaaagataaataacattaacatcctactgatatatttattcatctcctttgtctgtttaactcatttttatatttgatacaccataatccaatgtgccagctattaagtaaagtagacaagaaaaatagccttttatttagttatttaaggagagatctttgagtgtagagattacagttcacctctgtttccttgtgmttgatgtccagtggatgtacattaagtgttgatcaagtattgccaaatgaccagagaattgagtggaaaccaatcaggttactgaggaaattcagacctagagcaactggattattcagatc

SEQ ID NO: 840011 - DNA, 594 bp, Homo sapiens
tagaactctggcttacatagcatcttcgacaaagaacaatacatggttgaagaaatgacaaaggaaaaggaccttggatttataagggcagtaaattgtaggaaggcaaatatatggtagataaaggctattttgtaaaatttgttatgtagattcctgtggtgatatctccaggatgataagggtcttaagtcatcttcagtgatcaaattctgtcctacttggtagagagaggaggagggataactttgtgaatttgtattctgttcttaggcaaattgtttaggcaaggcaaataacttttcctgtatctacttcttctcagttgcctttagctcaaaataacccttatgctaaagtggcatcttttggggtggcatattctgctgccctccaccttctattttaattttcaaaatctaggtatccatctacagcaaaacctacagcaatactcaagacattatgaagccaactttagaatgaattgtgattgcttaaaaatcataacataattgaaagcaatgttcattactctactttcaatttgagcatacttaratataacacagtaaatactaatctatatgttag

SEQ ID NO: 840012 - DNA, 634 bp, Homo sapiens
aaaagccaatatggaatttgacaattttaacatagataggttaatatctaatgtattaaacaaatgaaagcaatactaagacatggaagatttagaaaaaaagatmatattacttaatagataattacgaaaccctagccagaacagtcagtgaatcaatattatttcaaacacatggaacatctacaagaattgatcaccaagaaagtcttaataaatactaaggatttaacagcatacaaaccacactgcaacaaaagtagaaataataaaaaaaaactcctaattcccaaaccaaggcttagaaaatttataaatacccctttaaaaatagatggcttaaagaagaaataataaatatacatgtttgacgtggtgagaacaccatatatgttttgtgggatatatctacagcagtacttagaggagtagtcataagcttaaatgcatatatcagaaaataagaaaagtttaaaaagaatgaactaaacttgaaacttaagatgctaagatttttaaatataatattaatttattagaaagaagcttcttctatttgaacagaaattaatgaaacatacatattagttacaataaagatgataacaggcaaaagttgaactgttttacttag

SEQ ID NO: 840013 - DNA, 653 bp, Homo sapiens
tgaaggcaaatgttttaaacatttccatttaaaaggcagagattgtcaagattggataaaaaacaaaattaaaacatttttgctgtctaaaagaaatacattttaatataaaaacacaggttaaaagtaacagaatggaaaataaatgccaggttaacattactcaaaagaaagccagaatggctatgttaatatcagttataccaatttcagaacaaagaatattacttgaattatatgacaaagttcasttcaaaatgataaaggggttaatccatcaagaagacataacaagcctaaatgcttatgcttctaataatagagcttcaaaatacataaatcaaaacctgatcaaacttcaaggagaaacagacaaatacaaaattttaatcagaaattgaaatacccttttttctgtaattgatagaatcagtagacagaagatcaataagaatatagaagatttgagcaatactaataaccaatttgacataattgacatatatataaaacatcccacccaacaggagcaaaatactcattcttttcaagcatgcacagaacttttaccaagataagcaatattctggatcacaaaacaagttgcagtacatttaaatggatccaagtcatgcaaaatgtgttttctgatc

SEQ ID NO: 840014 - DNA, 481 bp, Homo sapiens
acagagtttaacatttctttggattcagccgtttagaarcaagggttttatccactctttgtaaggacatttgggagcccactgaggacaatgatgtaaaactgaataaactagggtaaaactagaaggaatctatctgagaaacctatttgtaatgtgtccattcaagtcacggacttaaacctttcttttcattcaacagtttggaaaaactttttttataggatctgtgaagtcatattttggagtgcattgaggactatagtgaaaagaaattatcttctgataaaaaatagaaagaaactttctgagaaactgctttgtgatgtgtgcattcatctcacctaggtaaaactttcttctcattcagcagattggaaacactcttttttgtagaatctgtgaggggatatttcggtgctttgaagtcaatggttaaaaaggaaatttcttcagatagaaacaagaaagaagctttctg

SEQ ID NO: 840015 - DNA, 455 bp, Homo sapiens
tgcagagatttccttttttggccaggcrcggtggctcaagactgtaatcccagcactttgggaggttgaggtgggcagatcacaaggtcaggagattgagaccatcctggctaacacggtgaaaccccgtctctactaaaaatacaaaaaattagccaggcatggtggtgggcacctgtagtcccagctgctcaggagactgagacaggagaatggtgtgaacctgggaggtggagcttgcaatgagccaagattgcaccactgcactttggcctgggtgacagagcaagactccatctccaaaaaaaaaagagttttccttttttatcataggcctttatgtgctccaagatcactttgcagattctaggaaaagagtgtttccaaactgctgaatgaaaaagaagggttaactctgcaagatgaatgcacacatcacaaatcagtttctcata

SEQ ID NO: 840016 - DNA, 642 bp, Homo sapiens
ctgctgtattgaaaaaaaaggtttaactctgtgagatgaataaacgcatcacaaagtagtttatcagaaagaatcttgctcagttttatctaaagatatttcctttttcaccataggcctcaatgcrctgccaaatatcatttcacagtttctacaaaaacagtgtttccaaactgctgaatgaaaataaaggtttaactttgtgcagtgaatgcacacatcacaaatcggtctctcagacagcttccttctagtttttatcctgggatattagcattttcacctttggcctcaatgaactccaaattgtccatttgcagaatgcacaaaaaaagtgttttcaagctgctgaattcaaagaaaggtttaactctctgagatgaatgaacacatcacaaagcagtttctcagaaagcttctttttaattgttatttatagataattccttttttaccatatgcctcaaagcactaccaaatatccattcatagtttctacaacaacagtgtttccacactgctgagtaaaaagaaaggtttaactcagctaggtgaatgtaaacttcacaaagcagagtctcagacagcttccttctagtttttatcccgggatattcactttttcaccattcacctcattga

SEQ ID NO: 840017 - DNA, 655 bp, Homo sapiens
tttctacaaaagcagtgtttcccaactgctgaatgaaaagaagggtttaactctgtgagatgaatgcacacatcacaaagtggtttctcagagagcttccttctagtttttatcctggcatattcccttttttgccattggcctcattgagctcccaaatgtccattcacagaattgtcaaaagcattgttatcaaactactgaatccaaagaaaggtttagctctgtgagatgagcacacacatcccaaacaagtttctcattaaacttctttccagtttttttctgaagatatttcctttttcagcataggcttccatactcttccaaatatcttgtcagagattataagaaaagagtgtttgcaaactgctgaatgaaaagaaagttttacctctgtgagatgaatacacacatcagaaatcagtttctccaataagttccttccaatttttatcctgggatattcactttttcaccattggcctctatgagctcccaaatgtccattcgcaaaatggacaaagagtgattttccaaactgctgaatccaaatgaagktttaactctgtgagatacatgcacacatcccaaaagcagtttctcattaagcttctttgtagtttttatttgaagatatttcctaatcaccata

SEQ ID NO: 840018 - DNA, 632 bp, Homo sapiens
tctcagttagactccttctagtttttatcakgggatattcactttgtggcgtttggcctcaatgagctctctaatatcccttttcatattctacaaaaccagtgtttctaaactgctgaataaaaaaacgttttacatctgtgaaatgaatgcacacatcacaaagcagtttagcttctttctagttttcttttgaagatattttcttttacaccatactcctcaacgcactccctaatatccctttatggatactaccaaaacagtgtttccaaactgctgaatggaaagaatgttttaactctgtgggatgattgaacacatcgcagagctgtttctcagatagctttctcgtattttttatcctgggatattcacttttttgccattggctaaataagctacctaatatccctgtgcagactctacaaaaacagtgtttgcaaattgctgaatactaagaaaggtttaactctctgagacgaatgcacacatcacaaaccagtgtcacagaagaaagcttctttctagtttttatctggagatatttcctttttcaacataggcctcaaagcactccccaatatccctttgtagattctacaaaaacagtgtttccaaactacagaatg

SEQ ID NO: 840019 - DNA, 518 bp, Homo sapiens
tgcctcggcctcccaaagtgctggaattacaggcatgagccaccgtgcccgtccgtgtctagcttttatgtgaagatatttactttttcagcataggcctcaaagggcttccatgtatccctttgcaacttcaacaaaaagactgtttccaaactgttcaatcaaaacaaaggatcaactctgtgagatgagtgcacacatccaaagaagttcctcagaaagcttctgtgtagtttttatgtgaagacattttcattttcaccataggcctcaaagggatcccaaatatccctttgcagaatctacaacaatactgtttccaaactgctcattgaaaacaaaatttcaaatctgtgtgttgaatgcacacatcacaaggaagattatcaggaagtttctgtttagtttttatgtgaaaatrtttccttattcaccataggcctcaaacggctcagaaatatccccttgcagattctagaaaaagactgtttccaaactactcaatcaaaagaaagttt

SEQ ID NO: 840020 - DNA, 570 bp, Homo sapiens
ggagtactttggagcgcattgagatctatgttgaaaaaggaaatatcttaaaaactagaaagaaactttctaaaaaacttctttgtgatgtgtgcattcattttgagataaaacctttcttyggttttagcagttggaaacacagttttggcagaatccataaagggatatttgggatctcattgaggccaatggtgaaaaaacaaatatcacaggataaaaactagaaggaagctatctgagaaactgctttgtcatgtgtgcattcatcgcacagagttaaatgtttctgtgtattcagtagtttgcaaacgctgtgtttgtccattctgcaaattgacatttggattctgtgaggcctatggcaaaaaactgaaaatccaaggataaaaactggaagaaagctacgtgagaaactgctttgtgttgtgagcattcacctcacagagataaagctttcttttcgttcagcagtctggaaaaactgttctggcagaatccacgaagggatacttgggagcaccttgaggtctattttgaaaaaggaaataacttcagataaaaactaga

SEQ ID NO: 840021 - DNA, 523 bp, Homo sapiens
actgtaagttaaatctttagtaaggttttgccatttctataagacttcgctgcctccaaggcctaatgtatgaaccaaaaggaactcagttttccagaaattaaggatcccattcttacctaaaatattggctttactctcaggttctcttgattaacttagccaataattttgtttctacctaagcacacaagaaaaatgaaacaaagcagtagaacacaaaaatccctgtgaattttcaaaagccaaaattataaccagtgcaatattactgcttactactagttcctttctgacccagtcagatgtaagaggcctctacctggatccaaaccagttaattcccagatcaaatctgttcctggacccagtccagtttgtttcgtgactccaaacccagtttggattagaaatttgctcaaagaaactcagagagctcaaaacgcaaatccatggagctccaaaatctgagagtgagcttacccaccatccggagccrctctgagagatccatggacacaag

SEQ ID NO: 840022 - DNA, 536 bp, Homo sapiens
taatcacaattaatgttattatgttgttgtatgttgttattgtaaacaacagaaataaccaaatttctttgtcaatcatgtttttgactgtaaataccctggacattttttcwttcacagacaattgttgtcttgctttgatccttttcaaaagatggtttataatcagctataggactttgagaggtgctcttaaatgtaggttcctgatacctttggggattgtgacattggaataatggaaaatcattcaggacccatgaagggttgaaatattcatgaatatcaagcagaacaagagttaattgagtggactgaactaacagaaaactgaagtaatcttttttagctttttgcttaaaacattgctgatcctttttttgtttttcagagtcaaagaaagttttctcttgagctatccaccttttagcaattgagtaaggtatcatcctgtgaacaaaatttggaacatatctgtttctctctgcctggcttccccagaattcagaaactatgtgagtattcttaacttatgg

SEQ ID NO: 840023 - DNA, 588 bp, Homo sapiens
tactgaaaccaaattgttgttgccctaataaaatatatacgcttttctctgattgcaaatwtaacacttgtttatgatagaaaacaaaactaaggacaaaaaaaaagtcatctgtgatcgtatggctaacactgtgtgtgtatactatcttctttttctgtatgtatctacataatatgtttaacaaatggaattgccctaagaataacatctgtaacttgtttttttccattaagcaatatttttccatgccattaaagagtcttataaacatcagctttaatagctgtaaagtctcacattacatggaagaatcattatataatggtttctttagtctcttaaaatagatatttatgtcatttcaattttttattcttataaaggatgctgtgataaaccacctggtaataataacagctaatgtttattcagtttatgtggaatgcattgtggtaagcaatttacaactttcaactaatttaatgtgtacccaaatcctatgaaatggatacaatgaaaatcttccctttagaaacgaagtaaactcagacgaaaagaagttaaacaatatggtcgaggtcacac

SEQ ID NO: 840024 - DNA, 600 bp, Homo sapiens
gccccaaatgtctgcctcctcaactcctctaagtttttttttgttttgttttttgtttttgtttttgttttttttttgagacagagtctcactctgtcgctaggctggagtgcagtggtgtgatctctgctcactgcaatctccatctcccgggttcaagcgattctcctgcctcagcctactgagtagctgggattacaggcacgtgccaccacacccagataattttttttctatttttagtagagatgggatttcaccatgttggccaggatgttctcgatctcctgatctcgtgatctgcctgccccagcctcccaaagtgctgggattacaggcgtgagccaccgtgcctggcccacctcctctaagtctttattcaaatgtcccttcaataaggccttcatgataccccctacttaaaatggcttttagaattgtttctccttattttactgttctccaaagcaattatcrccatataatatagtacttattttattcatttgtttatctgtcttgcccaacaatgcaccccataaaggctgagatttttgcctggtatgttcacagatctctccccagtgcctggcataaggc

SEQ ID NO: 840025 - DNA, 457 bp, Homo sapiens
tgaaaaagagaggctcatccagttgttatttacctcattgccatgaaaattcatccagttactactgtctcattcccaagaatcattgaggaaatgtcttgtccttaagctttgtatagttaactttggaacaccatttttccattcaaagacttaccattacactttaaacatagaatataaacataaggtaagatgctggcaaaataaaaattatgaactacttcatttctgtgaatttagctcatgataactaaatttggataaattttgcaaagatggattttgatccagatttaagatttaatcagtggctttacaatttaagttagtttacaatgaattaaaggaactcctttttatgcagagggttttaaaaaatcaggttttcaatttttcaaatgrtcttttaaaaacatttctatcataacaaatgtgggttaccaaattataagga

SEQ ID NO: 840026 - DNA, 523 bp, Homo sapiens
agaaggaaagctttaagtacaatggcaactaaaatggcggcacaaacaaaacgaaattgcctccaaaacactgaacttttaattacggacgatgtcaaaatgcaatgtgttcctttagcttcattattttgaatctgtttcttgtttcccaataaactgaataaataaacagtgatttttaaaattaattatgtagtgcaatttccctcccggaaaaccaatatagcttaattttcattaactatattgtaaatcgcattactcttttggaaaacgttcaaggatgcttttatttataaaccaatagatgagaactataatgcatttatagtaagtctggacacttttacagggggcttcctatttgaaataaccaagaagtagaattcaacartgatatttttccttctaaactttttaaagtgaaaaaatccaatatattcttgaagtcagaaatagtggcatccagggttaaacttcagcattcatgatgctaattagctagccatgactgtatgtataa

SEQ ID NO: 840027 - DNA, 492 bp, Homo sapiens
gctctccaacgtcaacaactcagaaagggatttttctggccacagtatcaaatggtcattgccctcatccttgttagtcttcttcacagcacttattactagttgacattgcagtgtgtagctatttttattttttaccatctcatcaacaagaatgcaagaagtcctccagtggaaggcactttgtcttattcactactgtatccccagcacgaagaacagtgtaagagtttaataaatactcattgaataaacaagttaattttatttttattaaggatctgtggcatttgctacccgggactaagtaaatttttgctcgagttacaatattggcacatgggggctctgctgttagttgcaagagtatcctaagcattccccaacattcttaagggaactgttcaactgggaatggccacagctacagctaccaagtactaacagtataaggaaggatccwctggtttgacatataggctgatatatttt

SEQ ID NO: 840028 - DNA, 648 bp, Homo sapiens
ctgtcactttttaatgcctaactttactaataaacataataatagataagaacgaaaataaaatcccttaggtggtaaaactcattttgatttgggacatgaaattatgggaaaaaagttctttctttctcctcactctttgagaatgaatcttctgtaattctcagtatcttctgagcacagatatataattcttgtagatttaataactagtttaccactgtaaattttaaaacgccaactgccagtctcctgctcaaaagttgttgcctcacctccatcccatggtactttctggactacatatcataaatctatttgtataagtatttcaagttcatgcagattagagaaatgtgattgatatttatttttctagtacgtatttacataaaatattggacttccctcaaaggtgacaacagttaaaaaaaaaaaaaaaaaaagcctgacctgttgaactatacaacagaacacagaatactttgctttaccaaaacagagaagaaatgggatttagtctctaaacttcatgtgagtttttttccatttttattaaccccagtacacayagtgctaccacagcatgtagttaaatagtcccagtgccacagtcttgtaagcaatacttatgcaagatatattgca

SEQ ID NO: 840029 - DNA, 524 bp, Homo sapiens
cagcattctggaaagaaggtggtcagcactagatgtgcccaggggtccagagagggcagagggagccccttactgtgatgctaaaacccaartcccaccagtgcgggttttcaatgagatctaagaagaaagggaaatacataatccaaatgaatgacttgtgctcagttcaaaagcatgtgggccaggcacggtggctcacacctgtaatcccagcactttgagaggctgaggtgggaggatcacttgaggtcaggagttcaagaccaccctggccaatatgtcgaaaccccatctctactaaaaacacaaaaattagctgggcatggtcgtgcacacctgtaatcccagctactcatgaggctgaggcagaagaatttcttaaacccgggaggcagaggctgcagtgagacgagatcgcaccactgcactccagcctgggtgatagagcgagactgcatctcaaaacacacacacacacacacaccagcatgtgcacaggtgacactttgacacaggggcca

SEQ ID NO: 840030 - DNA, 623 bp, Homo sapiens
catatacggacaactgattttttgacaaagttgcaaagacaattcagtggagaaaggatagtcttttttaaaacaaatgatgataaaaaaattagatactcatatgcaaaaaaaagctttgatccataayttgcactacatgtaacaattagatcaaaatggatgacaaatctaaatgtaaaacctaaaactataacacttccagaagaaaacaggagaaatctttgtgaccttggtttaggcagagttttaaaatatgacaccaagagcataatccataaaagaaaaaaataatatattggacttcatccaaatgaaaaacttctgctctttgacatatactgtcaagggaattaaaaggcaagtcacaaactgggagaaaatacacaaaaatcgtgtatctgatgaacttgcatctgtaatataaaagcagcttacaataaaaataagaccacctaattaaaagcaaacagaagattgtaatgcacattttactatagaatatattcaaatggttaataagcacatgaaaagatgctcaacatcattagtcattagggaaatgcaaactgaaatcacaatgagatatcactatacatcctattcgagtggctaaaatgaaa

SEQ ID NO: 840031 - DNA, 593 bp, Homo sapiens
ttcttagaaagaatgacagtctaggaattaaagtctgtgyttctaatgggaaatccttggtcctgatgtgtttacattgaagcaactattttaactgagtcttatgaaagaccttcttaggagtgacaggtatgagctattgcaacaaaacatagtgtacaatcttatgtgagggtctttaaatagagagccggttataaagactgtgtccctgatgtgtggggctggtcctcctccccagcagacctcacctccctgccctttcagcatcccctccttggccccagctgatggctgatgctcccattggtctctgtggtgctacctgccactggcctgccaagacctcagaccctcgctgtctccttgtcccatttcccctgaggcttgtggctggttctgtggttatgactgagttggcccttctgacatcctgatccagacacttcccaacctaggctgtctcagctctccaaaagcaccctgaaaataaaaatggaaaggagtttggctccttgggtgaggttgttcctgctctccctaagacactgttcttttctgtaaatttcacctatctgaaagaaacagaatgc

SEQ ID NO: 840032 - DNA, 650 bp, Homo sapiens
tgatgggaggtcctcctgtcctctcttctctcccactgaatgactcaggcagggatcttccaaaccacagcagttggagagtacagctgggccccctctccttatctgaggcaggagttcaaaatcttagtccccagggcagacatgaagggtaatattcatatgcagaccccaccgccggctttgacaatagtctgatgatttatggattaggcacaattcctgcatgggagcctcacctccaccttatgatggccatcgcagaacacaaaggggtaagattcacagcagtaaaggaattaacctctaatctagtcatcaggctattgctcaatattctaattcttctccttctcttcatggaggatcacacttccccttcttgctccttgttaggcaagtttgtatgtcttattttggccaacaaaatgtgaacagtagtgatatgtgtctccttcaaccttcaagagccaatgagggatttgcctgcttccttctgctgaccgcagtgactggagacattccatataaggtttcatcaatttttayccctgagtgtgaataacctgagaagagcccccagattacccacaatagacacacagtataaacaagataaaacttcactgttttaggcaaccaagatctca

SEQ ID NO: 840033 - DNA, 385 bp, Homo sapiens
tttcagcttttgtataaggtccaagctcaaagaaccctcctgtatttttaaaaagaagtacttaacctgagagattccgcttgcycacagcatatgaatgagtccagggaaggccaaccagataggcagcactggcttcaaagtggggccagagcccaccgtaagtccctctaggaatgtcacacattataataggatcaagtatgatgaaaatacagatgtgaagtactttaaactgagatgttctacttaataggcaaagagataaagcaattatttcctctgtcacaatgctataaattcgaatatggtctgtggaaggaaaaggtgatatgtattgttgcaggtcaaaaaaaaattgaaaaagaaaagtaaaaaagcagga

SEQ ID NO: 840034 - DNA, 626 bp, Homo sapiens
ttaacaattacatctgcaatttgatcataaaacctttccctcttaatggccaataaaagtgatgcttcccctaagacatggaatctaacatgattaaggggggaaaagaagagagtctaacttatttgattcaaccaaaccttcccctcaacgttcacaccagttatccatcccaatctctatcaatcttctttgttgtgactgcctattgattagattggcaatacacagagaacgatgtgtgagttctctctgaattgatcctcaaggcagtggagagagtgtctccaaagagttctccttctgtggggttaaggtggaattcagagcagttatttgtttttctgctattgagtaaccattttactatctatatgtatcccgtaacatcatgtcattgtaaaccttgaatatacacaataaaatttattgtttttttaaaaaaatatacaaattcaactcccacaatgtggaggccagaggtcccaaatcaaggtatcagcaggctgcactccctctgaaggcactaggggagaacccytccttgcctcctccactgctgctggctgcaggcatttcttggtttgggctgcataactccagtctctgccaacatcttcacatgg

SEQ ID NO: 840035 - DNA, 571 bp, Homo sapiens
caccatggaatacagcataaaaaggaatgagattgtgtattttgtgggaacatgaatggagctggaggctattacccttagcaaagtgatacaggaacagaaaaccmaataccacatgttctcacttataagtgggagctaaatgataagaatttatgaatacaaagaaggaaacaacagacactgggttctacttgaggggggaaggtgggaggagggagaggagcggaaaagtaactattgggtactgggcttagtacccaggtgatgaaataatatgtacaacaaacccccatgacacatatttacctacgtaacaaaccttcacatgtacccccaaatctaaaataaaaatttttaaaaaaagacagaatggtgactgccagtagtgcagggaagcatggtgcagagggcagaatgaagagatgttggtcaaagtgtacaaactttcatttataagatgaagttctgggaatctaatgtacaacactgtgactacagtcaatatgactgtattgtatacttgcaatttgctgagagtagatcttaagtgttatcaccaccaaaaaaa

SEQ ID NO: 840036 - DNA, 454 bp, Homo sapiens
aagaagacaaccagctcgatgggatccacatcgtgtgcaatcaccaccagctgagctttcttgttctccaccaaggtggygatggtgttaactcctgctcgaaggacaggtggtctcttggtgggggcgtcccctttgccagcagctttcttctcggcctgggccaacagccttcttctcttgctttgtctctggtctgtacttgtgggccagcttaagcagctgagtagctgtttggcggtccagggcctgggtgaactggttaatcgcaggaggcactttcagccccttatagaggatggctctctgccgctgcaacctgatatagcagggccatttcacaaagcgggtgaagtgtcttttgggctggatgtcctgtccaatgccaaaattcttaggccgtttctcaaacaggggattcaccactttcttagcctcctgcttcttcatgaca

SEQ ID NO: 840037 - DNA, 542 bp, Homo sapiens
aactcaaatgaaccttatagacacagaagttctatgatgaaagtttatagcaataaatgtstacatcaaaaaaattagaaagatcttcaataaacaacctaacattgcacatccaagaactagaaaggccagagcaaagttaatccaaaataactatagtaaaagaaataataaagatcacagcagaaatacacaaaatagaagttaataaaggaaagcaaataaaacagttttttccaaaaaaagataaaattgactcttttaactaaactaaaaatatggataattttcaaataaatgcaatcagagatgaaaaagaaggtattaaaactgatagcacaggaacacaaagaaactattataaaaatctatatgccaacaaattgagaaacctagaagaaatgtatacattcctgaacatatacaacctaccaaaatagagtcagcaagaaatagaaaatctaaacagaataataacaactaataagaataaatcagtaataaaaagtttatcagcaaagaaaaacccaagacttgataat

SEQ ID NO: 840038 - DNA, 666 bp, Homo sapiens
cattgccctcaacaaccactttgtcaagcttatttcctggtatgacaatgaatttggcaacagcaacagggtgatagacctcatggtccacttgacctccaaagagtaagacccccagaccaccagccccagggagagcacaagatacaaaaagaggccctcagctgctggggagtccctgccacattcagtcccccaccacactgagaatctcccctcctcacagtttccatgcagaccctttgaagagggaggggcctagggagcctcaccttgtcatgtaccatcaataaagtcccctgtgctcagccaaacaaacaaagagaacaatttcagctgcaaataaaagaaaatagagaacaaaatttcctcatattatttagatgttgggaggtaggtccttaccattataagttatttctgattttaaaatatcatcaaaacctcaggtgtatgttttgtatgttgtcattttctgtatgccagagttaccataatagttctaggagtttcagacacatcgaggcatcaattcaattttttaaaaatctccaaaggaagaagaaatgttgtgtttatatagtcttatctgaaccctgtaaacaacttcttctaacrtgtgtttgttcataactgtgccacatgctcatggcaaaacaggcacag

SEQ ID NO: 840039 - DNA, 577 bp, Homo sapiens
acaaagaaaaaattcaaattacttaccaggttctactaagtcctgttttcaccgatctttataccattcctrgtcctctggttaccctccccattgccgattccagcttgctgtatcacaaacatgctaggcatgccgtctcttcaaggtcattcagtgctggttgttcctgcctggaaagttctttcccacctatctacatgctgtgctcccattttaggaactgtcagaactggaaattgttcttcacttgtttttcagcatctcttgtaacagtgaccaaagcacggaatgtaagcttttcagttggatatacccaaaccaaatttcaaacttcaactacaaagctagttacgtcatgtacaaggttacctttttttttttccagtagtttcctaccagttataattctgtgaaatgatttggagcaatttttccctcactgcttagcactcccaagtatctgttgagaaatccagtattctataatattttttaaaactcagcctgactcaacttgtgtgtcttgtaactaagaatcccaaaagataaaatatccatagtaaataaacaactc

SEQ ID NO: 840040 - DNA, 577 bp, Homo sapiens
acaaagaaaaaattcaaattacttaccaggttctactaagtcctgttttcaccgatctttataccattcctagtcctctggttaccctccccattgccgattccagcttgctgtatcacaaacatgcyaggcatgccgtctcttcaaggtcattcagtgctggttgttcctgcctggaaagttctttcccacctatctacatgctgtgctcccattttaggaactgtcagaactggaaattgttcttcacttgtttttcagcatctcttgtaacagtgaccaaagcacggaatgtaagcttttcagttggatatacccaaaccaaatttcaaacttcaactacaaagctagttacgtcatgtacaaggttacctttttttttttccagtagtttcctaccagttataattctgtgaaatgatttggagcaatttttccctcactgcttagcactcccaagtatctgttgagaaatccagtattctataatattttttaaaactcagcctgactcaacttgtgtgtcttgtaactaagaatcccaaaagataaaatatccatagtaaataaacaactc

SEQ ID NO: 840041 - DNA, 622 bp, Homo sapiens
gtgcagtggtgcaatctcagctcaccgcaacttccgactcccgggttcaagcgattctcctgcctcagcctccctagtagctgggattacaggcatgtgccaccacacttggataattttgttgktggtggtggtgttttggtttgttttgttttttgagatggagtttcactcttgttgcccagactgaagtacaatgacgtgatcttggctcactgcaacctccacctcccgggttcaagctattctcctgcctcagccttcccgagtagctgggattgcaggcatgtgcaaccacgcctggctaattttttgtatttttagtagaaaagtggtttctccatgttggtcaggctggacttgaactcccaacctcaggtgatccgcctgcctcagcctcccaaagtgctgggattacaggtgtgagccaccacacctggccttttttgtatttttagtagagacagggtttcaccatgttggccaggctggtctcgatctcctgacctcaggtgatctgcctgccttggcctcccaaattgctgggattacaggcataagccactgtgcctggtccattttaagtttttttaaaaagatttttttaattagcaaaaatgtt

SEQ ID NO: 840042 - DNA, 541 bp, Homo sapiens
ctatagggacctcatggctagaagccaaagtctcagagttcaggggatcctgtacaggtaccccgaggctgggcaggcctgcagtgcgctcagcaaggggcttggagaaggctcyggaaacttgtagtccttgccctcagagctccatgaaggtggaaggacgaacactccatagataattatggggacaaccccagctcagggctgcctcctacaggaagccttcccgcactcctgctcaaggctggacttcccccacattgcagtacccactgtgtcccacttggctgtaactgcatccttagttcttggtcccctttggtaactggggcctcttggggacaaggaccatagtggctacttctttaaatccttagtgcccagcactgggctggtaacatctacaacccctctccagggtccccacccaaagtttgtcttgggcgcccctgcagcctgcctgcccacctcaaactcctgcagggtgactgtgccctcggcaatcagcttgtctgcgtacttcttcagcacaggcacctgt

SEQ ID NO: 840043 - DNA, 635 bp, Homo sapiens
aaccacaacataagaaaaattatcmtctaggggaggggacaaaataggatagagaggcagggctaggagccagatttttaagaagttatcttactttgaagatttgactttcaaaccttgtaaatattttacattcttataaaacaaaattaagtcttaaaaattgaaagtgaaatgaatcaaatgaataaatatgtccacttagtggcataaatacagagagaaaccattccaattgactaatggaacattccctaaagacaaacagaaaaaaattcatcaagtcttttttattaccagtcagtcgtaatagtgttagaattgttatgctggctgggcacagtggctcacacctgtaatcctagcactttgggaggctaagatgggtggatcacctgaggtcaagagttcaagaccagcctgaccaacatggtgaaaccccatctctactaaaaatacaaaattagctgggcgtggcggcacatgcctgtaatcccagctacttgggaggatgaggcaggagaatcgcttgaatctgggaagtggaggctgcagtgagctgaggtcgcaccactgcgctctagcctgggctacaaggagaaactccatctaaaaaaaaaaaaaaaaaaaaaaaa

SEQ ID NO: 840044 - DNA, 679 bp, Homo sapiens
attacattaattgatacagtaaaaacatttgacaaaattgaacatccattcatgataaaatctcttattgaactagtaccagaagggaacttccttgacttgataaagaacatctacaaaaagcttatagctaacatcatatttaaaggcgaaagactataattgagttttgtacgttaatcttttatattgcaaccttgctgaattcatgtattctaggagtttttggagttgtagatttgctactattttctacatacataatcatttcataaaagtagggatcatttaatttttttctttctgatctgtatcccttttattcccttttcttgccttaatgcactggccagaactccaatactgtgttaaacagagtggtaagagtaggtatcctcttattactgatcttagggggaaagcattcagtctttcacctttaaataagatgttagctataagctttttgtagatgttccgtatcaggtcgagcaagttcctttctggtcctagttctctaagagattttatcatgaatggttgttgaattttgccaaatgcttttactgtattgattaatataatyatgttatttttttctttagtctgttaatgtggtggattgcattgtcttcacacctatcaaaatggttaaaataaaaaaaagtgacaccaccaa

SEQ ID NO: 840045 - DNA, 603 bp, Homo sapiens
gtcttctttcccactttccaggaggctatttcacacagtcgatttcatcttcaacatccaactgcccgcctcttatctcaaggttgtgatctgagaccaggaggtaccagttgggagcctctgcaygctcctacctctgctgcctcaggcccaagctttccacttcaccctgtaccaaccaaaggcctcttattttctgagttctatctccttttgcctttgcaagaattccacccctccattcatctcctatctcttcatcaatttcttttactaaattccttccatacatttgtctctcctcctaaaaacacctcccttgaccctcatcctcttttagcaactccctcatttttctgctccttttagtgtcaaaatgtctgagaaaaagtcgaccatactcactggttcaactcactgactgcctcatcgacaatttctttctgctgttggatcacttctgtcagtgtgcaagcatttgttctcctgctactccagtctgaccctcagtaagcccagtgacaacttcagggttgccaagccgggtcccctgtgtcctgttcctcctccagctctccacagcattccatgtggctggccgtt

SEQ ID NO: 840046 - DNA, 681 bp, Homo sapiens
ttcacaatttattataaaactaccataaaagcctgatgggattttgatttgtattgtgtatatatcaatttcaggagaaatgataccttacaatccagcaatatgttctatacctgcatgtatctatatcttttaaaattctactcaacaacattttacagttttaattgtataagaataacatatatttagctaaatttatccgtaaacattttagtttttaaagccaccataaatggtatttttaaaatttcaatgtctaattattaattgttagtgtagtaaaatggaattgatttttacatactgagaacatgcttactagttctaatggcttattaaaatagattcccttggattttctacaaagataatcatataatctgcaaatagagttttatatcttcatttgaaatctttatgtattctgcctatattattatttttaccttactgcactggctaggatcttctgtaatgtgttgaatagaagttgtaagaagttgcctattcttagagaaaagcatttagtctttcattattaagtatgatgttaaccaaaggtttttcttggatgctctttawcaggttaagcacaatttttctattcctgtttgctgagagtttttataaggaacgtatgtaggattttgataaatttgtttcttgtctattgtgatg

SEQ ID NO: 840047 - DNA, 564 bp, Homo sapiens
agtagtcatatcccatcaatttctccctacttttagttgatctacagtgcctcaaacagttgttctttttacatttttgtccagatttttgtaaatgttatcagcaggagggttaatctgacacaaattcctctttcattaccagaagctgttccctacaaccaccatctttgaaggaagatttggcaatatgtattaaaaatttaaatacctccatttcttggtttctgtcctagagatattcttatacatgtgtatacagaaatgagtacaaagatttttcatttcagcattattcaaaatagtgaattaataagtccctaaatgttctatagcaaggattggcaaaatttttctgtaaatagctagattgtaagtaatttaggctttgtaggccatatgatttctgtagcaatgtcttactctattyaggctgttgtaacaaagactgtggtctgtgtagcttataaacaacagaaatttatttctcacagttctggaggctgggaagttcaagatcaagatgctggcagattcaatgtcttattagtgcctgcttcatgg

SEQ ID NO: 840048 - DNA, 628 bp, Homo sapiens
gacataatggtcatctttctttaaaagaaaatgccctccttagccatcctgctmaagtgaacagaaattatttgcaatttcacttgaactatacaagaaacacctaagtcagcacactttcaagtctagatctgctgaactctttagaggaagaaaaataaaattattgcttttgctaaagattactatcttaaaatcactttgcctgattattttatgatgcacaaaaggtacacatactcacacacacaccaccccaataactatttccatatttcaaacttgacttacatgtaagtaccaacagaagtgatttcagaattatttaaaaatctaagaatgaggtataaaaagatgagaaaagacaaatacataaaattgttttaattaaaatactgaagattcagtcacatttactatttgacttaaagtgaaagagtcaaatgactttgaaaactgaaatttgaccatttccatgtgaaactgtcaatgttaacaataaggtgacaagttagaagtggttgtttttaagaattttctgctctttggcatttaatatttttgaaattaagcttagaatgtctttggcgtataatgttaaacaaggattttctacaacaaactttaa

SEQ ID NO: 840049 - DNA, 553 bp, Homo sapiens
actgtaactatggctaactatggtacacaggttgagaatccctaatgctgaaactcaaaatccaaaatgctccaaaatcygaaactttttgagaattgacatgatactcaaagaatatgctcattggagcatttcagatttttggatcagggatgctcaactgagtgcattctggaaatattccaaagtatccccaagattgaaatccgaaacgcttctggtcccaagcattttggataagggatactcaacttacataatattgtataaaacaactggaaagaaatatatcacatattaactgcagttatacttaatgatggttctgtaggtattttctacttttctccacctatttttctttaataagcatatattacttttatcacaatcatacaaaataaaaaacaagaaaagttaaaaataaaagaccttaacaaactccttaacaaagcataataatagctgatgaaatgtggcctttggcagaagacggaccacagtttgactctcagcatctcccatacataatccattatgtgagcttcagctt

SEQ ID NO: 840050 - DNA, 581 bp, Homo sapiens
tttgactgaaacttctcctcatggtactaaatactactagaagaaagcaattcaaactccaccagttccttcatgtgatgacacagagctggcaagggaagcagcctttaggtgccaataaatyatggtggccacatgtgtttctgcttcattgctaccctgtatgggtactcaccctccaagatcccatgccatgctatttcagagtccatcaatactccagcaaccactgtccatgcacatcaggcttgcagaatgctagagcaattatgttaccaaaggttataagacgtaaatatgtttggacagaagttcaaataaaggttgagtctgggcttgccccggtttcccaccaagttggccttgctgtatctggggcccatctttccattagctgggacttctttcttggctccacaggggcctccttttcatttctctcttccccatttttctctctataaaaacagtggtcatttacggagcatttagtctgtactcacaggccatgactgccccacattatgctacaagatagatttctatctatctacaagatagataacattgtccctaatttg

SEQ ID NO: 840051 - DNA, 599 bp, Homo sapiens
aaacatcactatgtagcccccatgtrtatatataataattattattatttttagagatagaggtctcattcttttgcccaggctggaatgcagtggagcaactataactcactgtagacttgaactcctgggctccagtgatcctcctgcctcagtctcccaagtagctgggactacaggtacatgccaccacatccagctaatttgtatttgtttatttatttatttatttttagatggggttgggggacttgctatattgcctaggctgatttcgaactcatggctttaagcaatcctcagcctcctgagcagctgagattacaagcatgagctaccaagcctggcttattatttgtcaatttaaaataaataaaattaaaactggaaaattcataaatatatggaaattaaacaatgtagtcttaaacaaccaatgggtcaaagaagcaaacacaagagaaattaggaaataccttgagacaaatgaaaacataaatacaatatattaaaacttatgggatacagtaaaaacagtgctgagagagagattaatagttgtaagtaaacatattaaaaaagagggaagatctaagtaa

SEQ ID NO: 840052 - DNA, 640 bp, Homo sapiens
ctgccttcctcctcttaagatggctgtcaaaaccatgacatgctgtggtaaatgggtagaaagaatgcagagaaatgtctcagtgataagaggtgggtgtgtctgtatagcasaaagtggaaagaagacaagcttaaaacatgaaacgtttcagaaaaatgtaatggcttaattataaagatctccacagatgccaactgaaattcttcataaaattgtcaaggcaccataagttagttttaaaaacagagagagatgaagaaaagaacatgtcaagccaaatatttcactgctttttaaaagatatttgctgagttaaaaaacatttatggtattttatttttaatggctctaaaattaatttcctcatgaaaatccacaatcaccatgttttaacaaggtggcctaatgcttgtctttacaacaacaccatctgatacctgggaccatgggccattagcattgagggtcagcttagaagccatccagtccccaaatctcattttgcagaaaatggatcaagcagcatccactcctgttcatggtttctgtggcccttctttgccaggagcattattgggcaaaaagaagagttaaggcattctagttgaagtggatccctttgaagcattaatatatg

SEQ ID NO: 840053 - DNA, 640 bp, Homo sapiens
ctgccttcctcctcttaagatggctgtcaaaaccatgacatgctgtggtaaatgggtagaaagaatgcagagaaatgtctcagtgataagaggtgggtgtgtctgtatagcacaaagwggaaagaagacaagcttaaaacatgaaacgtttcagaaaaatgtaatggcttaattataaagatctccacagatgccaactgaaattcttcataaaattgtcaaggcaccataagttagttttaaaaacagagagagatgaagaaaagaacatgtcaagccaaatatttcactgctttttaaaagatatttgctgagttaaaaaacatttatggtattttatttttaatggctctaaaattaatttcctcatgaaaatccacaatcaccatgttttaacaaggtggcctaatgcttgtctttacaacaacaccatctgatacctgggaccatgggccattagcattgagggtcagcttagaagccatccagtccccaaatctcattttgcagaaaatggatcaagcagcatccactcctgttcatggtttctgtggcccttctttgccaggagcattattgggcaaaaagaagagttaaggcattctagttgaagtggatccctttgaagcattaatatatg

SEQ ID NO: 840054 - DNA, 618 bp, Homo sapiens
ttgaggaatatattatctactgggaagatcaacagataataatattatgcaacagtgaatataacatactgctgactgtcagtgcagataaatcaaaattattatggactttccagatgcggtaacactttgtggaacattgcaacaagtttcaccaaaagggaactatctgtgtctgaaaagaatagtagttctcctgtcaaaattctcccagtctgctttagctgttagtaagatcatcttaacaggagtaaggatgccccttacccaagaagtatactcagtgacagtcagcctgacatcctcaacatttttaacccatgtcttgaatctgttcattaaattaagtcgctggaaatactgggctgctttttggagaagcatgtgttagtttggagccaaatgatttgaattctagtccagattttgccaggaatgggttgttaccttattttcctcataatggaaattcagttaaaatccctgctctacctgttttataagaccattttgaaaatgaartaatataatagataaaagtattctttgtaaggttaaatgcattatgcagatgggtgttgggtggtggtgatattagctgtaaagtaccattgaagt

SEQ ID NO: 840055 - DNA, 576 bp, Homo sapiens
tattatgcatagaaagttcaaacaccaaatgtaattgagttataaatgttcaataagtagcttatttgtcctgtttttttttccttaatattatttcctccacattccttctcaaaaataggaygtatatagatggtgagaaatgaagacaatataattacctgtccctacataaaaaatgaaaccatgcacatttttctattcctagttaaacaattctgacaccaaacaaaaaataacctagcagttggccctaggaaattatttcctcacagaaaatgagtttgtaacccaaataaatgattctacatgtcaaaactaagaacactatcaagactcattttaagaccatcgatttgaggaacccaccaatccaaagctattatatcataattctgtttaatttcaagtttcttatcttgtaaaatcacctaaaataccaaaataaaagtcttatttcttttaacaaccctttctcctttcgaaacacaaataaggctctgctaagtagttcatgttctctcttgctgcggtaagtttaataagcttaatttttgttgattaacaaattttccc

SEQ ID NO: 840056 - DNA, 543 bp, Homo sapiens
gaacttcaaagatatgctaatgaaataagccagacataaaagattacatattgtatcactcaattgatatgaagtttctagaaaaggcccatgcatagagactgaaaacacatgagtgtttgccttaaggctgggcattgagtggttgccttagggctgaggttgacagaaagaaacaaaaaaaaatttttgagctggtggaaatgttttaaatgtttagttatggttgtgtaagtctatgagcctcctaaaaataactgaaatatttacttaaaatagttaaattttatgatagtaaataaaactgttaacatatgtaggaaagtataaataaacctgtcacctcaataaaactgttttaaaaagaaaagttaaggccacgtgtgttggctcacactgtaatcccagcactttggaaggccgaggtggaaggactgtttggggccaggagttcaagaccagyctgggcaacatagtaagacactgtgtctgcaaaatataaattaaaatcctagcagagtttggcagagtgtgtctgtagtc

SEQ ID NO: 840057 - DNA, 608 bp, Homo sapiens
tgtctgtcagttttcagtataacatacaatcaagaagaaacataaaatttggcctgggtttgtaagtatatcaccagtatcaaagatgatttctcaataaacttagatttatgttyaataaaaaggtcacataaaggattttttttagtttactttgagcatggaagaagactggacttgtccatatatttcttcattccagagcatcgaccagcaatgactatcacaataagaatgaatgacattgtggtatcgctcctctcctatttttcttctgtctttattgaagagaatactcttcagatgagccggggctggtggctcacttctgtaatcccagtcctttgggaggccaaggcggtggatcacatgaggtcaggaatttgcgaccaacctggacaatatggtgaaatcccatctctaataaaaatacaaaaattagccaggcactgtggtgggtgcctgtaatcctagctacttgggaagctgaggcaggagaattgcttgaacttggaaggcggaggttacagggagccgatattgcaccactgcattccagcctgtctcaaaaaaaaaaaaaaaaaagagagagagagagggaatactct

SEQ ID NO: 840058 - DNA, 653 bp, Homo sapiens
gcctctgttctcttcctgcttttaggatcctttctttatccttgactttagggagtttgcttattaaawcccttgaggtagtcttccttaggtaaatttgcttggtgttctataaacttcttgtacttggctattgatatctttctctaggtttgggaagtgctctattattatccctttgaataaactttccctatctctttctctacttcctccttaaggacaataactcttagatttgcccttttgagagcattttctagatcctgtaggtgtacatcattgtttttattgttttttcttttgtctcctctgacttttattgttttttccttttgtcttctctcagtcagcttgtggtgaatgctgccaggtctgggactcacccttcagagtggtaaattcccctctggcccaggttaggtccagaaatgccatccaagagccaaggcctgtctccttgactgtgtattttcaaatagcgtatcttcaagctcattaattctttcttctgcttgatcaattctgctattaaagactctgatgcattcttcagtaagtcaattgcacttttcaactctagaatttctgtttgattctttttaattatttcaatctctttgttaagtttatttgatagaattcttaattcc

SEQ ID NO: 840059 - DNA, 466 bp, Homo sapiens
gtttccttgctcttccctagaaatgaaagggttccagagcacctaaatgagctgctgacgagcctaagtaataggagcatacctggcaggaaagaatgaattgagaagatagacaagagttcttctgtgctttttgttgtcctgggacagccaaggtgggagctcttagagcaaggaatttccagaaatcacaagcaatgatctgacctcaagccatggaaaaggctagctcactggaagtgtaattaatctttctggcagtttcttgctttcaaaacaagaatgaatcagggattttatctgaggttagtagtgagtcatttttaaagaaaaartctaatcaaactctggacatctggggccaccttggaagatgggattctgacctcttatagtaagttgtttctcatcaatattcctatctgacgagaagaaactatgatcagttcaattatatttttgctta

SEQ ID NO: 840060 - DNA, 647 bp, Homo sapiens
accaggcttggtgttttgcatgtattgtatygtttaagtttgagaatgttatttggatttctccagagttcacaatctttgacttctgtgatgcatatgcttttccttttgcctggaaggtccctcctcattttgcttgtatttggaagtctttctcattcttttgtatttaactcaaatactgtcttctctgtgagtccttcttcatccctaaaaaaaagctgggtgtttctcttggcaccttgtgggtgtccctcactaagctctgctctcggatcacaattgctgtttgcacctgtgcctcccttgctccttgctgagttttgaagtggcagatttcgtgctgttcactcttgcatcctcagggtctagcacagctcatattataaagtggcagcgcattcaatatcagttgacttcttgagatggcattgattctccagtccagaaaaaaatgtctcaagagcatcaaattccctttcttttgaggtctgagctcatgaagttacttttgataaagaagcttgatttcctagtttcttgataactgggtgaagatgttttagagaaaagaaacaggcatgtcctatagtagggggtatattttcactgcaaaagaacaaatcagcattccagtttatccgtca

SEQ ID NO: 840061 - DNA, 627 bp, Homo sapiens
cccgagctctgccctccccacagtctgcccttctaggagagaaacaaggagatagtggcacacagggagggaggcctgtttcttatgctacccrtacatcgaggccagctgttctactcaatatggcacaccagcatgctaattcccaatcccatcaacttgtgatcctcattcattttccttataccctgtgagctactgaagcaaggggtcttctgtgctgcattttaattactacgatgagctatgggatctcaagggcttttgaataataacacttcaacatttacacattttcattcacctctgcccacttaaattaaggctaaagaatgcagctcatgtgaggagttgctaattcaaatctcccctcaggcccagagaagaaggctgggggacccagtgtctcatattgttttgtgttctccgtatcattaggattggaatcctccagctgcctagtcactatagtgagcatcaaaaaccatgggtgtgcaggagaactcccaagtacatggctgctttcagagggtcaccaggctcttcctggaaggaaggtcctgaccaagttattcagacacttgctgaagactgcaatttgataagacaaatagactgagagttcat

SEQ ID NO: 840062 - DNA, 596 bp, Homo sapiens
gcgcccagcctgggttctctttaacgttaagartcacctcaacttggatgactcctaaatctgtatttctaaccttcacatctctcatcagactcatatttccaagtgtttatgaagtatcttcacttggatgttctctggtacctaaaacacctcaaacttaacacatttgaaaccggatttaatatcatccctcaaacatgccccctccctcaattctctatttctgttagttgtacattattttctcaattaaccaagctcaaacctcagaatcatcctcaaattcctctcctcattcctatacattttgttccatggtcctgttaattctgcttcttctatacttctcccattcatacctcccttcctataacttcctactccccctctagtctgggctccaattaccttggagagactctgtgaagtctcttgactttagggcattcccgcctccagtctctcccagtctaaccaatctaagagtccacaattgtatatttgtgaagcgtggctcctgtcctgtcgccggattcaaaaagcctcaacaacactgcattgtctcgggaataaacactgacggtggagatcca

SEQ ID NO: 840063 - DNA, 583 bp, Homo sapiens
tgcgtgtgtttcgcaggaggagcaccgtgaggccaagctgaccctgcggcccccragcctggcagccccctacgccccagtgcagagttggcaacaccagccagagaaactcatcttcgagtcctgtggttatgaagccaatgtgagttgctcccaccctcccagcagggccggcctccctgctccttctcggccaggcacctgcggccaagtcccagcagggactccacaaagccaggcccagggcttttgagctgttctccactctcagccactcttgacagctaaggcgaaggggtggaggcctctggatcctttagctagggagttgaatggagggtctctccagctggggcaggagagggggtgttgttattgagaggggtaactacttgattgtgggacagtcccaaattggttgggtcacccctgcatggaaacgcaggatttcctaagcctggccactgctcgcccccacagtatctgggctgccatgctgatcaaagatctgcgagggacagaatccacgcaagacgcctgtgccaagatgcgggtagggtgcctgtgtgggctggagggcgct

SEQ ID NO: 840064 - DNA, 532 bp, Homo sapiens
aaacaggtgacaatcattagctcagagtaataatataaggtttctctgtccagcataaaaactgcttaagtctgacacaaggcaccagaaaaagccmaaagaaaaaaaaaaaaaaaaaaaaacacatacacacacacacacagccaaaatgcttgcccatccacgttgattattcaagtaaaccagaccagcaaacaaaagataaatttgctgctaattcaaggccacttggagactgttcttcttatacagttcagttggtcttagttaaaatgcaaacactgaagagttacccccaaactctttgaaacagaaaaaaggaaaaggatgaagagattttaaaaagctaaactgtttacgaaaattttgttccacagctttcactggattagttattggagcaaaatttagccatgtgaacaggtcccattttgtcagaagcgtaagttggatgcaaccatcttttataaactggtgagtttgtattactctctcatgactaaaattttaaaatgaaagctataagatttgt

SEQ ID NO: 840065 - DNA, 572 bp, Homo sapiens
attatgcaaactgagattgtcattactatgaattttactttgtattttccctttttaaactgtgtatctgttatgttacttgtcaaatttttgcagaagtacaactcctaacataatatgcttctaaccagaaatgctggtccagcactttgagatgatagcaagactacaggaacagacaaattgaacttaataatggactccaggtagacttaatctgacaaccactccctcaaacctcccttgttgctcaaatgtggctaaaaaggttttgacacttactcctacttgccaaaactccttctaatgcagaaccaaaccagtaacctgggacaggttcatcctggcactgagggacatcaaaatctaactacagaatgattgatcactgatgcttttagagaaagaatttgatcaaaagggagaaatgtgaaagttatcagaattaaaatggagttacttatgtttaaaaaaaaaaaaaaactctgaaaaatagagccaaggtaggccatgaagagaagggtcatayataaatacctgataacaaaaactattacaaaagactgcaaaaa

SEQ ID NO: 840066 - DNA, 655 bp, Homo sapiens
tcccagctactcgggaggctgaggcacgagaattgcttgaacccaggaggcaaaggttgcagtgagtttagatggtgccactgcactccagsctggggagcagagtgggactctgtctctaaataaataaataaataaataaatatatagtctttttggtgattctgttacctgagttaaatgctttcaaaatgccacttctccaaagagcacctggtgtatgaggatgttcactctatcattgtggaagcagagaagatttctgattggattcccttagtatcttacaaattctcaccctttgctccagattccatttggccattttctgggctggggactctcaagtgcgactgattccactgggaattttgagatttatgttagcatacggcatgtgagtgcatgccctggccactgtcatactatttctgcatcctcttctctctgactaggcctctgggcacccaaaggtcatctcagaaagtgcatattttctcactggtgtaagcagaaacgcctatatccattcacactgtaggtaggccatgtgcacctaggtgctgggctttagaatctgacgaagcctcatctcatctcactctatttctgtaccataatcaatgttgtactgggtcaaagacttgagaaccag

SEQ ID NO: 840067 - DNA, 655 bp, Homo sapiens
tcccagctactcgggaggctgaggcacgagaattgcttgaacccaggaggcaaaggttgcagtgagtttagatggtgccactgcactccagcctggggagcagagtgggactctgtctctaaataaataaataaataaataaatatatagtctttttggtgattctgttacctgagttaaatgctttcaaaatgccacttctccaaagagcacctggtgtatgaggatgttcactctatcattgtggaagcagagaagatttctgattggattcccttagtatcttacaaattctcaccctttgctccagattccatttggccattttctgggctggggactctcaagtgcgactgattccactgggaattttgagatttatgttagcatacggcatgtgagtgcatgccctggccactgtcatactatttctgcatcctcttctctctgactaggcctctgggcacccaaaggtcatctcagaaagtgcatattttctcactggtgtaagcagaaacgcctatatccattcacactgtaggtaggccatgtgcacctaggtgctgggctttagaatctgaygaagcctcatctcatctcactctatttctgtaccataatcaatgttgtactgggtcaaagacttgagaaccag

SEQ ID NO: 840068 - DNA, 467 bp, Homo sapiens
gtattccaatatatatgttacaccttttgaaattatcccaatattttcatgtgctttggtctgtattttgttttcatttcttattctcttttaatttcagttttaagaagtttctatttccrtatcttcaagctaaatgattatttcattggccttgttgtatacattggtgagccactagaaggcattctttatttctattaccatgtctttgatttattgaatttctatgtgatttgttttcttagacttaatatctttcatcttatattctccatctaattttgcatgttctctaattttttctatttgaaccatttacattttaatcatagttaacttaaattcttttctggtaattttaaagcctatgtcatacttgagtctaattctaatacttgttttgtttcttcagactgttattattcttgcctgttaacaagccttgtaatttgttgaatgcccaa

SEQ ID NO: 840069 - DNA, 594 bp, Homo sapiens
gtaagcattacttcacccccctcttaaaggtagagatggggtttatttaatgcaggtactgttacaatacaactgatgtgttttgytgtcgttccccctgcttaaagcacttgatgcataactctgtctaccttcattccgtagtaagacagagacgcttggcttcagacattttcctttgggtattaatgtgtaagttgtgctacaacataattttctctttttaaggttgtgttgctttctgccacaatgccaactgatgtgttggaagtgaccaaaaaattcatgagagatccaattcgaattctggtgaaaaaggaagaattgacccttgaaggaatcaaacagttttatattaatgttgagagagaggtaactgtctgattgttagacattattttaccttcttgtataagcactgtgctaaaattgcagacactaggaccatgtcttggtttttgcaataatgctagcagagtacacacaagaagaaaagtaacagcactagattgtaaagactggggtggacctctttcttaatgtccaatgtcctttgtcttaagatttggtgcaatatctcattagacctaacag

SEQ ID NO: 840070 - DNA, 670 bp, Homo sapiens; identical to SEQ ID NO: 818926

SEQ ID NO: 840071 - DNA, 641 bp, Homo sapiens
aggcagaggttgcagtgagccgagattgttgccactgcattccagcctgggtgacagagcgagactttgtgtcaaaaaaaaaaaaaraaagaaagaaaagaaaaagaggctctaatgagataaaatgagaaaagcctggcatgtagtggcaacttatgaaaaattgtaattaaaaaaaaacattttctgacagaagaaactggatctacctggtttttctgaagcctaatcctgctcgccccagtgagtgctgtttctgaggcatcctggttgttttgagctgtggatgctgaaggttagagtgggagggattttagaggttaggtctgcccctcttgtgttagaggacatggatccctggtctggagaggttctggtttttggatcaagcctcacaaggggtggcaccaactcactcctaggaactccgctagaaggaaggccagctctgcctaattcggttggggagatgggggtccctttatgctagcagaatatgtccgaaggagcatgatggtgtcagctttgttcatgaaggccagtggtacacagggagcccggcagcttcctcagcagtccctgctgccactcttccttaagtcttgaggagtctttttttggcacaatctcagctcactgca

SEQ ID NO: 840072 - DNA, 638 bp, Homo sapiens
gaaactgataaatagctccaaagatggcagcttagaatgaaaatctgggttcttcagcacattgactgacagcatgccgaaagtcctggcttctgagtctatcaacagaataatggggaaaatatttttwaaaaatgacaatctttgagcttcatcccaggagattcaaacccaatgaatctgtgggtaagtctcctgaatctgtaatttgaaaatctcccctggcatgattttgccacttttggtacaaataacataatgatacattttataattgatggcacctttgatttgataagatgtcatttgtatatgccagatacttttatatatattattgcatatagtattcacatctttttttacaagtaaagacattgaggttcagagaaactaagcctgcccgtgcctgtaagtgaatgatgtatgtctagagcccaggccccctgatctcaagtgcaaagctcttccctgtcgtctgcaaatttctcgtgcttcttgtggactctgaacattcatgtgccaatgctgtcaatgtgattacaagattatacagaagaacaaaaaatagcttctatttaaaaaaataaatgattaggctctgttatgggctgaattacattcccctcaaatgcata

SEQ ID NO: 840073 - DNA, 520 bp, Homo sapiens
taactaatacaagttataacaagatcattcttgcatatgtgtagagaacagattttagagaggtaaaaccagaagtttaaaagcaaaattagagaagacaaaactagaacgacttagaagattgtaacaaaaaaccttcttgagagatggcaatggtttgggctaggatgagaatagtgaacacacagagaaatagatggatttcagatgggcccaaaaagttctattgagaatatttgctgatgaattgggaagacaagggagaaaacagaaaagaaaccaaggctgactcctaggtttggggcttgtctagttgagtggttggtggtgctacttactgacagcagaagaatactggaggagaagcaggttttaaggtggaaagcaatactttcttcttcaacatattaattcctrgatgactttagacactcaagtggacatgtttggtggatcactgcacactcataactggagtttaaagggcaagtaaaggacagagatagacattttggacaca

SEQ ID NO: 840074 - DNA, 447 bp, Homo sapiens
gtctccacactttcagcaaaatgagaggaaaagtgttgctcctagagttgagataagtgacattctggaaatatcagaatgtcctgttcttcagactgactctcttaatttgtatcatttaaagacttggggatggtgtaagaaggaactaacattttaaggaagacattggtaagacattctattttaaaaatagaggcacagctgaagaaagaaaactggtttttctctgcgtgagaatgaacagttcacatggcattttggactgttctaaacaggcctgcagtaatacataatcaactattggaggaaagatagttttgtcttatatttatggaggggacactgaacacagaaactaagaataactgtacttagtactgcacgcttcggttctcaaagtwctttcgcatgagctgcttcgtggtggcttcaccactgccccat

SEQ ID NO: 840075 - DNA, 609 bp, Homo sapiens
tgtctcatcctgttcttcagcatctcccatcaagatctccagtggcctcacaaattacaaccagtctctaaaagctgaatgtcaacctgcccttcaaaggccctgtgtcccagtgccaaaaggcagtagtttaaagaaacagggaacagtcttgctggggcctacttctcgttggaaggagtgtacaaaatctgaccttgccagtgggtggcctctatccagccctcaaggcatcctccaggcagttctcttgtggagcactagtcagtggctctggaggcaggattcccagtggtgcagccacaaagcttcacctgggcctggcccctgaggacaatattaaaggatctgtgttgggagtgcaattagttctgtatggaaaagaaggctgattcttcactctctggcaaggtcaaggccaggagaacagacggaaggagagggcaactcttggtctctggagagacagacatccttgcagagatctytcatccatgggatcaccattggggacctagacaaacctcatttttacatcacaagaggttattgggtccctggtatgtattgagaactgaactcatacaaaaatgagtacagcacaggttc

SEQ ID NO: 840076 - DNA, 556 bp, Homo sapiens
gtctgttgttttctgatgttcttaaccaccaaattatttctcaactgtttctggaatttaacttatctttatcagcacattgtcagctctgtgaatttgagcacacactgtgtctaaagtcatcactggccctctaatgatatttttagaggtgtggatcacttcctttttggttaaatggacactactttgggaaattagttgattcatataaatggacatacttttcggcaatataacaataattacttaatttcaaaatctattgtctaccataaaaagtaaacttgaggctgttcttgtgaatatcagtgattccacgtaaatacaacccacagctgctttatcaagttagatacttaaaaaattacagtctgaaaacatggaggcaatatatattgcctaattcaacacttatttgagtctataacrtgagttaatagatgtttacacttttcatgaagaaaaaattcagtcattattcccaattcattcctgattcaaggacaggcattgaaatccctttgtgtatgttctcagtgggaaaagtagttct

SEQ ID NO: 840077 - DNA, 635 bp, Homo sapiens
cagggagaatgttacttcacttgagaaagcttcatgattycctgactcagagatgccagagattcctggccgagcagtctgcagccgggatacatgcacctctagaaggcatccaggcctcacctctttcatgtgcagctttttctggacaggatatgatttcccacctcccttgtggaacgtacattttggagtgactacctgccaatataaggagtagaaacttattttaataaaaagcaacataatctgtgaatagacatagacattcaatgttaagcaatgcaaggaaggagaaagtgtctgtactgggagtcaagagacctgggctctagcctgattctgccacaaccaactgtgggacatcttctctgggccttggttctttatttgcaaaataaaacttggcaggtcatctttgtggttccctccagctctgataattaatgagtataaatttgaggaaataaaaaggcaaagtagaatatactattatgttaagatgttattattctctcaagatgagaattttatattggaaaagaacctggtttttacgtaatatcagaaaggaggctgagtgcagaggacatttcccaggcctactagaagatgtattcttgactcttgcttct

SEQ ID NO: 840078 - DNA, 635 bp, Homo sapiens
cagggagaatgttacttcacttgagaaagcttcatgattccctgactcagagatgccagagattcctggccgagcagtctgcagccgggatacatgcacctctagaaggcatccaggcctcrcctctttcatgtgcagctttttctggacaggatatgatttcccacctcccttgtggaacgtacattttggagtgactacctgccaatataaggagtagaaacttattttaataaaaagcaacataatctgtgaatagacatagacattcaatgttaagcaatgcaaggaaggagaaagtgtctgtactgggagtcaagagacctgggctctagcctgattctgccacaaccaactgtgggacatcttctctgggccttggttctttatttgcaaaataaaacttggcaggtcatctttgtggttccctccagctctgataattaatgagtataaatttgaggaaataaaaaggcaaagtagaatatactattatgttaagatgttattattctctcaagatgagaattttatattggaaaagaacctggtttttacgtaatatcagaaaggaggctgagtgcagaggacatttcccaggcctactagaagatgtattcttgactcttgcttct

SEQ ID NO: 840079 - DNA, 623 bp, Homo sapiens
cacatatatatatatatatgcacatatacacacacctaaatatatggagaaccatacatatcatatggttcccaggttcttcagagaaacagaacmaataagatagatatttatgtgtgtgtgcttgtataggatatacacatacatataatatatgatatatatatatatatatatatatggatatttaggaagacatttattatgaggaattcgctcatgtgattgcagaggttgaaaagtctcacagtcttgccaactacaagctgaagactcaggaaagccagtggtacagtttgaaggcctgagagccagagagctgatcttgtagattccagcctgagtctcaaggcctgagaatcaggagttgagggcaggaggagatcaatgtctcagctcaaaagtcaggcagagagtgaattcaaccttcctgcattgtctttttgttctattcaggcccttaatggattggatgatgcccatccacgttgggagggccatctgctttcctcaattcaccagttcaaatagctgatctcttccaaaaacaccctcacagacacatccagaaatggtgtccaagcagatatttgagcacctcttggtcaagcgaagttgacata

SEQ ID NO: 840080 - DNA, 569 bp, Homo sapiens
attcacttaacccccctgatcttagttcccctatttgtaaaggcagagartgatagtacctaccttgcagcgttgtaaggagcaaacgataatgtatgtaaggtgcttaatgactcctgacatttggtaagctctccataaatagcagctattattaattaccgtagaagttctggaggtaggcccaggggaaaggggctgagtatcagtgctgactgtaagggatcacagattcgatatgtctactatagtgggacatttgtttgttttacagtggcctgttctatagcatctttacagaccagttgaaatgcaaccttagtgtgatcaatctagatcctgagatcaaccctgagggattctgcatcctcctggacttcatgtacacatctcggctcaatttgcgggagggcaacatcatggctgtgatggccacggctatgtacctgcagatggagcatgttgtggacacttgccggaagtttattaaggccaggtgagttgctacccgggtggaagcgtcggagatggaagagatagtccccgatcagaaacctttgataattcat

SEQ ID NO: 840081 - DNA, 538 bp, Homo sapiens
gagttgaagagaattattaaattgcagtttctggatagttggtggttggcattcccagtttttaccagacaaaaaagtctaaatcttcgcccagctctggctacagtaatagagcccagtagtacctaatcagggtaaaatcaccgtgacttctcattttcaaattgttacaacaaatgaaaaaataaatcagctgcttacaccaagagatttggcacagggtcatggacccatagatgggagagcggggactgtcccctcctgcaccctggctagtttgcctttgctctgcactccagttctttttctctgggcctctgttcccacttccaccatcagcttcggtctcccagtctcacaggaggatttggagacatgaaatccaaataggtgcaagggtgaccacagagtgttcgtcattgattcctccttcagtgacctcaaagtagaattgaatttgacctatrtcttacattcctggaatgctttgtgttttattttgtgtaatataatatcctcctgtgaggtaggcaggaca

SEQ ID NO: 840082 - DNA, 607 bp, Homo sapiens
ttaatttttttcttttctttagggagagaggcaccataaaagcaccatggaatcaccttaggcctctccttcagaagggaaattactgtggaatctgaaggtggtttctttcagacaggcaggtggataggagttcttagagtctgaactcaacagttgctgtctagaataaggggggtataattagatgctttgcattttgacagttcaaaagcaaaggctacataacccttagctgcagattcccagatagagaaaagggatagcagctgagggtcccctaatgtcctggcaggtatctgtaaacggctcttatctttgcttttcctgctgtgtacctgaaatttcccacttcctcttatcaagtttctagctcaaatatcaactaccctccctgaagcttttctagccacctcaggtaaaattaatctgttttgcattcctagagtgctgcatgcatatttctattcccgcacttgtcaccttatattacagttacttgtttacatgcttgtcttccttcayagctagactctgaacttcctaaaatcagagacttcacttttcatctttatataataaatgtcaagacataaatgacttttga

SEQ ID NO: 840083 - DNA, 617 bp, Homo sapiens
aaaattagggttagccctaatgcaatatgactgatttccttataaggaaaggacattaggacacacacacacacacacacacacacgcgcgcgcgtgcgcggaaagccatatgaagatatggggagaacacagccatctgcaagtcgggagaaaggtcacaagaagccaccctgcaacacaccttgatcttgatttctggctcccagaattgtgagaaaatacatttctttattgttgtattcatttgttagagataccatagcaaactaatacatcaagaaactcttaggacataatttattgttaagttctatgctgctcttatgtattatttttcactaccttaagccctaggtcttgaagcagtttgtggggcagagaacagacattttagcacacagtctttcactaaactttaaaataacatatgctagaagtgccccctagaaacctagggtttgagcaaacaatatgaaaccttgaagaaagataatttttcatcttagattttctttaatggatatattagaaattgatatttatcattttctgccccatycccattcaaccccaaacatgcactcatatacatttaaccacatattctattgagaga

SEQ ID NO: 840084 - DNA, 581 bp, Homo sapiens
cctccaagggacaggcctgggcgctttcctcttccygaccaggactgattgccctgcagatggccccctgactggcttttcttaggagaagagagaagccaggcaagcggcatttggccttccctttatagcatctgtgacagagaaaataattaaaaaccaaatattaagtgatcagtctagagtcagaaacatggaggccaggctgactcagaggacagaggaaacaaaggcataaggtgaagtactaaccatatatagacaagacaagatggtctggtgtttatgtgcacaggtactgagtcagcctgctggggctcaaactccagcctgctgtttgtttataagtttcttgacttccccaagtcctaattttcccgtctagatagacagtggtaataatagtacctacctcataatgttgttaattaaatgtgataatatatgtaagatgatttgcattccatctcatgtgtgacaaaggttttatgttattaatataaagcttgccaacctagaggagagacatgctgtggaggggagcagggccaggggccataacacagaagagagatggggca

SEQ ID NO: 840085 - DNA, 535 bp, Homo sapiens
agcgtgtacgacacagaacatggacactgaggccggcaatagtgtcttctgaaagtggctccaagaacggaataatggaagctatgtcaaatgaaggaccacatataagagactatgaacagaaaagtgaaatgttatgaaatgaggcacctcaaaaactaaaacacaacatgcagaattcaatttcttaagactaaacctcacttgccaaaaataaaatagaaagaatgccatattagagcacatgcacgtggtccttatttaataaatctaagtataatataatcttgaaactacctctagtttaaagatctctttaatagaaagcaatcatttttaaataacatgattttatttgctttgtgtggactgcaaattaaaaccaatgggcattctttaggactctatcctaagagaataatcaacattgtggttaaagatttacgtccaatgatgttcacygcaagagtattcgcaatattgaaaatttagaagtaatctacatgtttaacaacaaaggatgagtaaatacata

SEQ ID NO: 840086 - DNA, 520 bp, Homo sapiens
ttctgtcccatcatatagatgtaaaagactatccatctttttcccatctgattgcatatacttgaagtacactgagaatttagtgagtggacccactaaatctgttgccccatctctcttatttataagttatgtacatatttggagtgtagagccctgaaagcattatattatgggtttgaatggacttgtaatgcgtgggttttgactgcctccagataggacatttttgagcttttcttattatcagcactaaaggagactgacatcattaacttcactgtgaaaccattagacattagaatagcagttgttttatgtaaattcagattcttaataagaatctccactcctgtttttcaaatcaaatcggagtttctcttttgttgcccaggctggagtgcaatggcgcggtctcagctcactgcaacctctgcctcccgggtttaagcaattctcctgcctcarcctcccaagtcgctgggattataggcacctgccgccatgcccgactaatttt

SEQ ID NO: 840087 - DNA, 633 bp, Homo sapiens
tcaataatctcatttttagtgagaagtaaagtgcttggtttctaaaaaaaaaaaaaaaaaaaaaaaaaaaaagcctcttgaccacagaataaatgtaggcattattatgttgagattcggkgttttctgactttgaatttctgttctcagaaatacactgatcatttacattatattgatctatgttattttacttctgaagtataagctatttgaattggatatttgttaggaatatacatgctgcaagaagctcccaaattatcatgctctgtgtttcaaaaatgggtttatatctgtctggaaactggaatacctttttccagaaggataagccttcagtaatggtggttatcttaacaagccagccccgacttagtgcctaatgtgtctgagatactctttcacggtcactgtcacccaaactgtgtcatatgatagtgttttatggcaagcatggtctctgagttcctagtgaccctttttaatggcctgcctgtggttttctgttgctgaccaggcttactgcctgctgtcagcctcttgggaaaccagaaccacagatttcctgtgcctttgtttgtataagatacacacatggcctttttgagagattactttaaaatcaggatt

SEQ ID NO: 840088 - DNA, 577 bp, Homo sapiens
catgagcatgaatagaatacggtcttgcggctttatttttaaagataatttgaattatttgaccagggttgagcaatattaatggacctagggaatataaaaagaaatatgtctgagtaattgttatttattttaaattatgagtcatctctcttcttatttacacagtgacttattcttatccttttacttaacatgcagccaaatgaaataaaaacatttaacaagtagatcattgctgatttatgaaacatgatttttgcctgaaatttttaaatcatttagaattttatgagtttttttttttttttttttgccagaaaacttattttaatgaacaacggtttatgcctaggaaaacatacaatttaaaaatgaaaccctttcttttctttcttgaccaatctcaactttcaagccttttattcccttgctccttattctactggaggattgcaaggagctgcaaggcctgtttattgacccaaagtgattttctctcttacagactaaaaaccttcattttactctctctccctttcatcctaagccaraaactacaggtataaaattcatt

SEQ ID NO: 840089 - DNA, 575 bp, Homo sapiens
ctcatatggaagaacttcttatatctagaagctgttttacctaaaaatgtaagtcatctttttaaaaatatatattaattctagcaagataggtagatattcattctacatttcaaagcttattttcaggataaaatttagtttttataaataaatatacagtaagagagaaaaccagagagagaaatcaaattgtacaaaaagagaaaaacaggtgtctttaatttgaagttctcagaagaatagaggtagaagaaaatgaagacaaaagaaacacctgactgtagatactgaatgtagctgaagttatgtcactattcctgtggtgagatcagacagtaacatatgtccaggaaggatgcaagaagtgaaaactcaggcaggaagaaataaagcccataagtaagttatatagatatttagaaagatttgaagccctttgcaattgaatatgtcacacacacacacacacacaaattttgaagtgatttataatggagaatatcctaaacacacaaataccacatccacatatccawtatgcacacgtacaccataacaaacacaaataaata

SEQ ID NO: 840090 - DNA, 579 bp, Homo sapiens
cagaatatctccagtactaggaatgtgtaagattctgtttaagcatctggagtctgaagaaaatatctaaatggaaataaattctttatcattatatttgttcttcagcatttccaagtaccaaaatgtacttggggatagcagctttgcttaaaagcttttcactgtttcattgaatttgggaagggcctgaaagctttcagaaagataattttcttataaatagtgtacaagtgagcaagttgctctttagtgagcatttttaatggtttctgaggctggccaaaaaactctatatctttaccctatgcagccctagaagctgtagcagccttaccttaagttcttttcttagtaaagcagaaaatgagcagttcccaccctgtgtaaagctgagaagatcttgaatgatgcatgttgaggaaacttggatactgatactgctggcagtttacatagrccccagtgccaaagaattaaagagtcttgagttttcttaaaagaggccagcttttaaaaagttaagtatgttttctttttgcagtgacctgagctcttaaacctaagtagagaattaag

SEQ ID NO: 840091 - DNA, 639 bp, Homo sapiens
tggcagtttacatagaccccagtgccaaagaattaaagagtcttgagttttcttaaaagaggccagcttttaaaaagttaagtatgttttctttttgcagtgacctgagctcttaaacctaagtagagaattaagacttgctcagctttgtgaagcagtcaacttacttgtacgcaccatagaatactcttgttagagaagtgaacacattatgaccaattaaccatggaaagtgagtgccctgggaaaattttacatagttaaaacaaaacacatagctttcttaggaactggaattgcctttcctctattatacctggagtccaacaaaggctatgcctttgtgccagtccttttacaatgaatcaaccaattgctcaattgtattcttgtggaggaggaggataacattcttttatgatcccagtttagatcagtttaccacccaaagcatgatatttgattacccttattaggtttctttgcatagctacaaatgttactaatggtttggccttgtctagccattaaaaaaaagtctgcctctgtgatgacttaacagtcagtgctgtaaaaggcactattgcttggaacyctggaaatacgagctcaaagagaatagagcagtactttggggtt

SEQ ID NO: 840092 - DNA, 568 bp, Homo sapiens
agctaagaagccattgcttaatttggagaatgtrctttgtatgattttatgcctttttaatgtattaagagggtccatggctcagcatagggtctaaaatggaaatgttctatgtactcttgaaataatatacattctgctgttttagggaaatgttctataaatttcagtttggtcatattgtttcatagtgttgtttaaatattacatatcgctactggttttctatcaatttctggcaagagagtattaagatttctaacaattgctccattatctttttctgtgtcagtttttgctttgtatattttcaggctctgttgttaggtgcatatacatttataattgctatgtattccttctgctattagtttatccattctacctctctcatggttactgattacatggcactttttccaaccctttattttcgaatatgcttgtttttcttaatttaaatagtcttttttggacagtgtactattggatcttgctttttatctactttgacagtttttgccttttgattgaagtgtttagttcactcacatgtaatgtaattttt

SEQ ID NO: 840093 - DNA, 650 bp, Homo sapiens
gagcaagtggacacacggggagatgcagaaatcaaagactgacaactttctaatctataattcctgagatcgggttcaatgagctatcctgtatccgtacagagtcctaccaaaacaatcatgtcccttattttactggtatatctcacatagcaaaaaggactcacagttaacagtcttcataagtgtcctctgtattactacacatctatacctcttggtaattttagaagatagaaatgcaataatattattgcctccatttatggaagagaaactgaggcaatgagcttataaaaagccaaatgacacagaaatacactggctgagccagaactcaatccacagactcctgcttagcacaaaggctctctttgttaactatttctgaccctagagtttaacttctgttttacagtgtggaaaaaccatgagaaggcattgcagcatttttagaaatgaactcatttttgattgagtttggaattttaagcaaaaagaacctcaaggttttgagttttgaccctgcagtctatctttatgacccagagrgattctctcaattcattctgagctcactgttagggccccggattcccaggcccaagaaatgggaattggttttttggtggttttccctcaatccagcc

SEQ ID NO: 840094 - DNA, 484 bp, Homo sapiens
acagattctcattagaaatgagaatctcagaccccactctagacctgcagaatcaggatcttcgtgattaacaagagtcccaagggatgaatagtcttgggaaaaattgagacacttcactgtgtctcacgcccggagcaggaagggaaccttttttttgtgggaacccctattgctgtgtgactctagtgtgccctctctcctcagcataccaggcagctttatccctgggccaggacccatccaatgactgcaacgacaaccagcgggaagttcgcatagtggcccagcggcgggggcagaatgagcccgtgctgggggtagattaccggcagcgcaagatcaccatccagaaccgtgagtgcgggggaggtgtcaggggaactgggggtggggggatgtgcagacaycaggcctggcaggctgagtcagcatgggatttcccatttctttctgctgcctgttggtctacttggtcactgtc

SEQ ID NO: 840095 - DNA, 667 bp, Homo sapiens
cagcaatatcctcagtgagaaacaggcagagcagaaagtgaagagaaccttcagaaaagagggtccagaggcacaaggcaaagcgtggagagccgggacggggcagagttgaacggtgaccttgcagtctgggcttcttgatcaaactgacatcactgcggataaagggcgagatacagttgggctggtgggatcaaaggagcaggtggtgccaggctgtgagtttgatgggtcagtggggagtgagtgcctgcatcttccctgtggcttttgtggatgaaagtgaggccgactggagagattgagtcatagtccaggcatatgggccactctcttgaacatgcttaaatgcccttttaccagcacaaattcactgcacacctcctaacttgagctatttgaccaaaaagcacaccagggaatagcaggacaaatgagtcttccaacttgctaatatataataaaacccagcaggagcttgctgcattcatggcagtactttgtggggtcgaagaaggaagaagtacaccccattaaatgtcctccagtcaagctttccaaaatgaattcaaggaggggaacaaagattggagcctatttaaatccttcctcaytggaaaaacaaaataaaaaaaactgcaattttaactttggaaaattttaggtg

SEQ ID NO: 840096 - DNA, 586 bp, Homo sapiens
cttgtggtttgagtggcagctcagcctcagtacaacagaatgccaagtagacttctgaggttttagactttagaccgtttgtgaacggtacctctcgacccacctggggcctgggggacctccctggcctgaagggaaggacacaggcctggctggctttgccgtcgactgactgtagagcctaagggccttgagtaaacaggcagtagccagggagtggttagagcagaccttgagcgagatccagcactgtgctggcctcaggtcttacccggcgcaatcatagtgagggtggccacaggggtgcttgtgtcactccaccctcatctttaggtgactcagaacaaagacagaggctatgtatctgggagacagtaagggaagagaacaagagtctctacctggtaatccagagaattcttccagatcttagaccatcaaggtggtacctatatgaatctgcaagaaccacagcgttactgggctttgggtgcccctaaagcagatacagcttagatcacaacacccaagttctttcacrtgtctggaaagccttcccaagaaggatgggtacaaataagcccaa

SEQ ID NO: 840097 - DNA, 624 bp, Homo sapiens
cttcagtctctttttaacacacttggcccatgatggctttgtatttctctsttagaaagattcagaagtttcactacacaaaacgtatagagaagtgttaaactggattagctctaaccaatgcttaacggtgtgcactgtctatagttctccattcagagaagtaacattgtatatctaaccactgtttcctctcttgaagatagcctccacccatgagagtgtttcctctgatattacggtcattaacaattttgatggaaggaaatagctggaaaaattcactatgtcaattgcatttatttgtcagagtctcatgataatggttcaattgttccatgttccttgacatcctggactcaacttcagaatatttcattgctctgggcatctaaatgtatacaagcaaagcagagtaggtggttgcacaattgttctataaagctgagctatccatttagtcaatataaaccattctgggaagaacaggatttctttgctcacatcaggagtctcaggtactggaaatgaccacattcacccatgtataagctttagcttagctcatttagctcaagacctgcaacaagtcacccaataaaatagcaaaaattttcttgggca

SEQ ID NO: 840098 - DNA, 440 bp, Homo sapiens
ccgcggacactggcagtgagtgttacagttcttaaaratggtgtgcctagagttttttttcttcagatgtgtccggagttttttccttctggtgagttcgtagttcttgctggcttcaggagtgaagctgcagaccttcgtggtgagtgttacagttcataaaggtggcgcgtccagagttgttcattcctcttgtctggagttcgtccctcccagtgagctcgtggtctcaccggctccaagagtgaagctgcagaccttcgtggagactgttacagttcataaaggtggcgcaaccagagttcttgtttcctcctgtcaggagtttgtctctcccagtgggctcgtggtatcactggccactggcttaaggagtgaaactgcagaccttcccagcaagtgttacagctcataagagccacgcgcactcagtccgcagc

SEQ ID NO: 840099 - DNA, 527 bp, Homo sapiens
tcaagtgaattttttatatgttaaaattattattattattatttttttagtttttagatctcaaatattttagaggtccttaaaatctatatagactgtargtactctgccttggggtggggctcctcccccagctcccaccttgtaggcacagagtactcaatactccttattggggacagcagactcggctgttctcctctcacaccaccttgaatccttcttacagtctcctgtgggtcctatccccacttcccccccttctttgggcactttcctatacttgtgattctttttaaggagctgccgcaggctatgagggctgctctgcttacagggaagataaccagaagtgcctgggagtttatgcctctcccagtggctcttaggcaaggaccaattgtagggggagtatgaaaccccacttctttttctgccagttgagaaaaaaatctggggggagatttacactcctgagctccccataggatcaggctgaggctgagatttgcctgaagtcacatctt

SEQ ID NO: 840100 - DNA, 500 bp, Homo sapiens
tttgcagagattttttttttttttacaaaaacttgtttttaataggttaaacatattatggtgtctgtgtaagtagttgtaagctcacgtttaaatgtaaataattacttggaattttatatgacayatcacacttctgaaacttgcaacagtgtacaaccaagtttgggaagagaaggaaggcacctggtgattcccaagtggtgaatggaaaagcaaggcttccaaaaattatattcagccatgtaaggccatataacgctatggttaagaatatgcagactctagccagactgcctcgagtaactgcaataccatctttacttggtcaggtcacttaggcatgtttcacgctgcaatattctcatctgtgaaagagaaattatgacaatacccaacgtgttttatgaacattaaatgagttagcctgatcagtcatttaacaaatattacataactgctgtccaaaatgtttattaaatcttttgtctcctaacaga

SEQ ID NO: 840101 - DNA, 541 bp, Homo sapiens
gagatatgtgcacttccatgttctttgcagcattattcacattgcagcattatttgtatacagaatcaacctgtgtctatcaatgaatgaatgtataaagaaaatatgatatatacatagaatattatttcagcattagaaaagaaggagagattcctgggcaagatggcagaataggaacagctgcggtctgcagctcccacccagcgagaccaacgcagaaggcaggtgatttctgcatttccaactgaggtagccggttcacatcattgggactggttagacagtaggagcagcccatggagggtgagctgaagcagggtggggtgcctcctcagccaggaagcacaaagggtcagggaactccctccgttagccaagggaaggcatgagggactatgctgtgaggaacagtgcactccagcacagatactacacttttcccatggtctttgcaacctacagaccaggagattccttygggtgcctacaccacaagggccctggctttcaagctcaaaactgggtggctgtttgggca

SEQ ID NO: 840102 - DNA, 604 bp, Homo sapiens
aaaaaatgtatacaaaagaacagtattcactgagagaggaaaatagagcagacagagtaaagagactactagcaaaacagtattgcagtctctctaaattaaggatagaagttggaagtttaraaaggctaagaaaactggaaacactgtgcaaaggtatgtaggagagttttcccaaagtgatttatagatttaagcatccccaattaatatctaagcaatcccaattaaaatcttagcaatcagtacaacagtataaatagtacagaaatagacccacccatatacagtcaactgatcattggcaatggagcaaagcaaattcaatggggaaacaataatcttatctataaacagttcagggaaatgatatttttctatactgaaaaataaacattgattcataacttacaccaaataaaacaattaaattgaaaggaatcctataaccaaatgtaaaaccaaaatggaaaatgtagaagaaaacacaaaaggaagttttgactagaatgtggtataattcaacttcttatacactgctcatgagaatgtatcattgtacaattgctttggaaagtatttatatggtgacataaagaacatc

SEQ ID NO: 840103 - DNA, 604 bp, Homo sapiens
aaaaaatgtatacaaaagaacagtattcactgagagaggaaaatagagcagacagagtaaagagactactagcaaaacagtattgcagtctctctaaattaaggatagaagttggaagtttagaaaggctaagaaaactggaaacactgtgcaaaggtatgtaggagagttttcccaaagtgatttatagatttaagcatccccaattaatatctaagcaatcccaattaaaatcttagcaatcagtacaacagtataaatagtacagaaatagacccacccatatacagtcaactgatcattggcaatggagcaaagcaaattcaatggggaaacaataatcttatctataaacagttcagggaaatgatatttttctatactgaaaaataaacattgattcataacttacaccaaataaaacaattaaattgaaaggaatcctataaccaaatgtaaaaccaaaatggaaaatgtagaagaaaacacaaaaggaagttttgactagaatgtggtataattcaacttcttatacactgytcatgagaatgtatcattgtacaattgctttggaaagtatttatatggtgacataaagaacatc

SEQ ID NO: 840104 - DNA, 486 bp, Homo sapiens
atctttacagcaccctttaagcctttttaaagatgagaaaactgggactcagagaagataagtaatttacccaattatctgaatagtgttgagtcagaggtccttatcaccagggaaataaccctgccattatgagtatatattggagatgtggcatttacaaaagacaaactcttatctacaccttccacttctgttttatcacaccacaaaagtcattaaaagttcctgccatctaactcttcttcaggccactcaaccaatgaagaacgaggggaagacattagaaagccagaattctatccttctggtctacagcacttaattattagttctgaattaaggggctaaataataagttgctgagatttggcmctataatattgacttactaaaaatagaatgagccaatgcactttaaataaagaaaagaaagaaaaataagaaatttctgtttaactatgaaaaaaaaaaaaaaaccttgaa

SEQ ID NO: 840105 - DNA, 551 bp, Homo sapiens
gcggcttcattcttgaagtcagcgagaccaagaacccaccaattccggacacactgrcatagctgcagcaacaatctcatgcatttccttctcttttttacaatgatcattaggctagattcatttatcatgaaatgatgagtaacacagctgcagacttcaatctatgttacagatcaagcaattcaaaattttcttgtaatgtcatgtcttttctctgtttcttggggacatttccgacatcactagtgccactttgtattcaattcaatgcttatagtgttgcgataaacacaatgagaaatactcaagagccacaagtgatcactttttactgcaatttgtaatttactggtctggtcacaggaagattgttagtgtcatgtggcattttaagaggatactcctaatgcttgtgatcattgcagtaacaacgggggtggctaaaaaactattacagtatggttaaataccgcatctttacatttgttggcctttctctcaacagcaaatggtgccgtgacagtctgcaaacgtttgtgagtgtacat

SEQ ID NO: 840106 - DNA, 497 bp, Homo sapiens
ttgctttaaaaaattttacatctgagatcaacagatctttttgtaaattcccatttgagaatgaaagtttctgtttttcctcttgttttgactagagagatctggaaagatttgggtatttacttcccttcaaataaaaaataaaaaactattcttaatagtttcaaattcgaagttcagtagcctgttcttttttttataaaatattaaagagaaaaagccgaaaatgttctacatactctttttcttctagtttgagaagaaactgctttatgtggattgacacctcacataccctgagtttaagaagttagcattatctgagaaggtactatttttaggtccagctgtaatgtttctaactttggtacacagagtrgtgggtgctccctttcccagaaggctccatattctcaacatgtgcaggtcaatttgacataaagctaccaacaaggagcaacaggcccactgcaggctgtgtttataacttgaaaatt

SEQ ID NO: 840107 - DNA, 617 bp, Homo sapiens
attggcttttaactcagatgtgtatgtggtgaaagctctgagcctcacacctgcttttttttttgctaaaaaggaattgataaggcaacgaagggatggggaggggctgygctttggggaaggagctacagagggcagggcctggcagcagcaccagaccattcctgggcaggagtcagctaaagcttcatgccaggatggtcaggagattccaggcagggagttgtgggtcagggagagcaggtgctaggggccacagccctgtagagggcgggtgcagcagggtaggagagctgatggctccaggtggctggagtcaggagcatgaccggcactggggcaggcagcgtggctgtctcctgaggctgctgagtgagcccccatgggggtagcggcagccagcgaggaagctggcctgtcatccaggtgagctgggctttgactggagtgtccagctatggaaagggggctgacacctgtgcttcctctccaggcctctcaggaacctggagctcctcggccaacagcatcctccacatcgaccccaagacgggtgtggctgtggcccgggccgtgggatccgtgacggtttactatgaggtcgctgggcacctgag

SEQ ID NO: 840108 - DNA, 518 bp, Homo sapiens
aatacatcacagtcacctagaaggctgtttacacacagattgctggggccccgccaccaaagcttctgactgattaaatctggtgttgggcctgagaatttgcattttgaacaagtttcctattagagaaccacagtttgagaccactgctctatagttatgtgttttttaaaaaacaccaaattattaaatcattattgttaaggcatttattaatatttctggaacttcacggtggaagggtcaagagaggaagggattgatgtataaaagaaaattactgagtggaaagctttatatccctgtctcttttcagagggattcctggtcctattatatacacttaaagagaagtgggtgtttatgtaatctaggaaacaatttactctttaaaagtatttagctttgtagtatcattttaagatcaggcgtgcaaaattctcagaaactatttccgttcattttatttacaaactcttttaacactgggaaraagttaactagattttctcttgaaa

SEQ ID NO: 840109 - DNA, 528 bp, Homo sapiens
tcactgtttattttccagcttagttctcagtggcttgatagagcttatgmatcttcccaaagatcctggggcttccctgtcgttattcctgatgtagctgctggcaaacatgtttttatacccttcctggaagtgaaactctttttgccttaaatgtgcgatatcccatacctgagaaggtctcattgatacaattcataggagtttaaaagaggcatctgactggactaatgcctactccttttacttctccacttatggaaactgtagacattcatggttccaccatggtccctgcagcaaaaatcttatggcaatgtacataatgtacataatgtacaaagatcttatggcaatgtacattaaatcagctaatgtatattgaaattggtagggttaaaagtgagactgtcagaattaaacatatatgaaagccatctaaattaaaataaaatctatggtgaaataacacttgagaagtagcaattcattcagcacccaaatgctgagaatagtcaaggcaaactt

SEQ ID NO: 840110 - DNA, 609 bp, Homo sapiens
tcttttgtggtttatttttgcaatcttcctgtcttaaagccacagtgtyagactgggaaggaagcgaatataccctcccccattcacagaaagaaaactaagactcagagtcattaagaaaaacatgtcctaagatgatacccataacgagagacgagccaggacagaatccagacttcatgagttttaggccaagcctatttacttctaaattctctcatgcctctctgtcattggtgaggtatgtgtaatttatcataaatccacagtagagactcctagaatacacgtgtatggataaggatttccagaggagagagggtagggactgacaattgattgagaaatggcagaaggctgggcccaatgattgcatgagaaatcactgaccttcaggtaactttccttctatctatctaatctatcatctatcattgatctctctcatctatcttacctatcatacatctatcaatcctatctatctatatattttatgaatcatctatttatcatctatcttctctgtcatctgtctatcttatctatttatcaatcagctatctcggggagtaacacctttcctcagtactccatttccttaaatgt

SEQ ID NO: 840111 - DNA, 609 bp, Homo sapiens
tcttttgtggtttatttttgcaatcttcctgtcttaaagccacagtgtcagactgggaaggaagcgaatataccctcccccattcacagaaagaaaactaagactcagagtcattaagaaaaacatgtcctaagatgatacccataacgagagacgagccaggacagaatccagacttcatgagttttaggccaagcctatttacttctaaattctctcatgcctctctgtcattggtgaggtatgtgtaatttatcataaatccacagtagagactcctagaatacacgtgtatggataaggatttccagaggagagagggtagggactgacaattgattgagaaatggcagaaggctgggcccaatgattgcatgagaaatcactgaccttcaggtaactttccttctatctatctaatctatcatctatcattgatctctctcatctatcttacctatcatacatctatcaatcctatctatctatatattttatgaatcatctatttatcatctatcttctctgtcatctgtctatcttatctattwatcaatcagctatctcggggagtaacacctttcctcagtactccatttccttaaatgt

SEQ ID NO: 840112 - DNA, 633 bp, Homo sapiens
gtctaagttcctaaagaactaattaattccttattttatttsatgttgaatgcttccaaatagcagatatttgtgtccaaaatagaaaatacagaaggattacagctttctccctctctagacaattctgcttctgaggaatagagtgaggagggtcagctggaggaatgaaataatgggatgtggcaaacaaggctcagtaaaagattcgaactgtgtccaccatgagcttattttttggtgcctctcatttgaccagtggtatgataacagagaattttttaaagtgtggatgtcccatactgtggccatatagtactataatctgcagtctgccctttcttccataaagtaaaagattatttgctcagttcttcttcagaaatgaaacttctagacttatgctgtctaatatggtggccactagattcatgtggctacttaaatttaaattaattgaaatgaaataagttgaaaattcagttcctcagtcacattagccacatttcaaatcacctgtgttcacatgggaatagaagctactccactggacagtgcagatttatggcacgtctccatcatcataggaagatcttctggacagctctgtaattcagacacctggattttgtt

SEQ ID NO: 840113 - DNA, 544 bp, Homo sapiens
agagcagaaagggattcagtttcaattatcaaatcataactgaattgtaaccataggttggctacagatactgcagcttggcaaaaatcagtgaaagtattctgtaaraattaattgcttatgtaaaatttgcaataaagagtattgtgtattttattatttgtaaattgtgtgatatacatcctttatatgagtaaagtttataatgacattatatacatgtatatatattctagcaatttttatttggcgagcttgttgttaaatatttacctgcaaatcactgtgtgcgttcttcattgtaaaatgcaatcatagttgattttgaacaagggaatgtagagccctagctacgttatgggcattatctccccacttttcctagagatgtatcctctcctattactttataaaatatatgtagcttaacttttgttttctggggggtaagggcattcagaatatccccatctctgctctgcctgtaaaatacctatacatgctttatctttttttatatcataaagcatacaactaacatatg

SEQ ID NO: 840114 - DNA, 699 bp, Homo sapiens; identical to SEQ ID NO: 817014

SEQ ID NO: 840115 - DNA, 471 bp, Homo sapiens
aatccagttcctgatttggtctcagtgtggatgtcattggtttataggaatactactgatttttgtttattggttttgtattctgaaactttgctgaaggtttttttttttcagatcaaagcacttttgggtagagaatataggtttgtctacatatagaattgtgtcatctgcaaacagggatagtctgacttcctctcttcctatttgatgccttttatttatttctcttgcctgattgatctggccaggacttccagtactatgttgaacaggagtggtgataaaggacattcttattttgttctggttttcaaggggaatgcttctagtctttgcccattcagtatgatgttagctgtgagttttttcatagrtggctcttattattttgaagtatgatccttacgtgcctagctattgacggtttttactacagaaagatgttgaatgttatagcaagacttttcc

SEQ ID NO: 840116 - DNA, 648 bp, Homo sapiens
caaagaaagagtctaattatcacaaggcagctgagagaggaagatgggagaaatttctcaagactgcctcccgaagaactcagaggctaaggcttttaaggataatttgctgggcaagagggtagggaatggaggctgctgattgcttaggaatgaaactataggggtatagaaactatcttcatactctgaggcagtttctgggtggaggttgcaggacaagttgagtcagttccttggtatgggtcgtgagttcagtgggcatcagttggtccacaagaatgcaaactgaaaaatatcttaaaagactagtcctgaggttcataatagaggtattatctacaggagcaattttgggaagttataagtcttctggaccccagttatatgactctcttagcagtaagtaaacaattatagaaaagcaagctaaggaacaatggctagttaccatttaacttctgtctatgtcttaacagatttcaggcctttaccacaattctaaccttgtggcctttcattaatgctatagwttttgtctctgagtgaggaggaagttagtctaggggaagggctgttaccatatttgttttaaactatagactaaattccttccatagttaacttggcctacttgcaagaataaga

SEQ ID NO: 840117 - DNA, 608 bp, Homo sapiens
gtaagaaggtaaagctttatgatataacacatccaattttgatgmtgcatgagggaaaagacagtcttttaagttcagattaattctgagtcacatgttcttcctcacacgcctgtttgccttgagtgaagtctgttttttttgagcacaggatgctactgactgtaactcactcaaaacatgggccaggaagatttattttgtcatttcagctgagaaaatggtaaaaagctataaaatgaaggtattaggcctttggtgtgcttcatattacacaccactattaaggtggcaaagtatccatctcctcaatacagcatttataaaacattatgtgttgaatatactgaattatttttacttgctaaacaggcttaacagtaagaatttaattcaaactcctaccattaagcacagtttttaatatcaatgtaagcttcaatcttaaataaaacataaaattatcctcttatagcaacagaacataaatttattattcctcttgagtgtttatctctctatccatgttattaggctgtgttaattgcctgtcaagagagaaagcttctgttctgcctgtgacaatcataaccacatattgtgcataa

SEQ ID NO: 840118 - DNA, 609 bp, Homo sapiens
gttcaccgttggtgtataaatatgctactgatttttgtatgtttatcttgtatcctacagtgttactgaattcatttatcagttctaatagttttttggttgagtctttaggttttctaaatataacattatataatctgaaaacaaggataattcaactgttcttctcaatttggatcccatttatatctttctgttctctgattgctctagctaggacttttaggactatgttcaacaacagtggtgacagtgggcatctttttgtttcagatattagagaaaaggctttcagtttttccccatcgactactatactagctgtggatctgtggaatatggctattatgttgaagtatgttctttctatacccagctttttgagaatttacattatgaaaggatgttgaattttaatgatttttgagcatcagttgaaacagtcatatggtttttctccttttttctgttggtataatgtattacattgactaatatgagtgttttgaacctttatcacatctctgggataaatcccattcggttgctatgaatgatcttttyactgtgttgttcaatttgttttgctagtgttttattgaagatttt

SEQ ID NO: 840119 - DNA, 477 bp, Homo sapiens
attagattcatatagttgatgrcatcatttcaattcttctgtgttctgactgattttctgtctactagctctgttactgaaataagagtgttgagttctacgagtataattgtgaattgtcaattactcttttcaattctataaggttttgctttgcgtattttgaagctctgttgttagattcatacacatttaaaattcttatttatccttgatgagttgattcttttatcattatataatgttcctctttatccctggtaattttgtttgttctaaagtctaccttatgtgatataaatctagccactccaggttcttttgattactttgtatggcatatctttctccatctctttagttttcatctaccaatattatgtttgaagtaactttcctgaagacagcatatacttggctcatattttttaatccattctgacaatctctgtctttaattggcatgtttagactatt

SEQ ID NO: 840120 - DNA, 477 bp, Homo sapiens
attagattcatatagttgatggcatcatttcaattcttctgtgttctgactgattttctgtctactagctctgttactgaaataagagtgttgarttctacgagtataattgtgaattgtcaattactcttttcaattctataaggttttgctttgcgtattttgaagctctgttgttagattcatacacatttaaaattcttatttatccttgatgagttgattcttttatcattatataatgttcctctttatccctggtaattttgtttgttctaaagtctaccttatgtgatataaatctagccactccaggttcttttgattactttgtatggcatatctttctccatctctttagttttcatctaccaatattatgtttgaagtaactttcctgaagacagcatatacttggctcatattttttaatccattctgacaatctctgtctttaattggcatgtttagactatt

SEQ ID NO: 840121 - DNA, 621 bp, Homo sapiens
tttccgagatgaaggcagttttgtcacctttcaaatggtcgagtccctccagcctgcaaatgaaggatttgtcctaccacgttccaccctcgacttttctgttgactgggaaagaatggatgcaatattctttgaggcatcattttattttatgtttggtcattatccaaagtaaaatgggtgaagggaatttgtgtctgtctaatttaacaatggcctaaaataggcaaaataatgacacctggcccatcaataacaagggcacaaactttcaagatggacacttctactgaagcagctagaagaccattctttacaagtactaaactggttatttattggggcattatattcttcttgttttcaagtttatttaattttatttctaacggccttttcatctagtattcagtttttataaggtggttcaatttcagttcatttccatcaaagatctacaaccagaagttgtgcccaattaacttcagacttttggtttcagagattagcagagatgatatcttggccctctagttatatttcactttcctctgttgaaaataccccctaaattatgatatttttgtgaatattatagwgtttattagtgtaatttattta

SEQ ID NO: 840122 - DNA, 632 bp, Homo sapiens
cctagccaaactggaaaaaaaaaaaagtaggtttctaaaaacaccaaaagaagacaagttattatttaaagcaaactaaacttatgacattttgtagcatgtatggtgtattaggtcattctcacactgttataaagaattgcccaacactaggtaatttataaaggaaagaagtttaattgactcacagctccacaaggctggggaggcctcaggaaacttaaaatcatggccgaaggggaagcaggcacctcttacatggcagcaggtgagagagcttgtgagagaatgcaggaaaaactaccgtgtataaaaccattagatcttgtgaaaattcactcactatcacatacaagcaagttcacataccaaaatagcatggggtaaaccaccccatcatccagtgacttccctcccttaacatgtggggattacaattcaagttgagatttgggtggggacacagagcctaatcaattcatttggtaagcagttcttattactagaaaatttatcaagcgtaaatacagcatatatatctscgaaaaaaatacttttgaaagacaaagacatgtcatttatagagcttaaatatttgcatacttaatgtggtaccttatgtattcagacta

SEQ ID NO: 840123 - DNA, 570 bp, Homo sapiens
ctccaagaggccactttcaaagagctaatgaagtcttccatttgtttattctagtccttttctgaattcaraatgaaattttatgacaggcgtagacctatcccactttggttatccctcttcaggtccataaaatgttctgtaacttaccatctcatacatggattcccttgttatctttcagtttttataaggctcatttttcagactaaattgccaatccatactctgctgcctaagaattgtgtatactatattattgtttttattatctagtttctctgatgatgagatacagtgttaattctgccactgggcagatttatctttttcttttttgaagtgcagttatagaccagtcacaatgttgttatctttgaagttgagtgtcagctttctacgcttgacatggtggagagtagacatggtgctgcttgtttggcatcctctgataactggtaatagggaggggtccatttgtctatggggtaaaaaactcaaggagattagtatgtggccaaagacatagcagaccttttcatgtatgctatggatacctccacttgtcca

SEQ ID NO: 840124 - DNA, 594 bp, Homo sapiens
acattctcaccaatgcttatcttttgtctttttgataatagacattacaacagktgtgaggtgatattttattgttgttttaatttctattattctgatgattagtgatgttgagcatttcttatgtacctgttagccatttgtatgacttattttagaagtatgtattctggtcctttgcaaagttttaaagtgagggttattattattatttgttttggggttgtttgagttcctaatgtattgaaaatatcaactccttatcagatgtatggtgctttggtttgaatgtttgttccctctgtaagttatgttgaaacttaatcttcaatgtggcagtaatgagaaatggggcctttaagagatgcttgggcattaaagtaatccattcatggattaatgaattaatagattaatgggttaacgaattaatgggctatcatgggatgacactggtagctttataagaagaggaagagagaacagagctaggatgctcagtcccctcaccatgtaatgccctataccaccttgggactctgcagtgtccccactagtaagaaggtcctcactggttgtggcacattgttgctg

SEQ ID NO: 840125 - DNA, 601 bp, Homo sapiens
taagaagtggagagaaataaggaaggaagctgcattattaatcttcttatattaagctctaaggaatatccacatttttattcaatcatcataaataaatataaaagcacaaataagtgttctaacatactttaatattggatctattgtttcaaattctacttgaaaatatataaaaatagaaaaaaagaaacctatttgattttatcaaatactttgtaattcacatgagtcctggttagataacttgcctagtggataatgctaatatttgacttgaatatatcatgaattttgctcccataaaggtaagtatgtatatgatttctattaaaaatatttcagctcccttcccatacacttgttataatcctattcagcagagagataatggaaattaatttaaatatcagttatttagttatcccccattgtgaaaatgtgtgatagagaaacttggagataacttcaaaaaggcaatatcytgaaaagaaagacttcaaatgctgaaatgccaagtacaatttttttgccacacggtaggttattattaaatttgtctttattaagcaacaacaacaaaaagtaaaaaatatgtagc

SEQ ID NO: 840126 - DNA, 464 bp, Homo sapiens
cattaacattcaatggtcatttaaaacctaggagcaaattatttaattttaaagctcaaatttggtctacacttttatcaacctcactgatgctcatagaaaccaatcttcttttataaactggtcattttcaaagaatatctggaagaagaaccactttatataagagatttgatgtgggacagacaattttatcccatttcattttgacaccggctttatttcagttttggagcaaatatatattttctgcttaatatttaatctgtttatttcatattttggcttcttggtatgaatcagtgtccttagtataaattttagtcttaaaaactcttaacaagcatttaarttcatgtgttgttgtccacttaagtactggtgcatacctaagcacctatactttcaccaaatttttgagagaggttttataccatttagatctttattaatcatggtcttaa

SEQ ID NO: 840127 - DNA, 589 bp, Homo sapiens
gatatgtatctttaattgtggtaatctacaaaaagaagatctttgagtgaaacccaaaatattaaatttaaatttacaccaaattttgaaaaaataatcgaaagaaataaaagttggatttttgttggggggggkggataaacattatcataataacagcgtgaaaaactattctctttggcttacaagcttaattatcacaataattgagcttcagaaagaaaagtctcagatatcactgatactttttcaaatataaattacatatattgctattatctttatgtttaagttttaaaagggttttgtgttaaaaaaaaagtggaaaattagatggctcacaattcaatgtatagatatttacctgaagcttgagcattttagaatagactgcaatcaaatccctatgtcattaagacatcatcatagtttctttcaatttctatcagttacatttcaataaatttatcctagaaacatatatgtaaatgtcaaagacaaacttatgaggatacagatacagcactttttataataggagaaacctagaaatattcatcaaaaggaaactgatgaaaaagcaagttgc

SEQ ID NO: 840128 - DNA, 647 bp, Homo sapiens
tccaaaaaaaaagaaagaaagaaaagaaacraggaatgttgagttctacggctcatctggggtgagtagggtttattagtcttgttagataagccttacagtaactgacattttgcttttctgaaacttgtcttttagtaacaaagattcacgattgcatttttaaaaaatctccctgctatggccatttgcaaatagaatcctggcaactatttttcccctctaaatatacattaatttttttttaaatagacccctagaatctcatttcattgtaggacattctccctctaaaatttagcctcctaattctccttagatgcggctaaccaggaagatggttttagcctctgggcaggtctgaattaagctgggtacgcatacactgggtatgaccgtgctgattggtcatatcagaaaggcctggtgctggtgggtaaagagccactatgctgagccccatcagctgcagcccccgcccccaccgagatattctccctttccacagatccagcaacaccacttagcatccaggaaaggaggggtaccctggaggaatggtacactgggggagtggtacttcctgcagtgccactgcatctgttctgattgaggagggaagtgctgtgctcatagttaactgtgtt

SEQ ID NO: 840129 - DNA, 634 bp, Homo sapiens
cctgtagttttcttttttgttgttgttgtgtccttgcctgattttgatragcatggtgatggtggattcatagaatgagatgggaagggagccctcctcttcgatttttttttggaatagtttcaccaagattggtaccacctcttctttgtacatctggtaaaatttggccatgaatccatcttgtcctgggctttttttatcgggagattttttttattattggtttaatttcattacttgttattggtctgttcagggtttctatttcttcctggtttaatcttgggggttgtatgtttccaggaatttattcattttctttaggttttctagtttgtgtgaatagaggtattcacagtagtctttgatgatcttttctgtttctctggtaacagttgtgatgtcatctttatcatttctagtaattatgtgaatctttcttttttccttagtctagctggtggtctgtcaattttgtttagcctttcaaaggatcaacttttcattcattgatcctttctattgttttttttttttttttttttggcctgaatctcctttatttttgctgtgatctgtgttgttcttttcttctgatagcttttattttattttgctcttgtttttctag

SEQ ID NO: 840130 - DNA, 634 bp, Homo sapiens
cctgtagttttcttttttgttgttgttgtgtccttgcctgattttgataagcatggtgatggtggattcatagaatgagatgggaagggagccctcctcttcgatttttttttggaataktttcaccaagattggtaccacctcttctttgtacatctggtaaaatttggccatgaatccatcttgtcctgggctttttttatcgggagattttttttattattggtttaatttcattacttgttattggtctgttcagggtttctatttcttcctggtttaatcttgggggttgtatgtttccaggaatttattcattttctttaggttttctagtttgtgtgaatagaggtattcacagtagtctttgatgatcttttctgtttctctggtaacagttgtgatgtcatctttatcatttctagtaattatgtgaatctttcttttttccttagtctagctggtggtctgtcaattttgtttagcctttcaaaggatcaacttttcattcattgatcctttctattgttttttttttttttttttttggcctgaatctcctttatttttgctgtgatctgtgttgttcttttcttctgatagcttttattttattttgctcttgtttttctag

SEQ ID NO: 840131 - DNA, 504 bp, Homo sapiens
aggtgttgcttagagacacatggagttctgttctagacttatacattattgacttcccagctgaccactacagtggcagtcttgytatatttcaaatatgacagttatggtctcattttttcctgtgaagcatagagccttctacttagttctaaattgagaccaaaaattcattttcggttggtttccacaaagaccatcatagaattacctacctttggaaattggtcctgagatggatttaaaacagtaagctgatgttcaaagtcagtattttttgagctgcccagatccatatttctgagctactagcttccataaaatgaacttatactgattctttggtaacctagagagatctttcgagctttcgatatttattcccgtatttttcccatttcactgaaactgaattccatcttacctggacattttctgagcaggagcaaacaccaaaattagtgatgggttctccactggtgttccatttttccagactgtctt

SEQ ID NO: 840132 - DNA, 577 bp, Homo sapiens
acaatgctgtacagcagatctctagagcttattcatcttgcttaactgaaactccatgcctgttcattaccaactcccatttccctttctaatcagaccctagaaaccatcayttgactctttgattctaggaatttaactattttagatacttcccatacaagaaattttgtagtattttgctttgtgtgactggcttaagtggttatgcattatcatttcacatcatgtcttcagggttcatccatgttgttgcatatttcaaaatgcattcttttttaagtctgaatagtattcattgtgtttatatagcacgttttcttattcatttatttgttgatggacatttaggttatctccacattttgactattgtgaatagtgctgcaatgaacacagcaatactactatctcttcattattctaatttcaattcttttggataagaatccagatgtgagattgctggatcatatatgatagtctatttgtaatttttaaggaacctccatactgttctccatagcaactccactgtattcctttttttttttttttttgagatggagtctcgctc

SEQ ID NO: 840133 - DNA, 436 bp, Homo sapiens
gaggtaggctattatcttaggaaaaatttagtaataagtcaggatagaggtgtctttcaaactggtttcctaaatgaccttgcaattcacataaagtaactcttctcccttcctttacagaaaatctaagactcctgcagtccacaatacgatttaaaaaatcttttcttcgcaatggttcctatgaagattactttcctccagttcctgaagtcctaaaatcaaaagtaagccatgaaagtaaaaaaaaaacaaaaaacaaaaaaaaaaacaaaaagacaaaacaaacaaaaaaaaaaccttaacacttcycataatatttggcaagatacacttttaagttttaaatctgatctttgtaaataatgatgctattttaactctagatttataatggccctacttacgactctagaaaaatggtgacaaaagagtt

SEQ ID NO: 840134 - DNA, 436 bp, Homo sapiens
gaggtaggctattatcttaggaaaaatttagtaataagtcaggatagaggtgtctttcaaactggtttcctaaatgaccttgcaattcacataaagtaactcttctcccttcctttacagaaaatctaagactcctgcagtccacaatacgatttaaaaaatcttttcttcgcaatggttcctatgaagattactttcctccagttcctgaagtcctaaaatcaaaagtaagccatgaaagtaaaaaaaaaacaaaaaacaaaaaaaaaaacaaaaagacaaaacaaacaaaaaaaaaaccttaacacttctcataatatttggcaagatacacttttaagttttaaatctgatctttgtaaataatgatsctattttaactctagatttataatggccctacttacgactctagaaaaatggtgacaaaagagtt

SEQ ID NO: 840135 - DNA, 670 bp, Homo sapiens
tcgggatgtgactgtatttgaagataatgtctttaatcaagtaaggttaaattgttacaggtagttaggcgtgagcgggcaggagagggctctccccgccacccactagaagtcttgagtgatggttcagtaattgttgcattgcctctctaaaagtgatacattggcagccggtgctagggagaggccattcagtgatggtccacacctgttaacgttaaaaactgttaattagaggcagacctcatggagaagaaatttcctgggcgtgcacattaacagacaaaaatagcggagtgtgatcttcggcgtatcctctacctgaaaaaggaagaaagcctcagataagcatgcgtacaatttactgaacacactacatgagctcacttcccaagggtaagaagggctctggccgggcgcggtggctcatgcctgtaatcccagcactttgtgaggccgaggcgggcggatcacgaggtcaggagatagagaccatcctggttaacacggtgaaaccccgtctctactaaaaaaaaaamacacacaaaaaaattagccgggtgtgttggcgggcgcctgtagtcccagctacgccggaggctgaggcaggagaatggcgtgagcccgggaggcggagcttgcagtgagccccgagatcacgccactgcaa

SEQ ID NO: 840136 - DNA, 606 bp, Homo sapiens
aaaatatattttaacattcagttttgtttgtaagtcgcatggaacttaraaaccacctgccattcttattttaaaaagtcgtatttctgtttttgtccctaagtgattaggggttaataagatttgctttcttaccaccatgtcccttaatgaatatatattaaaacaaactttcttctctctcaaatcatgtttttttttgtttttgtttttttcagaatttcctatttgtaatgtcatcacttttctctctggtccagaagaatagagcaacatacttgtcttttgctcttctgcctactttaatcctcttacctatttaatcattaagactcgctttttccctttaaaaacagcctcttcattcctattgctaattacttggttcaagttcttattccttataatacaactatattataacattcatatgacctcctggcttccagctcctaatttattttttataccatgttcacattaattggggtgagtgataaatttctccattaaactgtttcagcaggataaatcgataaccctggagtatgggtttacatctgctcttgactcttttcctccatcaaccccttcttgtctgtccca

SEQ ID NO: 840137 - DNA, 632 bp, Homo sapiens
caatacagcttcatcttttctaattaatctgcagtgactctattccccaataagttmacattttgtggtactgggaattaagtcttcaacatatttttaggagatataattcaactcataacaatgtttcatatagcttttaaaggattgtctctctatataattatgtagttttcgaataatgagttttccattttattttataatttatgtcttgtatatatgcatatatatgtagatagatagatatagatgataagcacaaagatacctaggcttacaacattattacactttttaaattagggagtgaacaaacactttgtttaggcaaaaaatcatctcacgtactgacatcaaattattggtagtagaattcccttttggtaagtatcatgacaacaaatatgttgttactatatatacatacatatatataggcaaacatgttgtcactatatatatatgtatgtatatgtgtgtgtgtgtgtgtgtgcgcgtgtatatatatatatatatatatatatatatagccaactgggtaatatatacatatatatatgaaggtttaaatcctgcggttaccttagaaaagctaagtaactttcccaaggtatatataactagtggct

SEQ ID NO: 840138 - DNA, 632 bp, Homo sapiens
caatacagcttcatcttttctaattaatctgcagtgactctattccccaataagttcacattttgtggtactgggaattaagtcttcaacatatttttaggagatataattcaactcataacaatgtttcatatagcttttaaaggattgtctctctatataattatgtagttttcgaataatgagttttccattttattttataatttatgtcttgtatatatgcatatatatgtagatagatagatatagatgataagcacaaagatacctaggcttacaacattattacactttttaaattagggagtgaacaaacactttgtttaggcaaaaaatcatctcacgtactgacatcaaattattggtagtagaattcccttttggtaagtatcatgacaacaaatatgttgttactatatatacatacatatatataggcaaacatgttgtcactatatatatatgtatgtatatgtgtgtgtgtgtgtgtgtgcgygtgtatatatatatatatatatatatatatatagccaactgggtaatatatacatatatatatgaaggtttaaatcctgcggttaccttagaaaagctaagtaactttcccaaggtatatataactagtggct

SEQ ID NO: 840139 - DNA, 609 bp, Homo sapiens
tgggctgtttttcactgattatttgccaacttcagcagaaagtgaacagtgagtggaactgcaggcactcctaactgcatgcagtatggagtcgcatccactgccgcgctcctccaccccgggcacttttgacctctgactgttagggatccgtgattttgtttttctggttggaatgacccataggaatgatacaccctgtaggtactgggactctgggctgcttttgccaaggcaaatgaaccaacaaatgatacctagaggtggagcaggcaccttctctccccgagaaaggagatgaaaccagtggcctcggtagggcggcttgcttgtgactctggcttgttgacaaggtatcagtttagacccggccttgggggcatcaggcttaaggtagatacatagccgcagtgagggtggagaatcccaaccccacgtatccacaaggaatcctcagtctcaccccagtgctgggcaggggctgctgcctcctgagtcagttctggagactctcaaaggagaaagaggtgagrtagtaggtcatggggccaggtgcactgggcagccgtcacccacaggcttaccctatgaactgtgggatcatttaaa

SEQ ID NO: 840140 - DNA, 613 bp, Homo sapiens
gactggctggcttagtcacctgaggagagatgaccaggaaaatccagagagaaggcatttgctgggctgaggggaataaactgcctgtggaaaggtggattggtccttggatctcttcacctgggggctgtcaagttgggacagagccaagataagagccctttttcaaatgtgttctttcatcttttaatggagttggtttctttggcaggctagcaaatcctgcagggcccctgtgcagccactctggagggtcagggagacactctgtggttggcacctgcgaaggagcaggggtgagaaatgaggagaaatgtctgtctgtgccgaacccccagtggagagcgtgtgggctcggaattagggtaaatgaaggcacgggcgcactgcagacccctgatgggagaggcagtgggcgatgcttccatggtgaaatggaatactgggagccaggtgccctggcgcctcatggcaacgcctccttactctaggycggcctccctggcattcctctttgagctgatgagggaccagaccagtcccaggttagcacctggatccactttcctgcattttgggtaacacatgttgcgtctttcctctggttatgaaa

SEQ ID NO: 840141 - DNA, 613 bp, Homo sapiens
gactggctggcttagtcacctgaggagagatgaccaggaaaatccagagagaaggcatttgctgggctgaggggaataaactgcctgtggaaaggtggattggtccttggatctcttcacctgggggctgtcaagttgggacagagccaagataagagccctttttcaaatgtgttctttcatcttttaatggagttggtttctttggcaggctagcaaatcctgcagggcccctgtgcagccactctggagggtcagggagacactctgtggttggcacctgcgaaggagcaggggtgagaaatgaggagaaatgtctgtctgtgccgaacccccagtggagagcgtgtgggctcggaattagggtaaatgaaggcacgggcgcactgcagacccctgatgggagaggcagtgggcgatgcttccatggtgaaatggaatactgggagccaggtgccctggcgcctcatggcaacgcctccttactctaggtcggcctcsctggcattcctctttgagctgatgagggaccagaccagtcccaggttagcacctggatccactttcctgcattttgggtaacacatgttgcgtctttcctctggttatgaaa

SEQ ID NO: 840142 - DNA, 319 bp, Homo sapiens
tcatcatgtattttgtttggtttgtctcttgtgtttgtaccaatgttttaatgacttccatctgcagactttatttcaattattacatttgattaaaagcttaaatattttggttctttattcattgaataccttgattaaagatattcaatagattttgggaaaaaatgcaaccaaaatttaggtggctctttgcacacatacaagaagagagtttaattaaggaattacttatgcagtgtggacagagttaaggcagrcaacgaaggatgggcaaggcaaaagcaaggggcactcaccttttgctgggagaaggcct

SEQ ID NO: 840143 - DNA, 319 bp, Homo sapiens
tcatcatgtattttgtttggtttgtctcttgtgtttgtaccaatgttttaatgacttccatctgcagactttatttcaattattacatttgattaaaagcttaaatattttggttctttattcattgaataccttgattaaagatattcaatagattttgggaaaaaatgcaaccaaaatttaggtggctctttgcacacatacaagaagagagtttaattaaggaattacttatgcagtgtggacagagttaaggcaggcaacraaggatgggcaaggcaaaagcaaggggcactcaccttttgctgggagaaggcct

SEQ ID NO: 840144 - DNA, 658 bp, Homo sapiens
aactatcataatatgctgtattatatctttcttatagcacttgaacacagtgctatatcatcattaaataaaygaattaagactttttcgtggtagaactaacgtgtctgtaaacttatgaagtggcttttattgataaatgtttataacgatttgtttccctcattatttaggtgcaagaatatttgtcagcagtattaaaaatggaatgtggtgtcgaggaactatcacagaattaattccaatagagggtagaaataccagaaaaccttgtagtccaaccagattatttgtccatgaagttgcactaatacaaatattcatggtagattttggaaattctgaagtcctgattgtcactgggtatgatattttataatatgtatccttggcctgcttagaaacattttggagggaggtggagttaaagaataaaggaaattagaggtagagaggagtaatttgtcattcttaacttccaagacatacgttttattattttgctctactgttgtcttgataagtaaaactttatcatttaccagtattactagatggagagcttagaaaaggaactccaaacttaagtactcttcttatgtcactttaaagcagggaataatacacaaactaattcttttaaatgttacagttagca

SEQ ID NO: 840145 - DNA, 593 bp, Homo sapiens
gtttctgttttcatttggctttggtaagaacacaaataagatctataccctcaacatattttgaagtatatagtwccatattgttaactataggtactgtattgtacggtagatctctagaacttattcatcttgcatgacaggaactttatacccattgaaaaataatttcccattttcttctcctcccaacccctgataaccaccattctatttctgcttccataagtttgactattttcgatatctcatataagtggaatcatgtagtatttgtctttcagtaactgtatatatatatacacatacataccacattttcttcatccattcatttaggctgtttccacatcttggctattgcaaataatgctgcaatgaacatgggagtgcagatatttctttgacatcctaatttcaattattttggccatatacccagaaatgggatatctagatcatatggtagttctacttttaactttttgaggaactgttttccatactgtttccatattactttccacagtggctgtaccattctacattcccaccaacagtgtgcataagggtttcagtttctccacatcctc

SEQ ID NO: 840146 - DNA, 633 bp, Homo sapiens
tggtttgggatttctaggattacaggccatatcatctgcaagcattaggacaatgtgactagggaaaaaaaatccagtaaatatataatttagataaaaggaaaaagttaaacacaaatttatttrtatcatgtagctactgtgttcatttttctcctccttaaaaaaaaattttcaactacatagttgaaggcaatttaattatttttttcatatccttgtgtactatatattttaaagtagagaaattagtgcaatctggcataaagttatgaaggcactttaattatttttttcatatccttgtgtgcgatacattttaaagtagagaaattggcgcaatctggcataaacttatgaacagaatttcaagttacaatgtttttctgaacaatgtatactttatgccacatagcaaagggaagctaaagaaactgtcttccttaagcatcaaaaatattttttagtaaaattttacattctcaagacttacagagtccacgttaaactatgatgtcccaaagaatttaactttcagaatcccaaatgcttgagtataaaaacatgcaactgatcagcaagtacaatcagtttagcacaagagcacacctccaagccaatcactcctcacaa

SEQ ID NO: 840147 - DNA, 666 bp, Homo sapiens
ataactcttatttgtttttactggaagtacttgaatcctgaaagaaggtactattattaccatgtaacaaatgagaaacaagcttattatggtaaagtgacttaaagaaaaatcaccattaaagccagatttcaaagtcatatctaactacaaggctctttccacactgactcactggtactaaataaatcaaacctaaataactgaattgactacagtttcttgctatagctgctttggtagtaggaaaaacaaatctatcatggacaaaacaatgtagaagacatgctctgagtgaaggtgtggggataccgcctattacctaaactcactccctacaagtaggaaaattcccactttacgagtcttcatataaagcaaagcccaccttcctatatagaggctaataatgccatatactagctcttccagtcaccctgcagcacagacatgggtgctgaacctagactttaccaatataacattcccaccaagacctctataagagagacagtaagaagttgggacagcaaagttcaaattttggcagcaggaggcaatagcwacattaagtttcaaaaggaaacaaacagtagcagctatgcagtagctgagtctaggcttcagcaatttgcagctccattattgtcaccagactgttttagg

SEQ ID NO: 840148 - DNA, 315 bp, Homo sapiens
tcttattgtctgttttccttactggaatgtaaggttcgtgagagcaagaacctcctatgtatttccagctacaatatcctggtatgttatgtcaactaaagaaaaaaaaacaggcttttaaataattaaagttaattttattcagaagtcctactgagtactgcaacctgggagaatctttcaaagagtttgttatattgctgcaaagcattgattcaccccatarcttaaacataggtggtggttgctctgcatgtgttaagaagttacatcaaatgtgctcagaaattacattaatgacatggtttggctgtg

SEQ ID NO: 840149 - DNA, 605 bp, Homo sapiens
  misc_feature 261: n = A,T,C or G
tcccccaaaccggggggaaaaaccctcatgacctttagtttacgatatcagtctatccgttttcagaaatggggaacgaggtttgcagtgaatggatttctcctttcagagctcgcttaggaagcctggcttgcttctattcttttctcctcctcccccctacttcaagcaaaagcacttgagattcaggaatgtttttaaattcaaatacaaagagaaggaaaggaagccaaacgacctgagacaggggttgtggcttanaacagaccaaggttcattcctcgagcctcctctctctcagtctccaagtgtccccccattcccgggtcccggtgcagatgatgctgtgctgcggtctgaagactgagcaacaggagtccgcccccctcgcagctccctccccgacccgctatctccaggtgggttgtcgagcactggcgaaacctgcggcccaacccttcctaggcaacggraaaaacgtgctcaggagttcattcagcgaaagcgcagagcaaggctgggggcctgtcaccggggaggtggcacttgataggttgggttttgctttttgcatcttcatccctctcttccaagctgtctccagg

SEQ ID NO: 840150 - DNA, 632 bp, Homo sapiens
acaaacaacatttgatgaatagcattgctggcttcttccacattgaagcagagctggtggcaccccctcattcagtggtaaggactacatgggttctacttcctacagtgtttctagatagtaacagctggtrttctaaacatgcagcttccctgagcagttggcagcaagctcagactgtctccttttgcaaggacagtatagatttactttaaaaagcgggagtgtctatgggagccctttcttgctttagggctctcatgtgatttagggttgtaatttcctccttgatccaacccatggtgtttccagctgcaccttcatctaaagaaacctttacaggggactgtgtgacttatcctgctattggtctttttatctagtagcagaaagtattcgcaggagcctattgctgaacagtggcttgcaacagaggaagctccactttgctcaacagtagggaaatctcttgggaaaaaacacatagacgctaaaactcaagtgccgaatgaatgtggaaggcaggacggcctaacatgtactaatatagaaacctagagttttgagttagaatggctttgtgtgagggttaggagaaaagactgtggatccatttgttgacagttgagctt

SEQ ID NO: 840151 - DNA, 623 bp, Homo sapiens
caccaagggataagaatcttgagggtcatcttagaattttgcttaccacaatacagaataatcaggagaattagacctacaagaacattagatatatgacttatcaattacaaaatacaaaataaccatttaaattattttttgaaataaaaggggccaggcgtggtggctcactcctgtagtcccagcactttgggaggccgaggtggacaaatcacttgaggttagtagttcacgaccagcctggccaacatggtgaaaccccgtctctactaaaaatacaaaaattagccgggtgtggtggtatgcacctgtaatcccagctactcgggaggctgaggcaggaggattgctggaatccaggaggcggaggttgcagtgagccaaaccaagattgtgccattgcactccagcctgggtgacaagagtaagactctgtctcaaaataaaataaaatacaaataaaagaggaaaataagataaaataaaaacaaaagaaagaaatgaaggattacayaaggattacatgataaagaatgatgaggcatatttggaaaaggccaaatagactttcatatttgtaaaccacaattattcaaattaaaaatgtaataaacagatta

SEQ ID NO: 840152 - DNA, 485 bp, Homo sapiens
tcgtattaaaattaaaatttgaatagcttatggcagtcagtcacctatgaaatgttcattttatctcatatgcatatttaagaaagtgtgtgaagtatcatatgagtacagccaattttcacttttgcatttatcataaatatagtacataatttcccccttatggcaccagttatgtgctgtatttatacaggctaaaatatttctgctgatgttaaaatattagattataaataatttccttccaaaattgtgacatgagctcatcaaattacagtcatatcatttggatgatttgatttaattagtgcttataattgatcaaaggaaagtcatctagattatatttatcatatgacaaaaacagtgcttgwgcaaaatcagtgtttacatgtatatcaattgttgtgttcatttggataaattttccataatttctaaatgtttagcttagtattgctttttatttatgaaatactgtattt

SEQ ID NO: 840153 - DNA, 583 bp, Homo sapiens
agacaataaagcttaccatattgattcactattcctttcaggaaagatttttcagtagcatgcaatgctgtgttatagcattttatccacagtaaaatgtctttcaaawttggagacaatcctctcaaactctgatgttgctttatcaattaagtttatgtgatattttgaatcatttgttatcacttcaacaatcttgaatagaagtagattccatctcaagtcatcactttctttggtcatccctaagaagcaattcttcatttgttcaatttgtatcatgtgactgtagccatttagtcacatcttcgggatccacttctaattctagttcttttgctatttgtaccacatgtgcagttacttcctctactgaagtctggaaccccctcaaagtcatccaactttccaaactcctggtaatgttgatgttttgccctcctcccataaatcataaatgttcttaatggcatctataatggtatatcctttccagaaggtttttaattaaccctgcccagatccttcagttgaattactgtctacagcagctatagccttggaaaatatatttcttaaataa

SEQ ID NO: 840154 - DNA, 645 bp, Homo sapiens
aaagtgaggatgcttgttctaaaaatttatccaccatgttgtgatgagtctcagtgcacatggagaagccatgtggagaaaccattctgacagcctcagctaaacccaggcaacagtcaatatcaatgtgtgagtgaatgagtcttcagataattccagcctccagcctttgagtcttccagttgaggcttcaaacatgatgagaaagtgagcattgattcccataggccttgtctgaattttctatccatctccaacctctggagaggaaaggggggctgaagattaatttgattaccaatgaccgatagtttaatcagtcatgcctacatattgaagcctccataaaaacccaaaaggacaaggtttaaagagcttcttgatagtcgaacatgcggaaatgcctggaaggtggtgtgcctgagaaaggcaggaaagctctgtgcctcttctttcgtacatctcttcatctgtattctctgtaatattctttataataaactggtaaatatattttttaaaaaacaaattcacagtgagatcacaaataatgattgctttttgaagccactaggtttggagtaatttgtatcgtagcattagatagctaatatyggttgcaaagatgtcgcaaccctgttctgc

SEQ ID NO: 840155 - DNA, 645 bp, Homo sapiens
atacaagattaatatacacacatcagtagctcttctacacaccaacagggaccaagcagaaaatcaaatcaagaactcaatctcttttacaatagctgcaaaaaawaataaaataaaatacttaggaatatatctaaccaaggagttgaaagacctctacaaggaaaactacaaaacactgctgaaagaaatcatagatgacacgaccaaatggaaacacatcccatgctcatggatgggcataatcgatattgtgaaaatgaccatactgccaaaagcaatcaacaaattcaatacaattcccatcaaaataccaccattatcttcataaaattagaaaaaaaaattctaaatttcatatggaagcaaaaaagagcctgcatagccaaagcaagactaagcaaaaagaacaaatctggaggcatcacactatctgatttcaaactatactatgagaccatagtcaccaaaatggtgtggtactggtgtaaaaatagacacattggccaatggaaaagaatagagaacccagaaataatcccaaatgcttacagctaactgatctttgacaaagcaaacaaaaacatgaattggggaaagcacacccttttcaacaaatggtgctgggataactggctagccaca

SEQ ID NO: 840156 - DNA, 617 bp, Homo sapiens
ttgggaccaagggtgtatctagccttaggcttccattccagcacatcccgtcagccagatgtgcaaaagttcctccgtatacacactgtactgcttaaattgctggtattttgaaatagaaaaaggtgcttataaacccatactgactgtgatgaacagggagtactttttccacctacctctgcttgggaggctgaaccccatcttgccctggaagatggctttgagccagaagccaagccctttaatggctatgaaggggggaaaaagtatgatttccatgtaagggctaccaagaatataagtacctatttaataaattatttgttgaaatgccttttctattttggtagttgaagtttgaaaaatgtttggagtactataattatcatttctgggaaaaaaatacacattgcagtatttttgtttttgctacaggtcaagttgtagttcaggatggaaagtaaacacatccctttgctcagctgcarctcacatatttgtagtctctgggtgccctcttggcagtcgtggtggatacccaaaggacacaaacagggcgtagaaacgcggggctccatcaggggcttgccccagtgcaagtctgattaggaagt

SEQ ID NO: 840157 - DNA, 559 bp, Homo sapiens
ggcagttctgccacttgctttgtgaccttggccaagtttcttatcctctctgggtctctctyttcatctgtcaagtagacatgaagatataatctcttcttcacacaggagtacaaaggcgtgtgagaatgagtagaggcgtgccccacacgtaggagatgctcaattagtagagatttctttcatttctccagcatgaccatgagaatttaatgcttaataagaagcattatccatcaaaacatttttctcgttgagtctttattggtattttctgcctattaattgtatcagtttagatttcttattaataatcatgaagtctgtttttccacttgaagagtaggccctttcttcttgctttagagccatcatttttgccattccctttgtctggaacactcttgctttgtgttttgtgtgctttctcccttctttcatgcaagcctgtgttgcgatgccatgtcagagataccttccttcactcgcctggtgacacatggcacccgtatcactgaatatgctgcaaagcctttatcataacctggcatggtgctgt

SEQ ID NO: 840158 - DNA, 564 bp, Homo sapiens
tttatctttgtgctgctagttagagaaggcatcatggaagaagtgatcgtcaggaatgaaccgaggtctstgaggcatgatggggggcttcagggtagaagatgcagagtagctctgacttttctctagctgctcttaacagcttgagtatcagcacagaggaagtcaaagggttgaatcacagtttgcagttagtagttcttggggctgaattttaccccaagacatgttttctttaatgtgcccctttttttctatttttaaattagtcactgatatttaaaaactggcatacttcacgtaaaaatctggcttctcttgagtacatggaaggtatgccctcattgagtttaccctttggcatggaatgagtagtgatgccctgttagaggtcacagaccttcttgaggtgtctagagtccccctctactcttttaggattcctgcctgattcaggtttgccatctctgggattaagtaagttgggtttgggagacagatacagaaggaggataaagaggcaggaaaggtaaaggcgttaggaagatggtggttcaagtgaaa

SEQ ID NO: 840159 - DNA, 603 bp, Homo sapiens
gctctggggagaggatttaatagtcarcctcccattgtgttctcatttgtggttatatataaaagcttccctaaactaaattccctaaacttagggccagaaccctgtgtatccccagccgcaatccagcttagtacctgctgcatgtacacactcggtaaacagctacaaaatcattacgtgttcataaacaagctgattcattgttccaaagcatctattttctgaggcagttggaaattccactctgaagtgggaataacctatgttgctaaactaaaacttattctccacttcccagcccagttctcctttccacagcgtgatgtgccagtttcccttcctccttttccaaactagtccttcatgcagctctcactcccatcctgtcttactctctaaagccatcctaccagccgtgaaagcagatgccattgtcttcccctagacctacggaagtgaaggcagggagccttccgttcctgggacttggccagctctcgatgtgtgatatcggattgttgagctggactgagtggcccaggatttctgccagatcccagctgtaacatttcaacaggggcacgggccctgcgattactt

SEQ ID NO: 840160 - DNA, 616 bp, Homo sapiens
tttttaaagggctatggtacattaaaatgaatttgaaagtacccaagaatctctgatctagacaattaagagatcaaacaaagctgtaaaatactctagtatggaagtaattcctttcttacctaagcaccctaaattctgtttccattatatacgctacttatatgcttaaaagctcatttgaaagaaagtaaagcaggcttagattggataatgcactgcagtatttctgtaaccagtccttggtgtgacatatctaaggaaactgaggaaacatgacaacaaaagacaatggactagaattaagaaagcaaatttcagccccagagccattactgactttgcaataacagctcctatgagaacaaccatttccgaagtattaaatgaagcatttagggagttatagcgtaagcatcccaggaataaaactgtcatcattaaatctggggaatttaattcatgaagctgatttataccacatatttttaatttttctacctcaagaatcgtatcattarggaagcaaaaacatagtatcataacactatcagaagcagagcttgccccttctgcaatggtaaattactacctaaattcatggtgaatctgaaga

SEQ ID NO: 840161 - DNA, 562 bp, Homo sapiens
taaaatgtagaattctggctgtatttcccagtattcagtagctatggaaatcttcctgactgtgccagtcattaatcccattaagctttgcagactgacctggcatatatttaatgaaaaggaataaaatgagggatcttttgctctgtcttgtttacttaggtcctggctatcattttgggcttagttcaagtttcccttcctctctgaagcttcctattactgttttagcctttgctgatctcatggaattatacaattttagagttggaaggggctttaaaggacacttaatccagcctctcacttggggggaatctcacctccagcatctctgacagatggtcatttagccatggcctaaattcctgcacggaaggaaaacacactcccctctaggggaactgatggcacttgtggggttgtgaactttgaaaggacttgttatctgtgccacggggtttagccttrctgtctcatgggtgctagtccccagatcactttgtccctgtctctaaaattaccactgccttctcttgttaatcatatgtttctgggtctg

SEQ ID NO: 840162 - DNA, 479 bp, Homo sapiens
cagccattgcctggccccaaatttcctcttacaaggacagcaatcatattggattagggtctatcctaatgaccttattttaatgtaattacctstttaaagaccatatactgtaacattctgaggtacttggggttaggacttcaacacatgaattttggggaggacacaattgagtctataagaaaccccatcatatttgaagtgtagaatagatattcagtaattatttgtcaaatgcaattcctgtttgtacaaatagtcttgtgtgttactatgaagaattttgggaaccatggatctgtttgacatatgtgagaataatgaactctagaaactctacagttgattttcatgaaaaatttctgaataaatataaccagcctgtgaacagcctgaggctgcgttggaaggtgtgtatctaatcattgccatatgactggtcccttccttgaataggcactgatggggtctgtatc

SEQ ID NO: 840163 - DNA, 479 bp, Homo sapiens
cagccattgcctggccccaaatttcctcttacaaggacagcaatcatattggattagggtctatcctaatgaccttattttaatgtaattacctgtttaaagaccatatactgtaacattctgaggtacttggggttaggacttcaacacatgaattttggggaggacacaattgagtctataagaaaccccatcatatttgaagtgtagaatagatattcagtaattatttgtcaaatgcaattcctgtttgtacaaatagtcttgtgtgttactatgaagaattttgggaaccatggatctgtttgacatatgtgagaataatgaactctagaaactctacagttgattttcatgaaaaatktctgaataaatataaccagcctgtgaacagcctgaggctgcgttggaaggtgtgtatctaatcattgccatatgactggtcccttccttgaataggcactgatggggtctgtatc

SEQ ID NO: 840164 - DNA, 459 bp, Homo sapiens
tagttgagatggctcagtaatgtctgcaaccacacatttaataaagaaaacctaaattacatctgcatgttacgaaattgaaactgcatcaacttttgttttttctagtgacaggaattggctttctgattgcgaaaacaaagctagtgtttttggaatgtgctttccaaatagaaagtgtgtcttagtttcctgataggtggattctgaaactttttatctagctttagattttatgaatttgtatctagcttaaacatgctcatagataatggagccaggtaatatagactaagtacttaaaaacaagtactcttctctttgtcacatttgaaagaaaatayattttatgaaaataatttaaaaaataaactgacttggttatttgagaatagtttctcataattgttattatatactctgaagcctaagatgttatctcatttgataatctgctta

SEQ ID NO: 840165 - DNA, 500 bp, Homo sapiens
gtgtttgatcaaattttgagagcaatcctcttctagtaacagtcttcttctctgggttctctctcttctccattaaagttagctgagcacaaggaagatgaagatttctgagacattagaaacctcwgatggtcttttcttaaaccatagtgtcatgaaaggggaacctcagtagtatacacagggtgctcaaagtgaatcacacatttcacttgtaagagtcttgatgcggtgagagtaagaagcatgagctagacactagtgggttgacactggagtagaacagactgagttgacatcattttaaaaaataagctttttttctgatggaggactttttctccctataaaattctgaaaaattttttttttaatacctgacatctttgtttgcttttgtgttgtgctagcattggtatgaaagctggattgttctgaggttcgttcttctagatgtgaaacaggaatgagacgaacataaagaacatgtcttaaatttt

SEQ ID NO: 840166 - DNA, 578 bp, Homo sapiens
tcatatgagtgatttttctcttcaacaattattagttatttaaagaaaagtgagaaaaagctacattaatcttcagagcagtttcaactctcatccatggaactaaataaaaaattttagagtgctgactagatgtcacactggctgtaaatgaacatttacaattttgaaaatgataaatcctccctccaaaaaaaagttcaaaagttgcatgtttaaatcacttaaaaataaaacagaaacaaccaagtctagctgcaggccgattagcctcactcttgcctggaagaacagaccagctgagtgcactgccctccaggggagttgagtcccactaggcagacaaaccacatgaactccctaaccgcctcaacttaatgaaggccatttgccaggaaatgcccaaattgaataacaccaaaaaaaaaacaaaaaaaaaaaaacaaaaaaatgagacattacaactgataccacaaaaatacaaagtatagttagagaatattgtgaacaactrtatatcaaaatattggaaaacatagaggaaatggataaattctgaacacacacaacctaccaag

SEQ ID NO: 840167 - DNA, 579 bp, Homo sapiens
aggcagacaaaccacatgaactccctaaccgcctcaacttaatgaaggccatttgccaggaaatgcccaaattgaataacaccaaaaaaaaaacaaaaaaaaaaaaacaaaaaaatgagacattacaactgataccacaaaaatacaaagtatagttagagaatattgtgaacaactgtatatcaaaawattggaaaacatagaggaaatggataaattctgaacacacacaacctaccaagagtgaaccaggaagacatagtaaaactgtacagtctaataacaaataattaaatagaatcagtaataaaaaaagtcttccaacagtgaaatgcctaggaccagatgactttactgctgaattccaccaatatttaaaagaagaactaacagcaattcttctaaaattattccaaaaaatggaaggggaatgaattcttccacactcaatctatgaagctagcattgcctggataccaaaactaaacaaatacagaacgacaacaacaaaactatgtgccaatattactgatgggcatacatgcaaaaactctcaataaaatactagtaaactgaatc

SEQ ID NO: 840168 - DNA, 493 bp, Homo sapiens
actcactttaacaaggagggcaccaagccattcatgagggatctgccccaatgatccaaacacttcctaccaggcccaacatacaaaactggagattacatttcaacatgagatttataggggacaaacatccaaactacatcattccatccttggccctcgaaatctcacatctttcttacaaagcaaaatgcaatcatgccttcccaacagtctccaaatgtcttaaatcattccagcattaacttaaagtccaaagtcttatttgaggtgcaaagtaagtttcttccatttatgagcctgtaaaataaaaaataagatatttacttccaagatacaataatgatataagaattggataaacattctgatatggtttggctgtttctccatccaaatctcatcttaaattgtrgctcccataattcccacatgttatgggagggacctggtaggagataattaaatcatgggggaagtttccccatactgt

SEQ ID NO: 840169 - DNA, 506 bp, Homo sapiens
aaacaatattcaactttcaaatttccatgacattactattaaatttacacataatttaacttcatttatgaaggttctttaagtcttgaaatatatacytattttccttctattatcccagagctggcatcttgattatggtacatatttaatccaggtgtattatgtttttaacattaactctcatcactttttaaattttgcttatagtatatgtgaaatgtgttagagaaaaaatctcatccgttctctgcagttctcttaattaagctgatatttctctttctgatatttccagtgtttctagtacttattatgaattttaaaaaataagtctttgaaagtaaggattaagtgaaaaacttcttaactagcataaagtgcatagaataggacttaacaaataacaggcagtaaatatttgttacgttgaaggaatttaaggaggtattctttccaggtttgttaatagtttgttcaacaaccagataatcactttacatgca

SEQ ID NO: 840170 - DNA, 551 bp, Homo sapiens
atatagtcctcatgctgtatattagatctctagtttattcattctgacccatatgtccccatgcgccccccaataccctgccccagtaatcrccactctaatctctatttttatgtatgcaactttttaattttaaaattccacatatacctgagatcatgcagtatttttctttctgagtctggcttatttcatttagcataatgtctttctgactcattcatgtcaatgcaaatgacaggatcacttctttaaactgaataatgttccagtgtgcatatatgtgtgcatatatatatatatgtatatttactgatgtatacatacacaaacgcacacacaatagatgtgttcaccattggtctgttgacactttggtttcttttcatatcttggctcacacttgttagaatggctgttatcaagaaaagaagcaataacaagtgttggcgatggtgtggagaaaaggaaacccttgtcctctgttggtgggaatgtaaattagtacagtcattatggaaaccagcatgggggttactcaaaaaaattaa

SEQ ID NO: 840171 - DNA, 601 bp, Homo sapiens
acctcaagtgatccacctgcttcagcctcccaaagtgctgggattatgggcgtaagccaccgcacccaacctattctttttttttttttttttttgactgagaaatttctagataaggaattggtgatttagagaaaggtttttttttttctttcttttccattttacatatagagaggttaagactcagaaatgtaaagtaaattgttcaagatctcccaaatagctattaaggagcagaaatggtattcaatcctatactttctggacttaaaagcatatgttgtttccactaaattaaaatgcacccctgcccttgaatctccaattgcagacagctgggggttgctaccacaaatatctcccagtgctttgccctttaggaaccagattaaagaatctcctttgtaagcattctgcctatataaacttaggcagtgctacagaactgtagctccaaatggaggtgctggcctgggtaggcaaagagctgggcagggccaggaaacatgtatttagtaggacaggtttttggrcatcacagtttgtgcttttaggctactgcagcagcccaaatgtgagttacactaagttatggctg

SEQ ID NO: 840172 - DNA, 632 bp, Homo sapiens
ctcttttttgctttccatttgtttgattcttctccattcctgtattctgagcttgtgggtgtcactgcatgtgagatgggcctcttgaagacagcatacagttgcatcttgctactttatccaaatttccacactgtgccttttaagaggggcatttagctcatgtatattcaaggtcaatgttgatatgtgagtatttgatcctgtcatcatgatgttagctggttcttatgtagccttgattgtataattgctttattgtgttagtgggttacgtacttaagtgtgtttttatggcagcacgtatcaaccttctgtttccatgtttagcactcccttaagaacctcttgtaagataggtctggtgataatgagtttccttagcatttgattgcctgaaaaggattttatttctccttcacttatgaagtttagtttggctggaaattaaattcttggttggatttttttctttaaaaatactgtatataggccccaaatcttttctgacttgtaagattgccgctgaaaagtctgctgttaggttgatggagttccctttgagtgtgacttamccccttctctctagctgcctttaagattttttattttatgttgaccttggtgaatct

SEQ ID NO: 840173 - DNA, 581 bp, Homo sapiens
gatcattcaattcctttcaatatgacaggcttcatcctgggagcaagttttgatggagaagagtaagagagattaataagaatcattattctttacagcccttgacgacagggattgacgargcccggatagtaaatattttaggctttcggagcctgaagttctctgtcacaagtactcaattctaccattgtaacaaaagcagccatagataatatgtaagtgaatggatgtggctgtgtttcagtaagactttattagactctgagatttgaatgtcatataatttccatgggtcatgaaatatttttcttcttttgcttttttctcaaccgtttgaaaatgtagggccgggtgcagtgcttgcacctgtaatcccaacactttgggatgccaaggcagtaggacaactggaggccaggagtttgagaccagcctgggcaacatagcaagaccctgtttcaacaaaaaaaatttttttttgaaattagcagaatgtagtggccatgccagccacatgcctgccatcccagctcctaggatgaggagaaaggatccttgagctcaggagttcaagcctg

SEQ ID NO: 840174 - DNA, 581 bp, Homo sapiens
gatcattcaattcctttcaatatgacaggcttcatcctgggagcaagttttgatggagaagagtaagagagattaataagaatcattattctttacagcccttgacgacagggattgacgaagcccrgatagtaaatattttaggctttcggagcctgaagttctctgtcacaagtactcaattctaccattgtaacaaaagcagccatagataatatgtaagtgaatggatgtggctgtgtttcagtaagactttattagactctgagatttgaatgtcatataatttccatgggtcatgaaatatttttcttcttttgcttttttctcaaccgtttgaaaatgtagggccgggtgcagtgcttgcacctgtaatcccaacactttgggatgccaaggcagtaggacaactggaggccaggagtttgagaccagcctgggcaacatagcaagaccctgtttcaacaaaaaaaatttttttttgaaattagcagaatgtagtggccatgccagccacatgcctgccatcccagctcctaggatgaggagaaaggatccttgagctcaggagttcaagcctg

SEQ ID NO: 840175 - DNA, 618 bp, Homo sapiens
gctgtctcaaaaaataaaaataaaaataaatttwaaaaaaataaaggtgttttaagaaaatcatctgatagcaacataaagggtgagctgggaagtggagtagaaggcatctgtaaagacactccagaaccttcaccaagcttccacatacattctaatggctagtgcctgaagggcactttatgaaggtgcagttgctgagaagagaaaatctagccccccagaaacatctctccacctgttcagggacccaggggccaaaggacagctaagatgcacctggtggcctccacctagcagtgctggcaaactaggttttcctgcccaggctacaaaatttggctggtaaatccagacaggcagccaaggaaatgcttgcttgccttcttttctgaaaatctagtcttatctcccttatgtaatggtttggtgttatgcagagaacaggctctggagtcaggatggacctaggtgtgagtcccagcgctgtcagttactgtgggactctcgttgagttactgaactctgagcttcagtttcctcactggtaaaaactggcaccttaaacctccttcacaggattattgagagggttgaataacatttagaaagtgttca

SEQ ID NO: 840176 - DNA, 601 bp, Homo sapiens
ttccatatttaagggggccagcacctccacaccggtgggtatttctcgtcaggcaggacgagaaactgagaaaagaaataagacacagagacaaagtattgagaaagaaaaatgggcccaggggacyggcgctcacatgcgaaggacccacactggcaccagcctctgagttctctcagtatttgttgattactattttcactatctcagcaaggggaatgcagcgggagaacagggtgacagtggggagaaggtcagcaagaaaacatatgagcaaaggaatgtgtgtctcaagttcaagggaaggtactatgcctggatgtgcacgtaggccagattcacgcttttctccacccaaacatctcagtggagtaaagagtaacagagcagcattgccaccagcatgtcttgcctcctgccacagggcggtttttctcctatctcagaatagaacaaatgtacaatcgggttttataccgagacatttcattcccaggggcaggcaggagacagaagccttcctcttatctcaactgcaagaggccttcctcttttactaatcctcctcagcacagatccttcaggggtgttgggcttgggg

SEQ ID NO: 840177 - DNA, 613 bp, Homo sapiens
tagctctttactgtggacaagtgtcctgaccttgcctgagccttttttgttttccctctcttttttgatatctactttgcagttttgttttgaggattaaatgagaaaacgtatgcctggcacatatgagctcagaaaatacaaattgccaaagggctaatacatttagttgagggagacactaggaataagacataaagctgcttttgcctctaaggcaataaaatgccctctccattctattctccacactacagcaagaacaatcttttgcaaacatgtcatgtgatgtttatctcttcttaaaatttcccctgccttcctttcagagtaaaacggaaattcctaccgtagtctagaaagttctatggtatgccaatatctctcagtcccctcaccttacaaaaccagtgcattttctaccactccatttgctatataattcagccatattggtcttgctcttctcaattactatgaacatgagtgtctgctttcagagctttrcactgtttcctccacctggatagtctttcctcaaatattccgtgattcacttccttacttcaggtgtatgctcaaacgtcatttaccagaggccaaccctggccac

SEQ ID NO: 840178 - DNA, 579 bp, Homo sapiens
cttcttagagctaagctcattccatctgtgtatactattgttggtttcccgaggggacccatgaaactctggaagaaccacagtcaaatcattagagaaacatgctacacagcttgtcttttcttatggtacccatataattgatcatccaaaccaggttttctggagagttaaagacggtgatcaataatttcaccaagaaaacaagtatacatcagggataccctggacaaactggaatatggccaccctactgatgctccatgtctccccagctacccacattcacattgcactgagaggcaatctgttatttcacactctgccaagggcggcacctttcactatgcattacctgaggatgcaaaactgaaaacctaagcaagcattccagatcttccatcatggtgataacatctttaccacttctgaaatattcttagcctcttttcatgcayatcttgaatctttctgtctcattaaactcagaaactaccttgcaggatcttcatggttttctctgtagcaactgtgcccagaaagccattaggactgagtcattttatgttattaacaact

SEQ ID NO: 840179 - DNA, 359 bp, Homo sapiens
attggtattctctttattaaaaagcttacaaattgtctgaggagtgaatgggagttgggaaaacagacccagtttagattaccatattgggaagtttataagtggaataggagctgaaagggtggcagttaaaatgggatatggggtactgagtcacttttggttttgttattaagacagaaagtaaatcttttaaatgcacgtggggaagcatgaatagagaaggaggtaagattccygagaaaataatgaaagaaaaatcttgacagcacaagtagagagatgttttctccactttgacctggttaaagaatcaatggattgctgggaatgcaggtgtctcattagatgtggtgctt

SEQ ID NO: 840180 - DNA, 532 bp, Homo sapiens
gtagggagcatttgaaaatgttcactgctaagctcggttcaaaagcacatcacattaatattggtgacaaagtcttttgtgtgtaaagtattaagaccctccaatctcccatccagtgatgctcataacacgatatgatcttgctgaggatgttagcctactgacaaacctgcgttactattactgggtgcagagtgggaagacatactcttaacataatacaggatttaaataaatgcaatcaagagacaagttttacttttctttggccaaggggaaataatggtaaaagaaaacctaagtgactcccagtgacctggactttgagaagtctctaaaggaaggatattttctgttggaaaactagcttgttgtgcatctgtcaggatcacagtgatggagaacctaactsattaacagaaataggaccagagaccaccttgcactgatagacagtctcaaaccaagagaggccatatgacagcttccaaacactgggctgagaactggtttttctttctgctttaaccag

SEQ ID NO: 840181 - DNA, 584 bp, Homo sapiens
tataacacaaacaatataagaacataataagtaaattgttttttatctaaatttaaaacatctgctctttgaaagacaacactaagtaaaatgttgaaaagtaagccacaaactgagagtattctaaatacrtatttcagtctaaagactcaatacatatatcaaacaaacgactggtattcagaatatttaaagaattcctgtaaatttctaagaaaaacaggaaaataaaaaagaggtagagcaaaagacttgaacacacactcttatgaaaagaggagcttaatatcatgattatggtttagggaaacaaaatgaagatattagcatttagatattgactaaatgtaatctcagtgttctgagtagctgagattacaggcatgtgccactaatccgggctcatttttgtatttttagagagatgggggttctccattttggcccagctggtctcaaactgctgacctcaagtgatccatctgcctcggcttcccaaagtgctgggattacaggtgtgagccattgcctctggtccttaactttttcttatagattcagggggtacatgtgtaggtttctta

SEQ ID NO: 840182 - DNA, 654 bp, Homo sapiens
gatcatcagagaaatgcaaatcaaaactacaatgagataccatatcacctcagttaaaatggcttatattcaaaacacaggcaataacaaatgctggccaggatgtggaggaaagggcactcttgtatattgttggtagaaatgtaaattattgtggagatgagtttgggggttcctaaataaaactaaaaatggagctactttatgacccagcaatccccactgctgagtatatacccaagagaaaggaaatcagtatatcaaatatatatctgcattcctatgtttgttgcagcactgttcacaacagctaagatttggaagcaacaacagatgaatacataaagaaaatgtggtgcttatacacaatggattactattcagtcattaaaaagaatgagaatctgtcatttggaacaacatggatggaactgcagattattatgttagattaaataagcaaggcatagaagaacaaacattacttgttctcactcatttgtgaaacctaaaaatcaaaacaagtgaactcatggacatagaaaktaggagaattgttaccagaggctggaaacagtagtaggggactgggggagaggtggagattgttaatggatactaaaaaacagagttagaaagaatgaataagacctg

SEQ ID NO: 840183 - DNA, 551 bp, Homo sapiens
gacaacgttacattccttgtgtgagtctcacatctaagacccggcagtactttcttcctctgtgcattctcacgaatacccacacactgtaagcatagtttctaagattccataattatkaatcctaacaataagaatgactcagaatgcagaatattacaatgcagactctgtcctgtcaggtaaagtaaggaaaggtaaatactgcttaccgatacacattattaaatggtctgttctaatttctaattgtaacttcttggtttcaatattagacatacatagaaagttctgcctaagtaacttgaggctgattccctgtggcacaggtccttactaatagatggtggttttagaatttgcattaagtctttctatctagttcatttcaacaaatatttaccgaatatccactctagtcgaggcactgtgctaccatatgggaacataaagatgactaggacaatccctatcctgcaggagtgtacaattacaaagcagagatgtgttgattgttatgattaatataaagtatagcagggttccaaatg

SEQ ID NO: 840184 - DNA, 365 bp, Homo sapiens
gcctcttccttctttaatctggtatctgaggggttttgtctgcagttcatcctgctacagtcccagtgctggtggccacaggagtgcttatrtcgcccctcccctaaatgcagacagcacagcatggagagagagagagactccatttgtttgggggagagtgaaggaaaagaacaagagcctctgcctcataatccagggaattctgccagatcttactgcagaccaccaaggtggtacatctgtgagtttgcaagagtcatagtgttactgggcttgagatgcctctaaagcagatatggctgcagtgaccaaatacttagatcacaaccctcaattccctttgaatactgggaaagccttct

SEQ ID NO: 840185 - DNA, 365 bp, Homo sapiens
gcctcttccttctttaatctggtatctgaggggttttgtctgcagttcatcctgctacagtcccagtgctggtggccacaggagtgcttatgtcgcccctcccctaaatrcagacagcacagcatggagagagagagagactccatttgtttgggggagagtgaaggaaaagaacaagagcctctgcctcataatccagggaattctgccagatcttactgcagaccaccaaggtggtacatctgtgagtttgcaagagtcatagtgttactgggcttgagatgcctctaaagcagatatggctgcagtgaccaaatacttagatcacaaccctcaattccctttgaatactgggaaagccttct

SEQ ID NO: 840186 - DNA, 597 bp, Homo sapiens
atcgtagagcctaattgtatcgtattactggggacrtgggctgtcagtctccacggtggtctgactgcaggaggccccagcttaggttttaccttgggccagtgagtatgtcggggcaattttatctcctgtaatttagaggtgatctgccctgagatttggaagctcatgggagttattattttcttacattggcctgaggaaactgcttggtaagtgagctttcccctgcaagataactgatggcaaatatgtcagtctcatttgtatcatctcagttgacatctgtggcaccagggttgaagatggtacccatctctagttttcagtggtgagagagcattttctttccacatcagtgagacacgtgggtaaagaacttggagaaggatagagatcaagatggcatgttcttagtctgcactatgctcacatttccctgataataagaattgtggagtgagagccgcttaggcatactacattcaatgtaacaatccattttatgcaaacaatcagaatttagaaagaggactaccttttttcccttactaggtaatagtcctttcccattcagaaaggattgataccagtcaa

SEQ ID NO: 840187 - DNA, 594 bp, Homo sapiens
gaatagctcagttggttaaatttatcatcagttagttaatactgtagagaatttaatgaactgggagataagaaaacatttattacgtatttaaatcccatttggttttcctaacttaatttttttcccagggtgtctcacttcagagatgactttcctaactttaatatctttttacaataactttgttatgcctttaagaaaggactaaaatatttgtaaaattagttcaataggaatatttccaggtcaaatggatccaatttcctcttactcctgaaaaaataaagacaaataaaattatttttattttacaatggataaatcttcttacacaatagattgttcctttttttattttacaatagataaatgttcctacacaatagattctgatctggtatttagtgatgtcaaatgtataatcaataagagaagtaatatcatcatcatgttttggtaatatcatccaccaccttatcagctgaatacaaagtagtgatttttcttctccctcagataccrtcggaacagttctcggactcacaggcttgttacctctttactccaataagaagggggaaaaaagcaaac

SEQ ID NO: 840188 - DNA, 623 bp, Homo sapiens
aattatctaaatcaaacttgtgaagttcaattagtattcagctactgaaaataagattattacacctttttaacacacttgcttccaatttttaaagaaatatattttattgttttwggcaaaattgcatatccttaaagaatacaaataatactgaaaattaaagatgaaaattcaaattctaccactctcaaactctcatttttagcattagctggacactatctcacccaagtctcaatgtcacaattcacctctctatgcaaatatacagatagaacttccatctgtatcttctaacttcttagatagatgtttggatggatagctggatggaaataatttataataggggaaccatagtatagaagtttttttcaatcaaatgtgtcaactttagtttcatttgaacttcatagcagaaaataaaccaataagcttaaagaaaaagtgagaagataatataaaaatcttttacaatagaatgattttttaaatcaccttcttcaattttaactttattggattcctgtttaaaatatgtgtgatattttacacatatttaaaatatgtgtaatagtggtattaccacttttacatctcttcattttaataaggcatgt

SEQ ID NO: 840189 - DNA, 647 bp, Homo sapiens
cagtatataaatatttttgaacataatttaacctaccacaattactgtgattgataataacctaatatgtttaccttactcaggaatgtctacattttcatgagastattaacacagagaaacaaataaatggaatctacagcaaatgattactacagagtaagaaatagttgttttattcaataattcattgaccatatctccattatctattaattttatacattttaaaattagtactctattggatttgtcccagaagctcacagttgtattttccttttagaatcattattatagaactactgagattaaaacatttttcactggttgattctaatgtagacttgatttttcaaaagtgacttatgtatgtatagactaacaaaaacagagtactagaacaacagagtctatttaattatgcttaggaaccacatcaagacttgaatgatcaagaagcttctgtgcaatccttccatataacttcaagccaaccactcagactcattattttacagaagaggaaaagaaaaaattggagaatcatccacatagataataaccatcaggagctgagacatacttctactctccctgggggtacagatactaaaatacattatagcctaattcctgatgaaatc

SEQ ID NO: 840190 - DNA, 645 bp, Homo sapiens
tgatacgtcactcaacatcattattcatcataaatttcaaatctagctacactgatgtgttacaaaccttcccagaggcaaaaattaagtatctcacatcaggtgctgccaaagttgaagaacattctaaccrtaatcatatctggagtgaatgtatggtgcttttttagaaacaacatgtatatgctcttgattcatttaacattgatgacatcatctacttgctttcagttaagtgggatttaagtaaaaaatcatctggctagttctagtgtctttgattttaatttcactacattcctttgactaagtaatacattatctttttttctgaaattctaaaggtaccaatgtatagacttcagacatttagaattttccctctctcttttgtacccccaatttcccaagaaatacacgagaaaatatttttattccctttttctttctccatatgcatacttaagttttgtgagatgtgaaacttttcatttttatgcataagtctcctaggcctctgtgcaggattgtcctcatttggtaattattgctcagaatatgaagacatttctctcaaaatgtaaggttttatttttggaaatcacagggtattttttactccaaaaattgaagtttgtgctatac

SEQ ID NO: 840191 - DNA, 609 bp, Homo sapiens
ttatccacaagtgggtcttaagggatccaaaatgctccatgtcgtgatatttccatgcaatgtttgttctttgatttttctttgatgtccaacatgataacaaactgtggctgttgaactacatgtaacaagtagaaggtaaaacgtatacactgcagcaaatgcagagaagaagcaagatacacaaaagtctttgatgagtccccctttttcaaaaaagcactcatttgtttgaatctttttctattacagaaagcactggaatttctctttcttcaactaaatttcttcacctgaaagaaggtacttatgatcagttggcatcaatgaagcatcctcaagaaatgtaaggaaatgacaactggttctcaggttgtgtctacaggagggaataaatggagacaaaacattcctccccttggaacatctcaggacctcgtctcaatgtcttagctcttacttggaaggcctctgtgtttgtctctaaccccctaacaacctaggaccctggttacagaagattyttaatagagtactggaagaattccaggtaatatatgaatattacttagcaaggacaattaaactttcaaaaaaatgaattttttc

SEQ ID NO: 840192 - DNA, 628 bp, Homo sapiens
atccgatatgaagacactaactttttcaaaataccactaatgtcaatacattaaaggtagaaggcagctcaacttttagtttatatgtatagtggcatggatgggagatgggttgtgagggcggtagaggtcagagcgaagacacagaacagttaagtgacttgacaagttttgggagccagcaagaacaaatgtctcagaaactacactctacaaaagattaatgagttaatatctagtgaaggcaaaaatataactcttaaacagggaagaaattttaactgcttaaggcagttttttaaaaaaatgttgttttaaaaatttacttagttgagagataatctattcaaaactttcacttcatcttaattttgtaaaagatatgcgatttcagtcatttttatacaaaacaactctcaatatagattagataattgaaatctaaatttcactatttttaaccacctattaatatttttccaataatcatttagtgttatagcatctctttatgttgtgataatgcaaataattagttatagattatgaacaktgttcatttgtctttcctttttattcgtgctatgaacggccacaaaacctgtccataccatcaatatacatttat

SEQ ID NO: 840193 - DNA, 546 bp, Homo sapiens
tatcattgcatgggagatagttctcacagagacagcagagacttgggtcatgcttctttatccaacttgccactctatgcttacttttaaggggggcatttagcctgyttatgttcaagggtaatattgatatgtgtgggttcaatcctgtcatcatgttgtgagctgcatgttatgaacacttgatggtatagttgctttatagtgtcaatggtctatgtactgaagtgtttttgtggtggcttgtaatggtctttcatttccatatttagcactcccttaaggaactcttgtaaggcaaatctggtggtaatgaattccctttgcatttgcttgcctgcaaagatcttgtttcacctttgcttatgaagcacttctggacatagcccctggcaaagatttcatgttgaagatgccaaaagcaattgaaactaaaacaaaaattgacaaaggggacctaataaaatgaaaagagcttctgcacagcagaaaaaactaccagcagtgtaaacaatctaaagaatgggaaaaaacatttgcaaatga

SEQ ID NO: 840194 - DNA, 546 bp, Homo sapiens
tatcattgcatgggagatagttctcacagagacagcagagacttgggtcatgcttctttatccaacttgccactctatgcttacttttaaggggggcatttagcctgtttatgttcaaggktaatattgatatgtgtgggttcaatcctgtcatcatgttgtgagctgcatgttatgaacacttgatggtatagttgctttatagtgtcaatggtctatgtactgaagtgtttttgtggtggcttgtaatggtctttcatttccatatttagcactcccttaaggaactcttgtaaggcaaatctggtggtaatgaattccctttgcatttgcttgcctgcaaagatcttgtttcacctttgcttatgaagcacttctggacatagcccctggcaaagatttcatgttgaagatgccaaaagcaattgaaactaaaacaaaaattgacaaaggggacctaataaaatgaaaagagcttctgcacagcagaaaaaactaccagcagtgtaaacaatctaaagaatgggaaaaaacatttgcaaatga

SEQ ID NO: 840195 - DNA, 612 bp, Homo sapiens
caaaccaacatggacctgcaagaccgtctggatcctgtaagccacagcctgttggttttgatactgtgtaggatggaaataattggaggtcttgagtaggaaaatggcttgaatatattcctgctgtgaaaggctcacactgacttctgaagaagacaggacaagttatttaaactctcagttcttactttcttgcttttgaaataggaatcacaatattgacctaatgtgtctcatggtcacagaataaattagcacacataatgcccaacacataaaatatatatatctcgataatatatatttatttttctgtgttttcttctgtagagttagataagacaatattcgtatttcttttaaagttaatttcacccatcaaccctattctcttagttttgtctttttctacctcttttgggtttttctttttcaaatgtttttatctccattttctgtttctcttccaaatagtttattctttcagttagaaagcatatatatgtcttcttacctcaaataaaagtagtttttctttaatcctggtatttccratatctcatcagaatgtaccactctagttttacacaaaatactttgaaagtaatagtc

SEQ ID NO: 840196 - DNA, 576 bp, Homo sapiens
acagtattacattacctgttttacccctgctctcaaccctaggtgcacagcacggagaaasataccctctgtgtggtgaaaggagagagaagtgagcaccacactttgccttagatcccaacatcacgcccaccccagtaaaactcaatgctgggcaggtccccatggcctcagacttcaggcaggtacctggagatcaagcctgcaggcctgtcccagtgccaagttggatcttgcagcctcagcattcaggcctgctctgcatactcagtctctgtgtccaccccaactccaggcaaactccagtgtccccaggctctggactgaccccagtgcagagctggacccagcaccctctgcttctggcctgtcccagcaccaagccagaccccacagagtcagggttgaaggcagggcttcgtggtcccagcaccaggcctgcacaaaggagctggtctccagaaaacaaaagtggcctgtatacacgatggaatattattcagccttaaagaaataaaaaaaaaatcttgccatttgtaacaatatagatgagcctggagaacgttatgttcagtg

SEQ ID NO: 840197 - DNA, 677 bp, Homo sapiens
tacgtcaagatataagctcttaaaatccaagtacagaattcccaaaatatagaaaaatataaataataaaaataagaatacattacaatgacagtccccttctgttgtcacaatgggtcgctttgcagttacacacagccaaataaccctatgcctttttcagatgaagagaattttagctccaaccataatggagctgtagaaatagatacaaccataacgtccttgtaacagatcataggagactagtacgccttgtcatctgttgctatattacaagtcactccaaaatgtagtagcttagcacaacaattattagtactttgtactggaatcggttggataattgttttgctgcctttgcttagagtcattcatggagctacagtatctgtcacctcagctgtggctagaagatataagatgatcatctatgtctgttgattggtgctgactgctggctatcagattagtaaagaatctagtaggctatcccagtcttcctcatatgacagtcaaaaaaatgattaggcttaaaatttatacagtatctctactgccatgttctgttggttagggcaactaacaaagccagtctagattaaggtatgagcaaagagacyccaccttttgatgagagttactgcacattgtttgtggttatattttaatctacc

SEQ ID NO: 840198 - DNA, 493 bp, Homo sapiens
taagccgattcttgaatttctcacttaggtccagaaattgatattactggtaaattaaaaacmaaaaaacaaaaaaacaccctgtgtcccactgaagccactgggcacagtgtgagagaggagggaaatatatacggagaccatgtttctctgtaaagtttccttaacattactttatgtgggactcactttggaggtccaaagacttctgcaaagttattaactacatacagaagcatcacatagagaatgtggcctgtattttctcccccagcaaataccccacctcagcaatcctaatacaggagaaccagagaagatgatggtactggtattgattctaaatacccccaaatcatgctgtaaaatacacagctaaaatagaaaaccccaaaaacctatgaaaacatctgcacacaaactaggtgacaattttacttcataaattcccttatatgagcagatgagggtagtagtagaggcaatgacaact

SEQ ID NO: 840199 - DNA, 645 bp, Homo sapiens
atatatagagacatagctacatacagatagatgattgatagatacatagatgatagatacaaagatacrtagagacagatgatgatggatagagatagatagatagatagatagatagatagatagatagatagatagatagatagattttaaggagaaggctcataacattatggaggctgacaagtctagactctgcaggttagactgtcaggcgagacctggggaacagctgatgctgcagtgtaagtcaaggccagccatctgctgtcagaatgtccccttgcttaggggagatcagccttttgttctattcacatcttctactgattggatgaggtctacccgcacaaggtggggcgatttgctttactcaaagtccaccaatttaaatgtcaatctaattcaaaaacaacctcataggaacatccagaataatatctggccacatatccagatactgttgccagccaagttgacacataaaattaacatcccatgtatcttggttgtggtagtggtcacacacatctagatatgtgggaaaatgacatggaactatactcatagattgtaccaatgtcacatattaggttttgacgtactatcattatttattcaataattatttcaattacttaaaca

SEQ ID NO: 840200 - DNA, 645 bp, Homo sapiens
atatatagagacatagctacatacagatagatgattgatagatacatagatgatagatacaaagatacgtagagacagatgatgatggatagagatagatmgatagatagatagatagatagatagatagatagatagatagatagattttaaggagaaggctcataacattatggaggctgacaagtctagactctgcaggttagactgtcaggcgagacctggggaacagctgatgctgcagtgtaagtcaaggccagccatctgctgtcagaatgtccccttgcttaggggagatcagccttttgttctattcacatcttctactgattggatgaggtctacccgcacaaggtggggcgatttgctttactcaaagtccaccaatttaaatgtcaatctaattcaaaaacaacctcataggaacatccagaataatatctggccacatatccagatactgttgccagccaagttgacacataaaattaacatcccatgtatcttggttgtggtagtggtcacacacatctagatatgtgggaaaatgacatggaactatactcatagattgtaccaatgtcacatattaggttttgacgtactatcattatttattcaataattatttcaattacttaaaca

SEQ ID NO: 840201 - DNA, 624 bp, Homo sapiens
gctcctgtggatatttcaggggacaaatgtgggtccttctggctggcaggattctggtgatcactgggmaggtggggctggcttaggcaggtcaggcacaattgggcctggcagaggagccagggaatggttttgccagaatagacagctggacctttgaatctaggccatacataggcagaataacaagtgatggtgcagccagctcaggcaggtctaggtcagggcacctgccagtagaaacatgcacccctgttccagaccccagtcccagaccacctgcctgcactgggcattgtctggtcttggcagaaaggcctgggggtgatgatcaggttgcgtgtccctgggtctcaggcctcagtggctccttaggaactgggcagtcactgggcagtgggaagggcccagggacatgtgcatctgcccatgggttgtgttcccaccccagcttctcagccctcactgggagaggccagggatccccgcctgctctgacccactcacctggtgactctgatggcttcctcaccccaggctgggtcctcctctgttagatgggagtcccaggcttcccgcagacacaagccaactaccagccacaccttgtgggcccacttggac

SEQ ID NO: 840202 - DNA, 500 bp, Homo sapiens
gctgcaagagaggctgggaagtgtagattttcttctgggtggtcacatgcccaatgaaagcttgcaatttccattatttatttatttagagacagagttttgcccttgttgcccagcaggagtacaatggtgcaatcttggctcactacaacctccatttcctgggttcaagcaattctcctgcctcagcctctcaagtatctgggattacaggcatgcaccatcatgcccggctttttttgtattttttgtagagatggggtttctccatgttggtcaggctggtctcaaactcccaacctcaggtgatccgctttctccagcctcccaaagtgctgggattacaggtgtgagccaccacgctcagcctgcaattttcattattaaggattagggaagatcagaggatgagagagaaaaaaatacaacagttgaagagaaygtcaaagaaaattttgtaataacatgagaagtatgattttgaagactttgaaactagc

SEQ ID NO: 840203 - DNA, 524 bp, Homo sapiens; identical to SEQ ID NO: 818859

SEQ ID NO: 840204 - DNA, 577 bp, Homo sapiens
tcatctatctgtagactcagattaatttaattactcaataaggagacaattaattatcacttaaagrggaaaatgctagaagtttgctttattggttttcttaatcacatatatacaattccattaaactgaaaaagaagagtgccgtgagcctttgtcaaattgctaaatatattactttttccgtattctaaattattattcatcttcattccaaaaccaagctttcttcagcaaattccttatttgatattgaggatataggaaaaaaacaaagtcagtttctcctatactgtcactcaacagtcaacacaaaagatttctgtgaccaaatgtaggggtaggggttcccccccatacaccaagcaagcaatcacttctgcagcagacaccagctgggtgtcctctaattcaagtcaattgtgacactctctacctggaggtagttcagatcccacaggttgaagtctcagtccccaagacttcccctccttatcctccacccaccaccattctgatgccaattgcaaattccaggttattttacctgtgcttctgaccaatcggctataatcag

SEQ ID NO: 840205 - DNA, 671 bp, Homo sapiens
atcctcccccatcatcccatcccaccaaaygtccttggccttttaacctattttttaacattttattttaaaataattttacacttacagaaaggttgtaaaaataatacatagagttcatgtatctcttcactcaacttctaacagcttataattgaaacaattagcaaaacgaagaaattagcattcataaagtactgttaagtaaactacagacctattaagtgaactacaaacttcaccatttttttcacttatgttctttttctgttctaggatctaatctaagatcctacattaatttgtcatgtctccttattctccaccaatctgtgacatttacatagtcttttattgtctttcatgaccttgattcttttttaaaatattgattagttattttgtagaacactcttcacttttgttggcctatgttttctcttaattagataaagggtatgaatttgggacaataatatcacagaggtgatatgcccttatcagtgtgtcatatcaggggatatgagatgccaatatgtctaattactggcagtgttaatttgatcactttaagcttaaaaagtaacttgcccacagtagcatagttgagtaagtggcagatccaggattctaatccaagcatgctttctaccacagagaaaaagttcgct

SEQ ID NO: 840206 - DNA, 647 bp, Homo sapiens
atgtgtagcacctccccctccctctcttttgctccttctctcttgtgaagcaccagttcccgcttcaccttccgccatgattggaagcttcccaaggcctccctagaagcagatgctactgagctttctgtacagcctgcagaaccctgagccaattaaacctcttttctttataaattacccagtttcagatatttctttatagcaatgtgggaatggtctaacacagaaaatcagtactgaggagtgggacattgctataaagacacttgaaaatgtggaattaggtaacaggcagaggttggaagagtgtggaaggctgagaagaagacaggaagataagggaaagtttggaacttcttagagactggttaaatgactgtgaccaaaatgctgacagtggtatgcacagtgaagtccaggctaccaaggtctcagatggaaatgagcttattgggaactggagtaaaggtcacttttgttataccttagcaaagaccttggctgcattgtgtccrtgccctagggatctatggaagtttgaactttagagtgatgacctagggtatctatctggcagaagaaatttctaagcagcaaagtgctccagatgtgccctggttgcttctaacagcctatgctcatat

SEQ ID NO: 840207 - DNA, 593 bp, Homo sapiens
acagacttagcctgattcaccttgaagtttcttggaaaaggtgctgccacctctcacatagaactttcccacttctcagcttttggtactatcctgatgtttctcttttcatgttrttttatgcagtaattatttctttccataccataccattcagggtccttgaatgagctcatgtccactaaaaccagcttaaattttgagaaagttcctgcataacttatgttgaatgcattatatacttgcagacagtggcagtcttgtatttgtcgtaatcacattttcatgtgataatgtattatacatcaatagcctgttggcagtgcatttagttctagtgtgggaaacttgtaggaacagatcaggtatggtttttattttcctgctgatgaggattgtgatgtctacattcagtacaccctgaatgcctgactgttaatgtgtgggttttaagtgtaaaagcagaattggctttaccaaggacaaagagaacacttatctgcttagtgggtttttttgttttttggttttttgtttctgtttttataatgattttaataacttttaaagtgcacttattaactaaatagaat

SEQ ID NO: 840208 - DNA, 572 bp, Homo sapiens
tgtttcagatctgggctcatcccattttgccccaacactgtggcagcttctagatgctgtctccaccatacagccgccagtgtgaactcatgctgtctttaatggccaatctgaaagatccctgctatgctgaaaaccttcgtaagagagccttaccacggattgcctcactgatgtgtttctgtgagttgtgaggtgggtcacaggccatttgctactaataataaaaccccaaagactccatagactcactcctgtatctagatgccttcccccgtcgctgagtcaccagctgtgctgcctggcaaattccttctcctccagcaggtctcggctcagatgctctctctgtgaatccataatccgcagtgcccactcctaccccatccggctcacgtccttctcctacaggcttgctgtgctttgtatagacttccatttaagaattgtcttgtttcattgcaattgtttatacaaacgtctcccatttctttgtaagctccttaaggacagaggccaagtcttagctcttyttacatctccagtaaatagcagtttgtggcacattttag

SEQ ID NO: 840209 - DNA, 629 bp, Homo sapiens
aaagttttaccatttaaggacactggatcccagtcctatgmacctgtgccttagcacgtattttttgcagctgctgatacactgaagagccaaagctaagctttgaaagtttggattcctgtgtgttgtgataatcagctggggtttggaaatgccttcaaaaatctaatgctctggccctttaacaaggcttctgaaaaaacaatttaacatctggaatcaagtattttgtggaagtccaagaccaacagggcaaagaacatttctttcagtaacagttaaaatgtggcacttccttctccttcatcaaataaatgggtttatttaacaaagatcctgaggtagtttataataagtaaaatatggcatagaagcaaggtatagaaaacaggatactccagatatttatcactgaaagtctttcctaaatatgctgctttattcttccagcatcattttcttttccaaaattcaaatccgaaaaacaatcgaagtcaagccttcttcatttaacctttctaagagactgcagagtgaggatgagtaaagaaattatagagttcatctttcatcttttccaacatacttcagaagaagacaaaaacagtaactgaatgtatgaatttctt

SEQ ID NO: 840210 - DNA, 629 bp, Homo sapiens
aaagttttaccatttaaggacactggatcccagtcctatgaacctgtgccttagmacgtattttttgcagctgctgatacactgaagagccaaagctaagctttgaaagtttggattcctgtgtgttgtgataatcagctggggtttggaaatgccttcaaaaatctaatgctctggccctttaacaaggcttctgaaaaaacaatttaacatctggaatcaagtattttgtggaagtccaagaccaacagggcaaagaacatttctttcagtaacagttaaaatgtggcacttccttctccttcatcaaataaatgggtttatttaacaaagatcctgaggtagtttataataagtaaaatatggcatagaagcaaggtatagaaaacaggatactccagatatttatcactgaaagtctttcctaaatatgctgctttattcttccagcatcattttcttttccaaaattcaaatccgaaaaacaatcgaagtcaagccttcttcatttaacctttctaagagactgcagagtgaggatgagtaaagaaattatagagttcatctttcatcttttccaacatacttcagaagaagacaaaaacagtaactgaatgtatgaatttctt

SEQ ID NO: 840211 - DNA, 438 bp, Homo sapiens
tcttgacatgtactgatcttttcttattaaaaaaattgtgagactttttaggtatgtggcctagaaaagaaagattctgtattttgtcaaaataatttctgtgcttcatgttttctttcttaggtcattaattacttaggaaaactgagtctcctctttattataagagttaagattttctacagctatgtaacttcttttgaagtattttaattatcattgtggctaaatgagtattatattcaaacacttgatcaaaaatgtgatcctatttttgatcaagtgtttgaatctttttgacaaacttcccaaaatgaaattctaagtctccttgtcttagtccctttagagctgctataaaggaatacctaaggctggataatttatgaagaaaagaggtttacttgactcacagttttsctggctggaagactgggc

SEQ ID NO: 840212 - DNA, 355 bp, Homo sapiens
ctcacttgagactattctaagaaggccatatgcagcaggaggatgaatgcagattcaggctctggacacttgatggttccttaaaatggatgtgtaaatttaacatttaagatagggtcggatattaattaccaaaaaaagggtaattatttaaagaaactttgtggtgattacatctgtgaaaatgaagaatcattctgtaatgtgaatcctgactctaattcagaggtccttcactcaytaattaaaactgatggactggtcagaacccagtagatcccatgtattccaacttaacacgtatggtttataagtataaatttttgcatattgagctggattaaaataggggcct

SEQ ID NO: 840213 - DNA, 639 bp, Homo sapiens
attcagctttagggataactattgctgamctttgggcataaaggttttatttttttaatgtgtggttagaaaatgctgtgacaatctgcacctgattcatagacctgtaatttcacagaatatattattctgaatttggatttaaattagtaaagaagaatttcattaaacatttattccaaaaagttaacaatgtcaagcagtggtgcagactatttaaactaaaatataacatgattactgaggcactcatttgtatggtttattacacctacatctagtattgttatgtcttcctgaaaagcacaggcctggaacaaaactgatgcagacaaaaagaaaagaaaggaaggaacaattggaaccgttctgcttttacagagtcagtaaaagggaaaaacataaaagacttcaattctttatgctgagctccttttaagtagttattcttgatgctctaaatgaaaaataaaattcatgaaataaataaataaatacataaatattcaaccagaggagagctcaaatattcacaagataagtaaagcagcaaatcagagggatgattcttccttatcagtgggaataacaccattctgcctttttgggtttttcctttcaatgtcttgtaataaagaa

SEQ ID NO: 840214 - DNA, 634 bp, Homo sapiens
tttaaatattttccccagtgcatcactcatctttttattttcttaagactgaattttttgaatagcagaagtttttaatgtgttaaagtcaaatttgtcarttcttatttgtgtgtgtttgtgtgtgtgtgtgtgtgtttatgtgtgtgatttctaagaatttttttgcctaaaccaaggttaaaaaatttcttctagatattactctggaaaatttatagatttaggtaatgcatttaggtgtatgatcaatttgagctaatttttatatatgctgtgtgtgtgtgtgtgtcaaggtttatgttctgcatataattagatgattaaagaattactcatttattattatttttggactaaaacctctattttgctacctgttttctgtttgcttcaaatgtcctttgaccactttgcactctgcctgcatttggattgagtatattttacccaattattagctttcatttatactttttaaaatcactttctttattactgtcttctgtttggttagtttgctttcttttgttttaccctggctttgtggttgccctaggattcacaatataattttcgtataaatcactttctgtatttttgaagaacaatgtacatgttggtaaagtttaaa

SEQ ID NO: 840215 - DNA, 611 bp, Homo sapiens
ttggtaaagtttaaatgagaactaagcaaaactaaatttatttatttattattatttcttcctttgcttgcttccttgtttcaccactcactttatgggtcagactttcaaaaacaggtagtcttttcagtgtgcttattaccgggctaggtagtatgctattatagatacaaccttttgagggaaagcttatatttaattaacttgcttttatatcttcaacacataggatatattatgtgtcagataaatatattttttaattttctgcaatttgaccaaaataatttagatataacatctattaaatatatattttatatatacatataaaataaagtacacataccaaagtatacagttttatgagagctgtgatctatttacacctggaatatcaataccaaaattatcataatgaacatatacatgatgcccaatagtttcttcatgtccctttgcagctcatcctcattattccatcttgttattaccagaaaacttcyaacctactttaagtattgatttgtttgcagcttttaaagttttatataaagaatcatatatcatgtactaattatttttggtgtgactgcaaatatttttggcca

SEQ ID NO: 840216 - DNA, 563 bp, Homo sapiens
tgagcaaggtcatctgattcacctatttttttcaagtacatttttctttaaagaaaaartattgatttctacaagtttgaaaattacttctgtatggcctccaggtcttctcccagcattaacaggctatggatctgcattttagtcccagtgaaccctgcttagacttactctacaatttggctagagtatccattatcacccaccatcagggataaagtcctgtgaacattttatctttaaatgaggcagaacaaacacaagtcatcaaatataatttcaataatgaaccttagcattttacatttgaatacttccccaaatggttgcaatttattaatgtcagattagagggctccattcatttttcctgttcagtaaagagacagttaatgaatgatggtgacttggtcaggcttctactgaatgagtctgggagtgtgtagcctcagtgtgaagggaggcaactaatgccagaagactattgacatgtttttcatccatgtagaatatgtctccttatacaacttttggctaatgagatggtaattatgtcatcaaga

SEQ ID NO: 840217 - DNA, 535 bp, Homo sapiens
ctattttgagagatgtgaatatatgcacatacttttgtgtgtgtgtgtagctatgtatggaatcagaagtaatttttctcttctgggaactattattttcatttacattcatttaatcaataattcatttatttaactgataaatagaactttaacacatattttataccaggcataatgttgaagcttaaaaaagatacaatgttactttattctgccatgacttttaaataattaaagaagatgacaaggtctgatgtttaattactcattgcatgagatataagaatgtgccactgaaatatatttaataagttattaataaacttggtactattattcaggggagttatcacaaaaagacatatttctttagaaatgaaagtatcatactgcaaatgattggcttgtgtaaggtagaagacagaaatattggaagaaaatgatkctgggagctgagaagccgcagttttggaagaattgtttatgtatatgttgagatcaataaccaaaacatgggtcattttgttaagaa

SEQ ID NO: 840218 - DNA, 592 bp, Homo sapiens
ccaacactagatagttataaaattctgagtttgccttatgtttccagggagttttcagattagcaacggtgaaataagttgaatttgaggcgtttttgctgtccaagtgttattgtaataattagggcttctatgattagatcaagaataacttcaccttttataaaacagtaactgagaccttgaatggctggggcatgactctaaaagttctgggcaagtctgtggtacagcccaataagataaaagcctacaaaaggaacggctacctgatacagagcctatgattacgtggtatcccgaattaccttctagaccctcactaatgctccattccttagggggtttgatcttgctatggttgccattttctacctacccacgagtcttctcaataatccacttaagtgcatctttgctccatatatatatatacacacatatatatacacacacatatatatacacatatatatacatgtatatatatatacacacacatatatatatatacacacayatatatatatatatatatatatatatatatttttttttttttttttttcctcctagggcaccgtcaaatcca

SEQ ID NO: 840219 - DNA, 585 bp, Homo sapiens
tttgtggtcctctcactggagccaattgcctgagtcagctaaaacttggacgcgatgtgcctcactgccatagctcactcacctttgctgctgaaatggtttcccatcacattgctaataggtacaacctgtgaagggttctaggtggggaaatggcaactcaggaagaactccaaacctttagctctcctaggatattaaaatggccgttatgaagaggaagaagtactgtgtcatctattgtcctggggacctgtcaacaggaacaatagatagacatcaccaggggtgtatttctgttcaacacaaggaaaagtttctaattggagctgtccagcatgaaatggactaagcagtgcattttctttctccgatcctgactccactgtgacgggcactgcagactagagagattgtgtcctagtatgaatttaggttggataaatgatacttagggataaagagaggaaaggaatatcagaatctccaagaagctgatacattttgaaaaaatatataaaatgccacacttcaggttttcttgtgtttaatttgaaacrtccagtaacattaaagaacagcatt

SEQ ID NO: 840220 - DNA, 644 bp, Homo sapiens
cagccattaacctggcaatggaaaagaaaaatattttcttctcccttgcagttgcgtacatcagcaacacagtagatccatggatcagtgaacaaattgggctatgaatattcctattataaatcagaaaaacagatctagaccaaagctgaccaaaggagaaggaaaaggagagactgcattttgatgtaagtgttactgatttgaaaaaccatggagatcgatcacctactacaaggtccaatggtattccagattctagaaaagacctagataaaaatataaagtctctgaaagtcctctcatcttctccaaagagtcctaaaatccaaaagaacctaggatttctgggtattttgaacctgaacaaaggcaaagcacaaaaagcatggtatagaagaaggcttctcaaagtgtggttcccagaccagcagtacctcttggaaactctcaggcctcatctcagacctactgatgaaatcagaaactctggaagagggaccagccatctaggtatcaacaatcgcttcaggtgaaactgatgcttgttagagactcattggcayagaacaaagatgggcctcaacaaagatggaatcaccagactccactgtaaatagctgtgaaacactgagcaagttatt

SEQ ID NO: 840221 - DNA, 588 bp, Homo sapiens
ctgataactggtctcttatttcaggaatggagtcttgatgctcaccaaaccaatttttgaataaacatttggacacccacctgagttgatgatcaaagaaagttcacgcctattttcacctactgagagttcattacattcatatttcgtttccctgtagaaagaacaattgacataaaattcagctaattcctctattcattgtttatcctgtttgggaggcttttcaagttccccaggtttctcacctccttgcttcctatttaaggtcacagcagaggagcctctattaacatgtgtgaagaaatcagcagagtttttataggatttacactggtaactcgcagagcaaaatatttcaaagttttttatacaggacccatggaacatcacccttccagaagccagcaaggtaaggctatcaaaaggtttgaagatggcctaacagggctaaggaatggagaagaggatgggccttctctgccttgtcatcttcaggagaagaagtgcatttgatgtgctaacatctaagccagtggtgggctyatccagaaacagaacagttatagctctcatcacctccattgc

SEQ ID NO: 840222 - DNA, 610 bp, Homo sapiens
tctacctatataaaatcataaaagtcttcattattgttttataagtagaaatacatatattttagtatcattaactactctaaaaaatgaacctcaaagtaatgtaagtttattcgtccctcgcttaccagttcagtgaggtaactttttgaattcaatggaaatgatgttacacagttctgattgtggcctgcaaaaggcctgccaatcttcatattctcttggggaaaactagcagcaatataagtattgttagcactagggaaatgtatccgagttacgcagcaccaaagtatgtcagcagcggtgaatccacacgggtttgcagcaacgttaattcttgccatctcagaagaaagaatttgaccaaggggcataaggcagagtgagagactgaggcaagttttaaagtgggagtgaaagtttattaaaaagctttagagcaggaatcaaagggagtaaagtattcttggaacagggccaagcrggcaacctgagagatcaagtgcacggtttgacctttgacatgtggtttataccttggcatgggtgcagggggttgcatctcttctcccctgcctctccccttaggggtggctgtccacatgca

SEQ ID NO: 840223 - DNA, 603 bp, Homo sapiens
agaatattaggagtggataggcattcattctcgattatttctcaggcttttaaaggtgatgttggaggaaactttgcccctctgccttcattttctgattcaagtaccttttacacatttccacaatcactcgcctctttcaaaattacagatttttgttactttttcattattttgcttttcttgttcatctttgatcaactctccaactgtttgcacattagtgcaggatcaacagaagggattagcttaggaaacacctcaaggtaagatttcaggaaaaattaaagaatgattaagtaggatagtgaacacagattggcatttatttgaaaagagccccatatgccccattaaatacagtgtttgttgttcaaccagcaactcagtaaaagatcaaggtgaagggcctctgaattctctttttttcaatgtctttcttttgtttcttttccttccttccttctttctttcyttccttccttccttccttccttccttccttccttcctttctttctttttttttttttttttttggcataatctcactctgtcacccaggctgtagtgcagtgccaagatcttacctcactgcaacctc

SEQ ID NO: 840224 - DNA, 598 bp, Homo sapiens
ttgttgtattcaatgaaactatctgtgccactgttcattctttgattttaaaaaaatatcaattgactaccttctttgtgccaagcaccygaaataagacttggaccctacatagaccatcatcctctgagccatgccccagccccaccctagacacgtgctcccagaaacatcaaacctctcaagtggcagcaactccaggattaagagagcccctctctcatcagttacggtgtcaagtggactcattataaaactagagagcagcccatataagaaagctccttttgcttacggtctcaggccacaaacctaaaacacaacatttttgttttgtttcttttgtgattttcacccattgagattattttcaccttatctgaacttaggctctcacaggataatcactagtctgactctctcttgaagtaggatgtttgtttgtttgtttgtttgtttacaaagacagagtcttgctattttgtgttgcccgggctggtctcaaactcctagcctgaagtgatcctcctgcctcgatctcccaagatgctgggattacaggtgtgagccaccacacttggccttggccttgaagtgg

SEQ ID NO: 840225 - DNA, 598 bp, Homo sapiens
ttgttgtattcaatgaaactatctgtgccactgttcattctttgattttaaaaaaatatcaattgactaccttctttgtgccaagcacccgaaataagacttggaccctacatagaccatcatcctctgagccatgccccagccccaccctagacacgtgctcccagaaacatcaaacctctcaagtggcagcaactccaggattaagagagcccctctctcatcagttacggtgtcaagtggactcattataaaactagagagcagcccatataagaaagctccttttgcttacggtctcaggccacaaacctaaaacacaacatttttgttttgtttcttttgtgattttcacccattgagattattttcaccttatctgaacttaggctctcacaggataatcactagtctgactctctcttgaagtaggatgtttgtttgtttgtttgtttgtttacaaagacagagtcttgctattttgtgttgcccgggctggtctcaaactcctagcctgaagtgatcctcctgcctygatctcccaagatgctgggattacaggtgtgagccaccacacttggccttggccttgaagtgg

SEQ ID NO: 840226 - DNA, 594 bp, Homo sapiens
cctcatctcagatgagactttgcacttggacttttgggttaatgctggaatgaattaagactttaaggccaggtgcagtgggtcatgcctgtaatcccagcactttgggaggccaagacaggcagattacttgagtcaggaatcaagacaagcctgaccaacatggtgaaaccccatccatacaaaaatacagaaaattagctgggtgtggtggtgcatgcttgtaatcccagctgcttgggaggctgaggcaggagaatcacctgcagctaggaggcagatgttgcagtgagccaagatcatgccactgcactctagcctgggcaacagagcaaaactccatctcaaaaaaaaaaaaaaaaaccaaaaaaaacccaaaaaacaaaaaaaaacttaggaggactgttgggaaggcatgattggttttgaaatgtgaaagggacatgagatttgggagggtccaggggcaggtgsaatgatatggttaggctttctttccccacccaaatctcaggggggttgtttcccctatgctgttctctgatagtgagtgagttcttatgagatctgatggttttataataggctcttccc

SEQ ID NO: 840227 - DNA, 627 bp, Homo sapiens
ctcctttgtagcctacatttttcacttagcattattccgaagacatttgcccacttagcgttctttttcacttagtgttattctgaagacatttgtcattcattattctacaaggctatgattttaatgactaaattatgaaattatgtctgttatgatataccatagtttatttaatctctcatctattttgggaatatttaagttgtttccaatttttagggggtttaagtcaggtctaacaaatttatttattttacatttgttattctttaattgctgcagaaaaattcaggaacttcacaggtggtggtaatagggaagtcatcttcaacaaaattcctctttttaaaaaatgtttaaatgtagacttttaaaattaaaatgtttttatttgaattaaagaaacgatgcaaaggcaaatgtaaactagaagcagtttcaaaaattttcataaatttaaatcttataaaaatattacaatagtaatattttgttggtgaaagtctatytgcttatagtgaatgaactggcttatcaacatggatctagtttttctagttccaatactgcagaagctgtttattgctttgtgtgctttatctaacaaatgttgctttaaaaaac

SEQ ID NO: 840228 - DNA, 537 bp, Homo sapiens
ataatccttatggggcatatgttccatatggggcaatgttcatagttaaaatgggtaaaaaagcaaagatgttcaaaattgttgagtattgtgtcaaaggagtcaattgaccaatttaaaggtgcagggttagrccagccaaggtttgttacttattgtagacacataagaatttcttttgaacaaatcaaagtgtaatagttaattgtatattccacaaagagtgatgataaagcagcctcactgtcaactctaggctcttgacagagtgaaacactaataatttgataaatgtgcttttcatcaggagagaggctcttttgagtaatattcagcctacaagttgctctcatcatcatacccaaaatcaagttcataaaaatttcctgtattgtgaagagaaaatatttgtcaagggtagcctaagtataaatattttatggaacatatattgtaggggagctacttcttctgaaattacccacatgtatgcagtcatatgatgaattgctttttctaaagatggcctcctggctg

SEQ ID NO: 840229 - DNA, 674 bp, Homo sapiens
caagaagactggaaaacaaaacttgggtgcagaaggatctgagaaaatcggaaaaacccaacttgacttgcatagacctatagcctccaaaatttaagcagactttccaactcagtagattgcatgttcatttcatccccagattttggtgcctatccagggggaatggccatagaggaatggagactttgtatctctcaaaaatactttccagaaagcagatttgaatccactcttggcctcaccattgtgattgagtcccccagctctctcatttaggctggaggtatcctaaccaaggatgtggtataaatgaggctttgttgtctactctttgtcttatctcagggagtgatggcagtctaacacccaattcctttagcactatccctaagattggtacatttgataacagacttcttagtgacagaaagaattacacagatcatgtgtttaactctttcatttgaggaccattgtgatatttacacaaaagaatcaggacctaacatcagaaaacttgagttcaaagccttcatctaccactgattaactctgtgactttaggtaaggcactcaagccaagttgctcctctaaacaacgaacagtatttaccatacaaagttgtcggaaragatgtaaaagcatatttcaaaattatttttaaaaagcc

SEQ ID NO: 840230 - DNA, 450 bp, Homo sapiens
cctcacaagggacagtggaggaaaggcctgtgaccaaatcgttggaagatatggttccccatattgacatgcatattttaagcatgtcaattaaaataagaaaataaaatttctgtaagacaccagacactctccatgacacactttgtatttcaaatacattaaattactcactgtgtatctaacatctgttttgacacccactgctcttgtacaaatcatatttatcctatttaatacacataaatcctataaatcctatttaatacacattaacagcacacgtggaactggggcaattatcaggacgttgtaaagtttgtctgatttttagccatgtatccatatgaagaaaaaaaaatctgtataagtactttgatcagaacagggcctcagtgcaggggctcatgcctstgatcccagcactttgggagtctgaggcaggaaggt

SEQ ID NO: 840231 - DNA, 642 bp, Homo sapiens
tggtatagaatgcatagataatacattttctttatcctatcaaacattgatggacatgtgattgatttcatgagtttactgtgtgaatagtgctgcaataaacaaacgagtgcagatatcttttttatacaatgatatatttttatttgggttgatactcagtagtgggattactgaattaaatggctgttctattttcagttctttgagaaatctctatagcgttttccatagaggttgtacatccaaccaatagtgcataagcattccctttcttcttcatccttgccctctgttatttttgactttttcatagtagccattctgactgctgtaaaaatggcatctcattgtggttttaattgcatttctttgattattagtgatgttgagcatttttgtatttttttttggccacttgtatgtcttcttttgaaaactgggtggggacacagcaaaaccatatcaaagaatgtgtgaaagagaccctacctatagaaataagaatagaaataacaaaatagtgtgttttggaaaccaagagcatatcaawttttaaaaagaaagggggccagtcatggcctttgctcatgtcctttgctcacttttatttgcccatggtaaaatttcccttttattcca

SEQ ID NO: 840232 - DNA, 562 bp, Homo sapiens
ttcttccccttcatcttctgccacgattgtaagtttcctgagacctccccagccatgcagaactgtaagtcaattaaatctctattgtttataaattacccagtcttaggtagtatctttataacagtgtgaaaacaaactaatatagaaaattggtactgggatagtggtgtacagctataaagataacctgaaaatatgggggcaactttggaactgggtaatgggcagaggttggaacagttaggaaggctcagaagaagatgagaggatgtgggaaagtttggaacttcctagagatttgttaaatggtttttaccaaaatgctgatagtaatatggacaatgaagtccaggctgagatggtctcagatggagatgaggaacttattgggaactggcgtaaatgtcactcatgctatgctttggcaaggagactggtggcattttgccccyggcctagagatctgttgaactttgaacttaaggaagagtaattagggtatctggtggaagaaatttctaagcaacgaagcatccaagaggtatcctggcttattcta

SEQ ID NO: 840233 - DNA, 556 bp, Homo sapiens
gtaaggccatagttagtcacctcaaaaaaggttcacgccaccttagaaatgaatagagaacacaacrgaataactcatagacagtgcaactgctcatggcccaaggatcccctggcacaattaagcggctaagcattctcagtttgcagaaggctctagaaattgctattggtgagtcactctaaagccctgtatcaaaatcaagctaggagagtgttagatacatccatctcccaggagttttcaaccacaggtctccagggccttctgagtacaaaagatgctctggcccagggtctcctgctttcttaaaatccacaaagctacagtgaggagagaaggaaggaagagatggagagggagagcatggagaatcactctcttgctcattaccagaggttattttgattcttttaaattgatagaagtactgaattacatatttttccttttctgtaatttcagtgaatatgttcactgcaattaaataagattttgcagtccattaccttgtaatggatgtagcctttgggtatttttgaaaactaaaattaaa

SEQ ID NO: 840234 - DNA, 627 bp, Homo sapiens
ctatagctgctctcataggctgctgttgagtatttatggtttttccaagctcatggtgcaagctttcagtgtggatctatcattcygggatctggaggacagtggccctctttttacaactccattaggcagtaccccagtgggtacctggggggaggcagggctccaaccccacatttcccctccacagtgtcctagtcagatattcatgaggtctctgctcctgcaacaggcttctgcctggacacccaggcatttccatacatcctctgaaatctaggaggaggatttcaagcctcaactcttgtagtttgttcacctgcaggcttaacagtacatggaagccaccaaggattaaggctacagcctgtgaagcagcagtacaaactgtacctgggaccctttgaaccatggctggggctggagcagctgggacacagggagcagtgtctgagaactgtgcagggtgacagggccctaggtctggcccagaaaaccattcagtactcccaggcctctgggcctatgatgggaggggctgttggtcttcagaggcagctgacagtgtagcctgccccagcctaagctctgtgtcaaatcttgagtctatgtgtatttcaaagtcta

SEQ ID NO: 840235 - DNA, 484 bp, Homo sapiens
gcaaccgaagcaaaaatggacaaatgggatcacgtcaagttaaaaagcttccgcgtggcaaaggatacaatcaacaaagtgaagagacaacccacagaatgggagaaaatatctgccaactacccatctgacaaggaattagtaataagaatatacaaggagctcaaacaaccctgtaggaaaaaaaaatctaataaatcgatcaaaatatgggcaaaagatttgaatagacatttctcaaaagaaggcatacaaatggcaaacaggtatatgaaaaggtgctcaacatcactgatcatcagagaaattgtctcaccccagtcaaaactgcttatatgcaaaagacagacaataacaaatgctgrcgagaatgtagagaaaagggaactgttgtatgctgttggtgggaatgtaaattagtacaaccactatggagaacaaacagtttggaagttcctcaaacaactaaaagtagagctaccat

SEQ ID NO: 840236 - DNA, 602 bp, Homo sapiens
catctacaaccatctgatctttgataaacctgacaaaaacaagcaatggggaaaacattctctatttaataaatggtgttgggaaaaatgrctagccatatgcagaaaactgaaactggatcccttccttacatcttatacaaaaattaattcaagatggattaaagacttacacatgagacctaaaaccataaaaaccctagaagaaaacctaggcaataacattcaggacataagcatgggcaaagacttcatgactaaaacaccaaagcaatggcaacaaaagccaaaattgacaaatggggtctagttaaactaaggagcgtctgcacaggaaaagaaactatcatcagagtgaacaggcaacctacagaatgggagaaaatttttgcaatctgtccatctgacaaagggctaatatacagaatctacaaagaacttaaagaaattcacaagaaaaacaaacaaacaaccccatcaaaaagtgagtgaaggatatgaacacttctcaaaagaagacatttatgcagccagcaaacatgaaaaaagctcatcatcactagtcattagagaaatgcaaatcaaaaccataatgagatacc

SEQ ID NO: 840237 - DNA, 636 bp, Homo sapiens
aatgtatataattattacatagtatccagaacacatttctaataaaaatcttrgcaaattaatagtagaagagcatgtcttgatctgatgatgaacatgtaagaaaggcctacagataaaaatatgcttaagaataaaaaataaaatattttcttcctaacatcagaattaagacaaggattctagcttctcagcatttctattcagctttgtagtagagtactagctagtgtaataatcaagaaaataagtagcaggcatcaagtgtaaaagatagaaataacattgtttttatttgtggattgaaaaaatgtgatatagcatcaaaaaccaagaaaactaacaactgtgtttatcaaggttacaatattcaagaacaatagacaataatcaattgtatctttacatattgtatatactaccaaaaagactagaaattgaaacttaaaagtaatactaattaaattaccatcaacaatataaaatacttaagaataaatctctttcaaatgtgaaagaccacatctactcatggtttaaaaaagaaaaaaaaaaaactcttaatgaactaggaactaaaaggaagttccttaacttgataaagaaatctgtcaataaaatagaaaaattcaaaca

SEQ ID NO: 840238 - DNA, 562 bp, Homo sapiens
gccactgcactccagcctaggcaacagagtgagagtccatctcaacaacaacaacaacaaaaagacctaatcaccaaggtgatggtgttagaaggtgttagaagatggggatctttgaaaggtgattaggtcatgagggctctatccttgtgaattggataactgcccttataaaagaggccccagagaactgtcttcccccttccaccatgtgaggatacagcaagaaggtgccatgtttgaagcagggaacgggctcaggcaccggatctactgctgccttgatcttggacttcccagcctccagaactgtgagcaataaattccgttgtttataaatttcccagtctaaggtattttgttacagtatcctgaactgaccaagccacccccatgagtcatgaagctaagcagcttttcgtgtatttgttggcctcctaagtactcttrttatgaagtactttaatgcaagccctcccccatttttctcttgaattgtctgcctttttctttttggtttgtaggagttcttcatatatagtgggaaaaaatcatttgggat

SEQ ID NO: 840239 - DNA, 615 bp, Homo sapiens
acttacagcacttttaaaatgtaattttaaaacttgacttcggccgcgtgcagtggctcatgcctataatcccagcactttgggaggccgagatgggtggatcacctgagatcagtcaggagttygagatcagcctggccaacatggtaaaaccttgtctctactaaaaatacaaaaattagctgggcgtggtggtaggcacctgtaatcccagtaacttgggaagctaaggcaggagaatcgcttgaacccaggaagcagaggttgcagtgagctgagatggtggcactgcactccagcctgagtgacagagcaagactccgtctcaaaacaaacaaacaaacaaacaaacaaaaaacagtatatatgaagcacacactgcatgccagaccctttgcttacagatactatggggatacagtggtgaaccaaccagccagccagtgatggaagtaaggagattacagcccttcctcccactggaagtctctctcactgccctgtgtcctgcccaggccaagttcaggcccctctggcatcctttttatcttctccagaactctgacccagcacacaaatatttgtgttttttaattattttaaatttatttattt

SEQ ID NO: 840240 - DNA, 484 bp, Homo sapiens
accaactttccaagcccgcagatctcaggttaaaatctccagtcctagaaagacaagcttcaaataatcccatccaagtgtatattatatatatatatgttatatatatacactaactcctcaaggacttgtaggacattggagtcatttggctcataatcaattatgtgaattaccaaactttaaagatttaccaaacacacattcaagtatataaaagtatacagcaatttataaaggatagttttatcaatttttaaagacttctgacaattattaataattgacagattttcagttttcatagcaacattttaagaaatgtgtcaaaaggtaaagatcacaaaatgtttcratcttcctataaatatgcctcatattcagaaaaccatttctcctccgccgccatttcctaccaaccatacagcataataaggcagctcaaacccaataatatatacatcaaaagcagaaaacaaggaaa

SEQ ID NO: 840241 - DNA, 414 bp, Homo sapiens
actcacatgtccaaaggctgtctctcttaaaataccctgaaggtgaccacgccagggaagggggcatgaacgaaatgagtagggaatggtctaggagaaaragaataattttgtgtgtgtctgtgtgtgagacagagtctcactctgtcccccaggctagaatgcagtggtacgatcttgggttactgcagccttgacctcccgagctcaagtgatcctcccacctcagcctcctgagtagctgggaccacaggcaggccacatgcccaactaattcttttttttttttttttttcgtagagacagggtctcactatgttgcccaaactggtcttgaactacggggctcaagcaatcctgcctcagtcccccaaagtgccaggattataggtgtcagccatcatgcccagccta

SEQ ID NO: 840242 - DNA, 554 bp, Homo sapiens
ccaaagtgacagctcaactgcaaacggcgaaatgcttcctaaaaaattcccatttatgcagctccgcaacggatatggatggcaacctagggcctatggtctgtcaatattgattggattgattggttaatgtagtagccagtcctacagaggaaaagaagtggttgttttgtttcccagcagagttaacaaaatttcctggatctttgagcatattagcatgttgcacttgctggaagacatttggtcaattcttactgggactctcttccgaagaattgcacctcagcccacctatagattaccttatttttataaatggaataaatgaaatattttctcaacagtgtcacacacacctaagatacaggccggcttcattttcactcacacatgagccttggaaactgtgttgacttgatccagycccgtgggaggctttaggagccccaaggactgatcacaaccaggctggaagtggcttagaagtcaaaatgcatttcccaaaagtagggactatatcaacctttgaacttgaatagattaataatagc

SEQ ID NO: 840243 - DNA, 554 bp, Homo sapiens
ccaaagtgacagctcaactgcaaacggcgaaatgcttcctaaaaaattcccatttatgcagctccgcaacggatatggatggcaacctagggcctatggtctgtcaatattgattggattgattggttaatgtagtagccagtcctacagaggaaaagaagtggttgttttgtttcccagcagagttaacaaaatttcctggatctttgagcatattagcatgttgcacttgctggaagacatttggtcaattcttactgggactctcttccgaagaattgcacctcagcccacctatagattaccttatttttataaatggaataaatgaaatattttctcaacagtgtcacacacacctaagatacaggccggcttcattttcactcacacatgagccttggaaactgtgttgacttgatccagcmccgtgggaggctttaggagccccaaggactgatcacaaccaggctggaagtggcttagaagtcaaaatgcatttcccaaaagtagggactatatcaacctttgaacttgaatagattaataatagc

SEQ ID NO: 840244 - DNA, 572 bp, Homo sapiens
aaacataccccccacaggggatccacccttcttttgctcccccatctaattagaaagattgacttgtctaatgatataaattggccagtatcttctttatatggattatctttataatttttcccttgagttaaaataaatgtatgatgtgttgatataaattggagtgggaaattggagagatgaggaagatggagagagttatgagtagatatctatctaagttacttatttccccctccaggcccagttggctgttcctcctctgtgctgccatgctcccctgcacactcctctgtggggtgcttgtgaccatgtgctgttcactgactcgtccctctccgtcactgtactgagctcttggatggatgagctggatttcatctctgagttctcagtgcctagcataaggcctgatgctgaatgagtattcattcagagtgtgtatgtgcgtgtgtgcgtgtgtgtgtgagagagagagaggaagaaggagagggagawtggggggtggaagtgaaggggaaaagagaaaagtaaaaaggggaaaagggagaagaaaagaagtaaaaaat

SEQ ID NO: 840245 - DNA, 628 bp, Homo sapiens
acccacacttgctgggtgtcgcactagaagaagagcagaacttatctgccttgcagccttggttctcagggaagggtgctgacctgcccaaggtcaaagcaggtccagaaaggccacagtcctggctcggtgctctcccagctcctgcatgtagcctgtcctgtagaaaagagaggatagatctggccagagctggggctgtgggcaaagaggactggatgctctcttggcaacatcatccaaggctcaaggaccaggtaccctccaggggagttgggggagggtgctggtccagagatttggaatctggtacttttctgcctctaactttggtcaagtcacagtggactttacagttcttatctataaaatgaaggggttgggaggtatgatatctaagaactttcattcattggttcaaccaatattcaaccaactgcctgccactagttaggcactgttcagcccttgaagatgaaataatttttaaaagtgaacatttacatagcatttactatgccagacactgccttaagaatttatayataatataaatataatataaaagatattataattattatactatgattatatcaatatattataattataatattatataata

SEQ ID NO: 840246 - DNA, 666 bp, Homo sapiens
aaatttgtaagcttttcttttgttaaaccatcttttgttacagaggccttagccatgaacctagcaataggtgaggaaaakatacttttcctcctctacaataccctgacccttttgtggaaagaacagcaaagttacatggcaacggcaacagatatagggaggagagaagaactggggctactgttgccctttcccacctcccctacacctttattattccatttgtgaaatggaataataatagatcatgcttcataccattatgagaggattaaaggagatgacatatttttaaatacttttcatggtgtctggcacattagtgttcaatacataatatctcattattactaataactattgttattgctccacttttgtgctctagcaaggcttggatgccccccttctccttgcccaggtcctccccttcagatatcccttctatgtgccacggctcttgctaccatctgcagaaccatttcttattctgtttgaaattactcaaatccctcattttaaaaacatatgcttcagccccaataggaggaccaaccatcatcacgtggccctgctatgatgtactaagaaaagcacatcacttgtgttatattcctgctaaaattatataacctaaatcttattgcaaagaaacaccaggga

SEQ ID NO: 840247 - DNA, 580 bp, Homo sapiens
gcgcacagggggaggctcagaaagaaagaaacaaaacccactgcttgagaatttagattgcatagtaagctcattcaagtaataatcaacaaaagcaggcaaaatcacacatagattcacatatttccaagagccatccttgggcattttcaaagggcatgaatatacaactagctttacaatgtagcatttaggttaaaagcagttaatcatattacccctaaatttttatgctcagaagtctcacacgaatgatatttgactttacttcaaagccattcaacctgaaagatttccaagcatgtcacatgtcacatttagctactttttctctgaagggctttcgtccaactggctcaccacattcattgcctagaaaagcagaggccaagaaatgctgagccagtccacaagcaaataggtaggctcctgaaataaattgtattatgcttgttctaaataaagcacrcaagttttctcatttagattatcagagcagtatgacccgttaactaaatgcatcatgtaatcgtaaagatatattggttctcctgttaagcaaatctccattcttcatgtc

SEQ ID NO: 840248 - DNA, 635 bp, Homo sapiens
tgggcgtgagaggccttgaagtaggggaagtagtggagagagagaaagatagagaaatcggctcttggcttgaactgttgttcttgtcgaaggtatgttttccctcccggcctctgtcgyttttcctctctccccttaactactttatgcaaataaagccgcttccagactggaggagcccctaccgctggatctgtgctaccaggtgggtgggaattgatttagtatttgcctttttattgagaataggcactgagtctcccaccaattataaaataaaaatggattttcctcttaaaatttaattttactcaatctggaagataatgcatcctgttaatttctacaatatttttaaaaaaggattccagggtgagcgctaacttataaaatggtttaataaagcttttccatatacaaattaataggagaggaaaaagcccctaaataattgatttaaaatactgtgtattatttgagtgtcatttcaaatagctgtacaagccagtaatcaatatatcatctaaggaatctaatttactgggcagtacgtgtggctcttgctcttccttccctctccacttcctcccctttaaacagaaaacttgttttaacaagatttttattttaaatca

SEQ ID NO: 840249 - DNA, 605 bp, Homo sapiens
aaaatgggaagcctgaaacactctggtactttcgggtaacaggacgtaaacatgatgagatgctggggagtggcctcaaagatcaaggaattcagccacataagagayaaatcaaagaagtccttgtaatctattttaaggacttcttaatagattaatagattgttgttaaaaataacagttaatctgcataaactttaaccttgattgggccttatactgacttagaaaaccaactaactctgtaatatactccacagtgtaaatagaatagacaaaagaatagacaattgaaggagttctctctacttgatgtatttactctcttaccttccattcacttctcctactctcatttggccctgcctttgctacatcaccacaatcatttgggtcaagaatgacctttatctataaattaaatgcccacatttcagtccttttcttgtttggtcatttgggaacatttaacattataagctactaactgctcctttaagcgctctcttctcttgtcttccaaagatctcactcccctgattttccttctgtttctctggtctctcatttcagtctactttgagagctcctattctatttaactt

SEQ ID NO: 840250 - DNA, 636 bp, Homo sapiens
cgaaggcctgaaatcaggaaccttaggaatctacctggtgctctactctactgtggctgagctggcacccaagctacaagacaaagtccttctgactattccctcccctttcctcgagcagaaaaatctctccctgtggccaccactgcctctggcccacagcaagtactgactggttacagtcaatgttcactcaaggccaaagggctcatcagtcagtttgtggtgaatgcttccaggcctgagtctctttcttcagggaagggtgggctcccccctgtcccaaagcaggtccagaaatgtcatccaatagccaaggtctggaattggggaccccaggaagtggcttgatgctctaccccactgtgaccaagctggtacccaagctgcaagacaaagtcttctttactctttcctctcatttcctcaaccaaatggacactctccccatagcaccacagctgggaatgtgttggatcacacctgaggccagcacacctctgagtctcacccaaggcctgcattgagtactgcctggctaccacygctggttatttagggtccaaaggctctttacacagcaggagcctaataaatcctaccaggactgggtcccttcccttcaaggcagaggat

SEQ ID NO: 840251 - DNA, 635 bp, Homo sapiens
ttcttttaagagttttatagctcttacatttaggtctttgatctattttgagttaatttttgtatgtggtatgagggtagtggtaattgatycttctgcatttggcaatgtaccagcaatatctattaaaaagattattcttttcatattgaattgtcttggcccttctgttgaaaatcagttggacataaatgtgagggtttatttctgaaactaaattctgttccattgatttattggtctatgtctatccttatgtctataccactctgtcttgattatggtaactctgtagtaagtttaaaatcttaaagtttgagttctctaactttgttctttttcaaaattgttttgactgttctgagtcctttgcatttccatatgaattttaatatcatcttgccaatttctgcaaacagaggcagctagggttttgatagagattgcattgaatctgcagaaaaagttgaggaatattgctatctttataatgtgaaatattttcatgaacatggaatgcctttccatttatttggtcttctttaattcatttcaataatgttattttagttttcagtgtacaaaccttgaactttttctgttaaatttgttcctaaatattttaatttttgatg

SEQ ID NO: 840252 - DNA, 530 bp, Homo sapiens
tcaactcttagcacaactctaacatagaaggtatgattattatccctacttggcaaataaagaacttgaggcacacggatattaattaactctcctgggattacacagcctgtacgagccatgctaggaatggatcctggcaatcttgctccagagcccattctctgaattctgcagcactactgcttcttagagatgaggttggagagataggcagaacccagaccaaggagggccttggaagtcatcacaatgagtttggattttatctcatagccagtaagagcctggggcaggtttgaattcgataagtgaaattagtaactttgtatttgggaaaggccattctagaaggaacatacagaatggactagggagagagctaaaattggagaaaggatatcaggaagaaaactaattgctccataagagaggacaaaaacctgggccgggcgtggtggctcatgcctgtaatgccagcactttggaggccgaggcgggcagatcaygaggtcaggagatggagacca

SEQ ID NO: 840253 - DNA, 592 bp, Homo sapiens
ggtttcataatcttaagaatgccaacaaagttcctgcaggataaaaaaagcacacctatttattcatagtttttatatctacctaatagtttgaacttcgattctttattatagatgatacactaatattctatgtaaataattgtccagtaattaataagtgaattttaataaaattaaagtatctgtgaaaggtacaatttaggcaactgtgaaatcatactattagtgggatattttattgttttgattcattatttattttaaagctgttttgtatggttcaaataaggaggtgatcaaaatattatttcacgactcacatggcttattgtcacacacagggaattttttccatgatgtttaaagagggaaagaatcacaagaacaaatctcatagggaatacacttgatagatgaagtacattaaccatgtaatgaatgagttccaaaattactaaagcctagttgctcaattaggatgaatgcaggctctatggaaagtgaaagctagttgaagtgtcaggtatgagtgtaagagaggattttgggagagatagcttgatcarcacaacagagatccatgcagaca

SEQ ID NO: 840254 - DNA, 614 bp, Homo sapiens
gactttttttttttttttttttgagacaaagttttgctctcgttgcccaggctggagtgcaatggcgtgatctcagcttatcgcaacctccacctcctgggttcaagcgattctcctgcctcagccacccgagtacctgggattacaggcatgtgccaccatgcctggctaattttgtatttttagtagagatggggtttctccatgttggtcaggctggtttcgaactcctgatctcaggtgatccgccagcctcagcctcccaaagtgtcaggattataggtgtgagccactgtgcctggcctggggttaatttttgaaagcaagttataaaatggaaagcactataattttactctttgaaaatacatcgagaaaatactggaattatgtgcatcaaaatggatggtgagagtatagctgtttttaaattttctttgtacttgtatttctcaacttttatagtaataatagctaacatttactgagaactaagcacttacatatggtattttattcgaaaactstttgaggtaaatattactattattttcattatggagtttcagaaactagaaccagaagggtaactcatccatggtcacacagccact

SEQ ID NO: 840255 - DNA, 614 bp, Homo sapiens
gactttttttttttttttttttgagacaaagttttgctctcgttgcccaggctggagtgcaatggcgtgatctcagcttatcgcaacctccacctcctgggttcaagcgattctcctgcctcagccacccgagtacctgggattacaggcatgtgccaccatgcctggctaattttgtatttttagtagagatggggtttctccatgttggtcaggctggtttcgaactcctgatctcaggtgatccgccagcctcagcctcccaaagtgtcaggattataggtgtgagccactgtgcctggcctggggttaatttttgaaagcaagttataaaatggaaagcactataattttactctttgaaaatacatcgagaaaatactggaattatgtgcatcaaaatggatggtgagagtatagctgtttttaaattttctttgtacttgtatttctcaacttttatagtaataatagctaacatttactgagaactaagcacttacatatggtattttattcgaaaactctttgagrtaaatattactattattttcattatggagtttcagaaactagaaccagaagggtaactcatccatggtcacacagccact

SEQ ID NO: 840256 - DNA, 436 bp, Homo sapiens
ggatcctcctttgttatgggcttaatgtttgtgtccccacaaaattcctatgttgaaacctgaatcccaatgtgatgatatttagagrtggggccattagaaggtaatgaggtcatgagtgtagagccctcatgaataggattagtacctgtataagaagtcggaggctgggcgcggtggctcacgcctgtaatcctggcactttgggaggccgaggcgggtggatcacgaggtcaggagatcgagaccatcctggctaacatggtgaaaccctgtctctaccaaaaatacaaaaaattagccgggcgtggtggcgggcgcctgtagtcccagccactcgggaggctgaggcaggagaatggcatgaacctgggaggcggagcttgcagtgagcagagatcacaccactgcactccagcctgggcgacagagcgag

SEQ ID NO: 840257 - DNA, 518 bp, Homo sapiens
ccaaggtcaccactgataagtagtaaagaaaggatataaactcagctcagtgtgtcgcagagttcatctctctccattgtacagttacattcccaaccaacatgctggggctgccatgccaggattactccactctgttgctttttattaaaaaattatgttacatattttattacacaattattttacataaaataaaatgtacagatcaatgagttttgacagatgtatatatatatcattgtaatcatcagccaaataaagttatagactctaccaacatttctgaaagtttctttaattacttctagtccagaatcccctcctcccagaggcaatctaatttatttttatttttatttatgtatttatttttagagacagggtcccctctgtcacccaggctggagtgcagtggtacagtcatagctcactgcagtcttaaactcctgrgctcaagtgatcctcctgcctcagcctcccaagtacctaggactgcaagcatatgccaccatgcc

SEQ ID NO: 840258 - DNA, 578 bp, Homo sapiens
caactacttgggaggctgaggcaggtgaatggcttgaatccaggaggtggaggttgcagtgagccgagattgtgccactgcactccagtcatctcaaaaaaaaaaaaaaagaaaagaaaaaaaagaaagaaaaaagaaaagaaaaagaaagaaatcatctgatagctctcatttgtttagtgcttactgtgtgccaggccctgggctgggcactttgtattcattctttcatttaatcattaaagccgcctagtaatcacacttatatgaacttatgaagtccaatttactccgtcatggagaaattactatgtagtaagcgttgtggggggaataacaatattaataatacatagtctcagccttcaaggcatcaccctcttgtcttaatcctccaactttggaaactaattgctttttgtctctttcgaccggggtttgaatcccagctccatcacttactagctgtrtgacctctaataagttgcttaacctctctgtgtcttggtttcttcctctgtaactgggaatgatcataatagaatttatctgttagagttgtgaagattaagtgagag

SEQ ID NO: 840259 - DNA, 460 bp, Homo sapiens
ccgagtagctgggattacaggcaagcgccaacatgcctggctaatttttgtatttttagtagaaatggcggtttcatcatgttggccaggctggtcttgaactcctgacctcaggtgatccacctgccttggcctcccaaagtgctgggattacaggcatgagccactgctcccggcctccatttttaatcttttacactgtattttttactgtatattttctatttttagatatacaaatacttataattgcctgcaatattaatacagtaacatgctgcacaggtctgtagcctaagaggaataagttatacaatacagcctatatgtatataatatatartaagctgtatcatttagacttgtgtaagtacactatgatgttcatacaatgatgaaatcgcacaaggatgtatctctcagacatatcctcgttgttatgtgagcgtgactgtatttt

SEQ ID NO: 840260 - DNA, 460 bp, Homo sapiens
ccgagtagctgggattacaggcaagcgccaacatgcctggctaatttttgtatttttagtagaaatggcggtttcatcatgttggccaggctggtcttgaactcctgacctcaggtgatccacctgccttggcctcccaaagtgctgggattacaggcatgagccactgctcccggcctccatttttaatcttttacactgtattttttactgtatattttctatttttagatatacaaatacttataattgcctgcaatattaatacagtaacatgctgcacaggtctgtagcctaagaggaataagttatacaatacagcctatatgtatataatatataataagctgtatcatttagrcttgtgtaagtacactatgatgttcatacaatgatgaaatcgcacaaggatgtatctctcagacatatcctcgttgttatgtgagcgtgactgtatttt

SEQ ID NO: 840261 - DNA, 645 bp, Homo sapiens
gtatgtaccattaagacagaaaaactactaaactatgaccaaaactttcatatcacatagaatttttattttatgtatattgaaagagctttttaattttatttttatgtaacagtgatgaaaatataagtaactatgaaaaacttcatgaaaaagcaggcaatgacaactccattggaacagctgcctaggtactcataagaataaatgttgtaatttttttttttttttttttttttttgagacagagtctcactctgtcacccaggctggagtgcagtggcttgatctcgcctcactgcaagctccacctcctgggttcacaccattctcccacctcagcctcccgagtagctgggactataggcacctgccaccatgcccggctaattttttgtatttttagtagagacagggtttcaccgtgttagccaggatggtctcaatctcctgacctcgtgatccacctgcctctgcctcccaaagtgctgggattacaggcgtgagccaccgtgccaggccaaatgttgtaattttaatctayatcctaatttcagagatttaaaagataaaatagtgcatttgttagaactaataaaatatagggtctatactctgtctctaagagctgtcctttctgtttgc

SEQ ID NO: 840262 - DNA, 477 bp, Homo sapiens
tagtattcctcaaaaccatcttagtcactaaaaccgaaaccaaaaattctgagaaagtgtcacagccaagaggagcctaaggaaacataatgactaaatgtcatgaattttggccgggcgcggtggctcacacctgtaatctcagcactttgggaagccgaggtgggtggatcacgaggtcaggagatcaagaccatcctggctaacatggtgaaacccagtctgtactaaaaatacaacagttagctgggcgtgatggcatgcgcctgtagttccagctactcaggaggctgaggcaggagaatggcgtgaacctgggaggcggagattgcagtgagccaagatcgtgccactgcactctagcctgggcaacagagcaagactccgtctcaaaaaaaaaaaaaaaaaaawgtcatgaattctggatgggatcctggaacagaaaaagaacactgggtaaaaactaaagtgtgaact

SEQ ID NO: 840263 - DNA, 544 bp, Homo sapiens
cttgaaccaatcagaggctggcaactaaacagtgttgatcatgtgacaggccctaggaagataggcttgagataaaaagaagagaaatttgagcatgacatcgcacacagcacacttgaagggaaatagcttttctgaaccaccacagccaaataattaacatataaagcagcaaacaacatcaataagcttggaagaggggatcagtatctagagttactacaatgtattttcctttagaagttttcaacaaaaaattaccagacatacaaagaagaaaactcagtcatacacaagaaggaaaaaagctgccagtaggctctacctttcaggaggcccagatgttggtcttatcaggcaaagacatcaaagtaactatcataaatatattcaaagaattaaagaaaattatccttaaagttatgatracaatgtctcattagataaagaagatcaataaagagatataaattataatagaccaaaatggaaattctggagttaataatagcccaaatacaaattttaatacagaggctcaaca

SEQ ID NO: 840264 - DNA, 531 bp, Homo sapiens
aactagtccataagacccaatttaaaacttttctttttagtagttctagacagaaaggagaaaaaaaaaatagaagagaggatatattcrttgaaataattctggaaatgttaagaagtgaaggacatgagtttccacattaaaggtgtctacaatggataaaaccagacacaccgtctgaggcacattatagcgaaatttcaaaacaatggagacaaagagaaaatcgaatgagaaaaacatggtcatacacagaggattaggaatctgaatgccttttgagttctcaattactgcaaggaaagctgaaagacagcaggtccaacctcaaagggggaatagtttccagccaagaattctatatccaaatcaaatgcgtagggagaatgaaaacacgtttggacattaaaggtctcaaaaagttgtactttttacatgccagtttcttaggaatctcctagaagttgtgtttcctgtgaatgaaggagtaactttaggaaacacaggatcccagagacatttcactcaaga

SEQ ID NO: 840265 - DNA, 531 bp, Homo sapiens
aactagtccataagacccaatttaaaacttttctttttagtagttctagacagaaaggagaaaaaaaaaatagaagagaggatatattcattgaaataattctggaaatgttaagaagtgaaggacatgagtttccacattaaaggtgtctacaatggataaaaccagacacaccgtctgaggcacattatagcgaaatttcaaaacaatggagacaaagagaaaatcgaatgagaaaaacatggtcatacacagaggattaggaatctgaatgccttttgagttctcaattactgcaaggaaagctgaaagacagcaggtccaacctcaaagggggaatagtttccagccaagaattctatatccaaatcaaatgcgtagggagaatgaaaacacgtttggacattaaaggtctcaaaaarttgtactttttacatgccagtttcttaggaatctcctagaagttgtgtttcctgtgaatgaaggagtaactttaggaaacacaggatcccagagacatttcactcaaga

SEQ ID NO: 840266 - DNA, 621 bp, Homo sapiens
atagaacttgaataacttccagagcaaggctatcagtgccttaagaattttaacaaatcaaattgtaaatttatatrtgtaggggaggggatagagtaataatgtatatgaaaaaggagtttatatggcatatttaatgtgttcttcatatgattacaataccatgagtaaataaaactgaaaaaaactctaatcatttagttttctaggtagcctgtctatgagaagagaatgtggtgggccagtctagtgatccacttgattgtgtttttcattaaaaacttatcaggaggctgaggcaggagaatcacttcaacttgggaggcggaggttgcagtgatctgagattgcgccattgcactacagcctgcgtgacaagagtgagactctgtctcaaaaacaaacaaacaaacaaaaccttatataagtttttcctaggcttatgcatttacttaatgaaatttttaagcctcaccaccaacactctcaagatattatttataaacattttttaaaatgtaaacattcaaggatgattgataaaccttggaccagcttgatatcacaaagtaaatgccctattcttggacaattttgagataccttttaacattccaaaat

SEQ ID NO: 840267 - DNA, 629 bp, Homo sapiens
ttattatgatctttgagactctgtgttttctgggttagtatttagaagacaaacaggacaaggggatgcaaaatgaaggcacagcttgccttatacaggatagtccatcaattcctctattgaaacaagagccctctgtctgattcccatttctgtgaccttgttgacatctaagccttcaaaatatgattaaaaagtccatcacagtccatcacacatgaaatattgtgagataagttgcccccgagtaaggccagaagaatgtttctctgaaaggcttagacctgatgcaaaaatgtaaataattgcttcacttgtcataagtagtgacatgaaatcccacagatttttactctagttaagatgaagtgttactattaatctaataagagaattattagcattacagacatttggcattcatttcctaaaaaattagcacatagttaaatttaactaaagaatttattcagcattctgctaagaccagctgtcacacaatgcctggyaatgttgcaaagctcctatttgcatgcacattcacagatagtaggaatccctccactttttataatggatgttgcatttttagtgaaacatctgtgttgtcttgagtgtgttatgacttt

SEQ ID NO: 840268 - DNA, 628 bp, Homo sapiens
gaaaagaaaatcccattttctgaggagaaattcaagctggctgcagaaatttgcataagaaatgaggatcaaaattataattcccaagayaatagggaaaatgtcttcagagcatgtcataggccttcatggcagttcctcccattacaggcccagaggctaggaataaaaagtggtttctagggccggacccttgtgctgtgtccccatgctgtgtgcagcctagggacctggtgccctgcatcccagctgctccagcctgggttgaaaggggttcaatatagagattcgagccatggcttcagagggtgcaagtcccaagccttggcagcttccatgtggtgttgaacctgtgagtgaacagaagtcaagaactgggtttggaaacctctgcctaaatttcagaagacgtatggagatgtctggattcccaggcagaagttttctggtggggcagggccctcatggagaacctctgttagggcagtgcagaagggaaatgttgggtcagagctcccacacatagtctctactggggtactgcctagtggagctgcgagaagagggccacagtcctccagaccccaaaatggtagatccactgacagcttgcagcgtgcacctggaa

SEQ ID NO: 840269 - DNA, 304 bp, Homo sapiens
gacagatgtgcagcagcagagcgggcacctacagcagactatagcagatyacaaggcctgggggagactttcagaaagatagacttcatagcatacctgatttgtctgaccatctaaacggagccttaggcaactgtttaagagtttgtgtttgaattaataataagtatatagaaaatcaagcaagttaatagtacatatttttaaggctgcacaaaaaataattcacccaaggcttaactatgagtatcatttacatactcataagaatgtaaatagcagttatgagtactatcaaattata

SEQ ID NO: 840270 - DNA, 540 bp, Homo sapiens
tattaaattttccctagatgtcatgattccatgttccacagcatcaacttttctatttaattctttatatatggatttaaattgtgccattggtgttttatttttctagcaatattttcttttcttaccatctctcattttatctattgtcttcttctctcaattgcctttttatctcaggcgattctcttaatatggcttctagtttctattttaaaacgtgctcttttcttttattttattgacctaacagtgcctgaaatgttgtcctgaaactgtaattgctgtttttcagaagtgaattcttcctctagtcttgcaactattattccctttccatgattttgttcgtttttctcaagtcagttgttttcctctttcttatttttaaaacgattacttatcaccaataaggcaggatcatgtgtttgtcaaccaaaaataatttgaaactttctttaccttaatggctgttwcattgtgttaaggcaatcttaacctcagatttagtgctagacagactgattcctcttccatttc

SEQ ID NO: 840271 - DNA, 540 bp, Homo sapiens
tattaaattttccctagatgtcatgattccatgttccacagcatcaacttttctatttaattctttatatatggatttaaattgtgccattggtgttttatttttctagcaatattttcttttcttaccatctctcattttatctattgtcttcttctctcaattgcctttttatctcaggcgattctcttaatatggcttctagtttctattttaaaacgtgctcttttcttttattttattgacctaacagtgcctgaaatgttgtcctgaaactgtaattgctgtttttcagaagtgaattcttcctctagtcttgcaactattattccctttccatgattttgttcgtttttctcaagtcagttgttttcctctttcttatttttaaaacgattacttatcaccaataaggcaggatcatgtgtttgtcaaccaaaaataatttgaaactttctttaccttaatggctgtttmattgtgttaaggcaatcttaacctcagatttagtgctagacagactgattcctcttccatttc

SEQ ID NO: 840272 - DNA, 273 bp, Homo sapiens
gctttaaagaccttattgttgaaaaaataagataaaaagcattcacaaactaccttcacaagamtatataaatacaaatacaaatatatgagttcatttattttacacatatattttgtgtatttattaaccaaaaataaggcacctctttcaagctcttggcatgattaacaatgtggctattaattttgaaaatatgacgtgcttaacaatagtagtaattttcaatttatatgtatagaagtattttccaaagagaagataccagctttg

SEQ ID NO: 840273 - DNA, 273 bp, Homo sapiens
gctttaaagaccttattgttgaaaaaataagataaaaagcattcacaaactaccttcacaagaatmtataaatacaaatacaaatatatgagttcatttattttacacatatattttgtgtatttattaaccaaaaataaggcacctctttcaagctcttggcatgattaacaatgtggctattaattttgaaaatatgacgtgcttaacaatagtagtaattttcaatttatatgtatagaagtattttccaaagagaagataccagctttg

SEQ ID NO: 840274 - DNA, 273 bp, Homo sapiens
gctttaaagaccttattgttgaaaaaataagataaaaagcattcacaaactaccttcacaagaatatataaatacmaatacaaatatatgagttcatttattttacacatatattttgtgtatttattaaccaaaaataaggcacctctttcaagctcttggcatgattaacaatgtggctattaattttgaaaatatgacgtgcttaacaatagtagtaattttcaatttatatgtatagaagtattttccaaagagaagataccagctttg

SEQ ID NO: 840275 - DNA, 273 bp, Homo sapiens
gctttaaagaccttattgttgaaaaaataagataaaaagcattcacaaactaccttcacaagaatatataaatacaaatacaaatatatgagttcatttattttacamatatattttgtgtatttattaaccaaaaataaggcacctctttcaagctcttggcatgattaacaatgtggctattaattttgaaaatatgacgtgcttaacaatagtagtaattttcaatttatatgtatagaagtattttccaaagagaagataccagctttg

SEQ ID NO: 840276 - DNA, 610 bp, Homo sapiens
gacagatctggtctctcaatacttgactgagatctttatttttaacattaggtagtgtttttctatttttcattaacttttgttcatcactttcagcatagaacttccacagtgtatccttctgtttccttaggtcttacatcacagagaataagcaaaaaagaaaacaagcaaacgtacaattatagtgagtaatgtacatagttattggcttcatgtgggacattgtggggaacctgccatcggtgcatcctgcctgcacatgtgccattttattacctcttgtgggtgtgcttgtgtgtgggactctgggcctgtgccaaaatacagcagaaggagaataaaaaggtcttttttcttttggggatgctgaataacttaactgtgcgcctgcattttgactgcgacccatcgcatgagattagatgtggaattttccacttgtggtgtcacactgacactcgcaaaagttcagatttttaagcatttaagattttgggggcttgaatttggaatgctcaacctgtatatatttttggccaaatrgcactgaccttccacctgaaaagtttattttcaagtgagtgggcggctttgggagggatacaca

SEQ ID NO: 840277 - DNA, 623 bp, Homo sapiens
gataattaaaataggttgctgtgatggaggacaaatgagtggccacattagattggatggttaatgtaggcctctctgttgaaatgacatttttaaacttaggtgtgaatcaggggaaagagtattccagttaatagtaacagaaggccctaagatggcatgatggttaattttaggtgtcaacttgtctgggttaagggatacttatagagctggtaaacttatttctggatgtgtctgtgagggtgattctgtaggagactgacatatgagtaaatggtctgagtggggaagacacaccctcccaaggtgaggcagcttccagttggctgagggtctggattgaacaaaaaggcagaggaaaggcaaatattttctcacctagagctgagacacccttcttcttctgcccttggatgtgagaacaccaggtatctagcctttggactctgggacttgcatcagcagtcccttgggttctcaggccttcaacttcagactgagatttatacctggacttccctgtttctgagrctttcaaacttagactgagccaggccaccaagttccctggttctccagcttgcagatggcctatcatagaaattttcagcctccataat

SEQ ID NO: 840278 - DNA, 630 bp, Homo sapiens
ttctggggagagggcaggacccacgcaggcttctggggagagggcagggggctcaggtggagacacacgcatgcttcgtctgtactgggctctgaattctgtgcctctcctgcctgctggcgaccgggggccctgcctgactttgggcctggggcctgctgtgtgagccaaagagggagtgatgttctgagacctgggctttggatgctggaggcagcagggctggtgagggtggcagagccttggggccaagtcgggccttgggcgcccacctgcatgctccccttcttggttgagccatcgccctgcccaggacctgcttggcagcgcctgaaggtaacagagggctggcagtccaaatatggggcattggagccatgggctggggcagcagccgtagctgggcggtgtgggcagggggctggcaggcgccggccgcggctgtctcctccagggcctgctgttgtggcgtctggccgcggccagcaccgccgtcatctgggctcagctctctctgtccgcggggctgtctccctggtggtgccggccccagagcgcatggccacagcargcctggtccacccgacattgaagcctccctgtcataattggcaattttgtcatatttat

SEQ ID NO: 840279 - DNA, 433 bp, Homo sapiens
tttcacatttgaggtaatttgggattggctctgatacttttttgctttagaagagtagtagaaattaattaatctacaactgcactgatagcaaaagttaayataaattttaataaaaacacaacctcaataagctcccccattcttctcataaatgcaacagtagtttaaaaattgtagattaaaaaaattaataaaacagctgaggctagggaccgtgaggctcaaatacggggacacagtgtgagtttcgactgcccggtgcgcaggggcccgacagatgccctccaagtgcctttccctcactctgtgcgttgaacatctccctgggcctttaactaaccctcttcttttggtggcttatttttatttatttatttatttttaattttttttgagatggagtctctctctgtcacccaggctggagtgc

SEQ ID NO: 840280 - DNA, 433 bp, Homo sapiens
tttcacatttgaggtaatttgggattggctctgatacttttttgctttagaagagtagtagaaattaattaatctacaactgcactgatagcaaaagttaacataaattttaataaaaacacaacctcaataagctcccccattcttctcataaatgcaacagtagtttaaaaattgtagattaaaaaaattaataaaacagctgaggctagggaccgtgaggctcaaatacggggacacagtgtgagtttcgactgcccggtgcgcaggggcccgacagatgccctccaagtgcctttccctcactctgtgcgttgaacatstccctgggcctttaactaaccctcttcttttggtggcttatttttatttatttatttatttttaattttttttgagatggagtctctctctgtcacccaggctggagtgc

SEQ ID NO: 840281 - DNA, 639 bp, Homo sapiens
aatagaattctagataatcttttatcacaacaagacacccatatagaattatttaaacagattggacggcggcagcagcaaatttcaattattctaatgctttaataaatgtggtgcgtgtgtattaaattcaagcttcttaatccaaattttacgatgtaactgcactgatttttcatttctgcaacacccacacgcggcaatggccgctcctctctcggggagggtgatcccagctcggaaaagccgagagggcgcgcggagtcgggcggccgagaggaaagggagtcacggctgggcgaggggcgcgggcgcgggagaccccggaaaggcaaggagagagcggcccgggaggaagcgcaggacgcccagcggggcccagagagccgcagactggccagccccgcgccccgctcctcccagctcggggtttctgtccccacgcgccccctccatactcacgccagctctgcccggcccggtggttccccgcgcggggctctccgtccgggccccctgctggcggcgccccgggcagaggggcccacgaggaagggtmtcggggtgcgggcagccctcggccacagccccggctcctcgtggccaccgtgtccggggtgcgccagggagccgctgggc

SEQ ID NO: 840282 - DNA, 518 bp, Homo sapiens
gatgagaatttccatcagataatcactgatgatgttacctgggatgtgtctcttccctgcaactcgaaagattgcaactaacgtcttttgtgggctctgcttggaaaatattaattcattatctcagtattgctgcaacatcatgctctctctctctccactccatggataggataatgcctaacatagagtaggtatggtggatgggagggaaagaaagaaagaggggttgaggggaggaatgagaaatgggctttgtcctttagagaggaaacaggaaatgagcaaccagcccacagcatagtaagatagatcttataatctgaataatggttgaaaaggtgtttttttttttaataacttacattatatggtgaatacagagccaaatttggggrtttagctgtggttccagaatcactgcctaaagacaagtcccacctttgatcctcaaggttgccagcagcaatgtctgattgccaatatgggggagccttcagtttattgggcagtagggg

SEQ ID NO: 840283 - DNA, 597 bp, Homo sapiens
gaatgggttctaaaccatcaatgggatccaatccaataaatagaagaggcacatcaaaacagcgtgatttcacaaaaggagtgaccttcctgggacagacagaaaggtatcagagacaaggcaaagtttgtattctgttgtaaagggtgagcggcctctcctgggttgagcagttttcttgagttgccagggctttgatccttgttcacgtttatgacctcgtgtcttcagcatctagtttcagttcaccccttctgcttaccttctccctggtcatgtttcttccttcttccagctcccaaacttgacctctgcactctgaaatccaaatacaggctctcaacctgtctctcaggtttcaatacctattctcgtgccctgttctgtctcagtaattgaccctctcacatctgctcaggcttcagccatgagagtatctattgactgggccagaattttcttcagaaaactgatctgtgtccrttccaatagctttgcaggcccctaggtttagccactggaaacagtggtcactgctattagagaactagttcctaagcataaatactattgctagagtttccctgtactttaaaa

SEQ ID NO: 840284 - DNA, 570 bp, Homo sapiens
ctacttagacttttgctgtatcttctctgtgaccagtgtcatttyaaaggatattccctatttggggtcacaaaacagataaaatttatctggctcattcatgacatagctgcagttactggtgtcatgggttgaatggtgtccccccacaaagatatattaaagctctaaccgcctgataactcagagtgtgattttatttgcataaaagtttgttacagatgtaatcagttaagatgagatcaactggaggaggaggataactggtatgcttataagaggaggaaaatttggatacagacacagacacagagggaaacagccaagtgaagactgagactggaattgtgctgccacaagccacgcaatgcatggggctaccaggagatgaaagaggcaaggaagaatcttctagaggcttctggaagggcatgggcctacagacatcagaactatgagacaataaacttctgttgttctaacccacccagtttgtattactttgttttgcagtcctaggagatgaatacacctacattttagtgacatttccataccttagatgaataa

SEQ ID NO: 840285 - DNA, 588 bp, Homo sapiens
atgcacatccttgtgccaggagctatgggaaacttaaaataagccttggccctgcccttcacattttttttttttctgagacggagtctcgctctgttgcccaggctggagtgcagaagtgcgatctcggctcactgcaaactctgcctcccgggttcacgccattctcctgcctcagcctcccgagtagctgggactacaggcgcccgccacaacgcccagctaatttttttttgtatttttagtagagatggggtttcaccgtgttagctaggatggtctcgatcttctgacctcgtgatccgcctgcctcagcctcccaaagttctgggattacaggcgtgagccaccgcgcccagccctgcccttcacatctaaagagttagaaacctatctgaatctacccattccaccctgaaggtacactcccatcatgaattcctttcctcactcaggagataaaccaagtaaaatagcttgartgtcatttaatatgaaaatttttagtcataggctctcttaaaaattatttactgttactttaccatttttattctctatcgaataacatgacattaagcactagta

SEQ ID NO: 840286 - DNA, 777 bp, Homo sapiens
cccttaggaattcccttaggagaactgccctgtctctctagcagcctttaatattttttctttcattgcaatcttggaaaacctgacgattaaataattatacgtcttgggtatgaaatttttgtgtagtatcttgcaagggttctctttatttcctgaatttggatgttggattctctagtgaggctggggaagttttcatggataacatcctgaaatgtgttttccaaattgcttgctttctccccctctcttttaggagcactaatggtctatagatttagcctctacataatcccatacttcatggaggttttgttcattcattttccttcttttttttttttttaattatctgattgtcttattttagagagccagtcttcaagttctgagattctttcctcagcttggtctattctactgttaatacttgtgataatattgtgtctggagttggttccttctggtgggtttgtggtcttgctgacttcaaaaatgaagccgcggaccttcgcggtgagtgttacagcccttcaagatggcacggacccaaagaatgggcagtagcaaggtttattgtgaagagcaaaagaacaaagcttccacagtgtggaaggggacctgaatgggttgctacttctggctggggtggccagcttttattcccttatttgtctgctcccatgttctgtttctgccctattagaatgyccttttttcaatcctccctgcgattggctacttttgggatcctgctgattggtgcattttaca

SEQ ID NO: 840287 - DNA, 534 bp, Homo sapiens
cccacggcccacaggctggaggcaatccaggatggctttgaatgtggcccaacacaaacttgtaaactttcttaaaacattatgagattttttttttgtatttttttaactcatcagctattgttggtgttagtgtattttatgtgtggcccaagacaattcttcttccaatataacccagagaagccaaaagattggacacccctgttttagaggaatggaaagtaatggggcagtacctgtagggaaaagaagggttgtttatctcattaatgaaagaagtgttatattttatactgagggagaaaattcagtaaaaaggaaaaaaatgattaggcagagggaatagagagttttttgggttgtatttttgatcaagtgggaggtaataagatctaatggaggagtaggtgtattgttcttaggaagagyaatgatattccattaatgggagcaggtgaaaaggcagggaatatgagacagatgcaattggttggctaatgtgatagtaggaattttggaagctttattttc

SEQ ID NO: 840288 - DNA, 534 bp, Homo sapiens
cccacggcccacaggctggaggcaatccaggatggctttgaatgtggcccaacacaaacttgtaaactttcttaaaacattatgagattttttttttgtatttttttaactcatcagctattgttggtgttagtgtattttatgtgtggcccaagacaattcttcttccaatataacccagagaagccaaaagattggacacccctgttttagaggaatggaaagtaatggggcagtacctgtagggaaaagaagggttgtttatctcattaatgaaagaagtgttatattttatactgagggagaaaattcagtaaaaaggaaaaaaatgattaggcagagggaatagagagttttttgggttgtatttttgatcaagtgggaggtaataagatctaatggaggagtaggtgtattgttcttaggaagagcaatgatattccattaatgggagcaggygaaaaggcagggaatatgagacagatgcaattggttggctaatgtgatagtaggaattttggaagctttattttc

SEQ ID NO: 840289 - DNA, 534 bp, Homo sapiens
cccacggcccacaggctggaggcaatccaggatggctttgaatgtggcccaacacaaacttgtaaactttcttaaaacattatgagattttttttttgtatttttttaactcatcagctattgttggtgttagtgtattttatgtgtggcccaagacaattcttcttccaatataacccagagaagccaaaagattggacacccctgttttagaggaatggaaagtaatggggcagtacctgtagggaaaagaagggttgtttatctcattaatgaaagaagtgttatattttatactgagggagaaaattcagtaaaaaggaaaaaaatgattaggcagagggaatagagagttttttgggttgtatttttgatcaagtgggaggtaataagatctaatggaggagtaggtgtattgttcttaggaagagcaatgatattccattaatgggagcaggtgaaaaggcagggaatatgagacagatgcaattggttggctaatgkgatagtaggaattttggaagctttattttc

SEQ ID NO: 840290 - DNA, 669 bp, Homo sapiens
attacttcattttactagggactgaaatgctgaaaaattcctatgtacacaatctagaattttatttgaaaaaaaattataaattatatagtttgatccgtyactttaaaaatgagaaaattaaaattcagaaatagtgatttgtttatgcactctaacttcaagcctgctggcatttaacctgttgctctttaaacatattaatttaaaaatcagctctaatgatttttccttattttacatggaaatagagaatactcatttaatgcaagtgtacacataagagaaaatccagattcataaagcctttgattgaatttatatttatctaactttgttaatttttttaagtaaacctcaattttttaattattctattggaaaccctttaacaataataaccaaaattctaatctaggctgtatgtgtccctgaacaaccatgatgtattttggcatttaaatgttctcactgctttctccttctggtgcccaaatttgtatcaaagctgaccatctcattagacctgaagatttaggtgtttttttaattgttattttttaagttctgcgattcatctggggaaggaagcagaaagaatacaagggtctctcacctgctccctccctggtgtccttggtctgccttagacaggcttccacctgagga

SEQ ID NO: 840291 - DNA, 625 bp, Homo sapiens
gtaatagagtatctggcatgggccaaggcctcaggtaagcaaatacaccctatcaggcagaaggtcaacttgctgagttaatcctttattgccaccggtggaaaatgaattagtttgttgtttatgagattctaaagaaatttttacttgctttaattacttcattttactagggactgaaatgctgaaaaattcctatgtacacaatctagaattttatttgaaaaaaaattataaattatatagtttgatccgttactttaaaaatgagaaaattaaaattcagaaatagtgatttgtttatgcactctaacttcaagcctgctggcatttaacctgttgctctttaaacatattaatttaaaaatcagctctaatgatttttccttattttacatggaaatagagaatactcatttaatgcaagtgtacacataagagaaaatccagattcataaagcctttgattgaatttatatttatctaactttgttaatttttttaagtaaacctcaattttttaattattctattggaaaycctttaacaataataaccaaaattctaatctaggctgtatgtgtccctgaacaaccatgatgtattttggcatttaaatgttctc

SEQ ID NO: 840292 - DNA, 483 bp, Homo sapiens
cacttcttagaaaaaatagaataaggagttttttcctctccctygagtttcctgcattaattacagtaagaggcaggagagggaaagaatacattgcaaatacagaatttcttaagccataagctgctgaagaagatactgtgagtaaatttgatctttgactaataatttctttaaaataccttgagttcctactgaatttatttgtattttgaatcatatccttattgtctaaagcaatcactatatccagtcttgtaatagagtattcaaggcaacaaattgtccacagggagattatctctgtggattaaccatagcaaaatctaaattcggggtcaacttcctcttgctactattccagtcactgcactatctcttggtgactcacagttgtatatgctaggagctttggttctcacctatggctgtaccttagaatcaccaggggaactttaaaaagaagttcttatggctgggtcc

SEQ ID NO: 840293 - DNA, 494 bp, Homo sapiens
attgcctggggctgacagggtggggaagaaatgaggaatgactgctaatgggtatggaatttctttgggggatgatgaaaatgttctaaaattttatctgtaaatatgtttaaagctattgaattatacttcaaaaaagggagttcattacctgtgcacacaattacttaaaaaaagagaatattgacaaagagacagcagttactttaaaaagaacccaataaaaattctggagttgagaagtacaataactgacatttaaaattcactagaaggactcaatagcagatttgagctgacagaaaaaagcatcaatgaacttgaaaataggtaaattgagatcatccagtctgaggagtagaaggaaaaccaaatgaataaaaatgaacaaagtatagtgtgggggtggggggagtagtttwaccaaagtgtggagaaacctgacaaggtctgcatcaacactgttaagccatgttgatactatgtatttttga

SEQ ID NO: 840294 - DNA, 636 bp, Homo sapiens
attgttttatatggtgtgaggtaaggatccaccttaattcttgtatacgtggatatccagttgtctcacttaacagtgtttgagagactgttgttttcctattgaattgtcytggaaccctttttgaaaatcagtttactatattttttggggttatttctggactctcggctgtatgtccatcttgatacagactcttgatctgtatgtctgtccctgtgccagtaccacaccattttgattgctgtagctttggttttatagtaagttttgaaatcaagatatatgagtcttctttgttttaatttttcaaaatccttttgcctatttgggatttcttacaattccaactgaatgtaagtatcagccttcctatttctctaaaacaggccactgggattctgatagtttttttattttattttattttattttattttagtctagtcaagtgaaccagtgggagtggagaaggaacaaaataatctgtaatggttgtaatcaaggaattttttttttgatgtaccattttgattcccttctcattccctttggattatatttttaaatgttttcttagtgattataatgattacaattaacatcccaaattgataacacttttgaattgatacc

SEQ ID NO: 840295 - DNA, 577 bp, Homo sapiens
cacgcctggctgcagcccgggcactacggccttggcccttgctgagtctgcctcggctgcctctggcaggcccttccggtcttccctggtgcctgctctccctcccctgcatttcctccatcagcactgcttccccatgtgtgtggccacactgctcctaggtgctgtcttctttctcccctgttgctgcagtgacaggtcatcgctgcttataaccaaggtgtgcacctgtagctggagcgctggagccacacggagtggcagctgtgatttcagcagaggttctctggcgccctccgatggtgcttgggcaggctgatgggggcctcactgttgtctgtaaaagtttaaaaagaaaaacacttttaatagaaaaatttacagaataaggatataaagaaaaatatttttgtacaactgtgcaatgtgtttttgttttaacctaagtgttattacaaaaagactcaaaagttttaaaaaattaaaaagtaaaaaagttacagtaagctaaggtatattattgagaaagamaaaatttttatatagatttagtgtggtctaagggtctcttgagccc

SEQ ID NO: 840296 - DNA, 577 bp, Homo sapiens
cacgcctggctgcagcccgggcactacggccttggcccttgctgagtctgcctcggctgcctctggcaggcccttccggtcttccctggtgcctgctctccctcccctgcatttcctccatcagcactgcttccccatgtgtgtggccacactgctcctaggtgctgtcttctttctcccctgttgctgcagtgacaggtcatcgctgcttataaccaaggtgtgcacctgtagctggagcgctggagccacacggagtggcagctgtgatttcagcagaggttctctggcgccctccgatggtgcttgggcaggctgatgggggcctcactgttgtctgtaaaagtttaaaaagaaaaacacttttaatagaaaaatttacagaataaggatataaagaaaaatatttttgtacaactgtgcaatgtgtttttgttttaacctaagtgttattacaaaaagactcaaaagttttaaaaaattaaaaagtaaaaaagttacagtaagctaaggtatattattgagaaagacaaawtttttatatagatttagtgtggtctaagggtctcttgagccc

SEQ ID NO: 840297 - DNA, 644 bp, Homo sapiens
gaaacatagaactaaccctggatcctacacaatccatgacaagtctcaaccatgagaaccatgaccaggggcctccagtaatctttgatgttcttccctattcctgggttaaagatatttttgcctggaatgtactgattttatctattcttaagtaaaatccctttctgttgattatattctgtctttgagtgaaatttgggaagtgggctattatggagagaagacattttaagaacagtgagtgtggtgaatatactttagatacccttgagaagcagccacgcccgctctgcgcttcctctgccttcatggctggggtggcagttcactgcctgccagcagctgctgttggttttaggattggccagattcagcccagcaaaaccatgttttcgtgtgagagtaagtttttccttagatgggtattggtggcggaggggttaggcagaagaatttcattaccatttcattggtaatgtagatagacttaagcttttttcatgtttactttctctatgggctaccttatgaaactcccakctgcctgtagtcctggagttttttgctggaatttttctgggtgaatttaattgtcttctgaatcatttgttatccttacaactcccaagctccacagagcc

SEQ ID NO: 840298 - DNA, 510 bp, Homo sapiens
ttttttaactgacagctaaacttgtatatgtttattgtttacaacatgatgttctgaaacacatattcattkcagaatggccaaaccaagccaaccaacaggcatacgcatcacctcacatttgtaatttttgcagtggaaacacttaaaatctactgttttagcatttttcaagaaaacaacatattgttattttatttttattttttgaggcagggtatctctctctcacccaggctggagtgcaatggcacaatcacagctcacttcagcctcagactcctgggctcaagtggtcctctctcctcagcctcccgagtagctgagactacaggtgcgcaccaccacgcctggctgatttttaaactttttgtagagatggggtctcgttattttgccctggctggtcttgaactcccgggctcaagcaatcctctggcctcagcctctcacagcactgggattacaggcatgagctaccttgcccagccaatatattggtcaccatgt

SEQ ID NO: 840299 - DNA, 250 bp, Homo sapiens
cttttggctatatgcccagtagtggaattgctagatcatatgctaggtcatatgctaaatttttaaattttttgaggaatctccatactgttttccacagtggttyccatgatggctgtactgatttacattcccaccaacagtgtgcgaatgtcccttttctccacatcctcaccaacacttaatctttcatcttttttcaaatagccattcggacaggtatgaagtgatatctcattgtcaatttttt

SEQ ID NO: 840300 - DNA, 439 bp, Homo sapiens
tttttttttttttttttttttgagatggagtctcactttgtggcccaggctggagtgcaggggcgcgatctcggctcactgcaacctccgcctcccaggttcaagtgattctcgtgcttcagccgcctgagtagctgggattacaagcatgcaccaccacgcccagctaaattttttgtatttttagtagagacagggtttcaccacgttggccaggctggtctcgaactcctgacctcaaatgatccacccacctcggcctcccaaggtgctaggattacaggcgtgaaccactgcacctggccaggcctgctcacactttcagctctgtctcctgcactcarggagaccactgggctctgctcggctgccctcctcccgcagcagctggaaacactttgcctcattggtttctcccctaacagagatcacggtcttt

SEQ ID NO: 840301 - DNA, 584 bp, Homo sapiens
ataagtaattgatgagggaaatttagatatggcctccagaatttgtattatataagtttggttcactytttcgggtgatggtagtattgaaagcattaggcttttcaacatttcaaaagcagaatacaattttagctgtgtatcagtaatttagacttgtcaggagggaaaataagattcataggcggtatgtggtgtatttggagggtaacgaggcccaattttattttaatttaagcaacttcaagtgatagttactttcagtttctcctttgttattatgagaagtcataacattttccaaatacttgtctatgcttagttctgtgggaaaacaccctaaagtctggctatgcctactaagagttgaagtattacttccttaaagtcatgaggactcaccaccagcaagatctttgtcctgttggagcatctcttcagtcttttgcctcttttcactgctgttaacacccactttaattcagctcttgttacttctcacctcacagcaacagccccttaattcatcccattcctcctcacaccccacccacaatatactctgaaacaagatgaatattctg

SEQ ID NO: 840302 - DNA, 616 bp, Homo sapiens
ctaagcttcaattttttaaaaaaaaaaagattaatttttacaagtcagcagttgtcctatstctaatactctcctgtggtctaatttctgacaagtgtgaagattagagccagtagggaatataattaaggtacttgctgaaaacattttatcttaaaactgtgaactatgaagattttagagaagaattttcagtagatttaaaaattaatagaaaaaaatttaactgaatttttattattaaagctctagaatatgactcatacctctataggtgtctgtgatgtttggcttctgaaaacactgtgtgttaccagaggggaatcttggtctagaacctccttgccttcaaagctgagaaatgaatagtgaagaaccccttttctgtttaggctgtggaaagttgttagccagctggtgggtaaagtcagatgagcattattcctgggagaaggcgggttcctgcaggagaaagatttcaccaatccgttgttcactttcccctttgagttatgcctcttgcagttttctacctgggtttaaaatgaatccacctggggcattaccctctgcgtggccttagagccagtaggaggatgaaattatccttccatag

SEQ ID NO: 840303 - DNA, 351 bp, Homo sapiens
ccatgattctaaatttttaaaagaaaaattgttaatattttataagtgacaacagaaatacaagtctgaatgctagcaatgtttatatctggttaaggagttgggaggtgatttgaaggttttgtatcttttatattaatttcccaaaatttaaaaaatcgatgtaacatatttaaagtagacattttgataaaaattaattgtatgtctaagtgaaagtctcaaacatatttgacatatttaaacacattttgtaccaagaaaattgtwctatttccaagagattaaacctgggataatattagctgactttaaaatcctttgagaattgaaagctggcctccaacagga

SEQ ID NO: 840304 - DNA, 435 bp, Homo sapiens
tcatgtgtcactgatctgtgtacttcagtgtgtttttgtatggctggtaataacttttccttttcatatttagtgctttattcaggagctcatgtaaggcaggtctggtggtaccaaattctgtcagcatttgcttgtctgagaaggatcttatttccctttgcttatgaagtttagtttgtccagatatgaaattctgggttagaaattcttttctttaaggatgttaaatattggcccctgatctcttctggcttgtagggtttctgctgagacatccactgttagtctgatgggcttccttttgtaggtgacctggcctctctctctggttgtccttaacaatttttyctttcattttattcttgtagaatctgatgattatatgacttgaggatgatctttttgtgtagtatcttactgagactctctgca

SEQ ID NO: 840305 - DNA, 384 bp, Homo sapiens
acctcccaaatgcaaataatctgaagtggaactcttgattcactttcttacccaaatcatcccactacttacatgcttccctttcagtctgtctcctgtgtwtcagtaaacagccttactatctattgatccagcagaaaactttcattcttccctttctggtggaccaggctagctataggaagaaaaaaatatcctcaatattgtaaaatattctccatagtgatcttcccaaaccaaagttacaccaaggtaatcatctgtctatattctctatcatagtactgtttattccactgtattgatttttaaaattatttgtgagttttatttttcaaagggcctgagcttcttgagttcaagaactgtgtattttaggtatac

SEQ ID NO: 840306 - DNA, 312 bp, Homo sapiens
tccttctactcttttttcttctccttgatttacttttttaaaaaaattatggtcgtcttattgactaaatcttcaaatagatagatttcattatacactcttcttggacaatcttatctgcattaatatctgttttatatatattatatatacagataccatatatatatatatatatatctgtatctcatatatacagatagttcttgctttgcctggtgccgtgttaactgaaacaggtgcatattggaaccatgtgtttgttttgtgcggttwaccataaaaccatgcaaagtaaggacacatttccta

SEQ ID NO: 840307 - DNA, 441 bp, Homo sapiens
tatacagataccatatatatatatatatatatctgtatctcatatatacagatagttcttgctttgcctggtgccgtgttaactgaaacaggtgcatattggaaccatgtgtttgttttgtgcggtttaccataaaaccatgcaaagtaaggacacatttcctacatgtacaatatttggttaataagataccatgaaaaatgaggactatcttcattaattatatactccatctttattctgatccctacacctgaatacatagttttctaccagttatctccactggttttccaaaggtctttttcaaatttatwtgtccaaatataactttttcagcctccatcgccagtcctcctggccatattctctatcacaagtaattagttaatcaacagaaaattattagtgtatattattcccaggcactatgctagatac

SEQ ID NO: 840308 - DNA, 513 bp, Homo sapiens
aatgttcagtctgctcacaattaactagatatgctattaaaattagataaatggcagcagaccctgaaccttcttctagaaacattgggaaaaagaacctctccmtactggttttgcttatctgtgaatatgtgagtttggagccttctggggccatctttgtatgatgaggaaaacagagtcaagtggtcaagaaaatcaaatttctgatgccatttaaacttttggactaaactgtgcttgagactaaatttcctctggacttattaattatatgattcagtggttttattaattatgccgattttattttagtcctttatcttccaactgaatgagtttttgttaatcttaaatttagtgagaacacatcaattcagtattcaagtgtttttcagatgttcatataaaaaatatatactgacagccctgtatccaccatcaattttatgacatttgcatcaaatatattttaaaacacaaacagaaactaaatattacaggtaaaaattg

SEQ ID NO: 840309 - DNA, 426 bp, Homo sapiens
aatgtacattttgtgttgttgagtggaatgttctttagatgtctgtcaggtcaaattggtcagattaagtccagagtttctttyttagttttctgccttgatctgtctaagctgtcagtggggtgttaactttttcccacagttattgtgtggctctctacgtcctttaatagattaagaagaacttgttttatgaatctgggtgtactaatgttgggtgcatatatatttataataggtctttttattggatcattatgtaatatcttctttgaatcattatgtaatatcttctttgtccttctcattttttattggtttaaagtctactttatctgatgatacaggagtaacaactgctctgtttgttgttttccatttgaatggtagatctttctccctccctttaccttgagtctgtaggtg

SEQ ID NO: 840310 - DNA, 508 bp, Homo sapiens
ggaagtggcctattctatgctcttataakcctgggagaattctgtttttctgttgttataattgacttattggggtttgaaggtgctaagcatgggaaaacttatgttcctgaataagatattaaatttcttagctttggttctttttagaagatacagttaaactgcagggaagtgatttttcaaattatgccatataaggtgattttagtggtctttaaaacacatgtggtagattttaaatgcctcaaataatctagacttgtgattctcagtttggctgtacagagagtcgcctggggagagtggggtggtagtgcttttaaaaatgcagatgctggagtccccttagaccaattaaatcagaatatccagagatatgaccagaatatctgtacttttaaaacgcctcagatgatcctaatgtgcagccagtgttgagcttctgatgtatgaacaaaaatataaaaacctttcacaagttgccctctgaaacttgacatgaaat

SEQ ID NO: 840311 - DNA, 449 bp, Homo sapiens
tgcgtctcaaaaaaaaaaaaaaraaaaaaagattgttacatataactacataaaaaatttcaagttttatatgataaaatattctggaaaaaaatttccactgacctacattgtagaaagaattccttttctttttcttttcttttttttttctccagagacaaggtcttgctctgtcacccatggcatcctggagtgcaatgatacaatcttagctcattgcagtctcaaaatcctgggatcaagccatctttctgcctcaacttcctgcgtagctgggattacaggcacatgccaccatgcctggctatttttgttttctgtagagacagtgccttcactaggattttaaaaatatataaaaaccagggtcaaaacccttacttgcaaagaatttctttaattttaaataagaaaaggaaaccaatctaatggaaaaaataaaatgg

SEQ ID NO: 840312 - DNA, 560 bp, Homo sapiens
agtttcttgccttttagggtgaggctcaatttcccccactggaaatttcttgccttttctactactggagrtttatgtgaggttcaatcccccccagtggggatgtcttgcctctttttaacctctaagccaccccgaccaaggagtacttcaccacaccccacccccacggcttttttaccttggttctgacccaggaaatactttactggctcccatggcttctccttccttggtctgtgcacagagtcatcaccgcagtatgtgaggatcctttaagctaggttgctggccagtttttttttcttttttccatgttgctgagagctcaggctattccttgcattgggtgggtcttgatttctcactcctgaggccaccaaaggggacagggtgcacctcctcacgagagagaaccagagaccacccccggaggggaatgtaatcaagggcaagtctccaaattgttatatataaagattcggtgctgcaaaagaaatagcactcgaatataaaattttctttttaattctcagcaaggcaatatacttctatagaag

SEQ ID NO: 840313 - DNA, 637 bp, Homo sapiens
gcacttgaaaagatgctcaacatcattagccatcagggaaatacgatttgaaaccataatattttcaaaaagttaggagatttttaatggtcgcaacacaaagaaaagatgaacgtttcaggtggtggacatactaattacctgatttgatcactacacattgtatacatttatcaaaatatcactctgtagtccctaaatatgtacaattattacatgtcaacgaaaaagaatgaaaacacaatgacacacacttcacacccactggaatggctagaatcagaaagacagataatgacaagtgttggcaaggagtgagaaatcaaaaccctaatacactactggtgcgaatgttaaaaagatgcacactgatgctttggaaaacagtctgaccatttcttaaaatgttaaacagagctaccatatgacccagccatttcactcctaggcacatacgcaagagaaatgaaaacatgatgtccacacaaaaagttgtaggtgaatgttcacagcagcattacacataatggccaaaaggtggaaacaatccaaacgtccactaactaatggaaaataaatcrtggtaatacccataaaagattaaccagcaataaaaaaaagtactgacacatgctat

SEQ ID NO: 840314 - DNA, 305 bp, Homo sapiens
gggcagagctacagccacccaaactgcagctgtggatccgagcttccctgtgctcttgggggagccaggaacaggaaggatctgccctcccaggtgcagctgcagctsgccatgcccacggctgcagacgtggcctcctggctccaggaagcaggcaggagctgaggatatgcaggagccctgctccgtccaagatggcagggtgggaactcccaggtgcagctgtggctgccccctttcctcccccaacccccaacattcctgcagccttgggggtgtcttatcctgctgcctggcctctctcc

SEQ ID NO: 840315 - DNA, 305 bp, Homo sapiens
gggcagagctacagccacccaaactgcagctgtggatccgagcttccctgtgctcttgggggagccaggaacaggaaggatctgccctcccaggtgcagctgcagctcsccatgcccacggctgcagacgtggcctcctggctccaggaagcaggcaggagctgaggatatgcaggagccctgctccgtccaagatggcagggtgggaactcccaggtgcagctgtggctgccccctttcctcccccaacccccaacattcctgcagccttgggggtgtcttatcctgctgcctggcctctctcc

SEQ ID NO: 840316 - DNA, 617 bp, Homo sapiens
cttaaaatacagatgcttgcctggcacggtggctcacgcctgtaatyccagcactttgggaggccgaggagggtggatcctgaggtcaggagttcaataccaacctggccaagatggtgaaacccatctctactaaaaatacaaaaaaattagctgggcgtagtggcgggcgcctgcaatcccagctattcaggaggctgaggcagagaattgtttgaacccaagagacggaggttgcagtgagccgagatcacgccactgcactccagcctggacgacagagtgagactccatctcaaaaaaaaaaaaaaaaaaaaaaaaagagagagatgcttgtctcccactctttcaggttctggtctgaggtttggatgtaggtgtgcagactcttagtggacattgtaagggctgcaggggatccacagttcacactgaggaacccactggtggaagccctgggcctagctcatgtccctaatctcaaaaatagctggtagcctcatctttctggcccatgggatgaccagtgtttttataaggcagccaagaaagcaggaaaggggctagatgtggtggcatcatcttgagttttgtaccctgactcaggcctccatctt

SEQ ID NO: 840317 - DNA, 605 bp, Homo sapiens
tcactgggtagtacctcccaactggggtctccggccacctcctacaggtgcctttgagccagcaacaggcctgtatctttctgggtcgaagctcccagaaggagggacaagctgccatttttgctgttttcagccttcactgttgatacttctaggtactggaaaatctgaggcaactagggactggagtggtcctcaagcataccacgggagccctatggaaagtggccagactgtgacctgagtcccctttcccatatcccctcactgggcaagtcctccaggtctgggcttcaagccaccgccactgctaaagttatcaagccataccaactcagaaacagcctcgacagagtctctaggggcaattgaaagcctctctgctactgcatctgctgtggaactgcccctgccacccttggactaacaaaggagtgaaagataagtgccttattcacacctccaacaaagtgcagttaactcaaggagaagaggcaagtccatctctcacgggcccyacacacttcccactgcttgtcacaggacagggaacccctggttggacccacaccacagacctttcattctgggctgattgcattgag

SEQ ID NO: 840318 - DNA, 512 bp, Homo sapiens
ggaccttaacagtgttctgaggatcctgcacatgctccagggttgcatcaacatccagggcaaccaccaacccagagttaaacygcaaagggttgtctgactcgcccgctggctcaatgatggtggctgaggctttgtggatctgtaagccagaggaaaatcctatgattctaaagccaggtcattcctggacaagaaaacacatcttttttctgtctccttatctaatgagtgggcatgtgggagccactcagaggaagagcctagcccagctgctccattggtcaaagaagatcaccaaggtaaagatttttgaccgtctggacagatttggcctacaggggccaaatagaccctgacctgctctggaagtgggagatgcagaaaggcactctgtcgcagcatggtctgtagaattttgaccacttctgcaggtttggatgtcatgagtcggggcataaggtcaaggagtttgtccacaaagctgtcctgcaagtggggcaaatcagcga

SEQ ID NO: 840319 - DNA, 432 bp, Homo sapiens
acctggaccttaacagtgttctgaggatcctgcacatgctccagggttgcatcaacatccagggcaaccaccaacccagagttaaactgcaaagggttgtctgactcgccygctggctcaatgatggtggctgaggctttgtggatctgtaagccagaggaaaatcctatgattctaaagccaggtcattcctggacaagaaaacacatcttttttctgtctccttatctaatgagtgggcatgtgggagccactcagaggaagagcctagcccagctgctccattggtcaaagaagatcaccaaggtaaagatttttgaccgtctggacagatttggcctacaggggccaaatagaccctgacctgctctggaagtgggagatgcagaaaggcactctgtcgcagcatggtctgtagaattttgaccactt

SEQ ID NO: 840320 - DNA, 498 bp, Homo sapiens
agtgatttggcctcagcagcagcaaaacaggtaagcttattcagaccttcccttcaaacaggtctctgtccaggaattgtctggtccaaggcagagcagagcgcttcctatagctctgtctctgtaggccttgcaggaaaagttgtggcatgtagctgcccctttgtatttgaagcagagtgatttggcctcagcagcagcaacacaggtaagcttattcagaccttcccttcaaataggtctctgtccaggaattgtctggtccaaggcggcagacggccttcctgtagctctgtacctctgctgtggcctccctaattttaggctatgacagaagttagtgatatgagaaggagcataactaggggacrcagcactcactgtggactcaggggacctgggtcctagtcccaggtcttcctctgatatgctgagtgatattgagcaagttacttaaattccctggattttttctcttctataaaatgtggcagttgg

SEQ ID NO: 840321 - DNA, 498 bp, Homo sapiens
agtgatttggcctcagcagcagcaaaacaggtaagcttattcagaccttcccttcaaacaggtctctgtccaggaattgtctggtccaaggcagagcagagcgcttcctatagctctgtctctgtaggccttgcaggaaaagttgtggcatgtagctgcccctttgtatttgaagcagagtgatttggcctcagcagcagcaacacaggtaagcttattcagaccttcccttcaaataggtctctgtccaggaattgtctggtccaaggcggcagacggccttcctgtagctctgtacctctgctgtggcctccctaattttaggctatgacagaagttagtgatatgagaaggagcataactaggggacgcagcactcactktggactcaggggacctgggtcctagtcccaggtcttcctctgatatgctgagtgatattgagcaagttacttaaattccctggattttttctcttctataaaatgtggcagttgg

SEQ ID NO: 840322 - DNA, 645 bp, Homo sapiens
tctcacatccgtaaatggttttatattttgtggctatctgcaattatatttaagggcgagtattataccaccatttgtttcacatccaacttggagcattttgtatttgtgtatacatataaggttagtcaggagtgagagataggattaaactcatctagtttgcgtgccctttctcagtcacaatgcagtctttacaaacaatttttcctttaacagaaaaactgaaaacatgtctaaaaaaataatttgccttaagacaacccttctaggaaatggcgaagatctgtttcaaacccaggcctgcctcatgccaaagcctgtgaccttttcactattaatgaccaaatggttgaatgactgttaaataagtctcttgggtaaaacataaacgtgcctgataccccttcattaaaatgtttattagataaataaataaattggtggacggagctcaatataatcagctcatttgcctccacaccaaaagagaacattttcaaatgaacatgcaggaggaatacatgattacaaaaatgcttcagcaatgattttgcttttataggattactcrtcccaagttcgatagtcttaatgcacatgcaatttgcttgaagtctataatgcccttgcatttcaagctga

SEQ ID NO: 840323 - DNA, 402 bp, Homo sapiens
tgttgggattacagtcatgagccaccgtkcccagcctgtcttttctttccaaagccacccttggtgattaaatgttaaatatgtactagtggatattactttgctgaatattgcctagtgaatattaagtatttattctcaccttgcagacatgaacttgtgaattcaacacgtgaagatttacaacttgataaaccagcttcaggaggtaggtcttcagtcttaagtcagattagaagattatgtgaaataattatttaatgcttaacattgattttttaatggtatcttccacatgaaataatattcctctaacatttaattacatgccaggacaggagaattcatgttgtcaaaattctaatactctctagaacagtaaactcattttatttgtattaa

SEQ ID NO: 840324 - DNA, 459 bp, Homo sapiens
gcccagctaatttttgtatttttagtagagacggggtttcaccatgtcggccaggatggtctcaatctcttgacctcgtgatccgcccaccttggcctcccaaagtactgggattacaggcgtgagccacaaaagttaaaaattttcaataaatgtgctgagtcctcaaaaagaaaacagaaaagtaccaggctaaaagatgcaagatcaggatctgacctcactctacaattttctgtctgtataagctggataacttacttaactcctcagagccttagttttctcatctagaaaatgataacagcatttaaaaaaaattttttwaaattttattttttgaaaaatagagatgggatcttggtgtgttgcccaggctggtcttgaactcctgggctcaagtgacccacccacctcggcctcctaaagtgctaggattatgggcatgagccaccatgc

SEQ ID NO: 840325 - DNA, 459 bp, Homo sapiens
gcccagctaatttttgtatttttagtagagacggggtttcaccatgtcggccaggatggtctcaatctcttgacctcgtgatccgcccaccttggcctcccaaagtactgggattacaggcgtgagccacaaaagttaaaaattttcaataaatgtgctgagtcctcaaaaagaaaacagaaaagtaccaggctaaaagatgcaagatcaggatctgacctcactctacaattttctgtctgtataagctggataacttacttaactcctcagagccttagttttctcatctagaaaatgataacagcatttaaaaaaaatttttttaaattttattttttgaaaaatagagatgggatctwggtgtgttgcccaggctggtcttgaactcctgggctcaagtgacccacccacctcggcctcctaaagtgctaggattatgggcatgagccaccatgc

SEQ ID NO: 840326 - DNA, 459 bp, Homo sapiens
gcccagctaatttttgtatttttagtagagacggggtttcaccatgtcggccaggatggtctcaatctcttgacctcgtgatccgcccaccttggcctcccaaagtactgggattacaggcgtgagccacaaaagttaaaaattttcaataaatgtgctgagtcctcaaaaagaaaacagaaaagtaccaggctaaaagatgcaagatcaggatctgacctcactctacaattttctgtctgtataagctggataacttacttaactcctcagagccttagttttctcatctagaaaatgataacagcatttaaaaaaaatttttttaaattttattttttgaaaaatagagatgggatcttgstgtgttgcccaggctggtcttgaactcctgggctcaagtgacccacccacctcggcctcctaaagtgctaggattatgggcatgagccaccatgc

SEQ ID NO: 840327 - DNA, 523 bp, Homo sapiens
accacagttccactcctaggtacattctcaagagaattgaaaatgtgcccacagaagcctgcgcacggatgctcatggcagcattatttacagtagccccacagtggaaaaaamcaaattctgcatccactgatgaatgaaagtgtgatacgttcacaggatggaatattactcaactgtgaaaaggaatgaagcaatcacagtcgaggaggaaccttgaaaaagtaacaaaagccagacacaaaaggtcacatgttgtgtgactgcatcctatgaaatgtccattacgggcaaaaccatggaaacaagaagtagcttagtcgtcactggggacgggagaatggagagttaccgtttaatgggtgtagtgtttcgttttggggaagtaagaaggttctggaattggtgatggttgcacaaccttgttgatatactaaaagctgttgggcgctgtggctcatgcctgtaatctgggcactttgggaggctgaggcaggaggatcccttgagccaggagttcaag

SEQ ID NO: 840328 - DNA, 664 bp, Homo sapiens
agttcataaaatggatctcttctcattgaagcaagattcatagtccaagcgttcctttctcacttccactcccatcccactgctacccccagtggcaacatctttgagaaatgtttctggatgtggggaacacagttagaataataccagaagatattcctaacacattaaatgctataattttatagcatctaaatgtatccagtgaagtccatataaggtctttgtagtatcccctccgccggcaatctgaaattttccctggaattatcctgctccttgcacacatacacacaaaaaaatcccttcagagtcatcaaaagttatttctatttgacggaaattgattttgcttctttaaagcttcgaatttcaaccgagtttatagaaatagactcccttcttcctatgcctctcaacaaagtcttttaaagaaagtcagaaaaagagtaatattagttctgggatggtctaagactcactgaaataatttcatagttttggaaaatggacatctaactgcctgcgtacatacaggaaaggacccaacatatgaaatccattaatgttaaggtctttctttgagaaagcagaaaactgctgtctcaaggatacacgcaatatattttccgtgggtataaawcctgaaataaatttttatcat

SEQ ID NO: 840329 - DNA, 615 bp, Homo sapiens
aaattatcattctgctttccacattgaattttgtaccctagattcagcatctctgagtacataagctctggaaatctggcagatcagattyctgagcatgtgaggactagataatgggccttgttgaatacaagattattctactttgtgtggctttttaaacattaatttttagaatatttcctggagataccctaaacttactgaagctgctctttattcaagtaataggcaataggcaatggcaacagaggaaaaccagcagaggataaagataataccataaatcctagaatgctctttcaattttataataggcatcatagattcaagctcttcctcttctctatgagggtgtgtgtgtgttttaaattcttgttattgatatcctatcacagaaggttgcatccttggctggatataaatgtcacttgagaagcttttagaaatcctgatcctccggcagcaccctgaaccaattttatcataacacctaagggtgagactcagcacttttttcagcactaaagttgagttctcaacacttttattctttaaaaatatttggcaaataaaaaattgaatatattcaaagccaatgtaaacctacatata

SEQ ID NO: 840330 - DNA, 621 bp, Homo sapiens
ttgtactctcttgaccaattttgataataagtgaaaaggtgcagtagccatggcttgatgagggcatagtgactgggagctcaggggcatmtcaccaggtatgccacatagagaaacagaggttctgtccatgggcatgaagaaataaaaggaaggatatgatgagtttttagataagctgcatcaacagagattatgatctgttccactcaccttcaacttttaagtttcctgaggaaatgagacaaagcagaattttgcaaaagtagttcctggatgggttgattacagtaagaagcaaatggatctgagtgggtggtaataaaatagatcttttggtgcactgttcattcaggaccaaagtacttattctcccagcagagagacctttggctgctgagatctcagagctttatcccctcccaggaatccccctcactcattaatgcaggagtgagagttgcctctatgtcagattactctcaaagcaaaccacggggcaggtgacctctcttttgcaattgtattacaattgcatttggtctctagtacccaatcctgctttcctcctatccttagaagtgttgttcccaagtgcacactttactatatgtctgcata

SEQ ID NO: 840331 - DNA, 620 bp, Homo sapiens
tgggtgtgtttgtgtgtggtttagcatttacatcagtttcttatgtccctatgatcatatatttaaattaaaaacatctgctattaactgaaatcagaggcagagaataccattgcctggtcctgagggatttcttaatagtgacagaagactggagcctgaggagccacctcttgggtcctccattgtttcattcactcatccgttcattcattcaatacacattacacaccttctgcatatgagggacgcgcaggtgtgggagcaagcccccgctccctggggctaacctgagtgaggggtctcacagggagagaggactgggtgaggacatagcagtcaggtatgggctgcaggagggcagggaggcgctggggacccggtggagttgagaaggatgaggctatagaaaggggcagcatggcagggaggcattggctgggcatgggctgggactggagaggccagtttctgtgggggtctcctatggaagaccagctgagctgtgcccagcaagtgaggacctgctgggacctcagggctgagaagggcctgatactggsgctttggctggggtttggggagctgcccccacccccaaaagccttagcgcctagtgg

SEQ ID NO: 840332 - DNA, 624 bp, Homo sapiens
cggcctggtggtcccgggagcggccatggtgtccagccccgcggcctcaccctgccctcgaaccccgtgtcaagmacccgcggattctcacgtcctcttcttccacggcggcaggcgcttctcctgcaccttggcctggcgcttcttctcggcctcctcagcctccggtttctcctccgtggccaccttgtacggccacttgggtgtccgcaggtggcgggtgtccgcaggtggccactgtccttggtgctgcccttcggcaccggcctctggcgctggaaggtgggcgcgggcgtatgctgaggcggatcggggcaccaccacgccgggccgcaagctgctccgccgcagctgcaggcgcaggaggctggccttccgcggggcggggtcggcagagccccaggaccccggcaaaggggcaggtgggaggccagctcttggggagccctgccgggagcccgcggcctctgggcagggccacttgtgctgctctgcgccctccgcttcgcccgcctcctgcgcctgcctccccacccccacgccgcgtcaccagaatttcctgagccgccaggatttcctgcaccgccagcagcctcttccccaggcacagggagctctggaggc

SEQ ID NO: 840333 - DNA, 719 bp, Homo sapiens
tggtagagatttaataggtgagagaaaacagaaaaactctcctgcagagagagagagtgactcctgagtgggtcttctggttttgtagtgaaatgcatcgggttttatagatgagcttgaggaggtggtgtctgatttacatagggcccaaaagattgattggaccagctgtgccatttacatagcatgtgaagaagctggctgccccatcctaatcttctattatgtgaatgggttctctacttggttggtgccatgttgcctgcttctttactgcacacgtggttgacaaagaaaaggggaaaattgagcctccatgctcaatatgcctggcccccagttagccttttcctattggcacagctgccagcattcacccatgcaagctgccagcttgcttttccatgtctgcagcttgatttttcaggctgctctttgttagaaaagaaatgattttggggctgctttttattaaaaggggaaccttaccaaggactcttaccctcactatatgcctaagtaatttatttctagccctgtattatttccccccatcagcagtggcaaccctaactgctgttagtgggtgttggatgacaactctttctgcctacttcctgctgaaagaggggcactgtgtggggaayagctcctcctggggtcaatctaaggatccttggaagaatggtgtgttcatgtatgttccatcttcagtagca

SEQ ID NO: 840334 - DNA, 600 bp, Homo sapiens
ggttcttatttacatacttttttctgtaataaaactataatcataagtatatgactttcttgagttctgtgagttgttttctgaattattgaamctcagtggatggtggaagcctctggatttgtaaccagttggttagggttgcctgggaaccccaagcttgtggctggcatctaaagtgagggcagtcttgtgctaactgtgcccttaacctgtggaatttgagccaccttagttagtgacaggattgcattgcagaatgccacccctcagatcccctgcctatttacatgttgaaatactttagtctttatgaatttttcttccttataattgagatcaccccatccatacaattttcatatcccttttcttgtcattggagacttccaatttgaaataaggtttacaagatgtaactttacgtacttaattttatatttgtaaattaaatcttgttcctcatcgttagatgttatttcttgaacttatcttttatggctaattccatttttctgatatactgaaatttattttattgcctccttattgtttgacatttatgttgctctcaaattaattataagaatatttttacaa

SEQ ID NO: 840335 - DNA, 634 bp, Homo sapiens
ttcccactcttaattatgaattacccaaggtgaatattattatggaatatttatctattatattacaaatagattttgagktttttttccagtgtggagtcttttgaataacgcaattataaagccttgtgcaagttttagaaatgtaaatatgtgtacaattctgttttgtatatacctaggaataaaatttctggattatgatatatagatgtacagttgacccttgaacaacatgggtttgaactgtgtgggcccacttgtatgcagattttcttctgcctctgctatcccagaaacagcatcaccacctcctcctcctctttctcttcctcagcctactcaacatgaagatgaggaagaagaccattatgatgatatacttctacttaataagtagtaaatgtattttctcttccttatgatttgcttaataacattaccataaatttttgtaagaatacagtatttaatatacataacatacaaaatatgagttaatggtttatgtttgtggtttatgttataagtaaagattctggtcaagagtaggctattcgtaattaagatttgggaaatcaaaagtaatttcagctgtacagaggtcagtgtccaaaacccctatgttgtttaa

SEQ ID NO: 840336 - DNA, 576 bp, Homo sapiens
tccacacagaagactttaatggttttcaaactaacctggatttatggtcatttctaagaagaaaaaagaaatgttatatgtttttctcagtgaacaaggtaattgaatgggactattataaacaggaaagagaacccctagttgtcggtgcagaggaaactgctggctggaggaaaaggatgcggtgttagtatttgggagtgtgaagattgtgtttgtgttagagttgagcttctgcaggaaacaatttaaaaactgtatcctatagtgctagaaattatggtgccataaattttctaatattcgtatgtccctaagaggcaatattgttaaattctctctctaaagataaatgccttttcccccccaccgcttaatagaactctatggagaactctttggtattttggaagtaacatatgctaattcaatttatccaagtgctgaactcaactttaaattaatatttatgcrctactccatcttattccaaactataaaatttatgaggcaaataatgaaaaagctgtcttcgagaatcatataaataattctctaagacattgcaacagcttt

SEQ ID NO: 840337 - DNA, 655 bp, Homo sapiens
gattaaatgtccttgtaaaattaaacgaatttcactttttgacatttattagatttatacacaatctagtgttttacaaaaatccagcacttaataataagttattagacttaatgaagtaagtataatcagaatccttattgataactctctctaccaaaacatactttgacaatttatggtggagaagaaaagactcattaattatctgtttatacttctgctaattgtaatcatttaaagttgtttgatcagtatttttatatatggcatttataatcaactatagaatcttaaacttacaagtgagaattctttcaaaaaatttcaaacagagcccagattaataattttttgtttggagacatcagaccttatctatgttttaatacacagcacaaatatacaccaagaaaaatgacaaataaccacatcattaacatgcgcttattgaaacaactacatagctgcacacaaaagaataatatttgtacttgtttccttccttaatctctgcagcattatgaagtaatatattataaaggaaatccttkttattaattaatgaggaggagcaaataaatatatttctattggcattaaaaactagataaatttttaccattcaaaggattgctacctgagaatatgttta

SEQ ID NO: 840338 - DNA, 655 bp, Homo sapiens
gattaaatgtccttgtaaaattaaacgaatttcactttttgacatttattagatttatacacaatctagtgttttacaaaaatccagcacttaataataagttattagacttaatgaagtaagtataatcagaatccttattgataactctctctaccaaaacatactttgacaatttatggtggagaagaaaagactcattaattatctgtttatacttctgctaattgtaatcatttaaagttgtttgatcagtatttttatatatggcatttataatcaactatagaatcttaaacttacaagtgagaattctttcaaaaaatttcaaacagagcccagattaataattttttgtttggagacatcagaccttatctatgttttaatacacagcacaaatatacaccaagaaaaatgacaaataaccacatcattaacatgcgcttattgaaacaactacatagctgcacacaaaagaataatatttgtacttgtttccttccttaatctctgcagcattatgaagtaatatattataaaggaaatccttgttattaattaatgaggaggagcaaataaatatatttctattggcrttaaaaactagataaatttttaccattcaaaggattgctacctgagaatatgttta

SEQ ID NO: 840339 - DNA, 609 bp, Homo sapiens
atgatgcaaaggaagtaatgaaaggccagatgccctgtggcctctgcttttagataagtgagaatctacagaccaaggagcaagtgggatgcacaggtctgagttaccctcagtrtttccagtttgaatggctactttcgtacttgtcagtctgcaaaacctgaactgaaagctgcctctcaaactgattctattgattgttacccccattttatcctttgatgattaacctcatcgcaggcaggggcagagttcagaagctcaggcactgcaatgaagtagattaatcagcgtcccattctgagatcctgtcatccagtgggtcggtataagaccagaaaacacgtgtacagctcccaggaatccccttctcaggcctgtttcagttcaaactggacatattcctgggttttcagattgaagaaacaagattttgctacgatttttgttaaccctcttttttgcagtctttttggttatttgctggtttgtatctgtgtttgaatcagttgcaattttggtttctggcattttagcagcctatgctatactatgagaaatagatattttttaaaggcacttttttcagcagctaccattttcctaaaa

SEQ ID NO: 840340 - DNA, 603 bp, Homo sapiens
tttgtgctattttgttatatattttacatctgcatacatcacaaatcccacaaaataatattttgattcttacattaattaaaaaaagatttacccayatatttattatttcctataaatattttcttcttgtaggtttgagcttccatctcatattattaccctgtggcctgacaaattttctttgtcaatttattgtagtgtaggcctactggaaatgaattctctcatattttgtacatcccaacatgtctttattttactgtcaattctgaaggatatttttgattatttagaattctgggttgggtgtggtggctcatgcctgtaaccccagcactttcggaggccaaggtgggcggatcatgagatcaggagattgagatcatcctggccaacatggtgaaatcctgtctctactaaaaatacaaaaattagctgggcatggtggcacgcacctgtagtcccagctactcaggaagctgaggcaggacaatcgcttgaacctgggaggcagaggttgcagtgagctgagatagcaccactacactccagcctggggacagagtgagactctgtctcaaaaaaaaaaagaaaaaaaaa

SEQ ID NO: 840341 - DNA, 616 bp, Homo sapiens
tatacctggcccctctctttccaccaaggcaggggcccctttgctgtaccccaaccatgtgaaagcaygcctgttgattctccctgggactgtaatccttcccactctggcctaatctctatttttgttgtaaatttattgaggaagcagtaaagactgtatcctagtcatgtctttaattctgagacaggtgttcagtagctattgtagactgatgttttctaacaccactgccatcactgtggttagtatttaacatttccgtgttaacctccccctttgcaagcttcatgcagcgcatcctcatcatgcttccagtgttatctttgcctctggccatgagctttccgatgaagagcatctcctggaagtcttgatgctaaaaccttagaaaaggcaaagctcgtaaaagaaatgtgggtcttcctgagctcacccttccatgatgttagtgtttctgaggtgtggggacacttgcccccataggcagccctcagaagggggtctatagtgaaacatggtacttgtcactagcttatctatctcagcacctgttatgaactacatgttcacgttctcttaaaattcacacaatgaagccctaatccccaatgtg

SEQ ID NO: 840342 - DNA, 580 bp, Homo sapiens
aatatggtgaaatcccatctttactaaaaattcaaaaattagctgggcgtggtggcgtgcacctgtaatcccagctactcaggaggctgaggcaggagaatcgcttgaacccaggaggcgggggttgcagtgagccgagatcacaccattgcactccagcctggatgacagagcgagactctgtctcaaaaaaaaaaaaaaaaaaaaaatcttttaagtatgccatatgaataaaaaacttttaaaaaatccattacctcaagcatttatcccttgtgttatactcttttagttatttttaaatgtacaattaagttgtgaataaaaactttgagagctttagagtttagaatcactatcacatttactgtctcattttatgatcctcacaacaaccctgaaagatagatggggcccattttacagatgagaaaactgagccgcgaacaggtgatgcractcacccaggcacaagtgcagagccaggactagatcccaggtccctggactcctggtcagtatgattctcttgcctcccatcaagcaccaatagagcagcttggctggggtcggagatagg

SEQ ID NO: 840343 - DNA, 645 bp, Homo sapiens
gtctactgccctgaagggtgagtcccaggccaggcagcactcaccacracttgactgaggggcctttgggcattaagttaacatcggcagtggcctggcagtaatccctgtgggcctgtcgtggtcgtggccttgggatgaggctcttctgcctgtggaaaggagaggggaccatgggaaggactgtggcttacagttggagtgccagctcagccagagtggaatagaaggccacgtagatttctaaggtttttatcttcagtccctggctcctagacagcatctctggacccagctgggggaactcgctgccctgaagggaaagacacaaacccagctggcttcaccgtctgccgatcatagagccctagggccttgagcaaatacaggctgtagccagggagtggccttgggtaagacttagtgttgtgctggcttcaggtgtgacccagcacagtcccagtcgtggtagccacaggggtgcttatgtcaccccacccccagccccaggctgctcagcacagggagaaagagagactccatttgtttgggagaaagtaagggaagagaacaagagtttctgtctggtattccagagaattcttcctgatcttatccgagaccaccaaggcagtacttctgtga

SEQ ID NO: 840344 - DNA, 601 bp, Homo sapiens
aatatcaaagatgacctttgctctgcctttgttccttttcctgaactctatgatttttcaaatgagttctgtccaaacatcaaaagtattgacagagatgacaaaaatataaggcccaatatcttaaattggctatagattaatacacaaataacctatttgagaaaaaaggcatttatccgatctccatggaaatgtctatagccccttcttaaggatgcttacatcaagctatattgaaactacaagttttcataagttatctcaaacagaagtcttcaaaaccaagagactgagtttctccacagccttccctttcaagaataaccaaattttggctgtagcctctagtgctggggttgtgaccaggtttccttagaaagtttacaaacataaatgaaatggaagcatagccttatggttgcacctatgattttcacactggatgaggttccaactggaaatagcacaaaatatctgagaatcagctttcttatttaatctgagtaaatgaaaggtatgtgatacctggagtaatttgtttgatctcctttctgtaactgttggttttaacaawtccaaagaccaatgtttttgtgaa

SEQ ID NO: 840345 - DNA, 611 bp, Homo sapiens
aatgcaatgagactaaaaatgtcccatcaaaattatttaaggtatgctcaataaatatggtgtacttttaaatagttatgaactttgtgtgacttttctgctaaatagataaaataaaattttcatttgtgtcgagttatctaaaaagaaatatgatgagtgagtgaaaagctggaagcccctatgggataagtatactgttagacacataaaacataaagttttatgagattctttaaactaagaatatcaagaaggcactaataatttcaaatatcttctaaaccatatatatatttaacataagagatcattgaatagttcttcattaaatagtgacatcaaaacataacacataacacaagatgtgaaggatggcaggtgtaaatggcaacactaggaaggaaaacgcttttactatcagcaacaaagacatgtgggttagaatgcttctccagcatgacggtattatctctacacactagcttattattaaaaacctcagcagttttytcattcccagtagcaatctggttttcatagcacactgttttcatagtgaacaataatgtctttacaacctatcttttatttcctccttgtcatttctc

SEQ ID NO: 840346 - DNA, 598 bp, Homo sapiens
ttcagcaatacacttctagaacaagcagtactcatgctgctgaaggatgaggctggacatcatcctgaaatcaaatagactcatctaaatagcctactcctattggcaaaccggcccaattccatatttcttaaactaaaatgaaaatcatttaacttccttttccaacttgaaatgctgagaccaagtacatgtggatgagtaagaagacagaaaaaaaaaatactggaatcacaacttgaatgaaaacttgttttaagaattgcctattttgtaccagatgttctgtcaggtactttgaatttctttttaaatttattatcttagcaagccagtgaagtgagtattatttttcccattttacagataaagacatagtctgagagaaagttggtggcttcctaaaagtcacacacctagtaaatgtcagaatcagaactcaggtcattctgaaggttctttccactacatcaccctcctctcacattttagatactgagtaataaacatttaatattagatcacagaagaataccamagacatttgagtaagaagagcattatttcatataaatatggcgcttctcctcagtacacc

SEQ ID NO: 840347 - DNA, 622 bp, Homo sapiens
agtatgcagagcaaaagtgttggaagtacttaaacatttaaaggacatatccattttatacttttccatacagaaatactcaagaacattttccaagcgtgtttctctttcaaacaaaggatctctaaaggccattttctcactctttaaagcattgaataccactgcctcaaaacatggccattattgagttacacttccccgcacagtccatgtgatgcctgcatctgcccagcatgatttctagcaatagtaaaagtcccaagagaactacaaaagaaccattattttccttgtgttctacaacggattagtcaatgcgaaattcatgcttgaaggggccttagtgataattttgactccacattacagatgaggacacagaggcccagagttcagcagtacaacgaaagagagtggaacttaaaaaactaacaatctataaactgagacttagctctttgaaggtacattatagtaaaaaataaacctagattgcagaagagttgagaagtttaagttacacaaaaatctakcccagaatctcagattttaaatgaatcaagcattcttatttttatccaggcttaaattagctaaggttatatacaaacccagtggc

SEQ ID NO: 840348 - DNA, 631 bp, Homo sapiens
ctcttttggaaagatctactagattacaagtcttatgaggacatgagcaatgtctgtcttattcaccatyccagccccaggtgcctaacatacagaagatactcaatgaatatacagtgagttaataaattcaggcattgcctaccacataaatcctgaaaaagatagattttaacttttaaaaccagtttctgtgttgccttatgagattcctagacattagctgagttccttgactaataggacctacatctcttcagttatattctggttctctatagtaagtttgtctaacaaacactcatgaaatagattgtgtcttttgatatcttaagaactccgctgccatattccaataattcgtcgtgggtgtccttgaagatagctgtagcataatgaatacacgttgtggaatttgaatgtctgaatttgaatcctatctctgttccttgctagttgtgcaaaatgctcaaattctctgcaactcactttgcttacctataaaatatgaataaagtcatacccatcccagaggatttcatgagaaaaatatgagttaattaacacacaagaacttctcagtagtaaatctaacacatattaagtgatgaataaatatgccctatgactg

SEQ ID NO: 840349 - DNA, 544 bp, Homo sapiens
aagagactatcatttgcatatataacaatctgaaataaaattataggatataygtgcaccacacctgcatttggaagcatggtatatatgtgtaatgaattgtatatctttggaagcctgtcacttagcttaatttagtttttccaatttttaaatatttttcattaattagttgtgatttctctatacattatacctcttttgtaactgtgggaatgtctaagtatatttctgaaatttatattttaacaatttggctcataattacacttgtctttgccaagtactgtggtagatgctagagataaaattaaggagaaatgattcctcaaaatgcttatacacctcctagtttatttatattgtgttagagaacaaatgcttatattttgaaatgttaaaaaggcacagcataaggaaagagataatcaaaattgataatctgaatggtttgggattttgtgttttctatctggtaaagttgacctcatttacatgcgaattcctatattttgcacatgaaactgaaggtagagagtcagaa

SEQ ID NO: 840350 - DNA, 544 bp, Homo sapiens
aagagactatcatttgcatatataacaatctgaaataaaattataggatatatgtgcaccacacctgcatttggaagcatggtatatatgtgtaatgaattgtatatctttggaagcctgtcacttagcttaatttagtttttccaatttttaaatatttttcattaattagttgtgatttctctatacattatacctcttttgtaactgtgggaatgtctaagtatatttctgaaatttatattttaacaatttggctcataattacacttgtctttgccaagtactgtggtagatgctagagataaaattaaggagaaatgattcctcaaaatgcttatacacctcctagtttatttatattgtgttagagaacaaatgcttatattttgaaatgttaaaaaggcacagcataaggaaagagataatcaaaattgataatctgaatggtttgggattttgtgttttctatctggtaaagttgacctcatttacrtgcgaattcctatattttgcacatgaaactgaaggtagagagtcagaa

SEQ ID NO: 840351 - DNA, 648 bp, Homo sapiens
gcttctcaaataatccaaattaagatagtaacctaaaattctgttggcaaaagtttccttttgcttgtaagtcagttaaaaatgcaatatataaataatttccagaaaaacctgtaactacattagtatatatcttataacttatagcatcttagaactgagaagttacagtaatggttgtagtttgttgaaaatttgttgaatgttattttgtcctttgaaatttttgtgatgtgagcataagccctgtaacccattttgtgtgaagtcaaatgtgttgctcatgatttctccaaagtgccttgggcttacatttgaatgaccattgctagctctcaattaccgcttcctctgcattcttgatttcatttttatctcttcttgcatgaaagaattttctcatgtcttcttttgaaatataggactcagctactttgacttactttgaaaatgctcatggacacacacacacactcccacacacagacccataaagcacttatatatgtataatagagtttacraaaggttcaagaaatcagagagagagattataaagaattagaatttacctgaatattagataaatctattttaaaagtctttggtcaaccagaaaccaggtttttactaatctactttgtcttt

SEQ ID NO: 840352 - DNA, 569 bp, Homo sapiens
aaataaaagtgagtcacttggaagtgaaggactggcccgactgggaggagttaattacacatkacacaagggaaacgcaaacccaaacttcatattggtctgagtgagaggagttagttaattatagttgaaacaggggaaactcaaacccaaactttatactgagagctttgagcgcccttgtcattaataactaggctaacaaatatatgaacatatctacaggctcctagctttttgtctttgagcccagagttgaaaataaatccttggcagtgatccatttgcttccatctctgtgtaccaacttcatttgtcagagttcccaagccaaagtgatctccaaatcaaaaggcaataccccaggtcaaaaagctgcaatcacaaaaagctacttttagctccagaattttctcctctttccccgtttccccagatccctccagtttttctttttgtctctgtccatttctcttttttttttttcccatttctccactctctgtttcctaacacatggttttaaattgagattaaagagaacaaaaaggaaggctgcaatgttcatt

SEQ ID NO: 840353 - DNA, 599 bp, Homo sapiens
tgtactatgttgaataggagtggtgagagtgggcatctttgtgttgttccagctcttgagggaaatgcttccagtattttttgcccattcagtatgatgttggctgtgggttttacatagatggctcttatttttggaggtatgctccttagatgcctagtttcttgagggtttttagcaagaagcaatgttgggttttattgaaagctttttctgtgtttattgagatgatcatatggtttttgtttttaattctgtttctgtggtcaatcacatttcttgaatcgtgtatgttgaaccaaccttgcatcctaggaatgaagcctacttgattgtggtgaactaactttttgatgtgctgttggatttggtttgctagtattttgttgaggatttttgcatctatgttcatcaggtatattggcctggagttttttttttttttctgttgtgtctttggtaggttttggtatcagggtgatgctggctttgtagaattagttagggaggagtccttcctccttgattwaaaaaaaaatagtttcagtagaattggtataagcactttgtacatcttgtagaatttgactgaatcaatc

SEQ ID NO: 840354 - DNA, 618 bp, Homo sapiens
ctttaaaagggattttagtgttctttcagctgctgagatgttaatatgcaagacaaaggtacttatcacttacatggtggttgaggacacttgccccctaggctatatcatcagtcccccaaataatctagcccttccaacccaatgcagagaaggtgccacagccacacagtccaagaaatgcatattggccccatcatcccctcatattgaacaactaatgaaaatacaatacttttgattcatttaagctctctcaaatcacgcctaggctttttaagaaaactaatttttgaatggaagattcaggcttgtgggaagagccaagaagttggcacgatctaatcaggtcagttcttttttgatcaaggacataattttttaaacaatactcaacctaagggtcaagttacaatttttgctttcggagagtttcagtacaactggccaaaatttggctaagaacattttttcttttattacgatcttagaagatctaacacattcactagtatgcccaaaaagtaaaaacatgcagcaaaaagtaaaaagaggagtgagcatgaattatcatgaaaacagatgmtactataattatttgtacttttgacctaataa

SEQ ID NO: 840355 - DNA, 574 bp, Homo sapiens
gtcctttgcactcacaccacaacaatcaccagaatacttctgtgaccagatgtatgagagatttcccccaatgcaagcaatcgcttctgcagtggacaccaggtgggtgtcctcccacccagttcaattccaacattatctacctggagacagtgtcacatcccacaggttgagggctccccacttccaatcccaatctaaagccccaggttgttttacctatgcttctgactaactggctataaattggggttcccacaacctcttactccagtctgattaatgtgttagagcgacgcacagaactcagggagacagatttaccagtttattataaaggatattacaaaggatacagttgaagagatgcacagggcaaggcatgtaggaaggggatgccaccctccatgtgctcagccatctggaagctttctgaatccagtccttttggatttttatggaagctttgttaagtaggcaatgattgattaaatcactggctgttggtatcaacttaaccttcacgccctctctcctmcccagagattaacaggcaggactgtaaatcccaacc

SEQ ID NO: 840356 - DNA, 593 bp, Homo sapiens
acgtatattaggtcaactgagcttggacaagggtgctaagaatacacaatagggaaaagatagtcacttcaacaaatgttgttgagaaaacygaacatccacatgcaaaagaatgtagagattcctattttacagcacacacaaacaaaactcaaaattaattaaagacctataaactcaaaattaattaaagacttaaaggtaagacctgaaactgtataacttctacgagaaaacatagaaaaaatcttcttgacattagggcagacaatagtgtcttgaataagtcccccaaagtatgggcaatagaagcaaaaataaagaagttggactatgtcaatctgaaaagtttctgggctgggcgcaatggctcatgcctgtaatcctagcactttgggaagccaaggcaggcagatcacatgaagctaggagtttgaaaccagcctggtcaatgtggtgaaaccagtctctactaaaaagacaaaaattagctgggcattgtgcttcacgtctgtaatctcagctactcagggggctgaggcaggagaatcacttgaacctgggagacaagttgcagtgagccaagatcatgc

SEQ ID NO: 840357 - DNA, 614 bp, Homo sapiens
aacatcctaaggggaaagcctcatatcttstattactcatcattttgtcatcgccccctagcacaggatctgacatatatgtaatggaaacaaaattattcatttggctaatgaataaaagttgtatttatctgatgctgtatttaccaattacataagagtatttttttggatgatcagttcttggagattcttactattttgtcaatatagaagtgcacattttgactgcttttacattgaacaagtatttactgtattataaaaaaaaatggcaaacatttatttttataggacttgcctggagactggaggctccctgaatgtgagactatttctgactttcccaggagtagagtgtctgccagagaggtgcagcttgaattaatgaaactgacactttgtgtcatcgctgaacatcctgaaatataatatttcagtcacaggatcaggaattttatactcactctagcaattatagcacaagcagtagcagcttcattgttaatatctataattatagcagtccttatggtaagattaaaattataagatcataatataatcacagtttatttcttaattcaatattcttctatttaattccttgattc

SEQ ID NO: 840358 - DNA, 573 bp, Homo sapiens
gtgaagacctctgggtccttccctccttttgagctgggaggattgcaccagaagacaccamatgccctttctgttggtttctatttcctttctcttatccatttaattttttagaactgacttattctatctgaatagtaataaagacatcattttttcctaatgctgcaatgtttagatgttccactactatattctgggtagaatacttgttactaaacttcctctgcaacttttcaactttaatgtttctattcaaagaccatgtggctttgggtggctgcactgtttcaaaatatttcctggattttagtcttttagtgatttcttaagtttacagaacaagattgatgaaattttttatgggcgagctctttgaatcttttcctgatgttaatttttaataatttcattgatttgtatacgttttgaaaagacccatggcatgtggagcatatgggaggaagcttcggttaagtgttcatcagtgaatgaggacgtgtgtgtatgtctggaaattgggcaatcatgctatagggtaccgagaatgcaggagacacagggctcaagctg

SEQ ID NO: 840359 - DNA, 549 bp, Homo sapiens
tgatataagatatctgtcatgccatgataggaaaaagtttgcagtttttttgtggggctaaaggattgtcttatggacagtggtgagaggttgatgtggagtctatgaaraaaacctatcccatttgataggaattagttacttctccaaagcccaatctcattacagacagggtaagaaatcctcttcttgcccattatctagtgggttgaagaattcaggagtattatttcctggtccgtcaaattagactttgtgacttccagttagaaaactgtatattgtgaagaacactgtaaatataaattttaaactattagaattattctaagagccattattatatgctaaattgcacccacccctcaagaaaaattatagttgaagtcctaaccctcagtacctcagaatgtgactgtatttagggacaggatgtttatagggtcaattaagttaaaatgaggtcattagtgtgggccctttagatacagacaggtatataggaaagattatgtgaaaacacactacaagctaaggagaaaagtctga

SEQ ID NO: 840360 - DNA, 630 bp, Homo sapiens
cttctatacccaaattgttgagggttttttttttatcataaaagcatgttgaattttattaaatgctttttcagcatctattgaaatgttcatacggttgtctttgattttgttratgagatgtattatgtttatttatttgtgtatgttgaaccatctttgcatccctgggatgaatcctacttgatcatggagaatgatctttttaccatgttgttgtattctgtttgctagtattttatcgaagatttttgcatctatattaatcagggatattagcctgtggttttcatgttgtccccttgtctggttttagtatcgggataatgctggcctcatagaacaagtttgaaaatattccctcctcttcaatttcttggaatagtttcaatagaattggtattaattattctttaaatatttggtagaagtcagcagtgaagccatcaggtctggctttcctttaatgggtcactttatattactgctttaatctcattacttgctatgggtgtatttgggttttctatttcttcatggttcaatcttgataggcttcatgtatctaggaatgtatccatttcttctatgttttccaatttgttggcatagatgttcacaatactctct

SEQ ID NO: 840361 - DNA, 565 bp, Homo sapiens
ccaagaagaaaacacaaaataggccattataagagagtaaaaagtatctcaagagggactctgggaacagagaggaagggtaactaaccaagactgagagagaggacagaggatcaaaggtagcctttctggaagagatgacatctgagctgagcctaagcaggactgagtagggcaaggaagaagaggagagagcctacaaagagagcacgtgatgggtgaaggcatatggccagagagggtgccttgaacttgggtaacatggagtaactccacatggctacagccaagggctcgtctggagcaatgatggagaatgcagctgagaggtagtggaggctagaactggaaatcctcatgcagcatgttaaagccaacagagttcaggagagattttaaccaggaagtgacatgaataaatgtgatctgagaaagacaactytggtggacaaatgaaaaataagtcaggtggtcaaagtcaacagtcaagagtagatgccagaagacaaattcagtagctttgaatttgatagtaatgtcactaatagacaatgagtgccagaga

SEQ ID NO: 840362 - DNA, 611 bp, Homo sapiens
caatggagccatgaaatcttcaaaactgcttcaccatgtggagaccaaacaccctgcactaaaagacaagcctttggagtttttcaaattaaaaaaacatgaacaggaagaacaaaagcaattattgatggccaccacttcatcaaatgtgtctgcaccgagagcatcattcttagtggctaaccacatcactaacactaagaggccctttactattggtgaagagttgatcctgcccaccattaaggatgttagtcatgaacttttaggagatgctgcagttcaaaaggtggcatatgttcctcttttggctagccccataactagatgaatgaaatagttgaggatattgaggcacaattgttagagaagattaatgagtcactgtggcatgcaatccaggttgacgagtctacgaatgttgacaacaaggcaacaatgcttgtttttgtgcgatatatttctcgggaggacgtgcatgagaatatgttatgtgcacttttgttgccaaccagcaccacaggtacagaactattcaagcctttgaatgattactgtgttagttcgttttcatgctgctgayaaagacacacccaagactgggcaattta

SEQ ID NO: 840363 - DNA, 585 bp, Homo sapiens
tgctatcattccaacacattaccttccaacccgtcctctcctacaactacccagttctgctggttttacatataaacaaaccagtggagaagtgttgaccatgctataccagacaaaaggccccaaactggaggtcaaaattcacttcctgctttccttgtttataacacacagtgggcacacagcctcagggatcccccaactgagtgttccctggggtatcagagggctggcatgcctgctcctcactgatactttgtatatagcattgtctgccatctgaaccacagaaatacttggtgcctggggccagagcagctgagggtacctggtgaaggctgcccaagcggggccttctgggtactattgctgcaccccaatgaatgtcagcaaagttctcagtccccaccctgacactgtataagcaggatgcaggatcttcgcaagtccagctgatggagttgggaggcaagggccctcggcccccagaagcaagtggccaccagtcccttaaccaacatgagtgacagcagctrgaggctaccaactccataagggatatgctgtccatggcccccacaaggt

SEQ ID NO: 840364 - DNA, 574 bp, Homo sapiens
tagtgtctgatcacattcctcaccctgaagtgccttactttgcagatttgccgtgagctcacccctcccccacctgcttccctatgtgagtttccccttcccctgcagtgtgattcaggggacttcccagatgctttaggttttgtctgcaactagaaacattcagaattactgtgttttaaaatcgaactttctaacaaaatggcttcccataaagtaggttttggctacgttattatttatcatatctgaaaatgattatttagaaatttgaggactgtgttcttggagatacaaagaaataaaaagccatggcttttgagaggtttataggctactaggaaaaatcatatatactgcataactttaatacaggcatgatgtggtaaatggacaaaggtggaggtgtcgcagatggtttcatgaaggagaagacttgaggaggactttgaaagctgggtacggacttcaactggcagagactatrgagtgaggataggcaattcaggtggagggagtgacatagagaaaagtgtaataggtagggcacatgctggcttatcttgagcatttg

SEQ ID NO: 840365 - DNA, 637 bp, Homo sapiens
ggcacaagaaattgcaagagcagatgtctcaggtatctctaacacctactcctagcatacaaccacacctgtggcttcacaaagatttccttaagaccagstgcctggaaaggaaacttgggcccggtttagagaaggtttgtataatgtctggtaccaagcaaaagtggacttctacagcatgacatctccaataatgagcatccctcaaatgtgaaatcatcccaacagaactgtaactagtacatttgcttgtcctctttacctacactgagaaatggccagaattatggctttacactgaatcatggggtaaaggttaacactcaatgtggatggatggttaaggacttggaagaaaatagtataggaacagagcatacaagaacatctagggaagagctatgtggatggaccactgagaatgagcagtatgtaaaaattatttttgtcccttgtaaatgtacaccaaaggcatccactacagatgggcttgtcaataaccaggtgaacaaaattacaaggctgtggagaagttatcctttttcatcagtcacaccggtcttcctcaataggccaagaacaagtgaccatggtggaaagagtggaggctacatacggactcagcaaaggactt

SEQ ID NO: 840366 - DNA, 600 bp, Homo sapiens
cagaatggacgtctagccaggaatggacgtctagcctatcgggaatggacgtctagtcaatcagaataggcgtctagctaatcagaatagacgtctagctaattccaatagacgtccarccaatcagaatggacaccactgtcaacaaccagtaagccagccctgaccatatgactacgttctcaacagtaaggtatgaggcgtgtcctttctgcctcacttactcaaaaggaaagtgcttgctgtccacttcctctcttttccccttctcatgagctacaattcagacatccccacgacccacttcgaccatgcagagatgccagagtaacagtgtgggagaatcctgggtccctgaatgatcacatggaacagcagtctccttatcagggttgttacgtgagagaggaacaaacttcgacctcatctgggccactggattgttgggtcttttttgctactgaagctcagtttatagtctaggtatttagactaaatctaaaatgctctcaattataagatgtaccacaaagaaagacaaaagtgctgccaattaagccatgataagtcatcaattataagacacatctcgttttcaaa

SEQ ID NO: 840367 - DNA, 517 bp, Homo sapiens
aaaaaaaaaaaaaaaaaaaaaaaaaaaagcagtcggagtgtgggtggcaccaggcctttgccttcaatgcaggttgagaggcctggatctgttccacagcactggtgagccaggggtgggttatgagcaggagacgggtggcgtgagttttgggtatagaaagacgcctctgggacctggtggggaacagactggagtagagagattggaggctggaggccaggcaggaggctgggatgagggcctaggagggctgtggggaggcacagaagaagacagggcagagagagccccaggccaggaagaaggagacttggggaccgataggctgggtagcgggagggaggaaggcggctaagagtctagtccagtgactgggtggatgacatgagagacastcagagtacccagggtgatgttgcatagtgaagatattgaggagtccagggacacccccggccatccccagccctgggcacttctaaccagaggaagagacatttgagctcagtcttta

SEQ ID NO: 840368 - DNA, 556 bp, Homo sapiens
ccttcccaagaaggatgggtacaaacaagcmcagactgtgaagactataataaatacctaactcttcaatgccaagacagcaacaaacatccacaagcatcaagaccatgacttcaccaaatgaattaaataggggaccaaggaccagtcctggagaaacagacatatgtaacctttcagacagagaattcaaaatagttgttttgaagaaactaaataaaattcaagatagcacagaaagggaactcataattctatcaataaatttaacaaatagattaaaataattagaattgaacagaaattcgggagttgaaaaatgcaactgacatactgaagaatgcatcagagtctcttaattgcagaattgattgagaagaaacaatctgtgatcttgaagacaggccatttgaaaatacacggtcagaggagactaaagaaaaaataaaaaagaatgaggcatgcccacaagatctagaaaatagcctcaaaagggcaaatccaagagttattggccttaaagaagaggttgagaaagagacagggatggaaagtt

SEQ ID NO: 840369 - DNA, 606 bp, Homo sapiens
gttgcccagaccctttaattctcataattcccatttgaagctctatgcttttcaatgaaaagctttttattaccaaagctccagaagacttgatgttttagtccctacctacaattctgaatttatcatggtgcaaacttctgaaaattggcagccttgcaacccacagacaattcaaacactaaaaattccttagcatgaatgagctttataaatattctaaatgtaagatagactggcacacatgtataagagtagctgatatatatattgggaaataaaggagtgatttgactattcagaacataaatcacctttcctgtgaccagtagaaacctagattctgactgattgcagcagtaatactcaggattagcacattgagctctcgctgaaaattaaatttacttatatcccctagacttcctccctctctgacaattttggcttttcttttgcacaggagaaattgtgcaactsagttccagagcctcgccttcctaatgcatctgtaaacagctgcagctccctgttcaatattggctgcagctgccataataccccagaaggacagccaaatggagagagttccccttaattgccttg

SEQ ID NO: 840370 - DNA, 627 bp, Homo sapiens
tttgtctgtcctgcatttatyttacctttgcacccattatgttctggttcttgttcttttcttccacattctgaaagaatgtacagaactcatcttccgatgagccacttcagttttctgaagtacccaattttctgcctctattacagttgaaaatcgttcaattgtgctttttgtcttaacagtttcaaatctcaaaactgcattttctgtgcagtttcaaatttcaaaactgcattctcttcatgtctgttgtatctagttccatgggtgcaagatatcttttatctttttaaaaattttatttttttccccttatttacaaaatgtaggcaagttcacatttggaaaaaataggaagtgcagataagcaaaaggaagaaaataaaaatattgttttaattgcacacttcacagatcattagtgtgtgcatatgtgattgtaagttttgcccccttttattgcctgccttctttcacttaaaatacatcatgaaaatctttccatatgaacattcatctccaacatagtttaaagcagaaaaatgtttgtgtatctatgcttgtcatttcaagcaatatcttcttttcctacttatccctgaaatgtcgctgtttcccagggat

SEQ ID NO: 840371 - DNA, 599 bp, Homo sapiens
gaaaatctttccatatgaacattcatctccaacatagtttaaagcagaawaatgtttgtgtatctatgcttgtcatttcaagcaatatcttcttttcctacttatccctgaaatgtcgctgtttcccagggatcttctggggactcttccttctttttatggtacgtaatgtccttgagagagtttatctattctcatggcttcaaggatcacttcaaataaatgatgcaaatcactaaactacacttctagcccaaacaattttctacttaacttcaggcccatacttagccaaatacctaatatatccattagatatccaacagtactctttctcaaatggtaatgcatattaaaatcacctggaagcttgttaaaacacagattgctggaccctgcccccagaatttttgatttagtgcctctaaaatgaaacccaaagatttgctttcctaccaggttcctaggtgatgccaatattgccaagaggaccacactttgagaaccactgtcctatagctacctcaaatatagagtactctaagtggtaatcaccctctttatccccacagcctctcacccttacttttaacatttta

SEQ ID NO: 840372 - DNA, 666 bp, Homo sapiens
tcacataaaaatttggagaaagcaaatatcaagagaattgctagagaaatatyttactacatgaggtcaagtggtaggatttgggatgggaaataaaatattctatcacttccacaattgtaacctgtcacccaaatctgcaatcaagaaaagccattcatggaattttaattgttttatacaagaattctattggcttgccatcaatcagtggaatgaaaatgcaaaagttttgagttcagagaattgatgagtattggaaaagacagtaaagaagagacaaatttgagactccaaattagaagtcgagtactgaacattcagaaaggtcttttaattggtacttatgcataagatcataatcttatgaatcgtgattcataaatcatagcataattgaaatccttacagactagtggaaaagttaccatttttttaaatataattaagaaaatgctgtctttcccaaggagggaaaaatttacttccatgtaattctggaaggaaaattttgtttgctgacagaccaagagatacctcttttgttgccttgagctcacgttcccttttactattttttctttaaaaaaagtaaagaaataagctatcacttctgctgcttcattaatagtgggctacagcccttgttaggacctctacttcctt

SEQ ID NO: 840373 - DNA, 666 bp, Homo sapiens
tcacataaaaatttggagaaagcaaatatcaagagaattgctagagaaatatcttactacatgaggtcaagtggtaggatttgggatgggaaataaaatattctatcacttccacaattgtaacctgtcacccaaatctgcaatcaagaaaagccattcatggaattttaattgttttatacaagaattctattggcttgccatcaatcagtggaatgaaaatgcaaaagttttgagttcagagaattgatgagtattggaaaagacagtaaagaagagacaaatttgagactccaaattagaagtcgagtactgaacattcagaaaggtcttttaattggtacttatgcataagatcataatcttatgaatcgtgattcataaatcatagcataattgaaatccttacagactagtggaaaagttaccatttttttaaatataattaagaaaatgctgtctttcccaaggagggaaaaatttacttccatgtaattctggaaggaaaattttgtttgctgacagaccaagagatacctcttttgttgccttgagctcacgttcccttttaytattttttctttaaaaaaagtaaagaaataagctatcacttctgctgcttcattaatagtgggctacagcccttgttaggacctctacttcctt

SEQ ID NO: 840374 - DNA, 666 bp, Homo sapiens
tcacataaaaatttggagaaagcaaatatcaagagaattgctagagaaatatcttactacatgaggtcaagtggtaggatttgggatgggaaataaaatattctatcacttccacaattgtaacctgtcacccaaatctgcaatcaagaaaagccattcatggaattttaattgttttatacaagaattctattggcttgccatcaatcagtggaatgaaaatgcaaaagttttgagttcagagaattgatgagtattggaaaagacagtaaagaagagacaaatttgagactccaaattagaagtcgagtactgaacattcagaaaggtcttttaattggtacttatgcataagatcataatcttatgaatcgtgattcataaatcatagcataattgaaatccttacagactagtggaaaagttaccatttttttaaatataattaagaaaatgctgtctttcccaaggagggaaaaatttacttccatgtaattctggaaggaaaattttgtttgctgacagaccaagagatacctcttttgttgccttgagctcacgttcccttttactattttttcttwaaaaaaagtaaagaaataagctatcacttctgctgcttcattaatagtgggctacagcccttgttaggacctctacttcctt

SEQ ID NO: 840375 - DNA, 591 bp, Homo sapiens
catgagaaatatacccccctgaatgcctttggtggaggtgcagcgtgctttcgtgcagcctctcctggctctgctgctgggcaggtggctctagccagttttttgacctaactcttccgggcaggtaacacaccggctccctctgtcaccaggctgcaagtgccaagtccctttgggcctttctcaggaggccttagtggaaggaagcatatcctcctctctcccacggaagaggcagtgggaatgataccgaactctaacaaatatctccaaaagtatatcacctggcctcctcagcctcccctcttttatatcttcaaggtgtcaccaaaaatcttcagacatctccttttgcacatcttatacatttgcaacacgtttatactaaaaaattatttatggtctgtctgaaattcaaatttaactgggcatgctctattttctctggcaacattacgtacagctggcatagtcctcatgttgaaataaggtctccttgccccctattgtttttttactttggtttgtgggcctcggcagaagaaagtcccatttaaataktgtaatgacgccaaataaatccatcacagg

SEQ ID NO: 840376 - DNA, 593 bp, Homo sapiens
agtgccatgacatcaacgacaatcaaactaacaattcaaccttcaggctagaaaaatgttaagttattctatcttttcctgaatccaggttgaattcatccaggttcctttgcctgctttgtaccaagactgggagtgtgatgggacgtggttgaattcagttatctctctactgaaaagcatctcaaaagaggaggccatccttatccatgggtgtaccccatgactgagaacagaacttgacaaatattagccagtcaggaagtgtttttgaatgaataaatgaatctgaaagtataagcaggtaattgactggtcctgacaaaattctgcttccaaagagccactttatgtcaaaatactaaagcaagtgttaatatagttttcaatatgagagtaattttcccccttagtttattgtgctgtatctcccacaaaatcttttagtatctccctcctaaaattgttgggaggatacratgagataatacaagtaaagcacttaaaacagttcctggcccattgtttcaaaattcactgaacacacacaaatacacccccacatacacacacacacacacacacacatgcat

SEQ ID NO: 840377 - DNA, 566 bp, Homo sapiens
attcaagtacattctcatgaagacttccaaaaaacctttgccaraaaatttgccagccgcaacaatcattcatatcttattgagcaaatactaggtgctgtgcattgcgtgctaaaacattttaggcactctacgtggattctctccctacattcttacaccaatcctatgagataggaacaagttacactgatgcagtgctggcatgtagtatagactttagatatattaactcacatcttcctgtcaacaaccctaggacagaaccgctgctattatctctattttatggaatcaaagaggttgtgtaacttgaccagggtcacgcagctattgaacgtcagatccagaattcacacccagacagtcccattccagggttcatgctttgaccaacatgctaccctaccagagtgccacaggctgtggctctgaaatagggaaaggttaatgagagatgggtcagaactgtcagaagtattcctgtcttcttctgtgtgagctagctttccaaggagcttagggctctgcttcacatgccttcagctaagacatcccaggaccag

SEQ ID NO: 840378 - DNA, 658 bp, Homo sapiens
gcttaaaacaaacggggtaaatgccactgctgaaattacagcttctgcttacattctttcagcttatcctttatttttayaaaaatattcctcttgctgaacatatattttgagattaagcagtgtcttttctttctcagggaagaatatttctcagccctccgttctcaagacagatgagtgctttagaaagaggactctgcagcggtgaggaggatggaatgacaggcaaagcacgcaggaccaggagatggcttcgttccctcaatcactcatccaaagacgtttaatgagcacctattgtgtgtcaggcattgtaccgggcaatggggatatcgtagtcagtaataagtgaggagagatgagttcatttgtgagaggctctgaccagtggaatcagaggaagggagttcccctgggtgggccaggttcaaagacattttggaagtagaatctgcagaacatgatgatcttttggaaacagggcagggacgtgaatgagcacgtaatgtccccatgggtttgtctttccgaaggtttaaaatcctcaagaataaggaacataggcatgtgtcgtaacggtctccacagtgggggagtattatgttagtgcacctgcatgttaactctgctcatgaaggggccacgtcttcaccac

SEQ ID NO: 840379 - DNA, 619 bp, Homo sapiens
cacatcctgctactcaacaatctaccaccttgtggcttgtttcrttttattttgcatgggtggaggtgggggtagtgggaagggaattcctaaaatctcatcagttccaggaagcctagaggcctaggccttattctcctcctcatatggtacaaatgccaaatcctacatttccttgagtccgcgtcctccctgtagatactctcagtgaactggacctgttgtggaggagtagaaaataaacatgcctcgaattctccaacagggcattcagtgtctgcatggcctgtgcattaggatctctttcttagctctccatctagtgcaggtacacgttcctgtgatccgtgttccagttacttcacagtacagttatcaacacctgccttaacaccaccaacaagattgagtggcgatcgaaaccaaacaactagtgaggaaaggcagaggcaccacagcctcctgacttggtcattgcagacatgcactatgggttatacgtggaagtctcaagatccagcaccagtttcaacaattatatgccttctaccatttttatttcattgacctccaaccactttccactttctactgtccactcaattattatcattataat

SEQ ID NO: 840380 - DNA, 497 bp, Homo sapiens
aaccccactgggcggctgtaagacatgcaaycatcttagaccagtgcccgacacaaagttggcactccataaacgccacatgctaatgctgccattactactgttcatgctcacattagtgcttgccattctcactgcactgtataggctcacccagcctcatcgggacctttggcaccagcaggaggttccacgcagacaatgccaggcacagctgcaggcagcacccacactggagcggcccatggggctttttctatgaagattctgctgcccagacctggagaggccggagaagccgaaccccaccaagaacgctgttttcacaaaagccgtttgccttcacactgggtggcagcacatgacactaactcattcaaggtcagagcgaccagactctcaacccttattttcgtttgcttgttcggcttttttttttttttttttgcattccattttgttgacatttctgttggacatgaccttaggttgactat

SEQ ID NO: 840381 - DNA, 607 bp, Homo sapiens
gctctcaagaaaaaggaacttggagaatttgtcatctcaaactaagtgtgaatgaagaaggcatggggtaactgatattgttttctcccctaggtatgtgggtctcctggcttgccagtaacaggtaagttgcacatgaatgggattaagcaaaactcctacccatgcctgggaacaaaaattacctgctttagaaaacaagggatgcatttgacccagcagtcccactactgggtatccacccaaagaaaaagaaatttttgatatattaatttcctttcctttagctatatattcagcagtggaactgctggatcacagcatcattctatttttaagtttttgagaaacctccatattattttttaacagtggcaatactgatatacatttctatcgtcagccacaagggttcccctttctccatatcctcgtcagcattttttattctctttttgatttaaaatattttaactgtcaaaataaaagagagaaaacaagggatggatttccccttaggaatgagctcagrcaaagactgactagagcagcctctagtgtccgagtgaagctggaccaagtgctcagccctttaggcccctcaacc

SEQ ID NO: 840382 - DNA, 525 bp, Homo sapiens
aattctgagggcatgaaccgagcctatcttgtttctgcatcactgtggggccagcagggcccagcacccaacaaatgtgtgttgaattgggccccctgagccgagggtgtggattaaacgacccccacagagcccttctagccaaaaggtctgccatctcaggggtgtgtgtgttgacagagagagggagggaaatcaatttaaagtgagagagagaaaaaaaaatgctgcatctacagttcttatttatttttccattccaattttatgtaattcacaataaaaagatgctcaatgtcattactcattaggaaaatgcaaatcaaaaccacagtaagatagcacctcacacccactaggatgctataatcaaaaactgggaaagaagtgtcggtgaggacrtggagaatggaggtcctcacacagtgcagcaggaatgcagagtggtacagctgctatggagaatagcttgttccccacaagttaagcatggaattactgattggtggtatcgttggatattca

SEQ ID NO: 840383 - DNA, 593 bp, Homo sapiens
gaccctgtctctacagaattttttwaaaaaatctaagtatgatgacaaatacctgcttgagcccaagagttccaggctgcaatgagctatgatcacaccagtgcactccagcttgggtgacagagtgagacttcatcactaaaaaagaaaaaaacaaaaaaagaatgaaaaaagtctgtgatctattatacactgtcctgtagactctattcatctatcatctatctacctatccatccatccatccaactatccatctagctatctatccattcatccatctattcattcattcatctatccatccatccatccatccatttatccatccatccgtctatttatccattcatccatctattcatccatccatctatttatacatccatttatccatcgatccatccattcatcatccatctatccatttatatattatcttatacaatttatatataatcttatccatttatatataatcttatacaatttttctctactttattgttatccttcaattactaagagccagaacagtcacataatgtgtgtgggggtcacacaattgtgagtgatggaccttggatgggaac

SEQ ID NO: 840384 - DNA, 625 bp, Homo sapiens
atgttggctaggctggtctcaaactcctgacctcagaggatccacctgtctcagcctcccaaaatgatgggattacaagygtcagccagctgcgcatggccgctattttttaaattttactctcttaataaacttgtttttgctttgcaccgtggactcgccctgaattctttcttgcacgagatccaagaaccctcacttggggtcttgggattgggattggcaactgtttcctgtaacacttccaccaatagaggatggtggaaatgatgccatatgatttctcaagtgggtcattaaaatgtcctgcacttctgctttgttctcttgacatattggctcctggaatgcagccaacatgcaatgagaaaacccaggccatgtggggaggccacatggtgatgtcacagccagcagattcatctgaggtcctagtcagtatcaacacccagatttcttcagatggtttcaccctccagctgtcatgtcactcacagcctttgaggctttctagctgaggccccagacattgtagcgcagaaactagctgttctccagtgtccttctcaaatttcagacctacagaatccatgagcataacgaaacggccgttttatgtcactaa

SEQ ID NO: 840385 - DNA, 660 bp, Homo sapiens
aatacatagcaatccattttacttgaaataagactgtttttaccaggatccagtactacactgaactataaaccagaactaaccacattaatttactgaacccaggcagaaccwgttccaagtatcacttttatttttagtgaatcataaaccaaatcaaagttgtttaaaacattatgaatataagtattccattaaaattacaaccaaaccaatgtgtcttgtaaaataatttttgccatattacaaattattatactagaaatattttgctgttctctaaaatgaatctgaaaaaaaacctcataaataaatagtcatttgttcaagccctttggggtacatactaattcattccaaattgattggtaagatggtaagaaatacattatttatatgaactgagggaggacatgtcacttcacacaccagtccccaataagccctaagctctttttctatcaaaggagctatacaaattcttgttatatgtcacatgatatattagaaagattcaggattttagagtctcgtagactgggatgattgtcacaacccatttactctgagatctcagaaaatttataagacttctcttggttcactttgtcagtagtaaaatggaaaagaaaatatgccaacttcatagcatttgtttgt

SEQ ID NO: 840386 - DNA, 670 bp, Homo sapiens
atatagtggttgcctcttccaaggagaggaaccaaaatactgagtagataattacatttcaaatagatcatctaaaagaaaacactgtgattcaacagacaggtgatggaaagcaccaaaagcaagaaaggagaaggaagtaagacagcctgttcagcttggattgtctgggagtctggggaggctccttaatgcaggcaaagtgtaagtgaaatacacgcagaagtccacattcctgccacagactcctgcaatcctagctaaaggggagcctcttgactctcacaggccctgagactaacatagggagcttcctggagactgtgcaaagacattgctctggagacagagctcacactgggtctcacaagcctccagtcctaagcagtgacattttgagagtgaagcctccacccatagagccccattgacatttcttgctcacagctgctgtacttggggctgaggtgggagccactgacagcaacccctccccgcaagcagaagggtggccactaattttcacatacccctgaggacaaattctactgcctgcaaccactaccactgtgggctgatgctgagtgaaggcagaaaagaagtacatgcctcctagctacttgyctaagtttgctcccactgaaatcaaccctatcctcccccgtggcag

SEQ ID NO: 840387 - DNA, 625 bp, Homo sapiens
cttgctgatcatgtcacaaaggcttactaaagatgggaaaatgagtacagctcaggacagcctgaacagaaagccttgcttatctccatttagaatcaaaagaagatggagcagagcaaggagyccaggcacaagtcatggtacctttggttgtagcatcaggatcctcagtggcagacattgctccagggacccagacctgagcaggagaggatgaaagtggtccctgttcaggtggttgctgagaaaaaggtgagatatgattttaggaattatttagggggcatttgagatacatagagtttttgtcaagcaaataggagcagaactagagatattatatttttgccaatgttactgtgatcccattttgttggccatggcctgggaaaacataggatataagacattaaatttacgtgcaattttgaatactttattaaatgtgtgaacaatgccaattctattttgtctgtttggagttagaaactgaagttcaattcacaaagacacatgaaacaataactaaaatctgggctctatacatttacggaaatacatttacagaaatattcttgaaaggatctgggattttagaaattatagatatacatttatatgaccc

SEQ ID NO: 840388 - DNA, 625 bp, Homo sapiens
cttgctgatcatgtcacaaaggcttactaaagatgggaaaatgagtacagctcaggacagcctgaacagaaagccttgcttatctccatttagaatcaaaagaagatggagcagagcaaggagtccaggcacaagtcatggtacctttggttgtagcatcaggatcctcagtggcagacattgctccagggacccagacctgagcaggagaggatgaaagtggtccctgttcaggtggttgctgagaaaaaggtgagatatgattttaggaattatttagggggcatttgagatacatagagtttttgtcaagcaaataggagcagaactagagatattatatttttgccaatgttactgtgatcccattttgttggccatggcctgggaaaacataggatataagacattaaatttacgtgcaattttgaatactttattaaatgtgtgaacaatgccaattctattttgtctgtttggagttagaaactgaagttcaattcacaaagacacatgaaacaataactaaaatctgggctctatacatttacggaaatacatttacagwaatattcttgaaaggatctgggattttagaaattatagatatacatttatatgaccc

SEQ ID NO: 840389 - DNA, 600 bp, Homo sapiens
aacatattaatagatgtatgattttataatggttgccataggttaattttccaaaataaacaatcattctggaacctttgaaattattttaatctcaatagttcaaggcttttagaagaatttaccagctatcccttaaatacagttttttctgttaatgcaatagaattttaaaataaagagaagaaagcttcacttccatacagattgcaaaactaatttcctcattacttattgccattaaaaactctcattctcctattccttaaattaacaattttttccaataaaaatacagataatgagcaagactttattacaaagtacaaatatcaggaaaacaacctaatgctgaacgctactcactgctgcatgaatttattcagccctggctaattaacggatggattttctatattcattgtttgttataatattctgtgtgctaaaatgcatcagtattttacatgccattccaactagaaatataaccaaaaagtaaaaattcacttaatttatagttaattaaaattccacactaacrctcactttctcatttttaagagtaaatgaacattttaaagtctatatggattaaaa

SEQ ID NO: 840390 - DNA, 638 bp, Homo sapiens
cttcaatctaatcaagttgacactcggtattaaccatcacaagcctaccccttgtcaactkgaacccgtacacatcttctgagatcgtacataatcttcaaataaagacaataataaggtcataactatgcctaacataatacaactatctttcatacgggaaacacaacagtccccaacccaaatactattacataaagttaacaatgcttaaatgctgatgtgaagtcaataaaacttatgtcacatgataagaaaaaggaaataaaatgaagatagtttcttagtacaagtgtataaatgtacaaacaagtttttaacgaaagaaggaggaaataaatactcatgacaatactcatgacaaatatagtccttgtttctgcagctagtcatgtggtcatagctgatatttatgactaccttctactaccaattctgtattccctttgcctttagcaagcaccacagcaggtcgtttgtttgtttgtttgtttatttatttatttatttctggtggagtgacccaaacctttgttgtcgaagagtctgggccatttgtagtccttcctgtatagattgggttgttgttgtttcccactgactttaatcacagggcacggtaatattaagagaagccc

SEQ ID NO: 840391 - DNA, 583 bp, Homo sapiens
gttggcctccatccagaaggtggtgctttcaagagtgcatcagctgcagtaagaggatacaatcttgccctagggtcaggcagtgggtggggccatagagctcccaamatttatgttctttgtcttcagctaccagggcaggtagagaaagaccatcaggttggggcagggttaagggtgtctgcgcttagactctccttgggcagtgcttgctgtggctgctgtgggggtggggagtgtggttcccaggccaatggaattatgttcccatggggattatggctgcatctgctgtgtcacacaggtcaccagggaagtgggagaaagttggcagccaaagcttcacccagctcccacatagcccgcagcccaaaaggctggtctcacttccacagtgcccccttaacagtaccaagtttatttccagatagccagtaagcagggctgagaatttgccccaggttacaagcctcccagcttagaaagcaagctgactcacagttcctcagctgtcccagggagcctgcagcagcagtccacctccttcaaatgatctgtggatcctcttcactttcctggtatg

SEQ ID NO: 840392 - DNA, 564 bp, Homo sapiens
ccggctccgcttcaggatcctttcaacacaggagctagaatgatcttgtttaaatgatcaaatcgcctttccactcaaaatcctctcattttataaaagataaagacctaactatggtccayaaggagctgaaaaatctgcttgtgccgcctccattcttcaacatcatttcccacttttcttccccttcctgtgccagagcacatcagccacgcttctgcctcaggcccaggcactgactggcccttctctctgcctagaacagtcttctctcagtaaatgctccctcagctccttcaagtttttcttcatatgtcaccttcaaaatgagggcttccttaaccaagtggcttttaaaaaattattttattcccaggctggagtgctgtggtcccatctcactgcaacctccgcctcccagcctcaagcgatcctcccacctcagcctccagagtagctgggactataggcaccatgaccggctaagtttggtatttttggaagagatgaggtttcgctatgttgctcaggctgatctagaacttgtgaactcaagtaatcctc

SEQ ID NO: 840393 - DNA, 510 bp, Homo sapiens
tattaattctgtatttaaaaaatcctattaataatcttgtccattatgagataaggtagttatgcagatttttggcagaaattcggatattttaggatacatatgtgtgtgtgtgtgtgtgtgtgtgtgtgcgcgcgcgtgtgtgtgtgtgtatatgtttttttttttttgagacagagccttgctctgtcgtccaggctggagtgcagtggctggatctgggctcactacaatctctgcctcccgggtttaaggaattcccctgcctcagcctcccgagtagctggaactacaggcacgcaccacgacacccggctaatttttgtatttttagcagagacagggtttcaccatgttggccaggctggtctcgaactcctgacctgaagtgatgtacccgcctccgcctcccaaaatgctgatccagacgtgagccaccacgyccagcctaggataaaaatttctaactttgcccttgagtgttctctgtatttgataattactattctt

SEQ ID NO: 840394 - DNA, 579 bp, Homo sapiens
gcatcaaaggaacatacctcaaaataataaaagccatctacatcaaacccacagccaacatcatactgagtgggcaaaagctggaacaattccccttgaggtctgcaacaagaaatagatgcccactctcaccattcctattaagcatagtactggaagtgctagtcagagcaatcaggtaagagaaagaaataaaggacattcaaataggaaaagaaaaagtcaaactgtctctctttgcagacaatatgatcctatatcaagaaaaccctaaagactctatcaaaaggctccaggaaccgataacttcgtaaaatttcaggatataaaatctatgtaaaaaatcagtaatattagtaatacttctatacatcagtaatgtttgagagccaaatcaagaatgcaatctcatttacaatagctaaaaaaacaaaataaaatacctagtaatacatgtaatcaaggaagygaaatgtctctacaaggagaactacaaaacactgctaaaagtaatcacagataacataaacaaatggaaaaacattccgtgtttatggattaaaagaaccaatatcatta

SEQ ID NO: 840395 - DNA, 357 bp, Homo sapiens
aattcttttaaaatttagtgtctataaccaagtcaatatttttaagtttctaattttaatgaagctattgcatctttctgaaaaatctttagtgacttaatcaagtccatcactgatgaagcctcctggtatakgaaactactgtgtttcactcacgtccgtgtgaagagaccaccaaacaggctttgtgtgagcaataaagctgtttgcaggcgggctgagtccaaaaagagagtcagcgaagggagatacggggtggggctgttttacaggatttggttaggtaaaggaaaaaggggggtggttctctggcgggcaggagtgggggtcacaaggtgctcagtagggaagcttttg

SEQ ID NO: 840396 - DNA, 649 bp, Homo sapiens
tagtcctataaaaacatagaattatttaccattaacactttaatttattttattttttgagatggagtctcactctgtccccaggctggagtgcagtggctcaatctccactcactgcaatctccacctcccgggttcaagtgattgtcctgcctcagcctctcaaatagctttaacactttattcaccagttaaggatacagagacttgaaatagaaagatgcatgcaaaaaatatgagatgtttctccccctgcctcacatacttacatatctttttttttttttctgagatggggccttgctctgtcgcccaggctggagtgcagtggtacgatctcggcccactgcaacatctgcctcctagcttcaagtgattcacatgtctcagcctaccaagtggctgggattacaggcctgcaccaccacaaccggctaattttttgtatttttagtagagatggggttttgccgtgctggccaggctgttctcaaactcttgacctcaggtgatccrcccacctcggccttccaaagtgttgggattacaggcaagagccactgcacctggcccacatatcatttttctaaatgagtttatatatagctagatgcagttgctgaagaaaagaaataaaacttatgttcta

SEQ ID NO: 840397 - DNA, 566 bp, Homo sapiens
tccttcattcggttaatgtgtatcacatttattaatttgtgtacattgaactattttgcatcctggaataaatccctcttgattgtagtgtataatcctttagaggtgctgttgaattcaacttgttagtattttattgaggatatttgaatcaatgttcatcagggatattggcctgaaattttcttttcttatcatgtccttatttgtctacttttgatatgctgtaatgctggcctcataaaatgagtttgcaagtgtgcctttctttttatttttttgtgaaagaatttcagaaagattggtattaattttctttaaatgtttggtaggagtcaccagtgaagctatctccttactcattattattctgaacagatattcctttatgattcagtcttggtatgttgtatgtttcttggaatttatacttttgtataggttatccaatttgggaataactcttcataaaagtcccttagtatcttttgtatttcattgctatcagtgataatgttcccrctttcaattttaattttgttatttggctcatctctttttttttt

SEQ ID NO: 840398 - DNA, 617 bp, Homo sapiens
agtatttatgtgctaagttgacgatgggtagactwgtgatggttaattttatgtgttgactgggccacgggataccaaatacttggtcagatgtgacactggttatttctcagcatgttttgggtgacattaacatttaagttgggagactgagtaaaggaaactgccctccacaatgtgggtcagctttatccaatcagatgaaggcctgaatggaacaaaaagctgattctcctccaagtcagagagaattctttgtgcctgatggatgcggactgggacactagcttttgctctgcttttggactcaaagggaaacacgggctcttccttggtcttgagtctgccagcttttggaatggaaatacaatactggcttctatggttctcaggcatttggactcagtctggaattaaaccgtaagatttcctgggtctcctgattgctgaatcaccctgcagatattgggatgcaccatcttccataatcacatgagccaattctttgttgaaaaagtctatttttgtgtatatcacatataatatagacaaatatatttatgtaaatatatattatgtataggcagaaatatatatatttggctattttcctctga

SEQ ID NO: 840399 - DNA, 646 bp, Homo sapiens
aagatttcagcctttgagaaattgcttttgtgaagttgaaaaaagaaaagtcagactagacttctctgttacaacattatatttgtaaagtaacaagcatttttggattaaaacatttttcaatttcatgataactttttaaagcaaaatttggctgtgacaatactccaacagaaaaaaaaaaaagatttaaactcaaaaattacttttttttttcttttatttaagacagagtcttgcactgtcgcacaggctggagtgcagcgaggtgatcttgactcactgcaacctccacctcctggactccagtgatcctcctgcctcagccttccaagtagttggcattacaggcatgtgccaccacatctggctaatttttgtattttttgcaaagatgaggtttctccatgttggccaggctggtctccaactcctggtctcaagtgatccgcctgcctcggcttcccaaagtgctgggattataggtgtgaaccactgtgcccagcgaaaaattactttgttttttaatggtctcatgacagttctctgtaccactttggtaaagagtaygagtatttataatttaaaggcacggtatacctacagccatttgagactttcaggtaacttgtatttaatttaccaa

SEQ ID NO: 840400 - DNA, 542 bp, Homo sapiens
ctctgtaaaataataattagtcacagccagctccaaggaagggcagtctccctatagataaaaacacctgtaactggtgataggcagcttcccaataagatctcaggagttgggtgtgtgggcttgagcatgtgcattaagaagcaaaatggcagagtttagctgacatatagccttccagggacattctactggaaaagggatgcaagacaccagaagtagacccgcatataaaaccctaagtccaacgtcaaatgggacacttgaccttcaaggtgtccacatggccctcttccaagtatactttatttttttttcatttcttctctaaagcttttaaataaactttcactcttgctctaaaacttgccgcagtctcttctgccttatgcccctcagctgaattttttyttcagaggaggcaagcattgaggtttctgtagacctgtacggatttgccactggtaactgggataacttccactggtataaaaatgagaacatgaaaagtttgtctttctgtgcctgacttatttcattta

SEQ ID NO: 840401 - DNA, 605 bp, Homo sapiens
aaatagacagtgaaaatgtgataaaagaaatactttgacagattggctaaacatcacatattactgaaggagaaagatttaatgtatataaagagatttcagtcctggcactaatggaccagagttgtgaattaagaagcatccaatccatatgatattctgttctgtgatgaagacttttaaggaaggaatgaacattagacttcatcttcccatttgctattcaataagaaatattgaggaattattcagcatctgactagaaaacaactgactcaaggaagtaaagaaatgaagcaagatttatattatccaaatacagaaagacagcaatacaaagatatagacaggagtagcctactgacaatagagatgagcaatcatgagaagcaactttcacattagggcatctaaaaggtcagaaaggggcaccttggtgctaaacatattgatttataaataaatgaacataatagtctaatgaaataacccgaaactattctaacatgtaactggatgattattagtctttttytttctttctttaaagaatgggcaagataatgatatgttacaatttatgggaatgttgtaatttacattta

SEQ ID NO: 840402 - DNA, 480 bp, Homo sapiens
ggatttcatctgccagtggatggagtacatttcttaacacaggtaagcacatttcctctgggctaggtgaatttcatgattcctataaggatccctgctggaaaaagacccgtaaggcactatataatattgagcaaccttcatgaaagtaaaaaaaagagattgtgctttaagttcccttaccccaccaattttacatacacctttaaaggctatattaaaaggatttccttttgtcaggttcatgctgaatccacaaaaaaaaattatcactatcatgagtcctttgggaaagagtggtctttttgaagatgatttcaaagtgattgctttattttaaaaatagtctttgaagtagtatcattggtttttcctgtaattggatattcatcaatgaaaagagtaggggtctctggccagttcttataraagatagtaaattagcctcagcactaaatagaagtctcagaaaagaaaaga

SEQ ID NO: 840403 - DNA, 439 bp, Homo sapiens
atttacatcaacaactttgcagaaaactaatttatggtactgaccaatggatttttaacaaatatctgactttttaaataaatgactaagtataaggctgttcatagtaatactacattataatttgttttccataacttatactgatattttgtgttctcagctcttcccatctactactcctgggattcagtcactgatgcatgaattttatgatgtggcaaatcctgtgggaaatcctggctcagtcctgacccaatactggtctcttttaaatgtatttgaacaatttcagttcatgaataaaaagacacagccacatccactggaatggtaagatagccacaaatttgaattgkacaatccaaaaaatctctagtttacagattgatttcaaaaggctttgcctatgttaaagcaagcagcaacaacaaaaaag

SEQ ID NO: 840404 - DNA, 314 bp, Homo sapiens
gaggattgaaatgcagaaagcgtttttttgtgttcatcaaagtaactgtgcccatacagaagaaaagatagtgtgttagatgtaatttccacgcgttttgttcatttcattaatccagagttgtttggcattgcatttgcaggaattctttcacagaagataagaacattgaaaaaccacaagtgccatttgatgcaatagaaaataaaaaaggtaaaaatatagatattcccacttatttcaacataaaaataagtwtttcctggcaaaaaaatgcaaaactatttagcttcattagcaatcaaaaatgaaaa

SEQ ID NO: 840405 - DNA, 612 bp, Homo sapiens
atatttacccacttcacagttgtctttgtcattgtttttgtttttttaacagatgaaaacacaccatgtcatatcaagcagatcttcacacatccacatttggaactaaatcctgactttcatccaaagatcaaagattattactgtgaagtcccatttgatgtggtaacagtgacaattggagtggaaactcctaagtgtctgtgcaaggtgcacctgtacgagcaggcagggccaaggtatgagatgttgactggggctgtgttgagacactatactgggaagtagacatttgatgcaaactttgaaagtggttcagaaaagctgattcataagatcagttgaaagattgccaggatgtgaactttccccttctcattttttttaaaaaagatttgtaacctttgcagctcatctttgtaacaatattttaacaagaaaggatcttgttatatgaaatatagagaagatccattaaggaaaaattttacttattgttgtcttcatgttttaacattctcraagatgtcaagtttttgaatattcaaaaattgattgcttaaaccaattggtgcacaatttgtggacacagtacccctaacttttctaacc

SEQ ID NO: 840406 - DNA, 487 bp, Homo sapiens
ttgttttcttacatttgtgtmtttcaatgattgttttgctaacataaattactatgtttcttaagttttatttgcccttgttaaacataatttaaatctataaaaacaaaaaggaacaaaaaaggaaaagtaatatcaagcatcagataaaagatgtgccaaagtaggatatgttggatataaacttcacttaagtatccagtatataaacttcacttaagtatccagtaagtgttttttcttgtttctttttggtgttgtttgtaactgtttttgagaaagcagtgtctaaaagcaaaagtaaatttccttttgtcaaactttaaaaattagaaactcattaactgaccagtaatgaaaataaaggatctgttcattaatgaccaaattcatgtttaaggacacaattttgtatgagtagcttcaaataatctttaccccagtcttcctactattcaatcatgaaagagtgatagtatgtttagta

SEQ ID NO: 840407 - DNA, 515 bp, Homo sapiens
ttgcttctcttcccaaaactattctgtatccaagaccttgttattcatacttttgagcagatagggagacaaacttgcaaatcttgtccatacttttatcacagccctttattccttctctgtctttggtaaaatatgtttcaaattttacttcaatacttgcaaattacctaaacattgtatgcatgggaatttatagaaagctgctttctccataactttaaaattttattaaataatatttgaatgttgtgtgtgggacactagcacttatctgttattataaaatgagtcctcatagctctatttgaaattccagatattttatgcatctatgaaaaagctgtccttgggccaatataattttttaatttcctggtgcctagaaagctgaacaccagcataatacatattccttwcaagatttccaacacatagggcactatacacacatctaccaagattatcaaaatcaaatatcaaatgttatagatacctgcagtttattgaagaaa

SEQ ID NO: 840408 - DNA, 468 bp, Homo sapiens
aatagaaacatgtaagaccccagacttttaatagacatgatgatgaaatatctacacaggtatctgtaatactaacccaggaaatctttgtgtagagttaaaagcttgattttgaagaaacataaratagttttaaaatatttttgctttattctttccatagtttaattactatcattttaaatcacctttcattatatgaaaacccatattgaaacaaagaactgctcattttctagtgtttacagatacatcacataatgttgataactccagcaaaaatttaattttagaaatctgatcattttaagtcaaaggagaagtacatctaacacagttatgctaggttgagaatatgaagtactgctttaaatgtttgctctggaaccaaatgtagaaaagtttagataagtcatggaccaatcattactaaattcacctcaaggatattttcactcttctctactt

SEQ ID NO: 840409 - DNA, 479 bp, Homo sapiens
aatcacctttcattatatgaaaacccatattgaaacaaagaactgctcattttctagtgtttacagatacatcacataatgttgataactccagcaaaaatttaattttagaaatctgatcattttaagtcaaaggagaagtacatctaacacagttatgctaggttgagaatatgaagtactgctttaaatgtttgctctggaaccaaatgtagaaaagtttagataagtcatggaccaatcattactaaattcacctcaaggatattttcactcttctctacttggtaataaccactaagggaatagggaaatttacacacatatctaagaaatatgaaggacttccagacagttatgcatttwgaagaaaacatttatcttcagtgtaaaaacattcaatagttaatttttctttcaaaaacacaacttgctgcttattaccggtatcttgacttctaacaaaacctcaagcttgg

SEQ ID NO: 840410 - DNA, 512 bp, Homo sapiens
cattatatgaaaacccatattgaaacaaagaactgctcattttctagtgtttacagatacatcacataatgttgataactccagcaaaaatttaattttagaaatctgatcattttaagtcaaaggagaagtacatctaacacagttatgctaggttgagaatatgaagtactgctttaaatgtttgctctggaaccaaatgtagaaaagtttagataagtcatggaccaatcattactaaattcacctcaaggatattttcactcttctctacttggtaataaccactaagggaatagggaaatttacacacatatctaagaaatatgaaggacttccagacagttatgcattttgaagaaaacatttatcttcagtgtaaaaacattcaatagttaatttttytttcaaaaacacaacttgctgcttattaccggtatcttgacttctaacaaaacctcaagcttggttggtgtttggtgtgaatgtgtgttcctatgagtgtgctgtaa

SEQ ID NO: 840411 - DNA, 502 bp, Homo sapiens
ctcagtaccttataccttggcatttataaactagacaatctcaaaaaatgttattgaaccaaactgacaaaataagaaggcttttttattcaaatataagcttctgagtgtcatgagcacacatyttttttgatgcctttttatagcttcttagataaaagctcatttttatggttacattcggtatggtttcttgtgcacatgctatgcttctgtgtgaaagatgagtaaatcagatccattttcattgcagttttcctcagatggcaagtgtgagtggagcaagcacacttttgcctgattggaagcacctgcagtttatttgccatggggttgttccctgtgtttttgcccggactcatactttacagagtgctgcccaatcctgcttattttcctctcactgcaactttcatatcagctgccattggggttgtcttcttactactctctgaaattcactacgccagagccttctctgcagctcatgtgaaatgcagcc

SEQ ID NO: 840412 - DNA, 464 bp, Homo sapiens
gaatgattttgttgttgttgttgtgccagatagatgtctgtcatcacaaaatatttattttgtttataattttaagaaaatagtaaatggatgacaattgcttccatatagctctgtggtattttytttttgtttttggcccctgttgccacatacgagtttttcactaatgatccatcatcgaataaatggtctcacgtgatttctcaggtcattgtttttatataactagtcattggaacagctgactcagttatatggatttttctggtcatgggttctttaacagatagttaaagatatgtcatcaaaaattactgtctcctcaggaaattaaaattctctgagatggctgaattagcttccatataagcaatgtcaacttgcttcacatatttttatagtcagctttatgaaactataaaaatttgtttgtggaacatcttactattgacagtgaaatt

SEQ ID NO: 840413 - DNA, 389 bp, Homo sapiens
tactcagtccccaaatgcaastagacaaaacccatcgtcaatctgttccagattgtcttgtgtattttatggctaaggactgaattgcaagctaacattcacagctgggaagaaaaaattgcaatttataaatcagggtccagtaagtctaagagacaaaggatgcccactgctttgcaggtggaggtataggaaaggatcaattgctttaggccccacttcccctgtctctgttttttcctctgcttagaaagcctgtcagcctcctatcctcctggtgaacttcaatatacttcaagtttaaactaaagcatctcgagttgaccatgttcttttgtgccaacactgtgtccagagcaatcttcattacagcatttatcactctctac

SEQ ID NO: 840414 - DNA, 454 bp, Homo sapiens
gtttaattttgtcctatacttttattagccagctacttagtaaaagtttttataagttttataaaaggaaatagagtttagagacttacctggtaataatttttatacataacaaagttgaagaagcttaatttgttgtcacattcaagaactctgtgtcattagaatgagccaagcatggaaatcatgattccaaattaatgtgactaatttctacccacttcctatcccagtctctgagcatcgtctactctgaacttgaatggtcatggtttcacccagctctagcatgttccaggtgctcatccccctacctggaacatttgcttaactcactcttatgtttccttggataaactataagtytgcgagacaagacagtattaaatggctgtacaggctgcttgtccttcatagcccttagtaggaatcaaacctgccaatgcctccgttt

SEQ ID NO: 840415 - DNA, 598 bp, Homo sapiens
attttcttttatctcttccagtttctctctcttaatatacctacrtttctttctctttctgtgttcaatcagtaagagccataaactatatcatctttcatattttatattaataactatttccacatacacaaacacattcacaattctaacatccctgaagtcatgaatataaaatgcactatattcatctcctaaaaacagaaatcctttcccctaaaattaatataacaccagataccattattagcagtaccactaatcaaagccagaatggacaaagtttttaagttttttcctttctaactcaagaactatctgggtgatatttagctcctcagttttgaagggtaaacatatactagtaacataagcaagatatttagggtaaggagagtgattatcagagaaataattgcatatgttctccaacaaggagagaaataaccactccatatttgttcatatgatgtgctatgttcacactcaattcctgaaacgatgaacaaggaaaaaaaaacaaaaaaattatatttttctaccacattattaatgtatccactcacactaaaagctgaagtgttttgcatgaatgttg

SEQ ID NO: 840416 - DNA, 654 bp, Homo sapiens
tatgacattaaaaaaatactaaggagggttaaaacagagtggtaaaagtgaagaagagaaaagcatgttacggagagtaggcaaaatatgacgcatgtccactaatactgacatctagttattgggaaagtggaattatcagcatatttgtaatcactaggtaagatctctaattttaaattttatctagttttaaatttttattttaaattttattcatatttacctattaccagaataaaagaaaaagagaagaaaacatgctcttgaaaaaaatgactcagttaaatctacctgatctggtttaaaggaactgaataaaactccatgcactcaggacaatgacagtgacctcaaaggcaggacctcttgaaatgtcgccagtgaccacaatctttttaacgtgtagacaacataaagaactcctttttattagggagataccacattttcatgtatctctaaaatgggttaaatcatttgtttagcttacattatgtatgttttactccaggatttttaaaaatgttttttgatggagaaaactgttaatatataatagggctttactgacttttaaaaagtgacattttccataatatttgtataygtaatattattttttacttatataaatggacttaccttggtcat

SEQ ID NO: 840417 - DNA, 391 bp, Homo sapiens
gtatattggattgtctcgtgtggaaactgaggcagtgttgtcctctttggaagaggcaaatatcaggttttgggggcctttttgtgaggtgggagggaagacggaatgaggcaggtgtcccctgttctcacagcatctgtctgtgccattgaattggcccctgggttgttccttcgtgggtcataattgcatttttgcctgtttctccagtgtggatgtggaacgccccttctttctatcacttgcattactctcttcagttccacattatttaggtgacccagataaaaacaaaaaacggcagcrccgttactggaaactgtatgttgtaggggggcatcacctcctctctgctagctgctctctgcctttgcaggaggatcccactgga

SEQ ID NO: 840418 - DNA, 371 bp, Homo sapiens
acttttcctcacctattatatggttacttagtggaatagttgacacaaatggcaagattaatgtgcttgattctttaccttttatttactrttttttaaaataatgatgtggtttattgatgactaattagtgttattagtatgattttgaactcatgaatttaaacatatttggtatgtttcaatccatggatgtcattaatgtattgaagtaattattgtaattaatgttcacgtcccatctttggacaatgggaacatattcaattggcttgactccttttttcacagtcctttgatagcttccatgttatttagtgtaactggctatcctaggctgacattgtatatctgttccaggttgagagtca

SEQ ID NO: 840419 - DNA, 610 bp, Homo sapiens
aaagttctcatttgctaaactggggatgaagggaggtggagagtgaagtggtgatgcctagctaattaaaatgacataaatgttatacactttatagagcacttttacatattttaactcagagaaactctaggaggtgggaaaagcacagtatcattttacaaataatatcagaaaacttatttgaaaatgagaaaactgagcttagagaggttcaagattaccagatttccatgtggatttagccagactgcaaacctggttctttaaaggtacctttggttgtaaatggctgtggttttcttgttttctggtcttgttattacgttaaatgctgatgaattccagtttttagatccctgggtaaatgccaggttgaagaatgttaaatttatcacaagttacatattttttcctcctttaaaactgcattagttgttttctctgacccggtgattcataaagtgtggtctggaaccagcagcagtagctgaatacttagaaatgcaaattgtcaggctgcacgcatctcagacctgaagaatmagaaaccccgggggtgggatccagtaatctatgttatatcaagccctcctggggatgctgaaac

SEQ ID NO: 840420 - DNA, 635 bp, Homo sapiens
ctttttgtgagacagaaataaactgctgttttgttcaagccactttgtttatatatgaattttgtaagtacatagagtgtatactctcaaaaagaggagcaatgttcatgccatgtggtccatggggagtgttcaatgttgatgatggaggtgatgacgatgaaatgaaagccaagaaaacaaaatggcttaaataactatgtattttctttatatttctcttctttatttccacatcccagctccttccaacatatttccaatagtggaatagacctttatcaatgataaatttgtgataatttacaattacaaagcaattgttacaatagtgactttttcctcttaaactcatggtctttgaatgcaaaagtaatgcttgcttctgctactatactttgcttatattatagatttgcaagaaagcttcttggatctaataaggcagatttccaaagcaaaggtagccttgtttagctgcatttaatccggattctgtaatatcaaacmatctggcataacaacagacgaaaggcatactcttgtctctttaggaaacaatatacccactgaattttatttctattctagctttgtttcaaatgtcgagaaagaaatatttttggatttttttt

SEQ ID NO: 840421 - DNA, 521 bp, Homo sapiens
gaggtgaatattgtatatacattcataaggagatcatattcatagcttatccataaggctgtgaggaataaatgggaatatatgaaatcacttattaytatgatatgtacatgttaaatggtcatgaattaatttattcatttgttcagcaaacatttctctgagtatctaccatattcccagcacaaactatgtgctaggaatacaaagataaataatataagctctctgtgccttagcaaatttacagtctagtagggagatagaaaaatgattaaatgattataataaaatattaactatatgtagcaatgaaagaaaacccacatcagttactacatgagcctccacatcatgccattgctccagccagtgggagaaggtgtcttacaagaggtactatgtgagctgaggtttgaggaatgcataggaatttgccagattcaagatagatcaggagaaaggtggggagaacagagcagggtatccctggtgcagaaaggaaaggtattcacacacaa

SEQ ID NO: 840422 - DNA, 611 bp, Homo sapiens
caaaggtttagaagtcactgtgctgtcaaaacaactgcaactcaaatgtatragtgtaacgtgtagttgttttgtttaccatacctttatgtaagtactaagcaatataaccagtttataagcattacttttgtatatatgtatatatcccttcccacagcttttgcctgtgatgaaaaaaaaaaaaaaagtttgcattgaaaggaaggctgatctttaccatatgttataatctgtatttcattctgaatcctaaacctgtatgtctgagcacaccgctaagttgcagaaaagtttcaggatctttaaccgcatactaatcgctattcgaaaactgcctgtttaccttcagtatttactgatctttgatggcatttatcttatactttcttgggcaaaagaaatggtttcaaaatgtgacatagataacactcttcttaatgataatctaaggccttcctaaaaatgtggaaaataacacttccctaaacagtaattgtactatgaaaataaaatttcatttacacagtaagattctatttgcacttgttgttttaagtggcaaagagaatatgaactgtaagcctagaattcggagagatttgcctctt

SEQ ID NO: 840423 - DNA, 476 bp, Homo sapiens
gctttgtctctggctaatgtgagatgggctccaccaaccagaagctactcttcccatgtcagaacactgaggtgttttatagtcatggtggtggtgrcagtagcattggtgagagtgtgaggttggtgtgataaaaaccgaaggctcggccggtaacagagagcctgattgttgcagactttgtctaaaatttgtgtttttaagaaaaaaaaagtgacattctcttgaccttagttcctaatgggctaaaagaatgaaaaacatccctgtatataagtctgtgcccaactgtcacaaagcagcaatagccatttgctctgggctaagacagctcagccttttttttttttttttttttaaggaagtagacctgtttttgatgcttgagatattaggggtgaaggagagtcatttattataaatgtgttgaatactttgcctaaatagggaaagggagttaaactacatccaaggaa

SEQ ID NO: 840424 - DNA, 596 bp, Homo sapiens
acagatcccgtgtataatatatatcatcatatatgtgagttgagttataaatagttgagatggtacatttcgtagacacttaattaaatgtttactacttttaattttatagtttctgtttcattttggaaccaactaattattttgaggtctggaacattttcatgggcctttaaaaaactcaccctccctgagtgctgtccctacaggtgctgaagccgcctcttgctctcattcactcctgtttccctcctcacacctgtggcagaaccgaggcaggtgcttactaaatgcttgttggtgaatgcccaagtgagtgagagaaggaatagaagaagtaacaaataagtgaagtacaagtaagtggcaaagtctggtgtcgaaggacgtctgaacccttagcgggctcatttcctttgcactgtcatcacagtgaagcagaacgggcatcttcaagctgtgtatcaaagtgtgttcctccccatttctcattgttttgttccaagccagttttcttctctgttacagctaaggcatgagaaagaatagactaccagsttatttgacttttgataagttcatgaagcagcaatagc

SEQ ID NO: 840425 - DNA, 581 bp, Homo sapiens
gtctctcgagtccaggggctctctgctcacactcggccaagctcttgctgtttaagggtgcctttcatgaagtctatttgaaatgttttgrtttctgtcagtttttggttgggttataggtaagtacacaagttaccacatgtatttagaaggcccaatccctccatttatcaactaaagttaaagaaaggaaggaagcctgtagcaaaaaaaaaaaaaaaacaaaaaaccatgcaggttcccccactgctatatgattttctatatttatgttttaatttcttggtaggcctggacttcaaagtagagattcagagccctacctgagtttgggttgtgccctgtggctgccatccttcctcacagaagttcctccctggacttcagcctcggggttcttgttcactttcagtatttcctttttgcagtgtgtatgtgtgtgtacggaactatatagatgttgattgtccctaaatgatcttcttccaaactcatccaaaccatttaatttgtagcaggaatcccaaagtatatccttcccagagaaagaatgagatttgcctggcaccaagttaaggaaa

SEQ ID NO: 840426 - DNA, 620 bp, Homo sapiens
attaaattagaggatatttgccagaagaaatcaactagaattttatattgctcaagagagtttcaagtcattctagagatgaaaactccgttactaaatcatagctgctcctgtcagtcacattgatgtggacattttatgtaaataaggtgctgccattctgcttgtcattgatgctgcctcaaattattatgtatgttcttaatctatttcatttttgtcctaatccacaaatttaaaatctctttccaccctgtgaaaatcatggactggcctcgtttgttgtctttggatccctctaggtcccagaggtaagctttgctataaaattggtaatttcccctcactctggtttctagtcatttctgtacttgtcctttttcctctgtatgtgtgagctaaactttgttacatttttatagatggggtgctgtaaggatattaagctgcagtgttttgcttcctcgttacagatatagtaacctcatattagagcatcctaacattcagcctcattataggttgtcaaggcagtgtagagccttwgcttatatagtttcaatttgggcatgaagtatgtgggctttctctgtcaaaggctatatagtacataaccaatg

SEQ ID NO: 840427 - DNA, 553 bp, Homo sapiens
aaatgggttaagtctttgagtggattttcttatcatagatgtaatgagttccttatgaacagagaaacaacgcattgctaagtgagttacttgataaggttatgtggactgyagttgcctatgcaaataagaaaccacttggttcttcctaattttaattaacctctaactttgcatcaggctttacatcaaatctctacaatatttacaaacccagtttgcactgtatgaatttgcattttatgagagatttcatcacttgtattctcaaatttctactcactagaaagacagggtcataatcttcaggaaagaacatcccccataattccacaccctaacccaaaaatctactttgttttcctatgttttctttacattttggttcatatgtttacatttaaaaatagtaatcagtgcaaattcagttgttggagcgcttcagattgcatattaatctgcaaatgttttccagtttgttgcagtctttacaaatatgatttaaattgctaatggctggatggtattcctttgagagatagagtgtgtgtgt

SEQ ID NO: 840428 - DNA, 553 bp, Homo sapiens
aaatgggttaagtctttgagtggattttcttatcatagatgtaatgagttccttatgaacagagaaacaacgcattgctaagtgagttacttgataaggttatgtggactgcagttgcctatgcaaataagaaaccacttggttcttcctaattttaattaacctctaactttgcatcaggctttacatcaaatctctacaatatttacaaacccagtttgcactgtatgaatttgcattttatgagagatttcatcacttgtattctcaaatttctactcactagaaagacagggtcataatcttcaggaaagaacatcccccataattccacaccctaacccaaaaatctactttgttttcctatgttttctttacattttggttcatatgtttacatttaaaaatagtaatcagtgcaaattcagttgttggagcgcttcagattgcatattaatctgcaaaygttttccagtttgttgcagtctttacaaatatgatttaaattgctaatggctggatggtattcctttgagagatagagtgtgtgtgt

SEQ ID NO: 840429 - DNA, 484 bp, Homo sapiens
atccctggaggccagtatagttcaagaccagcctgggcaacacagtgagacccccmtctctacaaaaaaattaaaaaattatctgggcatggtggtgtgtgcctgtagtcccagctactcgggaggctgaggtgagaggatcgctggaacccaagagttggaggctgcagtgagcaatgattgtgccactacactccagcctgggtaatggagcaaataataataataataataataataataataataataataaatttcttttataaagagcatagtttcatggaagacagacatgcacatgaaaggatatgtcagtttaaatccagttaagtgtcctgaatgaagagcttatcaaaaagcaactaaacttcagttgggattccagggaaggcttccctgagaaaatgaaactggtcttatctctaaaaaatgaggaagacatcatggatgtggaagaagtaaaggaacatcacgtatgagg

SEQ ID NO: 840430 - DNA, 610 bp, Homo sapiens
gataaagttcccatcctaacagcttcctggcaggcgcagctgactgcacttcttggagtaagaaaggaaacttccctatggcccactgctccaggcctcccttctgttctccagggcagaagaagaaaggccccaaactaacactcactggagctttgggaatcacatgagctcctgtgtcttttcaatagaatactgtccattttgaggaaagaagacaaaaactgtctcctccttcaactcttaactttttataatatgccctcagccagatctaagaactgaaaattacctccagtagttttctgaacaaaatagcacctttgacagcttactgcggaggcagattctgggaatgttttaggatctcaacttatatctgaaactcttctcttactggtctaatatgcaataatttaaaccagtgtgaagcaaaacttaccacattttaaaatggaaatctaaatagttttctcgccagcttagggggacaaagaaaagtgcaggatgacttggggtacaaagatcattctaactcctgcttggcacgrggtccttctggatcccaagtcagagctgatgaggtaactacacaggagaccctcagtat

SEQ ID NO: 840431 - DNA, 603 bp, Homo sapiens
ggttcttcttggaacatgaggtggtgtgggcagggatcatggaggattgctagcaagtgtgaagtggctgtaggcgtgagaattttactatggggtgtgaagcgttgggcctcctgtggaaaggtgaattactgtgggggaggaggttagggcttcccacgggaggtgaggaggtctgagaagggtaagattgtagtttgctgtggactgtaaaatgcctgttgggtcagacgattggatttactgcagaatatgtagtgattgtaaggagggacaatttttgcttgatgtggaatgtgaattggttgtatggaggaggatttgtgtttatgatgaagtgtgaaatggtggggagagggtctgaggctgactgtggagtgttaagtagatatggcagtgggaggcttatggctgattttggagtgagacatggtatcctgagttatattttgctccctatctttccataaactatctcctaaatctgactaaacatgtccctcccagggaagccacttagaatcatgggaaccttccaccaccyatacatccctcttctcctccacttagaagaaatttatttgagcactttaatgtacctgg

SEQ ID NO: 840432 - DNA, 613 bp, Homo sapiens
  misc_feature 31, 457: n = A,T,C or G
gaacctgccaaggagagatgcaaccttgttnacattcttgttggcagctaatgaagaagctgctgtgtactcgagctattatctaacccaaaaataacacatgaaaatgattaatttcatctaaaaataagcaggcgctaggctatgtcagccatgataatcaggctctgagctgattgtactgcagcattggagtggaacttgggaacaaagggagaaacaaatttgagctcatagtaatcatctcctactgccttttcttccctctgtttcttctcttttctcttcctactttgttgttatttttccttctctttttccttctcttttttctccacgttttccttcttctctgtagtttcttcctcctctcttcttcccccttcttttaaaaacactcccctcccttatttcattattacactattatcctcagactgcagtggatccatccccnattgcttacggcacagtttcctacagcagtacctgtctctacttgtagcacataatatattgttacggggtgagtaaatgatcattaattgttaaggatcaaaattattttaatgttttaattaaaaamttactgcatataatctattattgcatg

SEQ ID NO: 840433 - DNA, 599 bp, Homo sapiens
tggtagctatattttaattgtttgagaaactttcatgctgttttccataatggctgtgccaactgacatccccaccagcagagtacaagggttccctcttctccrcatccttgccaactcttatctcttgtccttttgatgttaaagacaacatgctatttactatgaaatcctctgcctctagaccccagagggaagaccctggtgacttgaaattgccttggcatggctcaatgaaatctgggatactcaggatctggccctagtccagagttggtttcctatttgtgtcatgaatagtcagtccagcaatggttaagagtcttaaaacagccagacagcccaggtttgaatcttatctctgcatttactatctatgagcccaggaaaagttattacatctctttgtgcctcactcttcctatctttgaaatggtgataatagtagtactagaaagtattgctttataagaacaacatgatgttaaatgagttaatatgcgtgatttatggaaaacaatactggcacatagtagacagtattactgctcagctgtgagttacatatgtgtgtatgtatatatacacatacacgtata

SEQ ID NO: 840434 - DNA, 546 bp, Homo sapiens
accatctccacctcccctccaggcccctactacccttccccacctctggtaattagctctctactctctagctccatgaatcarattgttttgatttttagaccccacatatgagtgagaatatgtgatgtttggctttctgtgcctggcttatttcatttgacataatgacctccagttctgtccatgttattgcaaataacaggatctcattcttttttattgctgaatagtactccattgtgtattaaagtaccacatttttttaaaacccatgttgatggagacttgggttgcttccagatcttggctattgtgaacagtgctgcaacaaacataaaagaacagacatctctttgatatactgatttcctttcttataggtatatacccagcagtgggatcactagatcatatagtagctctatttttagttttttggggaactgccaaactgttctccatagtggttgtacaaaaatggaatttttaatcctatctcacataaaaatgccctaaatctaggttgagaggaaagcacatcat

SEQ ID NO: 840435 - DNA, 546 bp, Homo sapiens
accatctccacctcccctccaggcccctactacccttccccacctctggtaattagctctctactctctagctccatgaatcagattgttttgatttttagaccccacatatgagtgagaatatgtgatgtttggctttctgtgcctggcttatttcatttgacataatgacctccagttctgtccatgttattgcaaataacaggatctcattcttttttattgctgaatagtactccattgtgtattaaagtaccacatttttttaaaacccatgttgatggagacttgggttgcttccagatcttggctattgtgaacagtgctgcaacaaacataaaagaacagacatctctttgatatactgatttcctttcttataggtatatacccagcagtgggatcactagatcatatagtagctctatttttagttttttgrggaactgccaaactgttctccatagtggttgtacaaaaatggaatttttaatcctatctcacataaaaatgccctaaatctaggttgagaggaaagcacatcat

SEQ ID NO: 840436 - DNA, 562 bp, Homo sapiens
ttagcattttcccttaatagccacagaggtcacttttttctgtatcttcatctccttcttccccccagctctcccctgwggttttccttagccctggactgttttgggagtgaatcttttgactctgggatcattttttctcttcgtatggacctgaggcactgcagggggggaggcatcctgctgcagctcctcagaaagcatttggaggaggttgtcatgggctacacagctcccctgcggctttgctggagccctcacatccatgaggtaatgaatgtgaccctctcacatagccagagcacacacgagctaatttggagagcaaattctgaaaaggttgatgtaattggccccaggggcccctgggtggggtcagaaggagaagacagccttttcactgggctggcatggcctagctctgcacaaacaagaattggctaatgggaagacagtcacatgcacccatgaattatcaatgtagatggtaaccccactgactctctaaggccacagatgctcctgtaggggctgtggtgaaggagaggttaaaataagaaag

SEQ ID NO: 840437 - DNA, 610 bp, Homo sapiens
tctctatactgccgattttgtctgtcagttcctgcattgttttatcatgattcttagcttccttggactgggtttcagtatactcctgtagctcagtgttctttgttcctatccatgctctgaattayatttctgtcatttcagccatcttagcccagttctgaacccttactggagaagtgatatggttgtttggaggaaggaagatactctggctttttgagttcttggagttcttgcactatttctttctcatctttgtgggcttacattccttcaatctttgaagttgctgacccttggatgaggtttttttttttccttttaccatatttgatgaccttgagagttttattgtagtataaggtggattcagccaactggctttgtttctggaagattttcggtggccattgctcagcccccaactcctagactgtgtgctctaactctgggggggctcgtattgggccccaacttttttctctggctccttgaagttaggaatccactgcattggggggtcagagtgctcccagaccactagtcactacaccacaatgggtggtggcagccaaagcatttcatagtgtggtgacagtgggattca

SEQ ID NO: 840438 - DNA, 610 bp, Homo sapiens
tctctatactgccgattttgtctgtcagttcctgcattgttttatcatgattcttagcttccttggactgggtttcagtatactcctgtagctcagtgttctttgttcctatccatgctctgaattacatttctgtcatttcagccatcttagcccagttctgaacccttactggagaagtgatatggttgtttggaggaaggaagatactctggctttttgagttcttggagttcttgcactatttctttctcatctttgtgggcttacattccttcaatctttgaagttgctgacccttggatgaggtttttttttttccttttaccatatttgatgaccttgagagttttattgtagtataaggtggattcagccaactggctttgtttctggaagattttcggtggccattgctcagcccccaactcctagactgtgtgctctaactctgggggggctcgtattgggccccaacttttttctctggctccttgaagttaggaatccactgcattggggggtcagagtgctcccagaccactagtcactacaccacratgggtggtggcagccaaagcatttcatagtgtggtgacagtgggattca

SEQ ID NO: 840439 - DNA, 620 bp, Homo sapiens
ttgtattttcatgtaaatcactgacaggcatgtggtcctagaaacttgcttccagattaatattggtccatcaatcatcttgctttaggcactagttactataatcaaatccatgtttattattaatcctctagaggcttttgtcatttaacatggcctatataatactctggtaattacttcttacatactgatgtaccacccatatgaacacttgatttttgtaagattactaaagaattctttaaacatcactctactctggaagttataataaggattattgagttccaacttatccatttattggaccaaacacttgacctatactgagcattttaactgcaataagttcataataataaagattactatcctgaagatattggaggaagatattggagatcctgaagatttttaaggtcataacaccaagctaagtaacctggttggtaggtggagaagataagattcaaactcaggtctgtctgacatcaaagtccaatccatttctattgtaagatggtcagctcagartggaaaacgcatttggaaaaatgtctgctctcacgtttgctgggtatagtgtctgcattttgtacgctaatatgtaacagcta

SEQ ID NO: 840440 - DNA, 624 bp, Homo sapiens
tccactatttctattcctagtaacagtgctacaaaacaayagcctattcaaaaaatcagatgaaaatcaaaattataaacaaattcttaaatttaatctataacatatcaagactagcttctattcaacaatctcactgtccattactaaaacatcctctttagaaaaataaaagattcaatgagagaaggaagtcaaatagtcactaattaaagctttctaaattatctgtaagttgtgacaaactatgtcaaatatagtctatactactgagctcttttctccttacatctttgatcagagtgttaacaacccactcttgtgaaaatataagtccccaaagtcatgaaaaaatacctaacctaacagataacttcgtaagaaagaagatcctgccaagcaggaagaattgctgctgaaagcaacatggcaggacttaaaggaaacatgccacaaagttatctttgggacaagtgatcagagatggggacaaatgttaacagggctgaaacagatgaacatgagttcacatcatgagtcacttaaaacattactgaaaatattcaactgaaaggaaattacggttcttaaaaatcttaggttccagctgggctcagtggctca

SEQ ID NO: 840441 - DNA, 643 bp, Homo sapiens
ggcatttatttaccttcacaaagtggtgcaaccatcacttctgtcaagttccaaaacatttttcctgaatgcctttttattttatttttatttatttttaattttatttatttgktttttgagacggagtttcacttttgttgcctaggctggagtgcagtggtgccatctcggctcactgcaacctctaccacttaggttcaagcaattctcctgcctcagcctcctgagtagctgggattacaggcgcccgccaccatgccaagctaattttttgtatttttagtagagacagggtttcaccacgttggccaggctggtcccgaactcctgacctcaggtgatccacccactttggcctcccaaaatgctaagattgtaggtgtgagccactgcacctgtcgaatgcctttttagagtgctgacactccaccgcccttgacagtgactctccttgtctctattagattgttacaggtcagactgatttttgtttcttctctttcttgggcagagctcgaaagagcattccagacacatatgcagagcacctcattgctggcggactcatgacgcaggaggaggtgtctgaaataaaatcctcctactatgccaagttgaatgatcacttaaataacatggc

SEQ ID NO: 840442 - DNA, 567 bp, Homo sapiens
acaagatcaatatgcaaaaatcaattgcatttgtatgttctaccaatgaacaaytggaaattaaaatttgttttaaactataattttcagtagcactgacaatataaaattctaagggataaatctcacaaaaatatgtgaaaaatctgtacactgtaaaagataaaacattgagagaaattaaagaaaatctaaataattaggaagatatgtcttgtttgtgggtgagatgactcactatttttatgacatcaattctcccaaaaatggagtacagattcactgcaatcccaaataaaatcccagtcagctttttttagaagctgacaagctgattttaaatgtatacaaaaatttcaaggacctaagataaccaaaacaatcttgaaaatgaagaacaaggcaggagcctaacaaaatgtaatttcaaatcgtatcgtaaagctaaagctatagtaatcaaaagaatgtcggattggcataaagacagaaaaaaatagatcaatggaatagaatcaagagtccaggcagttttcagatactacacgaaaaacataattcttaaaa

SEQ ID NO: 840443 - DNA, 567 bp, Homo sapiens
acaagatcaatatgcaaaaatcaattgcatttgtatgttctaccaatgaacaactggaaattaaaatttgttttaaactataattttcagtagcactgacaatataaaattctaagggataaatctcacaaaaatatgtgaaaaatctgtacactgtaaaagataaaacattgagagaaattaaagaaaatctaaataattaggaagatatgtcttgtttgtgggtgagatgactcactatttttatgacatcaattctcccaaaaatggagtacagattcactgcaatcccaaataaaatcccagtcagctttttttagaagctgacaagctgattttaaatgtatacaaaaatttcaaggacctaagataaccaaaacaatcttgaaaatgaagaacaaggcaggagcctaacaaaatgtaatttcaaatcgtatcgtaaagctaaagctatagtaatcaaaagaatgtcggattggcataaagayagaaaaaaatagatcaatggaatagaatcaagagtccaggcagttttcagatactacacgaaaaacataattcttaaaa

SEQ ID NO: 840444 - DNA, 562 bp, Homo sapiens
tgcatactccagttaagctgaaacatgcctaatttcttattggctccaactttcacacctctgcagatgccactctctttaaataaaatatcctctatctgctttccagttgccagaatctattaacatttgctataacatagtttagtcctaggataatactcacaaattctcaaggtatagggatgtccaacttagtacaaactctattaccacttcacacacaggcttagtataaggctatagatttagggtggtatattagtgtattctcacactgctgataaagacatactgagactgggaggataaaagaggtttaattgaacttacagttccaaatggctggggaggcctcagaaccatggcagggcgtgaaaggcacttcttacatggtggtggcaggagaaaatgaggaagatgtgaaagcggaaatccctrataaaaccatcagatctcttaagacttatccactaccatgagaacagtatggcagaaaccaccctcatgattcaaattaattatctcccaccaggtccctcctgcaacacgtaggaattat

SEQ ID NO: 840445 - DNA, 562 bp, Homo sapiens
tgcatactccagttaagctgaaacatgcctaatttcttattggctccaactttcacacctctgcagatgccactctctttaaataaaatatcctctatctgctttccagttgccagaatctattaacatttgctataacatagtttagtcctaggataatactcacaaattctcaaggtatagggatgtccaacttagtacaaactctattaccacttcacacacaggcttagtataaggctatagatttagggtggtatattagtgtattctcacactgctgataaagacatactgagactgggaggataaaagaggtttaattgaacttacagttccaaatggctggggaggcctcagaaccatggcagggcgtgaaaggcacttcttacatggtggtggcaggagaaaatgaggaagatgtgaaagcggaaatccctgataaaaccatcagatctcwtaagacttatccactaccatgagaacagtatggcagaaaccaccctcatgattcaaattaattatctcccaccaggtccctcctgcaacacgtaggaattat

SEQ ID NO: 840446 - DNA, 550 bp, Homo sapiens
tgtaggctgggtgtggtgtctcacgcctgtaatcccagcactttgggaggccgaggtgggcagatcacaaggtcaggagtttgagaccagcctggccaacatagtgaaacaccgtctctactaaaaatgcaaaatattagccgggtgtggtggtgggcgcctgtaatcccagctactcgggaggctgaggcaggagaatcccttgaacctgggaggtggaggttgcagtgagccgagatcgtgccactgcactccagcctgggtgagagtgcgagacaccatctccaaaaaaagaataaataaataaataaaaaataattgtactgtatatatccttttataacaagtcgtcgattttcacataattctaagagaatatatatgtatattccatatatccctctttcttcatttgtcaaaatcattataytagagagtatataaatgttttttataaagggatataatccttattcgtttatgaaagatgtacagtgtatctgcatttcatggtgtccttagaactctatacattataaattatacatta

SEQ ID NO: 840447 - DNA, 550 bp, Homo sapiens
tgtaggctgggtgtggtgtctcacgcctgtaatcccagcactttgggaggccgaggtgggcagatcacaaggtcaggagtttgagaccagcctggccaacatagtgaaacaccgtctctactaaaaatgcaaaatattagccgggtgtggtggtgggcgcctgtaatcccagctactcgggaggctgaggcaggagaatcccttgaacctgggaggtggaggttgcagtgagccgagatcgtgccactgcactccagcctgggtgagagtgcgagacaccatctccaaaaaaagaataaataaataaataaaaaataattgtactgtatatatccttttataacaagtcgtcgattttcacataattctaagagaatatatatgtatattccatatatccctctttcttcatttgtcaaaatcattatattagagastatataaatgttttttataaagggatataatccttattcgtttatgaaagatgtacagtgtatctgcatttcatggtgtccttagaactctatacattataaattatacatta

SEQ ID NO: 840448 - DNA, 601 bp, Homo sapiens
attttcattcctctttaccagctctcaataccgtttctcctttttgtttactcaagtttactaagtatacctgacaaaaaattgtatatattcaaagtatacaatgtgacgttctgatacatgtagacattgtgaagtgattcatacaatcaagctaattaacatatgtataacttcacatagttaactttgtgtgtgtgtgatgagaatatggaaaatctactctcttaaaaatttcaactgtataatacgttattatctgtaactatagttactgtgctgtgcattagggttccagaacttatgcaccctttgaacaacatgtcttcatttccctgtcatccttggaaatcttctactctatatttctgtgagttctactttttaaaattctgtatataaataagatcatgctgtatttgtcttcctgagtctggcttatttctcttagcataatatctaccaggttcatccatgtttcttcttttaaaagacaaatkaaaatttgacttttatagtcagatgagcttaagttaaaatgccggctctttcgctaactggttgtgagaccgttagccggttatatcatttcacttgccgc

SEQ ID NO: 840449 - DNA, 494 bp, Homo sapiens
taaccataaatatatgaaacagtactcaatttcattagtcaaasagaaatgcaaattaaaaccactttataatatttgtaaactaaaattattaaaaaatagatattgaatattggtgaagacttgcagcaacaagaactctcatacactgttggtaaaaatgtaaattgacacaactactttgacaactgttcgagagtgtactaaagctgaaaacaatgcaaacattaaaacctagaaattccatttataggtacataacaaaggaatttgttcgtatacagcagtctccccttatacacagtttcagttacccatggtcatccatggtctagaaataggtgagtgcatttcaataaggtgttttgagagagagaaatcacattcatataacttttattatagtgttgtagccttttaattattacttattattgttaatctcagaatataccttatacattaatctttgtcaaaggtatgtatgtgtaggc

SEQ ID NO: 840450 - DNA, 494 bp, Homo sapiens
taaccataaatatatgaaacagtactcaatttcattagtcaaagasaaatgcaaattaaaaccactttataatatttgtaaactaaaattattaaaaaatagatattgaatattggtgaagacttgcagcaacaagaactctcatacactgttggtaaaaatgtaaattgacacaactactttgacaactgttcgagagtgtactaaagctgaaaacaatgcaaacattaaaacctagaaattccatttataggtacataacaaaggaatttgttcgtatacagcagtctccccttatacacagtttcagttacccatggtcatccatggtctagaaataggtgagtgcatttcaataaggtgttttgagagagagaaatcacattcatataacttttattatagtgttgtagccttttaattattacttattattgttaatctcagaatataccttatacattaatctttgtcaaaggtatgtatgtgtaggc

SEQ ID NO: 840451 - DNA, 633 bp, Homo sapiens
aagtcccactctcatgtatttctggacctgacaattttttcatgcctgacatagctcagactggtctgagctatttttcttttctaacatctcccttacctcctaaattcctccaaatactcatgctcatatatgagtattagggtacctattccatagataataaaattataattgaaataaatttgcagccataaaaaaagaagaaaatcatgtcctttgtagcaatgtggatgcagctagaagccataatactaagtgaattaattcaggaacagaaaatcaaataccacatattctcacttacaagtaggcagttaagcattggatacacatagacacaaaggtgggaataatagacactggggaatacaatacgaggaggaaggtagggaagcaagggtgaaaaactaacttttggttactatgttcactatctgggcgacagattcattcacacttcaaatatcagcatcacacaatatatctttgtaacaaacctgcacatctaactcctgattctaaaacaaaagatgaaaaagtraaaaagcatgaacaggaaagccagagtgtgtgatttttgcacttttagcagcaaaagtatttgtttatcactaaaaatattttaggtct

SEQ ID NO: 840452 - DNA, 462 bp, Homo sapiens
actgtatttagctctgatactggaaagatttgaaaggaattataagaaatgaatgagctcaggaatgaactggtcaaattacaagcagaaatagatgggaatagagagatatgtgatcccacctatgaaggacaagcttgtatcagataaacccatctaacaaaatcagccacaggtcatcagagagcagcaggaagacaatacttgagtggatgttatctgatagaaaagagaaatggcttgtgatgagtccaatattctgcattgttttgctctacgtcggtcaatttttcatcagtgcaaacaaactgagaaactgaataaaaagaaacaaccrggaagcatgttaccttagcagaatttttacagtcttacaggatttggaagaaaaaaaatgaagttcaaggtacaaaggaaactaggattaaggagtcaaaattcagaaagaatagagatgaagtg

SEQ ID NO: 840453 - DNA, 462 bp, Homo sapiens
actgtatttagctctgatactggaaagatttgaaaggaattataagaaatgaatgagctcaggaatgaactggtcaaattacaagcagaaatagatgggaatagagagatatgtgatcccacctatgaaggacaagcttgtatcagataaacccatctaacaaaatcagccacaggtcatcagagagcagcaggaagacaatacttgagtggatgttatctgatagaaaagagaaatggcttgtgatgagtccaatattctgcattgttttgctctacgtcggtcaatttttcatcagtgcaaacaaactgagaaactgaataaaaagaaacaaccgggaagcatgttaccttagcagaatttttacagtcttayaggatttggaagaaaaaaaatgaagttcaaggtacaaaggaaactaggattaaggagtcaaaattcagaaagaatagagatgaagtg

SEQ ID NO: 840454 - DNA, 559 bp, Homo sapiens
cctgggtgacagaatgggatcctgtctctaaacaaataaagttgtgtgcctttcttcaaatccaggaggtatcctgtcatttatttaattaagccctccctttcattttctttattctctcttttaggatctctaatcggtagaaagttatactttcagaatagacctcttaaatttccatctttttctcatcattttcaactctttgtgttttagactgatgttcagaaaagtttcttaaacttaaaatgtaaactcatatatgtttaaacattagcaattatattttaattttccagaaatcttatatattatttgactttttctttttcttagcatattatgctttttatgaatgcagtatcttctcaaataactgagggtaggaattaggttgtatttctttttagttttgtcagtcttayatgtcctttaaggtaagttattctgttttattttaaccttgatctttcttgtatgcctgaagatcttacattgttttcatgttataaaggaaataaaaaaaagattattctaggtatctgatttgtgtttcgct

SEQ ID NO: 840455 - DNA, 559 bp, Homo sapiens
cctgggtgacagaatgggatcctgtctctaaacaaataaagttgtgtgcctttcttcaaatccaggaggtatcctgtcatttatttaattaagccctccctttcattttctttattctctcttttaggatctctaatcggtagaaagttatactttcagaatagacctcttaaatttccatctttttctcatcattttcaactctttgtgttttagactgatgttcagaaaagtttcttaaacttaaaatgtaaactcatatatgtttaaacattagcaattatattttaattttccagaaatcttatatattatttgactttttctttttcttagcatattatgctttttatgaatgcagtatcttctcaaataactgagggtaggaattaggttgtatttctttttagttttgtcagtcttatatgtcctttaaggtaagttattctgttttattttaaccttgatctttcttgtatgcctgaagatcttacattgttttcatgttataaaggaaatwaaaaaaagattattctaggtatctgatttgtgtttcgct

SEQ ID NO: 840456 - DNA, 637 bp, Homo sapiens
cttcacaagtagctgccttccaaattggcttcttcaacctcagtcaaatataagctaaaacctccttaaaaaaatctgtgacttcatctttcaatagattaccaaaaaacatcctcactagtacctgctgacaaaaatatcacccctcaaataaggcacatttttctagttgacacacataatatgattaatctaataatcaagattcattatatctcaaatgatgtagaacatgcacacattttcctaatagtgtttctcaaatgttgcttgaacaaacagcaggactcaaataaccttccaaaatgcctcagtgttatttgcatacctggcttaacagtgatgagtaaaaggaagagcaactcaattacaactcctttggggactccttggggctgccttcacttaagaaaaacaccttcaaagagacaagcactgtaataattttcttccatagttccttcaataaggaattagcccagaagtaatgtcacccttcaggagaagctattgataggatctagtctcacttcctctcttacaggctctcctccaacaaagtcaggttttgaaatgagaaagmaagattaaactttgatctaatctgatggggaagaagcaggaacaacagaaagca

SEQ ID NO: 840457 - DNA, 564 bp, Homo sapiens
tagtctataatagcatattatgtatgcaagtttgaagcacgtaacttcatataactgagcattaaatgtaaatggctacaaaggctagctctctcatctcwagctctgtaaattacaacttgttgtcagtggccagaaaaaaatggtctcacttcctctgatattctagggaaataatccaccctgccaaggacctaggttttaaatttcatgacctacataaaaggcaaagctttttaaaagtttgttttctatatggtaatttctgtatatcacaaagtcagggactagtttcctcttcatttgtgtctacaaaacatacagagtagtatgctctataagatagtggtttccaaatattttgtataaaacatatttcttctgtctggatgtattgtttttcaatgataacaatcttagacagaaaaggaaaacatgtccttcaaatgactgaagagtgtgaaaataagtaattaaaaattaaagctgttggaacttcaaattattttgagccttaagggaatgtaaatatgggtcctgagtcatgtgataggcagctgtaac

SEQ ID NO: 840458 - DNA, 545 bp, Homo sapiens
caaggtataggggaaggggtgtggagcytccatgcctccctgggtgcaccaccctccaggaacctccatgtgttcagctatccagaggctctctgaaccctgtccttttgggtttttatggaggcttagttacataggcatgattgacaaccatgtagaaatgtgactggacacaggaggcatgatctcatactaatagactgaccggaaacccagcaaggcctgtctgttcaggttgtcgctggcctttctgtgcagccttccttcctccagaatatggggcacaaccctcccaggaatgagggttttttggcccacagttggactagagtcttgctttgaggcaggtaaaagaggacaggagaaggttgagagagattctgtttcctgaggcccaaagtgccccagcattataatagaagactataacaagggctatgggggttatgaaccaggaaccatggatgcaaaccaatatatacgtataacatcacagaagcacactttcctgctcactttcaatagataccacaaagtttgaaact

SEQ ID NO: 840459 - DNA, 696 bp, Homo sapiens
gcatgtctggttgctggctatgtcctggatcctagagcacagggtgcaaggggctggggtgactggccatggctcgtggggggccctggagccacatgcaygaactccattctggtgcagcagggagaacagacagaatttcctttttaaaaaacaaaaaaaaaatttcttatgaaaactatcaaataggcaccaagtacagagaagagttcatggacccccatgtacccagcacctggcaccaacagagatctaccagcttctcatccattctccctccacatttgtacaaaccttttatagatagaaattgttaaacataccaaagaagggagactggcataacgatccccacagacgcaccagccagctccaccaggaagtttccaggctggtctcggccgcccactccttcccaccctcagattattctgaagcaaatcacatagcattttatatttaaatatttcagtgtatatctctaaaaatgagagactctttaaaaacacaggcttgcactactatgataacacctgaacaatgtgcacaccattgttttttcttgttttttttttttgagatggagtctctctctgtcacccaggctggagtgcagtggcacaatatcggctcactgcaagctccacctcccaggttcacgcctcacgagtagctgggactacaggcacctgctac

SEQ ID NO: 840460 - DNA, 539 bp, Homo sapiens
gtataataattaaataagattttttaaaaattaatctgatttttattgatagtgataatcttattgagagtaatgacagktataaaacataagtagttgccctaagcaactaaaatcattacttttccataaccatgtgtatgttttcagctaataaaaaggaaactgttctgaggcccactggaagtatccataactcagatccagattttttttgttttgttttgagagggagtctcactctgtcgcccaggctgcagtgcggtggcacgatcttggctcactgcaacctctgcttcctgtgttcaagcgattctcctgcctcaacctcccaagtagctgggactacagacgcctgctacatttttgtatttttagtagagatggggtttcaccatattggctaggctggtctcgaactcctgaccctgtgatctgcccaccttggcctcccaaactgctgggattacaggcgtgaggccttgtgcctggctttattattttttttttccacaacaaatgatttccagaacctggat

SEQ ID NO: 840461 - DNA, 601 bp, Homo sapiens
agttttagattcttcttttggatcctttttccacttagtgctatttctgtccctgcagtcgctgagatgttcaaaagcagctgaagctgcagcttttgaagcagcaggagcactctgggcactcaaagycctcagaaattcagccaaacacaagttagggaattttaggttttcttagccaagaggggcactccggtacatacaacctgggcttgaccacttggtgggcactactagtgctgtcactgttggaaggttatacaatctctctcagcctctttttcctcctttggaaatgaagagtactaagattgctttgtagagttgttgtaaggattaaaaataacaacacatcaagagcctagctcaggatctggcactgaaaaggttctcagttaatagtaaaattgtttatttatttatttatttatttatttatttattcatctatttattttatttttttgagatggagtcccactcactctgtcgccaggctggagtgcagtggcacaatcttggctcactgcaacctctgcctcccagtttcaaatgattctcttgcctcagcctcctgaatagctgggattacagaagtgct

SEQ ID NO: 840462 - DNA, 317 bp, Homo sapiens
ttttataaatatgatttagtgcatacgcatgtgggggcgatgtgggtgtccacatagaaaataattggaattgtgtacattgttttgacttcatatatcatgagcattttctcatataattaaatgctttgaaactataattgtttagtggctacataattttcaatcaaacggatgtaccaaagtttgttgggcgtgtaccatatttggagttaytaaggttgcttttgtttagttatttttggtaaaaataaataatacaatcatgaatgtccttatgtgttagacttctaacatcgctaattattcccttagga

SEQ ID NO: 840463 - DNA, 587 bp, Homo sapiens
aatatacattattttcatcagcacatggaacattcttcgggatagatcataggttagaacacagagcaagtctcaacaaatttttgaaaatcaaaattataccaaaatcttctcagagcataatgaaatagwactagaaatcagtgaaaaacaggaactttggaaactacagatacatggaaattaaacagcatgctcctgaatgaccactgggtcaataaagaaataaagaaaaaaataaaaataaaatctgaaacaaatgaaaatggaaatacaacataccaaaacctataggatacagcaaaagcagcgctgaaaggaaactacatggcaataaatgcttacatcaaataaatggagaagtttcaagtaaacaacctaatgatgcacctcaaagaactagaaaagccatactcagaaatagaaggaagaaacaataaagatcagagctaaacaaaatgaagtctaaaaaaatgagaagttaggattttgaaaagataaacaaaatggataaaccactgactagactagccaagaaaaaaaaaaacagagatctaaataaatgaaatcagaaatgaaaaaggagc

SEQ ID NO: 840464 - DNA, 612 bp, Homo sapiens
tttggtatatggtggtccatggtctctttcttctgttagcagktccagaacttgcctgactaggtatggtgtaagtagattacagttattaacttgttctccagaaggagaagaaaacatagatccccactaaggtttaaggtgcatgttatcttatgagacaagagcctgggcattggcttcatgcaagagggattgctagcctttaaaaaggaagtatgccacatcttccagcccaaagggtccaggggaatttaagaattcaagatcttttgatgcatcagcccaggcatccttattctaaatctcaaggtcccactccttcccagtgaagaccttgatcttgttgtagtagatttaaaaagcttgaaaattcagtcctctctggaacttgctatctttctcattaagtcctgcacctaatcattgtgttttcaagccatttctccactccaggagataaatgcttgtttttatgcagccaaaaagtccctctggcttttacactttacattaaattagtgactaaccaccattggccttccgttgtctttctctagtggattggtagttctcagcaaatagccatcagtgctatagttcttttttttt

SEQ ID NO: 840465 - DNA, 623 bp, Homo sapiens
atccaggggaatctggaatgttagaatcttggattcataaaactctaaaccttgagcctctagattctagaatcatggataatagtgtgtcggaatctgagaattctagaatcttaggttctgggcattctaatagtatcctggaatccacctgatgcaggaatcctctctccattgcctctgaaaagtgaccatccatactgttccaattttcttccctccatgagtaaagcactgattgtggtaagagatgctgtgtgggaatttcccatcatgcattgctccatgatggaacctcctttaacttaagcctatacatcagactgggagaacgatgttcagatttcagccgaaagtgaagcaggagaaatgcagagatatgaaggtggaagagagtgagaggcaggggaagggtagggggatgaagggatgtaggggtgaggactacttttccagatccagagccaagacagcaagaatgacagagagagacagacacagatgtttctggttccccaaccctgaattcgcagtcattagcctgctgcctaatgtcagaggtcagaggctggggaatggacttgtcatccccgaaaggatccsagctgtctagggcatggacc

SEQ ID NO: 840466 - DNA, 464 bp, Homo sapiens
accttcattcaatccatcaccaaggcttgttgattctctctcctaagtgcattttgaacccakgtacttaacatcgtctccacctttcaaccacctgtatccaagtcaccatcttccctcatctagacaacaacaatgacttcccccatggttgcccagtatcttcacatcccacccaaatccagccttcatacagtagctaggttgatgttttgaaaatacaaatcttgttatgttatttctctgactaaggttcaaatagttcttcattatccacaggataaagcaagactcacaatgacatacagagctcgtcattatctggtcccagttaacctctggcctccgagctccagcaataatgccttgggcctttgcacatgctcttttctctacacaacacactccccattctcctcccattttcttctagttaccagaagaaattttcttctagtttacta

SEQ ID NO: 840467 - DNA, 316 bp, Homo sapiens
tattcattcagaaaacatactaagtgctggctctttttcatgtcctttatcaagtttggatcatgtcatttgctrttttctttctgatgtaaactctcaaagtttgaagggtattgtcttttcctgacacatacgttgtaaataattttctggcttacattttgacttttaatttcattcacgatgtttttaatgaataattttaatttttatgaatgcaagttaaaataattctttcattgtggtttctgacatgtcatgccaataagggtcttctcctccaagagcacagaaatatttgccaatactgtcctta

SEQ ID NO: 840468 - DNA, 316 bp, Homo sapiens
tattcattcagaaaacatactaagtgctggctctttttcatgtcctttatcaagtttggatcatgtcatttgctgttttctttctgatgtaaactctcaaagtytgaagggtattgtcttttcctgacacatacgttgtaaataattttctggcttacattttgacttttaatttcattcacgatgtttttaatgaataattttaatttttatgaatgcaagttaaaataattctttcattgtggtttctgacatgtcatgccaataagggtcttctcctccaagagcacagaaatatttgccaatactgtcctta

SEQ ID NO: 840469 - DNA, 464 bp, Homo sapiens
gctgaaaaatggttgaaccattgtaacttggaaacagtttgtattctggtatgcactgttttattatcactattcagaatatttatgtcttgtttttgtatttccactgtcatccttgtgtttggttttttttcttgctgatttgttccaattctttgtagattctggatattagtcctctgtgtggatgcatagtttgtgaagattttctcccactctgtggtatgtctgtttactctgctgattatttattttgatgtgcagaaggctttcagtttaattaagtcccatctatttatctttgttttgttgtgtttgcttttgggttcttgattgtgaagtctttgcctaagccaatgtctagaagggtttttccaatcttatcttctagaatttttatggtttcaggtcttagatttaagtctgtgaascatcttgagttgatttgtttataaggtgagaga

SEQ ID NO: 840470 - DNA, 560 bp, Homo sapiens
agcacctggaaccccagcgagacagaactgttcactcccctggaaaraggactgaatccagggcgccaagtggtctcgataagcgggtcccactcccatggaggccaccaagctaagaaccaccggctcgaaattctcactgccagcacagcagtctgaagtcaacctgggatgattgagcttggtaagggaaggggtgtccaccattactgaggcttcagtagtcagtttttctctgacagtgctaaagaggctggaaagtttggactgagcagaactcaacagagtgcagcaaagcggttgtggccagactgccattctagattcctcctcactgggcagggaatctctgaaagaaaggcagcagccccagtcagggggttatagataaaactcccatctccctgggacagagcacttgggggaaggggcagctgtgggcacagcctcagtggacttaaacatttctgcttgctggctctgaagacagcagcagatcctgaaaaggaggattctcccagcacagcgctcgagctcttagactgcctcctcaagtgggt

SEQ ID NO: 840471 - DNA, 581 bp, Homo sapiens
tttattactgcctcaattttagaacttgtcattggcttattcaaagrttcaacttctttcaaaaaaaagttcaacaacaacagataaatctagaatttaataacagatgtaccatagttcttaaagtataattttttactctccccagtctgccattttactaaagacaaatcatggtatgaccaagttgctttattatacttggcctgattatttgtacgaagtgcagcaagaataattatttttacataggttttaaaaattggatttgatgaaactgttccataaaatgaatctcagataagactttttaaagctgagccagccatgagtctataccctcaaatatgagttgcataaatttcttttttgataccacgggataacttggggctcatgaacctgtcaaaaagtgacattatttacttaccccaggttaggaaccctgtatagggactgtgtagacaaggcataaagccagttttcccaaggggcttttattggctctataagtcaagtttgattccttaaaggaaagcacgtcattccagccaaagccttggcaaaataactaatttctc

SEQ ID NO: 840472 - DNA, 407 bp, Homo sapiens
tagaagaaaataataaatgtgtttactttagaccatataacagtgtttgccacatgggaccaattcaracaagggctcttcatcattactcttaaagtagcaatagcaccacatccatttcctggtaccagccagcctgtttttcactgatatgaagtgcagaaggcattgaaacagtgaagaagggtgatataaatggaatacttatatgaagtacaattgttaataaaaagtagcatttgatattatacgactataggtaagatgattagtatgagataaaaatatttttactttaattgacagaatatcttaatccacattatttctatttcaaataatttttttgctctatatttgctgcctttttatttgctattacctgagctcaataagaatcaacaaaa

SEQ ID NO: 840473 - DNA, 407 bp, Homo sapiens
tagaagaaaataataaatgtgtttactttagaccatataacagtgtttgccacatgggaccaattcaaacaagkgctcttcatcattactcttaaagtagcaatagcaccacatccatttcctggtaccagccagcctgtttttcactgatatgaagtgcagaaggcattgaaacagtgaagaagggtgatataaatggaatacttatatgaagtacaattgttaataaaaagtagcatttgatattatacgactataggtaagatgattagtatgagataaaaatatttttactttaattgacagaatatcttaatccacattatttctatttcaaataatttttttgctctatatttgctgcctttttatttgctattacctgagctcaataagaatcaacaaaa

SEQ ID NO: 840474 - DNA, 407 bp, Homo sapiens
tagaagaaaataataaatgtgtttactttagaccatataacagtgtttgccacatgggaccaattcaaacaagggctcttcatcattactcttaaagtagcaatagcaccacatccatttcctggtaccagccagcctgtttttcactgatatgaagtgcagaaggcattgaaacagtgaagaagggtgatataaatggaatacttatatgaagtacaattgttaataaaaagtagcatttgatattatacgactataggtaagatgattagtatgagataaaaatatttttactttaattgacagaatatcttaatccacattatttctatttcraataatttttttgctctatatttgctgcctttttatttgctattacctgagctcaataagaatcaacaaaa

SEQ ID NO: 840475 - DNA, 491 bp, Homo sapiens
cctccctgtcctcccgtttctttttctctttccctcttttcgcamcccccacccccaactcaaattcagtcctaggctgttttaccgggtcaagaccttgacatctgattccttgggagaatttcttctaattagctaagagtaggcattcaataaatatatgtcaaatggttggttagttggattgttgaatgggtaggtgggtggatgtgtggataaaatgctttatcagttcttataccaactagtttctgatgagcccactccatttatatctgaatttcatttagactcaagctgaggtccttgttaaagttggtatgatttttctccatgttacagatttaaaagctgaggcccatagaagttaagtcacttgtccaaagtcatactgctaacaaacagctaagccgggattccaacctaggcttaactgatactcaaatcctttctttttttctactccactgtctctatggcaaggggttaag

SEQ ID NO: 840476 - DNA, 516 bp, Homo sapiens
ttgatcttaaatcttgcaaccttgttgaactcactagcwaattctagaagttttcttttgcagtttctttttttactttctatgtgtttactgatgtcatctgcaaatagaattgttttatttctatgtttccaatctgtatgcctgatatgcctttttcttgcttcattacagtaggtaggaattccagttctgttcagtaagaatggtgagtagaagagcgaagatggctggctagacacagccaggaaaagcttctcccactgagagaccaaaccatcatgtagactaacaaactctgaacagatcttcgggaagaaggcattgagaatggatacagagaggatgcagactcgagttaaagagaaggaagctgagaaccctgcatggggttgctaagcactaggatgtgttcctggccctgagtggctcctagagaaggggtgagtgaaataagcgtagagtggcgcactctcattacagacctccaggatcctagctgtgggagaccccatg

SEQ ID NO: 840477 - DNA, 648 bp, Homo sapiens
acatgttttattaattgtatacctgagtactttatttggagttactgtaaaaagaaattgtgtttttagttttggtttctacatattcataggtgtgtatgttagtaataaaatacaattgctctttgtgtattgatcttaaatcttgcaaccttgttgaactcactagctaattctagaagttttcttttgcagtttctttttttactttctatgtgtttactgatgtcatctgcaaatagaattgttttatttctatgtttccaatctgtatgcctgatatgcctttttcttgcttcattacagtaggtaggaattccagttctgttcagtaagaatggtgagtagaagagcgaagatggctggctagacacagccaggaaaagcttctcccactgagagaccaaaccatcatgtagactaacaaactctgaacagatcttcgggaagaaggcattgagaatggatacagagaggatgcagactcgagttaaagagaaggaagctgagaaccctgcatggggttgctaagcactaggatgtgttcctggccctgagtggctcctagagaaggggtgagtgaaataagcgtagagtggcgcactctcattacagacctccaggatcckagctgtgggagaccccatg

SEQ ID NO: 840478 - DNA, 530 bp, Homo sapiens
gtgtagaactgggcctgcttcacaagaatcgcttgaacccaggaggcggaggttgcagtgagctgagattgcgccactgcactccagcctggctggcagagagagactctgtctcaaaacaaacaaacaaacaaaaaacttgacccacctagagacctatatgctcctttctcattaagaagtgttggaggctccacaaggttcttttctaatgaaacgttcttagagatataaactaacaagtcattttatctgtctttcatttaaaactgttgtcatttttacctcttaataacttttggtaaattatttaaatgttgaaacaacaaaaagaatattgaaaagtacaggggatgatttagagagtatttataagtaatctccttatatagtttccttgaactctaagtaggaaatgtaaaaaagtgatgacatccaaagtcrgcttcttttagctactgcgtaagagtgaaaggatacactgctgattttcaacattagagtttaccctaactccattttgactttaa

SEQ ID NO: 840479 - DNA, 591 bp, Homo sapiens
tataatttgcaagtaaaaagattaacaaacattttaagtgttggccttttttatattcatgtaccaaaaagaaaatttgtgcatcctgtatgccaaacatagtcgtataagaattttcatctttaaaataatcatgacaaataatcaattctctcattttctcagatatcactattgatttaagaataatcacgctgatataaataatcattgtgtaactaataataccttaccccaactttgtagttcaattcttttgtgccaggtttattattttttgaaacatccaaaaaatgatggtgaagatggaggtagggtaggatgagtagaaggttttggaacaagcaatattatgggatatctctggctgtagtaacacttttatccagatggtatctgtaaaattttggatcaagacagacccaaagcctaaaacatcaattagtgtgtattagtgatgtagggaagaattatagtcaaggacagcaaactgtcagaagtagataaactcaagataaaggytggaaggaatgtataggttggcagcagtgaccatgttttagttcagctctttcaactattgcagacctc

SEQ ID NO: 840480 - DNA, 519 bp, Homo sapiens
acaaacacagatatgtggtcacaagattacaacaagggtaacagggcagtgtggtagggaaagggtaatcatttcagtaaatggttctatgtaagttgaatatccatacagaaaaaagtgaatcttgattccttctataccatatacaaaaatcaaattatatagaatatagatctaaagagtaatatacttaagcttttaaacacagaagaataactttgtgactttggtgtagacaaaaatatttccttaacaccactggtgctactcaaaagatgctaaacataaacaagaaaattaataaattggcttaaattaacattagtagtttcttaatttatcaagacaccacaaagagagtgaaaaagcaaagaatgggagactatatgtcaccagtctgtgcaacaataaactcagattatgatctttaaaattcttacaattaaacaaacaaaaakcaaatgggaaatggacaaaagatatgagcagacactttagaaaagtaaatatcccaatgtc

SEQ ID NO: 840481 - DNA, 318 bp, Homo sapiens
tctttagctacgtgatggtttcattgtgagatatccacataatgaaatatgcaaccattctctcacacacaccagagagaaaaagagagagtaagtgaataatggtcccaatatattatttgaatacaaccactatcttggacaatttgtgaaggggtacatgtttttttaaagacatatacatatttctgtgtgtttgtgaatttgtgtgtgtaaggagaaatcagtgtatgccaaagygcttgtttctagattataggatttattttctttgcgtttatctgtggtgtctaaaagttctatactgaacatataata

SEQ ID NO: 840482 - DNA, 512 bp, Homo sapiens
gtctggcttcactcggcataatgttttcaaggttcatccatgttgtagcatgtatccgaatcacattctttttacaggctgaataatattccattccaatatgtacatagcacatttggtttatctctccatctgtagatgaacatttgagttgtttccactttttggtacttgtgaataatgctgctacagaacactgaagtacaagtatttgtttgagtccctgctttcatctcttttgggtatatacctagaagtggaactgctagtacctatgctaagtcaatgtttaacttgttgaggagccaccaaattatttctattgccgcaacatcattttacattctgatcagctatgcacaaggtttctaatttctacacatctttacyaatacttattttctgtttttttgataagagccattctaatgggtatataaagcagaatctcattaaattagatttgctttgtaaactatttattaaaaataagagacacgaagagaacttat

SEQ ID NO: 840483 - DNA, 521 bp, Homo sapiens
cctatcagcacttgagatatctggaaactctagaaatttaaatatgaatcatgcaagaatttggggtacctaaatacaaaaaatagtttccatgtttatatgctactcctataaggctaagggctttgccttttctgtctttatactctgtaaaaatggtgccttggacataacagaatttatccatatatgtttatggaattagatgaaacagggttttaggtttttactgtattataaaaataacaaaagccataatttgttcagcaagtactatgtgctgagcactgtgctaattaccttatatgcattatcactaaggcacaaaggaaaattgcatggtgggtactgttacccccagtttacaggtaaagaaagcagataatgtgttcactcatcaattctttattgagtaccaattctgtgccaagcactgttcccagcaayaggggtccagttacaaataatgaagactgaaattcctgactttaaaaagcctgtactcctctggggatgacatg

SEQ ID NO: 840484 - DNA, 542 bp, Homo sapiens; identical to SEQ ID NO: 815936

SEQ ID NO: 840485 - DNA, 557 bp, Homo sapiens
aaaaaacaattcaaagcagaattcaagttatagcttcaaaaataaaataaataagaaggacttttttcttatttggtatctagcaaaagagtttccctttctatgcctaagaagtaaagaagcctaggatataaatgtttgataataatctgaaataaatatgtcaagaaagaaattcaactgctatcttaaagcaaaagagcagctaaaaaggaaatgaacccacctgaatctctattctggaaaaacccatattattacaaacgacctcatgatttgtacggccttgagatggctcagttaaataatcttcaagatattatggttaactctcccatcccaggattcttgaatgacagtttcaggaaatgttagggaacattgaggcagaatgccttgtaatttcttggtaagttccaacttgaagcaggtggtctgtgaggccctaactgagaaattattttatctataaagtaamatgaaatgatatgtgaaatgcttatttttgctagattaataacaggaatgatgatacaaagtgctgtgttttccttctt

SEQ ID NO: 840486 - DNA, 542 bp, Homo sapiens
catgtgtatctacctgaccttgcgttatgtattaattcacaggggcaggagctttgtgctgtcctaagctggactctagcacccagctctgrgacataggaggcactcagcagttgttaaatgaatgactatttctgggtgccatgtgcttcattcactgaaaagatgaatggattttttttttttttttgagcaggcactgggtttgtttttcataggggagtcggtatatagataattccggaggaagcagaaggaatgtttagctgaagagtgtggtaatgaacagcacgggctatcagcctccttgagctaatggtggttgcttctgcaaacaggcagaggatggctgaaaataccttggggtgagcaacaatggacttgccgtgccatgccattaacataggaagtccttgagggcttgaacaatatcccagctctagaacaggattcccagaaagagcaaggcagtacctctctgcagcaccaggggcgtttggatgcggaattagtgcaggggtctttaccaggcactaagcaag

SEQ ID NO: 840487 - DNA, 542 bp, Homo sapiens
catgtgtatctacctgaccttgcgttatgtattaattcacaggggcaggagctttgtgctgtcctaagctggactctagcacccagctctgagacataggaggcactcagcagttgttaaatgaatgactatttctgggtgccatgtgcttcattcactgaaaagatgaatggattttttttttttttttgagcaggcactgggtttgtttttcataggggagtcggtatatagataattccggaggaagcagaaggaatgtttagctgaagagtgtggtaatgaacagcacgggctatcagcctccttgagctaatggtggttgcttctgcaaacaggcagaggatggctgaaaataccttggggtgagcaacaatggacttgccgtgccatgccattaacataggaagtccttgagggcttgaacaatatcccagctctagaacagkattcccagaaagagcaaggcagtacctctctgcagcaccaggggcgtttggatgcggaattagtgcaggggtctttaccaggcactaagcaag

SEQ ID NO: 840488 - DNA, 651 bp, Homo sapiens
gtactatattggtgatctcagataagatctagaaaaattttctggattaccagtctctgcctgttctcttcctttactttctcccaaacaaatgaagtctctccttctgtgctgagccacctggagcttggggtaagacgacacaagaacccctgtggccaccatcactggaattgcactgggtcaggtttaagccagcacagcactgggtcttgctcaaggtatgttcaaattactacctggctaccacctatgtttactcaagaccttggggctctacaagatcttaagcaggtggtaaagccagccatgtttgcttccttccatttagggtggtgagttcccccaggccccaggtggattaggagatgccacctgggagccaggtactagagtcaaaaaccttagaaatataccttagaaaccttagaatctagattggcagaggctgagttggcactcaaatcatgagacacagtccttcccactcttccctcccctttacacaggcagaggggcctatccccatggccaccamcacaggcctaggaagagtactgtcagactgtcgctgctgttcacttaaggctcaaagtctcttcagtcagcttgtgaatgctgccaggcctggatttttattattcaagaaag

SEQ ID NO: 840489 - DNA, 585 bp, Homo sapiens
agcagtcagggacgcatcccagctccggcaggraggggagagcagtggcggacgcatcccagccctggcaggaaggggagagcggcggggagctgctgctcaccggtcggtcctgaaaaaggaaggaaaaggccatgaaaaggccccagagcgacagggcatgatgggggcatggtttccctcaccctcagaagtccgagaatggacaagcttagaagcaacagtgagaggttttgagttcccatttcactcactggttcttgagtatcacattgggcatcaaaagcgttgcaggacttttccttagttcaagctaaaggcagggttcttcccacagccacggaaattcagactcgcagacgagttgaatggtaacccagggttttattgggtgaaaataatgaaaagggggaagcaggaactctctccaggccagagtccctgctagagcgtttcccacccagccattcgaatcccaggttccacacaggaagaggaggggccaggctcctccctgctgctaacgtggtgaacttccccgggctccacttcagtgggcaggctagatggagtttctccagggaa

SEQ ID NO: 840490 - DNA, 549 bp, Homo sapiens
cttaatagcaattagccaaacactagtcataatgcatattcgtaaaattcaaaggactgaaatcatacagaatgtttcttgaccacaatttagttgagctagaggtcgatagcaaaaacgagccaaaataagaaaaaataaaataaaaactaaaaaatgctcatgtatatacagaaatcatttccaggtggattgcagatctgaatatgaggttgtaaaccaaaaggtatttgagacaggtctcaatcaatttagaaagtttatgttgccaaggttaaggacatgggcccctgacagagcctcaggagctcctgaagacatgtgcccaaggtggtcagggttcaagtgtgcttttatacattttagggagacatgagacatcaattaatatgtgtaacattgccttaggtacagtaaatcaggacaacttgaagaggggggcggaggcaaaagactgcattcttttgagtccttgatcagccttccactgaatacacsaatacacaatttggtctggctcagtgaatctacatttttacataaacaata

SEQ ID NO: 840491 - DNA, 400 bp, Homo sapiens
tctgatttttttctcatgattaaactgggatatgtgttttgggatggacaaccatagaggtaaagcaccaatctcttcacattatatcaaatgtgtatagggactcaaaaatgtatcccaargtatggtgccttgggatgctgagtattttgaagtaaaggagattggaattcctcagaagcaaagtctctggcccctctttctcctgtgaaataaaccatagaaactaaactccctcttccccaagattataaaaactagacccttcttttccaaaacaagccataaaccctaaaactattactatcatcttctcccacctttctgtatagcagctggccataaagaaatactctgacctacgttgtttgatagtaggccataaaacattcattgctaa

SEQ ID NO: 840492 - DNA, 546 bp, Homo sapiens
acataacttaccattgtgaatgttaaccttgatcaccgggcagaggtagtgttggtcaagtttctcaaactgttaaaygatttcaccatgttttgatactgtactcttcgaaaagaagtcactgtgtgcatcccatacttagtcagtggggagttatatatagtaccttcaagacagagtatttacataattatttgaattcttttacatgacagatttatgtatttctctccatttattaatttatatatttatagattgtatctgtacagactcctctatatttattttataagactttattttgtggctcaaactcttccagctttagccttcaggagtgatttcagttgactactctgtccctttgacatatctctaacattgtgggtggttgtcgtttctttgaacatatccttactttatggcactgaaagatgctcaacattcatcttgtatatttcttaccccagccctagagcctgccgtttcttcgaggaaccccagttccctttattggagaatatttcttctgttctgcctact

SEQ ID NO: 840493 - DNA, 648 bp, Homo sapiens
ccatttgtctatttttgctttgattgtttttgcttgtgggatattactcaagaaatctttgcccagtccaatgtcctggagagtttctccagtgttttcttttaraggtttcatagtttcaggtcttagatgaagtcttcaatcaattttgatttttttaatttaggaagagatagagatctagtttcattcttctggtatgttgtatttccattatcatgcatttcaaaaagtttgaaaatttcctcaaaaatttcatcattgactcactggttatcaggaatatatagtaaaatttctgtgtatttgtatagtttccaaaattcctcttattgatttctagttgtattccattgtggtcaggaaaggtgcttgatattatttcaagtttttgaatgttttgagacttttttgttacctaacatatgatccttgagaatgacccatgtgctgaggagaagaatctgtgttctgcagccattggataaaatgttctgtaaatatttattaggtccatttggcctatagtgcagattaagtctgatgtttatttcttgattttctgtctgaaagatcggtccaatgctaaaagtggaatgttgaaatctccaactattgttgtatttaagtctctctctctctctttag

SEQ ID NO: 840494 - DNA, 603 bp, Homo sapiens
gaagagaagaaagagaagtcaaaagctagaatgaatttgtagatgactttggaatagtgtattagtsatgtgtttattattattaataataatcctctagatccctactagtctctataattttcagaacttttctgagtttcacataatattcacaaatattagacagggcaggtatggtgactcccattttgctcatgtgggacctgacactcaaagagtaagtgattatctcaaaggtgcaaggctgctacattgcagaccttgtcttgcaatgctactcataacacagtgtggggctaaatgttattatatgcagaagaggcatgatctgtctgcatgaaagaaagaagatttgaaacaactagagtgaggctttaaaaagtgaccattaagacaagttttagttggaggcctcaaagggatgtgaaagataaagtgtgtaattttaagagaacagtaagccacataggcttctgcacgtcccaaagtttgcatgtgtcctgggatcagggctaaccatgcaacacatattcaaaattgtcaggtttccaaattataaatattattttatgttcttattatattatataaaagtaagtg

SEQ ID NO: 840495 - DNA, 589 bp, Homo sapiens
ggtaatacagagtaatacatggtagctgaatagtaacaatatttataatagtaacaacagttgctatttaaactattggtttcagataaacatgagaggctctcaaattagtactactttacataaaccaggaaatcaagttgcaacttattaaagatataggcaggccaggtgtggtggctcatggctacattcccaatatttgaaagcttgaggccagggatttgagaccagcctaagcaacacagcaagaccctggctcttcaacaaagtttaaaaaattagccagatgtggtggtatacacctgtagtcctcgctacttgggaagctgaggcaagaggattgctcaagcccaggattttgaggctgcagtgagctatgattatgctaatgcacaccagcctaggtgacagagtgagaccctgtctctctctctctttctctctctatgtgtgtgtrtatatatatatatatatatgtttacatacacacatacatatatacacacacatatatatttgcctatatatattacatatgtagacaaatcttgtctcataagattctaggattcaaatgaaaatgatt

SEQ ID NO: 840496 - DNA, 638 bp, Homo sapiens
atggaggaaaattaaatgcatattactaagtgaatgaatccaagctgaaaaggctacttacggtacaattccaactatatgacattctggaaaaggcaaaactatgcagacagtaaaaagatcggtggttgcccggggtttgagggaagaaagggatgaatagacggagcaaggaggatttttaggacagtgaaactattctgtatgatgtcataatggtggatactgtcattatacagctgccaaaacacataccctaatgtaagctatggactgtgagtgataatagggtgtcaatattggttcatcaattgtaacaacctctttggtgcagaatgttgatggtctttgcaggaacaggtatatgggaactctctgtaccttcagctcaattttgctgtgagtctaaactgctctaaaaaataaaagtctctctctataacaatatgtatacttaatatggaattgatatggggtggggttacaattttttttttttttttttgagacctgtctcgctccrtctcccaagctggagtgccgtagtgcaatcacagctcactgcagccttgacctcccgggttcaagggatcctcccacctcagcttctcaagtagctgggaccacaggtgcctgcc

SEQ ID NO: 840497 - DNA, 393 bp, Homo sapiens
acagtcaaaggactaacagtcatgtagattggatataattaaaacatatagtatatatagctccagcagactgttttacccctattaagcactcaaatacacctgaacatttcattttgaccaatcttactcagttttcccacaggtgatctattttagtgatatcaccaccaccacccagagtcttctcatttttcaggaaacacagaatcaacttcaattcacaattatgaggaaacgttttgttttgtagactaatatctgacagatagatatgtgtcttaaccaatgcagccactgtggtcttgatttctatygctactctttcaatggaagagtgaccacagcctgactttcctagcttcctctttaacttctcagactatgaactac

SEQ ID NO: 840498 - DNA, 356 bp, Homo sapiens
  misc_feature 205: n = A,T,C or G
gtcattttctgccactcattcctgtctcagcaaagcccacctggttgcaggcccagccctccccgggaaagccaggagcatgctgtttccaaactcccaatatttgccgtycttgcaaaccaataaggccgcagctcgcaaagaatgctgatggaatcagtggcatctgaaggtgactttgaaaaagaacaggagtactgctganacagctcactcaatgacaggacatcaatgagagaactagagaggatcaatacctgaagggtgaaccgttgcaaactgggaaccactattgagcaactgacaagccagcctcagaagtggcaaccacaggaacataaagggaggtgcttaca

SEQ ID NO: 840499 - DNA, 248 bp, Homo sapiens
gccccgagcccggccaccgaagcccgtgccactcgccagctcctgcgagacgagcctttcgagcgcagctcaggcatttggttcagggtcckactgccggagtcgtctgaggcctccatccgtctgtcgtcacgaaaaaggttttggggggactaataagcacttcctgaatgcacatttgctccacgcccctgctgtagggagagggtctgcagacacttcaacaaatagaatcctaggaccttacc

SEQ ID NO: 840500 - DNA, 586 bp, Homo sapiens
atgtggtgaacctgtgcatgtctcgtttctgctaaagccgctgttaataagaacatctgtctctccctctkagatgaagcagggttacaggtggcaaacgtccagcactaattagcactctgcaataagcagctctccatcttgaggggtaacgtccctatctctccccatctcatgcctcagctctcaaagaaacaagcccataaactggggatggatcaacacttcacaacccgtatcatcatgcagtgtgcagctcttgtgtatatcctagtggaagctgagtttgttggctaataggatacaagacaggaagagcttagaatcaagggtccagtagacagaggagtaggcaagaccgtctctattactttctcctctgagactgaggacaagtcacacaaatgtggtcagaaactcatgttctgagaactgagagagccagcggtaggagagtcatttttagttgcaaagaaacattgcagtggattgaactgatgagagacaggctgcttgctggagtctcagcaaccagcttttctgaaaggaaagagaggtgggtgaccacactgccagcaccttctcc

SEQ ID NO: 840501 - DNA, 570 bp, Homo sapiens
atgatcttgtggttatgttaagaaatacaggactctcttagagattcataccaaaatacttacagatgaaataattttctgtgtggattttctttaaaataatccagtggaggaaaggagaaatggcgaggtatgtagatgaaacaagatttgctatatattgataattcctgaaacaggatgatggctacatggagatgttttgatgttcttgctacttttggtttgtttaaaattttcataataaaaagtaaaagacaagtccccaaaggaggatcagagaggagtcctgctatacctctgggtaatcacattrcataatgtcactccaagtgtttttgctttgatgttccacttgagatattttatttacttaatgtgaccttgctcatactgaagagactttacaagatactacattaagcatgattttttttttttaaagtctatatcccatggacatttcctctgtgtgcagaaagtgccaggccctaggggtggggtccaggataggctcacaggcttggtcactggcttccagattaggacaccgttaggccaggaatgggc

SEQ ID NO: 840502 - DNA, 570 bp, Homo sapiens
atgatcttgtggttatgttaagaaatacaggactctcttagagattcataccaaaatacttacagatgaaataattttctgtgtggattttctttaaaataatccagtggaggaaaggagaaatggcgaggtatgtagatgaaacaagatttgctatatattgataattcctgaaacaggatgatggctacatggagatgttttgatgttcttgctacttttggtttgtttaaaattttcataataaaaagtaaaagacaagtccccaaaggaggatcagagaggagtcctgctatacctctgggtaatcacattacataatgtcactccaagtgtttttgctttgatgttccacttgagatattttatttacttaatgtgaccttgctcatactgaagagactttacaagatactacattaagcatgattttttttttttaaagtctatatcccatggacatttcctctgtgtgcagaaagtgccargccctaggggtggggtccaggataggctcacaggcttggtcactggcttccagattaggacaccgttaggccaggaatgggc

SEQ ID NO: 840503 - DNA, 570 bp, Homo sapiens
atgatcttgtggttatgttaagaaatacaggactctcttagagattcataccaaaatacttacagatgaaataattttctgtgtggattttctttaaaataatccagtggaggaaaggagaaatggcgaggtatgtagatgaaacaagatttgctatatattgataattcctgaaacaggatgatggctacatggagatgttttgatgttcttgctacttttggtttgtttaaaattttcataataaaaagtaaaagacaagtccccaaaggaggatcagagaggagtcctgctatacctctgggtaatcacattacataatgtcactccaagtgtttttgctttgatgttccacttgagatattttatttacttaatgtgaccttgctcatactgaagagactttacaagatactacattaagcatgattttttttttttaaagtctatatcccatggacatttcctctgtgtgcagaaagtgccaggccctaggggtggggtccaggataggctcacaggcttggtcactggcttccrgattaggacaccgttaggccaggaatgggc

SEQ ID NO: 840504 - DNA, 568 bp, Homo sapiens
aaagtaaaaaaccttaacacaccaataacaagtaargctattaaatcagtaatcaaaactctcccatcaaagaaaagcccaggacctggtggcttcaccgatgaattctaccaaatttaatgaagaactgatactaattattctcaaactcttccaaaaaactgaagaggaaaaagtatgtccatatttattttacaagaacagcacaacgctgatactaaagtcaaagacactacaaaaaaagactacagaccaatatccctgatgaacatagctgcaataatcctcaataaagttctagtaaaccaaatttcacataatattaaaaatatcatttaccatcatcaattgagatttatcccagggatgcaaggatggttcaacacatgtaaatcaatagatgtgatacattatattaacagaatgaaggataataccaaatgaatatctcaatacctgcagaaaaagcatttgacaaaattctggccaggcacagtggctcacacctgtaatcccagcactttgggaggccgaggcgggtggatcacctgaggtcaggaattcaagg

SEQ ID NO: 840505 - DNA, 651 bp, Homo sapiens
acatggtgcgggactggcaggcagctccaccagcagccctggtgcaggatccactaggtgaagccagctgggctcctgagtcaggtggggacttggagaacctttatgtctagctaaaggactgtaaacacaccaatcagcactctgtgtctacctcaagatttgtaaacacaccaatcagcactctgtgtctacctcaaggtttgtaaacacaccaatcagcactctgtgtctagctcaaggtttctaaatgcaccaatcagcactctgtgtctacctaaaggtttctaaatgcactatcagtgctctgtgtctagctaatatagtggggacttggagaactttcatgtctagctagaggattgtaaatgcaccaatcagcactctgtgtctagctcagggattgtaaatgcaccaatcagtgctctgtgtctagttaatctagtgggaacttggagaacttttgcgtctacctaaaggattgtaaatgcaccaatcagcactctgtgtctagctcaaggtttgtaaaygcaccaatcagcaccctgtcaaaaaggaccaatcagctctctgtaaaacagaccaatcagctctctgtaaaatggaccaatcagctctctgtaaagtgggccaatcagcaggatgtgggtg

SEQ ID NO: 840506 - DNA, 523 bp, Homo sapiens
gaaatttggaaagtacaggagtcacattttctagatacatatgatttgtttgatgcacagggaaacccaaacatcactgctaagctgaatctggcccatgggctactggtttgccaacagaaatccaatcccatcatttaatgtaagaggaaactgggccgggcgtggtggctcaggcctgtaatcccagcactttgggaggctgaggcaggcggatcacaaggtcaggagatggagaccctcttggccaacgtggtgaaaccccatctgtactaaaaatacaaaaattagctgggcatattggcgcgcgcgtgtagtcccagctacttgggaggctgaggcaggagaattgcttgaacctgggaggcagaggtgtcagtgagctgagatcgcaccactgcactccarcctgggctacagggcgagattccatcaaaaaaaaaaaaaaaagaaaagaaaaaaaacaagaaaccgaggctcagagagggcatgtgtctagagtcccaaagtaagtttgtacatg

SEQ ID NO: 840507 - DNA, 597 bp, Homo sapiens
agtcttggggaaagaagtttcttgcaatctctcctctgacactttttgcttgtaaattaatccatcaagaaaatggtgtttcttcccagctcttaagggattcacaccacttatgcaaactcccggaggstccagtctaagttgagatgacctaatgagttgcagagccaagctctttaaaaggcaggcctgcatttacatatagaatgatgttgacgcaggcagcagtgggatctcaggtttgttgttctcccaaacgccaccccctctcccatcctcacactatgagagggaagccgaagtggtttattaagttgcctgaactcttttttgctaattctccattttcattttgtagaaggaaggctccaatgaatctgagtcagtaagacctgactcagcctccttgtaatacatttaatcatttattcatccatcatcattattatcatgcacctgccctgtgccacagaaccagcagttgtggaaagacaggattctaccaagggagaggctggcattccagctctacccctgtcctcggcaatacttatagacatctatttaatgggataagaatgggatgttccctacaat

SEQ ID NO: 840508 - DNA, 656 bp, Homo sapiens
tggcaaactacttatatcttcagtagaaatactaaaagatgaacctatcagaaataatgaagacaacgacttttcaagacatagacagtaaagtaagataaaaataggaamaacaaaaagttaaaatagaggggagatgaaattaaagtgtggagtttttattcattttctttttgcttgtttatttaagcaatcagtgttaagttgtcatcagtttaaaacaaagggttatgacatattatttgtaagcctcatgttaacttcaaatctaaaataatacaacataacacaaaaaataaagggcaaaaaattgaaacacaccgtcagagaaaatcaccttcactaacaggaagacaggaagaaaagaaggaagataagaccacagaacaaccaggaaacaacaaaaatggcagaagtaagtctttacttatcaataataacactgaatgaaaatggacagacttctccgctcaaaagaaatggagtggtgaaataaattaaaaacaacaacaacaacaacaataatcaacaatttcttgcctacaagaaacacactgcatccataaggacacacacagactgaaaacaaaggaatgggaaaagatttcatgcaaatggaaatcaaaaaagagtagaagtagctaaactgatatcag

SEQ ID NO: 840509 - DNA, 526 bp, Homo sapiens
ttttctcttgcttcttttaggatcctttatctttgacatttaggaatttggtaattaaatgtctcgaggtagtmttatttcggttaaatctgtaacctctctgtgcttttgaattgtgatattgttgtctaggtttggaaaattctctgttattatccctttgaatcagccttctaccccatctctctctacctccttgttaggttaatgactattagatttgccattttaggactgttttctagatttcgtaggcatgcttcattcttttttatcattttattcttttgtctcttctgactgtattttgaaatagcctgcttcaagcttacgaattatttcttctgcttgatcaattctgctgttgagagactctgacgcattcttcagtatgtcagttgaatttttcaggttcagaatttctgcttgatttttagttatttcaatctctttgttaaatttatccgatagaattctgaattccttttcagtgttatcttgaattttgttgagcttcgtcaaaaca

SEQ ID NO: 840510 - DNA, 621 bp, Homo sapiens
aaaatggtcctttaaaaggccaagaagaagaaagaagctgaagctaaatagtacacattttgtcattttgagtaataacatggttaagtagagatgctggtaaatattaaatctgttcattaaaagtcgaatagtaacagtttcagaattaaccttccttcatctacagactttattaaaaataatttaatttttgttcaaatttctgtctccaaaaaagtactttataaaatcagattttcactaatgctttctaaaataatacagatttttaaaagccattattaaccatgttaactttttttttttttatttactcttttgaggtggggagaagagaatcatgtacttcttaaattaggatcaaaagttttacttctttggacctgaagaataggaagtattcgttttgctcagtgtttgtattgccacggaaatcagtagatatatattgaatgaatgtcttttgtattttggttttgtctggccttttgttggtttacttgttttgagaagtgaaggaagtgggagagaagagaatggtatcaagagtacaagggtgcagcttgaagggcrtgaactccacagtataatttacaaggattatttttttcttgttgc

SEQ ID NO: 840511 - DNA, 611 bp, Homo sapiens
agtgacatccttttcaccacgtttaacccatttctgaatgactgtcttgtgcggatatatcacactgataaatccrtgtgatgaacactgaagtcacatgcttgcactccagtggaggccgggaggtgtggttttactgaactctgtgggtaaggcagacttcacacagaggaagtgtcagatatagagatggtgttcaaaagattttagacagatacaaatgttgcttgtccactactatcatctagttgagaatcagtttcattggggcatacaatatagatgtgtaaaatatataaaatgtgttgcaaaaatgtaaaaataagatttaaataatcccaggccgggtgcggtggctcatgcctgtaatcccagcactttgggaggctgaggcgggcggatcatgaagtcagaagttcgagaccagcctgatcaacatggtgaaaccccatctctactaaaaatacaaaaattagccaggcatagtggcgtgtgcctgtaatcccagctactcaggaggttgaagcaggagaatccttaaacccaggaggtggtggttgcagtgagccgaaatcgccccactgcactttagcctgggtgacagagctaga

SEQ ID NO: 840512 - DNA, 294 bp, Homo sapiens
aacaaccaaacctaagaataattggtgttcytgaggaaggagagaattccaaaagcttggaaaacatatttgggggaataatcaaggaaaacttccccggccttgctagagacccagacatccaaatacaagaagcacaaagaacccctgggaaattcatcacaaaaagatcatcattgcctaggcacattgtcatcaggttattcaaagttaagatgaaggaaataatcttaagagctgtgagacagaagcaccaggtaacctacaaaggaaaacctatcagattaacagcag

SEQ ID NO: 840513 - DNA, 682 bp, Homo sapiens
gtgaatgtacaaaatgagcttacaaacttacaaaacgaagaagactatttaaatttatctgtacttagttttgagatatttgaaaaattaatttttaaaacattttagtccctctaaagatggcagacactgacacaactaaagattaagttaaaaatgtgttatttggctaagtgtatgaaataatcattagagaaatgcaaagaaaaaagacacaatgagatatcaccgcacacccatttggatggctactatcaaaaaaaggaaagaaaagaaaagaacaagtgctggcactgatatggagaaagtggaactcttgtgcaccattggtgggaatgtaaaatagtgccactgctatagaaaacatagtggttctcaaaaaactaataatagaactaccatatgatccagcaattccacttctacacatatatctgacagaattgaaaataggtctcaaagagctatttgtacacccgtgttcatagcaggattattcacaatagccaagggatggaagaaaccctagtgtccatcaacagatgagtgcatcaacaaatgtagcatatacatacaagggcatatgactcagctttcagaaggaaaaatattctgacrcatgcaacaacgtgaatgaacattgaggacattatgcaaagtgaaataagccagtcacaaagac

SEQ ID NO: 840514 - DNA, 650 bp, Homo sapiens
aaaaacaggaaaaagacatgccaattatcactattatttcttcttacttggcccgaagcaaattcaaatagaaatcaagataaagtttaatagctagaaaacgcagtaaactgtaataaaaataagaaaaaaatacagaaatcaatagcttttctctttattatccataaccagctggaagtgactgagtgtggaggtggtagtgcaaattcttaccatgtggacagtaaccacaaattactaagaaataaattttgaaagaaaggattgatatgaaggaaccaattaaatattactgaaagaccaaaagtcagtcccctcccctaaaagaaatgtaaaagtgtactgtgtaattggatggaaagtcctaacctcatacaaatgttaattctctgcaaataattatataatcatttagtaaaagagaatttaacttaccacaaaggtggtatttcaatttagtaggaaaatgttagctggtgtaataaatggtgccatcacaattagctatatatctggggggaaatgaactctaaacaaataaattctagatrtaccaaaaaaatcataaaaaataactgaaggatatttaggagaatacttatgtaactcctggtcaagaggcccacttttagcaaaacaagaaacac

SEQ ID NO: 840515 - DNA, 676 bp, Homo sapiens
gaaaattgaggctgatggggacataacttatttccaggaaccctcactccccctggccagcctagaaatggaccctggggatgcaaccatgkgatacaatccccctgcctccagcgtggctccttccctggatcatctctcctctttctggcaccaatttcctaaattcccagcagcccagccacacacagctggtggtaaagatcaggctgaaaccccatccctgcccagtggcttggcctgggatactgagccaaagcagaacaccgcgggcaggacaggctgagggctgggcaggcagcggctggggcctgctgggcaccgcaagtccttgggaagcccagccatggggaggaaaggtggctgacactcccctgcctaagaaacatggggacaggaccctcccataagggctagtgaggagacagttcctgcccacaagaggcttagcctcaggcttccacctaggatggcagaggaaaaactcagtcttctgattgaagagacacgatcttcactatcaggtcaccattaagtggtatctgtcattgctatggtcggctccgacagccagtcctgtccatgacaagtagaaatggaagctcacaggtattaaggatctacagtgggcgaccgtgcaaggcacttggcactgtgcaattctctctttaattat

SEQ ID NO: 840516 - DNA, 578 bp, Homo sapiens
aagtactgtttcccatctaaaattgctaagcctctatttctctctgatcagaggtaggggctggaggcaacattgagccaggggaggtgcctgctccctttctgtagttcctgtgtctattcagccctcatcaggggagaggggggcatgcttgtacgaactccgcagcctgcacagtgaaggagctcgcctcaggagcccccactttgaatggctttttgtatttgtgtttgactatgtctcagcatgagcttctgcccgagtgttctgctcattagagtttctagaaagttgtcctttcctgaccacaggcatcacttctggggttgttttcttgggaccgaagctgagattgcagatggtaatggctatgtgtgctttagcttgttccattggcgaaacataccaattaaacttcaaatgaaccaattcttgtttctttacaatgtaccttggcttgaagttggagttttagccagaatttccrttggcctgttacaacacatgcaaaaatgctgggtattctagggtgttttgcagcaaatgctgcttctctggatcctgctccttgacagaga

SEQ ID NO: 840517 - DNA, 636 bp, Homo sapiens
aaggctttgctttcattattttttattgtttgttctttattttttttctgactagattacaagttctgagattttttttttattctgcttgatctaccctagtgttgaaactttcaaatgtattttgtatttcctttaatgaattattcagttccagaatttctatttggttctttaaaaaatatctttggtaaacttctcattcatatcctgaattggttttttattcctgatttctttgcattgtttttcataattctcttgcatttcactgaggtttttaaaatcaatattttgaagtctttatatgagattttgaaaatttcttcttgattaagacatattgctggagaattattgtgttctttcggaagtgtcatattttctggatttttcatgttttctatgtccttatgttaatatttgcacatctggtgtaaccatcatttcgtcctgtttttggatttactttcataggggagaactttttcctgaagattcatctgtagtgttggttgggtggggaactttggctttgattctgagwcttgcctctgatttttttttttttttttggctataaatggtgttattggttttttgtgatttcatcagtggattagggtgtgattatta

SEQ ID NO: 840518 - DNA, 627 bp, Homo sapiens
ggctcttccatatgtcaggggtgggctggagktggggaggctttgaatggccttggctgagatatttaaattcctttccatgtgtctcatcttccagcaaaccagccttggtgtgtccttcttatggatgatagagagctaaagagagtaagccatattgtacaagtgattttttagaccctgtttgtctgagctagtcacatgactgaccccagaattagagggggaggatcttacaaagctatatgacaaaaggcatagatacaggaagaggtgaagagttagtgctattttgcaatataccactgtgattgtcctaggatcatgttttctacaatgaatatgcacactttatgtgtgctctaatgcttccagagagtggaactacgtcaaagctattaaaatctcacaagagagtgcagggttaaagctgtattgccttatggcaccatgtcctataaacattgcactaaaatactcaaagctcatactgttgactaataataggaaatatgccatttgggaacattattctgatactgaagcctactgaaacttcaaccacaatgcagttcagattttcatagatgtatcccttaggagaaataaagaaaactaattaaatgt

SEQ ID NO: 840519 - DNA, 607 bp, Homo sapiens
gcagggttagtttgaagcaataattgagaaaactgtattgaaatcatgcatttctctatttcaccaaagtgcctgctgctgaacgtgcaaaaacctttgtttgagttcttcttcttcttttttttttttcacagtagagtgaaagcaagtttattaagaaagtaaaggaataaaagaatggctcctccataggcaaagcagccttttgagttcttaatagcaaatgaaaataattattctaaaaggaaaataaagatcttgaatggataaagtagttatcaaggttacactatcagtgaccagtctggaaatagtcccctggtttcccagtcaatttttagaactgttctgattcctagcaagatgaaaaagaaaggtacacctggatcaggaacctgagactacgcaatgtttcataagaaacaaacagcatttggtcgggtgtttaagagacacttttaaagtgaactcactacagaatgaggcttattttttttttacacatcataaatcttcaaaaatcatcatgttgakgtagtgatttcaaggtttatccctgagaagaattttaagggattctgaaagtattttaggaagaatataaaat

SEQ ID NO: 840520 - DNA, 578 bp, Homo sapiens
aagacttgagaggtgaaattactccttgattcttgggctgcacaatggatattgttttagtaggcatgaaaacaacattgatatccttcatcagagctctggggcgaccaggtgtgttgtcagtgagcaataatattttgaaaggaatctctttgtaagtggtacatctcaacagtgtgcttaaaatatttagtaaaccgtgttgtaaacagacatgctattattcaggctttcttgttccatttctggagcacaggtagagtagatttagcataattcctaagggccctagaattattgggaatggtaaatgagcattggcttcaacttagagtcactactagcctctaacaagatactcattctgtcttttgaggctttgtagccagacactggcttttactgtctaattgtgaaagtagtagatggcatcttttctccatataaggctgttttgtctacagtgaaaaatctgtttagtgtagccatcattatcagtgatctagactaaatctggatgacttgcygtatagcttctacatcaggacttgctgcttcaccttgtacttctgtgttat

SEQ ID NO: 840521 - DNA, 637 bp, Homo sapiens
ctgtaaaacactgataaaagawattgaataagacacaaaaaaaatgaaaagatgctccatgttcatggattggaagaatcaatattgctaaaatgtccatagtacaaaaagcaatctgcaaattcaaagcaacccatatcaaaataccaataacctttttcacagaaatagaaaaaataatcccaaaatgtattaatatatggaaccacaaaagacccagaatagccaaagcaatcctaagcagaaaagaacaaagctgaagacatcacattacttgacttcaaattatactacagagctacagtaaccaaaacagcagggtactggcataaaaacagacacataaaccaatggaacagaatagagaacacagaaataaacccacacattcacagtaaattcactttttacaaatgtgccaaaaatacacattggggaaaaaaacagtcactttaataaatggtgccaagacaactggatatcgatacgcagaggaatgaaactagacccctatctctcagcatatagaaaaaccaatttaaaatggattaaagacttcaatctaagatgtgaaactataaaactactagaagaaaacagtggggaaacaatccatgacattggtctgggcaaagat

SEQ ID NO: 840522 - DNA, 494 bp, Homo sapiens
ttggtcttaggaacaaagaaccaatgtttctggcttatacaatctgatctttcacccttattggcccttaattayagccaatcaagtatttaagccttgtttcccaaaaacagattgaaggtttctgagagtcagaaagcatgccacctacctctctggtaactccactaatatcttacaaaggacataacattaaatgtttatttgagcatttgaggcaagaaaagtcaaaggaaaattttcatgtcagttataaaactctgatagctaaaacaacctggttctgaaatactcttttaaagggttgttaaaaggttccagaaggttttattttttgtaattgtaaattgtttcttgtagtgttacacggtagaaaatgtttagcttttaagtattatgtagagcaaaaatccttatggcctcagagttacataatcattttatacatttgcgctttatgacgcaaagaaacaaagatttagataggttaggat

SEQ ID NO: 840523 - DNA, 629 bp, Homo sapiens
gcttcctttgcaattgctgttttttgtttttatcatgagggctttgtccatgcctatgtgttgaatggtattgcctaggttttcttctagggttttatggtttcgggttttacatttaaatctttaacccacyttgagttaatttttgtatacggagcaaggaaggggtctgctttgagttttctgtatcccttctaaaaccagtagaagactaggaggccccctctctccactcctattcaacatagtattgaaattctggccagggcaatcaggcaagagaaagaaataaagggtattcatataggaagggcagaggtcaagttgtctctgtctgcagatgatatgattttatatttataaaagtctatccccaaaactgccggaactgataagcaactttagcaaagtctcaagatacaaaatcaatgttcaaatatcacaagcattcctttacaccaacaataggcaagcagagatcaaaccatgaatgaattcccgttcataattgctacaaagagaaaaaaaaatgcctaggaatatagctaacaaggaatgtgaaggatctcttcaaggagcactacaaaacactgctcaaggaaataagggaggacacaaaaaaatggaaa

SEQ ID NO: 840524 - DNA, 476 bp, Homo sapiens
gcaattgctgttttttgtttttatcatgagggctttgtccatgcctatgtgttgaatggtattgcctaggttttcttctagggttttatggtttcgggttttacatttaaatctttaacccactttgagttaatttttgtatacggagcaaggaaggggtctgctttgagttttctgtatcccttctaaaaccagtagaagactaggaggccccctctctccactcctattcaacatagtattgaaattctggccagggcaatcaggcaagagaaagaaataaagggtattcatataggaagggcagaggtcaagttgtctctgtctgcagatgatatgattttatatttakaaaagtctatccccaaaactgccggaactgataagcaactttagcaaagtctcaagatacaaaatcaatgttcaaatatcacaagcattcctttacaccaacaataggcaagcagagatcaaac

SEQ ID NO: 840525 - DNA, 656 bp, Homo sapiens
tgcctcttctaataattattcaacaaaccattatggattatgaacctgaaggggtgttaattattagtctgctttaggtgytcacatttcttaccttggccctgttggcatatgatataaactcagaaaacattctttttggattatgtcttctttgttatgttatgtgtaccctaggcacagggattttagtctgtttcctttttaatattttacctgataattgacataaagcatccatgcagtaaatgtttgtgaaatgggtgaatgattaatgtatgttacacttgatacagaatgttaaatgctttaaaaagtaaccagcaagctactgcataagaaacactatgaaaaagatgattagatgataataatagtcaagacaaacattgttataagtaagatttatcttggaaatcagttaacagcaagaacagtaaaagtaaataagctgatgtatttgctttattattacaatacgtttcatcatttaacatcttccagagtatccttaaactaactgtattctggaaatgccttctaaaacattaaaataaaaatgctttccacaccaccttttaaaatcattaaaattatttgagaggctctgctgttttaaacaccttttaattaagtaagcctatggtcacttgtct

SEQ ID NO: 840526 - DNA, 634 bp, Homo sapiens
aatcacaagcattcctgtataccaataataggcaaacagccaaatcggagtaaactctcattcacaattgccacaaagagaataaaatgcctaggaatacaacttacaagggacgtgaaggacctcttcaaggagaactactcaagaaacgactgctcaagaaaataagagaggacacaaacaaatggaaaaacattccacgctcatggatagaaagaatcaatatcgtgaaaatagccacactgcccaaacattccatgctcatggataggaaagattcaatattgtggaaatggccatactgctcaaagtaatttatagattcaaatctattcccattgagctgccattgactttctccacagaattagaaagaaactattttaaatttcatatggaacaaaaaaagagcccatatagccaagacaatcctaagcaaaaagaatgaagctggaggcatcatgctacctgacttcaaactatactacaaggctacggtaacaaaaacagcatggtactggtatgaaaacagatatacagaccaatggaacacagcagaggcctcagaaataatgccacacatctacaaccayctgatctttgacaaacctgacagaaacaatggggaaatgat

SEQ ID NO: 840527 - DNA, 609 bp, Homo sapiens
aactcagagttctttaagtcaaaatatgtaattatttttatacagcagataaagcataatgtaggggtagaataggtgactcattagagaccatagccactctgcatacatgctgctcccagcatctaaacacttttatttctttccttagttcttcctactctctctcactcgacactcagtgttgatcttcaaacactgatcttcagaataccttcactgttagccatttgctttcaaataatggtgtttaattgtgggaaagttaaaaaaaaagtgcttgtgatggttaattttaggtgtcaatctgactagattaagaaatatccagagacctggtaaagcattattttgcgggtgtgtctgtgagggcattccagaagagattttgtgtaagtatgagtggactaagtagggaccatctaccctcaatgtgggtgggtaccattcaatggctggagacccagaagcagcaaaaaggaggaaaggtgaactgtgctctctctgtctcctggagcttgggtacactcttctcctaccmttgaacatcagaactctaggctctctggcctttggactccaggacttataccagtgccctgccaggtt

SEQ ID NO: 840528 - DNA, 531 bp, Homo sapiens
ttggaaaatattctgaattcatctgtgaccctccagtgctttgtatagtgcaatggactgaaagtttgccccctaattcatatgttgaaagctttttccataatgtgacggtatttataagtkgggcctctggaaggtaattaggattagatgaggtcatgagggtggagctcttcataattgggattatgagtgttcttcttatgaaagcccaaaaggaagcttgcctttctgcccttcaccatgtggccatacaataagaaatcagggtcgggcgaggtggcgccaacgcctgtaatcccagcactttgggaggccgaggcaggcggatcacctgaggtcgggagtttgacaccagtctgaccaacatggagaaaccccatctctactgaaaatacgaaattagctgggtgtggtggcacatgcctgtaatcccacctacttgggaggctgagacaggagaatcacttgaatccgggaggcggagattgcagtgacctgagatcgcgccattgcactccagcctggaca

SEQ ID NO: 840529 - DNA, 592 bp, Homo sapiens
actgcacttgatcccaggtgacagagcgagactccatctgaaaaaaaaaaaaaaataaaatcaaagctgccttggagactgctttagcaaaattttggttcgcgccttccttggattatgtattagggtaaagtaaaaatggcaagcttatattgctatcttatggctaagattccaagctgtcagatcttcatttatgtagtgtgtatatatgtctaaatgtgtttatttgtatgtacacttattgttatatgttttgtctaccaaattggcttataagtaaaagagcactcataaattaagcaaataagactaagcaattttcaaggccatgtgacctaaatataactttactaaacaagctatctttaaaattatttgtggaacaaaaatagaaaggccttcagaattgtcagcatacattttgtctgaattatatgtttgtctttgctagatattttaaaatgtcagtgttaattcrggctgggagctgcttctgggagcctgcctcccattctattcaaaatctcagtgagataaacgcatatccaactgcttcctttgaagaaaggctagtcagaaactcaaagga

SEQ ID NO: 840530 - DNA, 523 bp, Homo sapiens
aaatattgatacataatacaattggccagccatatcatagaccacaagaaggattttacaataaatggaggtaaaatataattattcatataaaatgaaatcaatcccctacttcacctcatatataaaaatgaatacattccacacagattaggaaattaaatattcacacaaaatctcaaatagtgataaatgtatttatgaaaatgtgtttttttaacaccatagaaacactgttgactctaaaacttgatgagtttgcttaaacataaaataattcaagacaccttaagtaaaatgataattgttgaccttggggaaaaaacataattgaagttaaaaatccagtggataaatttcatagtagataagacagctgtaaagacaatgaataatccggaagacaagttaaataaaatacctgacttaagtatgggagaggaaaagaatgtgattgagcasatgtaatgtttgaagagaaaatggctgaaattcaaaaaacatgagaaaccaaagtaggatg

SEQ ID NO: 840531 - DNA, 533 bp, Homo sapiens
tcaccatatttcaattctattaaattgttttgctggtctgaaaagcatggctgaatactgtgttcttttatcagtagtttacacagccagacaccatgcaaaagcagtcttccctttagaatgactgatggtatgctaaggtttttcatagcatatcattattaaaggtgaatacaaataaatgaactaatactgatctgctgaaaggctgccagtggccagtgaagccattctggttggaccattctcctatttgatatgttagtcgcttgtattgtggctttcacatgcagtacttaaattgatgtggtcatagtgaatttgtaagaaattaatggctttcatatgtatattttgttattcataattagttctacagttttcttagcatttttctttttcccccatccaacaggctgtgtggttccgggtgctggtgcygtggaagtggcaatggcagaagccctgaataaatataagctcagtgtaaagggcaaggcacagcttggagtccaagcatttgctgatgcgtt

SEQ ID NO: 840532 - DNA, 410 bp, Homo sapiens
gtgaagtttgagtatatgtacataatatgattatgttgagttaaataacacatgaactcacctatcatttttgtggtgagacacttgaaatttactcttagttattttaaaatatacagtaattattgtttattgtagtcaccctgctttgcaatagatatcaaaacatatttaccctgtctatgtgaaactttgcattctttgatcaacaactctctgttttcttcccaccacacccagcctctggtaaagattattccactttctacttttttgagttaaactttattcttgcagtatttgtctttctgtgccacrgttattccatctagcataatgtcttctaaattcatctatattgtttcaaatgataggatttacccctttttaaaggctgaacaatattccat

SEQ ID NO: 840533 - DNA, 457 bp, Homo sapiens
ggttactctgggcagacccccccctacaaacacactaatgttttgtggttytaaattttatttacttattatattgttaaagtttctatttttagtgaaattttccaaagtgatttacaaaactgtttgctttataaggtgcggtcaccgaagtctttttgtttccttaacaaatgttaagctaatgttttgacagtgattttcttgtatgtcaggaactaagcaaacaggcaaatacaacaaaaacaaaaagaaaaacaagtaatcattagccagcaaaatatgtctctaggccatgcagactggctttgtgctgggttctttaaagccggcacaaagtgtatgttcactcttgcactgagtgaagttcaagttcactcttgcacagagcttgcactgaggggaggaatcggccaaggtaaaagtgtaggctcttcttatgacatttgtcatcatg

SEQ ID NO: 840534 - DNA, 457 bp, Homo sapiens
ggttactctgggcagacccccccctacaaacacactaatgttttgtggttctaaattttatttacttattatattgttaaagtttytatttttagtgaaattttccaaagtgatttacaaaactgtttgctttataaggtgcggtcaccgaagtctttttgtttccttaacaaatgttaagctaatgttttgacagtgattttcttgtatgtcaggaactaagcaaacaggcaaatacaacaaaaacaaaaagaaaaacaagtaatcattagccagcaaaatatgtctctaggccatgcagactggctttgtgctgggttctttaaagccggcacaaagtgtatgttcactcttgcactgagtgaagttcaagttcactcttgcacagagcttgcactgaggggaggaatcggccaaggtaaaagtgtaggctcttcttatgacatttgtcatcatg

SEQ ID NO: 840535 - DNA, 458 bp, Homo sapiens
tcttattttagcattgaatattttcacaattattataaatatctaatattaataacggaactgttaaaaatgtttaaaattgtacctttgaattattttattgttgaatttaaattcctttaagtatgatagtaaatttctattttatgctttctctatgcatatgcaaattaatctatccacttctctatctctatgtagtaacatatgaaaatcaggcctctcttcttctaatggacatacacatgtttgcatatagaatatcagactctttatagcatttaaaatctttaaagacatgaatattaccttttgacaaatatatttttgcatgtactgagaataccctatttattttttatttgggctaakcaatacgattattaatattattggattaccaaatttagaatcacactttcatccccaaggtggatatttgtgggtttttttgccaa

SEQ ID NO: 840536 - DNA, 607 bp, Homo sapiens
cttctggtagggaaagccttggcccatcctgaaaaggtgtagacaagtactaacatgtaccgatagctccctgcctgrggcaactctgtaagtccataagcaggttttcacagggcatggttcctatttcctgaattcctgggggccgagtgggccattgtcatgggttgttctgggcacaggttaaatattgttcacaaacagcttgggtgatggcagtgagtcgcggcacatagaaatggcgtcctagtagcgtttctagtgctgtttttcccacgagttccatgatgcaattacttcacaaatttgggggccaccattttgggaatggccgacctcccatcagaaaatttccaccatcctccttcaatatattttccagttttttgggcaaaacaggccttctcattcggagagtaacttgagacctcctggaggggaggctctgggaggaggggcatagctaaggcttcctttttaaaatgaggtgtaaccattgctgcccattttgcctccctgtctgcctttctgtttccttttgcctctgacgtccctgccctctggtgtcccctgcagtgcatagctgctactttctctgggatccata

SEQ ID NO: 840537 - DNA, 639 bp, Homo sapiens
tgaaatgcaagggcattatagacttcaagcaaattgcatgtgcattaagactatcgaacttgggaygagtaatcctataaaagcaaaatcattgctgaagcatttttgtaatcatgtattcctcctgcatgttcatttgaaaatgttctcttttggtgtggaggcaaatgagctgattatattgagctccgtccaccaatttatttatttatctaataaacattttaatgaaggggtatcaggcacgtttatgttttacccaagagacttatttaacagtcattcaaccatttggtcattaatagtgaaaaggtcacaggctttggcatgaggcaggcctgggtttgaaacagatcttcgccatttcctagaagggttgtcttaaggcaaattatttttttagacatgttttcagtttttctgttaaaggaaaaattgtttgtaaagactgcattgtgactgagaaagggcacgcaaactagatgagtttaatcctatctctcactcctgactaaccttatatgtatacacaaatacaaaatgctccaagttggatgtgaaacaaatggtggtataatactcgcccttaaatataattgcagatagccacaaaatataaaaccatttacggatgtgaga

SEQ ID NO: 840538 - DNA, 536 bp, Homo sapiens
ttattatttccattcttttgcatttgctgaggagtgttttacttctaattatgtggtcagttktagaataaatgtgatgtggtactgagaagaacatatattctgtggatttgggggtggagaattctgtagatgtctattaagtccgcttggtccagaactgacttcaagtccttaatatccttgttaattttctgtctcattgatctgtctaataatgggtcatttatacttgcctttgctttaagcctgcttcaatagttagtaaatatgtttctagactttttccaatttaaaaaaattgacctgcaccttgctttggattgtactaaaatctgatttcaacacaagcatagtctcctgaattgctttggttttgttcagctgaggccttggggagcgctgaggccttggggagcactgaagccaaggctctactgtaccaaaaatttgaaggccatgcgaatgatctgtatgtggaaggactaccagaaaacattcctttcagaagtccctcgtggtatggaatcgcaagg

SEQ ID NO: 840539 - DNA, 536 bp, Homo sapiens
ttattatttccattcttttgcatttgctgaggagtgttttacttctaattatgtggtcagttgtagaataaatgtgatgtggtrctgagaagaacatatattctgtggatttgggggtggagaattctgtagatgtctattaagtccgcttggtccagaactgacttcaagtccttaatatccttgttaattttctgtctcattgatctgtctaataatgggtcatttatacttgcctttgctttaagcctgcttcaatagttagtaaatatgtttctagactttttccaatttaaaaaaattgacctgcaccttgctttggattgtactaaaatctgatttcaacacaagcatagtctcctgaattgctttggttttgttcagctgaggccttggggagcgctgaggccttggggagcactgaagccaaggctctactgtaccaaaaatttgaaggccatgcgaatgatctgtatgtggaaggactaccagaaaacattcctttcagaagtccctcgtggtatggaatcgcaagg

SEQ ID NO: 840540 - DNA, 394 bp, Homo sapiens
aaatttttttgcagaaaagctgatccaccatctttcttcatttagtgattctggcataccattcttcctttactgtcgaaatcacaggaatacaagttttctcaatttaatgggcttaatagcttgggttattaaatattattattataaaatagacagtattattttttcttttcctgtgactaaaattatttctaatatccagaatgtatttattactgaaacaatgctgacacacactgcacaaaaaaggaagaaccagacattcatkaaagctgggaaaaagcagaactcagtgtgctcaagaaccactagcaggccgggtgcagtggctcacacctgtaatcccagcactttgggaggctgaggcggacagatcacctgaggttgggag

SEQ ID NO: 840541 - DNA, 645 bp, Homo sapiens
attataaaattaagacaaccaaatgattgtccaaacccttctgaaaaatagttcattattttaaagtaaaagcttttttattatttttaatttaaaaagccaagggaatgattcaatgcatctttctaatattgataaaatgtctgttttgggttctttgaccaaatttttgtgttttgtatttgttaccagcccctaacttacttatctgatttggcagtgacaaaggtcttttgtcattaccattttaataacaaatgatagaaatatttggtgcaaaaaaaaaaatactggggcaaattaaagtttgccaaaactcagctatcaaatttaagaattcacttattctaataattgattatatactcttggtgcaattaatgttctgtattatgagaggaggacattttaaaaatatgttaagaattttgatttctgaatataaaatatcagaatgttcatatcctttctcattaatgttattagtaaatccttagtcactgcaaaataatgtctacatcctgaaaaagtgattcatcagagagagaamaatgcactttatatattgtgtgaaagtttctctactttgcctatcactagtatttgacacagtttcactattcacttcttttttcttttggcctc

SEQ ID NO: 840542 - DNA, 595 bp, Homo sapiens
gattgttcaacttgaatagctctgttaacggggaactcacagagccacaggtccaagctgcttcctaaaggggcatccacctgagcctttgagccttaatccctagagaacaagttaytgatttcttatcaattgggtgatatttggtattaatttttttttaaaatcttgcagtcccaaccaaagtcatcatgccttccattattcttggtcacgtccaagatggaagccaatctagttatcttttgtacttttatcccttttgtacttgtgcttctctcctaatccaatgacttgtcactgggttccctcccagacttctccactgagcactttaaccttccaccttcagtgtacatgaatctatacctccagcctctttagtgatgtcccctctacttcctgctgtaactgaactctgtcttaaattagaagatgtttcagatgtcaacaatgtgactaggcagtcttatgaaacattaaccatctctttggttggttgcttgtgtacacacaaatatattcattcttggaatgccttgggccattaaatacgtctaaaggtttgatgctgggaaaacatgatgagggccaa

SEQ ID NO: 840543 - DNA, 560 bp, Homo sapiens
tgcataatgtgagcagaaatatggaaactataatatacatgtaaaaaatgctagcaatcaaagcactgtaatggaactgaagtgtgcctgtgatggaatcatctgtagatggaacatggttgaagaaagaattrctgatcttgaaggcatgtcaacagaagctactcaaactaaaatgcaaaaagaacaatgggaaaaacacaatagaacatttgagaattggtggacaaagttaaaatctgtcatatacacatagttggaatacaagaaaacaaagagacaatggagcagaagaaatatttgaaataatagttatcaagagtttacaaaattaatgacaaacaccaaaccatggatattagaataaatactaaaaaattcacatttaggcataccatattaaaattgagagaaccaaagacagagaatattctgaaagaagaaagagaggaaaaagcatgctagctatagaggaacacggatcagaattacactggacttttcatcagaaatcacgcaagcaagtacaagaagagagtagaatgaaacatgtaagatag

SEQ ID NO: 840544 - DNA, 467 bp, Homo sapiens
ctagaggatccccgtattttctccatcttacttttttcaatagtatctcaaccaaattccttctaaggcaactattatagctctaatggacttctttaatgggctacatatgacatgatatggatgtatcatgattcaatcagccattcagtcccccagtggcagtcctttacttcaagattactgtttgctcatttttttaaatttaaagcatttagagaccatttcaacaaagtactgacatctgagcttattctctcatctatggaataaaaataatatcacctattttaacaggctattcaaaggacaaaataagataaagtatataaaagtctctggcacaaaagggtaaatataaaatgacasactttttttcttttttcaaacactattaataaattatatataggactagccatatttggtggttttaaagatatttctataacttatttgttgtgctt

SEQ ID NO: 840545 - DNA, 635 bp, Homo sapiens
taacatgcaaggccatattaagcactgtgagtgactgcctgaaagcagtttataatgtagtgtctgtgtgcacacatrttgggggaaacaggttaaaaagacagcatacaaaatagtgaccgtctgaaataatgaggtgagcattgtgtgaaagcacaccatcggaacaaagaaagagagaagttatgaacactccccagcatgcctctttagcatttcagaattttcataaagcctaccaagccaccatttgtttccacaaccagtcctagcagcagaccctcctcgcttccagtctaccaagtctaggtattctgctgtttggctgttgcttgccttttcgttagaccaactctcctctacctctagttgtacatctcacactattaccaagtacaataaaagcatcacatgccaccacactactattttgggaagccctgcaatgactaccagtgtaccaattaaccagtccaaccctggatataaaatgttagttcctcaaacacgtgatgcagaatgggaagatgagaggaagtggggtgagtagccacactagttactcttcagaaatagccacactacctaagcagaacaggttggattaaggtctgcacatgagccaaagctgagaa

SEQ ID NO: 840546 - DNA, 544 bp, Homo sapiens
ttataaggggcttttcaccctttccctcagcacttctctcttgccagcatgtgaagaaggacatatttgcttccccttctgccatgatagcagttacctggggcctccccagccatgcagaactgtgagtcaattaaacctcttttctttataaattacccagttttgggtatttttttttttttcatagcagtatgggaatggactactacagatccttttaagcacaaggcaatttactgggttttcaccttgtccacatgaatctgctattttaacaatgtacaaagttatttagcttttttaaatttatgctttggctccacagttaaaggctgtaggctcctaggggttgagggactgggataatgtcatatatacatttttgtatccataacagcacctactctaaggccttctgcacagttggtttgaataaattttaattgatttaattgataataattagacaaactgaactaaatttttttaacagatacctgagtgccaagcwtaacagatacctgagtgccaagcataataa

SEQ ID NO: 840547 - DNA, 572 bp, Homo sapiens
ccacgagttactggataagagggttgagagaaagagagtcaaagacaactctgaaaacagtgtaactggctgagtaagtgatgattcaataaatagagaaaaagagagtaagaagaggaaggagagatttggtaagaaaatgactcaatcacttctgtaccaaaagcaaactagctgactggtgactaacaccctaatccaactagttcctggtttgtccgtttatggaggactgagtgacagagtaaaagttgatggaaagacgtaaagggcctctttcccaacaagggtaaaatctgctgctttcctgcttctcacgcaaccgagaatcctgagtagcaagcagccagactggctcaaatggaagcatttctcaatgcttgatacgacgttgatataagaagtaggagaatgtaagctgaagacagggagaaaaacatttggagctggcagagaaagaagcaggacactaatgtgaacaaatgtcactrtccactgggatgtgaccacacattaaatcacatttgtttactattttatgtccacaatgaagattcacatgagagaataga

SEQ ID NO: 840548 - DNA, 644 bp, Homo sapiens
aaataatcctaatgacctaatgcaaaattgatgaaaaacagaaacattccttgttcatatatgaacatctatacatcatacagatgtgaggtctcccccaaatcaattttaaaacttaacrtaatttcaatgaaaatgccaacaagtatttttttttttttttttttgagacggagtctcgctctgtcacccaggctggagtgcagtggcgcaatcttggctcactgcaagctccgcctcccgggttcacgccattctcctgcctcagcctcccgagtggctgggactacaggcacctgccaccacgcccggataatttttgtatttttagtagaggtggggtttcaccatgttagccaggatggtctctatctcctgacctcgtgatccacctgcctcagcctcccaaagtgctgagattacaggcgtgagccaccgcgcccagcacaagtattccttttaaatgaaactaaacaaaataatacagaaaatccagtataaatagctaagataacactgaaaacggagaactacagggaactactagtccaatccaatgttaaattacattataaagcttcagaaattaatgcaaaagtatttatggctagtattgttatataaatagacaaatcagtgtgatt

SEQ ID NO: 840549 - DNA, 609 bp, Homo sapiens
aaataaacatttccccaaagaagatgtacgagtggccaataagcacatgaaaacatagatgctcaatatcattagycatcaggacaatgcacatcaaaaccacaatgagatgccacttcccacccattggatggccacaaccaaaaagacaaacagtaacaaatgttggggatgataaagaggtcgagaaatcagaactctcatacactgctggtaggactataaatggtcagctactttagaaaagagtctgggagttccccaaatgattaaatatagttaccaaatgacccaggaattccagtcacaggtatgaacacacaaaaaatgaaaacatatgtgcacacaaaacacatatacaaatgtttatagaagcattattaataatagcaaaagggggaaaagcccaaatgaccatcaactgataaatgaataaacaaaatgtgagctatgtccatacaatggaatactatttggcaaaaaaagaggcaccgacgcatgctacaaaatagataaaatctgaaagcattatactaagtgaaagaggtcagacaaaagaggctgacttttggggtgataaaaattttgaaaactgtggtgatggctgca

SEQ ID NO: 840550 - DNA, 631 bp, Homo sapiens; identical to SEQ ID NO: 815728

SEQ ID NO: 840551 - DNA, 526 bp, Homo sapiens
gtatttcttctttatgctgtctagcaactgctctgaggaagaactataatacaagctttaaagagtctgttcagaatcattacaaataagttgtgttatttaaaattataattcataagggagaaagatgaaaaatgttaccagattaaagaagatttttcaaaaggatgtaaggaaagaggcagtgttaaacactgttaagaggacagtttatcagtattttttactaaactttaataaaacttttctatttgaatttctgctatgaatttttcttcagcatttgtcctcagtacaggtggttccttgaaacattgtttctaataaaactagaacatcctgatattttatccattctatagagatcattgatggtacacagacatacagtggattatgtttgttgagtgaatggaaagagagattgttaggtttacaacgatgcagctcttgagacyggagtttaagatcagcctgggcaacatagtgaaaccccatctttagctgggcatggagatggatgcct

SEQ ID NO: 840552 - DNA, 510 bp, Homo sapiens
agtgccattagaggactcatagtttggagtctggcctatggtgcggcagtatgtccctgtaaccagcttaactaggaataggcttctcaggttagagtaccctggtacattgagttgtcctgtctcttcttcactggtgcctagacacccttctgtagcgattacttcagcaagcacaatccaaaacctgggttcttcaagggttcccagggtcactctgattggcctggtggtctgggtggcagccctcagctccagtactctggcaggaagtcccaacaggcttccaccacatggactcagcccatggctggactgaggcctgcctactcccatctagggccacagggttcttagtttttgtttctctgtttttagataaatgaagacaatctaggttttacagcaaaaacatgattaatgtacaatccctttacaggatcattctccatatagayagacctgtcaacaaacctgtcccaacaaaactgggttgtaaagcagatcaca

SEQ ID NO: 840553 - DNA, 604 bp, Homo sapiens
cttcattcaagggagtataggtctgtaaactggctctgatctaagatttgactgacagccacatatataagtaaaaaaacttatgcctggtttacagatggttctgcacaatatggaaaaaccaccaaaagtgaacatctgcagcactgtcgagcttttctaagatatatctctgacaaactctgtggaagggaaatctactcagtgggcagaacgttagacaaggcacttggctgtgcacttttcttggagggagaaaaggccagctgtgaaattatatgcaattcctgggttgtgaccaatagttcagctggaggaccagggacttggaaggaatatgatggaagactggtgacaaagacatttgggaatgacatgtggggacagatctctctgagtgggaaaaaaataatgtgaagatatgtgtatcttatgtgaatgctcatcaaaggataaacaattgaggagaattttaataatcaagaggayaggatgacccattctgtggataccactcagctcctttccccagccacccctgtcattgtccactggcttcatttaaaaagtggccatggtggcagggatggaggttatgcatggg

SEQ ID NO: 840554 - DNA, 523 bp, Homo sapiens
agcattatgttcataatacagaggatcccttagggcatttcttggtagtgccatccctgtgattaagataaatggaaaactgcagcaagctaatccaggcagtaatactaacagctcagatgatacaggaatgaaagtttgggtcggtctactaggtaaggatctaataaaaagctgaggtgctcactgaaggcaaagggaatatagaatgggtgtagaagacgggagttataagcacctgctaggaccacatggtgagtacagagaccaaggctgtaactgtcatgagtatgtccttcttatattttctaaatatgttgtgttcatatatgtctatattaagcaaatatctttgtttttcccctctcttagtcccttattatgtataataacatgtgttgactttacttmatagtctttaagtattattgattttacatagtagtatttatgttatacaatgtcaggagaagagtaaacattactcatggacttcacctcttcctgggaagggattagtgca

SEQ ID NO: 840555 - DNA, 490 bp, Homo sapiens
aaacagtatgtagtgatcttaagaagctagacatacacctaccatatgatccaaccactcctctcttagaagtttacccaagagaatttcaagtggatgtccatacacaaacttgtacggaaatgtccattagcaatttcacttgtatagtcaaaaactggaaacagcccaaacattcatcaacagaaaaatggataaacaaattgcatttgtttatcttaagatactattcaacaatttaaaagaataaactattgatacatgcaacataagtgaatcccaaaattattatgctgagtggaaaaagtaagatttttaaaaagagtatatgctgtatgagtccatttatagtaagctgtaaaacatgcaaactggcctgccacagtggctcctgcctatratcccagcactttgggaggccgaggtgggaggatcacttgagctcaggagttccagaccaacctgagcaacatggcaaaaccatgtctcc

SEQ ID NO: 840556 - DNA, 595 bp, Homo sapiens
gcatatttagatattccacgatgctactattaccacttaatttcaaaaaccataagctgtctaataattaaataataccttgatgctattgtacactytgattttcatgttgtaatccttgaagcacagaggaaaagcatttgttttactcctcagtcgcctggagactgtcagggagaaatcctgtgtaggggagagacaatgaaacctcattgcaagtcaagtccctcatgagtcattattgattatcaaccagtagagcactgtatttgggatagaatttgaagaaagggtaagaggatttttccttgaatctattagaaactagttactgagggcctttggggcttcctggagccattcttaatttattctttccaagatatgtcgggtttgttaacattggtcaatcatctagagtagcaaaataggccactgacctgaaataaagtgcttaaaatatgtaaattacataaagaagaaatcactaaggtattttacggtctctccggaacagagttttgcgaaacactaccaaaatcaggcccttttcaagtacatagaagacatagttcttttggggaagagaatcatc

SEQ ID NO: 840557 - DNA, 639 bp, Homo sapiens
gacctatctattatgaggaccaggatcccaacagggaccyggaggatgcaactcagcttcagcatttgcagaggtaccgagaggcacttctgcaggggctaagagttggtagaaggaaaacaattaatataaggaagatttcagaagtgcttcaagaagctgatgagagcctaagtcagttttatgagagactctgtgaagcattctggctttacaccccatctaactctgaggctgctgaacatcagtgtatggtaaatacttcatttgtaaagcaagcccagggtgacatcaagcagaagctgcaggcatggataccacccagtctataaaagtggccaccaaggtgtgtgttaactgtgacctgggaacaaaacgggaaagaggaaaagcaaccaacacagcagctttgcacgccaaggattaagtccctctccccagccctgttgtatctggaagaagagggggccgaggatgggcgctacgagaaaagcaaaagagaaggaaaggagaaagtaagagtaagtgtgagaagggaaagaagaaagtaaaagagaaatcagaaaaaaacagaagagacagatgccagcacacgcgggcagaacccatgttgttgtccgtcccctccagctggtttca

SEQ ID NO: 840558 - DNA, 588 bp, Homo sapiens
gatgaggggtttgcttgaatgcaagattttcagtactaaaacagtcccagacaaaccaggatagttggttacactacattaaggacattagaaatattccaaaaacttttattcaaamggacaaagaactaagactatgcacgaaaaactttcgcaattaaaaaaagcacaatgggaacactgggtgtaaataagagaaaagattcagacatgaggcttggatagaagattccataagaatcagatctcagaagtataaaagtggctacaagtgagaagttttaaaaatgcttcatattaataacggaagatgtagttcttgatcagtgaaactagaaaatctactaccttctttcatcattcagaaagtttgtcttaaaagttttggtagaacttatcacatataaacatgagcaacataaaatgattatagaaacaatcccataaaaatcatttaaaaaaagaagagaataaactgaataatgtagtgatggataatgaaaaaagagtagaaaaaaaacatggtcatgacgtacatgaaaactagtgcctattagtctaaaattcattttaaattgtgagaatatc

SEQ ID NO: 840559 - DNA, 547 bp, Homo sapiens
acatgaaagtataaactggtatagcctttttgcagaataccctmaagttatttaccaatttttttttttttttttcggagacagagtcagctcttggctcttgtcgcccaggctggagtgcagtggctccatcccggctcactgcaacctcggcctcccaggctcaagcgattctcctgcctcaggctcctgagtagctgggattacaggcgcccaccaccaagcgcagcttatttttgtacttttagtagagatggggtttcgtcacgttggccgggctggtctcgaacttgacctcaggtgatcagccctcctcggcctcccaaagtgctgggattacaggcgtgagccactgagcccgggctatttaccaaattttcagcaaataaagaatatatctttacccagcaatggtacttttagtaaacttagacatagctgctcagttgcacaatagattagagaacagggatagtttggggcttcagtttgtgggctggagaaagaacaattcatacttcatactatttccatatttattaatgtc

SEQ ID NO: 840560 - DNA, 611 bp, Homo sapiens
gtggattttcttaacaaatagaatgtctttgttgggtatttaactgttccatccaattgtttccaaatgaaaagaagggcaaattatatattccttttgtctctcttttgtgatatattgtgggctttgtattttgtaaaagctgaacgtattcagtaacaactacgttcttccaacaaaatgtattttaaaagaattacaaaacctctaagtgaacatgccaggttatgcattgccggcacaaaaggaaatctgtcatgtggattctcatagtctttattactcaaagtatccagtagatggaagcctttcccttttaaaacttaaagctgcttcaaaagcatacatgcagtcggatttgctaatccctccgtgcaaaaaaacagtccctctcctaagagcgtatcagaaagaccacagtttgcgtgatttgtaagtggtttgaaaatcgcattattaaagtcaagttgtcttgacccccatgaggtgaatgagaatgggaagaataaattgattcttgaagctagtctcttggtggctgcgtgggtttgtttgtcttcctgcattagtgtccacsttcttgttgccctttttcagtgataaatttccca

SEQ ID NO: 840561 - DNA, 660 bp, Homo sapiens
ttctccctttgtaatctaagacctctataccagcagaagctagtgttacagacagaggaagcaactacacatcggtggggttatagggagaytggccactatcatttccagtccttgattctcagattcataagtcctgaatacgggagaaacagtacccatagtcactcattcagagtatatactgcatcctgaagaatatacaccccacccacaaggtgtggccaaccaactggctccataactgagtcttcaaaagactaatttgctcttcccacaggccagatacatcagggtaataaggaacatggtaagaccaatgaatgtcataaacctgaacccactgcaacattttctacaaagtgagttgctttgtcagaagtgatgccatgtgagacattgcgaaggagaataaagcatgttgtaaatgcaaggatggtgatattggaagaattgtgaaaaagcaattccacatacagaattagtgtctattccagtgaaaataaagtgcgctcttcacatgatgaatgtgatctaaaataattgacatggtggctggcagaagctcaatcactatttataatctagccttgaaagtagcatttatcaccagtgtattagttgaaacagtcaaaaagtctcccaagtttcaaagggagg

SEQ ID NO: 840562 - DNA, 585 bp, Homo sapiens
cttgtcagttgttttcctttacccctcctcctttctgctacaaagaaagagtgaatgggatgtaaatacagaaaaytggcgctcaaacaattgagttctttaaaattaattttactgtcttaccttagacaacagtgcctgtagcaagaattttcaggggtaccctaaaaatagactaattttacctgtcactcccttttctcctgctgttatttctcttccttgttaaaattgggactatcttagtgctcagtgtttaacattgttccatgaatctttctggctgtccatgtagctgcatattattttttagcctttagaagtgaaacattctctttcttcagtccttagcaagctaggtgtgaatctgatgttaataattcacagtaagcaataaagaagggtagatagtgtcaggagacatttccatttgaaacatttgctagcgcaagtatatttcagatagaagaataagtgaaaatggtgttattgagaaaagtcatttgctcatttcttctaggaagtgacacagaatcaaaacttgaatcacacaatctccttgcaaactaggatctcatcatttca

SEQ ID NO: 840563 - DNA, 603 bp, Homo sapiens
gaattgtgtatttctataattttctatttaatatttttggatgggggttgaccataggtaactaaaactgcaaaaagtgaaagcacggataatgggggactactgtacggcaatcaaagaaaccccaagtatcagtaggaactctatttcaagagaaaaaaaaaatcccctatcccatcctgcataaaaatagatgcaaatcaattcaactggtaaaaggacttgaaagcagattctggaaacagatgaatagtttacccaaagttggaagcagtcccaatctaaatgtaccttggcctatatctggagagcttttgtttaaaattcaactcagacagagtgaggtcagagggtaactcctgaccagctccccaaatattgctatctaacacccagtgccaaaaatagagttacttttgtgtcaatagactatgatctgaaaatctatgcttttatatgattttcctattgtttttcattgttggccttcacatgaaatatttattttggggaaaaaaattcaagacaccatagttcgttggatttagttttggcctctgtacctcacgaatgccaatrtagggccaaaggctgaagagcaac

SEQ ID NO: 840564 - DNA, 389 bp, Homo sapiens
tagaatgaagctgctaaacttttatcaattactacatcctaagcaatgtctttgttttcaagaattctatctttcatgacccaattacaaatggctaaagaatcctgcagtttcagaccccagtatatataatcattacgtttccttaagcatagtctgtatatataactggtttttctgtatctgtacttttatataacaaaaaagagtgcttgttcgtggagtttcctgtgacttgtagaaataaaaatggcaaaggagttaagttgccagatctagcaaataaaaatacaacatgcctagctgaatctgaatttctaataaaaatgaactatttgttagkataagtgtgtcccctgcaatgtttgggacataattatactaacaaa

SEQ ID NO: 840565 - DNA, 629 bp, Homo sapiens
accaagtcctgaggctgcatacagcaggggggctctgggcccagaccatgaaaccacttttccctcctaggcctctgggtctgtgatgggtgtggctgccatgaaggtctctgwcatgtcctggagagattttcccatgtcttggcaattaacactttgctcctttttacttatgcaaatttctgcagccagcttgaatatctccccagaaaatgggtttttcttttctactgcatcatcaggctgcaaatgttccatacttttatgctttgtcacctcttgaatgctttgctgcttagaaatttcttctgccagataagcctaaatcacctctctcaagtttaaagtgccacagttctctaaggcaggcataaaatatgaccagtctctctgcatagcaagagtgaactttactccagtttccaacaagttccgcatctccatcagagaccacctcagcctggactttattttatagtccatttcactatcagcattttggtcaaagccactcaacaagtctctaggaagttctgaactttcacatcttcctgtcttctgagccctccaaatctctaagaagttccaaactttcccatatttttctatcttcttctgagccctccaaa

SEQ ID NO: 840566 - DNA, 537 bp, Homo sapiens
tacaagagtgatattatactaagtattctatactttttctgtattaggtgaaatttctatatagtctgaagaaatcaggagcagaatactacccaccttcccaccctctggcccctggagaaatttctggataagacagtgttatgatgggaatctgtctgttgaggcagacaacagactggtgatcccctaatgctgccagcattctggaataaatgaggcattatcacctgtgccttaaaaagtatgacatcttacagtggttcttaaccaagggagtgtttttggatgtcacactgacttgacaggtaggagtgtagaaaaactgccagcatttagtgggtagaggtcaaggattttatatttgtgcctgcacgaggaagaactgccctgtgaaaaatgctrttgagaaatatttatgtgaacagcatataccaacaggactaaacattcaataggaggattccttagaatcttaaatgtagaagatagatgtgaccagtattgataatgtcacacaccatgctagtcagttta

SEQ ID NO: 840567 - DNA, 618 bp, Homo sapiens
gcaggaaaacaaaaatgcctgtcctcacctaggttcgtgggcacaggcctagggatggagccctaaccagggaccacgcccttcccccttcagtatcatttaaagggaccgtgcccttcccttgccagcacttctcttcccctcttccgtatcaaacagacataaaagtgagaaatggcccggtgtggcaaggacattatgacaagtggacccaaaaggcaacaccctgaccctgacttgctccagaaaacatccagccacagaaagcttcctgctccccgcccctaacagtaaataatccttcctctttcaaaatgtcccaaagggctcacttgctcccttgcagccaaaccatggactgcccaatgtaccctaagaccaattaagtctccttgcttctaaaactgacaccttaagagaagacttgtcaagtattcccttttgactctagaaaaaccattgtctctctagcacctctgaatcctgctgcaagaaaarccacggcaggtgggttccctggtggcaagttaatcaatcaatggcctttgttccttttgtctctgcaaccacagctgggagcagtcctgctaggtgttcccaggaaagaagccctgggcg

SEQ ID NO: 840568 - DNA, 641 bp, Homo sapiens
gcctgttatcccacctacttgggaggctgaggcacaagaatcgcttgaaccggggaggcagaggttgcagtgagccaaaatkgcaccattgcactccagcctgggcaaaaaagcgatactccatgtcaaaaaaaaaaaaatcattccagatagagtgtaagggaagatgggaaagcaatgagaaggtactgaaaatatctaggaagagcaaagaggcttggcccacagaagcagcagggaagacaggaagaggcagtcagattctggaagtattttggagggccactcaacggcatttcctgattaattcgctatgaggtgtgagaaaaagagaggcgtccagggggactttcagtgtttttggcctgagcagctacagaagtagagctgccactgaagtggagagagcaggtcgggagggagaccacaggttccgtcctggatgcgttgtgtgtgtagcagccatcccagcagagaggtcgggccgcaagctggatcaaggcgtctggagtccaggtgggaagtgaagtggagatgcaaatgtgtgagtcatgtgcgtgtaatttgtatccacagccatgagcttggaagacagggagcaggtgtaggcagagatgagaagaggtcccaggacagggacc

SEQ ID NO: 840569 - DNA, 518 bp, Homo sapiens
caagcaccccccacaacaaacatccttacatcatgggtcctttcaacacagtcgggtgaagcctgtgaactcctctgaataacgtttttacatgtataatacaaaacatacagaatcacaggggaaatcaattatgttgaaataaatggatcaaaatatttttaaaagtgagccagaataatatacacacttcctcatcgcctcatttaacaatgatttccagctctagatctgataaaaaaaactgccttaactttgcaggcaggactagcttcgccggtatttggagatgtccactgctactacggtgcgatgtgaaaataagtgatttcttttggtgacaaagtcacaagttctactactgtgggtgagggcctcctcccaaaaaactcccatgttaaagtcctcaccaccaatacctcagaatgtgaccttatttggagacaggctccacaytaagtttcagtgaggtcattgggggatccctaacccatatgatgggtatttctccagggaaa

SEQ ID NO: 840570 - DNA, 542 bp, Homo sapiens
cacgtgggctccccaggcttctgagcactcagacctcacttagggttgtcaccaatggagcttccagccttgagtctcaggctaaccccttggagtccaagtccttaaaggaagtgggggcaaaactgcccttcatattcactttgttctacttcatagagaggactccaagtgtagcagactcagaaaagaggctcagaagtgctttcaaagtgattgaaagttcgcaagagaaactggcttccccctggccaggagagcagaccctgccacctgatgagaatggaagaggtgtgttgagtgtctattgagcttcaggagtgctgactccctggaggaggtggagggactgaaggcttggaggggccaggtccacctcccagaaggctctgtgtctctgagaggcagggacgacaggktcagagttggccactcactatctttctccaaggatggtatctcacgggaagaaaatgagcatctggtgtccagattcgtatgaccctagcagagaggagagactgtgatgagatgccagtgac

SEQ ID NO: 840571 - DNA, 542 bp, Homo sapiens
cacgtgggctccccaggcttctgagcactcagacctcacttagggttgtcaccaatggagcttccagccttgagtctcaggctaaccccttggagtccaagtccttaaaggaagtgggggcaaaactgcccttcatattcactttgttctacttcatagagaggactccaagtgtagcagactcagaaaagaggctcagaagtgctttcaaagtgattgaaagttcgcaagagaaactggcttccccctggccaggagagcagaccctgccacctgatgagaatggaagaggtgtgttgagtgtctattgagcttcaggagtgctgactccctggaggaggtggagggactgaaggcttggaggggccaggtccacctcccagaaggctctgtgtctctgagaggcagggacgacaggttcagagttggccactcactrtctttctccaaggatggtatctcacgggaagaaaatgagcatctggtgtccagattcgtatgaccctagcagagaggagagactgtgatgagatgccagtgac

SEQ ID NO: 840572 - DNA, 600 bp, Homo sapiens
catcacacctggctaatttttgtattttgagtagaggtgggrtttcaccatgttggccaggctgatctcgaactcctgtcctcaagtgatctcccccaccctccccctacatacactggcattaatgggcttgataaaaacaaaaacaggtaaatacctccactttgccagaaccatcatccaccatattgtgctgggctgccatctgcggagaactgtgtaattttgaggcatcaaagggaatttgttttatttgagccactttctctgtgacataaactttcccgaagccatcactctgatctttatctctccagtccttaaaaaactgtttgaagattggtgtttcacctccttctggaagaacttgaatctgaaatttaaaataataataatagtaaacaggaaaataagaaattaagggaaaatatgaatctggcagtggagacaaaagtaaggaaatggaaaattatcctggtttagctatcaagctcatataatccaaaattgctttttctcacaactaaagtaattgccgctgaatttgaatatttgagagaagaatcaagttctttaatatgttacccctgcagtaaaata

SEQ ID NO: 840573 - DNA, 584 bp, Homo sapiens
cacatagtcacatgatgaatcaccgaaggtttgaaggaaaattaatgtcatttagcatggaggcctggtgacaggggctggcagtagggatcagggacccagctgtgaacagtgctcctcaaacacctggttccatatacctggaggccttggtgaagattaataggattcagtataggagaactggacaggaagccaaaggacatactgagatgtttttgggacaagacagaaacccaaaaacttggtgaagagtgtgagattgaggttcagtgaaagaaatacaactggtttgtttctagaaagagtgaatattatcataatagtggtaatagcaaaagagattttaggtacacctacggagctctgtggagattctttttatttcacgtttagaggcttaactgatccctgaggcttggatgacatttaaactaacaactaggagttaagtgcttagcacatagtagatgctcaataaatattttttgaatgaatgarttatatgatcttatttctggagaatggaagtcttctgctgttttccaaataattccaaaggtattaatttacaacagtgtttt

SEQ ID NO: 840574 - DNA, 311 bp, Homo sapiens
actgtgtgtccagcactgaagtaggttctctgcctccagcaactttttcatttcataataaatttttgggccaggaggtgacataatcacaaggaaattttttgaagaagatccaggcccaaatcagatgcttgagaatcactgcactgattggcatcaagatggttttacaaccatctgcttttgrtgacttctattttcccagcagccaaacccctattctaggcaggaaaatcattagctatagaggaggcagatctgggttctcatcctcattcagtcattgggaaaccagtggtcaccaagaattg

SEQ ID NO: 840575 - DNA, 658 bp, Homo sapiens
acctccacaattctggtgatagatgccaggtttctccggacttgaaagaggcgtgtagggggagcaggtgcctgacctcctttctttgatgttccattcttgtaaataatgagcggtttgtctttgaacaaactcagtaggtgaacaggctctttgccttgggagactcggatctgatgggggagagggggaataaaagaaatataattaagagtgctgtgaaagaaggttttagttccaaatgtgttcttatgttgtctttttgaaaataaaacaaaaaataaaaagtcaagagcaggaggaatgatgattaacagaacatataggttaatgataattaattttccctgttgacttgagaatcttttgttatcgcaggcackgtgtccatgagtagtttcttgtcaggggaaacatcaccatgctccaatactttctgtttttgaaaagtatgaagatgtaagtctgttcatctacatctccgaaagagaaaaggtgctggtgtctgcgcccttatgtgaaaatcactcttctttcaagggcaccagtaacacttacagatatttacagaggtactagaatctcacgtgttttggatctggttcagaaggttaagagatgtgcattcaaatgcttcacaacataagatgaccccaaa

SEQ ID NO: 840576 - DNA, 621 bp, Homo sapiens
gaattccatcctcagagtattgttattattttacctgtctggcagccccctgggraaagttttaatcacaggacaataccctatttacactgatttggggctcacttggtgggaaaagctctattctatagagcatttttcaaaaaatattagtgtcattttgttaatattgtggctatatgagaaagagataccaattaaggcaaagaagatccttaaaacttaaaaattaatatctgaaaaataagatatgcacaggggctctgaaaaataacagcatgttctttaggatgtagaaggctaaaaacaattacaggactatattcatgcccaagaatgacctgagaagtcccaacctctcatcttggctgacgttgttgcctgcacaagtagaaagtaaaggctaaagaacagttataaatggctggaacatggaagagctgccccaatacacccactgagcaactcagcaaggatacaagatgtattggttcaaggaatttaaacacatttctttccaattattaccttaacgttaaactaactgagatgggacctcagtgactgtacacaacagcaaatacaaattgtatagaatatctaagaatgcaagtaaacaat

SEQ ID NO: 840577 - DNA, 641 bp, Homo sapiens
gcatctttaccagaagtagtttccatttcaagcaactatgttctgtgttcattcataaaaacaaactccacatctgttgaagttttatcatgaaattatagatgttcagttccatcctcaagttccrcatctaattgttctcttgcaatttctattacatctgcaattactttccccactgaagtcttcaatcgctcaaaggcatccctgagagttggaattcacttcacttacacttccattaatgttgatattttgaccttctcctttgaatcataaacattcttaatgccatctaaaataatgaagtatttccagagggtattcaatttactctgcccaggtccatcggaggaattatatcaaaaattatttcttggataatgaatttgaaagcttaaattactccttgatccttgtgttgcagatttaatgttttattagcagggatgaaaacgtaccttgtgtatatccctatcagagcttttggatgagcacatgattatcaataagcagtaatcttttgaaaggaattttttctagtttctggggaacaggcctcagcagtgggtttaaaatgttcagtaaatcattttgtaagcatacaagttaccatctaggttttgctgttccattgagaa

SEQ ID NO: 840578 - DNA, 544 bp, Homo sapiens
aacagcaaagattttcaatttcatcagtgcgaagggaaacaattgaagaaagggtaatgtgatctgatgtgttttcagaggaagcttgacwgctttataggttaaaggtgcttgtaaagagaccatttaggaagctatttcattggatcatgatagtgtagtagatatcaagagaaatagactaatctaagatatattgtagggaaggaattcacaagaatttgcatttatttattcaaaacacacttgctgattacatgaagcataatgatatcctgtgtgggcagctagaatggatagaactataaactaaaatatctaatcagacttctataataacgccagataatttgacctggactggaattttcattgtcattcaaacagactaagctttttatttaaaaaaatatttaaaagatgatagaaaatttggctggacgcttgtaatcccactactttgggaggccaaggcagttggtggatctcttgaccccaggagttcaagaccaacctgggcaacatagcaaaacctcatctcaac

SEQ ID NO: 840579 - DNA, 530 bp, Homo sapiens
acagaaggaaaaggggagtggaaagaagagaaagtattccaggtaagaggagattttaggaaaataagagaaataattaagacgtgtgtaggtaatcagtattttctctatcagcactataaagtattatgagataactgtatttgtattcatataagctcctctctttccctgtacataatgtgtataccagaagagaactataaaaaattattctgtttaaaaaaaaaataagtaaaagccaaaagttgtgaaatattagaagggctattgaaaaatgggagaaatatattatttctaaaacaagaattatgtctcctctttgtggaataatttctataccctatatttaggaaagaaatggacttgatgtattactgaccatggctgggcatgagaattgtcctcaggatttatttaaaacagggatcctcaggtactactctgggagattctgtcttagtagaacaggaatttgtaayggaatttgtccctagaaacttttttttttttttttttttttttttgag

SEQ ID NO: 840580 - DNA, 473 bp, Homo sapiens
aagacttgttagtcttctgaaattttagctagggattcaatttaagatcatttggatccttttataaataacactataccattttctttgagtgataagccctcatcacatgtattcatcrtttaaaataccatttaaagagcatttatttcttccacattttctgaaacacaaaatttgaggaaaaatttgtatcatatatttgtattgccttgatgaaaacttatataaaataatttgtatacagttgagtaaagggaggaaaatgaccctcagtttcattcactgcaatttttaaaatagaattttccaagccgttaatccctaatgcaggcaggtgcatttgggtttttcattttctggaaatatttcatgttcaaaattgtaatgaaaagcaataaaaagcaaactggtttataggtttttggaaaaagagatgacttttctgtttcttctcttcaagttaacaaaat

SEQ ID NO: 840581 - DNA, 510 bp, Homo sapiens
gggatacgttacagcaacgtatgaagattgcatgagcttcccttttttttgttgtttttgtttttggagaaagagtctccatgtgtcacccaggctggagtgcagtggcatgatcatggctcactgcaacctctacctcccaggttcaagtgattcaccttcctcagcctcccaagtagctaggattacaagtgtgtgctgccacgcccagctaatttttgtatttttagtagaggtggggtttcgcatgttggccaggctggtcttgaactcctgacctcaagtgatccaccagcctcagcttcccaaaatgctgagattactggtgtgagccactgtgcccagccatccttttcctctttcttctttggttagatgtgatgaaatgatttgggatamaattacagggctttccatcaatgctttccgtagtaggactttttttatttttaaattttagtagttgtccttctgttagagctattttctggtctttatccatcagccttg

SEQ ID NO: 840582 - DNA, 527 bp, Homo sapiens
aatctgacctcataaaatccccacttgaaatcctggcatcttagaacaacttgtgggcccagatcatcatggccaaaatcagtctgatgattagtttccacacaaaacagaaagccaagtgacacctgattgtgttcctcacgttcttgtctgataccaagaaggccaatagggtgcactgaggaaaaagtggccttgagatatgcacgtgatgggacctcttcacaatgtatggagcacgttgactgtcccctcacttacaacagtgtacctgcgacagctgacaatctgtcatacactaactcatgctaaatctttcaaataattaacactacccagtccataagtatgtgaaactagtggtatcaaagcattttgtgttctgaaccacattaaataggaatccaccagccagtttgcaygtaaagtgacagtggcataatgaggtgtcggcttctgcttgggccagctatgataaaggcatgagcatcatatcaaaatgtagaaatattatgaagccattaaat

SEQ ID NO: 840583 - DNA, 496 bp, Homo sapiens
attataatattcatgagaacagtgatcatgttttgcccatctttacatctctgcagtgtaagagtttttttaacaactttattgatacacaatttatacataataatattcactcctttaaagtatataattctttagttttcattatatgcacagaactgtgcaaccattgaaacgatgtaattttaaataatgttcattattccccaaagaaaccatgtagctattagcagtcattccctattattattattattattattattattattttagactttgtcgcccaggctggagtgcagtggcacgatcatggctcactgctgtctcaacctctgctggtcttaagtggtcctcccacttcagcctcccgagtttctgggactacaggcacgtgccactatatctggctartttaaaaaaatttttttagagacaaggtttcactatttgcataggctggtcttgaactcgtgagctaccatgcctggcccca

SEQ ID NO: 840584 - DNA, 594 bp, Homo sapiens
tttgaaaagggaagagaggaaagcagaaagggaaggaaagcaagaagaaaaggaaggaaaaatgggaagagaaaaggaaaaaggaagaaaggtaggaaggaagaatgaaaagttgattttggtctttgggaaagttttgacagcaatctttcacaacgaacattttactatgtactctcaaatcacaaagttggtgtacaatggcaacaggcaatactacccagtggaaaatatctgatgcattctatctggaaacgatggagtctctcataggtttcaagagaagaaaaacaattgccataggtaaaacagaagtactcttttctaatcagcagctcataaaattgctgtaagaatgtctaagcaataatgaatagaaagtttctctcacacaggactgggaacttacaggacttaatatatgttagtcatgtttcattactcttatagaaaagttagacatgtagggtaaattggactgtcttttgwcaaattcccaaagcaaatatggaagggtttcagtgcatcattcaattccacagtggaccatgctcaaatagaaacgaggatgtagaaacaatgaataaatgcatc

SEQ ID NO: 840585 - DNA, 488 bp, Homo sapiens
gcatcaccgttacgcctacaccccctgggctctccggatagaccttggtgaggcttccaagtggtgggtctttctcttgataatcttaaaaacattattttataattggtaaatgtcggtatgggtccataagttactggaaagaaaaatgtgtgtaaggtaacacgtttggtacacacaaatgggatggcagtgggaaaaaatgggaattaaacaacaacaacaacaacaagggcgacatgcttgaccctctgggaatatttccagttcagccacccaagggtgaaccaggcttgcaaaatgctgaggcttcagagcccggggaaaggacccaagcttccaggtcctcctgcctgtctcccagatggagaggctctgatgatcagtcttgagaccctcattggagtggtgtccttctgtacacggtagccatggtgattattcacatcagcatctttctgcccstagggccaaacctgaggaccctt

SEQ ID NO: 840586 - DNA, 606 bp, Homo sapiens
ctgcccctagggccaaacctgaggacccttccctgctggaggatcccaagattaaggagattgctgcaaagcacaaaaaaaccacagcccaggtaccatatttttatttttcttgttatccaacmactcatgcttccagtctcatgtttcatttctcgtgttgtcctcaactgactccttaaaggggaagaacacaggagctgaagccctctaaagtatttcctttgaagtctgttggaacctctaggaaacacaagagctgtcactgaagcaaagatagcttctgtctcacagcttcctgtcaagccctacagcccagtggcaaagcatggctttggagtctagggatatgggtgcagatgccaactctacctctgatcagccttatgacccccaagctactttcttcattcctaaaaaaggaagatcacagggttgtctctaaggtgaagggagagaaagaggtgggggtctggcacaagtctaatagctgtgaagggctcagtaattattagcgattgtacctgaagccacagtgagctgcagagatgttttattcttcctttccataaaaggaggggtccttgtagctgagtggaaacatga

SEQ ID NO: 840587 - DNA, 623 bp, Homo sapiens
cacatgtatcccataacttaaagtaagataaataataataataataatgataaaagagaaaccttgcagacttycaggtgggaagagcctcacctgggaaccaggaaggctggtcttcccgcctgtcattcacatttcagtgcttgtaaaaagagcactgttgggagaaggcacctggattctgtattttctttcagttgtttgcagggaggaaatttattatttactttgtccctcctaagcagggtagaaaccaaggactcattttcctttatactgtcttttattggtagccacattttcacatgtaaataagtatgaagtaacttttcttcagccatattttaatctcttcaggacaaaccttgttgtacctcttttattccccaatgagtacaattctggcagaacttcatctcaataaatattgactcattgattaagggatgaagagcaagtgtcattctaaataacaacaacaacaacaagctatgaaccattttaaaggagaagtaatattacattttaccacattgaataaggtaacccattattaaggaaagtgacaatttagagagtttctgtgcctgcaatttggaggagataagagtttgggggtttct

SEQ ID NO: 840588 - DNA, 491 bp, Homo sapiens
gcagtgtatacagaggcccttgtcttggtgtagatatttagacatttcagggacttttgttttgtttcgttttcccactcattcakcaaacttgattgagcgtttcatccgggcagacgctgagctaaaggacacaagatgagcagcagcctcttgctctcccagactgcgtgtcatttggagaacatattagactactcccacgctgccacagagccctgcacagtgttggggaggccacttctcaggggactcactgaggagggaaaggaatgaagcgcaaatccaaatagcctcaggcatcccagttgagtgttcacggatccctctgattgagggattgccccctccctcagcccacgcgttctccgttgagggttcctgccatagtgagctgtgcctgttgagtgtgaccagccagataaaaaggctgggaatcattagcgtagatggaaaaatgaaagatgagctaatttaaatggaagaagtcc

SEQ ID NO: 840589 - DNA, 496 bp, Homo sapiens
tgctttctttgataacacattcttttaacaagtcagttggattccttggtaattagactctagtagaaagcattttttaggttgaaagccactcaacagcagagccagccagaaatcaaaaatcccctatcggattgtatatactaagagggttttctatctccacagaaacagtttcaagtgcctttcacaggaaatgccttttgtaacagaacttttatggtaagaaagtttctaaaagagttagaaaaacagttgctatttggaagttgtctcatttttacagacattgtaagaaagaagaactgcttaggctcaatgctaagctctcttgctttaaatccacctgatgatatctattctaaaccgactgtcacttgacacagaaccacatttgatgagtgggatcaaaacattactatattataccacrgcaatatatcgtcagacctgcttgggccaaagtttaattagattgtccctaataatggatttt

SEQ ID NO: 840590 - DNA, 668 bp, Homo sapiens
taatatgtcaccctaagacgtttgtgtggtgctaacctgtcactctaaagatgtcgtgtgttgtgaatgtgtcaccctaaagacattgtgtggcattaacatgtcactctaaggatgtcatgtgctaatgtgtcaccctaaagatgtgaggtgttaacatgtcaccctaagatgttctgtggcactgtcattctaaggatgtcatgtggtgacatgtcaccctgagatgttgtgtgatgttaacatgtcactctgaaggcattgtgtggcattaacatgtcaccctaaagtcattttgtggcattaacatgtcaccccaaagacattgtgtggcattaacatgtcaccctaagatggcgtgtgggctggcatgccaccctaagacgctcacttagcccagctttgccatctgactcttctcaccaggttttttcatgggaagctgtacagtaacttgagactctttgaatgtttttatttaagtccttttaaaaaaaacagtgcctcaaaattagcaaatattttccaactatgtttttagtcttagtccctrtagtaaaactttaacacacaaactcagtaataaattctagtaggtaacatttaatgagtgctttcagttcgtaaaaggcagtattgccacaaattgttggatgaaggggtgaggc

SEQ ID NO: 840591 - DNA, 588 bp, Homo sapiens
ggccaattgtgtatcttcctttgttgactgtctcttcatatcttcttcttmttattattattttttgagacagggtcttgcactgtcacccaggctggagtgcagtggtggatcttggctcactgtagcctcgaccttcagggctcaggtgatcctcccacttcaaccttccaagtagctggggactacaggcacgtgccaccacacctggctaaatctttttatttttgtaggggtcttgttttttgcccaggctggtttcgaactcgtggactcaagcaatcttcctgtcttggtctcccaaagtgctggaattataggtgtgagccactgtgcccagcctgtctcttcgtgtgttttacctacattgttttattttattttatttttgtctttttgctatttttgaaagaattctttatgtgttctggttaaagtccctctgtcagatatatatcgtacaaataatttctccctgtctgtagtttgcctaatcatattctttatggtatcttttgactaatagagttttaaattttgataaaatctatttttcaatgttttctttttatgataattactgtctgt

SEQ ID NO: 840592 - DNA, 449 bp, Homo sapiens
tcgctgttagaagtagctgtttgcttagagcatgagtgtatgtggtggcaggagtgggcatggtaggctgctggtgctgagaagcagcagtgcaggctgcattgtgggcatggctctagcagcctcagcctcgcaggcgcagggacggcatgaaggaaccctgttcagtttccctgtggaccatcactcacccaggctccaccagcaggggcagctccagctcactttagggctggcctcactgtgtgatttcagaacacagcctctcaaacaatatcttctcacccattagctttgaccaaatatttccttaggatgggaaaacatgttttcctttacagttcattttcagaggcttaagatgcaagtgacaggatgaagtgtgtgtgccggcacaataccrtagaaagagtaatggttaatcatagccaggaaatagctagcacttc

SEQ ID NO: 840593 - DNA, 526 bp, Homo sapiens
aaaagcacaccagcagtttcagtcacctgtttgattcccctccaagggctttctaaaaatttccaccaaaataccccgacagccacctaagaccgtgaccgcagattctgggaatgggaggcaggtgaatggagatgtggtcttaaatgacactcagtgggatgcaaaatttgtctgacatcccaagctttaccttagaagttcacgcccttgcattctatttcgtttacacatgttgtattctactccattatatatttgcattaaatttcacacataatgttttcaattatcaattaaaaggttgcctttaacccccaacccctaaacatgtcaagtaaaatgggggctccaggaagatctgccaggtttatgctgcctgtgtcttcccctcctcccagcagaccccaatgactaatttgagaagagcagtggctgaccgcctggtcctcagaggctccgccctctgcccctccggactcggggatacccsggggatccctggcttaccttcctgttttctcac

SEQ ID NO: 840594 - DNA, 593 bp, Homo sapiens
ctattgaatctttcccggaacctattcttttcatggtctctctctgtcttcccaaccagaaacctctgatttatttgactccctttacctctatatcgactcttctgtgagatgcttttcatgcccaccgcctgttcctctgccctatttctacaggagttggactctgtcttgcctttactacaaacacaacctcctcccctttagaccagaggaccgtgtcgtcatactgttcctagaccaaaatgagggtcaggctgctatttcttgtggcccaataataagatgcagatgaactggggaggaagagaatttttatttctgcaaccagttactggtagaaggcctggaaattatggccagaccaactcaaaattacaaagttttccagagcttatataccttctaagctatatgtctacctgtaagtgtgcatcatctaaagacataagtgattaacttcttttacattataactaatgtctgagtcctcaaggccttcttctggagcctcagtaaattcacttaatctaaatgggtccaggtgctgggrtgattacccttatcttgtctcctactaaatcacaagaggt

SEQ ID NO: 840595 - DNA, 591 bp, Homo sapiens
ttcctttaattgaaccttatagcaaaggcaagactatggaacaagatagaaagcagatcmgtattgcttggggcgccggggtaggagttggaattgactgcagaacaacatgagggaactctctgcagtgaaggaaaggttctgaagctggattggggtgttggaggcactgctgtatacatttcctaaaactcatcaatctatatcttgaaaatgggtgattttatagtgtataaactaaacctaagtaaattgagctagaacttgatcacctgatccttcaagtatcatgaattgtgatttatattgataattatgttttaaaagatagcatagttttcagaacgcttttgttcagcaggcattaataagaactcctgggtgcaaaagtggggtgggtctggcagcgaaaccaatcttttgcactcattgaggactctttttttttttttttttttttttttgagacggaatcttgctctgtcacaccaggatggagtgcagtggcgccatctcagctcactgtaacctccgcctcccaggttcaagcgattctcctgcctcagcctcccaagtagctgagactacagg

SEQ ID NO: 840596 - DNA, 595 bp, Homo sapiens
ttttattaatggcttttgttgatgggctttaggtggtttcccagtaacggcagtaaatattcttgtgcattggtatatttttgtgagtatatctatagggcatattcttagaagtagaattgctgsggaaaagatacgtatatttttaattttgaaagatattgtcaaattgccttcaaaagaggtcaccctatttacccacacacgcatacacacaccccataatgtataagcatccatatgtaatggttttttgtttgttattttgtttttgttttgttttgttttacagagacaggatcatgctctgctgcctaggccagagtgtagtggcacaatcatagctcactgtaacctcaaactcccaggctcaagtgatcctcctgccccagcctcctgagtagctaggacctcaggcaaacactaccatgcccagctaattttttaaaattattttttgtagaaatgaggtttttctatgttgctcaggctagtcttgagcttctggcctcaagcaatccctaccacctcagcctcctaaagttctaggattacaggcatgagctactgggcccacccaatccatatggaaggt

SEQ ID NO: 840597 - DNA, 550 bp, Homo sapiens
taagtatgtctttttaagaaaatacacagcgggggctcaggyctgtaatcctatcattttgggaggccaaaatgcctccccagtggatttggggacattccaaatccacttctctagttatgttgaaatatacattttagttaactatagttagcctgctgtgctgcctaacactagatcttactccttctatctgactgtatttttgtacccattagacaactcctctatcccctcctcccctgattttcatgttaactgacttatggcatcaggtaagatttaggacttagaatattcacattttctgagtttactgaactattccctaatgttcaagtaataatataagataatatttttattttactaatttattcagtaatttatggtctgcataccaattatatgcaacataaaacacaatcactttaagattatacaaataatagaaataattgatgatggttgatcaattagcggaaggatgagtcatatgtcacagttcttccaagctgcattagtggattgggcttgttggcttctgtca

SEQ ID NO: 840598 - DNA, 590 bp, Homo sapiens
aaggttaaattcctactaatacatgtggttgtactggtattttgttaatttcattcacaattaatagatcttaaaaatgaaaaactatagatatttaaggataacttatcctaagttaatatgaataagtttaataggtgtatgttcattagaacttctatctacacaatctctttgttgaaagtggcctaatgtggatggtcatatgtatcccagcttcattttctaacctgacgtgattatgccagtagttcaaaaagttattgcaaaggatagcttttggaattacatcttttcaccctgcagaatcaaaagcctacctcggaagagatcactatgattgctgatcagctcaatatggaaaaagaggtgattcgtgtttggttctgtaaccgccgccagaaagaaaaaagaatcaacccaccaagcagtggtgggaccagcagctcacctattaaagcaattttccccagcccaacttcactggtaagaataaaaaatagggagtgcaagctcaagggctaatttttgcaattttacaaatgacctgttaaatcagtttatttcawaatagtaatttaatgaataaa

SEQ ID NO: 840599 - DNA, 596 bp, Homo sapiens
attctcatctcattattacaagatattttgactataagatagaggaaaatacacaaaaacattggaaaaaaggaggaggtttcagttattattatttcctggggaaaatgaatgaagagttgcyactttttaaagtacattatttaatcccattaaaatggctgtaatttttttaaagaagaaataagtgttggcagggatgcagagaaattggaatccttgtacattgattgtggaaatataaaatggttcagctgctatggaaaaaagtttggcggtaattctatgtttaactatttgaaggaccatcaaaaagtggacccagcaacttcactgctagacatacagtcacgtaccatataaagacatttccatcagcaacaatagaaccatgattataataccctatttttactgtaccttttctatgtttagatacacaaataccactgtgttacaattgcatacagtattcagtatactaactgtacagatttgtagcctaggagaaacaggctatatcatatagtttaggtatgtcataggctataccatcttcgtttgtgaaacatactctatgatgttcatacaatggt

SEQ ID NO: 840600 - DNA, 570 bp, Homo sapiens
ggaacagtttcaggggcgcttagcattcctcttaagccctttgtgctgagtgtcacacgatatagcagagcagttatgacctcctggccttgaatttaaagaaggtcttaaaaatgtctcagggtaagctcccctaatcaactcttaactgcatcggagacacccagatcagaatttgcattattaaaaacttctcaagacagaggagacagattcctgacgttgacacccatgtggcattttcatgttcctagtcgtcatgtgtgtagacgattagtctacagaaagtaaatcaggtgggattcatgccaggtgagaaattcagtgtggaccctgatagtcacttcattcagtttcattggctttagaggtaatgggtggaggtgggggtggagtgtggcagtagggtcatccatgaacaatgtgagctttactcaaaaacattactgaactggatccatctacatagcttcaagctcttgcttcaatgctcactaaagrcctttctcaccaccatgagatgagtcagaagtagctaaatctttcttaaactgtcacctccaggtgcat

SEQ ID NO: 840601 - DNA, 420 bp, Homo sapiens
aatgtgttaagtgaatgaatacatttccaaagttaaaatgcccaaacaaaccaatccctttgagagtggttgagtctcttctgtgttcctctgagtggatcagggcttgtagcatcatcctaagcaamattccctaagttttcctgcaaggagccacagtggaggaagactccagattacatgactaatctgggagggatattaagatgttacctgtgggtcaccaggacacattctcatcaccactccccagccaaacacttacatactaatgctcatctgtggggactgaagccatctggcaaatatttatcaaggctctctgtgcctggcattgtgcggctgctctctcaggaaactggtggtaggtgagaaagtgtgactctccacatagctcaccatctggtggaggactgcgag

SEQ ID NO: 840602 - DNA, 601 bp, Homo sapiens
acagccactatgaaaaatagtgtggagattccttaaataactaaaagtagaactaccatttgatccagcaatcccactactggatrtctaccccaaggaaaagaagtcattatatgaaaaagattctcacacatgcatgtttaaagcagcacaattcacaattgcaaagatatggaaccagcccaaatgcccatcaacgagtggacaaagaaactgtgctaaatacatgtatgtttattgcagcactattcacaatagcaaagacttggaaccaacccaaatgtccaacaatgatagactgggttaagaaaatatggcacatacacaccatggaatactatgcagccataaaaaatgatgagttcatgtcctttgtagggacatggatgaagctggaaaccatcattcgcagcaaactatcgcaaggacaaaaaaccaaacaccgcatgttctcactcataggtgggaattgaacaatgagaacacatggacacaggaaggggaacatcacacaccagggcctgttgtggtgtggggggagtggggagggatagcattaggagatatacctaatgttaaatgacaagttaatgggtgcagc

SEQ ID NO: 840603 - DNA, 569 bp, Homo sapiens
acctttcagtgcctcacactaaaatatgaagagatggcctgggtgctcagatacaattttttaagccctcagtctgaggtaacaaaacctacaaacagaggattcagaagaaaaagaagcaaagcagataattgaagaaaatgtctaaaactagaataaatatcctcagagagatggaacaatattgcactcatgaaagtaaaacaggatgctatgaaaataaatgtcttaggaaataaaaataaaagctaatataaaaacaaatcaataaaatagttttatgatgaagtaggagaaatgacctaaaaaaagaaaaaaaaaatcagagatagaaaaaagagatttaaaaaaaaaaataaaagaatccatctgagaagtctcatatcttactaacaaaagtttgagaaagataactggtaaaatggatagaagttatccaaaaagcactagaawaaattttatcagataaaaagacatcaaactccagactgaaatatctgtgcagtacccaggcaatgagtattagaaaaagaagaaacatgaaatttcagaatttcagggataaaaga

SEQ ID NO: 840604 - DNA, 494 bp, Homo sapiens
tgtacctgctccttttctgtgacctctctggggatgctttttgggggaacagctggactaccctggaacaacctctggttggtcttggggaggggwagaaaggcagagaagcagtatgttctgcatgcttcccaacgacagctccgagcctggctgtctgtcccacattcctctgctctagagccctctgtcctcccctgcacccttgtgcaaccttccccaattgcctgagttgctgggtcctggaggttatgggtttccaagagcttctgatctttcctttaggaattcccaatcgctgggaggacagattgtgctgggaggcagcgacccccagcattacgaagggaatttccactatatcaacctcatcaagactggtgtctggcagattcaaatgaaggggtcagaaatcctcaaccctccccgggctccaaaaaatgctgccgtcactggggttggggagggtggggaaggactgcattaccatcctg

SEQ ID NO: 840605 - DNA, 577 bp, Homo sapiens
ccaggctggagtgcaatggcgctatgtcggctcactgcaacctcagcctcccaggttcaagcgattctcctgcctcagcctcccaagtagctggaattacaggcatgtgccaccacgcccrgctaattttgtatttttagtagagacagggtttctccatgttggtcaggctggtcttgaactcctgacctcgggtgatctgcccccctcggcctcccaaagtgttgggattataggcgtgagccactgctcccggccaaaccttgcttttgatatttgtaagaatctatcctgtagtactaacagtagctgggctcttacaacgtgcccagctttctatgccttatctcctaaaatccccaaagcagccccatcaagtaggtactgttattatcatacctgtttaaaatgataaactgagacttggagaggttaaataacttgcccatgattccagacctagtttgttctgctagtgaagcaaaatttaaatgaaggcaatctaactctataagccttgcatttaaccacgatatcaagctgcttccctggtacagttaactgtacccatgccccg

SEQ ID NO: 840606 - DNA, 653 bp, Homo sapiens
aaaggcccggggactggaactgggagtggttgggaaccagacctgctatgggcatgggggctgcagacagagggagayaggtgagcaggcgaggctcgggagagcgtggggcgttgaggcaggccaacctgggcccgagtcccggctccccttttcctcctcaatgactgaccttgaacaagttcttagtccttgtttgtaaaaagagcgacacatagattcccattctcccaggagataaagctgtcaggagatgtgggtaccagggtgtctgtgggagggtctttagccctctgtgttcaaggaggggacccaggtgtctctgaagttacttcaagaatggtcagtcctgtgctaggtggagttgctggcctaggttctgaacaataaagacctcggagcctggggcagggtcatgcccatcctgttggggtgcagctctccagagacccacaagacacagtgagcagggagcctgtgacccaggaaggtgaacagatgctgggcgagacagtgtggcttagcctctgcaaggccatttgaagctaagaaacttccagttcttggacctctcccagaggctaaagaccaggggtctagaaaggagggggtgctccagggtgggggtcttctgacagttcaaaggatccaca

SEQ ID NO: 840607 - DNA, 608 bp, Homo sapiens
cctactttaaggatcaacatatagcaaggttttggaattgagtcataatgattyataattgaatgcatgctctgtcaaatatcttttactgctctgggaattttaaaaacagatattatttcaggtgatgcctcacataaaatcacacgcataatttcagatgaaaatattttttaaataattgtatgtaatggaatctcattgaaaaactcagaagttttaataactacatatatttaaaaaaacagtttaatttaagctattatctctaattaaaaagaataggtaatagttacttaaaaataaaacaaaacaaaaagattactgaaaaaaaacaacaacaacactagactaggtggttaacctcacaaatttcccaactgtaagaaaatcaaccaaaaagccttaatggttttgtaacatttttccaaattcacatggccatgattcctctcactgtatatcagaaataaattattttattggaggttattgaatgagtactctacttttctttccatattttaaggcctgttttgctctggctttacttgggggcagctgtaaactacattacagatttcgaaaaccagtggattaaatcacca

SEQ ID NO: 840608 - DNA, 643 bp, Homo sapiens
ttctgtgaacagtgtataggagttccagttgttccatatcctcacctaatcttggtattgtcagtctttttagccagaaacccattarccattctaataggtttgtaatgatatctcattgttatattaatttatacttctctgatctctaatgcaatgaattttcttttcttgtgattatttgccttccgtatatctttggtgatgtgtctgtccaaatatgttgcccatttttatttgggttgttttgggggtttaagaattatatgttctagatccttttcattttcatataaattttaggatcattttgttaattttcatataaaaatacctgctggaattttgattcagattgtgttgaatttataggtgctgttaggcagaattgacatcttaacaacttttagtctacgtagaaaattagagggtatctacaaaaaagagacaataaataataagtaagtttattaaggttttagatgcaaggtatcttttacaattacctgtttatgtaataggtaatcaattacatatttatgttcaagcaaacaaccatcagaagttaaaatagtaaaagtaccatttataatggtattaaaatatgaaatacttaggaattaaattttaaaaagatatgtaa

SEQ ID NO: 840609 - DNA, 590 bp, Homo sapiens
ctaacattatagcaaatccctcaaatttctttagtaaataaatcagcaaaaaaattagagaatattttgagattgaaaatacataaaaccatataatttttgaaggaaaacataggataatgtttgtgatttgtgagaaggcaaaatttgggacctgaaacataaagcaataaccataataaaaaatgaataagttacacttcatcaaaattaaaaactgcttaacaaaacaccactaatgaattgaacagcaagccacagattttaagacaatgtacattgcaaagcatgtatataacaaaggcctggtatgcagcatatataaagaaatcctacaactcaataataaaaaaacagctccataaaaatggtgaaaggaattgaatagacatatcaacaagtacatgaaacaagtacataaaaatatgtttaacatcgttagtcattagagaaatgcaaattagaactacatagagccaccactacacaccccttacaatgactaarattagaaaagctaatttttggtaaggatgtgcagcaactggaaatctcatacattactgctgggagtgtaaaatgggacaata

SEQ ID NO: 840610 - DNA, 463 bp, Homo sapiens
gtctcaagatctgggtgtaaggtgtactcattgctactgggtgtcactgcctctagtctgtctcagaggacaaatctagggaatatgtctacctatattaacccccatatacccacatatctatatgtctgtatctatctgtgtgtgtgtgtctattaaacatgattgtaggctacgttctactctaatccagcattacatggttcattctagtctcatgcagttttgaaggctgtgatggtggtagttaatgttgtaggttgctgggaggctacagtaaacggcaattatccctgatgacttcagagtctttcatctccacgtacccttgacctggcaggcattttsctgcttgacactggactcatcaagatgagctgatgtgctgccagaatgacccttctgcgcccaagctcatcctggatccgccctgaggctgcaagtgatgtcaactaagcagaaa

SEQ ID NO: 840611 - DNA, 606 bp, Homo sapiens
agtcctcttagggatgtggcagttttttaaatactgagatcttagacacatcttcaatctgtggggctatgctccctcctctagaatctttgagratggtaactgcttccaccaataacatatgataggagtgatactgtttgaattctaaggctaggtcataaaataccttgcagcttcttgctggttctcaagtgaaagtgttctctaaggaaagccagctgccatgtaagaaatctgagatcactatattggaaaagtggcaaagagaaagataaagatataagtacaaaggcaattaaaacacaaacagttggccgggcgcagtggctcacgcctgttccagcactttgggaggccaacgcaggcggcttacgaggtcaggagatcaagaccatcctggctaacacggtgaaaccccgtctctactaaaaataccaaaaaattagccaggcgtggtggctgcgcctgtggtcccagctacttgggaggctaagccaggagaacagcgtgaacctgcgaggtggagcttgcagtgagccggagcttgcagtgagcccagattgcaccactgcactccagcctgagcgacagagagagactccg

SEQ ID NO: 840612 - DNA, 652 bp, Homo sapiens
ctataagaaaaggtaggaattttacagatgaaaaaatgggtttgtgcccaaggtcataaagccagataatggaagcactggagatatctctgagcctactgaacgtcctctagttatcacacacatrtccacatgtccaccacctatacagtacccggaagaaagacgcccagaaactccactaactgagaggctactctgtgccaagggcagaatcagaggcgaaaggtacagtgagctggcactaccctacaggattcccccaaccaactaattcagaaagagggattcagatatggtttgggtctgtgtccccacccaaatctcatgttgaattgcaatccccaatgttggaagaggggcctggtgggaggtgactggatcatggaggcagatttcccccttgctgttctcataatagtgagtaagttctcatgagatctcgttgtttataaaaatatgtagcacttccccctttctcttcctcctgctctagccatgtaaggcaatccagcttcccctttgccttctgccaccattataagtttcctgaggcctccccagccaagcttcctgtacagcctgtggcaccatgagccaattaaacctcttttctttataaattacccagtctcagatagttttttatagc

SEQ ID NO: 840613 - DNA, 613 bp, Homo sapiens
gctggctgttgggggaaaggaatgaagctctacttcctggagtgcagactatttatatatattattcatacttctgtggaaaatatttrcccctactccccatttatttaattagtaatttaataatatcaatatggactcattgatatttattttaatttttagattataatctggtactatcattattttgctgctgaaagtaatggccagctttggccattgggagttttcttttcttgagacagggtcttgctctgtcatccaggttggtgtgcggtggtgcgttcacagctcactgcatccttgacctcctgggctcaagcaatccttccgcctcagcctccttaatagctgggactataggtacatgccaccttgcctggctaatttaaaataaattttaaaagacaacaacttttttttttgtagagaagtggtgggtatcgctacattgcccaggttggtcttgaactcctgggctcacgccaacctcctgccttggcttcccaaagtgctgagattataggcatgagccactgcgcctagcctgggagtgcctgaaggttggctcttatgtccttttgacatactaccatcttttttcttttaa

SEQ ID NO: 840614 - DNA, 613 bp, Homo sapiens
gctggctgttgggggaaaggaatgaagctctacttcctggagtgcagactatttatatatattattcatacttctgtggaaaatatttgcccctactccccatttatttaattagtaatttaatwatatcaatatggactcattgatatttattttaatttttagattataatctggtactatcattattttgctgctgaaagtaatggccagctttggccattgggagttttcttttcttgagacagggtcttgctctgtcatccaggttggtgtgcggtggtgcgttcacagctcactgcatccttgacctcctgggctcaagcaatccttccgcctcagcctccttaatagctgggactataggtacatgccaccttgcctggctaatttaaaataaattttaaaagacaacaacttttttttttgtagagaagtggtgggtatcgctacattgcccaggttggtcttgaactcctgggctcacgccaacctcctgccttggcttcccaaagtgctgagattataggcatgagccactgcgcctagcctgggagtgcctgaaggttggctcttatgtccttttgacatactaccatcttttttcttttaa

SEQ ID NO: 840615 - DNA, 626 bp, Homo sapiens
tgcctgtggaatggggtggagaggcacgaagacattcaagcagtgatgcttttttttttaatttgataccatttactatggcatgtaacttagactcacccttctcattcaacaatgtttttctattttacagtatttaatgattcctttaaaggtatttctgacatcatagaacaatctatagagctctcttttgaaatctggaaaatattttagtagcaaactgatttataactttggttaatgtatattagtcatcactccaggcactagtcaacaaccacagtatgtaatttttcctgccagttgtgacagctggtctccccaacatccctcctgtatcagtaaaaagaaacatagatgattccatttatttcagttagaaaacaacagttagatgattttatttgttagaaacataaaatgggacttgtatactataataataaaaataaaaaatatgatgaggataactataatagtatagcagctaacgttaactgagcatttactakgtacctggcattatgctgtgtgttttatgcctatgatcaattcatcttcacaacaactgtacatggtagttataaatatttatctcattgtgcaaaactgaagcagaaatt

SEQ ID NO: 840616 - DNA, 556 bp, Homo sapiens
tcagcttaagaagcttttggtctgagactatggggttttcttgatataagacctgtcatctatgaacagggatagtttgacttcctctcttcctatttggatgccctttatttctttctgttgcctgattgccctggccaggaattccaatactatgttgaataggagtggtgagagagggcaacctcatcttgtgccagttttcaagtggaaagcttccagcttttgcccattcagtattatgttgtttgtgggtttgtcatagatggcacttactattttgaggtatgttttgtcaatacctagtttattgacagttttttttaatattaatggatgttgaattttattgaaagccttttctgtatctcttgagacaaccatgtgtttttgtctttagttctgtttatgtgatgaatcaaatttattgatttgtttatgttgagccatccttacttcccaaggataaagyctactagatcatgctggataagcttttcaatgtgctgctggattctgtttaccagtaattttttaaggatttttgcactgatgt

SEQ ID NO: 840617 - DNA, 601 bp, Homo sapiens
ggtggcgcccaccaagaagagcaaaaatggtgagtggatcctgtgccttcaactgaggtatccaggttctctcattgggactgactaggcggttggcatgatccactgagagtaagaaaaagcaagatggaacgagggcccacccaggagttgcatggagtaaggggagcccccactcccagccaagggagggagtgagtgattgtggtaccctgcctgagaaaccacgctctttccacggatctgtgcaacccatggatcaagagatcccttgtgagcccacaccaccagggccttgggacccaagcacagagctgtgcaagctcttggtggctgcccaggttgcagccagtggcagcaggacagagactgcctaagaagacaaccatcactgtggctccagtctgctgttctcccctgctggtgccaggaagactgggcagtttggaccagcaggaattctccgcagcatggaacagcagctgtggcagattgtggccagaccctctggtcccaaatgattccatccctctgatgtactacattatcatgtgtgaaatgtccagaaaagtattawttcattatagcacacactcaaagt

SEQ ID NO: 840618 - DNA, 567 bp, Homo sapiens
ccatattcttcccccagcctgggttcggggaccctgcatggggtcgcctctcttcttgcatctatcacaccacgttacctgcatctgtttctgtgtctgtcccccacctgagagtgggctcctaaggacaggagccatcgagctggtcttcataggtgggctccgcatgcagacctgtcaggtgccccccaccactgcccccgccccagagaaacagagccagcaggagcccagggaagatgcagcagcaacgagctctgggagatgtggttctgggacagaagcctctggcttgctgtgtgaccctaggcaaaccatatcatctctccaatcctctattgcttcatctaccatgcaaggaaagggacaaaactctctgccccctgtccccatcttcaggtggggtggcagtggggagctggagacgcatggggtcmcaggattaccaacattcccaaacagggtgtgtcccggagacacagagcagggtggctttgccagctgaggatgaaaaccaggcggaaatgagctaaagtaattccaggtgtcggttttctgtgcaacagg

SEQ ID NO: 840619 - DNA, 613 bp, Homo sapiens
acacctggctaatttttgtatttttagtagagatgggattycaccatgccatgttgaccaggctggtctcaaactcctgacctcaagtaatccacccgtctcagcctcccaaaatgctggaattacaggcttgagccactgtggctggctgagtttgtaaaaatattatgaactcaatattttgtttgcttcgagccattttagtctttttttttttttttttttttgaggcagggtctcactttgctgcccaggctggagtgcagtggcgcacttctagctccctgataccttgacctcccgggctcaaacaatcctcccacctcagccttctgagtagctgggactacaggcaagtgccaccacacccagctaattttgtttactttttgtagagatgaggtctccctatgttccccaggctggtctggagttcctggactcaagtaatcctcctgtctcagcctcccaaagttctgggattacaggcatgagtcactgctcattgtagtcattttttaatggtaaaattgtcccatcattggccagtatgaggcattttgagttggctccttctaacttccttgcttttgtgtgtaacaagaaacctcat

SEQ ID NO: 840620 - DNA, 561 bp, Homo sapiens
ccttccctctgttacactgatgaaacagagtctctgtcggggtgggttcctgaatgactccaaaaagcagagccttcttctgacctgtgttrtacacgaagcatgagcaaaaaataaaacctttattgtctgtcttaggccacagagctttgaggtttattattcccctcactgttcttgtttactgatgatatagtatcttcctttcccaaactagaggagaccatacatcagatatagaaatttgataccttattttctatggctctatctgtttaaaaacactgctattgtgattcatggtgaattcttttcaccagctttggaaattactagaataagctactcaaaccatttccatggatgtctcaaacaaagaatactggaatattgctggcatcaatgaatattttctcaatcactctgaaataggcttctaaattactctgtattcctccacaaattattgacattaaagcctccattaaaagtaaaacccaaaattagattgttttggggcatgtcttgattttcaatgcaagaaaatttacatgataaaag

SEQ ID NO: 840621 - DNA, 214 bp, Homo sapiens
tggaatgggactggtttttctggacatcatgagatactgctctccatgattaaacagyaattgacataaagtcaacattaatataataaaaatattggtgaatcaagttttcaaaacacaaaaatgttgtacacgctagtggttctataaataacacatgcttttatttaacatcaagacacttcagggcaaagacacaaagtactaaacggaa

SEQ ID NO: 840622 - DNA, 214 bp, Homo sapiens
tggaatgggactggtttttctggacatcatgagatactgctctccatgattaaacagtaattgacataaaktcaacattaatataataaaaatattggtgaatcaagttttcaaaacacaaaaatgttgtacacgctagtggttctataaataacacatgcttttatttaacatcaagacacttcagggcaaagacacaaagtactaaacggaa

SEQ ID NO: 840623 - DNA, 214 bp, Homo sapiens
tggaatgggactggtttttctggacatcatgagatactgctctccatgattaaacagtaattgacataaagtcaacawtaatataataaaaatattggtgaatcaagttttcaaaacacaaaaatgttgtacacgctagtggttctataaataacacatgcttttatttaacatcaagacacttcagggcaaagacacaaagtactaaacggaa

SEQ ID NO: 840624 - DNA, 597 bp, Homo sapiens
caattgcaaagacatggcacaagcctaagtgcccactggaccaatgagtgaatamagaaaatgtggtatatatacatcagggaatactactcagccataaaaaggaataaagtaatggcttttgcagcaacttggatggagctggaggccattatcctcagtgaagtaactcaggaagggaaaaccaaaaacaatatgttctcacttataagtgggagctaagctatgagtactcaaaggcaaacagtatatatactagatatactagactgtggagattcagaagtgggaggttggaagaaaggtgagggataatacacatatagtgtggccaggcatggtggctcacgcctgtaatccttgcaccttggggggctgagaagggcagatcacttgaggccaggagttcaagaccagcctggccaacatggtgaaaccccatctctactaaaagtacgaaaaattgctgggcatagtagtgggtgcctgtagtcccagctacttgggaggctgaggcaggagaatcatttgaacctggaagacaaaggttgcagtgagccaagatcgtgccactgcactccagcctgggcaacaaga

SEQ ID NO: 840625 - DNA, 599 bp, Homo sapiens
tgacaatggtgaaggaaataaggcagaataaacaatctcccatgattattttcatytttcatgttattttacgatttcattacagaagggaaaaattcatttatagaatgttcctgaatgcatttttgcatccttgattttttttcccccctggattttttgcctttagtcttctaaagttccaagtgctttggcacctgcctcccaggagccctcccccgctgcttctgctgaggctgatggcaaggtctgttctgattcttaatctaagcctgcatgccttgttctctggtacaacataatcttctggaaacaatacactgaatagaagaatattaatatgggatactgtgctaaggtcagatcactttagtctaatatatattttaaaattatataacaatgcaatgcatagtttatattgttgacatgcttttgcttgcaatatagaagatgcacacagaaaaagtaatttaaagaggaaattatcctgcactttttgaatttcaacccattggtatttaaattttgcttgttaaattgcatgttttaacatatcttttaacagttaattcaggacagcagaagagaaactaaaa

SEQ ID NO: 840626 - DNA, 666 bp, Homo sapiens
tattttatcatgttctaccataaaatacacaaaatctattatatatatttttttataacggagtcatgccctgtcgcccaggctggaacrcaatgacacaatcttggctcactgcaacctctgcctcccggattcaaatgattctcctgcctcagcctcctgagtagctgggattacaggcacccaccaccacacccagctaatttttgtatttttagtagtgacggggtttcaccatgttggccaggctggtctcgaactcctgacctcgtgatccacccacctcagtctcccaaagtgctgggattacaggcatgagccactgcacccgacccacaaatctattataaaaaattaaaattgataaaaaccaagtacctgctttaaacacctgtgacgctaatcatctccacgagagcagatactatcaccagtaaattgcatactatagtaaaaagtgatctcttgtggttttcacgtgtctttcattgtgtttagcacaacgctgtaaatcttgaataacaccatggcacccacacgtagtgcctctagtaatggtggaagtgctcccgagaagcaaagtcaagtcatgacattacaagaacaagttgaattgcttgatatgtaccatggattgaggtctgcagctgcagttgcccaccattt

SEQ ID NO: 840627 - DNA, 666 bp, Homo sapiens
tattttatcatgttctaccataaaatacacaaaatctattatatatatttttttataacggagtcatgccctgtcgcccaggctggaacgcaatgacacaatcttggctcactgcaacctctgcctsccggattcaaatgattctcctgcctcagcctcctgagtagctgggattacaggcacccaccaccacacccagctaatttttgtatttttagtagtgacggggtttcaccatgttggccaggctggtctcgaactcctgacctcgtgatccacccacctcagtctcccaaagtgctgggattacaggcatgagccactgcacccgacccacaaatctattataaaaaattaaaattgataaaaaccaagtacctgctttaaacacctgtgacgctaatcatctccacgagagcagatactatcaccagtaaattgcatactatagtaaaaagtgatctcttgtggttttcacgtgtctttcattgtgtttagcacaacgctgtaaatcttgaataacaccatggcacccacacgtagtgcctctagtaatggtggaagtgctcccgagaagcaaagtcaagtcatgacattacaagaacaagttgaattgcttgatatgtaccatggattgaggtctgcagctgcagttgcccaccattt

SEQ ID NO: 840628 - DNA, 348 bp, Homo sapiens
gctgagtcacactctgtccccagagtgatggggagcctagaggactttaactctttttccrtttgtgccaagaatactcactggcggtgcttgcggctgcaggctttaccctgagataacttttccccacgaaatgtctcacttttattattatttttgcattgctcttatatgttgactttggaaacaaaagacatcattctacttaaagcattctgtttttagttgtggcatttccatttacaaaatacactaactctcaatcattgaaaatatcaaatcctagaaaactagcattcctacgagtgatgctaacatcattctcgaacagtttttggcctaagattc

SEQ ID NO: 840629 - DNA, 598 bp, Homo sapiens
agcttcatcctgtaatcccaaaaccaaggtttcatctaccatccaggttgaggccatcactatttgtaatcctttacgcttcaagtaataataatataataagacaatattaaaagatctgaagctaaatctcattactaaagaccaaacttaatgattatttaaataggtcaaaccgttaaggggaatcatctgctgtgttatttggtacttttcccactgatgctggagtgaatttaatcagcacaattaatggagtgctaattgtggccttctccccacactttttaaaaactaaccttgaattcttagtttggagttaagacatttttagaaggatggtaagctgttgccatgacaacaactcaggcctccctggggaaaacagctcagcagacacctgccaatctcctaggcaagggtcttctccaatggaggccttcaaagtagagccattggaaagctcagtaccccaaggagaagacccatttgtcaagctgccttttgggcatgtccacatggctgcccctcaggattccccatggctgcccctcaggatccmccagttcacacagctgacattgcgtcccttatcttc

SEQ ID NO: 840630 - DNA, 489 bp, Homo sapiens
ccgtctcaaaaaaaaaaaaaaaaaaaaaaaaaaaaaaacccggccgggcacagtggctcatgcctgtaatcccagcactttgggaggctgaggcaggcagatcacctgaggtcaggcgtttgagaccagcctggccaacatggtgaaacctcgtctctacaaaaaacgcaaaaattagccaggagtggtggcaggcacctgtaatcccagctactcaggaggctgaggtgggagaattgcttgaacccagcaggcagactatagtgagccaagatcgcaccactgtgctccagcctgggagacagagcaagaccctgtctcaaaaaaaaaaatgaattgaaaaaaccttaagggcattacttgaacatcagttgttttactcttttatgtgatcatcttttgtgcccccaatgrcttttttgtttttatatcttccagagagaggcaggagtctgttgttacactcacactgaattccctggtggctgc

SEQ ID NO: 840631 - DNA, 662 bp, Homo sapiens
gtcctttttgttgaaattgatgctattcctttctgtttgttagtttttcttctaacagtcaggcccctctgctgcaggtctgctggagtttgctggaggtccactccagaccttgtttgtctgggtatcaccagygagggctgaagaacaacaaagattgctgcctgttccttcctctagaagcttcatcctagaggggcacctatcagatgtcagcctgagctctcctgtaggaggtgtctgtcaacccctaatgggaggtgtctcctagtcaggatgcactgggttcagggacccacttgaggacacagtctgtcccttagcagagcttaagcactgtgctgggagatccactactctattcagagctggcaggcagggacgtttaagtctgctgaagctgtgcccacagccaccctttcccccagctgctctgtcccagggaggtgggagttttatttataatcccctgactgggctgctgcctttgtttcagagatgccctgcccggggaggaggaatccagggaggcagtctggctacagtggctttgctgagctgctagctgcagtgggctctaccctgtttgaacttcccagcagctttgtttaccacctattcaagcctcagtaatggcagatgcccctccccacaccaagctc

SEQ ID NO: 840632 - DNA, 644 bp, Homo sapiens
gttgtgatcagcttcttgttaacaaaagagaattcatccaggctggaacaaaatagaattgaattgaaaaaaatactttctcacatgtaatatggctgagtgttgttytgtgaaagttcgttttaattatatgtaaatgggctttttgagcacataatgaaatatgatataaaaagtatttgttattataggtcacagtgttttaaaaaaaaccaatggcctacaatattgattctcaggaatccacccaaaatttccaggaaataaaaataccagaagaaaacaatgaactggaaaaacaatgaaagagaagcaaagagagaaccaatgaccaaagagttgttcctttgaaaaaagtccataaattaatagtgactagccatatcggccaagataaaaagagagaagacacaaattatcaattttaggaatgaaggttagaaaattatttcagatccttcctagtcatttataaacataaaaataaatcatacatgtgtcatacatggcacagcagcaatactcactgaagaagaaataggtatcttgaataagctactatacattaaagaaattgaatttgtggcttacaattctcaaagaaaaatcttcaagtccagctggctgtactaacacgtttttcc

SEQ ID NO: 840633 - DNA, 541 bp, Homo sapiens
tgggaactcccactcctgccgctgctggttgcrgcccagctcatggacggggccccacagccccttggttctgatgagcttctcgttgatgagctcctgcactgactccagatggcacatgatggggtaccctgcatgcatccagcctggaaaatgcagaaggagggaagacagagttagggtcctccccatttaagtcgtaatattcttctatgttttgtgtgtgttccaaaacactcagtaaccccagccaaattccagcacaccataatactcagaaaagcaacccaaaccaagaccctgctaggtgttccttctcctcttttcattctggaagaattccttcatctctactctgacccagaatagtgtggctatggaaggagatgcagcttatatataaggagctgttcatgttaccattcaatttttctattttgatgaggatgccttatccatgtgaatctgtgtcactataaccttttctcaaaattcagagctctttaagggtagctcctctctcattgttcagatatggagt

SEQ ID NO: 840634 - DNA, 575 bp, Homo sapiens
atcttacttgtagtttaccctttttttctttttaagtcagtaacaactttgagtaactttttgacgtctattgagataatcatgtaatttttattatttgacttcatgatgaagtcaggtcttttcattatttgacttttattatttgacccttatttaattgaatttacgataattgaaaaactgctacagttcatggattacttctctttagctgagcttctctctctatatcctgttaagtttgactatttttttattttttaatttaggttttgcaaatatatccataaaaataattgggccaggygcagtggctcacgcctgtgtaaaaatcccagcactttgggaggctgaggcaggtggatcacttgaggtcaggagtttgagacaagcctgaccaacatgctgaaacctcatctctaccaaaaaaatacaatgtagccaggcatggtggcacgggccggtagtcccagctacttgggaggcagaggtgggagaatcgcttgaactccagaggcagaggttgctgtgagccaagatcatgccattgcactccagcctgggcaacagag

SEQ ID NO: 840635 - DNA, 620 bp, Homo sapiens
ttcagccgaggagtttggggctgcagtgagctatgatggcaccactgcactccagcctaggtgacagagcaagaccctgcctctaagaaaaaaaaaaaaattgtgtgggtattttaaaaaaccatgtccaccacgttgtgcgtgcccagtaaatgttagatattattatgattatcaggtttcctggaccttgcttcagcctggcagcttgggagtggtttttagggacttagtgtaaaacctacctctgagattctatttgtttccgttcccctaaggttgagggtgtgggggcatagggatcagacctctgggtacaatgctgataacttttggggggtattcccagccctgtttgtctgttaaattaaaatctggtaaagaggtcatttctgtagtctaaatctgaatgtttatgttaccagtagggttggtatagaattgtagattagagggaagagtcttcatttactgaaggtctgcagaaaatgtgctgtgtccttacatacttaggaaccagagctgagaaatatcgggagacagctggagatatgggggacctatyctgattgttcctccaaccatgggcctggagacatccccctttgctcattgagtaa

SEQ ID NO: 840636 - DNA, 573 bp, Homo sapiens
aatatgtgtgttcccttaataactaaatttaaaattttggttgttttacacattctaatttggcttgagaaacacaaagaaatctctcttcatcamtgaaaggacattttcctttttgtaatgctaagtcaggttgtcacacactgggcacttattgacatgtgagactggataattatttgttatggaggctgtcctatgtactatagggtgtttagtagcaagcctggccttcaccctccagatagcagtagtacctatacaccccagcccatacttattgacaataagaaatgtctctgacaaaaccaaatgttttctgggagacataatctgtcccaagtcaagaatgactttggtaaatgacaacacttaattgaagagacattcaagaagtatatattagtagaaggttttttatgaatactgattgagtactctgccactgctttatcagctctggttatgtaaatattttaaatccttttttatcatttcaacagtgttcacattgtcttcaccaggagtagactccatcttgagaaaccacgtttcttgctgattcataagaag

SEQ ID NO: 840637 - DNA, 573 bp, Homo sapiens
aatatgtgtgttcccttaataactaaatttaaaattttggttgttttacacattctaatttggcttgagaaacacaaagaaatctctcttcatcactsaaaggacattttcctttttgtaatgctaagtcaggttgtcacacactgggcacttattgacatgtgagactggataattatttgttatggaggctgtcctatgtactatagggtgtttagtagcaagcctggccttcaccctccagatagcagtagtacctatacaccccagcccatacttattgacaataagaaatgtctctgacaaaaccaaatgttttctgggagacataatctgtcccaagtcaagaatgactttggtaaatgacaacacttaattgaagagacattcaagaagtatatattagtagaaggttttttatgaatactgattgagtactctgccactgctttatcagctctggttatgtaaatattttaaatccttttttatcatttcaacagtgttcacattgtcttcaccaggagtagactccatcttgagaaaccacgtttcttgctgattcataagaag

SEQ ID NO: 840638 - DNA, 565 bp, Homo sapiens
tccagttgttgaagatgggaggagatggctactgtgtagacaaccaattgtgttgttggttgttagctgttcaactaatgaacaactttattgacatgaaagacacagttggttgtctacaccctagttttcagactagggccaggtgcagtgactcacacttgtagtcccagcactttggaggctgaggtgggcggatcgcttgagcccaggagtttgagaccttcctgggcaacatggaaaatccccaactcaacaaaaaatacaaaagttagccaggtgtggtggtgcacacctctggtcccagctactcgagaggctgaggtgggaggaccacttgagctgggaggtcgaggctgcagtgaggcattagggcaccactgcatggtggcagaaaaagaccctgtctcaaaaataaataaataaataaaaataaaaataaaccaaaactgagactaagaatcatgtatttctttgtcactacagttgcaatmctgggagaaggaattgtacttaccctggaaaagcctgtataatatatactctatctatttctttttgaaat

SEQ ID NO: 840639 - DNA, 530 bp, Homo sapiens
aaaaacacactcctgagaagctctggacaaatgagacttatgaatatgaagacctaaattagggattgtgaggcctgccagcactccaagaggcagttaggttcaggtctctgggtgggkctggggcagatacctgggggtgtgggcaggtctctaagttcaggaattaggccagaaaaagttttctgttactcttgctgccccacgtgtcctaaggggctcattttttgtcccttagacatgtcaggcaagttaactagggtgaagtttgtggcagtgttaataaccagctggagtaaggaacagacagatggtttaagcacaaccaccagctccaagcatcccctgctctcacatttcctcacctgcttcacacctccaggactggtagactacaagagaaggaaattatcactttccagggcttatttcttcagagtgtaaagcaaaatggtagaaggctgttttgtgggctgaggaggcagtcacaatcacagcacagttgtacctttggctttaggcctgggcac

SEQ ID NO: 840640 - DNA, 530 bp, Homo sapiens
aaaaacacactcctgagaagctctggacaaatgagacttatgaatatgaagacctaaattagggattgtgaggcctgccagcactccaagaggcagttaggttcaggtctctgggtgggtctggggcagatacctgggggtgtgggcaggtctctaagttcaggaattaggccagaaaaagttttctgttactcttgctgccccacgtgtcctaaggggctcattttttgtcccttagacatgtcaggcaagttaactagggtgaagtttgtggcagtgttaataaccagctggagtaaggaacagacagatggtttaagcacaaccaccagctccaagcatcccctgctctcacatttcctcacctgcttcacacctccaggactggtagactacaagagaaggaaattatcactttccagggcttatttcttcagagtgtaaagcaaaatggtagaaggctgktttgtgggctgaggaggcagtcacaatcacagcacagttgtacctttggctttaggcctgggcac

SEQ ID NO: 840641 - DNA, 580 bp, Homo sapiens
gctattagaaactttattcatagtagctggaagcaactaaaatatcctttaagagctgaatggataaacaaactgcagcagccagacaatggcatattcctcartggaaaaaaaggatgacttattaattcatacaacaacatggaggaatattaaatgcctattattaaataaaaaagtcagactgatatgggtacatactgtatgatttcagttatatgactttttgtaaacataacagtggttgctgttgttcaaagcaggtgggaaggtggaataattgaatatgagaattgttttaggggccaggcatggtggctcacacgtgtagtcctagcactttgggaagccaaggtgggcgaatcacctgaggtcatgagttcaagaccagcccggccaacatggtgaaaccctatctctactaaaaatacaaaaaaattagctgggcctggtggcacacacctgtaatcctagctactcgggaggctgaggcaggagaatcaaccaacccagaagacaaaggttgcaatgacatgagattgcaccactacactccagcctgggcaacggagcaagactc

SEQ ID NO: 840642 - DNA, 627 bp, Homo sapiens
gacattctattttacatgttttatatgtgtattagagtattatattcctaattcctccctcccatgccatgtrtcattaccctcattcatttcacttacacataagctataatcatagaatatatcagttattattattttgaacaaactgttgtctcttagctcaattgagaataggaaatagaagattttattttatcttcccttatttcttccctaaatctttcctttctttatgtagctccatgtttctgatctgtataattttttttctctctaaagaacttttttaaaaagcattttttgcaaggcaggtctactgacaatacattccctcagtttttggttgtctgagaaagtttttatttctctttcacttttgaagggtaattttgcgtggtacagaattacaggctggtggtttttcctcaatactttgaatttttcactctgttctgtgcttgcttgcctggtttctgagacgtcagatgtaattcttataattactgctctataaataagatgtttttccctctggcttcagtcaatatgttttctttattttggattttctgcagtttgaatattatatgcctgaatataagtgtagggctttttccttctctc

SEQ ID NO: 840643 - DNA, 600 bp, Homo sapiens
gtacagaattacaggctggtggtttttcctcaatactttgaatttttcactctgttctgtgcttgcttgcctggtttctgagacrtcagatgtaattcttataattactgctctataaataagatgtttttccctctggcttcagtcaatatgttttctttattttggattttctgcagtttgaatattatatgcctgaatataagtgtagggctttttccttctctcttcttgtgctttttttttctttttggcacttatcctacttggtattctctccacttcctgaaattgtggttgggtctcatattaattggtgaagttcttagtcattattatttcaaatatttcttctgttcctttttctctttctttttcttcttgcattccctgtgtttgtatgttacaccttttgtaattgtctcaaatcctttaatattctattttatttttttcagtcttttttttttgctttgcttttcaattttggaagtatttattgacatatcttcaaatatgaaaatcctttcctcagccatgtccagcccattaaaagcatttaaaatttttctgtgacagtgtttttgattctagaattta

SEQ ID NO: 840644 - DNA, 602 bp, Homo sapiens
gtttgagaccagcctgggtgatatagtgagactccttctcaaagaagagacctttataataattttgtttttcarggagagggttttaaaacctgctagaactaaagattgattgaagtcattttgaaaaggcaggtcctcatataggtggcaaacttgaaaacccttgctctttggctacaggtcaagaaatggttcaactattttgacttgacttaaaattctgtagtgactccataaccatctccagctccttccagccatagcctaggagtggttctgcatatccagagacccagagaaagatgcctgtttgtggttacagcagtaggtctgcagaccttggcctttactgtgctctctgaaacagttcagtgactcagtttcagcactgatagtcacagtttgtggcaagttctgccaacttaagtactcaaagagttacttggggaaatcttgccacatactcagtaagaaacacacatcaggcacaccatataccagccgtactgcagaacactgccctagtgctggccctacagatccaagtcctaaaggcaattccgtctgccaagaaataagacaggattaacaactaccca

SEQ ID NO: 840645 - DNA, 647 bp, Homo sapiens
gtggccaaatccacatacgacagtcacgattccaactgtggtctgcatccatatgtgagatttataacctcaccagtgggctgtgtctaggtttaagggtgacaatcccattgttggctgggtgcacctrtgggagtcacaatctcacctgcgtgttggaccgtgttatgacatagcttataccacccaagggctttgtaaaatatttgtgtcataatctcccatgaccttttataagaaaacccagaaccttacctgtgtccctaagtctagccagaagagtaaaaaaatctgttgttttggttgagtctatgtatgagggtcattatcatgtccactaactgggcctgggtatatgtaaaaatttcacctctgggtgtggatcaggcaagagtcacatcacctgaattctgggccaggaatatgtcaacattcttcttgtgtgcagtgccatagcaggaaagccacatcgcctgagtgctgggcttagtgagatgttacaacgccttctgtggacataaaatgatagtcacgtcacttatatattgggtccagaaatatgtcacaattcccactgttggcatggcccaggcagaagagtcacatcatttgggtgcaggatccagcgatatgttacaatccttact

SEQ ID NO: 840646 - DNA, 580 bp, Homo sapiens
atcacctagtgatgtgactctccctttctttctaggctcaacttatagaaggcattgtgacagatctctgggttcatcacctaggagatgtgactctacactcccagctgggccaagccccactgaagattgtgacatattaatgagcccataaactatgtgacatgactctgctccctggcctaagccaagattaaaggggacattgagacataatgctttgcctagcacctacatgatgttgactctcttttcctgcctgggctcggcctacagaagaaattgttcatatcactgagccaagatcccagttgatgtaactctcctcctgggccctgctcacaagggaaatattggcatattccttgcctagcactaaggtgatgtgaacttctgcctggtccctgcccatatgtgagattgtgacatacacttaagcccaactcacaggcataatgatgactctcttacctggaccaagacaatagaaaagattttgactcttccaaatagtcttatggtaataggcaatctactgggtcttttacttgtagwaaggtcagagattacaacactcata

SEQ ID NO: 840647 - DNA, 554 bp, Homo sapiens
agatcatacaatctctatatggaattctttgtgataattcattagttggtgagaacgttttgttaggtttaaaccagcctcagtgaagctggtgtcagggaagggaaagtggactttgaacagagcagaaacagaagaaagatgctctgctgcaggtcaggaaaaagcagggggtgaaatgttacaaattctagaactcagagaactgaaggtaattacttccttttcaaattgtgaaacattttaacctgtggtaaaatattcataacatgataattaccatctaaccacgttgaagtctacagttcagttatttgaagtatattcgtgtcattgctcaattattatttgctaaatgtcttctctcaagtccttcttaaagtcataaaatgtaaacgatgaatccatggattaacagtggaaagcctggaggtccaatagccttagccaggaacatatgctatctgtcagagtccccatagcatgaaartgagttcgccctggaaagggaaaaaacagctttttgccctcagctttctcaccttcttcttttc

SEQ ID NO: 840648 - DNA, 554 bp, Homo sapiens
agatcatacaatctctatatggaattctttgtgataattcattagttggtgagaacgttttgttaggtttaaaccagcctcagtgaagctggtgtcagggaagggaaagtggactttgaacagagcagaaacagaagaaagatgctctgctgcaggtcaggaaaaagcagggggtgaaatgttacaaattctagaactcagagaactgaaggtaattacttccttttcaaattgtgaaacattttaacctgtggtaaaatattcataacatgataattaccatctaaccacgttgaagtctacagttcagttatttgaagtatattcgtgtcattgctcaattattatttgctaaatgtcttctctcaagtccttcttaaagtcataaaatgtaaacgatgaatccatggattaacagtggaaagcctggaggtccaatagccttagccaggaacatatgctatctgtcagagtccccatagcatgaaagtgagttygccctggaaagggaaaaaacagctttttgccctcagctttctcaccttcttcttttc

SEQ ID NO: 840649 - DNA, 628 bp, Homo sapiens
aggggataatgagataagcataaaagtgaataacaatgacctataccataatattctaagtatcataaaagaaacataaaagaaattctgtaggcagcacagaaaagaaagcttttgaaaagagaggagttttatgaaggaggtagaacttaaaatagatcttgaggaaaaacaatattttgatgagcaaatgtcagagagtgagggaaaagagttaaatacagaaccaaaagcatctgtaaaaagcacagaatggtgagtagtggaaggcaaggctagaaagtgaggccagcatctggaatatcacaataaggaatttgaaattgagtctacaggagatgggagccatggaaggctttggagctgaggtgtgatatagcctcatctgcattttcagatgatcatttacacagcaccgcagaaaccaagctgggatgtacatcagaatcacctggagagtttccaaattgcttaatatatacagaaaagtacaaataacaatacaacacttctccattctccaacagcttgctaamaagacacccagaagcaagctaacttgttctatagaatccctgaggagtttggcacctaaggacatccatcggcaaaaaggcagcagtgaatc

SEQ ID NO: 840650 - DNA, 358 bp, Homo sapiens
gtacctacttaaaaaaaaaaagaatgccaatcatgatgaatataaacccaagggaagtagtgagaggtattgttcattactttgtccttggatttgycctactcagaaatatgaatgaggactttgttggcatggttattaaaaaataccaaagacctgacactaagagagtaaaataaatgtggtattccagagcaagatctgaaggctctcaataggctagaataatggtccaaatcttcactctttatatatataaatatatatgtattctatataaataatctttatatataatctctttcaatctttatacataacctttttattttatgtaatctttacacataaatttata

SEQ ID NO: 840651 - DNA, 358 bp, Homo sapiens
gtacctacttaaaaaaaaaaagaatgccaatcatgatgaatataaacccaagggaagtagtgagaggtattgttcattactttgtccttggatttgtcctactcagaaatatgaatgaggactttgttggcatggttattaaaaaataccaaagacctgacactaagagagtaaaataaatgtggtattccagagcaagatctgaaggctctcaataggctagaataatggtccaaatcttcacyctttatatatataaatatatatgtattctatataaataatctttatatataatctctttcaatctttatacataacctttttattttatgtaatctttacacataaatttata

SEQ ID NO: 840652 - DNA, 580 bp, Homo sapiens
ctggaaaatcaggtcactcccaccctaatactgcgcttttccaatggccttaaaaaacggcacaccaggagattatatcccgcacctggctcggagggtcctacgcccacggagcctcgctcattgctagcatagcagtgtgagaccaaactgcaaggctgcagtgaggctgggggaggggcgcccgccattgcccaggcttgagtaggtaaacaaagcggcacggaagctcgaaacgggtggagcgcaccacagctcaaggaggcctgcctgcctctgtaggctccacctctgggggcagggcacagacaaacaaaagacagcaataacctctgcagacttaaatgtccctgtctgacagccttgaagagagtactggttctcccagcacgcagcttgagatctgagaataggcagactgcctcctcaagtgggtccctgacccccgagtagcctaactgggaggcaccccctagtagtggcggaccgacacctcacacagctgggtactcctctgaaacaaaaattccagaggaamaatcaggcagcagcatttgcggttcatgaatatccgctgttc

SEQ ID NO: 840653 - DNA, 516 bp, Homo sapiens
aaaattgacagaagtaagcttcagaaggtgggtaataacaaacttcackgagataaaggagcatgttgtaacccaatgcaaagaagctgagaatcatgataagacaatacaggaatgatagccagaatagcccatttagagagaaacataactgacctgacggagctgaaaaacacaatacgagaacttcaccatgcaatcacaagcatcagcagcagaatagaccaagtggaggaaagaaactcagagctgaagactgtctttctaaaataagacaggcagataaaaatatttttaaaagaatgaaaaggaatcaacaaaaccttcaagaaatatgagattatgtaaggggaccaaacctactactgattgaagtacctgaaagagacaagaagaagagaaccaagttggaaaacatatttcagagtatatcatccagcagaatttccccaacctagcaatacaggccaacattcaaattcaggaaatgtagataaccccagtaagaggttccat

SEQ ID NO: 840654 - DNA, 623 bp, Homo sapiens
aacaataaaaccagaggaatcacattatctgactgcaaattatactatagagctataataaccaaaacagcatggtactggcataaaaacagacacatagaacaatggaacagaatagagaccagaaacaaagccatacatctacagtgaactcatttttgacaaaggtgccaagaacatacactgggaataagacagtctcttcaataaatggtgctgggaaaactggatatccacatgcaaaagaataaaaccagacccctatctcttgtcatctacaaaaattaaatcaaaatggattaaacacttgaatctaagacctcaaaatataaaattactgaaagaaaacattggtgaaactctccaggacattgaactgggcaaggatttcttgagtaatactccacaggcacatgcaaccaaagcacaaatggacaaatgggatcacatcaaattaaaaagcttttgtacagcaaaggaaacaatgaacaaagtgaagatacaaaccacagaatggaaaaaatatctggaaattatccatctaataagggattaataaccagaacatgtaaggcrctcaaaaaactctataggaaaaaatctaataatccgatttaaaaaat

SEQ ID NO: 840655 - DNA, 455 bp, Homo sapiens
tacaatttggagcaaggtgctcactgaagttgggctccttccctctcacaacgactgggagacagtggtgtgaccttccttgatcacctttcaaagggcccatagaccttgggaaaaatattctatggtcttaacactggtaagagacttaaaaattttacaattcaaaggggtagagaaaggatttgcagaagtgcaagttaaaagtacacgctctaagaaaagggcagtcagggcctgcagtcagaaagaagcctatctaaagtttactcggctgaagggacatttaggctgcgttggtcagctggtgttatggactgaattgtgtgtttcgccacaaygacaccgccaagttcatatgttgaagccctaacccccagtgagactatttggagatggagcctttaaggaagtatttaaggttaaatgaggtcataagagtggaactccgccgg

SEQ ID NO: 840656 - DNA, 517 bp, Homo sapiens
ggctgacacagttaaacgccatctctactaaaaatacaaaaaattagccgggcgtgtggcgggctcctgtagtcccagctactcaggaggctgaggcaggagaatggcgtgaacccgggaggcggagcttgcrgtgagccgagatcatgccactgcactccagcctgggggacagagcaagactctgtctcaaaaaaaaaaaaaaaaaaaaagtccagaataaacaaatccatagagacaggaagtagtagattcgtggttgccgtggttgcctacgatttggggttttgtggaagaattcagagtgatttctaatagttttggggttctatttggggtcatgaaaatggccgaaaattagattgtggtgatagttacaagactctgtgaatattcggagtatcacaccaagttattcactttaaatggtgaattttatagcatatgatttcttggccaataaaatgataagaaaaaaagaaaatctgtttaaaatgcatatttctgggcccaacct

SEQ ID NO: 840657 - DNA, 618 bp, Homo sapiens
ttagatgtaaacagcctctcagcctgtcttggagcattctcatttagatataagatactatttaagtaacgaaatatctaatcatatcatttcagtaaatttaaatgaagaatttccattaggatatggaactcacttttttatttttttattatactttaagttctgggatacatgtgcagaacatgcaggtttgttacgtaggtatacacgtgccatggtggtttgctgcacccatcaacccgtcatctacattaggtatttctcctaatgttatccctcccctagtcccccaccccccaacaggccctggagtgtgatggtcccctccctgtgtccatgtgttctcattgttcaactcccacttatgagtgaaaacatgcagtgtttgggtttctgttcttgtgttattttgctgagaatgatggtttccagcttcattcatgtccctgtaagagacatgaactcatccttttgtatggctgcatagtattccatggtgtatatgtgccacattttctttatatatatatatakagagagagagactagatagaaactcttaaatcctaatatgcaaatctaacctgggaaaaccattacactggttaaaagtag

SEQ ID NO: 840658 - DNA, 542 bp, Homo sapiens
aagaaatgtatttctgactgttacgggtgctgaaaagtccaaggtcaaggggctgcatctggagaaggcctctctgaaatcccatgacagtgtagagtatcacatggcccagtgactgaacgtgctaatgcattggctcagtctctctttctcttcttatgaagccaccagttctgctcccatgataacctattaatccattaagggatgaatctattcatgggggtrgaaccctcatgcccaagtcacctctgacagcccctacctgtcagtactgccatattggggattaagtttgaacatgagtttcagagggagcaaacattcaaaccatagcagtgatctttgtttattaacctggatttgaattattggtgtcacttttcttcattctgacaaaatttctttagtacttatataagatgaaaggtttgctagcaatacattctctcaacttttgtttatctagaaatgattttattttgccatcttttttctctatgtgtcacaactcttcaaataaacacttaccttttaaagta

SEQ ID NO: 840659 - DNA, 710 bp, Homo sapiens
aaagctagaaggaagacaaaaatgctctcccttacagaatagaccaastcataaatttagaaaaaaaaatagagcataaaaatcacacctttgcaatgatgatattaaggagtgaggcaagcagcaggcagcaaggaatggtgatgaacaggatagttctgtagtctcgaagcatctcatcacaaatgacttgacaatcacaatggtaaaaactcaaagtgcaaaaacgtctcagcctgcatcgcaatcaagtgatggaagggaacaccccaatcataaagcaagctgacatcaggactcacctggaatgatgcagtgaggacacagcctccctttgtggcagccctgacaaagacgcacagctgaaatctatcgtgaagaaacaatagacagacccacactgagatacattctataaaataaatgggctctctgcctctagatgtttcatgccatgaaatacaaagaaaggctgccatacatttcagactgaaggagaccagacacatggaaactgtgattcttgatcagacaccagaactgggaaagacaactctagacaatataattgtgacaactgttgaaattgaataagatctgcagattaaagaacagtatttcatggatattaaattttctgattttgatcagtattgtggttctctaagagagtgcccttgtttgtaagaaattctcacgaaagttttcag

SEQ ID NO: 840660 - DNA, 710 bp, Homo sapiens
aaagctagaaggaagacaaaaatgctctcccttacagaatagaccaagtcataaatttagaaaaaaaaatagagcataaaaatcacacctttgcaatgatgatattaaggagtgaggcaagcagcaggcagcaaggaatggtgatgaacaggatagttctgtagtctcgaagcatctcatcacaaatgacttgacaatcacaatggtaaaaactcaaagtgcaaaaacgtctcagcctgcatcgcaatcaagtgatggaagggaacaccccaatcataaagcaagctgacatcaggactcacctggaatgatgcagtgaggacacagcctccctttgtggcagccctgacaaagacgcacagctgaaatctatcgtgaagaaacaatagacagacccacactgagatacattctataaaataaatgggctctctgcctctagatgtttcatgccatgaaatacaaagaaaggctgccatacatttcagactgaaggagaccagacacatggaaactgtgattcttgatcagacaccagaactgggaaagacaactctagacaatataattgtgacaactgttgaaattgaataagatctgcagattaaagaacagtatttcatggatattaaatttyctgattttgatcagtattgtggttctctaagagagtgcccttgtttgtaagaaattctcacgaaagttttcag

SEQ ID NO: 840661 - DNA, 547 bp, Homo sapiens
aaaggaaatgatacaaatggaataataatgaacaagagaaaaatttacgattgtgaaaattagattgtaaaatggctttagaggaaaagtactgtaattcacattcctacagttatttgagagaaagggaccaaaccagtttaaaaatgtttttactgagaatttaaaaacaccctttagaaatagaaattcagtttctgactttatttagcaaaaattaaccagcaaaaaccttatgccccccaaaatgtgacctctttctctgtggatagtccagtgtttttcagcctagagcctaattctgctcttgggggacagggtccatgaagcgcaaccctgtgttttgtattcatagaaatgcagccagcaaacttgggtattggatgaactgggcattgtgggtcactctgcccgtggacctgctggtggcaccrcagggaaaaggttagaaactgcatgttctctgccaggcagaggctctactcatgttcttctagggagtcttgccttgtcatttctaccagtcatagactgggagatttgctga

SEQ ID NO: 840662 - DNA, 589 bp, Homo sapiens
ttttttatttttttttttaggtggagtcttgctctgttgcccaaactggagtgcagtggtgcaatctygggtcactgcaacttctgcctcctgggttcaggtgattctcctgccttagcctcctgagtagctgggattacaggcatgtgccaccgtgcacagctaatttttgtatttttagtacagacagggtttcgccatgatggccaggctggtcttgaactcctgacctcaactggtccatctgccttggcctcccaaagtgctggaattacaggtgtgagcactgcgcccgggcaaaacaaaacttttatatatactaggaaaccaaaaaatacctgtgactgttttgtagtattcactttattctggcagtcttgaaccaagtgtacgatatctccaagatatgcctgtacctgtcagagttctactttgcattcaattacagctattaatctcctgcaagtcattttgtctctctgaagttttttttttttttttcttaaataggagaatactatttatcaactcatttcatgggattattgtgatagtgaaataagaaactgtaagagaaaaccttatactt

SEQ ID NO: 840663 - DNA, 576 bp, Homo sapiens
ttgaaacaagagtttaaccagaagttaataaacaactctttcttcaggaaacctttgactcatggtttatacatacttttgtattaagttgtgtagcataaaaataaaagtatagcagtagwatactaccactggagtgtcattcctgagatagccagatgttcagttattttgaaataaccctggagtataacagtaaagctaccccctcaaaaaagttttttgttattagaattcatgatattaatctaagttaatctctccattcctttgtgctcctcataacatgttgtttaaatgtctctacagtactgattccatcctattttatgttattattatcttgatggctgtattagtccattctcatgctgctgataaagacgtaccagagactgggcaatttacaaaggaaagatatttattggacttacaatttcacgtggctggggaggcctcacaatcatggtggaaggcaaggaggagcaagtcacatcttacatggatggtgcaggcaaagagaggagagcttatgcagggaaactcccctttataaacccatcagatctcgtgaga

SEQ ID NO: 840664 - DNA, 582 bp, Homo sapiens
ggtactggttatgagtaagcatggtgaaaacccattttctaagaaacagaagagatggcaagtgtatcctctcaaagaaktaaattttgttttctgccttatttttctcaaacaaaacaagcttttaccaattgcattaccatagccttgctatctatacataggtatcacagaaatcttaatctttgagttttcaagttagaggaattcttattaagcatgagagttaataatctcctgagacacaaatatgcctggtaatatgagaacaataaatgtttgttgggtccaaacatgaattaaagctgtatatgttatgccttaaagacattaaattaatcataaattatagtgattaattacattaaaacagtagcattatgaatacacaagatacaagtttcagtttaaggaaaaaccatattttaataatccccaagtacgcctgtattctgagacactaaaaataattatatgctactaactataccttgaaaacgcatacactcttactgaagacacagaaatgaacagaacagaactaaaaattgaatacattttgtgacacatgatttttttcat

SEQ ID NO: 840665 - DNA, 486 bp, Homo sapiens
gtttaacaaactaggcattgaaggaacatacctaaaaaacaaaagagccatctattacaaacccactgccaacattataccaaacaggcaaaaattggaagcactctccttgagaaatggaattagacagtgattgctgtctacggccataccaccctgaacgcgcccgatctcgtctgatctcggaagctaagcagggtcgggcctggttagtacttggaagggagacagtgattactcgctctcacactcctattcaatgtagggctggaagtccttgatggagcagtcaggcaagccaaagaaataaaagcatccaaataggaaaaaaagccaaactctgtctcttcatggacaatatgattstatacctaggtaactataaagactctgccaaaaggctcctggaactgaaaaacaacttcagtaaggtttcaggatacaaaatccatgtgcaaaaatcggtagcattaatatataccaata

SEQ ID NO: 840666 - DNA, 604 bp, Homo sapiens
ttactatatccagtacctgggtgacaacatcagtcataccccaaaccatcacacagtttattcaggtcacaaacctgcacatgtaccccttgaatctaaagtaaaagttgaaattataaaaataaataaataattagaaaaattgaaataaacaacctaatggtgcatcttgaggaactagaaaagcaagaccaaaaacaaacccaaaatgagcacaaaataataataatccagattagagcaggaatatacacaattgagactagaaaaccaatacaaacgatcacgtaaacaaaaagttgtttttgtcgatagtacacattgacaggctgtgaactagattaactaaaaaaagagaaagaagacccaaattaattaaaatcaaaaacaaaataaagagatgccacaacagataccacagaaatagaggatcattagagactactatgagcaactatatgccaataaattttaaaacctagagaaaaaaataaatttctgaacatatacaacctgccaataytgaaccaagaagaaataaaaatcccaaacagaccaataataagtaacaagattgactcattcattaaaaatctcccaacca

SEQ ID NO: 840667 - DNA, 583 bp, Homo sapiens
tctttctagttttatttcttaactacaaaacagagtaaatgatggtacttactgcataaggctcctataatgactaatcraattattgcattcactgcacttagcattgtgtcccaactcagaaaaatgttcaatagttgttacttatgattgctatttatgtatttatgcaaaattctgactctgaattgtctgcagctaactgataatgagctaacaataatgtaaaacggagttgttgttcttgcttaacaaccattaagtctggcttaataaaaaagagtttaagatcagtacaggcatgtaggattgggaggggtaagaaattccttattgctgtctctgattttgttttggaggtcaaaacatctggataaaaaatgagcattagtctgtataaaaacaaatatttatacattcagaaattctgagcccatgaggccaaaatgtctggtctttggcaatctttggaaaatctgttccccaggcagcccatgtattgctggggccccagcatagttttgtagccaaaggcccgggatacagggtgagtgggtggtgaagagagatctctggcaaagct

SEQ ID NO: 840668 - DNA, 617 bp, Homo sapiens
gattctgatgcacagagagattgatattcactttgggatgctggagtccttttctcatctcctcaagctggacaaaaatttatacacagaggargaggagcaagtgagccttctcagaggaagcaacatttgagctggactttggaggctaagcagcagatcatagaggctaagatggaaggaaatgagagcctgctagtccaagggcaaaacaatttctctccttacactcatgtatcatcaactcagtgcaggagaaatggggaattggccaatttgggcccatgcaaaaggcttggcaggcatttgggttttctcaggtgccatatgtagttgtggctgtggacacctgggaacactgagcagttgcacatactacagaaagggccaggggacaccctcagggacttgtgagtttactctgggccctgtggatttcttggtctttctttatcatcatcatcccgtagtcagaacttaatgctgttcagtgttcaagggtgccattgtctcacaattttgtgaagtgaacagaatggggatcactgtcaccatctgactgatacagaaactgaggcattttgattggtgttacttttaagttctccaggtgatac

SEQ ID NO: 840669 - DNA, 624 bp, Homo sapiens
tcaccttgtagccatcttatttaggaagcaaaaaaggtggcaggtttgtgtgactcagttcccagcttgacatttcccttccacttaatgagtttggggttycaagatttattttcctttcagatagctttcctcttctgtaaactgcctgttcatactattcgtctatttttcttttgagttgtctttttaagctccttaaatgttctgtaaataattttctcgtacattgtaaataccttttctcagtgtgtgacttgtcttttaactttcttctatttttattatgaagatgctttatacattaatgtagtacagtttgtcaatcttttgctttatattttgtgcctccttttaaagaaatactccctaccaagagatgatatattattcaaaattttcttctaaacattttgaagttttgcctttgaaatgtgcattttagttcatttaaaattcattttatttacaatatgtagtaagaacatactgtccatatttctctacagtcattctttttccattaatttatcatgttatttcctatgtggagtttccatatacccaaggctatgttcctgagatttctatccagcttcaccctgttgaatacttggatttcca

SEQ ID NO: 840670 - DNA, 624 bp, Homo sapiens
tcaccttgtagccatcttatttaggaagcaaaaaaggtggcaggtttgtgtgactcagttcccagcttgacatttcccttccacttaatgagtttggggtttcaagatttattttcctttcagatagctttcctcttctgtaaactgcctgttcatactattcgtctatttttcttttgagttgtctttttaagctccttaaatgttctgtaaataattttctcgtacattgtaaataccttttctcagtgtgtgacttgtcttttaactttcttctatttttattatgaagatgctttatacattaatgtagtacagtttgtcaatcttttgctttatattttgtgcctccttttaaagaaatactccctaccaagagatgatatattattcaaaattttcttctaaacattttgaagttttgcctttgaaatgtgcattttagttcatttaaaattcattttatttacaatatgtagtaagaacatactktccatatttctctacagtcattctttttccattaatttatcatgttatttcctatgtggagtttccatatacccaaggctatgttcctgagatttctatccagcttcaccctgttgaatacttggatttcca

SEQ ID NO: 840671 - DNA, 309 bp, Homo sapiens
gtttactctgttgatattttcttttgctgtgcagaagctctttaatttaattaggtcccacttgtcgatttctgrttttgttgcgattgcctttgagatctcagccataaattctttgccaaggccaatgtccagaatagtatttcctagattttcttctaggattcttatagttttaagtcttacatttaaatctttgatccatcttgagttaatttttgtttatggtgaaaggcagtggttgtttcattcttctgcatatgactagccagttatccgagcaccatttattaaacagggaatcctttc

SEQ ID NO: 840672 - DNA, 604 bp, Homo sapiens
tcatcaagcattgaggatcttctgtcttgacctctaatctgcctcatctttatgttcacactgaaacactgtcagttttccaaacaaaccacactgctgtgccttggactaacattgcatcctctatgatagacttcctccctttgccgtggtgaacacataccatgattcaaaaccaagtttaaccatatgtcttctgttgaggcttcctgaattaccaatttacctcccaggtcagattaatcactccttcatctgtacttctttgtgactgcctaatcagcaggtgtctcaggtacaggcaaagctataggaattccataagatgtccttgtaatcagactgaaatatattaaccttcagagccaaccaataatttggcactccttcaaactgatattatttaaatatttactttaaaagaacaaaagtaaactaattttctattaataaaaatcgaatatacctttaagttcaaaataagaatatatatgcacatcaaaattttactctatttcaattgtttttagttaaccttctcatcatttataatattaggcactatactaagaatagcgawtacatctagataagataaaatgcc

SEQ ID NO: 840673 - DNA, 540 bp, Homo sapiens
cgagttcctcagcactcacagctcaagtaccatgactgcctgattgtgataatcaattgtaaggtttgtcacaagcagtgtgtaatttttaacagtgaaagttctsagagagtcctttcctaatcattctagctgacactcttcccttcattcagtttgcaaactctggagtatttatttccttaatttctgtgcatctgttccattagactacactctactagctaggaacctggctagcctcttagtagtatactcctagtgctcaacagagtgccctttctctaacagtgtttgtggaatacagaaagaaagaataaatcttgtgccttctagttctacctttcacagtgaagtcacagttgcatttttgaaatgcaaatctaatcctttggatttttctttaaactttccaatggtttcctactttctaaggttgaagctttaaacttttagaaaaatatgtaaaatctttcattactgcctatctttttctcccatctctgcactcaacttctgctccatgattacagaaacact

SEQ ID NO: 840674 - DNA, 548 bp, Homo sapiens
ggatccccatttacatgatcaaccaaatcatacggttacaagctgtcttagaaataatcactaataaaactgtcagagccttractattctggcccggcaagaaactcagatgagaaattctatctatcaaaatagattggcttttgactacttgctagcagctgaaggaggcatctgtgggaaatttaaccttagtaattgctgtctacacatcgattatcaagggcaagtagttgaagacatagttagagatatgacaaaactggcacatgtgcccatgcaagtgtggcatggatttgatcctggggccatgtttggaaaatggttcccagtgctaggaggatttaaaactgttataataggagttataatagtaataggaacctgcttactgctcccttgtttgctaactgtacttcttcaaatgataaaaagcttcattgctatcttagttcaccaaaatgcttcagcacaagtgtactatatgaatcactatcgacgtgtcttgcaagaagacatgggtagcgagaatgaaagtgagaactcc

SEQ ID NO: 840675 - DNA, 545 bp, Homo sapiens
tttcaacttactcaacatcagaatcaccagagtggccaataatatcaaacatgatttggttcttttttaactctcttccttctcactctgttattcacatactcctcatatttgtttcattatcaattgacctctctgctgtttctgcaacatgccaggaatgctgtcatggagagggtattttatttgttatttcccctttccattaatttattttcattttatttttaattggcaaacaataattttacatattcatgaggtacaatgtaatgtttccatacatgtatacattgtaaatgattaaatcagggtaattcatcacctctatcatttatcacttatttctgtttacaacattcaaaacattttcttccagctgttttgaaatataaaatatattattattaactatactgcctctattgtgcaatagaacaccagaacataktcctcctatctaaatgtaactatgtaccccttgatcaacatctccactttcctcttccacttctttgtcccagactcttgtaaccaccattctg

SEQ ID NO: 840676 - DNA, 639 bp, Homo sapiens
tctagaaataattaagacagagacaccagacaaaatatattaattacacaaagtttataaaatagatcatgcacagataataaaataatctctccaatttaagttcatgctagatattcatatgatttaattaagtcaggaatgtggaagcaaatccattgttttctactggttatagtggagaaatatgtagagctatcagaaaatggtgctattagacactatcaatttctttgaaatgacagtatcatttattatgctggaagaagtgttccattctatacatcaattacattatgaatatacatgggaatattcctcttctcatttaatgttagaggtaggaaatggactctgaatctaacatatcctaaataatttcaaagtcaaaaagcacaagccaaaatgatactttttgcacatgtctcccttgctggggtttgagtttgtcaagctcagccacaggagttagtccttcctttcttcagtcggagctattgtgtctggctctgtttatttttgaataagttactggactrtgctacgtttaaacaatacaaattcagcaaataattagttcataatttgatatgattgcacattttgccaacaaagatgaaaccttgataaatatttaac

SEQ ID NO: 840677 - DNA, 719 bp, Homo sapiens
tccttgatgacaatatgattctatacctagaaaaccctaaagactctgccaaaaggcccatagaactgataaacaaaakcagtaaggtttcaagatacaaaaattagtagtatttgtatacaccagtaactttctagctaaggtccaaatccagaacacaatcctctatacaattgccacaaagaaatgaaatacctaggaattcgtctaactaaggaggtgaaagatctctacaaagagaactacaaaatacgcctgaaggaaattagaaaaaaaaatatttccacaaataaatggaaatatattccatgcttatgaatagaaagaatcaatatagtgtaaaatgactaaactgcccaaagaaatttacagactcaacaatatttgtatcataataccaatgtcattttccacagaattgcaaaaatctattataaaattcatttggaaccaaagagcctgaatagccaaagcaacatggtaaaagcaaaaagaaaaacgccagaggcatcacatagcctgacttcaaagtaaattataaggatacagtaatcaaaacagcacggtgctggtacaaaaaaaaggcacatggaccaatggaacaaataggaaacccagaaatgaacctgcacccttaaaatcacctgatctttgacaaaatcaacaaaaatagacaatggggtaagaactctttatcaaataaaagatgttgggataac

SEQ ID NO: 840678 - DNA, 632 bp, Homo sapiens
ctatctatccttgatgacaatatgattctatacctagaaaaccctaaagactctgccaaaaggcccatagaactgataaacaaaatcagtaaggtttcaagatacaaaaattagtagtatttgtatacaccagtaactttctagctaaggtccaaatccagaacacaatcctctatacaattgccacaaagaaatgaaatacctaggaattcgtctaactaaggaggtgaaagatctctacaaagagaactacaaaatacgcctgaaggaaattagaaaaaaaaatatttccacaaataaatggaaatatattccatgcttatgaatagaaagaatcaatatagtgtaaaatgactaaactgcccaaagaaatttacagactcaacaatatttgtatcataataccaatgtcattttccacagaattgcaaaaatctattataaaattcatttggaaccaaagagcctgaatagccaaagcaacatggtaaaagcaaaaagaaaaacgccagaggcatcacatagcctgacttcaaagtaaattataaggatacagtaatcaaaacagcayggtgctggtacaaaaaaaaggcacatggaccaatggaacaaataggaaacccagaaatgaa

SEQ ID NO: 840679 - DNA, 580 bp, Homo sapiens
gacaggcgcagtggcacatgcctgtaatcctagcactttgggaggccaaggcgggtggaccacctgaggtcagaagttccaggccagcctgaccaacatggtgaaccccatctctactaaaaatataaaaatttgccaggtgtggtggcgcattcctgtaatcccagctacttgggaagctgagacaggagaaccacttgaacccgggtggtggaggctgcagtgagacaagatcatgccactgcactccagtctaggtgacagagcgagacttcatctcaaaacaaaacaaaaaaactcagtaacaatcaaaaatttaattagaaaatgggcaaaagacagacattttcaccaaaaaggatacacatgtagcaaataagtacacaaaaaaatgttcaacatcatgagctattatgcaaattaaaatcagtgagagattgctacacaactatcccatgtctttaaaaaaaaaaaaaaagtagyaataccaaaagctagtaaggatgcagagacattggatcactcatccattgctggtgggaatacaaaatggtacaagccactctggaaaacaattcag

SEQ ID NO: 840680 - DNA, 607 bp, Homo sapiens
tctcattcagttgggtttccttgtatttgccacattagtgtttaccctgttcctaatggcaaaatattctgtcatctccttgccttttataaagtttaatatactttctcattttaatctgtccccacagatctctagtcatcactgtttttatttgaatgtctctcatccctctcaactcttttactgcccaatttctgtgattcctgaagacttcaacaatcaatactctctttttttgtttgttttgtttttttttttgagacagagtctcactctgtcacccaggcttggagtgcagtggcgccatctcaactcactgcaacctccgtctcctgggctcaagcgattctcgtgcctcagcctccccaagtagctgggactacagacatgcgccaccaagcccagctattttttagatttttagtagagacagggttttaccgtgttggccaggctggtctcgaactcccaacctcaggtgatctgcctgcctcaacctcccaatcaatactctttctagaataagtatcaccacttttgttyctcaccttttctcctttcttggttctcttcctataaatcccatagtttcagaccttttaaa

SEQ ID NO: 840681 - DNA, 492 bp, Homo sapiens
tatttatttattttatttttatttttttgagatgaagtcttgctgtgtcacccaggctggagtacagtggcacagttttggctgactgcaacctctgcctcctgggctcaagtgattctcttgcctcagcctcctgagtagctgggattacaggtgcacaccaccacgcctggctaattttttttgtattttttatagagatggaatttcgccatgttggccagagtggtctcgaactcctgacctcaggtgatccacctgcctcagcctcccaaagtgctgggattccaggcatgagcactgcgcccagcttattttcctgatttttaagtcaggaattaaaatggaagtacatgcacaatgactttatttaaaagcggttcataagctgatagggacatacaaaaatcaatamgtcttttgttcttcaaaggtggagtaaccttactgagagctgcagccaaaaaccacgctcgagtgacagtggtgtgt

SEQ ID NO: 840682 - DNA, 625 bp, Homo sapiens
atttttagaattttcagtttttctgctctgtttttttccccatctttgtggttttatctacctttggtcttcgatgatggtgatgtacagatggggttttggtgtggatgtcctttctgtttgttagttttccttctaacagttagcaccctcagctgcagatctgttggagtttgccagaggtccactccagaccctgtttgcctgggtatcagcagcggaggctgcagaacagcggatattggtgaacagcaaatgttgctgcctgatcattcctctggaagtttgtctcagaggagtacccagccatgtgaggtgtcagtcctccccccactggggggtgcctcccagttaggctactcaagggtcagggacccacttgagaaggcagtctgtccattctcagatctcaagctgcatgctgggagaaccactactctcttcaaagctgtcagacagggacaaataagtctgcagaggtttctgctgccttttgtttggttatgccctgccccctgaggtggagtctacagatgcaggcagkcctccttgagctgcagtgggctccacccagtttgagcttcctggctgctttgtttacctactcaagcctcggcaatggtgg

SEQ ID NO: 840683 - DNA, 459 bp, Homo sapiens
ctcaaaagaaaaagaagaaaatgatggaagataatagttcattggaaaaaatctaagtgatattaaagttatatcttctggatctcaagaataaagttataacctcatggcttttcagtgacactttattgtaaatgtaggaattaataagccctgtcaaataggtgtctttatgtgttgggggtgatcagacccaacaccaggctgtgtgggctacaaagtctggcggagtcaaaggaatgagaaaagacaagttaagagtgcataaagtgggtccagggggccaacactagattggagtctgtgaagtccccaaactctgggagccaacactatttattggtgatcaaacaaaraagcaggtggtgaggatgtgagggtaaacaggtgagggcgtgaggacatggagggtagaaaggtagtggtgcatcaagcgtagctgtgatggtttagcatttt

SEQ ID NO: 840684 - DNA, 508 bp, Homo sapiens
acagtctctttttcccatagttccagcagactacaaagcccttgggttttaacactgaccccccaagccttgtgatgggaaggagagctgtagctcatgttgtcgccaggctcccataggtatgatttcgtgctggagaggtgtttaagcaaaagtctgacatgatcaaagtggtacacaaaattaatcacgtcccgtcccagaatggatgagggtggcagaggcaacatggaaaaacaggtctggagtctggttgtctgggaaggcaggctccattatcaggctcacaattctgctgaacacaactaacaatgaatacattgaaaaaaaatttctgaatggctgggcacggtggctcacacctgtaatcccagctactagggaggctgaggcacaagaattgcttgaatccatgaaacagaggtttcagtgagctgagactgtggcactgcaccccagcgtgggtgacaaagtgagactctgactcmagaaaaaaaaaagtctgaaa

SEQ ID NO: 840685 - DNA, 688 bp, Homo sapiens
attgggattctgaaaggttatttgcaggagcaatccaacgggtaggttttaatctcaratcctaaataagcttatgactgaagccagctcctcttgcccagtgctgctttcaactgttagaataagctggggaggcacttaatgtgtttgttgcaataatcttcttagggaaaagcccttagaaccaatattccaggcaaatccagcagacaaaggttacctggttgtttcaaagcccacccacatttcccattctcccagcttccacacagaaaggttagattcttctctcaatagtcccatttatgctcacagtgacctggcacatggcttttgttcaccaaagaaaagcctttcctttcaaggacttaagtcttctgcaataagagttaattctttaagtttaacaaagttctcccaatacaagtagtccccacttatctgcagtttccgtcacccatagccaaccaagttctgaaaatatcaaatggaaaattgcagaaataaacaattcgcaagttttaaactgcatgccattctgggtagtgtcatgaaatttctcactgtccaatcccatcctgcccaggatgtgaatcctccctttgtccagcagatccacgccgtaggcgctacctactcattagtcacctttagctgtctcagttatcagatcaactgtcaccatatt

SEQ ID NO: 840686 - DNA, 463 bp, Homo sapiens
atgggctggctgcagctataacacacaccagacactctcatcacctccacgctttgtgcttgtgcattcgtgccagtgmtatccattctgagcagctgtgactgtgcccacattgaagctgtgtgcctgggtcagtgctgtggtgcacacgttgttgcttggtgtgtatggatttgaatctgcagatccaattgtttgtgagtactcccaaggtctacagcacatagctccgtgcactcattctgaagcttggtgttcaccagtcactgagctgtgcctgagccagcacactgctcagtcccacccgtctgccagtcttgctgagaggtgaggccagctagacttcctgggtggagtggggacttggagaaattttcttacaagaggattgtaaaatgcaccaatcagcactctgtaaaaatgtaccaatcagcactctgtagctagcaaaaggattgtaaaa

SEQ ID NO: 840687 - DNA, 463 bp, Homo sapiens
atgggctggctgcagctataacacacaccagacactctcatcacctccacgctttgtgcttgtgcattcgtgccagtgctatccattctgagcagctgtgactgtgcccacattgaagctgtgtgcctgggtcagtgctgtggtgcacacgttgttgcttggtgtgtatggatttgaatctgcagatccaattgtttgtgagtactcccaaggtctacagcacatagctccgtgcactcattctgaagcttggtgttcaccagtcactgagctgtgcctgagccagcacactgctcagtcccacccgtctgccagtcttgctgagaggtgaggccagctagacttcctgggtggagtggggacttggagaaattttcttacaagagrattgtaaaatgcaccaatcagcactctgtaaaaatgtaccaatcagcactctgtagctagcaaaaggattgtaaaa

SEQ ID NO: 840688 - DNA, 575 bp, Homo sapiens
taaatgatttgggacagacggctgcagtgatcagcctagatggtaaatgagtcatgagaaygcacattaggtggcagacaaccatcagttcagggtgggcttccttccttccttccttcctacctggcattctttctctattctccctagtggccctttaaaaatgcataagcatttagcacaaacatcattacctggtttacctccagagacacccgatgacttcttgatttccgactttagcttagatgccagaataaatctcctaaaccattcctctttttctcggccagttctcccaaagagatagagtatctgatctcgctggctagatcttgttccctcctgagggcggggtggcttcttagggtcctcacttccctcagctggcggcttctcttctgaagtctccttatcagtctgagctttagacataaagtcatcttgctgaccaagctcgatacaaatggggtactttttattccagattcgctttcgagccaaagttttaggtacaagataaatctacagagaaagaaaaatgatgatttatatattaaagattggctacacta

SEQ ID NO: 840689 - DNA, 536 bp, Homo sapiens
tctgcaaaaagagagattcaaaactgctcaatcaaaagatgggttcgactctgtgagttgaatgcacacctcacaaaaaagtttcacagaatgcttctgtgtagtttttatttgaagatatttgcttttccacagtaggcctcagaacgttacaaatatcaacttgcagattctgcaaaaagagagattcaaaactgctcaatcaaaagataggctcaactctgtgtgttgaatgcacacataataaaggagtttctcagaataattctgtgtagtttttatattaagatatatcttttccaaaaataggcctcaatgccctccaaatagctactatgagtttctacaaaaagagtgtatcgaaactgctcagtcaaaagaaactttaaactctttttgatcaatgcactcatcaccaaggcatttctctgaatgcttctgtgtagtttttatttgaagawatttccttttcaaccatagggcacaaagggctccaaatatccacttgtatagtctacaaaaagagagattgaaaa

SEQ ID NO: 840690 - DNA, 491 bp, Homo sapiens
aacattctggccacacggaacagggaagaggggcccaccgatgtcattgagcccttggtgcccactgtggctcagtgaaggtgacatcacacgatgtaggtgaactctgagggagatggcagctgtggcgggccttcatgggcttggcgggcctcagaaactttagcacagacactccactgggaactggactggaggaaactgccaggtaccacatggcagctgaatgggctaaaacagaagaatattgaaatagtgagagagtgggcttttatgagagactggaggttctcccaacatgcacagtggagatgaaggctgagacgggcagacaagatgacgttagaacaggaccagatcatattgggccttgtcagctccaggctacaaatgcacatgtactgtggacrtgggggagcagcctcaacgctgcctcagggggtaagaggctcctggacaaggtagaaaggggccagggaaagccggcctgg

SEQ ID NO: 840691 - DNA, 606 bp, Homo sapiens
gatgcagtgagcttaagtattttcaagagcttatcaatcagcctttgttcatccccgagtggatgtgaggtggtattgtggtggacctttactggacattctgccaaataactagagtggcacttgtgctttaatccaattggctatccctttcatcctggcatttcatcaaccagagggaaggaaaaataagacatcgtaaagcgagagaagccccttataggtctttcaactctcatgtctatttagacacaattagagtcccacggggaataccagatcaatttaaagcccaaaatcaaatagctgcaggatttgagtctatatttttgtgggtgaaaattaataaaaatatagattagataaactacatctattacaaccagcagcaatttattaactacactagagatgctgttaaaggaatagctgaacaattaagggctactagccagatagcttgggaaaataggatagccttagacatgacattagcagaaagaggagrcgtttgcgttatgattaaaactcaatgttccaccttcatcccaaacaacaccgcccttaatggaagtataacaaaggcattgcaagatctgactgctc

SEQ ID NO: 840692 - DNA, 626 bp, Homo sapiens
gcccaaagtgcatatgcccactgagatccagtatgctcaaggcacttgtgtgggatgggaggagcactaaattaggagtcatcagaccaactgacaaggctgctcctaacctgttgagttggctgggtggggcagttgtcctctgtgggcctctgcttccttctcaagaagggagaagggcaggagaagaactgaaaaccatcactgctggcttgattcagtcaactttaatcatgtgcccatcaaggacatggcaccaagctttaattcaagatcataaagcaattttgaacccctacgctatcactgtacaagaagaaaagctgcaaaagatgagctgatgcaaatacatctggcctgacaatcaagagtcctgggttctaatcctggctcctttttctatctggctatgtgagttttttttgcttcaattttctcatctgtaaaatgttgttggcatggaaaaatgatttctaaccgagactccatggayatcttgggttcatgagtgggatctgaggtgtccacgaagtcctcaaaatgtatgaaaatttttgtggcataggcatatttctagagaggccacctagaactttaatcacatgtgtaaaagacttgcagtccaa

SEQ ID NO: 840693 - DNA, 474 bp, Homo sapiens
tctccttaggctaaagggggaaagagaaaaagaaaacatgcagccaaaactcagctcaagctggtcacagtggctcatgcctgtaatcgcagcactttgagaggccacggcaggcagatggcttgagctcatgagtttaagaccagcctgggaaacatggtgaaaccctgtctctactaaaaatacaaaaattagccagcagtgatggcatatgcctgtaatcccagctactcaggaggctgaggcaggagaattgcttgaacccccgagggggaggttgcagtgacttgagatggcgccactgcactctagccggggcaacagaatgagactctgtctcagaaaaagaaaaaacaaaaacaaaaaacctcagcttgatcytaccttctcaaaactacctttcattatagtttcagtaatattcagtagagtggacagcatcctctaacaacattgtgcctatgaagcacctca

SEQ ID NO: 840694 - DNA, 630 bp, Homo sapiens
tttatatatgtaatatgtaatgcgtacaggcatacatcatttcattgtgcttcacagatattggggtttttacaaatttaaagtttgtggcaactacatcaagcaagtctatcagcaccatttttccaagagtatgtgcctactttgtgtttctacaccatatttttggaattctcacaacattgcaaactttttcattattattatatctgttatgatgatctgtgatcagtgttctttgatgttatcattgtaattgttttgtataggtgcaccacaaattacacctgtagaaaatggttcacttaatccataaatatgtgtgtcctaatgctccatctactgacaattctcctatctctctccctgtcttcaggcacccctattccctaagacataacaacattcaaatcaggccaatttatagccctacaatggcttctaagtgttcatgtgaaagagttgcatgtttctcactttaaatcaaaagctagggatgattaagctcagtaaggaaggcacgttgaaagccaggaggctgasagtgaagtctcttgcgccaaacagccacattgtgaatgcaaaggaaaagtttttgaaggaaattacaagtcctactccagtgaacac

SEQ ID NO: 840695 - DNA, 546 bp, Homo sapiens
agccactacagaaaacagtatggtggttcaacaaataattaaaaatagaattatcatatgatccagctattccacgtctgggtaatacccaaaagtgaaagtgtccagctgtgtcaattgcaattgatggtcaagaaagatgagtaccaagaactgaccattgaatgtagcattgtggagggtattggtgaccatggccaagacagtggagtgaagcaggcagacagtcagtgttgatgcaagtataaattggcgtgactattctaaaatgcaatgtggcaacatgaaacaagactcttgcaattgaaagcaaggtctcaaagagagatacgttcacccagtgctcatagcagcattatttacaatagccaaaaggtgaaagcaacccaagtgtctatcaatgaatgaatggataaacmaaatgtggtatacactacaatggaatattattccgccttaggaaggaaggaaattctgacacatgctacatggatgaaccttgaagacattatgcaaagtgaaatatgccagtcataaagaaaaaaa

SEQ ID NO: 840696 - DNA, 612 bp, Homo sapiens
ttaagtgctaaaggtggctttcactatgatatttattattggataatgaaaaatggaacagagagccttcaaaactccaggcaatggagtgaaccatatcttttctaagcttttaataataggaccacaattttcttcctagaaattacacagatctccagtgtcccttttgagattccctcttggatgcataaattttcttaaaaattttacttatttgtaaccaaaccccctatcagttgaaggaaagtcagttggtcaaatatatatatacatatctgcctcctccattcaactgaaactttttaggacaaccttgaacttcccatgtgaccaagagtcccccaattttcctggccttgcccaatacagacagctattagcacacactgggaatttactccatgtcactgtttccaatgctgagtccccactgggtcctatgttaggttgctattttaccagctaatatgcttttgtgycatttattgctctgtatgtctgtgactgcatcagactatgatgtctctgagaacagtaattagcctgatttatcttttttatctctggcatccagcacaatgtctggtacattgtagatgttaatagata

SEQ ID NO: 840697 - DNA, 616 bp, Homo sapiens
aagatatgtctacccagaacctcagaatgtgaccttatttggaataagggtcactgcagatacaatyaagataaggatcttgagattaaaacatcctgagtgagagtgggttctaaatccaatgattggcatcttccttctaagagaagggagaagggaatttgacacacagaggggaaggctatgtgcagaggagagatggaaggaatgtttctacaaaccaaggcatgccaagggttgctcgaggctgggagagaggcaaggagtgaattctccctctgagcctctggaaagacccaaccccactaacaccttaattttagacttctggcctctaacaatgtgagaccttcaatttctgttgtttcaagtcaccaagtctgtggcaatttgtcatggcagccctaaaaaataagtatactcagtttcctttaaggtcctgatgccccagactgggcaaggactgaggccccagagaggatgggcctatggaggagcaggagaagcctggagttgcagggcctcctggactcacctcagatttgaatgtcagctcgcctgcagggcagcaactggagaagggcggatgggtccttctcccctggaggccagtttg

SEQ ID NO: 840698 - DNA, 462 bp, Homo sapiens
gcataacttcacatccttgttgttgaagcattccattctctggccacagacggctctgacttcctcattgtcaacgactcagcttccattcacttcaccaatccagtcctgttgtcacctcctataccttkttcctccccatcacttgggatgacccaacctgcaaaatctatatgctcagaagtctagctctgcaacccttttgggtcacacattcatgggcctgagtcttagagtcagagaagtccacagtaatctgacttttctgaattgcagttactcttctgcaaagtgagagagtactaaatgagaccctacatgtaaagctgttagcatgatgcctggtgcataaataccaagggttacaatgagagctactgttatcaagtctgtgatggttgatttcatgtgttaacctgacaggactacgggatgcccacatatctggctaaacattatctc

SEQ ID NO: 840699 - DNA, 672 bp, Homo sapiens
ggaaacccacttcccgtctctaccatagacaccaggaggccctcaatgtgcctccaggagaagctgcgctaggcacttgrtgaagaggtgggaagccgggaaagagagggatgaagtaaaaacatctgggaggtcagacaaatggccgtgcagtttcctaattccatcatgcttctccttccccaagctactcctgcacacgcatagcagctcctgctgcttccaatgccattctttcccctctttggtaactcttatctttccttttgtttttgggttggaggacatggcctccaggaatttctccgtcctctatcaagtctagggtagacaccgcctgtgttcccacacccacccacatttcgccagttggcttggctgcctctctcacctcgggaagcaagaagacatcagggaccgtgtcttgcccccagccagggcttatcccagaatgcgacacttaataaatgttggcttttttggtgggtgggggcagggataacagaagttggaattttctgacgtgaattccatctctagaaacctacagatcattcagatatggaacttgattctctcaattttgatcttgatggacgtgaaagggaaaacaaccttacaggatccctctgtatctttccatttagctgttctagatgcagagatagaggc

SEQ ID NO: 840700 - DNA, 556 bp, Homo sapiens
agcatgaacctcacacagttgccatgaagattaaatgagatcatatatgtaaagctcttagcaaagtgcctggcacatggtctaaacattcagcaatgggtgtcttcactcttacttraattactgccatagaactgaaacagagtcttagagatcatctacagttgacccttggccaacacaagggccaggagtgctgacccctgcccccacacagttgaaaatccacatataacttttgactccctcaaaacttaacacccttaaaacttaactgatagactacaattggttggaagccttactagtaacataaacaacacatattttgtatggcatatgtatcatatactgtattcttacaataaagtaagctagagaaaagaaaatgttaagaaaatcataaggagaagaaaacacattaaatattcattaagtggaagtggatcatcaaaaaggtctccatcctcaagtcttcatgctgagtaggctgaagaggaggaggaaaaggaggtcttgctgtctcaggggtattttatggaagtaaatgataaaa

SEQ ID NO: 840701 - DNA, 674 bp, Homo sapiens
tgatgattaaataatgacatgtatataaagctacttactcagtacctaacacattgtaaacacttaagaaatagtagccattattgttatgggtttttttttacagatattaacaatctagtggagttsaattgttgcaggactatgttttcagtgcatcacttcaccatctctgctgtgtgtaagcaaaaaagcagaaatgtaaaccttatgaattcttgaaaacaatcgcttactattcccctctgaaagatgtacaccctcatacccttctctacattttctcagctcctcaccattctcacatactctcccctcactcgctgcacagctcctaaaaagagggtggaggtggggttcctgagctcttcttctggcactgtctattcctgacaagtttcttttatttcctgctgactattgggtggatcctcacgggtgtgctcctgagggtcaactaagagcagagacgctgcttttccaagatccaacagtgaaaaccatgggcatccagcagaggtacatgcaaaactctcatctcacaccctaaacttttatgcaggtgtggcatttgagattcaccagggaagctgcataattacttagaaagagtaccatctgattgttcctttctctgaaaagtgtaatctctcctaataacatcacccaactga

SEQ ID NO: 840702 - DNA, 584 bp, Homo sapiens
gttggtttcatggagactttttttctcttgttgactccccagattgcattttgggtgtcagctctcatcagcactacctggggctgtccccrgcctggattcagtctttacagatacctcgtgatattgaggggctcatcctcacatgcagcaccaaagtgaagttctttagacacagcagtttgaccatgaggatgagattgatgcagtttcaaatgttctgaactgggagtttgggaagtctgaattctgatcaaaactgtgctacagattacctatgcactgggccaaaacacgtgctctccagaaagcatttccctcaactgcaaataacagatcgctagtgtctcttctaattccaatgactttagattggctgtataaatacctagagctgagagcaagaggaatggaactttgtgggcacaggtgtcagggtcatttgtgttgtacaagctcacgtctctgtcaccaagaaggagaggcccagcccctcagcccaatgatatagcctttgcaacccagaaactgcttaagaagcatctaggtgcagcctgctgatgttgcccatgagaatggaatgg

SEQ ID NO: 840703 - DNA, 629 bp, Homo sapiens
gcagccatagtacctccagttcctatagaattttattccctgagtaacttaaaagacaacatgggccaggcacggcggctcacgcctgtaatcccagcactttgggaggccgaggtgggcagatcacctgaggtcgggagtccgagaccaccctgaccaacatggagaaaccccgtctctactaaaaatacaaaattagccaggcgtggtggtgcatgcctgtaatcctagctactcgggaggctgaggtgggagaatcgtttgaacttgggaggcagaggttgcagtgagctgagatcatgccctgcactccagcctgggcaaccagagtgaaactccatcaaaaaaaaaaaaaaaaaaaaaaaaaaaggctcataaagcaatccaaatgatgaggaataagcttttcagagccgtacccacattagatggtatgctttcccctggagagaatgaagtccagagatggcttcttggtgggtttctatttccttaaaacacttcttctgccgggagcagatgactgtggtgcwctctctcatacctcttggcatttccctttccagtattaagtactaagaaacagagaaaaactttttaaaattgcatttctcctcttctgctcccct

SEQ ID NO: 840704 - DNA, 495 bp, Homo sapiens
ctgtctccagcatggcagaggcagaagaaaatctgcatatcagtaaatccacatagttaaaatccatgttgttcatgtgttaaccatataataaaayacattaaaaagaaactaagttgtcaatgaaagactcaggacaattgtcctctctttatgactatacacagaaccttttattcaagaacgactaattttaaaaatttaactgcaatagattttctaatatttttgcaatataaaaggagaaaatcaaaccaaattgataggattgaaatatgtattgtgcagtttctagaaacctaaaaatgtccacattataaacccgaaattatttggcatacaaaggattaggaaaatattaactcacatgtgataagagagcagataccaatattaagagagcacagatattggaattacctagcatgcaatcatgaaaattcttgaaacaaatggaaacacagtcatccgttgaaatccctaagaaattggtgc

SEQ ID NO: 840705 - DNA, 499 bp, Homo sapiens
aatgcttcctcttgctggtgaagctgcaytgcaggatcttgtccatcttcacatgcctttgttggcatagctacacctggactccgcatggccgtctccaagtggtgatgatctctggagaacgaagtgggttcatgtgaaatagtgagttctaaatccatgttctccttccacattggtcattcccatgggaggtttcaccaagatttcctctcaaaattcactagaaaaatacagcaacgtggcctcatctgtactaccgtgggaagaaatgtgttgatggttggcattcctaccctagtttcagcaattatgcaagctttttcctatttctgattttctttcttcatttctgagcctgagtgggattaaaaaagagtttaagtacatgcaccaaatgtaatctctacttactgaacatcagctttccctgtgatcccacctccatgacgctcccctcagcccaacagtcaggatccttgatcaccctgccctggaa

SEQ ID NO: 840706 - DNA, 526 bp, Homo sapiens
gcaaaagatgtaaaagaatgaggtcactgtgtttaaatattgtaccttatgtgagttcaaaaaaaaacgtagatgtttgaaaaacacagctaacctttgaaaagaaaaaaatgccacattcactttagggaatgggcaaacttaactaataaaaatttatagccctggaatgtttgcaaaaaaaaaaaaatctctcccacttgaaatgtcagaatgatctcagatctcctgttaagcaatttgttaaactttaaatggtaataaatattagatttaataagtggaaaattctcaagtaagaataaggccactgaagtacatttgaaagacgtatcttttaaaatttcaaacatctgtttgtttgttgattaaattatttattcatccttttaatcactccttcagcaaattggatggctcctaggtgccacgcattgcaagcattgaactagacttyactaacactaaaacgaaagaaataatgtcccttttctcaaggccctcacaatcttgaatgtcagaccca

SEQ ID NO: 840707 - DNA, 628 bp, Homo sapiens
atctgagagactgaaagataaaattggctatctttggctttgagaataaaccaggatgagtcatcagccagagaatgccaagggatgacctctagaaggtaagaacaaacactgggcgacagcaagcaargaaacagggtcctcagccctgcaacttcaagaaacaaaattcttacaacaacaacctgaacgagcctggaagtggattctcccctagagcctccaggcaaaaaagcccaactgccatcttgattttagccttgtacctggaacagagaaaccagatgaggctattggatttctgacctagagacttgtgagatacgaaatttttggtggtttttagttttgttttaaaacagtaagtttgtggtaagttgtgacaataacaatagaaaactaatacaaagtcaacattactaatttttccttttgcctcaggctcaaagatggtttggtactatactttaaatctgtcttaactgggggtttaaatttgagatttattatgtatacatggtatttcaaaccagggctatatatgactactaaggagtgagtgaatgtagaacaaagaaaagctctaaggactgaactttacactatactaaaatgtaataattcagca

SEQ ID NO: 840708 - DNA, 504 bp, Homo sapiens
taaaattaaatgtttactctgcatatgcaaagctttccagtgacttccagaaataacatacttgctcgcaatatgtgactctggtaatgaaaataagtttttaaaataatatcttcctataagtsagattctcccaatacttgagtttaacactctgcaggcaaaacttttcgaaacttcagggtcagtttattttgatgactaaggaactaacccttctataagaacggaattattccagaagtgtaaaacagatgtacttccaaatagccaacatagtaaagaaataagcacataaatgtcagggagattaccaaattctagccatagcaatgtgattcttgatgttaactagtttatagaaaaatgaactcagtttattttgtgctaaatagtctcctaatctttgtttaaaatcattaaccaattttagatttaaaaatccctatagagctattcctgccctccctaccactcttcagctgtgcatgatgtataaatgct

SEQ ID NO: 840709 - DNA, 553 bp, Homo sapiens
aatcatagaggtgtttactacaagggataccagagatcatcatgttcagtgattcccattcttggttccatatgaaaatcacccgaggcactttttaaaagtgctgatgcatagatcctactcccagagattcttatttaactgaccttaggatgcagtatttaaaagttttaatagccttttaaaaaagtttttcaggtaattctattgcacccccttctctccttgcacaggcctggcacataactagttttcaatgaatatgttataaatgcatgactgaatagagataaatatgagggaacacattatttccacatatggaattttatagagatggaataaaacaaagagccagaaacaaccattacattttttgaattttgaaaatttctgaaattccagaaacttgccattttcttcctaaaatgtcaaatctcctcatcatcactctaagtctctttttcccagaatcctcaactaaaaccaccaggcaggtgtaagatasagacaaagagggatggctttgcctgtgaagacttttaaagacaat

SEQ ID NO: 840710 - DNA, 448 bp, Homo sapiens
tcctttgtggttggtaaactcttgtatgccaagtgctggtgaggtgcctgctctcacacaacaggatcctgcattaaactagagactctgaaatcttagtggacataaatgtgatgcagaaagcttgctgacatttagatcacgttgtatccccaaagattctgattcagcagcagaggctagatttccataatctgcactttcacaggcactcaggcgattacagtccaggtgatccatggactacacttggaagaatatcagacccactcaacaaagaggaattaagctgacaaaattagatttcttgtgtgtgttattattttttttyaccagaacatgtagaactgcttttatttttgtatatttttcatttcagataaatttcctgtaagtttgtttgagttcattgtagattctggatattagccttttgtcagatgagtag

SEQ ID NO: 840711 - DNA, 641 bp, Homo sapiens
tctcattacaaactaaaagtaaatsgagttcatcttccttttcacagtatatggctggcaagagtttggtttacatctttccagatcatcttctaggcatcacatgtgtatatacaaaaggttttagaactttttctatgttagtatgtatttgtttgccaaggaaatttgtaaatgattttgagagtgtcattggacattgttcagggaaggaagagaaagtcatgatcttttctcaatttttctgttttgcctttgaaaagcagtaggaagaaatcacaagaaaattctccatgacccaaatacgcagactgtattctcctgaggttaacaaaagcaggtattacctctagcttaggtgattagccttgcttacaggtaaccatgtcatagagttctggccagtgaggaatgtggtcaagaagatgtttacaggcaccacctttcccatgtccagcgttatcttttgcttgaaagggatgtgagggctgcagctacagtgtagcagtgatcatatggccaagaaaggccaagaaaataatggacacattgcacctgctatcacagagccactgaaccaaggtcagcagtctctttatatatatatatgtatatgtatatatatacacacacatatacat

SEQ ID NO: 840712 - DNA, 561 bp, Homo sapiens
gtctgtaattccagcatgttgggaggccaaggagactgatcacttgaggtcaggagttcaagaccagyctggccaacatggtgaaaccccatatatattaaaaatacaagaattagctggactacatgcctgtagtcccagctactcaagaggctaaggcaggagaattgcttgaacccaggaggcaaatgctgcagtaagctgagatcatgccactgaactgcagcctgggtgacagagtaagactctgtctcaaaaaaacaaaacaaaacagcaaaataataataataataataattggccttaaaaaagaggtagagaaagaggaagtttattcaaagggataataacaaagaacttcccaaacctagagaaagatactgatattcaattacaagaaggttatagaacaccaagcagatttaacccaaagaagattacctcaacacatataataatcacattcccaaagatcaaagataaagaaaagatcctaaaggcagcaagagaaaataaacaaataacatacaatggagctccaatgtctggcagcagacttct

SEQ ID NO: 840713 - DNA, 485 bp, Homo sapiens
ccccttcacttggttctgaccctctcctgtctgctgccatgtagactctctctcttgacttctgccatgattgtgaggcctccccagccatgtggaactgtgagtccrttaaacctctttttctttataaattacccagtctcaggtatgcctttatcagccgcctgaaaatggactaatatagtaaattgggaccagtagagtggggtgctgctgtaaatatacccaaaaatgtgggagcaactttagaactgggtaacacacaagggttggaacagtttgtaaggctcagaagaagacagaaaaatgtgggaaagtttagaacttcatagacacttgatgaatggctttgatcaaaatgctgatagcgatatggacaataaagtccaggttgacatggtctcagatggagatgaggaacttgttgacactggagtaaatgtgactcttgttatgttttagcaaagagactggtggcattttgc

SEQ ID NO: 840714 - DNA, 605 bp, Homo sapiens
acacataaagtttaaaagtgtgtgtttgttgtttyttttgctcaacattatgtatatgtaattcctattgctgtaactgtaattcattcacttattgctgttctactgtatgaatataccagtatttaattatctgttctacttttgatgggctattgggtattttccagtttggggcaaaaaaaaatagattcctttttgtgctaagaattaagtactcagaattcaatagcatcttgaaaagtagaaaatgtattgttacctgaaaaaagtcacccaccttttagaagcagaagaaaggaagaaactatcaattatcacataatgtttgatacagaagacaatgaaatgtgtttttcaatagtttttctcttacaaagtatataatctgtgtctcctaattaataaaacaagggtaatcatgttgtcacctattgtagagcattagaccaagattaacaaggtaatattggtaaattgctttgagaatctcagatgaagggcatcaagtaagaaagtgttagctaaatagtgattacaatatactcacacacatgcaaacatatacacacatatatttatgtgtgcatatgttttataataag

SEQ ID NO: 840715 - DNA, 321 bp, Homo sapiens
tttcattctttttaatggctgtatagtattccatggtgtatatgtaccacgttctctttatccagtgtactgttgatgagcatttaggttgattctatgtctttgctattgtgaatgatgctgtgatgaacatatctgtgcctgtgtctttatggtagaatgatgtatatttctttgggtgtatactcaataatggaattgctgtgttgaatggtaattctgctttgagttctttgggaaatcgccaaactgctttgcacaatggctgagctcatttatattaccaccarcagtatataaatgttcccttttctctgcaac

SEQ ID NO: 840716 - DNA, 620 bp, Homo sapiens
cccaacagatagccaacggcattccttctcataaattcttttttattttttttgagaaaggtttcactctrtaacccagtctgaagtgcagtggtgttatctcaactcactgcagccttgacttcctgggctcaagcgatcctccaacctcagcatccttagtatctgggactacacgcgtgcagcaccatgcctggttaatttttgtatttttcgtagagacagggtctcatcatgttgcccaggctggtcttgaacttctgagctcaagcaatccacccacatcagcctcccaaagtgctgaaattgccggcatgaagcaccacgcccagcccataaatttttatttctttcagttctcttgtactctggagctactccagtctcacatattccaaaccttcaaatttctcctcaagtcttggccagagaggcttttctccctctcattcttcctcattgctagctgtttatcatatagagccagtttctcaatgcttatctccttctgcctctttggcacacttatgcaaaggaaatattgcctgtattaaatacacataaacaaaagagtaaagaggaacaaatgataatctttagagtagttaacttctcatgat

SEQ ID NO: 840717 - DNA, 669 bp, Homo sapiens
gatggtgctgctggcagacgatggtatggttggatatttcttctcrttgcccgcttctgccattttcctagtactccctgaaactgtatatgctgcctaaaaatgtgtagtagattctccatactcagaccatctagaccatatttcattgcctacaactgagaacagcgaccttggcagtgagaataataatcctaaatgccagcagaattattctcaaagtaatatattaatgagtaccaaaatgatgctaccacatgctaggtctgctcctttgctttatgggcctagaaacccattattattagttctccaggatggtcaggtttagaaacaaatgcatatacctgaaactgaagctgaaaaaaatgagactgaagtgggcacaaacatgaattaaatggtcaagatgtcagggaaatttctgcctcaattcaacttacatgatcattaagcctaggtcaagaaaactgggactgagtgtgaagacggcaaaaatgaatctcacgggcaccaatatatcaatgtatacaaggatcaaaaatataacaggagccacagagtgagtgcagctttgcagtgtgaaccttctgtctttcacaggatgctctcagcatggggacaaaggtggcaaagcagtctgtgtggggatcagccaccagccctaac

SEQ ID NO: 840718 - DNA, 351 bp, Homo sapiens
ttcaaggaaaagtgagtagcagaacaattaacatggtgttcagaaaacagcaagaaatatgaagatgggaaagcaaggagtgggagttgtggcctgggtaccaagacagtgttttgtaaattccagrtaatcaatgaacctaggcatgaaggaagaagcttcacactctgagggacacagcctggaactcatccattcaacagacacttaccaagtgtcactctttgcatcacagctcccatcctgcttccatcttcatgtctcctccaactgtccagcctttcccttcactcactaagaccatggagattacaataggcccatccatgcaagagaaaatccaaaatgtgc

SEQ ID NO: 840719 - DNA, 514 bp, Homo sapiens
aagtctcatcttacatgttgtcacattagatatgccttccctgtcyacctaatttatagtcatcactgttaattattctctattaacatttaaaaaatgttttgagtggcttccaaaattgatacaaagtctggagaagcaaactcagaaaatagagaggaaccataagaaggtagatgaccagatgacctcagtcttggtcacaccacagaagcagcctagccagaatgttgatgttattcattcctgggtactcatgtcctgctggatagtggtggctgttgtagacagtatatcttctactcctggaatgaatccagcatcctagattcaagtcctgagtacttccatttgactggggaagttactttccaaacaggcttatccaagagcagattttcaaacgtagaaaaggttcttagatgctaggtaagaaaaaaatatataaatgaaaccaaatgtctggtgtaactgcacggtgacttgtgattgcatattcactgatttgtctatc

SEQ ID NO: 840720 - DNA, 562 bp, Homo sapiens
ttttgctgacctccttaaaagttctcaagacatattttgttcaaaattgcagtgttcaagtgccccttagagatctctgtgacattgatttgatggcactgagtttcaataaaaagaaaagagcagaggtagacttcatttcacagccgaatccattagaagatgtttttggaggatttccaaacagaaaagagaacagctgctttctattttctcaaaaaatataatggtggatcccctttctcacaattctgatgcttaactcaccaaattgactgaaataatggcaaaaatggagtagtttattaataattactctctttttctcaactttaccttggttgtgatgtgggataaaaggctttgaagttatcacactagttcagtaaaaaacacacaaaaatgtaaacgttctgttcagaaaaaaatgggttttaatttytagcacagtgagaatcaagtaaattacagaatgctgaagcttaaaaaatataattttaaataaaattggattatattaaagaattgaatagctgaatcgcatgttaaatgattatatcac

SEQ ID NO: 840721 - DNA, 441 bp, Homo sapiens
caggaggatggggtgtgaggatcacttgagcctggaaagtcaaggctgctgtgagccgtgttcatgccacttcactccagactgggcatcagagtgagaccctgcctcaaaaaaaaaaaaaacagytaaatttatttatataaataatgtgaaattgtgaaataaacatagtgttgctaatgtactgagagatactgaaaaaactttttcagaattgttaagatctagataaaaaataaggaatattatgattatctatcaataaacaaacgattacatagagatcatatagattgtgttttggacacacgtaagaatatatattgagagggtgtgagagatctgcatcctatagaaagaatgtaaacctatttcttgtcttcatggaagttttcaaaaaagtacattatgtgactggttacaaaacaaaacaaactttta

SEQ ID NO: 840722 - DNA, 441 bp, Homo sapiens
caggaggatggggtgtgaggatcacttgagcctggaaagtcaaggctgctgtgagccgtgttcatgccacttcactccagactgggcatcagagtgagaccctgcctcaaaaaaaaaaaaaacagttaaatttatttatataaataatgtgaaattgtgaaataaacatagtgttgctaatgtactgagagatactgaaaaaactttttcagaattgttaagatctagataaaaaataaggaatattatgattatctatcaataaacaaacgattacatagagatcatatagattgtgttttggacacacgtaagaatatatattgagagggtgtgagagatctgcatcctatagaaagaatgtaaacctatttcttgtcttcatgsaagttttcaaaaaagtacattatgtgactggttacaaaacaaaacaaactttta

SEQ ID NO: 840723 - DNA, 475 bp, Homo sapiens
tgtttaaagtaaaaatatcctttgaggcaaaatatttggamaaacctttccaatagaattttggggaaattaagacagaaacacgaaagtggcttttcagatattcagagagtattaggtagaagagaaattagtggaaatttctattccctgccttttgctagttactcaggtaaaagccagacctcaaaaatctgaagctgcagtagtgggcaaaatagcattaaaggcagtttttcctgttcctagaaagttgtctcatgcttcagtggccagttggaaagatgttaccttcactcacaaggtaaattaagaccattaatcaatcagaaaacaatgcaggtggcaggatccccagcccaatgaccacaaaatcccaaaagtatactgataaatgttaggttactttataaaggaatatcagcagaaacttggttaacaattattggcacaagtacttagaattaatgatctg

SEQ ID NO: 840724 - DNA, 612 bp, Homo sapiens
tttccaatttgattactactgatgattttcccatgacatctctgaagtctatcaggtaatcattgaggattacaggaactgtggactgggaccttatctctgtattacggtgttgttatttcacaaagtacaatcaaattatgataagcaaaattatttcatgagaaaatcttttatgaggcaactcctttggcaaatgcaagagtgtttgaggacccacaaaccatcacaccctgattcctcccatgacagtagcagcattaactttgggaacagacagaggtttgagattggggaactctgacaaaattttgcattttggcccaacatatacacttattccaaaacttaaggatgtagaattgtgcaatttcttgtgcttccacttactactattttcttgctcacaagagcttttgaatgctaatgccaaactggaagagactagtgaaaagttggacttcttttcactgatttgaatgctccactctcacagatttatcatgacaaggtccaaacggtattaggaaattaatattcttgcagaataagatgaaatcagtgtttytccatgtatcttattgattgtaaaatatattattgtatcttaag

SEQ ID NO: 840725 - DNA, 594 bp, Homo sapiens
tgtgttttgcaaatattctctctcagtctggggctgacctttccttttgacatatctctctgattttcagttctgcttttagccatgagaaagctctgtgttaagggcttatgtaattaccttgtgtacaaccagataatcaaagaatatatccttatttaagggcaatgattagttatatctgtgaccttagctatatctgcaaattccctttgacatgtaatatagcatattcatgtatctgataccattgggtaaaaatcatgggagtcaaaattctgacttccacaaggcttggtgagaaaatatgtggaaaaacctaagatactgtctgacatatagaaggtattcaataaataccaattccccctaatgcagcacccctttatataattagattattcccattagaggttgtaagagtgtttatttttgtttatcacataagaacacacaagtgtgtgtgtgtgtgtgtgtgtatgtgtgtgtgtgtccyaaaactctacctccaagttaatttttcaaatttccttatcttacatgctgaaggagagtttgcaagatttaaatataacattcaattcagaggatttc

SEQ ID NO: 840726 - DNA, 629 bp, Homo sapiens
ccctgaaatgtggcttctcatctacatctcccattatttaaaaaaaaaaaaaaaaaaacaaaaaaacaacaggctgctgggcatggtggctcatgcctgtaatcgtagctctgtgggaggccgagatgggaagatcacttgagtccaggtgtttgagaccaacctgggcaacatagggagacctcgtctctacaaaaactttaaaaattagctgggcatggtagcacttgcctgtagacccagctactctagaggctgaggtggcaggtggtttgagccaggaggttgaggctgcagtgagccatgatctcaccactgtactccagcctacgcaacagagcaaggcctcatctcttaaaaaacaaaacaaaacagtcacttcctgcccatctccatcttactataaagcatttctcagaggcataaagcccccaggtcaccaaacagaaaacattcagaattttaagatacatgtcctgcagcrtgtcactctggggcctggatggcaagttctcttgcagcttaggttgttagcaatattttacctttaacaaaattgaaagaacctaatcatgttgtgagctaataggtcattagaaacagtttttgatgatcatgttgaccatgtg

SEQ ID NO: 840727 - DNA, 581 bp, Homo sapiens
tcaagcctgggcaacacagtgagaccctgtctcaaaaaaaaaaaaaactaataaataaaaaataaaaatagggctgggctcagtggctcatgtctataatcttascactttgggaggccacaacaggaggattgcttgagcccaggagttcaagaccagcctgggcaacatggtgagatcttgtctctactaaaaataaaaaatgagccaggtgtgatggtgcacacctgtggtcccagctacttcggaggctgaggtgggaggattgcttgaccgcaggaagtcaaagctgcagtgagccatgtcacaccactgcactccagcctggatgacagcacaaaaccccgtctcaaaaaaaaaaaaaaaaaaaaaaaaaaaaaatatatatatatatatatatatatatatggccaggcacagtggctcacacgtgtaatcccggcactttgggtgactgaggcaggcttatgacttgaggtcaggagcttgagaccagcctggccaacatggtgaaaccccgtatctactgaaaatacaaaaattagcctggcatgatagtatatgcctgtaatcccagctac

SEQ ID NO: 840728 - DNA, 581 bp, Homo sapiens
tcaagcctgggcaacacagtgagaccctgtctcaaaaaaaaaaaaaactaataaataaaaaataaaaatagggctgggctcagtggctcatgtctataatcttaccactttgggaggccacaacaggaggattgcttgagcccaggagttcaagaccagcctgggcaacatggtgagatcttgtctctactaaaaataaaaaatgagccaggtgtgatggtgcacacctgtggtcccagctacttcggaggctgaggtgggaggattgcttgaccgcaggaagtcaaagctgcagtgagccatgtcacaccactgcactccagcctggatgacagcacaaaaccccgtctcaaaaaaaaaaaaaaaaaaaaaaaaaaaaaatatatatatatatatatatatatatatggccaggcacagtggctcacacgtgtaatcccggcacttygggtgactgaggcaggcttatgacttgaggtcaggagcttgagaccagcctggccaacatggtgaaaccccgtatctactgaaaatacaaaaattagcctggcatgatagtatatgcctgtaatcccagctac

SEQ ID NO: 840729 - DNA, 581 bp, Homo sapiens
tcaagcctgggcaacacagtgagaccctgtctcaaaaaaaaaaaaaactaataaataaaaaataaaaatagggctgggctcagtggctcatgtctataatcttaccactttgggaggccacaacaggaggattgcttgagcccaggagttcaagaccagcctgggcaacatggtgagatcttgtctctactaaaaataaaaaatgagccaggtgtgatggtgcacacctgtggtcccagctacttcggaggctgaggtgggaggattgcttgaccgcaggaagtcaaagctgcagtgagccatgtcacaccactgcactccagcctggatgacagcacaaaaccccgtctcaaaaaaaaaaaaaaaaaaaaaaaaaaaaaatatatatatatatatatatatatatatggccaggcacagtggctcacacgtgtaatcccggcactttgggtgrctgaggcaggcttatgacttgaggtcaggagcttgagaccagcctggccaacatggtgaaaccccgtatctactgaaaatacaaaaattagcctggcatgatagtatatgcctgtaatcccagctac

SEQ ID NO: 840730 - DNA, 543 bp, Homo sapiens
tcgctctgtcacccaggctggagtgcagtggtgtgatctcggctcaccccaacttctgcctcccaggctcaagcgattctcctgcctcagcctcccragtagctcagattacagaggcgcgccaccatgcctggctaatttttgtatttttagtagagatgggtttcaccatgttggccaggctggtcacgaactcccaacctcaggtgatctacacaccttggcctcccaaagtgctgggattacaggcatgagccactgtgcccagccggtagttaaactttaaatatgaattgtctttgatctattatacctcacacatgcaaaaagacatatggataaggttgtccagtgcagcatcactagtagcaaaaaaaaaaaaaaaagtgcaatatggcatatccacccaatacatttttggatgactgttaaaagtgctgatgtagaaatgtctgctatatacagttctgtgttttaaaagttatggagcaaatatataatctcatttatgtctttttttttgttttgtttttgaaaggatga

SEQ ID NO: 840731 - DNA, 543 bp, Homo sapiens
tcgctctgtcacccaggctggagtgcagtggtgtgatctcggctcaccccaacttctgcctcccaggctcaagcgattctcctgcctcagcctcccgagtagctcagattacagaggcgcgccaccatgcctggctaatttttgtatttttagtagagatgggtttcaccatgttggccaggctggtcacgaactcccaacctcaggtgatctacacaccttggcctcccaaagtgctgggattacaggcatgagccactgtgcccagccggtagttaaactttaaatatgaattgtctttgatctattatacctcacacatgcaaaaagacatatggataaggttgtccagtgcagcatcactagtagcaaaaaaaaaaaaaaaagtgcaatatggcatatccacccaatacatttytggatgactgttaaaagtgctgatgtagaaatgtctgctatatacagttctgtgttttaaaagttatggagcaaatatataatctcatttatgtctttttttttgttttgtttttgaaaggatga

SEQ ID NO: 840732 - DNA, 602 bp, Homo sapiens
ctatagcacatgctaattattaagcttattgtaattttctaagtaagaaagagtgcaatatatttagagatattttcatagttaaaatttttaccttttggtgagaatttggtaacacagcaatagaactgtgaatacctcttttgtatctggccattgttacaatgttttatggaaagattaatgctgcctgtactttggcagttaccttccttgcagtttcatccttgtgaaacatctttctgatgtcaactgattgtagttttcggtgtgtggttcctgtgtttgaggttcctggaaatcatgatcattctcatgactactgccttcattctattatctggacctctagtgaaccatatatcatctatttagaaatgctggtggttccataaggacttctaatacctctaactgaaagcattctgaattatatagagaattttgggccaggagtgagatgctgtagacaaaggccctaaaatgtaaarcaagctgatttaaggttttctgtggagtgtctcctttaactttgaactgcagttgtctttacaaatgtgctgtaacttatagcacatctcaattccttaatcagataaaat

SEQ ID NO: 840733 - DNA, 474 bp, Homo sapiens
agtgattttcttgtatgtcaggaactacgcaaacacaaaaacactacaaaaacaaaaagaaaaaygagtaatcattatccaggaaaatatggctctaggccatgcagactggctttgtgctgagttctttgaagctggcgcaaagtgtgtgttcactcttgcactgagtgaagttcaagttcactcttgcacagagcttgcactgaggggaaggatcagccaaggtaaaagtgtagggtcttcttatgacatttgtcagcatgtggcttaacctatgcatacgtgtgactttctagactctcccatgtacgtgaatgattttgaatgtcttagttttccaaatactcttctccaacttttcttcctgtgctgaaggtgatctactatatgtgtaaactctaatttttgccctaagcatctgttgtttgttaggtctccttgcagagtttctcaataatgtccattccttatctg

SEQ ID NO: 840734 - DNA, 474 bp, Homo sapiens
agtgattttcttgtatgtcaggaactacgcaaacacaaaaacactacaaaaacaaaaagaaaaacgagtaatcattatccaggaaaatatgkctctaggccatgcagactggctttgtgctgagttctttgaagctggcgcaaagtgtgtgttcactcttgcactgagtgaagttcaagttcactcttgcacagagcttgcactgaggggaaggatcagccaaggtaaaagtgtagggtcttcttatgacatttgtcagcatgtggcttaacctatgcatacgtgtgactttctagactctcccatgtacgtgaatgattttgaatgtcttagttttccaaatactcttctccaacttttcttcctgtgctgaaggtgatctactatatgtgtaaactctaatttttgccctaagcatctgttgtttgttaggtctccttgcagagtttctcaataatgtccattccttatctg

SEQ ID NO: 840735 - DNA, 748 bp, Homo sapiens
agtttggaaggagtgaatgagtaaacttgctaaatgagtaaaaactccggtatcaatgtataattttcctatagaaagagagtggattctagctattttacttcccatttctaagctgattacagtgctatttctgccacttagagactcattttacaatggcttagtttctgggttttaggtattttttattgttttattctaaaatgaagatatttgtctaattgaaaatgttatgtgaaacccaaaagatatatgttttaaataaagtgtgaaattgtgtccttggttataatttttaaatggtaggaattggttattaaatgttgccaaggcactgaaccacgtgagcttttttcaaactctaaactttatttataccatctatattatttttatgatatgctaacttagtaaaatatgaggagatacctcaagaaaacacatgtaacaaactcagggagaaaataaggacagtaatggtgtcaatgtcattggaagatattaatttagatttagctctgagctccctgaacttgaagatgggaagagaaattaaaaacagttttaaaattcccactccatctttccttcaacttaaagtccatttcagtatttatagatttcagacttctttaccccaaaggcattttgatctaggccacaagtgtcagacacaacagaaatggcaagaatttaaatttatcctgacaggtttggatcckagctttgaccacaggctatctaa

SEQ ID NO: 840736 - DNA, 604 bp, Homo sapiens
atactatatttttatacaaactactttttgaatttgctacatcaatttttttagtctcctaaaaatatgttcattttttaaaatttttttaaagcaaatgtgctttataatctaacaatgatatttctactaatgaacctttgtggatctgtttgtactctttttctgcttccctttcaaatggtggaatatcatttccttgtgtacttagatgcctttgaatgacaaatatttatttttctttgaaaattatttttgtgcacttttgaggattagttggaagaaaatttgccaaagagaatttgaatttttttgtgagtctactaaaggcaccaccattctgggaccaccttatgttaattcttggcctaaaggtgtttggacgtatgtttggactgcacaattaaacactttttaaattaattgctgtaaatcattaatgattgagtttctttaaatctgtccaatctcaagtcattttcattggcrtttgcagggaatgtgaaatgggactaatttacctctgattcttctttatactgaggatataaattttggtcctagctttagggaggagctcctgtgtgatgccctatcttgggaa

SEQ ID NO: 840737 - DNA, 609 bp, Homo sapiens
aaggtgaaaatacatggtaatctctaaagtcccatagagctacagtagccccctttatcggaggtaaataagttcaaaaaccctcagtggatacctgaaaccatggatagtgttgaactctatatatacaccatgttttttcttatgcacacatacctgtgataaaatttaatttataaatgggcatagtaagagactcacaacaataatgataataaaatagaacaattataacaacatgctataataaatgttatgtgcatgtagtctctgtctctcaaaataccttactgtactgtactcactcttcttgtggtctgtcaatcttacaacctgggtggccagtaagtgaataacagataggtaacatagagtgtggatatgcaggatgaaggaatgattcccgtgctaagcaggactgagtgaaatgacagtgcaaggtttcaaaatgttactcagaacagcagacaatttaaaacttatgagttgtttacttctggaattttccatttagtattttcagactgtggctgacaaagagtaactgaaaccayggaaggtgaaaccatggttaagactgttgtattattatatatataattgttacat

SEQ ID NO: 840738 - DNA, 601 bp, Homo sapiens
aaaataacaatacttttatacggttggtgtgaggattaaacaagtaaatagataagcagttcttagtagagtacctggcatttgaataaaaatsttagcattgaaaaaatgtttttattattattaaaagctggaaaattaaatagatctgttcatggatacctgattcataaatatcacaagaaaaattggtgtctaactttaaaaacatgtttttatggaaaatgattgtaccttttgatacagaattggttagagggtacagaagtttcacccagtgtgcgcattcccattatcttatgaggagtctagatatgccaaatgaatttcagaacaagcaaaaatgttaaggaacattatttaaaagcatttttattgcactgacaatgtatgttaaattgaaagtgtaagtaataaaccatagagaaatggcaaacttctaccaattatattttgttgttgcatgttatagtacaatttatactttgttgtggtctcagattcagaaggagagtaaataaaaagattccttttgtgggggtaaaatgtacctatctttatttcatcgtttatcattttgtgtgagtcttgtccatagata

SEQ ID NO: 840739 - DNA, 572 bp, Homo sapiens
gcctttgagagtcacaatgaagagcaagtattccacgcagaaagggtctcagtgagagtacaaagaatgtctagcaagatgatccacagttacctccagtttytcatatgacgctttcacaggttttttttttttttttttttttttttgagacaggtctcgctctgtcgccaggctggagtgctgtggtgccatttcagctcactgcaacctcttgactccctggttcaagcgattctcctgcctcagcctcctgagtagctgggattacaggcatatgccaccacgcccagctaatttttgtatttttagtagagatggagtttcaccatgttggccaggatggtcttgatctcctgacctcatgatctgcctgcctcggcctcccaaagtgctgggattacaggcgtgagccactgcgcccggcccactttcacagttttttaaaaatctatcctctttgaggatgtttcaataagttccaggaggaaaaagtttgaactcttactaatgactgagggaaatttagttaatagagtgacaaagttgaaagaaacctgagttgaaaaaat

SEQ ID NO: 840740 - DNA, 610 bp, Homo sapiens
atcatcactaaccctgggcacctagacaggatcccatggactcccagtctttcagcacttagaggccctggttggctttcctgtggctgctctgccagacagagctgctgcttcaaatgctggtccccaccatctctctggccatggacgttccagaggatcctgcagcctcctagtccagctccctgctcgtagcttaaggatttcttccacggaggctgccacttcagcatctccacccctcccccaggccccaaggcctctaccaacctagttcttcttccccgtccttgagcctctcctagggtctggctgctttctcatttccaacccctgaacatcctacagctgtccgagacgataaaatctaatcttgctgatagattacacaaatgactcctcacctcctgtgatcaccttctagaggaaaaggtttcccagaaatcagaataaaggcctgtgtaccacactgggaggggaaaaatacctttcattcctcctaaggcatccacagaggtaaaaacaaacacgagctgattctcagtagattattctgctacrtatatcatgtatgcatttacatctcagcctaacaaacaaaaaagaaatg

SEQ ID NO: 840741 - DNA, 541 bp, Homo sapiens
tatattttcactgttttgatagctcactttttatcgctgaataatattccattgtatggatataccacagtttgtttattcattcacaaatagatgctgaaggtcatcttggttacttctaaattctggcaatgatgaataaacctgctataaacattcatgtttatagcacatgtttgtgtggacataagttttctactaatttaggtaaatacttaggagtgtgattgctggatcatgtgttaagactatgtttagctttgtaagaaactgccaaactgtcttccaaagtagttgtaccattttgcattctcactgtcatagtgggtttgtttgtttgtttgtctatctgtctgtcttaaaacagagtcttgctctgttgcccaggcgacagtgcagtgccgtgatctcggctcactgcaamctctgcctcctgggctcagcgattcttgtgcctcagcctcttgagtagctgggattatagatgtgcatcaccacacctggctaattttcgtattttcagtagagatagcatttcacc

SEQ ID NO: 840742 - DNA, 619 bp, Homo sapiens
aaagggctggccgtgtacttcatctaccttggtcctgaaacaaggacagtaataggacctagtagagcctacagctgacccacagtggacatggaatgtaggcaggaagtggacatttgggagttattactgaaacataacctggcctttcctggcttatgtccccttatttccaatcagtggaaatgttcatatacaattagtttgcctttgtgactttaagaaacattacctcttagggccttagtttcaatgtctatgaagtgaagacgataacatagtgataaaaaatatcaaacataaattgattgcttatcatgtgtctggctaagcattttagaaaaattatctcattttatccttataacaacctatgaggttggtattattattatcctcattttatagaccaggaaacagaggcctcgagaggttaggaaacttacccagtgggtactaagagtacttagatactaagaataattactgatagaatrcaaatggcctgacaccagagcccagcctcttaatctccgtgttgcaccaggtcatctctaagacctcatctgtctgggatacaccaagaatctgtgatatcaccatgtggtaacgattgctc

SEQ ID NO: 840743 - DNA, 391 bp, Homo sapiens
tctgaaacctgtcttacctggcctttacagatctcaagrgtctaggtcaaaagatagatggccttggccaggcacggtggctcacgcctgttacccagcactttgggaggccaaggcaggtggatcacctgaggtcaggagttcaagatcagcctggcaaacatggtgaaaccctgtctctaccaaaaatacaaaaatgagccaggtgtggtgtcatacgcctgtaatcccagctgctcaggaggctgaggcaggaaaatcgcttgaacctgggaggcggaggttgcagtgagctgatatcatgccactgcactccagcctgggcaagagagtgagactctatcttaaaaaaaaaaaaagatagatagataaatggccttgaatttctaga

SEQ ID NO: 840744 - DNA, 642 bp, Homo sapiens
tgtaataaaccactacaaaatatagtgayttaacaacatttattttgctcataattctgcaattttgcagactcagcaacttgtctctgttctattaaactagctgtagtggcttaaagagtggaggcttgaatcagttgtgaaatctacagtggcaacatactccccatcttcccttttctctagtggaaccctagtgcttctcttgtagccttaaaaacttttaaaaaaaaatagaatggaggctgaaatcatctgaaatctctcgtattactagcagatgctagctattagcaggaacctaagctagggatgtctgttacaacacttccttgtgaccttgccacatcacctgggccttcttaaacatggtagctgggtttcaaaggagaaataccccaataaagagagagccaagtggaagtcatgttgccttttttgatgaactttaaaatcaccctacgtcactttcattatagtctattcattgagggagtcacaaagtcttgcctgggttcaaggggaagaaaaatagactcaaactctaaatgggagtgtggtaaggttgaggttgcgcatatgagactgaaaatactgtgatggctagttttggaaaatattgtcgctgcagctgtaactcat

SEQ ID NO: 840745 - DNA, 590 bp, Homo sapiens
gcctaggaggagcagatattgagaaaatggcctcgaagctattaaccactagaggaacttgacgcatatggtacaccaagggtaaccataacaacagaccccaaacacagcccaattcccmattagattaacaaaactcaccaaaccaaaggtctagcagaagaaaagacacccttatttctggttttttttgttttgtttagttttgttttgtttttgggatggagtcttgctctgtcgcccaggctggagtgcagcggcacgatctcggcgcactgcaagctccgcctgggttcatgccattctcctgcctcagcctcccgagtagctgggactacaggcacctgccaccacgcctggctaattttttgtatttttagtagggacggggtttcaccgtgttagccagcatggtctcgatctcctgacctcgtgatccgcccacctcggcctcccaaagtgctgggattacaggcatgagccaccgcgcctggccaagacatccttatttctaagtgtgataatatttactatttacctcagtatttatcctaaacaagatgtccagcttcaacaaaatattatgaggc

SEQ ID NO: 840746 - DNA, 628 bp, Homo sapiens
ctatagggagttctgggatgcaggtagtagttaaagccacagataaactgagatcaaataaaggagtgaagaagatgmgaggagggcatttagaatatcaaaaatatggtttttaagaacaaatgtcctcaaataataagaaccatagaaatagaagcactacaggctaacatcttagagaaatgcaccccttttcttcgtagctgaattgactttaaattgtttggaaagactaggtttataaaagaaaattggtcactatggaaacagactattcaatatcaaacaggcagtttgaccacaaaagtggtaattactttagtttttttccttaattatatgttttcatggttttcaataatcatatattctttaggtcagaaatttgaagtcagttaatgatgtggtgagccaaagcaaaaatactagtctatagctatttctcccaggttgcttaccatcagagcaccccagacctagatgtttcctgactttgatactctgcattttatcacagtatacaacttatctaatttatatagccaatctaaatctaaatgaacagagtcacaagaaatgtgtctccatcttttccttcatggccaatccccttaattaagaatgtatg

SEQ ID NO: 840747 - DNA, 607 bp, Homo sapiens
tatgatcatatcaatgtctttcataaactatatttctgtttatttttaaactttaatactattttatgactttttataatacgtgcttaacatttatttttatgtaaaatacgattctgccgcattyttttcaacaacttcacagtaacttctttgcaaggctaagccacatggtagtcaactgttgttcattgatggacatttaagctgtctctagtgttttttttttgttttaataggataatttattttttaagaatcagtttttaaagttatgttaaagatcgaacttttaaatgcatgcaattatatataaacaataatctatattaatttttaaattttctgctggatgcagtggctcatgcctgtaatcccagcgctttgggagtctaaagtgggcggatcttgaggtcaggagttgggaggccagcctggccaacatagtgaaaccctgtctctacttaaaaaaaaaaaaaaaaaaaaaaaaaaacaggctaggtgcggtggctcatgcctgtaatcccagcactttgggaggctgagcagacggatcacaaggtcaggagatcaagaccatcctggccaacatgataaaaccctgtgt

SEQ ID NO: 840748 - DNA, 598 bp, Homo sapiens
tagctgttaaccagaataactagtttagagaggaacataaatgaccttatggagctgaaaaacacaacacgagaacttcacaatgcaaccackagtatcaatagccaaatagaccaagcagagaaaataattttagagcttaaagactatcttgctgaaataagacacgcagacaagattagagaaaaaaagaatgaaagggaatgaacaaaacctccaagaactatgggactatgtaaaaaaaactgaacctatgactgattggggtttctgaaaggggtggggagactggaaccaagttagaaaacacacttcaggacatcatccaaaagaacttccccaacctagcaagacagaccaacattcaaattctggaaatccagagaacagagaaccccagtaatatactccatgagaataccaatcccaagacacataatcatcagattctccgaggcggaaatggaagaaaaagtgttaagggcagccagagagaaaggcctgatcacctacaaaggggagcccatcagactaacagcggatctctcagcagaaaccctataagccagaagagattatgggccaatattcaacattc

SEQ ID NO: 840749 - DNA, 598 bp, Homo sapiens
tagctgttaaccagaataactagtttagagaggaacataaatgaccttatggagctgaaaaacacaacacgagaacttcacaatgcaaccactagtatcaatagycaaatagaccaagcagagaaaataattttagagcttaaagactatcttgctgaaataagacacgcagacaagattagagaaaaaaagaatgaaagggaatgaacaaaacctccaagaactatgggactatgtaaaaaaaactgaacctatgactgattggggtttctgaaaggggtggggagactggaaccaagttagaaaacacacttcaggacatcatccaaaagaacttccccaacctagcaagacagaccaacattcaaattctggaaatccagagaacagagaaccccagtaatatactccatgagaataccaatcccaagacacataatcatcagattctccgaggcggaaatggaagaaaaagtgttaagggcagccagagagaaaggcctgatcacctacaaaggggagcccatcagactaacagcggatctctcagcagaaaccctataagccagaagagattatgggccaatattcaacattc

SEQ ID NO: 840750 - DNA, 471 bp, Homo sapiens
catgatcaagtcagcttcatccctgggatgaaggctggttcaacatacacaaatcaataaatgtaattcatcacataaacagaactaaagacaaaaaccacatgattatctcaatagatgcagaamaggcctccgataaaattcaacactgcttcatgttaaaaactctcaataaactaggtactgatggaacataccctcaaaataataagaactatttatgacaaaccaacagacaagatcatactgaatgggcaaaaactggaagcattcctcttgaaaactggaacaagacaaggatgccctatctcatcactcctattcaacatagtattggaagttctgcccagggcaatcaggcaagaaaaagaaataaagggcattcaaataggaagagaggaagttgaattgtctctcttttgcagatgatgtgatcctatacctagaaaaccccatcgtctcagcctaaaa

SEQ ID NO: 840751 - DNA, 471 bp, Homo sapiens
catgatcaagtcagcttcatccctgggatgaaggctggttcaacatacacaaatcaataaatgtaattcatcacataaacagaactaaagacaaaaaccacatgattatctcaatagatgcagaacaggcctccgataaaattcaacactgcttcatgttaaaaactctcaataaactaggtactgatggaacataccctcaaaataataagaactatttatgacaaaccaacagacaagatcatactgaatgggcaaaaactggaagcattcctcttgaaaactggaacaagacaaggatgccctatctcatcactcctattcaacatagtattggaagttctgcccagggcaatcaggcaagaaaaagaaataaagsgcattcaaataggaagagaggaagttgaattgtctctcttttgcagatgatgtgatcctatacctagaaaaccccatcgtctcagcctaaaa

SEQ ID NO: 840752 - DNA, 471 bp, Homo sapiens
catgatcaagtcagcttcatccctgggatgaaggctggttcaacatacacaaatcaataaatgtaattcatcacataaacagaactaaagacaaaaaccacatgattatctcaatagatgcagaacaggcctccgataaaattcaacactgcttcatgttaaaaactctcaataaactaggtactgatggaacataccctcaaaataataagaactatttatgacaaaccaacagacaagatcatactgaatgggcaaaaactggaagcattcctcttgaaaactggaacaagacaaggatgccctatctcatcactcctattcaacatagtattggaagttctgcccagggcaatcaggcaagaaaaagaaataaagggyattcaaataggaagagaggaagttgaattgtctctcttttgcagatgatgtgatcctatacctagaaaaccccatcgtctcagcctaaaa

SEQ ID NO: 840753 - DNA, 476 bp, Homo sapiens
gactaaataatgagattgctgagaaacttttaaaaatgaaaagtaataagagagctygtcctttacaataactttaaatgattagttaaaaaacagaaaagacctttttttaaaaaaaaaaaaaaatagcatttaaagactctcagttatgtccagaagggtgctgcaaacctctgcctcaggaagcaggtgtgcatctggactccctcctctgcgtctgcctggttgtaagtcctgcctctttagcccccaatggcggatgtcctctgagtggtcatggatgccggagtgtccagatgtgccccatagacaagatacagctgctgtttcccttgatttcaatgcaaatgcacccttgtattcacactgctccctactgtgcctattttaaggtgggaggttctgtccttatggacagaatggagaggtttctgcctaacttttgagttccagaaaattcctttgagtttagttat

SEQ ID NO: 840754 - DNA, 529 bp, Homo sapiens
aaagcgagacccctgtctctacaaaaaaatgtaaaaattagccaggttcagtgatgcatgtctgtagttctaggtactcaggaggctgaagcaggaggatttcttgagtccaggagtttgaggtkacggtgacctatgctccagcctgggtgacacagcaagaccctatctaaaaaaaataaaatccaatatacatataataggaatctttgaggaaaaaaaagtagggggatggaatactaaaaatacattgctttaaatatgcatttaaatacatatgctctaaggaaaactttaaacagaaagcatatgtatttaaacagcccaccacccacttgggaaaattgatccagtataaccaatacaaaatagttaagctattggactttttgaaaaaagaaaataatattctttgggcatctaagtaaataaaataaatattaaatcacttataaggaaaatttgattatcaaacttttcaacagcaacaccttgtcagaagacaatgatatttaaggtaatcaagtaa

SEQ ID NO: 840755 - DNA, 633 bp, Homo sapiens
gcaattctaccagaagcttctttcttttcttaacccaattatgttaaggaagaaccactggccatttattttcataagtgggttcatgacctcaaataattatagatccaaatatgcctgggaaacataggctttcccttcttcggtttacatataattttctgctaaagaagtagaggtgaccacgtcttagtgctgagagaatcattttctcccagaatacagaagatgttacaaagaaagcacagtgcctccttctccctccacccaatgtttcacattttttcttgttcttctctactagaaagctacacactaaacttttcatcctcaaatgttcacatggtaagttagagtcaagacactcccaggccctcacttttcaaaaagcccagttcccaaatacagagtccacttttgcaaaaatgctgtctagtctcttctcctttgctgctgcggcattccctaggggctgtcagacacttgagagcctggttcctccaagtctaggctcttccagccttcccctwctatgcagggtaaggggcactaacgtctctaccagtggcttcaccccattgttaaggttggatgtggtttttgtggagcacagttaatataaacatctcaaaa

SEQ ID NO: 840756 - DNA, 642 bp, Homo sapiens
tcaaagaaaaagaaagaatttaaaaatctgctcgagttgtctgagcctaaacacaatttgggtacataaagaacaaaatgccagccaggcgcagtggttcacacctataatcccagcactttgggaggccaaggcaggtggatcacctgaagtcaggagttcgagatcagcctggccaacgtggtgaaacgccatctctgctaaaaatacaaaaaattaactgggcgtggtagcgggcgactgtaatcccagctactcgggaggctgaagcaggagtatcgcttgaacccaggaggtggaggttgcagtgagtcgagatcgcgccattgcatttcagcctgggcaacaagagcgaaactctgtcccaaaaaaagaaaagaaaagaaaaagaacaaaatgccttttcctctctttgtttccatggagaatataacctggaggggaatgaatatagatggaaaggaccagcaacatgacctttttcccactcattgagaccctagggtggtggtgggatggatacccrtatagatcacagtgcacccagagatccaaattagatcagttctcacatgctcccaaagacccatgcctagtttcacgggtgttgctttggggacttttgtctatttcctccgtggg

SEQ ID NO: 840757 - DNA, 605 bp, Homo sapiens
caaattaatcaatgtgatacaccatatcaatggaatgaaagacaaaaacctatgatttcaactgatgctgaaaaagcatttgataaaattcaacattccttcatgttaaaaaaaaaaaactcaaaaaacggggaatagaaggaacatacctcaacacaataaagagccatatatgacaggtgcacagctagtatcacactgaatggggaaaatttgaaagccctccctctaagatctggaacacaacagggatgcccactgtcaccactattattcaacatagtactggaagtcctagctagagcaataagacaagagagagaaataaagggcatccaaattggaatggaagaaatcaaattatcctggattgcagatgatatgatcttatttctgtagaaaccgaaagactccaccaaaaaactattagaaccgataatcaaattcagtaaagttgcaggataccaaagcaaaatgcaaaaatcagtagcatttctatatgccaagagtgaacaatctgaaaagaaatcaagmaaataatcctatttacaataactataaatataattaaacacctagaaactgaattcaccaaagaagtgaaa

SEQ ID NO: 840758 - DNA, 593 bp, Homo sapiens
taatgactatctcagggaatggtaactagcacatgaggaacaacctgctttctaagagtaacataatacatgttctgggaagcagggtaagttaacagttatttctcctggtaagagaaattttcatcttctgctgcttcccaaggcaagtgcacagaattgcacctacacaaaatgttcccttcacaccaaaaggggcaagtggggtgcaagaggcatgcatcccaggctctactgataaagctctgtacccggtgcacatttacactgagataccacatggaatagcagaggcctgttctgtcctctcctccttcagatactttccgctttctctttcttgtcttcccttcctcccctaccccattgtctccttcaacccttttcttccctctcctccatctgaatgctaaaacaaatattatgtgaatatgccaagaagataaatttgacttcattaataaataaaagcaaaagaataatgaaaaatgagacttttgaggaagggattaaggaggggaaagatgatggggtwtattgaaatccagatctggagatctggaatgggatggagtattttgaataaaataaca

SEQ ID NO: 840759 - DNA, 512 bp, Homo sapiens
tcttccattgtccctgattttaatcaaccctacgccctctcctccctaacccctccgtacatctttttttttttttttttttttttttttgagatggagtctcgctctgtctcccaggccggmgtgcagtggcacaacctcagctcactgcaacctctgcctcccaggttcaagcgattctcctccctcagcatcccaagtagctggaattacaggcgcctaccaccacacctggctaatttttgtatttttagtagagatggggtttcaccatattggccaggctggtctcaaactcctgacctcatgatctgcccaccttgacctcccaaactgctgggattacaagagtcagccaccgtgcccggcccacacatcttttatgtactcaatttagacatggaaattagcaggttatcaacaaaaggactttcctttccttaatcttaatatccaaatttggaagaaaacaaaaacacacctaactctggcgatgccttcccatgacactg

SEQ ID NO: 840760 - DNA, 633 bp, Homo sapiens
agagaacaagcccccactacaaattcattttccagattctataagcttcctgttgagtggcaagaacaaatatttcagggagaattctaaggtatagtatcagtcgaatgtctgtcagtttaaaatggggacttacggtcatttaaaagataaactagcatgaggatggcttgagaccgggggagcagaggttgcagtgagccgagatcacgccactgcactccagcctgggagacaaagtgagggtccatctcaaaaaataaattaaataaatcaataaaaagtaaaagataaactactatgagcagagtgtctttttttctaccctgctttcagtacttgctaggagtaaggtgatgaagatccctttcttgctcagttaatgtgacagcagtcatgcctgctgacataaccgcggaatgccaaatgacctattcattcatttcattccttgcactagaacatcagagcagagaatccacaaatgcacccacatatccaaagctgatggcattttggcctctttctgcccccattactgtgaaaagatttctccaagggaacctgaaagtaatctttgtgggttgcagcaaaygtacacacccttttggaattttatcaggcaatcttagc

SEQ ID NO: 840761 - DNA, 551 bp, Homo sapiens
tcattatttcctgacatcagaaggcagcctgatggactgaaagaaatactggattaattatcaccaactatggaaaattttagatcttctctctgttcatcaattttgtggctttgcgctaattatgtccactcacctgagcctttttacttttttaaaagaaaataatgaagtctggtgagattgttataatgacaaatgaatatttccaatgaatatatgtgaaaagtttaagacttgtgataggctataatcaaagggtaatccaacaaagattctgctgtcatagactgagacctaaatgatcataatacagagaagtaatacattctgtattactaactaatatttttgagtgcttactatgtgttatgtaccattctaagcactttatgtctattatcttatgtaatcttccacagatcctatatagtaaaaaagtagggataggaagacctacaagtgagacaactaaagcacagagaagttaagtaagttgcctggattagtaragtatgtaacagtcaggaaacttgattcaaactcgaacc

SEQ ID NO: 840762 - DNA, 626 bp, Homo sapiens
cataatgatttaaaatcctaatttaatgaactcaatttcatgaagccttgagcacgattaaatgcattttgtcagcaccaggctactttcaaaaatgtgtttagacttctcaccctgacagctgttctctttgcwctttgctttttaagtaacacacttgaggaaggctgacatcagtcaatctatatttgaacagaagaagagaccttcctttgttagaatttccaggatgcatcatttaacttcagcatgaagcatactgtgttgacccaaataagggcactgcaattagagcacaaaccaaggtaagggctgattctctatggaatagcctttccacatataatcatttgtaccaaggaaagtattacattaggagattccagggccttataataatttcaaaatgtaacaaaacaaacatggaaaatgccaaatgccttaaaggaagacagaattttaaaacttcccacctcgatggcaggttaataggtgcagcaaacccccatggcacatgtgtacctgtgtaacaacaacctgcacattctgcatttgtatcacagaacttaaagtataataataaaaaataataataaaatctcccttcatatgtcacttataatccc

SEQ ID NO: 840763 - DNA, 613 bp, Homo sapiens
attggttattattgataaaaaggatccaaagtgcttattgtgcattctaaggatattattgccttccttatgttgtgatgcacagctatttagtttgcatgaaaaaacctattcatcttcctgyctaaaaaggttttagcatgaatggagtgcttaacttcctaagtatcttcaggtttcctttgaatttcttgagtatttgtgtatgttctaatgcataatggagagttttatggcttctaatttcgtaccttgtttaagcctctactaccctccccactccattactgaagcctggttagattttttttaatagacttcattttttagaacagttttagacttacagaaaaattgaaaagatagtgtagagttcccatatacccacacatctagtttcccctgttatcaacatcttgcattagtatggcacatttgttaacaattaatgaactaatattgatatgttattattaacttaagtccatagtttatttagatttttagttttaacctaatgtcctttttctgtttcagcattcaattcaggatgtgaagttaattatcttttgaggttactatattgtcaagtaatgccattcattagctttga

SEQ ID NO: 840764 - DNA, 580 bp, Homo sapiens
tgttagttgagagtacaggaggctgaaagaaagctcctcatctcaaaactagagatcacaaagatgagataaagaataaagaggctgggcatggtggctcacacctgtaatcccagcactttgggaggccgaggtgggtggatcacctgaggtcaggagttcaagaccagcctggccaaaatggcaaaaccctgtctctattgaaaatacaaaaattagccaggtgtggtggtgcgcacctgcagtctcagctactgaggaggctgaggcacgagactcacttgaacccaggaggcagaggttgcagtgagccgagatcgcgccgttgcattccagcctgggaaacaaagcaagacactgtctcaaaaaaacaaaaaccaaagaataaagaaaacagtgattaaacttgagcttctagaagtccttattcatttgatgatccagatggagtattgttcaggkaacattttcaccaccccccatctctagacatggggtaccgtttcctctagacgggaggctctcaacaccctcccctcagatctccttgtctgccaggccttcctccttcattcccaaa

SEQ ID NO: 840765 - DNA, 589 bp, Homo sapiens
aaagttgacattgtctcctaaacagtttctttggtgctaaattgtcaggttgcaaaagctatgagggaataaacgggtggtgcatggagctggtgtcactcattgatcaacgtgctattatacgctggggtacaaagggtgcccggtgacccttccgaatctattatttactcgaaagcagtgaccacatccacacacccagggtgacacagggtgtgtgacgaggcccacagatacatgccgatttgcaggggcacctgcactgggtctggggagccatcatcctccacaggagacagcgaccacctgtggatttttgaaagaaaggagtggcatggatttccccgagcgccacctctcattcctcctctcccattcatggtcacagcctgtgtttgagagaaggctgtccagctggggccatctgggtgtggggcaggatgaagctcacgtgccagtgtggaatcgacaccctcmttctctttagtatcatgcagtccccacagcgacttctgcttcaggctagttccgtaacccgggaaattttgaggatggaaaagggcagggacaggagcggtcaggagtggct

SEQ ID NO: 840766 - DNA, 627 bp, Homo sapiens
tttgggggatcctctttagaaaaaggacagaagattgtgaatggaagcaaaggcccatgaaggggagaagctctgagacccagcttctccagccccctggtgcgaattcacycctcgccaccaccccgcagggatgctcccattccacagcaatttcccgcagactctccagaagtgtgcactccggctcactgcttccccagtcttcacatgtttgcttgtcacttgattatcctccccgaagaggagccacttgtactttaaatgcctccttcacatcagcaggcaattaacagtagggaagggagaaggagggtgagcagtgaggcttctcaatcacacaactcaagagcacggggacgttctcccaggagcagcctgtctcttgtgcctaaagcacaaggggcagcggcaataggacggaaggggaccacccacgggctggactctcgaggccaggcagaggccactgtgcggtctttccttccgcttccctctccctgagccttatgcaaatccggctcttagcacagcctttagctcttgtctgaattccaggggaggcccaagatgggaccccctacttcaaaaataagcttgaattcaaacctccagcattgttccaca

SEQ ID NO: 840767 - DNA, 598 bp, Homo sapiens
ccccaaagtgtcctcattccagtgtagaaacagccactagagtgttgttttcacaggacgctgtcaccgggtggccctttggaaagtgtgggtgactcgttgcagagatttccatytggggggcaacacgtaagccctggttccttttcctgctccactccagagcattggtggaaggagacctctggacattccacagccttcctgtgggcctcttcagctttggctttggtccttgccgtttttttttttttttttttttttttgagatggagtccactctgttgcccaggctggagtgcagtggcgtgatctcggctcactgcaacctccgcctcctgggttcaagtgattctcctgcctcaccctcccaaggagctgggactataggcacccgccccatgcctggctatttttttgtatttttagtagagatggggtttcactgtgttagccaggatggtctcgatctcctgacctcgtgatctgcctgcctcggcctcccaaagtgctggattacaggcgtgcagccgtgcctgaccccgttctttgcagtttctaacacttttttctgatacttgcagcaatgagagtagag

SEQ ID NO: 840768 - DNA, 400 bp, Homo sapiens
ggggtagtttggggccgaggaagggcactcgtgttctatgagcaccgtccagaatgagccacagcccagctcactggaaacgtgccctggagtgtgatggcctgggtwgtgatgtgagcacttaacccaggctctgctcagagtccagaagcaggggctccaccccgtgagatgtggcaatggctttttgaaggaagaactgatggggcgtgggactggtccagcatgaaggatgaaaagacgctggagagatgagatagtaaagacaacgcctttcgtgcctgcgtgcttgctgtgtgccccccgtctcgtcccttcaacagaggcccccctgtgatgttatcagggcaagcgcttttcatccttaggattctttctccatgcaaaatcttatttggaa

SEQ ID NO: 840769 - DNA, 601 bp, Homo sapiens
aaaattaacactgatacaaaactattaactagtctacagaccttattcaaattttgcygatagtacaactaaatgtactgtttctggcccaggatccaagttcaaatccctcattgcatttaagtgttgtgtgacaatctgtgacagccctttagcctttgtttcctgagcttgacactgttgaagattttgtagaatgtccctcaatttgagtgagtctgatgttttcctttttctttcttttctttttagagacaggttgtcatctaggctctgtcacctaggctagactgcactgcaacctcaacctcctggactcaagcgatcttcccacctcagcatgcttagtagttgggactacaggccatgccactgcacccagctaatatacatatttattttttggtagaaatgggtcttgctatgttgcccaggctggtcttgaaatcctggtctcaagcaattctcccaccttagcttcccaacatgctggcattacaggtgtgagcaaccaacaccaagccctgatgttttctctgatgagattgatgtaagacatttttggcaagaataccacagaaatgatgtgcctgtctcagca

SEQ ID NO: 840770 - DNA, 620 bp, Homo sapiens; identical to SEQ ID NO: 835067

SEQ ID NO: 840771 - DNA, 504 bp, Homo sapiens
acgttgagtagaggtaaagagctgtgcagtgaaggatcttcagtgacaggagtgaaggcagagcatgttcacagatgcagagcagttggaatatttcttgaagaaaggtgagttttttcttctgttactcccttttctgtaaaatagatggcagagtatcagcttgatgcaagaggcaaggagatgttagaggtttgatgagagaaaacgttcatattggaagtatttgagagttcataacctagggggaaaataggaggactgcttagtagaaattataaattgcatgagatatataagtatctccattcacataaaatgaaaacagtgagcacagctgtttcaatttttcccaattgtatacttcttgcatacagttgctgaagaggaaattaattggttttaatcattaaaattagagatgaragaatttcccagcaagtataagaaatgtagagcagggaaagaaaatgatgaagccctgtctttatgttgggtaaagaa

SEQ ID NO: 840772 - DNA, 625 bp, Homo sapiens
atggaatcccaaatggactgtttgaatgagtgtccatggcctgacactccttttttacactatcctttgtcaaacggggatatatgggacacattgattttcgtatattacaccctttgctcaatttgtttaagatctagtcatagaagtaaatgttattcacctcaagacttcatttctcattctattaatttaccatgtagccataaatatatacttaatgtgtacatttcttctttcttagggaaaagaagaaatacacacgttgcatatatgaagctcataatttacatttgcctcaaatatatgaatccatgtattttccctccttctgcttgtaatttgaacaggtgaatcatgtgtgttatttgaatattataaaatcctatccagttttcaaaataaatgtatcttcaagaattttaacacttcccgttaaatatcaactaattacacatctcgtattactaatgatttaaaattaaaataaccatgtcctaatttaaaaaatatattaaaattaaaaataactattttggttattcatgcaattaaaaaaatcaagtctgtttttatgtaacttccatagcartcattgctatagacatttatatagtgtccttat

SEQ ID NO: 840773 - DNA, 616 bp, Homo sapiens
accaacaactcgattttacatttggcctccagatctgtcagagaataaagttgataaagyaaaagaaaaaaaaaaacagtgaaagctactcctggtattttctatttactcagtagaactattgttaactaactaatgttagtatcaattactacaagtaactacatactatacttacatcattgtaacttgtttattgtcttattacacttgaacatatttgaacatattttcttacctgttaatacagacataccacgttattttggactcatatttcttcataaatatatgtatgagtatataggggatgttttctatattaatatatatatttagcttgggcacattatttatagaatttctactaataaagtattacaaaatattcttgtgtaaacacttttacactctcacatgagtatataatggaatggaatactagagccgaaattttttgcatctatatgtttttaaatattacttaccagtaataatgttacagtacatattcaggcagacatgaacaaaacaggagacagcctccccaccagaaatgtcaggtaaccatcaggtgatggttaggcagttattaaattgtctctctaaaataaga

SEQ ID NO: 840774 - DNA, 561 bp, Homo sapiens
cactgtactctagttgataaagtggtgtctcagagagatacaggttaacaattttgttactrctatacttgtatactggaatttaacaattacgtatctcatatgcagaaaattccaaataatttatgtaggtactttgccctaaaagagagggagggagcataacaccccaatccttaagtgtgggctgtgcatagcaacttgcttccaaagaatgcagtaccaaaaggggtggggataaagagtaactttacaatggagaagcctgacagacactacttcaggcaggtgatgaaggtcaacatcaacggtcataaatcatgttgatattgtatacccttgatatgatgtgatgagaatggcacttcacttctgtgacctttcttcccaaaagtctactcatgagaaaaacatcagacaaataaagggaaatcctgcaatttacctgaccagtactcctcaaaactgtcaaggatgtcaaaaacaaggaaagtctcagaaactatcatagctaagagggtctaaggagacatgaccactgaatataatgtggtatcttgg

SEQ ID NO: 840775 - DNA, 611 bp, Homo sapiens
ctataaccctgtagaggagagattataagtgcaaatggcccacagtgatcatgtacccccacacaccaccataggacagtagaactcaaaagckaaattaataagaaggcagtgacacaatggaactgatttctttaaggcctaatcactctaacatcctttttcaaaatttcttactgtaaaacaaggaaagaaagaaaccaaagctgaatttaaaacaaactctgaggccaggcacgacggctaaagcctgtaatcccagcactttgggaggccgaggcaggtggatcacgaggtcagaagttcgagaccattctggccaacgtagtgaaaccccgtctctactaaacatagaaaaaattaaccagctgtggtggtgtgcgcctataatcccagctactcaggaagctgaggcaggagaatcatttgaatcagggaggcagaggttgcagggagccgagatcgcgccattgcactccagcccagcgacagtgaaaaaaaaaaaaaaaaagaaagaaagaaaaaaagaaacaacaactctgtttactacaaaataaagcaatgtcatttggtctcagtggagcaagttatccagtcacagtctaatgcag

SEQ ID NO: 840776 - DNA, 544 bp, Homo sapiens
taaaccatcttactttaaaaatctgcatagaggtagattctataatttttttaaattgcttactctaagaatctatgttctttgtgcttttttttgttttttaaaaaaatcttttaagattataaaaatatttattttttaaatgaacataatatagaaaatattaaagaggaactctccctctccatccccatgatactgcgattagcctggtgctaatcaccaaatacaagcagagtttgagcacttgagtcctcaggtgactcagatgtccctgggacatatctgttcaatcccaagggccaccctccagcactctatgtgtatggagattggaagggaactgtcctgaaggagtgcccatgagaagtttgacctaattctgccagctacctatatggtgtatggtactggcccrttccattactatctgagtcctatgagggtattgggaaatgtgattaaatatcgtaaaagtaatttcactacactgtttacacactggggccaaggcaactaccttaagaccctctctcacattatg

SEQ ID NO: 840777 - DNA, 541 bp, Homo sapiens
taatgtttgtttcattggttacattttaatgtgatatttaaaatgacagtattcttactattttaacttaccgcaattgttaaagcagttctaaaggggagtgygcttggagcttttaagcacgttagtaatgtacagaataattacaagcataattataatcgagatgatagtcatttgagtactgaagaacagtctttgtttttatagggtatattcaggaattttgatgatgccttcctgccagttctgaagccccatttagaacatttggttgcagatacacatgaaagcacccagcgatgtgttgcagaaattatagctggtttaatcagaggttctaagcactggacatttgaaaaggtgatgtattaatatttgtacagaacatttcctgttaaagctatgttacccattttggtggcaattcccaacacattagatactgataattaaaatatgaaatcttcagtgatatgaaatatgccgatatgtagacattgcttttgattacagattacagcctaatggtctctaggaa

SEQ ID NO: 840778 - DNA, 645 bp, Homo sapiens
taagtatgaaaaaaaaatgtgtttattgggatgagaagaaggaaaattcactaatttgtctacatgcaactaagtgatatttttccttggtaaaattaattgcaaaggcagccagatgcagtggctcctgcctgcaatcccagcactttgggaggccaaggtggacagatgacttgagctcaggagttcgagaccagtctgagcaacatggcagaactccatctctacaaaaaaatacaaaaatcagccagaggtggtggtacacatctgtggtcccagctacttgggagtctgagccagaaggtttgcttgagccccagaggtcgaggctgcagtgaactgggatcatgccactgaattccagcctaggcaacagactgagattctgtctcaaaaaataaaaataaaaataatctcaaaggcattagacctaaagcgattgtctattaaattatctcttgtggaaagtaacatttccctcaatatccacctttattcaaattgtcctatgccttaaaataattggtaccccctctyctctctttgcaagaactagttgtcccttttttcccttaattcttttgtggttgctgaagagttttatttagccttcaatgacttcaggcagtataatgagccaaggaa

SEQ ID NO: 840779 - DNA, 574 bp, Homo sapiens
gatcccagaatggggcagagtcacagtcaattcatagtcaatatgtaagaaagaaatttttgttgtggcaagccactgaaattggtttgaaattgcttattaccrcagcacaacttagccacagctaactgatacaaatatctataaaaacgtctggttgcaatagtactgaaagtcctagccagagaaattaggcaacggaaagaaataaaagggatgcaaataggaaaataagaagttaaattgtctgtttgcagacaacatgatcttatatggaaaatgctaaagactccatcaaaaattttcaaaactaataaatgaattcagtaaagttataggacacaaaacccaacatagaaaaaccaatggcatttctatacactaacaaattattccaaaaagaaattaagaaaacaatctaggccaggagcaagggctcacgcctgtaatcccaacactttgggaggctgaggtgggagaattacttgagcctgaaagttcaagtccagcctgggcaacacagtgagactccatctctacaaaataaaaaataaaaattagctgggcatggtgg

SEQ ID NO: 840780 - DNA, 574 bp, Homo sapiens
gatcccagaatggggcagagtcacagtcaattcatagtcaatatgtaagaaagaaatttttgttgtggcaagccactgaaattggtttgaaattgcttattaccacagcmcaacttagccacagctaactgatacaaatatctataaaaacgtctggttgcaatagtactgaaagtcctagccagagaaattaggcaacggaaagaaataaaagggatgcaaataggaaaataagaagttaaattgtctgtttgcagacaacatgatcttatatggaaaatgctaaagactccatcaaaaattttcaaaactaataaatgaattcagtaaagttataggacacaaaacccaacatagaaaaaccaatggcatttctatacactaacaaattattccaaaaagaaattaagaaaacaatctaggccaggagcaagggctcacgcctgtaatcccaacactttgggaggctgaggtgggagaattacttgagcctgaaagttcaagtccagcctgggcaacacagtgagactccatctctacaaaataaaaaataaaaattagctgggcatggtgg

SEQ ID NO: 840781 - DNA, 574 bp, Homo sapiens
gatcccagaatggggcagagtcacagtcaattcatagtcaatatgtaagaaagaaatttttgttgtggcaagccactgaaattggtttgaaattgcttattaccacagcacaacttagccacagctaactgatacaaatatctataaaaacgtctggttgcaatagtactgaaagtcctagccagagaaattaggcaacggaaagaaataaaagggatgcaaataggaaaataagaagttaaattgtctgtttgcagacaacatgatcttatatggaaaatgctaaagactccatcaaaaattttcaaaactaataaatgaattcagtaaagttataggacacaaaacccaacatagaaaaaccaatggcatttctatacactaacaaattattccaaaaagaaattaagaaaacaatctaggccaggagcaagggctcacgcctgtaatcccarcactttgggaggctgaggtgggagaattacttgagcctgaaagttcaagtccagcctgggcaacacagtgagactccatctctacaaaataaaaaataaaaattagctgggcatggtgg

SEQ ID NO: 840782 - DNA, 642 bp, Homo sapiens
tgaaaagacacacacgaatctactccagatggttgcccaagggaggtgacagggtggtgaggggggtagagccgaaatggaagcaaaacgggcttagtggatgccttatcccatggttctaatttttgaacaatgaaatggattacctattcaaaacaatagaaaataaaattaacaaattaatgttctttcttaaataaggtgaaaactttgtaaaatatacctgaaaaaataaatactaagaataaaatttgtgagtattgttaaagtcatcttttattttattagcctaaaaataaaccaacagagtttctctgtggatgagctgaacagatcaatagggagcagtaaccttacctttcttgttcagctgcaggactgaaggtgggggcgtggccaccttcatggccaggccataggcccctcggaaggaatggctgtctcgaacaatgaatgagcccggctccttgtccttcaacatggcgatggctggagaaagggaggagaaagacaagaaggtctgccgggtggacaaaggtctatgcccactcataaccttgggtaggtcctctycccttactctttttgcaaactggatcagtggggacctggccgggatccctctgcttggctggaagaact

SEQ ID NO: 840783 - DNA, 637 bp, Homo sapiens
gctgctcacctgtccttatggtggagtcggktggatggaggtgatgggtttcactgggactaatgttgctgcctgtgctctgtgcagggtccgaacacttgtacaacgaccacggtgtgattgtggactacaacacaacagacccactgatacgctgggactcgtacgagaacctcagtgcagatggagaaggtgcgtgtgttcatcttgtgtgcagttatggaggcaaagggcacagggaagacagcccactcaaatatctgaagtattttgcagtctgctaagaagaaaaaatttcccctgttttctcagaggtccagaatcacaccttcgtgtgacacagttgtgagttttgagggtcttcgtgagaataaggcatggtgagtttgggtcagggctttttgtgaagctgtaacgggtggatgagctgtcagtgaagttatatccaggagctccttggcctgaacttgtgtgtatgtataatgccagggaccgttcccccttcttccgtcccttccgttttgcatatggggatgccaagcgctggccacagccaaactagctactgttgtacggccccacatgcaacagacatcttgttttaatttctgtttgcttgttagtctagtgttcctga

SEQ ID NO: 840784 - DNA, 616 bp, Homo sapiens
gcccgcgtacccttcccaccaccctatcctgccttccaccatgckgatacgtattatagttgtgcagtccccgctggcttctgtgatttggaagggggatgccagaaatcactggtttgcaacaaaaggaaagccatcctcagcgcgctgtgggacactagggcgggggttagggaatgtaggaaagaacagtgttttaaatgagcgcttctcttcttcagtgccaaacccactgccccatctttcttccacattccttctcataatcctttaaagggaactttattctatcccagcttaacactcactgcttgactgagtgataccatcattctaatgaaattgcccaagcgctttggggtaagataaatggcagtggctcaacttcataagaatatttgttaatgatcatttgtccccagggtttgtatttgcttatcacatgacctgctcactcctttattttaaaagaaagcaccacacttcaccaaactactctgagtgtgttagttcagaatgcagcgctgagataatggcggaaggcattagtaggtaacagacatttcgctcagtaggctgataaacaaggcagtatattaaggagcaggcaactcct

SEQ ID NO: 840785 - DNA, 704 bp, Homo sapiens
gactttataagtctggcatgaaagctagatatcataaggcaaaattttatctcttataagacaaaagaaaccatcaataagatggaaataaaaaagaatatattggaagaaaatatttacaacacatgtaacaaaaatgtagtatccataatataaagggtacctataaataaatcaaaaagacattcaaatgaccaataaacataaaaaagtggttaaccttacagataattaaagtatacttatcattttgcctataaaattagaaaatttagaagattgatttcaatcaaaagatcaccagaagatggagaattggttgatgtataaactggaacaatgattttggagagcaatctaccaatagtagtcaaactttaaatttacatgtcttttgaccaacgaacctccacttctaagaatctgaacttcagaaagacttgcacaaatacctcaattatataagcatcatacttctttacaggataacttgtgaagtgaaaaattggaaaatgcacaaaagtttatccatagagagatggttccatcgatgcaacagaagatcacgcaaccataaaaaaaatcagataaagctatatgtactgacttggaacaaggcctgtggtacattactaagtgaaaagcaagctgctgaataaaacatacagtacacaccactgrtgtgttgggatccatctctcatt

SEQ ID NO: 840786 - DNA, 467 bp, Homo sapiens
ttgatacgacatagactttcctgttgcattttgtttaccagtgggcattggatgttggactttttgtagaaatttgaccttatttcttaggattcttaacattttctggtcagaaaacatcacaaaaaccaaatggtgggagggactataaccacagtgagtccttcttcatgccaaaagaaattacagcccactctcttttgtacctgaatgagtccattattagcattattcaattaaaaagagggaaaggaggcattttataaaattgttggcatgcagccgccatccctgataagatactagtggatataattcctatatatgtagacattcagttgaatgaggtttgcacacattgatcacacctgtttgctacaatttgccatgccagttatcttgtttcccttttttgcccaaggatgttgtacatgaaagtagcrcatcctgtggaagagctttttcta

SEQ ID NO: 840787 - DNA, 585 bp, Homo sapiens
gtgagacaagtctaatttcttttctaaagagttcaaggtaggtatcaccatttctgaggggggaaaacaatgsagaaatgtttgtggttgctatctgcaataatctggtgctgacagagagtagtattttatttagtaattaacagtgtaaaggggaaaggagctgtcatgttggttcttaagctggggaatgtgatgaaagatgatatctgcgatctcatcctttccacttgtttaggattgtcaggatgagaaatgtcagcattatgaaagctcggctctgctcttgatatgataaaacccttcaaaagccagtctttctctctccctcatccccctcctttctcgctgtctctctctgcacttgcttttttatttatcctgttttgttagatggcagaaatataattcttttctttcttcctattataagccaccatttttgttttattatatgtttcacaacccctaatgccccactgaaaattaccttgttaaatgacagtgtttcaaagccatgaatcctttccaccattccctcagaggtttgaaacagtcaacagactgtaaagaataaataataaa

SEQ ID NO: 840788 - DNA, 563 bp, Homo sapiens
catcagaggatgcaggacaggccaatatcaggattttgcagtgactggtgtgtgtcagggaatttataaaacccagacttcctcattagcaattgagccaagccaagtgagtcgaaacattttactggagcttcacaattaaaaaagaccaacccagacctagtcagtatttcccatcattaataggactaatcactgagaatgttagaactaactactcattaggtcaaaaggatgggagaagctacactttccagagctgttcaactactgcagaaaacgtctcctgaggctaagtacctcttgtaccagcatttacagaagtgtatgggagaggtgcaaaaggtcattttgggcaaagttccaggcaccacctagagcccattatgtatgtggtccttactcccactggtgatcgtcatttgtctgtgggaatcaatcacacacggaagcttgtggaggatggggaagtagagaaaccccactcataggcatgacagattccacttttayttatattgctgatcttcttggagtaggttaaaaattactggatatgacaa

SEQ ID NO: 840789 - DNA, 659 bp, Homo sapiens
ggtctcgtcatcctggtcggccctttgtgactcctggcatctggagaggttcccgtcgaccccgtggagaggtcagactgaaacctcagagccccgacacccaagcrctgccacagtaggctcccactttgccaagcctcgaggactggtttctacgacaacagtgggaagcactgtgatgggagaagccgctggcgcctcgcgcatgcgtattggctggtccgacttgcgctcccctcatggcagtcaggctgcatcccctttaaataacgccaccgctacttggcagcggcaaggctcctgatgcagctgaggtggtggctggatccggggtccagtttggggcggcgtgggagattgggccttgagtatcgtgtcccagggccaaaccgccaggagtccaggcttcaggacctccttgatcagacttccaccgatggagggggaacttcagggcacctactgggttctcaggactcctcttcagatcctagtttggacccctccttgttagaaaggataagctcagcacatctggttattcaggcagggcgtcgctgcagcacagaatgttcacatggccctgaagccgtggtgtcagctgaaagttcactaatcagtgagccctctgcctccctcctccgttgaaagagcagtga

SEQ ID NO: 840790 - DNA, 622 bp, Homo sapiens
ccgatctgcacaatagaatactacttagtaataaaattaatgacytattgatgcctgcaatatagctgaatctcaaaataattatgctgtgtgaaagatgccagacccctccaaaaaagggtgcatactacatttcaattatataaatgtctagacaaggcaaactattttatagtgacagattggtgattgccagggagagtggtaaggtaggaagatacagaaagtttgggattataaaagggcaaggggaaacttttatgagtgctagatatgttcattatttttattttggtgatggatttgcaagtacacataaaaaataacacgcgatggaagtagaaacagtatttttgtttctttcttaaaaaagcacaatttacttactaatgggatgtttgtgcctgttgggcacacagcacaacttttcaaatcttaaaatcggactggatctcaaccactggaccttattcctattccacactgactttagcacaatacttgctttcatcgcggtgattaacaacacccaccttaaaggtaaagaaatgcacttctaactaactacttttgaaactatgaactgcttcaggctagtagttcttaaggtttccagcaaatg

SEQ ID NO: 840791 - DNA, 596 bp, Homo sapiens
atgggccaattgtgtatcttcctttgttgactgtctcttcatatcttcttcttmttattattattttttgagacagggtcttgcactgtcacccaggctggagtgcagtggtggatcttggctcactgtagcctcgaccttcagggctcaggtgatcctcccacttcaaccttccaagtagctggggactacaggcacgtgccaccacacctggctaaatctttttatttttgtaggggtcttgttttttgcccaggctggtttcgaactcgtggactcaagcaatcttcctgtcttggtctcccaaagtgctggaattataggtgtgagccactgtgcccagcctgtctcttcgtgtgttttacctacattgttttattttattttatttttgtctttttgctatttttgaaagaattctttatatgttctggttaaagtccctctgtcagatatatatcgtacaaataatttctccctgtctgtagtttgcctaatcatattctttatggtatcttttgactaatagagttttaaattttgataaaatctatttttcaatgttttctttttatgataattactgtctgtgtttt

SEQ ID NO: 840792 - DNA, 610 bp, Homo sapiens
  misc_feature 224, 281: n = A,T,C or G
gccacagattccggggcctcgtcctcactctggtctccgaagagatcagggtggctcaagacccgcttcttcagcttggggygtcctgggaggggtctagcgagcaggccttccactccaccagcttcctgcaggggccttcgtgtgcttcctgtctgggagggttggggcagcaaatggacttcggtggccgaaaatggcttcttactggtcgcttcccccgnctcttgcggcaggggctgctgcctgcaggcccttcttgtccacaccgggcatctccnacggctgccctcagcccttgtccttggtcttgtcctcctcctgggcaccatctttgcggctggggtcccgcttttcttactcgggtttcccctcttagaggcagctaccatcctgccaggccaggcctgggaactgggtgtggccggggactccccagcagccggagtcccccacgtggcgctgcatggctatctccttggtcacccgcaggccgccccccctcagcctccagaccctccctggaggaaggctgcctggcggcttggctcccggggctggccctggctttgagcagggctggccatggcgggctccttggcggcatcag

SEQ ID NO: 840793 - DNA, 610 bp, Homo sapiens
  misc_feature 224, 281: n = A,T,C or G
gccacagattccggggcctcgtcctcactctggtctccgaagagatcagggtggctcaagacccgcttcttcagcttggggcgtcctgggaggggtcyagcgagcaggccttccactccaccagcttcctgcaggggccttcgtgtgcttcctgtctgggagggttggggcagcaaatggacttcggtggccgaaaatggcttcttactggtcgcttcccccgnctcttgcggcaggggctgctgcctgcaggcccttcttgtccacaccgggcatctccnacggctgccctcagcccttgtccttggtcttgtcctcctcctgggcaccatctttgcggctggggtcccgcttttcttactcgggtttcccctcttagaggcagctaccatcctgccaggccaggcctgggaactgggtgtggccggggactccccagcagccggagtcccccacgtggcgctgcatggctatctccttggtcacccgcaggccgccccccctcagcctccagaccctccctggaggaaggctgcctggcggcttggctcccggggctggccctggctttgagcagggctggccatggcgggctccttggcggcatcag

SEQ ID NO: 840794 - DNA, 610 bp, Homo sapiens
  misc_feature 224, 281: n = A,T,C or G
gccacagattccggggcctcgtcctcactctggtctccgaagagatcagggtggctcaagacccgcttcttcagcttggggcgtcctgggaggggtctagcgagcaggccttccactccaccagcttcctgcaggggccttcgtgtgcttcctgtctgggagggttggggcagcaaatggacttcggtggccgaaaatggcttcttactggtcgcttcccccgnctcttgcggcaggggctgctgcctgcaggcccttcttgtccacaccgggcatctccnacggctgccctcagcccttgtccttggtcttgtcctcctcctgggcaccatctttgcggctggggtcccgcttttcttactcgggtttcccctcttagaggcagctaccatcctgccaggccaggcctgggaactgggtgtggccggggactccccagcagccggagtcccccacgtggcgctgcatggctatctccttggtcacccgcaggccgccccccctcagcctccagaccctccctggaggaaggctgcctggcggcttggctcccggggctggycctggctttgagcagggctggccatggcgggctccttggcggcatcag

SEQ ID NO: 840795 - DNA, 545 bp, Homo sapiens
cctttatccaaaagaaaataaaatgtcgagccaggtgcctgcwgaagttggactcttaccctcccctggaatctggggatagggagttctcttccttgatgtttacattgcaaagagatagctcccaggtacttgagaaaagcatccctggattgtgaaactggcaagaagcttatttagcttttagaaagatttgcataaatctatctgaaaaggagagagaaagaacttatgatgaggcattttctaaaataaatcctctaagctggaggccattattctgagagaagtaactcaggaatggaaaaccaaataccatatgttcccacttccaagtggaagctaagctatgaggacacaaaggaatacagtgatataatggactttggagactcaatgaggaaggtgggggatgaggcatcaaacactacatattgggtacagtgaatacaacttggttgccctttacactaaaatctcagatttcaccactatagaattcatttatgtaactgaaaggaaaatatcttggtcccccaaaatca

SEQ ID NO: 840796 - DNA, 630 bp, Homo sapiens
ccctctgctgcttgctctccagaggcaaaccacagacacctgtgtccaccaggcacacccacttgaatcctgcagtccagagtcctcataggaagctagtcgcatggacacgagcctgctgtgtgacaggctgtgattgaagttgaggacatcaagtcttcatgtttatgtgagacactgctgactgaacattctgcccccgctgctgtaggactagttatatttcccagtagtgctcaaaacataaatgttctctaactagcatcggacatctaaataagttacctaatttcacctgctgttaatattttgccaccttttcactagcagaaagtatgtatatttgtatgtattgttaacccaaaatatctgagataggtctcagttaatttataaagtttattttgccaaggttaaggacatgcctgtgacacagcctcaggaggtctgacagcatatgccgaaggtggtcaggccatagcttggttttacatgtttcaaggtgacatgagacwtcagtcaatatatgtaagatattggttcggtctggaaaggtcggacaacttgaagctgggttggggcttccagaacataagtagataagagactaatggttgcattctttcgagt

SEQ ID NO: 840797 - DNA, 511 bp, Homo sapiens
agcctgggcgacagagaaagaaaaaggaaagactggattagaatgttaccttttcmtgaccagtaatgccagtaatgaattaagatagctaggctttggatattaatggtagataacttcatatatatatatatatatagagagagagagagagagagagagagaaagagaaagagagagtcctacattatatgttcctcctggaagtacacagcaacacctatgaagaagtttgcaaaaaggtggatcaagtcttcaattaccaatttgcagaaaataacagaagacagagaaatatgttaaatgacacctcagtgattcaatcagataaatccatactaaggtgaacatgacaccatgaaagacttggtttcttcaataagtaaatgtcaaagaaaaacaatatgaaggggaaccttatagatttaatagacatattaaccaatctgaacatgtgaaccttatttggaccctaattcaaacaaatttaaaaatatttatgacatttata

SEQ ID NO: 840798 - DNA, 511 bp, Homo sapiens
agcctgggcgacagagaaagaaaaaggaaagactggattagaatgttaccttttcatgaccagtaatrccagtaatgaattaagatagctaggctttggatattaatggtagataacttcatatatatatatatatatagagagagagagagagagagagagagaaagagaaagagagagtcctacattatatgttcctcctggaagtacacagcaacacctatgaagaagtttgcaaaaaggtggatcaagtcttcaattaccaatttgcagaaaataacagaagacagagaaatatgttaaatgacacctcagtgattcaatcagataaatccatactaaggtgaacatgacaccatgaaagacttggtttcttcaataagtaaatgtcaaagaaaaacaatatgaaggggaaccttatagatttaatagacatattaaccaatctgaacatgtgaaccttatttggaccctaattcaaacaaatttaaaaatatttatgacatttata

SEQ ID NO: 840799 - DNA, 631 bp, Homo sapiens
gagggacatttggcaatgtccagtggacatatttttgtgtgtcatgactcggggagggagctattggcatccagcaggcagagcgagggatgcaaagcatgctgccgtgcacaatacagccctcacagcaaagatcaatgagatgccaaatgtcactgatgtggctgtggagaaacctggctctgcaacaccccttcttgcctgcctggcgaattcacccagtaaccaactcactgcgtccattcttgctgcacctctgaccttccttcacagggcctttataaatgctaatttgaccatattaccattctgcttaaaatgctaatgatttcccagggctttcaagataaatctcaaaattctgaacgtggctcactagccttgcatggtgtgtcccctgccaaggtcactgtccagcctgtggtctcttctctagctgcctgtgcttcaggagtgctggtaactgcctccttcggttccctggctcccaccctccrtaggtccttggcgcttcctcttccttttgcctggcaggctctcactttcccttacctcccttcactctgctcctgcagctcctgcagattttagtgcagagaccttctcaccagggaggcctttctgcatttcc

SEQ ID NO: 840800 - DNA, 610 bp, Homo sapiens
ctaacagtaccctcacttttacattaaaacataattctgttcaaatcactgcctcccttttttagagttttggagcagttataacttcagtgtcmtagagggacatctgtgatacaaatgtccaacaataacgtgtgagcacaatattgactgtacagacaggggccctctgatacttttaaaacaaatatataattgctaaaatgtggaagctcctttttgtcaaactccttttcccttcactttaaagaggctcagccaacacagctgggtgttcccggtggctgatctctgctgccaggtgtgcttttccactgtgtttcaactgagccctgtggagagcaagcaggtgccaggaaccaggctgtcctgtggggacccttcctcctgggcagttccattttcatgagttctgcagacagtggccaccatctgttttcaccactgctggccacttgggagcaagccagcacggctctgccactgacgggctgcaggtggctgcggccagctcctcctggcagggcttctgcatagaataccattcagacaccttgctttgccctgctggttccaaaacaaatttctctcctccagaaagcatagagcc

SEQ ID NO: 840801 - DNA, 594 bp, Homo sapiens
gctccccctccatttctttatgtctctatataaatgtcactttattgaagatgtcttcttgtccacattctggaaaaaaaaaaaaaacagcagatttagccactccaaatgtcctgacacttcctattatcttctgctgctgtattttccccacaatatgtgtctatagtaagttctttatttcatgatttaccctctgctcactcttgccccatagaatgtaagctccatcaccatgagtcaactctgttttcctcatatctgtgtcaccaacaccttgaaaagaacctggcaagtcaaagaacaaagttaatatttcctgagttcagaaactgagatatgcagttttgtgtaagacacaatcattatgttgagagattccacagtttaggagggaagagaagcaagtaaacttgggactatatgcagtggatgggtcctgtatttcagaagaatacagaggagggawgtcaaagggatagtcccaggacacactaaaccacgtcagggctgcagcagcagagggaaaaagcagtccaccccccaggctccatcagaaggattctgccataattattgttttcagcataaggc

SEQ ID NO: 840802 - DNA, 612 bp, Homo sapiens
tcaggaccaggcgctggaagctgattgtcgcagcagcagtctgctcccctgagttctgaaaggggcgaacccattcaatacccacaacagagtcccatcccgagagggtgtcaggtgtagatctgctcacgtatgcttctcctgtcctgtacttagtgtttaacccgccacgaggacggcacattcatccacattaaggctctcctattgtgaactgatgcatttcaacatgggaatatcatgactcgccttttatctgttttcctattgttatggaacatctgaatttcttcttttgtgaattgtctgttcgtgttccattgcctggttttctcctgggagatcctttttcctgttgacttgaaaattattcatcttttgtgctgcaggagaacaactggaatctcttaaattacctgttctcagcagtcttgctgaagttcactgtgcaatcattgagcctctagagtaattgtayaatttctttcatggtcacttgttttctgtatttttctgcatttttggaagttttggtcacgggctttctatatttttctgaatacattttggaagtttgttccctgaaaacgtatctatttcaacaagatgtta

SEQ ID NO: 840803 - DNA, 572 bp, Homo sapiens
gaggagttctttcatccaccccaaggctggaagcatctccaaatcgatgaccttgcggctttaggaccacagagaaacatatatgccycacgccagctccagatgcagtcccagggaaggattgcctttggcttgggatgggtcatgtgcccaggcccagaccttagcaaaccatgctaaggactgtaactggcagctcacacccaaaaccgtgcttctggaaggtagagaggagtgccttgaaataaaggggtcatttttctgtgcagacaacattgcaatctcccagaagtgctgatgaaactgagctctgaagggaagaagaaatctgggtttccaaggagcagaggtttaagagacgtggagtctgtaggcagacagctttcactgaattcaaatgagagattgaactaggatagtttctcacagaaataggagaaacagactggataaaggaaatgaaataaaaagcaaagtaaacagaactggaggaagaaatgagagcttcaaaaacttcaaactgagaagggcagaggaaaagagaagccacactcaggatccaggtgaatgtg

SEQ ID NO: 840804 - DNA, 614 bp, Homo sapiens
aaacactgcagttctccaaccccagcgccagccataacgaatgaagcctcgtgtggcagcacgatgtgcagattgctaaagttaattaaaaaactgtgaggttctaagacaccatcatattttccttattctagaactgcggtagaggaattttagctatggattagtcaggtacacccaaacagatagaaatactagaaaatctctagaaatactattctttaagtattgaggcttacgtaaaagttccatgtgtagcctatcctatcaggagatgaaaaaatggttgagtatcccttatctgatacttgagaccagatcccttatctgatacttggatttaggattttttcagatttgggaatatgcgcttttaacacttactggttgagcatcccaaatccaaaaaaccgaaatctgaaatgctccaatgagcaattcctttgaatgacgtgtcaatgctcaaaaagttttgaatctgagcattcaggatttcagatttgtgmtgctcaacctgtaatgaattataaatctacagaataaaataagaatccatgagtccctactgatagaaataaattataaatagataaataaatatgtaaatagagggg

SEQ ID NO: 840805 - DNA, 652 bp, Homo sapiens
gatggctcatgtctataatcccagtgctttgtgaagctgcagggggaggatcacttgaggtgaggtgttccaaactagcctgagtaacatggcaaaacttgtgtctcaacaaaagaaaacaaaacaaatccaggaaacttaccactgtattgctcatttttcagattttgatttctctagtaaatctgtctggtattatttacttttcagagtcatcagatagttgccttgtgtaatctgtccaggaattttagttgttttcagtggaagaaatagggtggagtgggtttaatccttcttagctgaaactagagattgctattttaagttgacattcacattgcctacattccttcacctctttcactactctaaggtttcaactaccaacttcttgctttgaggctcatttttttagtaataaatcatattttatcatatgactccctagtacacatcacaatgttatttccatctttaatgatgactatctcttaaacagaagtgatccattttttcttyccaaacctgtttgggaaaagctaggctagtaaaattaaacaattcctttactatagaacttctgaagcctttaatatgttaatctggattctaaatttctagaagtggaatacagtgcattgcaatttcc

SEQ ID NO: 840806 - DNA, 506 bp, Homo sapiens
aaatttagggataataatctgccctgtatgataatcagaaggaagagcatacgatgaaattgctttgcaaactgaagcacrttacaaattttagtcttaactaattatatatatacacacacatgcatatatatatatgtttataagtttacgtgagtgtgtgtctatatatgtataaatttgagactactgcaaaggggaaaaatttctctcttatagataatttagtggtgggtgtaaatcagccagattagtaatcctgcttcaactacggagtagctggaaggatgaaatcctttaggcttttcttagaaaagaaagttcatttcacagacaaggtggctgggaagccaagcctgaagaattcgtttctgttccccttccctctctggacctgattccatggcaagggatatccttgggaattatttcatccacagaaaagcacaatgatcaaaacatttctatggtttttctgatcctgatcatgagaaaaacctttaaaa

SEQ ID NO: 840807 - DNA, 564 bp, Homo sapiens
tccaggtgctaacctgggactggtctggtccctcatcagctcaaagaggaatgccagsgaggccgacctagagtaaggaggcgttgccatgaggcgccagggcacctggctcccagtattccatttcaccatggaagcatcgcccactgcctctcccatcaggggtctgcagtgcgcccgtgccttcatttaccctaattccgagcccacacgctctccactgggggttcggcacagacagacatttctcctcatttctcacccctgctccttcgcaggtgccaaccacagagtgtctccctgaccctccagagtggctgcacaggggccctgcaggatttgctagcctgccaaagaaaccaactccattaaaagatgaaagaacacatttgaaaaagggctcttatcttggctctgtcccaacttgacagcccccaggtgaagagatccaaggaccaatccacctttccacaggcagtttattcccctcagcccagcaaatgccttctctctggattttcctggtcatctctcctcaggtgactaagccagccagtcatggca

SEQ ID NO: 840808 - DNA, 564 bp, Homo sapiens
tccaggtgctaacctgggactggtctggtccctcatcagctcaaagaggaatgccagggaggccgrcctagagtaaggaggcgttgccatgaggcgccagggcacctggctcccagtattccatttcaccatggaagcatcgcccactgcctctcccatcaggggtctgcagtgcgcccgtgccttcatttaccctaattccgagcccacacgctctccactgggggttcggcacagacagacatttctcctcatttctcacccctgctccttcgcaggtgccaaccacagagtgtctccctgaccctccagagtggctgcacaggggccctgcaggatttgctagcctgccaaagaaaccaactccattaaaagatgaaagaacacatttgaaaaagggctcttatcttggctctgtcccaacttgacagcccccaggtgaagagatccaaggaccaatccacctttccacaggcagtttattcccctcagcccagcaaatgccttctctctggattttcctggtcatctctcctcaggtgactaagccagccagtcatggca

SEQ ID NO: 840809 - DNA, 634 bp, Homo sapiens
tcaagttttgtcacgtgtcaataaaacactttaaccatattagaggtactgtgcttcaatatgactgatgtgttcagttaaaatgctgaagtttatgaatcttaccgtaaagcttgaagaakaacagtggagatacattacatgctatctgtgaaaaatggtaaaaataaaaagctaaaatgaaaatattgaatctttgagagagaaatgcaggcaccgaaatgtgctatcatctcatcactattctctataggcttgtggattagacaagtcgtatatgtctaaaactgcatagagggtgtttcagaactagagatgtaaaaaacttactttaaaataagaatagagctctccagtaaacctaatcattctcacagggcagatcggctttaaacgaatgtcacacttatctatatatagtccacagttccccaggggtgcccaagccccttaccccacaagaagcttgatatatatttcaacacacagaataacatatactttgccctaagacttccttttatgcttgctaacttcaggatcctcacaatggctgcaaactcctaatatttcaaagactgtctacattaatatctttcaaagcctcaaaccctggcaaggaacaaaaattgtt

SEQ ID NO: 840810 - DNA, 531 bp, Homo sapiens
aatatttgctgttctggagcctccgctggtgatacccaggaaaatagggtctgsagtggaactccagcaaactccaacagacctacagctgagggaccttaccattagaaggaaaactaacaaacagaaaggagtagcatcaacatcaacaaaaaaccccatctgtaggttaccaacatcaaagaccaaaggtagataaaaccacaaagatggggagaaactagagcagaaaagctgaaaattctaaaaatcagagcacctctcctcctccaaaggatagcagctcctcgccagcaatggaacaaagctggatggagaatgagtttgacgagttgacagaagtaggcttcagaaggtcggtaataacaaacttcaccaagctaaaggaggatgttcgaacccatcacaaggaagctaaaaaccttgaaaaaagaatagaccaatggctaagtagaataaacagtatagagaagaccttaaatgacctgacggagctgaaaaccacggcacaagaacgagaactttgtgacg

SEQ ID NO: 840811 - DNA, 519 bp, Homo sapiens
gtaaacacactgatataaagccctttgcactttcttctgctccttcctccctgaatcagcataaatataatgtraagtggtttgatcaatttccaaaagacaatgtttcatatgaatcaaaaggatatctacaaaatgtgttatttactacctctacttttaacatactgtgtgcacttctaaacatctagaagactagatgtttcaaataaggacttaattttgtccactatatgtccagtagtgttactactggagggtgtccaggttcttggcttcttgaacaaataattggacaaaatgcacaaacaaagcaaggaaagaatgaagcaacaaaagcagaggtttattgaaaacaaaagtacactccacagggtggcagagggcttgagcataggggctcaatagcccggttacagaattttctggggtttaaataccctctagaggtttccattggttactcagtgtatgccctatgtaaatacagaagacatttcccatcatagctgaagtgtt

SEQ ID NO: 840812 - DNA, 565 bp, Homo sapiens
tttaattaaaccattgtgattctgcttttggctgttaagtcagatagtgataactgaaactgttaagtcagatccggaacttgaggactccagggtccagtggagtccagtggttctagtgtcaggctctctgtgccttatctcatgggaaccttctgagaaccaggaggtagtggctgagatttcccccactagagatgaagggacctgcctcggttaatgagtagtagcaccagaacctgaatctagcccagactagacccaaagccagtgattctaatcaccatgcctcatcacttactaatcgcatagtagctaatacctagtgtagtggatactgtaatgtgccacccaggaccccctggaagaatgaaggattcacacccccagctgatgatagtattgccagagaatatctctctgctgtcagtctctccaacaattgactgaggctgaaaacaacwgccttgcccaaggtcaatttccttccaggagccgcccacatctaatactgattgtttcaatgtgcaacagtactaaagggtcattccggcaggagacctgg

SEQ ID NO: 840813 - DNA, 406 bp, Homo sapiens
agcatccctggctcctacccactagaaaggcgaagtagcacccccacccccttccccatttgtgacaagcmaacctacctcctgagactgccaaatgtccacgggagcagaagagaggggtgcaaaaatcacccccagttgagattcaccaatcgacataaatgtcagcttcttagaaagtattttcctggccacttaaactaaaataacccccttgcctcatcaacatcactctctgttgctttgccccacttgtttgtggttgtccatagaaagtgccactcactgaaattatattatgaatcagttgactggtttgctggctgtctccccagcttgcacgtaagtctcacatgagcagaggccttgtccattttgttctctgctgtatccctcacgcccagcc

SEQ ID NO: 840814 - DNA, 642 bp, Homo sapiens
ttattctagttatctattaatctaattttttttcaaagtttttaacttctttgccattgkttcaaacttccgcctttagctcggagtagtttgatcttctgaagccttcttctctcaacttgtcaaagtcattctctgtccagctttgttctgttactggtgaggagctgcattcctttggaggaggagaggcactctgatttttagagtttccggtttttctgctctgttttttccccatctttgtggttttatctacctttgttctttgatgatggtgacgtacagatgggtttttggtgtgggtgtcctttctgtttgttagttttccttctaccagtcaggaccctcagctgcaggtctgttggagtttgctagaggtccactccagaccctgtttgtctgggtatcagcagcggtggctgcagaacagttgatactggtgaactgcaaattctgctgcctgatcgttcctcaggaagttttgtctcagaagagtacccagccgtgtgaggtgtcagtccacccctactgggggatgcctcccagttaggctactcagggttcagggccccactttgaggaggcagtctgcccattctcagatctcaagctgcatgctgggagaaccactactatctt

SEQ ID NO: 840815 - DNA, 498 bp, Homo sapiens
ctatcttcaacttttattccatgtattactgtattgaatttatgtgattataagttatatatctttcttaatagtctgaattcttttagggcatgatacatatatgatttctaattgtgatctctacaacatctgagaaaatatctagcaaataattatatttctgtagacaaaaaataaataaaaagcacctaacatatgtcaacctctataacttcagaaattttaaataaaatgcaatataaattatgataccttcaatataatgactcatttactgtagctgatattacattgtattataacgatttggattgtctttgtctttgcttatttttatagacacttatgttttatgtattattggtatttttttagatagggtcttgctttgtygcccaggctggtgtgcaacaacagtccgatcgcagctcacttcagccttgacctccagggctcaagtgatcctcctgcctcaacctcccaagtatctgggac

SEQ ID NO: 840816 - DNA, 581 bp, Homo sapiens
aaattttccctggcataattctattctaggatacaagttttgtgttgttttgttttgttttgtttttcccccttcaggactttaaatatgtcatgccattcactcctcttggcctgtaargtttccactgagaagtctgctgccagatgtgtgggagctccattgtatgttttttgtatttcttttttcctcttcctgcttttacgatcctttctttagcttgacctttaaaattttaattattaaatgtcttcatataatcttttttggggttaaatctgcttgatgtttataaccttcttatgcttgaatattgacatctttctctaggtttgtgaagttctctgttattattcttttgaataaactttctactctgatctctctctctacttcctccttaaggccaacaactcttagatttgtacttttgatgttattttctagatcttgtaggcatgcttcattttttaaaattcttttttctattgtcttctctgatcgtgaattttcaaataggctgtcttcaagttcaccaagtctttattctgcttgattaattctgctgttaagagatgtta

SEQ ID NO: 840817 - DNA, 664 bp, Homo sapiens
agggcctaaatcccaagcagcctgtggaaattactttygtggcaaacgatttcagtgaaaccccaaatcacacacttggtacgctgaaccaagactgtgaaacaagtgtttggagccgatttctagtagtactggatttccctggctgtgcactgtctcctgtcacctcattttgtcttgttcagggaacaagcttcctccatgcctaagagcaaggagaataggaaaggacatcgccaaaatatagtgccttgaacctggtggaccaaaggagggaaatgcaagtctcctctcgcatctgcacgggagtggtccccagcgagataaatggaaaaactagggcactcccagccctgccgcctcctcagcagctgctcagccctgaggagccaggtgatcctgaaggaccaaggcctcccacactcctgtggcctcccacaccaccagttctgcaagtgatgatgccttttcccttcctgcctccaaaaaaggggtggttcaacccaaggaggcctccctgggaaaggttctaccccttccttaaaggcaaacccacaggcagggaaggaaggctgtccaatagaaaacaggaatatcccaacagcaatgaccaacccagctcaagctccctaagtggctgagaaaatgaggctgcaggaacagc

SEQ ID NO: 840818 - DNA, 643 bp, Homo sapiens
atgataactcattgtggttttaatatgcatttccccagtggctgataatgttaaacatcttttactgtgcttatttgtctatctctctctctctctctctctctctctcwcacacacacacacacacacacagtttattttatcttattttttggaaacagagtctcgccctgtcgcccaggctggagtgcagtactgcaatcttggctcactgcaacctccacctcacaggttctagcaattctcgtgcctcagacgcctgagtagctgggattacatgcatgtgccaccacacctagctaattctcactcatatattttctttggtgaagtgtctgttcaaatctttagcctatttttaatgtggattgtttgtttcttactattgaattttgagaattctttatatattctggatgcaagtcctttgttggatatgtgatttgcaaatatttcctcccagtctatagtgtctattaattctcctaacaccgtcatttggtgaactctaatttaccaatttttatgttgacagatcatgcttttggcatcctgtctaaaaaactctttgcctttgggaggccgaggtgggcggatcatgaggtcaagaaatcgagaccatcctggccaacatggtgaaacc

SEQ ID NO: 840819 - DNA, 504 bp, Homo sapiens
  misc_feature 344: n = A,T,C or G
gtattttttattatgcaatctgcataamaaattatgaagttttactattttaagtgtacgatccagtgatatttattttattcacagtgttggtcattactattagtatttccaaaacttttcagtcacccaaaatataaactctgtacccattaagcagtaattccccattctttcccttccccaacttctagcaatgtaacctgtctctatgaatttgcctggtttagatatttcataaaggtggaatcaacctacttctcctttcatgtctggcttggtttacttagcatactgtgttcgaggttcactcatgtaacgtgttttggcagttcattcctttntatggctgaatattctaagtatatatcacattgtgtttatgcagttatctattcatagacactagattgtttccaccttttggctattgtgaataatgtttaattgtagtacaagtatttgagtctttattttcagttcttctggttatatatgtaggaa

SEQ ID NO: 840820 - DNA, 504 bp, Homo sapiens
  misc_feature 344: n = A,T,C or G
gtattttttattatgcaatctgcataacaaattatgaagttttactattttaagtgtacgatccagtgatattwattttattcacagtgttggtcattactattagtatttccaaaacttttcagtcacccaaaatataaactctgtacccattaagcagtaattccccattctttcccttccccaacttctagcaatgtaacctgtctctatgaatttgcctggtttagatatttcataaaggtggaatcaacctacttctcctttcatgtctggcttggtttacttagcatactgtgttcgaggttcactcatgtaacgtgttttggcagttcattcctttntatggctgaatattctaagtatatatcacattgtgtttatgcagttatctattcatagacactagattgtttccaccttttggctattgtgaataatgtttaattgtagtacaagtatttgagtctttattttcagttcttctggttatatatgtaggaa

SEQ ID NO: 840821 - DNA, 531 bp, Homo sapiens
cctataacaaagggatttttgacaaagttgacaaaaataaacaatagggaaaggacaccttattcaaaaaatggtgctgggaaaactggctgaccayatgcagaagaatgaaactggacccatacctctcaccatatacaaaaaattcaagaccttaaactataaaaattttagaagaaaacctaggaaagactattctcaacactggccaaggcaaataatttaagaagacccccaaaacaaataaacaaatataacaaaatcaaaaacagacaaataggacttaatgtaactaaagatttctgcaaagcaaaagaaactacagagtaaagagacaacctacagaatgggagaaaatatttgcaaattatgcatccaacaaaggattaatatctggactctttagggaagttaaacaaatgaacaaggaaaaaacaaccctattaaaaagtgagcaaaaatatgaacagacacttctcaaaagaaatacaagcagccaaaaaacatgaaaaatgctcaacataactaatt

SEQ ID NO: 840822 - DNA, 521 bp, Homo sapiens
attcctctgacagatttcttaattgattctgtgttttcttgaagtttgctgaggttcctgaaacaactattttgaattatttgcttgaatgatcacatatctccatcactttagggtcagtctctggcaccttaytttgtccactttgtagtgttatattttccttgaatgttcctgacacttgctgatgtctgacaatgtctttacattgaaggattaggtatttattttagtcttcacagtctggttttgtttgtacctgccgttcttcagaaagcctttcagtaattctaagctgactaactttttgttccttcagcctgtgatcactacagtcatcgtggcactagaggatggtctaagcccaggcttgctgtgagtcttgcaaaaaggtctaagattaatatggctttttggcaaggatagacttggggaagatctaaggagactattaaggctgtctgggaatgttggccaggagtttgagttcagaagattgtccccagtggcccaggtgaatg

SEQ ID NO: 840823 - DNA, 521 bp, Homo sapiens
attcctctgacagatttcttaattgattctgtgttttcttgaagtttgctgaggttcctgaaacaactattttgaattatttgcttgaatgatcacatatctccatcactttagggtcagtctctggcaccttattttgtccactttgtagtgttatattttccttgaatgttcctgacacttgctgatgtctgacaatgtctttacattgaaggattaggtatttattttagtcttcacagtctggttttgtttgtacctgccgttcttcagaaagcctttcagtaattctaagctgactaactttttgttccttcagcctgtgatcactacagtcatcgtggcactagaggatggtctaagcccaggcttgctgtgagtcttgcaaaaaggtctaagattaatrtggctttttggcaaggatagacttggggaagatctaaggagactattaaggctgtctgggaatgttggccaggagtttgagttcagaagattgtccccagtggcccaggtgaatg

SEQ ID NO: 840824 - DNA, 515 bp, Homo sapiens
cacatttagttgttttttctcccagtgcccatctggctctcacttgtcctggcttagtctctatggagcaccatgtactgcaattgaaactgcctttgcaaaaattgtaactgaggyaatttctatgggaaagagatctgacctgattccatcttgcttctaacctccaagaggtccttgttcattcctgagtgtacaccaaactaattttgggaggaactcagtttatggtttagctttgaaacaaagatgataatagccctttcccaaaacaaaccccccttccctgcctggggactagagtgccttggcaggactaacaaattagctgcaagattagaaattatggtttaggagtcatccagctggaggctgcaagattctaaacctcctcaaattgctcctggggataacatcattattgtaaaacctgagatcagttcttgagatattttgctgtactcagtgaataagctgccccccgcccccccccccccccccccccgccattgata

SEQ ID NO: 840825 - DNA, 599 bp, Homo sapiens
ggccagccacatggaatgctgtggagagctggaggaggaacaggacacaggggacccggcttggcaaccctgaagttgtcactgggcttactgagggtcagactggagtagcaggagaacaaatgcttgcacactgacagaagtgatccaacagcagaaagaaattgtcgatgaggcagtcagtgagttgaaccagtgagtatggtcgactttttctcagacattttgacactaaaaggagcagaaaaatgagggagttgctaaaagaggatgagggtcaagggaggtgtttttaggaggagagacaaatgtatggaaggaatttagtaaaagaaattgatgaagagataggagatgaatggaggggtggaattcttgcaaaggcaaaaggagatagaactcagaaaataagaggcctttggttggtacagggtgaagtggaaagcttgggcctgaggcagcagaggtaggagcrtgcagaggctcccaactggtacctcctggtctcagatcacaaccttgagataagaggcgggcagttggatgttgaagatgaaatcgactgtgtgaaatagcctcctggaaagtgggaaagaaga

SEQ ID NO: 840826 - DNA, 621 bp, Homo sapiens
cagtggtgcaatctcagctcaccgcaacttccgactcccgggttcaagcgattctcctgcctcagcctccctagtagctgggattacaggcatgtgccaccacacttggataattttgttgktggtggtggtgttttggtttgttttgttttttgagatggagtttcactcttgttgcccagactgaagtacaatgacgtgatcttggctcactgcaacctccacctcccgggttcaagctattctcctgcctcagccttcccgagtagctgggattgcaggcatgtgcaaccacgcctggctaattttttgtatttttagtagaaaagtggtttctccatgttggtcaggctggacttgaactcccaacctcaggtgatccgcctgcctcagcctcccaaagtgctgggattacaggtgtgagccaccacacctggccttttttgtatttttagtagagacagggtttcaccatgttggccaggctggtctcgatctcctgacctcaggtgatctgcctgccttggcctcccaaattgctgggattacaggcataagccactgtgcctggtccattttaagtttttttaaaaagatttttttaattagcaaaaatgtttg

SEQ ID NO: 840827 - DNA, 625 bp, Homo sapiens
tcttttaagtcttgatttatgatttgtttggtgggtgtggctcagtgcccagtctcagtctgattattttgcactactgaggcaagacgttcctgagtctcctactgtgaaagcatgaggttttccagttggcctggtaggaaaaggcactattcctgtctcagcgtgagcagggggcattgctccttcttatcattttggataattctttccccatagctgggtaatttccttacacacacatgccgatcagtactctgctaaatgctctaaacctctctctttgctctcttcagtgctctcttctttggctctctgtcctatgaactctagcttagttgctccaggctctcagctccatgttctcaaaccagtcttccagttctacttggcgcgccctccaccccgccccacccccggcaggctagaaactctctcaaggttctgagctgaggaacctagtgttcacctcattttccccgtctttcgggaattcccgtccttcawtgcctgatgtccaatgtgttgaagtccgtggtttcatatattttgactggatcttttattgttccaagtgggagggtaaatatgttccttgttacttcatttcaaaatctggttttga

SEQ ID NO: 840828 - DNA, 539 bp, Homo sapiens; identical to SEQ ID NO: 840460

SEQ ID NO: 840829 - DNA, 619 bp, Homo sapiens
ggaggagtgactgtggagttgattttttttaaaggccatgattaaagccatggggacaaggattkaacaaaagggtggcagaagcttcaaagttgtaaaagtgtaatgagagcaaagatccaacctttgcgcagcacctccttattaatgcattgcctacattctacaaggtcatcaaaacctacattgcttgctcagcattgatttatgtattccttgcaagaaaaaaaatacttctctagagtctctttgataagaaactattataatattctgcattttgaatacttttaatgcatgttcctaccaattttatcatctaacatataatgtaatcttcacacaaagccactagtgaaatcattaggaccagcattattcccagatggcatgaaaggacactcaaacacaaagactttgttaaatacctaagatcacactaaattcatcaaggagtttgaatctttctgctaaacataatcacgcttttctgtttcctgcaagaaactgctgtgctgtgaaaaggggactaagaagcttcagtggataataatgaaatctgagatcaaaagtgtttcaagtttttgttagaaacaaatctgttaagaaaatgcaaagt

SEQ ID NO: 840830 - DNA, 602 bp, Homo sapiens
aataataaacatgctctttgtgctacagtcgcacaakgcgatagaaaccatagactcttcagagctagccaaagagcctaccagttatcaatctctgccttataggagatcatcttcatgagtctgagccaccctgacctattcaaaattgggctgatttgggggtatgctattgtagcatacaaatgcactaagtcacagatactcaaggaaacaaggaggcctttttcctcttaaacacagagatgagcaactacagtctgtaataccagccatggatgagggtgaaccagccttaccacactaaaagatcttggaactatcagcacatgttagtaagagggcaaaattattggtgcagaaatgatgaaggaaatagagtattgtttccattgcaactaataaggtggtatttttcttcattaaaaagccttgacttccttagcaatgaacttgtctcttaagctaaccctcaccaagtcattagtatacaaattaaaaatatgtcttggcagtaataatgattctaaactctattgtccaaggaaacttagccaaaacccattgtcctccaatcctcccacttctatagtaccaagtat

SEQ ID NO: 840831 - DNA, 610 bp, Homo sapiens
tggctggaggccaaccaactcaggccatcacagcaactaatgacggaataaccgtgttgccaggaaagagaaaataatatctaattccactgccttcaaaatcctggctaaccagtggtcctgggtctgtggacctcataacaacattactgctagcataaacagcattgagaaagccagcacactaaacgtatctacaaccaaggactctcacagtgagagtctccttcactcccctaccacctccaccagaacgggtactggtgtgtgctgctgggagtcataaagatggatcacatcacagaactctttgcagatattccccagcaccaacccagagcctggtggccccgctgggtggctacaccccaaagggcattaacaatcactgcagtctgactctcaggaagccccatccttagcgggagggggagaagagcacatcaaggcatcaacctgtgggacaaaagaatctgaacagcaggccttgagttccagacttccactgaaatagtctacccaaatgagaaggaaccagaaaagtaattctggaaatatgacaaaayagtgttctacaacacctccaaaagatcacactacctctctggca

SEQ ID NO: 840832 - DNA, 535 bp, Homo sapiens
gctcactgggtcccacgaccacggatccttgctcgctgctagcgcagccatctgagatcaacctgggacactggagcttggcagggggaggggcatccactattgctgagrcttgagtaggcagttgagtatgctcacagtgtaaacaaagcagcagggaagctcaaactgggtggagcccaccacagctcagcaagtcctactgcctctctagattccacctgtgggggtagggcatatatgaacaaaaggcaacagacagcttctgcagacttaaatgtccctgcctgatggctctgcagagagcagtggttctcccagcatggggtttgagctctgataacggacagactgcctcctcaagttggtccctgacccctgtgtaacctgactaggagacacctcccagtaggggccgacagacacctcatacaggcaggtgtccctctgggatgaagcttccataggaaggatcaggcagcaatatttgctgttctgaagcctccgctggtgatacccaggcaaacagggtcta

SEQ ID NO: 840833 - DNA, 574 bp, Homo sapiens
cccacttaagactgaatgaaatatcatcaagattattaagaattatggcttgatggttgcagtagttctaaagaagtgaatgtaacctatacaaagcaaaaatcaaaaggatgaacatstgagttagctgagagcaacaaagagacttcttagtaataaactaaatgaacagatccatttgttgatattgagcatttcctatgtgccaggaccttcctttatatgcattaactctcttaacccttggaggggccctaggagtggacattttcaccagcctccttttgcttcaaggctcaacctgccgagcatcacactagcagcagaactgtgcatcctgcctctggtgggtgcctccttcgccccatctcctccacagtaaaagaacagtgaaaagtgggtcttgattatcacgagatcactgatggaagttacaaactgtccattctatttacaaaagaccctgaatgagcttgagttaggaatggaggtggagaaaaagaacaactgccgtcaaagtcaatgtaagctattttgagctttaaaatcatttgcactcttaaagcttttcctc

SEQ ID NO: 840834 - DNA, 526 bp, Homo sapiens
atgtggggagactcgggaaatcttaaagacatttttccacactctgacacagtatctaatacttttccactcctagcccgtcttcaccactccactccctacacaattagggttctcaactgccggagtctttagctggggctccctcaacagtgtgaatctgcccaaatcagtgctgatccacctggccctttgctggtgctcttttccatggggataaatggaacagtaggagtcggtgatttctctggtttcagactcttgcttttattattgcagtaagtgattaaaggcttaactttctcatttttgcttgttttaattggctacactgacacctggcagcttagttctccctttcccagctcagctgagttcctaacagcattttgctgcctgkagctctagatgcttcgccatcctttggtggttcccataaccctgcccacacctctataagtagtaactttacaaaattctcatcatttattcttgagtatgccattatgttctgaaaatctgtatg

SEQ ID NO: 840835 - DNA, 526 bp, Homo sapiens
atgtggggagactcgggaaatcttaaagacatttttccacactctgacacagtatctaatacttttccactcctagcccgtcttcaccactccactccctacacaattagggttctcaactgccggagtctttagctggggctccctcaacagtgtgaatctgcccaaatcagtgctgatccacctggccctttgctggtgctcttttccatggggataaatggaacagtaggagtcggtgatttctctggtttcagactcttgcttttattattgcagtaagtgattaaaggcttaactttctcatttttgcttgttttaattggctacactgacacctggcagcttagttctccctttcccagctcagctgagttcctaacagcattttgctgcctggagctctagatgcttcgccatcctttggtggttcccataaccctgcccacacctctataagtagtaactttacaaaattctcatyatttattcttgagtatgccattatgttctgaaaatctgtatg

SEQ ID NO: 840836 - DNA, 501 bp, Homo sapiens
cctatgctactattaaggccatgcatgagataamaggccaaagcactggtctagttccaaccttcccataaagaacctaccacaggccgggagcggtggctcatgcctataatcccagcaatttgggaggccgaggccggtacatgacttgagttcaggagtttgagaccagcctggccaacaagatgaaatctcatttctactgaaactacaaaaattatccaggtgtggtggtgggtacctgtaatcccagctacccggaaggctgaggcaggagaatcacttgaacctgggaggtggaggttgcaatgagccaagatcacatcactgcactccaacctgggcaaaagagcgagaatctgtctcaaagaaaaaaaaaaatcctaccacagagctttggaagtttacagacagtaaagagtaaagataatcagccagtataattttttttctttttcatgaaatgtaaaaacaggatccaaagaactatgatcattatag

SEQ ID NO: 840837 - DNA, 646 bp, Homo sapiens
gcatactacaatatatcaacaattatagtacacagaatagtttaataaacctaaaaaamaatcctgtatcaccaattcaaccctccttccttcccaaattttctacaagtcctgatctttttaatgtctctatagttttttcttttccagatgttatataagtggaatcacatagcatgtaaccttttcaggcggccttctttcacttagaaatgtgaatctaatatttgcccatggaaaatatttgcaaactacccatctgatgagagattaatcaccagaatatataaggagctcaaacaaccatataggaaaaaaatctaataaattaataaaaaatgggcaaaagctctgaatagatatttctcaaaacaagacatacaaatagagagcaggcatatgaaaacgtgctcaacatcactcatcatcaaagaaatgcaaatcaaaactacaatgagattgcatctcaccccagttaaaatggcttatatctgaaaaaacaaaaacaaacaaacaaacaaaaaacaggcaataaccaatgctggcaaggatgtagagaaaaaggaaccctcatatactgttggtggggatgtaagttagtccaaccactgtggagaacagtttagaagttcctcaaaaatttaaa

SEQ ID NO: 840838 - DNA, 619 bp, Homo sapiens
cagcaaaccaccgtggcacagatttacctatgtaacaaacctgcacattctgcacatgtaccgctgaacttaaaataaaagttggaaaaaaatccaacaacaacaacaacaaggaaatgtctttcgagagcctatcctaagaatatccctgacctaagaatatccattatgtcaagcactacatcagaattggatttggcatgcagcgttttctttttatgagctcattacaaacttatcagttgactttaagtttcaacaaatgaagatgatcctgggtgggtctggcctaattaagtgagtcatttcttctgtatctaccacagaacttagcaaattgataaatttaaatggtttgcagtatgaataaaaaatgaatgagcataattcattatttattaaggatgaattaggtgagtcctttaaaagaagaagaagcctcagaaagaaattcccatgcttgcatgaaggatgaagtaattaccctgttgtgaacagagggtagcacatggcaagggcctaagggcagcctgtaggccccaagagcaaaccstggtggacagttagcctgaaaataataacagcagtcatacagacataattaagttctagactattt

SEQ ID NO: 840839 - DNA, 406 bp, Homo sapiens
gggtacattggaagtatcttaaagttcatttcacatatatattcctgwcacagcaagtctactctttagtatattctcaatataaatctatgtacattttagcagcattatttgtaataatcttgtaatggtaacaacacaaatgtccatcaatttttgaatgaataaatatattgtgtgatattcatactgtgatcctatacagaattgcaaatcaattaaatttatatagcaaacatacaaataacacaaattggccctggataattctgagtaaaataaaacagacctaagagagtacatactgtacaaatttcagttaacaggcaaaactacctaatagtgttagaatagtaatgacctttggacgggaagctactgagagaggcatccatgattttattta

SEQ ID NO: 840840 - DNA, 560 bp, Homo sapiens
ttcagggcaatcttgtattgcatcactcgtcttcttatggatcaaagaagccaccctcggcctttatttcccacaaytttgtttgcacaggccatgatgggttcacagtgtgaaggggctttccaactcaagtagaacagaccgacactgctgggctgggagcccagttgtttctccctactcagaagtcactgaaaaaggctgttttagtgttaagtccccatgtattaccaaagtaaactgcaatacttcctcacaattctccttcctcctcttactccagataccctgtcccattacccctcattcaccctacccctggccctgggctgggaagaggtcaaagctccccacaattggatgtgaatgcccagatggagcaaatgctggagcccatggagaggatgcttccttcctcttgtaccccagcccaaggatcctgccatgggctccaatgtgtcaggatggctacatgtcttccagcatcgtccccgcatggctgtggctgtctgaaggaacaaagacctagtatcttttctggaggaccctggaaaccaaag

SEQ ID NO: 840841 - DNA, 634 bp, Homo sapiens
atatacacacatacactaaacgtgacatcccaagacataaatttacagtttaggaaatggctctttacaagctgtgtggctgtgtttaatgggcctaccctctctgagccacatctataaatggggatgataatgcctccctaacaaccacccactcagaattccctctggataccagacactgggctgagcatttacatatcactttacatcattaatggcaagtctattgctgaggatggcatgaaataacctacttggaagggttttataaacagtgaagcatgaggcagatatttcattttccctattattagtaggtctcaagtgcttgttttccattgtgaaaacaggagggacttttccaatcagaagggcaagtgtgtgtgaatgagatgtgccaatgaatgatggtgagtcaagggctgtttcaaaattaaaaggtgagtgccggctggcagcttctttcctggagcttcggtgagacatacaaagaggacagaacacaatataatttctcttcctgtatgtttcacagaacatacaactctccttgctgaaagtctaatttacccaattstcatttagcactcaactgactggatgctgcagcacaatagcccaaatcctggat

SEQ ID NO: 840842 - DNA, 571 bp, Homo sapiens
actgcagcctgggtgataagacaagactctctctcaagaggtaaaaaaataaaggcttgggcaacatgataaaaaagttaaaagaatgaagatgcagttccctgacaatggcagtttctcagtacgctctttagtatgctagtagcatggaaactaccaaagggctaagctctttgagagtcatggagctattttatgtatccttggaggcataccatgctatctgaccccaaatagacaattgatgaccaatgctagctcgctctaaagtaagggcctatgcaggctagcttagtttttttagatttatagcagttcaagttattatcattagcacaacatgtggctattaaggttttagggatatatctccttctagagtttttttaaaatcaactttatcttactgtttctctaacttatatttaaataattgtacatagcaatttttggaggaatctggtttttaagaattgctattatgtttctcacaggttttctataaaatctcattcttttgaggaatgtcagagtgattcawtgtgcttatataagtaatatacgtattttt

SEQ ID NO: 840843 - DNA, 565 bp, Homo sapiens
agcaatataaaaattatcaatgggatattttactttttttttctaaatcttcaaaatctgctgtgcatgttaccctttcatgcaacatgacccctgcagaccagccatatttccagtgctcagtagccaagtgtggctggtggcttctagattggacaagacagccctaggggatcctctccatcctcactgtgtgaatgtcatctgtattaccaggacacagaaatctttttcaccagtctggagctctcttttgaactccagattcttgtatacatttggtgccccaaagacacatcaaacttcaaagggaatatcatggggtgggccgggtttgcaacttcatatagcatgaccagggaaggaccctgggaggaaatggtatttgaacagggatctgaaggcagggaggaaatgcactctgcagctgtcttggggaaagcccartgggcaggtaaaagggcaagtacacccatcttgagccgggagcaagcctggcatgtcccaagaacaggagggagggggctgagctgggagagagtggcgaggtgttgactcttggtct

SEQ ID NO: 840844 - DNA, 559 bp, Homo sapiens
gacattttactacacgagttaagtttagaaatcttacttacatttgggtctatttaccattcctactatttttgtaagcattttctctacatacatggagcaccacattagatggtggtataatttttgcttctaccatcaaatattatttaagaaactcatgagaaggaggatcctctgttatctttactcattacattgtttgtttttcttttctgaagttccaatacttgttctgttatcacttcctatttagagcaatttcttaaaccattcttaaggtaagtgtgctgacaaaagttctcttacttttccctcatttgagaattttattatttcccccttaattcctgaagaatattttctttgcctatataatttgcagttgacaattattttcttacagtactcgaaaaatgttgcaatacttcctccttgcctccgtgatttctgatgagayattctctgttgtttaaattggtgttttcctagagataatgtgttgcttctggataccttcaagatttttttttatctttagttttcacaagtttaatta

SEQ ID NO: 840845 - DNA, 652 bp, Homo sapiens
cctccgtgatttctgatgagacattctctgttgtttaaattggtgttttcctagagataatgtgttgcttctggataccttcaagatttttttttatctttagttttcacaagtttaattatgatgtgtctgtcatgaatttctttggctttatcctatttgggattcactctgcttcttgaatctctaggtttatatcttttgccaaatttaggaagtttttagtttttactttttcagtgttgttggggaccagtctctgcctcctctttctggagctccaattatacacatgttagttcttctgttattgttgcccagatcctgagactctgttaatttgttcagtctactttctctctgttgaccaggttgggttgggtaaattctattgatgtttcttcaagttctctaattctatcttctgtcatttctgctctactgttgcatccatccagctggtatttttatgtgttattgtatttttcctttctataattttcatttagttcttcttttataagttctatttctctgccgagagtttcaatttttttttatttgctttaagggaattcawaattgctcattgaagcatctttatgatggctgctttaaagtccttggcagataattctaacatctgattcat

SEQ ID NO: 840846 - DNA, 583 bp, Homo sapiens
gtgcagtactgcgatcttggctcactgcaatctctgcctcccagattcaagcgattctcctgcctcagcctcctgagtagctgggattacaggcatgtaccaccatgcccggctaatttttgtatctktagtagagacagggttttaccatgttggccaggctggtctccaactcctgacctcaagtgatctgcccaccttggcctctcaaagtgctggggttacaggtgtgagccaccatgcccaggtgggacatcatttttacttgaaaacatgactgataggcaaattaagattactctgattattcagtatctggtcgatgaccctttctcaaaatcaaatgtagggagtctctcgcttcaagaaaaacaaccatcatatggttgccaaagctaaaatttaagtgtcccaaagaaacttaacgttttggacaactcatattcaacaacatgagcttgagtgtttcccaatacttacaggattttctgatgagatcaggggtaatataaattaattttatttcttggatgttgtataattaaatgggccaacatttcaaaacatctctggctagtgagcc

SEQ ID NO: 840847 - DNA, 556 bp, Homo sapiens
gaattaatcttccccctcctgtctgttatctgggaagctgtccattagccaccctgagctgamttatagtctccttttcttgcttccacagcagtgagatggtggtgctgagccctgaacgctgtctgcttcctagaagtccctggcagcgtccctacccccacggaaccccctcacccatgttcaggaaagctgccttgtgaagctggtcatgtgggatgtcacctcaggagggaggagtggcctgcccagcacagcccgcagcagctcaggcaaacacagtgcacctcacttgtctgcatcaccatggcccctaggagtgagcacgagcttccacaacctttgctgacaaacaggggttctgcccaacacagccatgatgcctcaacatccggagagaccctgccttgtatcagcacaagactcctgggtttaatgatgcttgaccctagcttctttcaagactttggtcttcatttgtgcatctgcagggagcagggagcatggagggaacagcaagggctgggagtgggtaccaagtcaaattccagcacca

SEQ ID NO: 840848 - DNA, 639 bp, Homo sapiens
tgtttcccctaagaggtgggcgtcctgccacaagaaatggctcatcgggaaacactgagtgaaaacccacattcagagcaaggcttcccagtaactgagatccagcctgaggtttccaggagctgagcctcagatggaatgagggcgggctcagagctcagccaaccctttgaaactgagcctgcgggtgaagtcaggtcaatacattcacaggcgtttcaggccctatcgacgtctggggtgggaaacccacccgaaagctgttgaaatacaggggccagcactggttctgcagaacagtggctctttgagtggaaggtgttcgagaattaagtttccccagtgttcccagggctcagactttaagccaaggggggctggggcccccagtgcctgatggagccgctgataggtccctgctggctaaaagtgatgacattggcaagaaactgatctttctggggagcagaaactcaagagcactcaagtgcagaacacaaggcaagttgtgttacctgccacaaagccccagctttcaggaccaggggagggktagatggggaccacttggtattgggtatcaggagacccagaccagaccctgaaggaggaaacggctgaagcgagacctcttatctt

SEQ ID NO: 840849 - DNA, 527 bp, Homo sapiens
attattaaatatgatgtttgttattaagttttttktagatgttctttatgaagtttagaaatttttgccaatatttctagtttgctagttatagtttctagtttgctaggaatttttttcaaatcatgaatgggtgttaaattttgtaaaatgctttttgtatcaattaatatgctgtaaatgttcttctttagcctgttgatatggttaataaattacatggagtgatcttttaaatactgaagcagccttgcatacttgaattacttggttgtggcatgtacttctttttatacattgttggctctgatttgctaatattatgtggatttccacacataatatttgtgaaacatattggtctgtagttttctttacttataatgtatttatctggttttggtactggagtaatgctagcctgtagaatgagttaggaagtgttccatctgcttttattttcaggaagagattgtagacgattggtattacttcttcattaagtgtttggtagaattaaccagtaa

SEQ ID NO: 840850 - DNA, 527 bp, Homo sapiens
attattaaatatgatgtttgttattaagttttttttagatgttctttatgaagtttagaaatttttgccaatatttctagtttgctagttatagtttctagtttgctaggaatttttttcaaatcatgaatgggtgttaaattttgtaaaatgctttttgtatcaattaatatgctgtaaatgttcttctttagcctgttgatatggttaataaattacatggagtgatcttttaaatactgaagcagccttgcatacttgaattacttggttgtggcatgtacttctttttatacattgttggctctgatttgctaatattatgtggatttccacacataatatttgtgaaacatattggtctgtagttttctttacttataatgtatttatctggttttggtactggagtaatgctagcctgtagaatgagttaggaagtgttccatctgcttttattttcaggaagagattgtagmcgattggtattacttcttcattaagtgtttggtagaattaaccagtaa

SEQ ID NO: 840851 - DNA, 576 bp, Homo sapiens
tattttctaactactttgattactattctatcaactccaaagtggtcaagtttaagtttaaagccttctagtctcttaacccagtgcagtgcattctcagtgtaaagtggtcatgtgcagggcaaacagtagctcattccaatgccactggggctgctctccaagagccaggtgagaaacccatcctgaccagagcaaggtggacttggggccaattcttctacaaagggaaccatctctgaaaatggtataatatggtaacaaatggcggtcttgttctgtgttcatggtcagctgactagagcaaatagctgggtgactgagataatgtatggctaactcaatattcaagctgcctgcatttctaagcacctatatttttcattcacttattcattcattcattcagtctgtaaccccaaatctagcttgagctcactggcttcttaggctctggaggaggcaggctccacttctcaatttccctctggttgaagttcaaagccttctttgggatttctgcaaactgccagcaggctgtargacaccatttccacacatgctgtctctcttctg

SEQ ID NO: 840852 - DNA, 626 bp, Homo sapiens
cacaattacagcaatgctgccataaacatcaatccaatcactcaattcttccacaaatttcttgaacagcatttgggcacatgtgagggtttctccaagctagaagggrtgtagttgggttgcagggtactttcgctttaacagaattgtatgtaatcataagatattcccatggtttcaggggccagggatgagctggtctcttatgaagcagaaaaagccatcccctcccaaccctctgaagctaaacagccccagaggagcccactgtacctcccttcttacctcctcacttcctgtgccttcctaaatttaaaaattgcagggttcctgtaggccatatgctaccttgtgtctactctttaaaaacatggagtggcattttgggaatggggatcaggttgccaactgcagcttggatctgggaaatagcccaagcctccttgcagacagtttttctttcctctaatacctgccttcctttgaacccaggtccagcaggaggagagattagagcatcatacctgttctgactcatagctctccatctgttacagcaagtcattcttggtagagaggtggggggtggggatcggggaaggagataaaatcccgttttaattcct

SEQ ID NO: 840853 - DNA, 566 bp, Homo sapiens
tcctaaaaaaatccacagacttcttagaacttatatttttatacgttacctaaaaatatcatatacatattagacagtgaaaggaagaatgtcactctmgtagaaacatagataaaaaaatagtcctggaatattctattttaactatagctaaagttgtatgctctaagaaatttgaattatagtatttgagaaataagaatttatttttcccagaaattgagtctcttaaaatgaatttccaaatgacagggatgttttacagtataaacttcaacgtgaagtggtaatgcaaagtagatagtgggaggaggggggacaatatgggcctacaagacatttctgccaaagtaccagagtattaatatcctaaattattgtggcagcttccactagtgcccaaaagaaccgagatctctgataaattcattgacttcagattgggaacatgctcattgtttttaaaatcagttaaagatttttcataattttgtaaatacacccttactctaagatcagtattctgcatacaaatgggttaaaacttaagaagcacaacatttctc

SEQ ID NO: 840854 - DNA, 648 bp, Homo sapiens
aaactcagagaaatttaattatttgcctcaaattgcacaaccaagacttgactacagatgttataatgtcaaatcaatgagaatttctatggcatacatgtatttttttattctaagaatgataacygaaaataatgaaagcaaaaactgcctataacaagaaaatttttatttcaaattatatttaaactatgtttaacactcttactgaacactgtatatttgatgaagtattttacaatattgtactatcagtttttcatattattctccctgagtgaaacctgtttcatatcattgaccccctttaaacagtatatgtgacttagaaagacctttttaaaaaatatctttattcctaaacttcactaaaaaaaaaaaaaaacactttgtctccttccattctcatccaaagaacatttaaaataaattaattttctttaatttgcttcaaagaacaaaggctctttatgataagatcagattaactttcattgaacctctatttctaaacaggtatccagagattaaaaaaaaatagagataaaacaaagaagtcctaaaatttctgtctagtagggtgaatgttctctgtagtaatagattttttcatattcttgtcaatagaattggagaaaaaaagtgtaa

SEQ ID NO: 840855 - DNA, 472 bp, Homo sapiens
aaaaattgtatgttttacatakacatttacatatacatgtatgcacatatgtaagtatccatatatttatatgtatacacatacataaaatgtactgtttttgtagtttctatgctaccagaaactctctgcttttaactatggataaaactgggacttgtagtttgagagagaaagattttggctctctttcagctacatattttcagagttgtgggggaaggaaggatatataccctcgaaagtaggttcaaacttagaaaggtagtgcaagctgtagaaggatttataaatcccagatgaataatgggccagacttcaagattctccaattactagagaagaaaaactggaaataaaattaatgtccacagaaaataaatgatgtgacttcttcaaaaggacagcaatacatcctggaatttaccaattagacaaggttcagccagctgtggttgaggggaaaaaatgc

SEQ ID NO: 840856 - DNA, 457 bp, Homo sapiens
cctaatatgtacatagtagaatatcattgtgactctgatttgaattttccaaatggttaattatgttgtacatattttcatgtacttatttttaatccacatatcctcctttaaaaaatatcttttcaatctkttgcctatttttaaattgaattgtttgttttcttgctgttgggttctgagagtttaaaaatacatctttatatattatggccacaagccatgtaagatatgtagtttgcatatgctttctccaagtctacaacctatttgctcctttagaagaaatgtgtttggacatacaaactttttaattttaggccaggtgcagtggttcatgcctgtaatcccagcactttgggaggctgaggcgggtggatcacctgagtttaggagttcgagaccagcctggcccacatggtgaaaccctgcctctactgaaaaatacaaaaattag

SEQ ID NO: 840857 - DNA, 523 bp, Homo sapiens
aaacaaataaataaataaaaactgatataaaatatcaatacaataataagaaataatacaaataaaaacagtatagtataacaactatttatatggtatttatattgcattagattatacataatctagaaaggatttaaagtatacaggaggatatacataggttatatgcaaatatttactatactattttatatcaaggacttctacatccatgaattttgtatgtgagcatgtcctggaaccaattcccctgtgaataccaaaagataactattagtacaatttttgtcaccctatttatgccaatgaaaattagaagcccatattatttaattcaaacattattggaatgagaaaggtaagcacagaagccacaaatctcagttascgatttaataaaaaatattgaacaaatgcaaaactgttgatgtcactggtaagaaaaattaagcactcatctgcttcttacaagtaacttactaaatgtgggaacaatgacagcacctaaccatcaagttgc

SEQ ID NO: 840858 - DNA, 423 bp, Homo sapiens
ccatgaagcctataaatggttatactttatcaaaacagcaagcagctgtgattgttgagatggagtcagtatcattttaattacaactttcactgagagtcgttgaagggatttgtatgtcacattccacgtaagtggaatttgttgtaacttggctctggttaagcaggacttcaaattggccaatttcaacagacattcttcagcccttctaacttgatgcctttacagaatttcatgctgtctaccccttcttctagttaaaactgtttcttatctaggtttccatgttrttatctagcatgttctaatatgaaaggaatgagccttaactgcaatcgatcttggttccattcctagattcactaattagtatctttgagttatatagttcctggtgagctttctatttttttaaatatt

SEQ ID NO: 840859 - DNA, 481 bp, Homo sapiens
aatatttataaacaatatgttacatttctgatcatttatcattttcaaagcacttttgcatttaatatgtcatttgattcatccattaattgattcatttaaaaaattatggcatcacaattacatacatggttacaacaagcttatagtccagagaagaaaaaggacatgcagtaggttattataatactgtatagtgtagtatggggtatgtgaaaaagagataaaattaagcttcaaaggtaaggaaaacctcccttgataaagagacccctacagaatgagtaagactgaagttttaacattctgtaaagttttagctttactcatgatgagaaagaggacaggaaagtggaagtttcatgataaagaaatagcatacacaggaccttttaacatgataagmtattctaagaacatgcaatagggtttctatacttcaatgcctttatttgtaaaatggacataaaaacagtagtca

SEQ ID NO: 840860 - DNA, 486 bp, Homo sapiens
ttttgtttcttttaattgctgagtaatactcattttatgggtgtaccagagttaatttatccattcatccatcacaggacaatgtatagctagagtttaagatatgggaaaaaacagagatgagggaatgagatgccagataataaaagagtaatgcagtagagataatactggttggaaatatgagtgaagaaatgggaatgagaaaatatatcaataagttggactactatcaaggagatagagatgatatttggtaatagaatgcttatcatagagtgagagatagggaggaatgagaatgatctactgatactgacttgggaaaaaaaaccctgttaaaccattccctattcatttctccagattttttttytatgctagtcttcctctggctttcattatactcatcacaatagagtaatatcaattcctggaaatgcccatgtttctttcttccttcctctgagcttttccatgtgtggt

SEQ ID NO: 840861 - DNA, 499 bp, Homo sapiens
gcaacacatggcaacaatgacaaaccttgtatgaaatggagtaataaatctgatttccagagttggcatgctataaaacaataaattaatatatacaaaataatattttaatttttagcattatactactaaaatgtccagttttgaataaaaacttgtgagacacacaagaaacaggaaagaatggtccatacagagagagagaaaaaaaaggtggcaatagaaactgttccttggaacatcagatgttggacttaccagacaaatattttagcagctattttaaataggtttaaagaactaaaggaaaccatgtcttaagagctaagagaaagttgcaaatgatgtctccacatagggaatagttaatgaagaaataaagaaattataaataaaaacaaagccccaaaaycctggagttgaaaattacaataacttaaatgcaaacgtcactagaaagggaattttaactggtagaagaaagagtcagtgatcttga

SEQ ID NO: 840862 - DNA, 517 bp, Homo sapiens
tctgaatcgacccttgtccttgctgccctccactctgaggtaggaatttcctgttatgtctcctgcagggatgtctatgcctrtcccggaaaactctcattttctaacgggaattctattccaatcatgctacttcgccccccttttttttttctcacatatttttgtttgtttgcctcagggatttgaaatctctgactgaacagaagtgactttagaatttgcaatagcagagtaaagaagagtgctgtattctgcccactacacaatgcatccaaaaaagtggagacagaggacattgtattgctgggcacagggtttctgaatcaagcatctcagttgacggtggctgagggagtagcatggggcaaggggtgaggattggaggtaggaggtagttggttgttatacaacaaccttgttttcttcctatctctatttcttcttagtctcaactctacttcatgaagtgaaaccaggtatgtctttcacaggactttgtcacatacttttctta

SEQ ID NO: 840863 - DNA, 520 bp, Homo sapiens
ttttcatctgtcttacgataagagaaagtgccagtaattttctagcacttgggttttactttgtcagtttttatctgtgaccttttaaaatcttgtyctatgctttcattatattttagtgagaagttgagacagatttcccatgtgccattttgatctaataatctttcttgagttgtgaaaattgtatcatgtacagagaaggtcgttctagggaagcacaagtaaaaagtctttgtagtatctgagaccatggaattttcagaaaactgataaataggatttggcttgggacatgatgtggttgtcagcaaatgagggaaaatgtggctgaaaataggtgggccacctgctgattttttgcagtctgtgaaagcatattttccgtttgcaaaaagaacaccaactaaatagtagtgccaatattgcacaattgaggaaccataactgattgtgttatcatttctgctatatttctaaggcagtaattgatgctctggtttgaatagaatagtctcca

SEQ ID NO: 840864 - DNA, 489 bp, Homo sapiens
gtataaattggttcacaaattgctgaaactaaaccaagctgctggctaaaagaatagtttataaaatactgtgctctgaggtttgcttgtaaagaacctagttctggactatcatgttccatagaaataggcacccttatagccaactatgcacgcaactatttcacctcagaacataccagattaagtgcaaagacaaatgtggaattcacccattgccactgctacttgttttaaagtctgatttcttggggaatggacagaattgatttctcaaattcttcattggatctctatctatcccagtttcatgccacatttattatactttccccaactcattccttaaccacaggatcattctacaacattttctgagctattactatgcagtggacattgtgtatgtccagcccttcaaagagtacctagctttatagtatamtcattttgcttaagagcaactaaaggtaagccatgtcagcctag

SEQ ID NO: 840865 - DNA, 609 bp, Homo sapiens
actcaggtggctgaggtataggaattgcttgaacccaggaggtggaggttgcagtgagcygagactgcaccactgcacttcagcctgggcaacagagcaagactctgtctcaaaaaaaaaaaaaaaaattgcaatatagagaccccctctctccaaccctagtggacagtggatagcctggctaagagtaattattgttgcctggaaaatccaggctccttaggaccaaatacaagagtacctttctagctcttccctatcctttcacacagacctcctctccatgggctagagaagcctaattccaaaagaacagagacttagagccatctaaagcagggtggccaggcatggtggctcacgcctgtaatcccagcactttgggagcccgaggcgggcagatcacctgaggtcaggagtttgagaccagcctggtcaacatggtgaaaccccatctctactaaaaatacaaaaattagctgggcgtggtggcgggtgcctataatgccagctactagggaggctgaggcaggaaaatcacttgaacccaggaggcggaggttgcagtgagctgagatcatgccactgcactccagcctgggcaacaag

SEQ ID NO: 840866 - DNA, 604 bp, Homo sapiens
ccatcactcaaatacattcacacacctacatgctctaggtggcccttcttcccagagacctccctgcagagaccctgttactaacagtttagacagaagttaaagttgatctcggccttccaactgccagggcagtcctctgggcttcacacccctgctactcacagtcaggggtagtctccatccaagatgcaggaaaagttagagtgttgttctccaaggcaacactccaaatctttaggatacctcaaggtcgccagctaaatatattatttaccccaagctggggatggtagtggggtgggcttcttcaggggtcagaactgtctctacgtagagagctcaggcagccactgccagccaggcacacaaagactatgtgctaaagggaaccagggcagggctttccatgccatgtggggcctgggtaggtggggccaggaaatgggagggctaccctgctgcgaggacccygccttgcacatggatactctctggtccatggtccccagttcctcctgaaaaattattgagattccatctactttccactcaaggtaccatgctcctttgtaatgagctcctttgtaatgagctttgtaat

SEQ ID NO: 840867 - DNA, 624 bp, Homo sapiens
tctctctcaaactgtctctttctcattcctttgactccactggacttgccgcccccgcgacctggtgttgggtctcatcaccccaacagattcccattctaaagatgagggaaccaagaggtggaaggtacagttagaataagaaccgtttcttctgactctgaaatctttcagttctagcatgctaccacccacactttaaaaaactctgaagtaggcagagaattcccttttgttggaggaattgctttgagagacctggttttactggatgaggctttggaaaccaacctgaggcaggcgctagcacatcctgagaggggtgtgacctggcacagaggcccagcctgggcttcatgtctcagctggcaagatggcctgctcattgccattccaggccaggcagggccaaggggcttcagggacccatgccctcatgggtgaaatgtgtacatcaagccctggatttattcccatttggatggaaacactaggcaargtattttcttgttgatataaaacattttacatatttatggagtacatttgagcatttcttacatgcacagaatgtgtggtgatcaatcagggtgtttgtggtgtccatcaccttgaatattcggt

SEQ ID NO: 840868 - DNA, 609 bp, Homo sapiens
cattggtaagagaaaaattcgattcctgcaggggccactgtctgcgtggtgtttgcattctccccacgtctgcgtgggttttctcccatgtcccaaagctgtgcacgctaggctcattggtgagtctgcatggtcccagcacgagtgagtgtgggtgtgtgagcaccatgtcctgtccagggtaggttcccacctggcatcctgagctgccaggatgggctccagccacccacgaccctgaactggaataattgggtaaataattatcttgtttttctttctttcttctttctttctctttctttcttttttctttctctctctctctctctctctttctttctttctttcgagagagtgtctcgctctgtcacccaggctggagtgcagtggcacaatctcagctcactgcaaccgccacctcctgggttcaagtgattcttgtgcctcagcctcctgagtagctggattacaggtgcccaccaccacagtcagctaacttttgtatttttagtagagatgaggtttcaccaagatggccaggccrgtctcgaactcctgacctcaggtgatccacccacctgggccttgcaaagtgctgggattaca

SEQ ID NO: 840869 - DNA, 374 bp, Homo sapiens
cactgaggctcagagtggccaggtgccttgttcaagatcatagggcctttgaggactaatgctcgcctgctccctttctagtgaaataatccaaacagtraagatccactgtgagtcctccctctccctctcctctcccactctccagaagtagccactcttagtaagagtttggtggggtttgtatcagaccccttaaaaaaggtgtttatcaacatatatgtatacaatattcatacagttatattggaaaatgggatattgacctcatttttctgaaattcacttctttttcactcttcagattgtcaatattgccaaattctaactgtgcctggagaatctggtgatgtatctgggagggaagtggtgat

SEQ ID NO: 840870 - DNA, 374 bp, Homo sapiens
cactgaggctcagagtggccaggtgccttgttcaagatcatagggcctttgaggactaatgctcgcctgctccctttctagtgaaataatccaaacagtgaagatccaytgtgagtcctccctctccctctcctctcccactctccagaagtagccactcttagtaagagtttggtggggtttgtatcagaccccttaaaaaaggtgtttatcaacatatatgtatacaatattcatacagttatattggaaaatgggatattgacctcatttttctgaaattcacttctttttcactcttcagattgtcaatattgccaaattctaactgtgcctggagaatctggtgatgtatctgggagggaagtggtgat

SEQ ID NO: 840871 - DNA, 625 bp, Homo sapiens
tatattcattgattttagttaaagattaatgagaaataacattgtattgaagtattatttctgcaacaaaatcgttcamtacactgtttaaagtaaacgatttaaatcaaggatatttttaagaattagatgagttagtaacaattatcttttttatttgacaacttaaaaaatataaatgaagcacattagagaaagttgtttgtattttttgcttatttttgtttgtttattgtaaatattggataagctattttgaaagtgaatctttaaacctaaaagaatcagaattatcatatcataagaagttcagactggaagtagaaaatttcactataaatctaacctccaaattagctagacactaggatatgtgcaaatgtctgtgtactccaaactaaataggaaatgtacatgtcattaacaattatatgctagagtcataactattattcacttatcacctgcttatgctaactatgttacaataagttgttattatattgttatgttacttttctttacctcgtaaggaagagaactgggaaaacgtatgtctcagttaaggtacatactcttcatccatccttctttcttttatttctttaattattgcttcattcat

SEQ ID NO: 840872 - DNA, 455 bp, Homo sapiens
ccgtaatcccagcactttgggaggttgaggggagtggatcacaaggtcagaagatcaagactgtcctggctaacactgagaaaccccgtctctactaaaaatacaaaaaattagctgggtgtggtggcatgcgcctgtagtcccagctactcgggaggctgaggcaggagaattgcttgaacccaggaggtggaggttgtggcactccagcctgggcaacagagcaagactccgtctcaaaaaaaaaaaaaaaaaaaagactgtagtttgttaaagaggttacacggtacacggtatctgtatacacaaggggctactaaggtggatattgtggtaggctgaaaaatggccctcccaaagataccaggttattttcctggaacccgtaaaaattatctttattgggaaagaaaagggggggtytttgtagataagagtaagttaagactcttaaa

SEQ ID NO: 840873 - DNA, 409 bp, Homo sapiens
caaagaaggaaaatccacaccctttctattttggataaggaaaagactcaactcctggtgtgtgctttttggctaaaaactacagcctatataaatttcctaaagactggaaaaaaatttgcatgtatgaaaaggatcaaaccattttcaaaggatttttaactggcaatcttttaactggggagaaataagggggtagaaattacatctgtcatcaaaggatccacccttctgaaaatgtgtaattgtggtgtatcccgccccatcacaggcataaaggcagctctaaataaaagttctttctaaaattarctgagtataagaatcccctagtcacccattgatatttaatccattctcaaatcatgtatggcctctcagagacatttcagattaacatcaaaccttt

SEQ ID NO: 840874 - DNA, 490 bp, Homo sapiens; identical to SEQ ID NO: 839871

SEQ ID NO: 840875 - DNA, 560 bp, Homo sapiens
ctctgtatgactctttccatactccccggctggtgccttcagagccacaraaacttccttactagacttgtgaggaaggagggagccttggtaagagggaatgtgtaagaccagacatcagaagagaggaattctagttttggctctgctggcaacctgtcgagtgaccttaagcaaaccattcaatatctctgaatctgctgcttcatctgtaaaatgaagggttgggccagatgattttatttcattattattttttaatgtttagagacagagtctcactctgacactgaggatggagtgcagggctgatcatagctcactgcaaccggcaactcctgggctcaagtgatctcacctcagactcctgagtagctgggaccacaggtgtgcaccatcatgcttggctaatttttaaaaattatttgctgacacgaaacctcactatgttgcctactttcctgagattacaggcatgagccactgcatctagcctaggacacatgatttttaagatgacttccagtttcctatgtttatctctttagtttctataaatt

SEQ ID NO: 840876 - DNA, 645 bp, Homo sapiens
gatttataagatttatcttataaaatttttataaacaatgtaattcagacatgagattatactatcccattcatcttaacctttcttgatttgaraaaaattatataaacattttaagcataaatttgacttaaaattaaattaaaaagttgtatattttattgttatcatatgaaaaatctaactcatgctatttgtggatgaagcctaatttttatatttaaattgttataactatgtacatttttttcttaggtcttcttttcaaattcatttttcaacttaaatattgagatgctgatgcacacaacttgtacttgcatgtattatgtaaataatgaaatgcaatattttatctttttattggattccagatatagataaataatttttgtatacttaagaataaagaaaatattcccccccagaaatacttcataaataattttaaaactttttaacgaacacttaagaggaggagaagaagaatcaaaagtatatgcttagtaggtaaatgtgccagcaccatatgtagaattttatggctggaggggaggtgaagaggagattcgttttaaattaatataccagagagtgacacagaatcactagttattcaaaagcaaaactctagagaaattgaga

SEQ ID NO: 840877 - DNA, 602 bp, Homo sapiens
gtatagtttgaagtcagttaacgtgatgcctccagatttgttctttttgcttagtcttgctttggctatgtggacccctttttggttctgtataaattttagaatttttttctagttctttgaagaatgatggtagtattttgatgagaattgcattgattttgcagattgcttttggcagtatggtcatttttacaatatctattcctcccatttatgagcatgggatgtgtttccatttgtttgtgtcatctatgatttctttgagcaatgttttgtagttttccttgtagaggtctttcaactccttggttaggtatattcctaagtatttaattttttctggcagctattgtaaaaggggttgagttcttggtttgattcttagcttggttgctgttggtgtatagcagtgctactgatttgtgtacattgattttatattgtgaaactttactgaattcacttatcagatytaggagctttttggataagtctttaagattttctagatatatgattacatcattgacaaacagcaacagtttgacttcccctttaccaatctggatgccctttatttctttgtcttatctgattgc

SEQ ID NO: 840878 - DNA, 560 bp, Homo sapiens
gccagagtttatgtaaaatgaacataataaggtctttgtgcacatttacattaaggaaaaagagcccttaaaaaagttgacctgaaaactgtasagatcctaagttattttgtttttctctattctcttttctgtctgctttaaaactgctgtaattttctattaagataaaaaccactgtttggattcaacaggttttttgttttgttttgtttttgtttttgttttttgcaagctggtgaatttgtatttatctcatggctaaagttctgaagtaaaaggtatagaatctttctgtgtttgtgtatgtgcatgtgtatatatctagaaggcctttataatttctataatttttatctttaattagcaattaactccattttaatttccctgtagcacacccgactttttccctccatatcatatgatgtaaattttgctgtttgattttcacctgagttgtttccttcaatatacatatttaaggctatgaaagtctaagataggaggaaaaaggtcattataaatctataagatgtacttctattggcatacctaat

SEQ ID NO: 840879 - DNA, 543 bp, Homo sapiens
atgttatccaagctcctgaaatttgctgtgtatctgtaactttcagatccccttgtttgctccctcaaattcttaggttttttgttaattagcaccccatgctaccatttaaattttcctctttttaatggataacactatatatataaaattgtataacttgcttttttctcactcaacattatggacctggatttatctatgttggcacatgtagtttagtaaattcttttttattttattattttattttactttattcttttattatactttaagctctgaggtacatgtgcagaatgtgcagaatgtgcaggtttgttacataagtatacatgtgccatgatggtttgctgcacccattaacccatcatctacattaggtgtttctcctaatgctatccctcccctaaccccctacccgccaacaggwctcagtgtgtgatgttcccctccctgtgtccttgtgttctcattgttcaacacccacttatgagtgagaacatgtagtgtttggttttctgttcttgtgttagttttatt

SEQ ID NO: 840880 - DNA, 489 bp, Homo sapiens
tggaaaatgatacagccatgatcaaagataggtttgcagtgtttttataaagctaaacatgtcttaccaaacaatccagcaatcatgcatgtaggtaattgtccaaaacacttgaacatttatgtccacataaaccctgcacatgaatgtttatggaaactttattcataattgcaaagtctgagggcaacagagaaatgcttcagtgggtgaatggataaacaatcttctgaatggataaactgaggtacatgcctggattaatgtaaaatactattcagatataaaaaggaataaactataaatcatgcaactacatggaggaattgtaaatgcatgttgctaagagaaagaagccaagtggggaaggytacatactgtatgattccattatgtggtgttataaaagaggaaaaattacagagatgaaaaggacaccagtggtttcctggggattggggatgttttaataggtgaaaaagagaatat

SEQ ID NO: 840881 - DNA, 648 bp, Homo sapiens
gtaaaaacaaaaaaagagctgcctctcaattttactgtgaacataaaattgctctaaaaataaagtttactattttttattattatttttaaaaataaaaagacygggcgcagtggctcacgtctgtaatcctagcactttgggaggccgaggcgggcggattacgatgtcaggagattgagaccatcctggctaacacagtgaaaccccatctctactaaaaatactaaaaattagccgggcgtggcagcgggcgcctgtagtcccagctgctcgggtggctgaggaaggagaatgttgtgaacccgggaggtggaacttgcagtgagcccagatcgtgccactgcactccagcctgggtgacagagcaagagactgtctcagatagctagctagctagatagataggctgtcctttctcccttgtttatattagtatggactcactgatatttattatattctatggattcgaatccaatactatgattatttattttgtcttagctttgaccaatggaactatctcttcaagttggttagatcctttcatatgcccctatcattttttagttactttctgataccattaaatgtttcaggttcattttgattttccctgcctcagtcctggaatcagtcatttct

SEQ ID NO: 840882 - DNA, 579 bp, Homo sapiens
aactaaagctgttgcaatgtcttagagaattatttatatgattctcgaagacagctttttcattatttgcctcataaattttatagtttggaataagatggagtagygcataaatattaatttaaagttgagttcagcacttggataaattgaattagcatatgttacttccaaaataccaaagagttctccatagagttctattaagcggtgggggggaaaaggcatttatctttagagagagaatttaacaatattgcctcttagggacatacgaatattagaaaatttatggcaccataatttctagcactataggatacagtttttaaattgtttcctgcagaagctcaactctaacacaaacacaatcttcacactcccaaatactaacaccgcatccttttcctccagccagcagtttcctctgcaccgacaactaggggttctctttcctgtttataatagtcccattcaattaccttgttcactgagaaaaacatataacatttcttttttcttcttagaaatgaccataaatccaggttagtttgaaaaccattaaagtcttctgtgtgg

SEQ ID NO: 840883 - DNA, 633 bp, Homo sapiens
cataatgatttaaaatcctaatttaatgaactcaatttcatgaagccttgagcacgattaaatgcattttgtcagcaccaggctactttcaaaaatgtgtttagacttctcaccctgacagctgttctctttgcwctttgctttttaagtaacacacttgaggaaggctgacatcagtcaatctatatttgaacagaagaagagaccttcctttgttagaatttccaggatgcatcatttaacttcagcatgaagcatactgtgttgacccaaataagggcactgcaattagagcacaaaccaaggtaagggctgattctctatggaatagcctttccacatataatcatttgtaccaaggaaagtattacattaggagattccagggccttataataatttcaaaatgtaacaaaacaaacatggaaaatgccaaatgccttaaaggaagacagaattttaaaacttcccacctcgatggcaggttaataggtgcagcaaacccccatggcacatgtgtacctgtgtaacaacaacctgcacattctgcatttgtatcacagaacttaaagtataataataaaaaataataataaaatctcccttcatatgtcacttataatcccatcttat

SEQ ID NO: 840884 - DNA, 593 bp, Homo sapiens
  misc_feature 172, 173, 178: n = A,T,C or G
ggtacaggagaaattttgttacatacacataatgcatgatgtgatcaagtcagggtattcagctgtccattactcaagtgcagtacatttttgttaagtgtattcaccctactctggtttccttttatctcactstatgtttgtatcctttaacccacttctcttcatctcnnaatcntcctcccgtccccctgctcacccttcccagtctctgttatctatttttccactctctaccaccgtgtgatcaaatttttagcttttggaattcttgaggttgctttttagagcgtttctgtccccttctctggctgtcagcttttatttcttgctgccagtttgtctgcaaggcagtaagtggcatccccctccctttttatttgctttgtccttgggagctggaatacagaacttgttggaatttacgtaaatggagaagccatagaccctgagagagctgatggcctgaggccttttccttgaggaagctcctggcactttcaaggcatgaacattgtgatgtatattttgatggttgggaggcatttttctgtggcttgctgctacgtttgggctgtgttcctctaccatcc

SEQ ID NO: 840885 - DNA, 594 bp, Homo sapiens
aaagtaagaaatataatttaatatttacctttattatttcatttccagcttctttatttttgtatgtgtgtatcctaatttccacttgatatcttccttctgcctgaagaacttcctttatatttcttgtaacacaggtttatgggcaataaattctcagcttttgtttgtctgaaggtctttattttaccttcattttttaaaggtatttttaccagacataaaattctgagttgtcaggttttttctcttggtattttaaagatgtcagtaccttgtcttatgccttacataatttttgatttgtatcattgtgtgatatgtattatccctctgcacgtaatgtttccttttttgtcactgacttcaatatattttatcttcagttttcagcagtttgattgtgatgtatctagattcattttttttttaaggagagaggtattcttgggactctgggcttcttagatctgcaactttttgtcwttcattaattttggaaaattcttagccattatatttaatttttttaacctgtttctctttttctttggaactctttttttttttttttttttgagacagggtctcatc

SEQ ID NO: 840886 - DNA, 594 bp, Homo sapiens
aaagtaagaaatataatttaatatttacctttattatttcatttccagcttctttatttttgtatgtgtgtatcctaatttccacttgatatcttccttctgcctgaagaacttcctttatatttcttgtaacacaggtttatgggcaataaattctcagcttttgtttgtctgaaggtctttattttaccttcattttttaaaggtatttttaccagacataaaattctgagttgtcaggttttttctcttggtattttaaagatgtcagtaccttgtcttatgccttacataatttttgatttgtatcattgtgtgatatgtattatccctctgcacgtaatgtttccttttttgtcactgacttcaatatattttatcttcagttttcagcagtttgattgtgatgtatctagattcattttttttttaaggagagaggtattcttgggactctgggcttcttagatctgcaactttttgtctttcattaattttggaaaattcttagccattatatttaatttttttaacctgtttctstttttctttggaactctttttttttttttttttttgagacagggtctcatc

SEQ ID NO: 840887 - DNA, 602 bp, Homo sapiens
atacgtcaatgtgctttgcagactgctagctgtgcatgtgtcagctcccatcatggtaaatatttttattggacaccatattaacccatcagcacccattttctagtcactgggatacaggatggctgcattttagtggatagtgggtgcctaggaagtcaaatgagtgggctgtgtttggaggggcaaagaccaaagacaactaagggactcagggccttagaggtggccttctagagtcatgggcagaaggctcttagggagttctctccagatgatctgcgagtaagggaagaaggcagcactgggtggagggagaaggtcacccacaatgagtttcagtggatccgatggggcgttctgggccagatgatcttaagacctatatgaaattgaaaggtattatccttgcatcatctgggcattggcctcagggagcccctgggagggcaaatgcttgggcgaggcagctctctgtggccaaggsgaatttccagaaaggaccacagccaagacgtgggagcatcatctgaagaggacgtctgtgtggagcacacaggccctgcacaggctgaggacctgggagctggtggtgagcatgt

SEQ ID NO: 840888 - DNA, 602 bp, Homo sapiens
atacgtcaatgtgctttgcagactgctagctgtgcatgtgtcagctcccatcatggtaaatatttttattggacaccatattaacccatcagcacccattttctagtcactgggatacaggatggctgcattttagtggatagtgggtgcctaggaagtcaaatgagtgggctgtgtttggaggggcaaagaccaaagacaactaagggactcagggccttagaggtggccttctagagtcatgggcagaaggctcttagggagttctctccagatgatctgcgagtaagggaagaaggcagcactgggtggagggagaaggtcacccacaatgagtttcagtggatccgatggggcgttctgggccagatgatcttaagacctatatgaaattgaaaggtattatccttgcatcatctgggcattggcctcagggagcccctgggagggcaaatgcttgggcgaggcagctctctgtggccaaggcsaatttccagaaaggaccacagccaagacgtgggagcatcatctgaagaggacgtctgtgtggagcacacaggccctgcacaggctgaggacctgggagctggtggtgagcatgt

SEQ ID NO: 840889 - DNA, 431 bp, Homo sapiens
tctaggagtcctgagatttccaaagttgcttcttcctgaagatcacagagtttgcagtgacacactttcttgtaagaaaggccaggaaacaatacacggaagttacctctgaagatttgggggrccctccctgacatccatttaaaacagaaccttggatatccctaaaataggtctaggcttcagccagctcctgtaatatctattagcatttgctttgcttttacttataaagaggcaaagcgtgaggttactgaccctaggtgatttgcggcccttccccaagctatggcttccattagcattactgatgcacaaatgtgggccctgggagtcagaaggccaaaggcaaaatactccatcccattatcccattagtgcaggggcaagagtctgtgcatcaggagagtccttcgatctcttggtcccag

SEQ ID NO: 840890 - DNA, 431 bp, Homo sapiens
tctaggagtcctgagatttccaaagttgcttcttcctgaagatcacagagtttgcagtgacacactttcttgtaagaaaggccaggaaacaatacacggaagttacctctgaagatttgggggaccctccctgacatccatttaaaacagaaccttggatatccctaaaataggtctaggcttcagccagctcctgtaatatctattagcatttgctttgcttttacttataaagaggcaaagcgtgaggttactgaccctaggtgatttgcggcccttccccaagctatggcttccattagcattactgatgcacaaatgtgggccctgggagtcagaaggccaaaggcaaaatactccmtcccattatcccattagtgcaggggcaagagtctgtgcatcaggagagtccttcgatctcttggtcccag

SEQ ID NO: 840891 - DNA, 595 bp, Homo sapiens
ttcttgaatagcttttccttttccctctttctttgtttattctgattaaacaaatccttcagaaacttttgagaagcatttgagaggtaaaatttctgatgmattttgtctcacactcgattgacagcttgattgagaatagaattcaaggttaggaagccttttgcaaaatattttttgtgtgtatgacagggtcccactctcttgctcaggctgaagtgcaatggcacaatcacagctcactgcagcctttgcctcctggctcaagtgaacctcccacctcagcctcctgagtagctgggactacaggggagcaccatcatactggctaacttttgtatttttcttttcttggtagagatggggtttcaccatgtttgccaggctggtctcaaactcctgggcttaagggatctgcctgcctcagcctcccaaagtgctgggattacaggcatgagccaccctgcccagttagcatggaattttgaaaacattgattcattgtcatctatctcccaagttactcttaagaagcctggtaccattctaattcttcatattttgtacataatccattttttcctcttgaatcttt

SEQ ID NO: 840892 - DNA, 665 bp, Homo sapiens
gcacttatttacttattgtagtctaggcttatggttttctagtctattctatgggttgcattccattactttcattattyattttgatacccaaattgtcccagattttgcaagtgggtgtcttctcaagctggctcttaggtccctctgacatgttcccattgtgttttgagcaaccgcttactttgtggcacatcaagatgttccaggctcattttgtaccttccctgcccctgccctgaaatcagccccactctccaaagaggcctggttcctctcagtggaagatggcatttaaaaacccgatctggacccttggttggctactactgctggggtgtcagacttttaggccctttcagtggacacagttaggaaataaatgatacagggtcacacacaaccacacatacacatgtatgtttgttactatatgtgtggatatctgtatctgtatccatctataaatatatgtgtacctctatatctctataactatcactatattgtggattcacatcaataccttccattccaagccaacacgtcaggattctttttagcctttctcctttctatatttgtaaatctcttctccaacaaacagagagaaacctgactcccattatcttgagtatattgacttatttgctccatctggcctt

SEQ ID NO: 840893 - DNA, 520 bp, Homo sapiens
tacttcatttcatacagccacagttattaatactttgctaagggctacccagctgctaaaaactgctgttatctcatactgagaatgctagttctatacctttgctctcaggctgtgaggaaggggtgctagtccaaaaggccatgggattagatttaaaaaggctaaaattaaatcctagaaaataaagaatatttcgttttttaacattttaggaaacaaaatgaatatgcttttaaaacataaaaagccagaatccctcaatttataccaccaatctgattgtcttacatattcatttatccctgtagtttcattctttgctcatttaatacatgagcaagactgacatacaacatataaaatgagaacatctcaatatcacgttgtttttttttttttggagacaaagtctcagtcactcagtcaggctggagtgcagtggcatgatttcagctcactgctacctccatctcctgtgctcaagygatcctcctgcctcagcctcctaagtagctgc

SEQ ID NO: 840894 - DNA, 599 bp, Homo sapiens
tttgttgtgtttctgttactctgtttttctagtttagttgtattgttgaggttgttttatggctgagaatatgtattctgttgtttggtagagtgttgcataaatgtcaatttgatcctgttggttgatggtgtttgtgagttgttctatatccttgctgatactttgtcctgttctatcaagtgtggagagatagatggatgttgaagtctctggctataattgtagatttatatgttataaccttcatctgttttgcctcacatattttgtaactgtgttcttgtaaatttatgattatgtcttggtggatttgccctttttatcattttataatgtccttctctatctctgaacatttgcattgcctctgaaatctctatctgatactaatatagagacttctggcttcatttgattcatgttctaaaaatatatcttttcccagtctttttcttttgacctgcttatatctagaatgagtttttttaattaaatagcatayagctgcatttagaaaaaataaactttgtcaagctctgttttaattggtgttttaggccatttacatgtaatgtacttattgatatgttagggct

SEQ ID NO: 840895 - DNA, 540 bp, Homo sapiens
atgataataattccctcatgaccatttttagcagttctcaaagacttcaagacaagttatccttagttgggtaaccctgtctcccatggggctgggctgaggaggggktcaaagggacagtgtcatgtctctttagggaacagtagtcaactttgtgatggctgctctcaatgatagccccagattggggttatctgaaccaagtcactgccaactcagtggtctgatggttcttgggcttcactgtacattagactcacctaggagcatttaaaaacttgatattgctgtttctggaagataagagtagatataattttccctaatcctcccactaagtacagctaaaagccctggacattctgtgtaaaacaaatacaagaagtctgaaaagtggagaaaagaagacagaccaactagggacctcgataccttaggatggtgatggtggtaagttccctgggttttcttttgcctcataaattccagacatggggcagaaaagtccaaaaatctggaaataatagcaaccacagacaa

SEQ ID NO: 840896 - DNA, 444 bp, Homo sapiens
ccaaagtgctcagatacaggtgcccggcatccaccgcgcccagcatccaaagagagaatcttcttgaggaactcaaaagacttttctcttttggataagcagttcatatttctgcatttattagggattttcacattttacttcattttacactacattttttttttgttcagtggtataacattttcaccaaggcactgaaaattccatttgcattagtgtccaatgtcatatattccctaccatgttgcaaatacagttcatttgtccagctttattgaggtataattcacaaataaaaattgtatacatttactaggtacaacatgatgttttgctgtccaagcatacctcattttatcgcactacattttattgtrcttcacagatactatgttttttacaaattgaaagtttatgcccaccctgtgtcaaacaaatctt

SEQ ID NO: 840897 - DNA, 618 bp, Homo sapiens
aggaatgtagaatgctataactttcatggaagatgtttacaaagttaataatacatttaccatacattccagcaacatcacttctaattacttaaccctcccccaaaaatgaaaacctaagttcaggcagagatttccacatgaatgttaataaaagctttattcatatagccaaaacctggaagcaacacaaacatccaacaacacaatatttattcacagattttggtatatccagaaaaaaaaaatccctctatcctcctgggtttagtaactgagacctgtgaattaaactgacaaattaacagaagaaaaagcacacaaattttattagacagagtcttgctctctcacccaggctggaatgcagtggtgcactcacagctcactgcagccttgacctcctaggctcaagtgatcctcctgcctcgacctccaaaatagctgagacttcaagcatgcataactttgctcagttacttatttttattttttgtaggtataaggacagggtctcattatgttgcccaggctgtctcaaatttctgggctcaagtgatcctccctcctcgtcctcccaaagtgcygggtttacaggcatgagccattgtgccttgt

SEQ ID NO: 840898 - DNA, 676 bp, Homo sapiens
gcattgtgtatgtttattcctattgtttttctttatttttgtcccagtttgtgatggtgagataaaaaccccctcaygaaggcttccttgatattcaaattccaactgaccttctctttggagattctatattaagacctgagtaccgaatactgaacattttgagtcatttactacactctgttttcaaactgttctaaattctcttgataacaaattttaagctcctgatgcagttctcctgtcttacatttctcacaaatgtcctacaaaagttttcatagcttcaagcatgtgaaaaataccttttggtgaaagtggatgttagctaaactatacacagagacctctctatatttttatcaaataaatttaaagacttcattccaattcaggtgaaacagtaacaaatatcaacaatacagagaaaaattaagtgactctaaatccattagttgcattaaagtaaccaaaacaaatatcagtgcaaacaagatgggggaaaaaaaggaaagaaggaaaagaaaaaaaggggcaaatttctaattcacatcaagaggaaaaggctgctaaaagcatccttctgcaggtgaatgtgacaaatttggtgtcactgtgcaggtcccactgcccttggtctacgcaaatgtcatagataaaagagctggtggtggat

SEQ ID NO: 840899 - DNA, 617 bp, Homo sapiens
gagggaaacaacacccagagggaagaacgtaaaaggaggaggaagaaagaaagagataggatgaggcaagaaaaaaaaaaagagccagggaagatggtagaagcattcaggacattccatttattttgaattttgctgacatcaaatcttatgatgttttaaaaattggctttttgttggcgtttaatcaagtagcatgtacaaactaaagaaatcaaagagacttagaaaaaccaatttgtgcaagtcagggcctcattaggagacataaatcacactagttatttggacagaattttatataaagaattattaactggttataaagttgttcactaaataaatgaaagagtaacaagggaacagtaagttatagtagaaacaactgtagaaagaagctatcatacctcgcggtgaggtaataaaggcaagaggctggaattaacagtattcacctctttattctcaaaggatcagttccaagaccaccagtgaatgcctgaaaccatggataatatcaaatcctattgccatcaactggaacacatttctgttatgtcttccacccamaaatgcaatacctttcccatcttaactaagcatttatcacacactgt

SEQ ID NO: 840900 - DNA, 593 bp, Homo sapiens
tccctccctaagggccattaggcttactttcttaagggttaaacagaacccagcccttttgaaagccttgccaggctcccctccctttttgcagtttcaacacagtaattgactggcatttcttcttgttaagggactaccacccttagaatggttctggccagtctaaagaggctatgtactttggccaggcgcggaggctcacgcctgtaatcccagcactttgggaggccgaggcgggcggatcacgaggtcaggagatcgagaccatcctggctaacatggtgaaaccccgtctctactaaaagtacaaaaaattagctgggcgctgtggcgggggcctgtagtcccggctactcgggaggctgaggcaggaaaatggcatgaacccaggaggcggagattgcagtgagccgagatcgcgccactgcactccagtctgggcaacagagtgagactccgtctcaaaaaaaaaataaaataaaataaagagtgctgagtgctatgtactgagtgccttcatatyctctgcttcaccttttgactaatagagtctaatttagtacacttaaatattcagtctccgcgccctc

SEQ ID NO: 840901 - DNA, 589 bp, Homo sapiens
ctgctggtggtgggttgatgataaccatatttgacgcccttaaatttctaaaattaggagtcattgtattcattctagattgaggaggatagcatttaawtggggcttaagtatgccttgtaagtatgtaaaaagatataaaattaccatgcatactgtctttcaataacataacaagactgtagtttagtgaactcaaggtgacaaaatagccattattttcttactgtgagagtcattttgtttattgtttgcatgagtgacaatttttccaatgaaactttcttggttaatagaccctttcttatacataaatatgaaataagagggtgatagaaatcagatattatatctagtttttatgactagcagattacacagaataaaaacatcacaatgacacaaaacataatcttacacattagacaaaggcatacaactttaaaaaatattgcaatcaaaaagatgtaattaaattaccctgattcattgaaactttagcttttaaaaggttcatttttgtgggtataaataaattttgttatcttaattttatacaagttacaattatattattgttaatgacaga

SEQ ID NO: 840902 - DNA, 622 bp, Homo sapiens
cacgagggttaacaaccaatacactatagtggatcatgctgccagatgattttgccttgttttaagctaatgtcagtgttctgagcatgtttaaggtaggtgaggcttagctatgctgttctgtaggctagctgtattcaatgcattttcgacttaactatattttcaacttacagtggatttatagggacccaattgcaaactggggagcatatatttgataagtgtttgtggttatgttccaaagtactcagaattatttttacactgtggttgggttaagaaagcatagaatatgtaagccatttacaaatgtgtttcttaaagttcttttggtatgtcattttgatgaggtgagttgcatttataaagaaatgtcaactatgtgagcaacagatttccccatgatatcaactaaataaaatctgcctacacacacacatatgtacacacacaaaaacacatatattcttagagatatagaggatcaaacatgttataaactgaacatgttgattagtcaaactgaaatggactacaaggtctacacgtccaaaggttatatttcttacccataatgaaatgtccctaayacttgtgaatgatatggtctatattgttc

SEQ ID NO: 840903 - DNA, 652 bp, Homo sapiens
aattatttcttgacaacagtttaaaaaagagaataaggactattgagtaaggagaaaacataagagggaaaaatcactagctagcttctcttgagccatgtgttgtagctaggtccctcagccctgaaaatgtcctcaccgtgaacagaaaagcattctataatgagtccttcaaaggaattagtgtgttagctagatgtggagataaaaggtcattttctgcaagtcccccataactgaaggttagtaaatgccttcctgaaagttcattattcagtcaactgtcttttcctaaaaattctgacaatgactcacatcgtagaggctttggacagatatccctatgagatgtcttaaattcttagtgtggtcattctacctgaggtaagagtggaagctgtttttgccagaaacgctggagatacgagaccagttcatcttccataacattgttcttaaaaaagttttctgataaatccttcagagctgctatttttctctcctgctggtagagccagggctttaaggcccagaatctmaggctggcctgcttccccttgtctttatcagtgtgactgcagcagcagttacaacagtggcagcttcgatagccttccctatctcggtccctcttcccctacttctaaacttg

SEQ ID NO: 840904 - DNA, 652 bp, Homo sapiens
aattatttcttgacaacagtttaaaaaagagaataaggactattgagtaaggagaaaacataagagggaaaaatcactagctagcttctcttgagccatgtgttgtagctaggtccctcagccctgaaaatgtcctcaccgtgaacagaaaagcattctataatgagtccttcaaaggaattagtgtgttagctagatgtggagataaaaggtcattttctgcaagtcccccataactgaaggttagtaaatgccttcctgaaagttcattattcagtcaactgtcttttcctaaaaattctgacaatgactcacatcgtagaggctttggacagatatccctatgagatgtcttaaattcttagtgtggtcattctacctgaggtaagagtggaagctgtttttgccagaaacgctggagatacgagaccagttcatcttccataacattgttcttaaaaaagttttctgataaatccttcagagctgctatttttctctcctgctggtagagccagggctttaaggcccagaatctcaggctggcctgcttccccttgtctttatcagygtgactgcagcagcagttacaacagtggcagcttcgatagccttccctatctcggtccctcttcccctacttctaaacttg

SEQ ID NO: 840905 - DNA, 620 bp, Homo sapiens
tctctcaattcccatgccctttcctttccttcttgtacattcatacttttccttcctcctcccaccggctcacctttttctgggtcacctttttcttggtgccccctgtcctatccctcaattcttaggtgtaaggcgctccttcagtgtccccacctgggtgactggaaggcatcaaggatgactctcctttcctagccttttattattattattattattattattattatcattattattattattattatttggacagagtcttgctttgttgctcaggctggagtgcagtggcatgatcttggctcactgcaacctctgcctcctgggttcaagcgattctcttgcctcagcctcctgagtagctgggattacaggcatctgccaccacgcccggctaatttttgtacttttagtagaggcagggtttcgccatgttggtcaggctggtctcgaactcctgacctcaaggaatccacacaacttggcctcccagagggctagcattacagatgtgagccaccgcccccggccgcctttccyagacatttgtgaagaagcaggccctcctttagttagatgaggtgcttgggaagctttcggtcattcactactat

SEQ ID NO: 840906 - DNA, 590 bp, Homo sapiens
gcaagacaaagcaaaaagaacaaatctggaggcatcacactacctgatttcaaactatactataaagccatagtcaccaaatcagcatgatatttgtataaaaataggcacatagacgaatggaacagaatagagagcccagaaataatcccaaatacttatagccaattgatctttgacaaaacatacaaaaacataaagtggggaaaggacatccttttcaacaaatgatgctgggataattggctagccacatgtaggaaaatgaaactggatcctcatctctcaccttatacaaaaataaactcaagatggattaaggacttaaacctaagacctgaaactataaaatttctagaagataacattggaaaaaacccttctagacattggcttaggcaaggatttaataaccaagaacccaaaagcaaatgcaataaaaacaaagataaatagctgggagctaattaaactaaagarcttttgcactggaaaagaacagtcagcatagtaaagagacaacccacagagtgggagaaaatcttcacaatctatacatctgacaaaggactaatatccagaatctacaa

SEQ ID NO: 840907 - DNA, 552 bp, Homo sapiens
ccaaaagcaaatgcaataaaaacaaagataaatagctgggagctaattaaactaaagagcttttgcactggaaaagaacagtcagcakagtaaagagacaacccacagagtgggagaaaatcttcacaatctatacatctgacaaaggactaatatccagaatctacaaataactcaaacaaatcagtaagaaaaaaaaatcccatcaaaaagtgggctaagtacatgaatagacaattctcaaaagaatatacagaaaaggccaacaaatgtatgaaaactgctcaacatcacttatgatcagggaaatggaaatcaaaaccacaatgcgatatcaccttactcctgcaagagtggtcataataaaaaaaataaaaaaataatagatgttggcatggatgaggtgaacagcggacacttctacactgctggtgggaatgtaaactagtacaaccattatggaaaacagtgtggagattccttaaggaactaaaagtagaactactgtttgatccagcaatcccactactgggtatctacccagaggaaaag

SEQ ID NO: 840908 - DNA, 553 bp, Homo sapiens
cgggcgcggtggctcacgcctgtaatcccagcactttgaaaggccgaggagggcgaatcatgaggtcaggagatcgagagcatcctggctaacacrgtgaaaccgtgtctctactaaaaacacaaaaaattagccgggcgtggtggcgggcgcctgtagtcagtcccagctactcgggaggctgaggcaggaggatggcgtgaacccgggaggcggagcttgcagtgagccgagattgtgccactgcactccagcctgggagacagattccgtctcaaaaaaaaaaaagaaaccccacacccacgagcagtccttccctgctctcttttaccaccccccgcccctgggaaccactaatcgactgtccatatctacgaatttgcctgtcctgggcatttcctctaaatggctccttccctgtcttcatcaaggactgcagaagtttaaggtcagcagcggtagtaacagcacctagtcttatggggtagatttttacatttgaagcactgtaatctcaacagtttcagttggttatcaaaccatcactgagcat

SEQ ID NO: 840909 - DNA, 454 bp, Homo sapiens
cccgggaggcggagcttgcagtgagccgagattgtgccactgcactccagcctgggagacagattccgtctcaaaaaaaaaaaagaaaccccacacccacgagcagtccttccctgctctcttttaccaccccccgcccctgggaaccactaatcgactgtccatatctacgaatttgcctgtcctgggcatttcctctaaatggctccttccctgtcttcatcaaggactgcagaagtttaaggtcagcagcggtagtaacagcacctagtcttatggggtagatttttacatttgaagcactgtaatctcaacagtttcagttggttatcaaaccatcactgagcatgagatagaacagggatcactgtgtcctttttgtagatgaaaagggtagaccggaacccagagaggctaaatgaytcatccactgagttggtgcggagttgaaggc

SEQ ID NO: 840910 - DNA, 442 bp, Homo sapiens
tcaagtgattctcatgctcagcctcttgagtagctgggactacaggcgcgcaccaccatgcccagctaatttttgaatttttagtggagactgggattcaccatgttggccaggctgatcttcaactattgcttacctcaagtgatctgtctgcttcagcctcccaaagtgctgggattacaggtgtgagctaccgcacccggactattattattattctaatagtttttggggaacaggtagtgtttagcgacatggataagttctccaggtgtgatatctgggatttggtgcatccatcactcaagcagtgtacrcagcagcatccagtgtgtagtcttctatccctcacccctgctcccagtcttcccaagtccccatagtccactatatcattcttatgactttgcgtcctcatagcttagctcccacttaaaattaa

SEQ ID NO: 840911 - DNA, 555 bp, Homo sapiens; identical to SEQ ID NO: 810708

SEQ ID NO: 840912 - DNA, 639 bp, Homo sapiens
tgagtgcagtgtccattttgttattagccaatgtatcagtcaaggttcaagcagaaaagagaaaactggttaagtttaatatgaataattattactataaaaaggcattagagtaatggtggattggttatcaacagtgaagagatctctaaagaatgcagcaatggcggatacagggaataactcttgcccctagagctggggcagagaacccaaggaagaaacagaactacaagtgacttccccatccaggcttgaaatccagaccctactgaagttagcacaaccatggcccttagtatggcagagaaaatcactgaggtgagtggtaattgccatgaatctgcactctagggtatctggagaagttctacacttttcaaatctgcaaggctataaaagggcatacctgaggaagtcatctaggtggacatgccacacctgcagaaatccctgggacaccactctttgggatgccatggatgttgcctatgagaaggtgccatgtgctgctggttatgcgcattgcaggagctgaggtttagagaagctagatgtgggggaatccaggagcttsgtccatgggagccttttggaagcagcacactggaatctggaagagaaaatccctcttccttc

SEQ ID NO: 840913 - DNA, 639 bp, Homo sapiens
tgagtgcagtgtccattttgttattagccaatgtatcagtcaaggttcaagcagaaaagagaaaactggttaagtttaatatgaataattattactataaaaaggcattagagtaatggtggattggttatcaacagtgaagagatctctaaagaatgcagcaatggcggatacagggaataactcttgcccctagagctggggcagagaacccaaggaagaaacagaactacaagtgacttccccatccaggcttgaaatccagaccctactgaagttagcacaaccatggcccttagtatggcagagaaaatcactgaggtgagtggtaattgccatgaatctgcactctagggtatctggagaagttctacacttttcaaatctgcaaggctataaaagggcatacctgaggaagtcatctaggtggacatgccacacctgcagaaatccctgggacaccactctttgggatgccatggatgttgcctatgagaaggtgccatgtgctgctggttatgcgcattgcaggagctgaggtttagagaagctagatgtgggggaatccaggagcttcstccatgggagccttttggaagcagcacactggaatctggaagagaaaatccctcttccttc

SEQ ID NO: 840914 - DNA, 603 bp, Homo sapiens
gtattagatattaaaaagtagttaacaatccccccacctgatatcattgaaataggtgtaagattgcacaagttaacatttcatgaaragttatggccagtgatattgaccttctttttgttttagttctgttcaacttcacttgagcttccagaagtaatgaactcatcatgacaaaatctaccataaaagagcttgtgcagttctaactctgacctttttcttcctgctagggattcaatggaataatatgtaccaggctctggaacaagggggcatgacatttggctgggtttgctggatgattctttttgattcaagcctttattttttgtgtggatggtacttgagcaacttgattcctggtaagaattttgccttttgtaagataacacaataaattttaaaaacagtttgaattaatatgcataaatattagaataatcacttattctttaaggaagatccagaaagggaagtcttaggatatatatttaaaaggagctgtacatttttgagaaaaaatgtgatgcctttgtttcccaagtgaaaggtaaaaggccatgtgagggaatagccaggatgaaattagcatgaaaactc

SEQ ID NO: 840915 - DNA, 623 bp, Homo sapiens
tacagattatttcatcacccaggtattaagcctagtatccaatagttattttttctgattctctccctccttccaacctccaccctcaaataggccccagtgtgctttgttcccctctttgtakccatgtgttctcattatttagctccaacttatatgtgagaatttgcagtatttcattttctgttcctgtgttcatttgctgacgataatggcctccagctccatccatgtccctccaaaggacatgaccttgttctttttatggctgcatagtattccatggtgtatatgtaccatattttctttgtccagtttgcccttgatgggcatttaggttggtttcatgtccttgctattgtgaatagtgctgcaatgaacatacatgtgtaggtatcctcatggtagaatgatttatattcctttgggtatacagccagtaatgggtcaaatggtagttctctttctagttctgtgaggaatcgccacactggtttccacaatggttgaactaatttacattctcaccaggagtgtataaatgttcccttttctctgcaacctcatcagaatcggttacttttttgactttttagtaataatcattctaattggtgtgagat

SEQ ID NO: 840916 - DNA, 506 bp, Homo sapiens
taactcagttattgcacagatgagatttcaagggcctgtttaacttaattcagagagcaaattgctttcaaaaaccttaaaacatatatttacttataaataattggcttacaagttacagatcatttactgcawatgcaaacacaaacttgatttagtttagtgacttgatgttaggttttgtttgaactctttttgcctgggatggaactgactgggcacgaatgaggaggagtgtggaaattttagggttggacgtgtaggatgaggagcaagataacaatgttctcagaactgccttggagacagaatgtaagtccatcatgtgatagataatttgtatagctataaaatatctggatatcttggtagcatagacatacattaagactagtaattagtctgaattagtgatattttatggattaataatttattactggacaaatagtgtaaggacttatgtgtgtgtgtgtatgtgtgtgtgtgtgtgtgtgtgtaggtat

SEQ ID NO: 840917 - DNA, 638 bp, Homo sapiens
cttcatgtagtctcccctgacaccaaggggagggtggcctcattactgctgggtrgtgttgaaaatcttcactttccaataaacccaccctgacacagctaccctacccagctcagtgggcagtggggggtggggtgcctcattactgttgggtgggggagaaagtccaggcttttgactcggctttgtccgggaccactctggcaggtgttggggcacccagttacaggcagcagaagtctaggctccccacacagcctttactgaggaggtaggtgatggggtttcagttttctcctgcagtgtttggcaggggtggtcagttatcatctaagtttgctgtcttcataggctgccctttcctggccttttggcagagagaccaggcttttgttgagaccctttttttttgtctgtacctttctgtgttataggcttcttcagctccaaatctgatatattcgaggccaaaacagaacctagaaaactgaccaccctgtcattcctgggtccccgtctgatctgtgtcctctctacctttcagagtctccttatgtttgttttataggcaatgtccaggctttgagtcgtactcagcagggggaataggaaaaagtgtatccgttccatcctgccag

SEQ ID NO: 840918 - DNA, 511 bp, Homo sapiens
actccagcaaagtcatgtgggatgtctgaaattagccagatagcttttaaaaacattcataagaattggccaggcacagtggctcaygcctgtaatctcagcactttgggaggctgaggagggcggatcacctgaggtcaagagtttgagaccagcctggccagcgtggtgaagcctcgtctctactaaaaatacaaaaaaaaaaaaaaaaaaaaaaaattggctgggcgtggtggcgtgcacctttagtcccagctactgggggaggctgaggcaggagaattgcttgaacccgggaggcagaggttgcagtgagtcaagatcgcaccactgcactccagccagggtgacagagggagactccagctcaaataataaataaataaataaatattaaataaaaatattaaaaattcctaagaattgcataattctaaaaaaagtttaaaaatctcataaagtacaaagtccatatagcttgactaagaatgtgtttaaatatctttaaaat

SEQ ID NO: 840919 - DNA, 671 bp, Homo sapiens
  misc_feature 365, 367: n = A,T,C or G
gtctgcctcctgctgtcatcaacatgtcttccatggcaccttggctgttcatgccaagaggcacctgcaggcctgcactgcgcygccctcagccccactggcctccattctttgctcattggcacttaaagtctggagggggctgaggcagcggggggctgctgtatcagcactaccctgatcatgcacacacccagcttggttgtgagtgtctgggctcggccacaactttgctccaccctggagcagacactaggagtagggagaggccggagagtgggagcaggcacttctaagtctgcaggggcaggaggggcttcccaggttccctaaatgcagggaatgcctgggtctggagccatgtnancaggctgcagctgcccccagaagtgcggggcacccaccccaccaactcagtaggggcagggatcctgcctcttcctgtccctgctggcttcatggagcatacagccctgctgcacctcctctgctgcagccagcatcttcacagcagccactccagatgggccactgctgccatcaacaacagtccaacaaagaatagttaatattgctctttagttgcctaaagtaatgtatactcctgtgataggtcatctcatttatcatgttccattgtggcttacttgcattgccaaactttcaacctc

SEQ ID NO: 840920 - DNA, 586 bp, Homo sapiens
aaataagcagtttttttcattgacaagtaaaattgtatatatttatggtgtacagcatgacgttttgatatttgtatacattgtggaacggctaactcaagctttttaacatatatagtacctcacatacttattattgtttgttttgtgtgtgtgtgtgcagtaagaacacttacaatctactcttttatcaattttcaagtacacaatatattaactgtagtccccgtgatgtataaaagatctcttgaacttattcctcttgtctaactgatattttgtgtcgtttgaacaacacgtctccaatatctccacctccccagcctctggtaactagcattttactctttctttttgtaagtttcactgttttgcttttttttttttttttaaaggtgttattgaaatgagtcactgtaatacttttggcttaaaactgatttaactgattaatgctcttaaatatttttaaatttttwaaaatgttttataatatacacacatgtacaagtagatatatatgtgtatatgtgtgtgtgtttatatatatacacacacatttatgtatatgtgtgtataaatgtgt

SEQ ID NO: 840921 - DNA, 586 bp, Homo sapiens
aaataagcagtttttttcattgacaagtaaaattgtatatatttatggtgtacagcatgacgttttgatatttgtatacattgtggaacggctaactcaagctttttaacatatatagtacctcacatacttattattgtttgttttgtgtgtgtgtgtgcagtaagaacacttacaatctactcttttatcaattttcaagtacacaatatattaactgtagtccccgtgatgtataaaagatctcttgaacttattcctcttgtctaactgatattttgtgtcgtttgaacaacacgtctccaatatctccacctccccagcctctggtaactagcattttactctttctttttgtaagtttcactgttttgcttttttttttttttttaaaggtgttattgaaatgagtcactgtaatacttttggcttaaaactgatttaactgattaatgctcttaaatatttttaaatttttaaaaatgttttataatatacacacrtgtacaagtagatatatatgtgtatatgtgtgtgtgtttatatatatacacacacatttatgtatatgtgtgtataaatgtgt

SEQ ID NO: 840922 - DNA, 602 bp, Homo sapiens
tagaagtttcttcaatgaaaaactctaagaaaaaatttagaatatttaaagtaatatttgcactgtmttcaaaaaataaaaataaccatggagcatgagagaagcttattaggaaacaagaaaatattttatctttcacatttctggttcatttttagcagtgacagtttacattgacataaaaatagcctagtctacgttgattttccttttttccagaacactgacctacaaatgattatgtgaaagcattatgtgacttttaatgctgtctagtgtgggtatttaagttgtctatcccaaatacacttaaatttagacaggtactgaatcctatttttcacatattctttaccacatacagtgtacggagtcaaaaggtaagggaccaacgtctgattctactcctcactagatttgaattcagacaattcacctattcttgtctagacacgttccactacagttttctaactcccttagataatttttctgtgagaatcacatttattttaaaaatttaaagatttttgcaaagcaataaacaaatgctactaaaagttattactgtatcttcttactaaatttctttttctgttttc

SEQ ID NO: 840923 - DNA, 582 bp, Homo sapiens
tggaaatagtcatgaaacaaaggagcgctaggggagaggtgggtaactaaatgctagtttttaaataatgttatatcagacttaaaagatacatggaagataagacaggcctaagagtttgctagcagctggatcagattgcaaggaagaatctcagtctatcctttattactcaagccagagcacaagactagtttccacattttataaatatagagtcttttttggagactgtgaaatttggatagaatgttttatttctcattactgtttacagattcgttatgaccttggcctgtatacactttcatgacaggttaagtgaacagaggttaaaggaggcaaactgagagtatttaaataaagtttacttgctatatttgtcttatctccccatgaataataaaaatatcatttattatatgtattacaaaatgttctaagtgctttatacacctaatattagtatggttatttcacacaaattttatgatgtctgatttctttttctttttatagatttrgaggtacaagtacagttttgtttcatgcatatattgcataatggtgaagtgtgggctt

SEQ ID NO: 840924 - DNA, 523 bp, Homo sapiens
gttttaaccaaaatatttaattttataataactcacaatctcaagatacgggttattcttttcattttagrctgtcacctagactggagtgcagtggttccatttggcttactgcagcctcaaattcttgagctcaagttttctcctgcttcagccccctgagcacttgccatcatccttggctaattaaaaaaaaaaaaacaatgtaaagatggggtcttgctatgttgttcaggctcaaacctctggtcataagcaatcctcccacctcaacctctcaaattattgaaataagagacctgagcccccgcagctagccaagatatgaaatattcatttaaaatgtatcttctgttctatttaaatgtaaaatttcatatttgtattttcataactagtgcatatatttaatgctattgccaccacaaacattccatttgaatgaaatttagaacttatacacagtcagacataatatatggtaaactaaatttctatttgaagtaaaatatgaaactggaaa

SEQ ID NO: 840925 - DNA, 493 bp, Homo sapiens
ccatctgagattacaattttgaagagatctacagtagctacttctcagtacagtcctataataagggatccattttamaaatgaggcacaaaatgaatgactttttttccaaataacacagccaaactatacacaactaggttagtaacatcagtcatttagtctaacacagtggtcaagtgtctgggctctggagtcaaacataagtgaattaaaatccaggttttgctgctcactagttgtgtgatcatgtacaaattagtacatcataaatcaaatttgacatcataagtcaaatggggataatattaggatcttccctaggggttgtaatattggacctttgtcttttggagtatgtccaatatctacctggttcctagttggaatctaaatgtttggagtctcatatttattctagagaatgaaaactcttaatgtcctaaagcattgtcttgccccgttttaacacttacacactgtgatttaattt

SEQ ID NO: 840926 - DNA, 537 bp, Homo sapiens
ttaggggttaggacttcaacacatctttctggacaacacaattcaacctattacagggcttaagagacaaagcaatctaatggatacaaatataaaaataaatatgaaaaaaaaawatatatatatatataatgtgaatttttaaaaaaagtcaggctgagaagttttattcacttacccaagtaacgaagcacattagtatcacagccagcactagaatccaggtccactgattcccagttagctgctctttctgttttgctaaagcctctgcacaactcattcaatggcttcttttggccttgtggacattatccaaactcttcaaggtggcctaaggacttgcatttttctggccccagcctcaactcaagccacttttcctcttctctgtgcccaagcaacactggcctttttctagtgtcataaacttcctcgcctctttactacttcaatccctcccggacatgttagttcttctacctggaaagtgacactcacttcttagcccaactcactcttcattctttacctctc

SEQ ID NO: 840927 - DNA, 575 bp, Homo sapiens
cccctctaaatatatgattcatttatcataaagatattaatactttttttgagacagagtcttgctctgtcaccaggctggagtgaagtggcatgatcttggctcacagcaacctccacctcccaggttcaagcaattctcctccctcagcctcccgagtagctgggactacaggcgtgcaccaccacacccagctaatttttgtatttttagtagagacgaggtttcaccatggtagccaggatggtcccgatctcttgacctcatcatctgcccacctcagcctcacaaagtgctgggattacaagcgtgagccacggtgcccagccaatattaatactttttatatcaagattttttgacgattaaataatattatgcaggcaaaatgcttaatacagttcctggcacatcataagtgttaaaaaactgtgagttgctcttatcctccttcacctcctcytcctcatcgtcatcacctgagttatttaacattatcaactgggcaaggaaaaattagggctcagataaaggatgtgatattgagggggaaaatgaaagaaaaatgtgtggag

SEQ ID NO: 840928 - DNA, 528 bp, Homo sapiens
cacaagcttccgtagccaattcgatcaactgaaagaaakggtatcagtcatggaagatgaaatgaatgaagtgaagtgagaagagaagtttagagaaaaaagagtaaaaagaaatgaaaaagtctccaagaaatatgggacagtgtgaaaagaccaaatcgacgtctgattggtgtacctgaaagtgatggggagaatggaaccaagttggaaaacactcttcaggatattatccatgacaaattccccaatctagcaaggcaggccaatattcaacttcaggaaatacagagaacgccacaaagatactcctcgagaagagcaactccaagacacataattgtcagattcaccaaagttggaatgaaggaaaaaatgttaagggtagccagagaaaaggacaggttacccacaaagggaagcccatcagactaacagcagatctcttggcagaaactctacaagccagaaaagagtgggggccaatattcaacattcttaaagaaaagaactttcaacccagaattt

SEQ ID NO: 840929 - DNA, 540 bp, Homo sapiens
gtttaatccccttttatccaagtacatcaatgttcttggcaaacattaatcaaacggaaattaaggcatatcctcaggatatatgaaggcattgggctttcaaaaactcayacacgaagcatctagatccaactactaatttacaaagcaacacattgaactacaccatggcaacataattagcaaaaactggactgcgggaaactatgcaggaaaaatgatccagttttttcaacaaaataaatttcaaggaaaaaagaaaagaaaaagagatagagtacgaacctatagcttgagacttacaataagtgtcaaccagttgcaatacctgaaccttgattagaacaaagcagacaaaaagaatatgacatttatgagacaataggaaatgcaaacactggcttgatatttgataatattaaggaattataaacatttttaggtgtcacaatggttttgtggtcatacatagatatatagatttttttaagtgcttatgttagagataatctgtcagggatccccagaccacacccaggt

SEQ ID NO: 840930 - DNA, 557 bp, Homo sapiens
aaacacttggttttctaactacatcttttttttttttgctttgccttaaaaaaatttatagaagcgagttacctaaatcagaaagacatatgtcattaaaatttttaaggttatataaaacatttagcagcaagttatattctctgtattctgtagcagatattttgtaagctagatttaactatcaaaatccaaagccaaattttactttttctggttctgaaaatggcctttaaattgagtgggtaatactaatactctactaataaatagtctaactggacctttgttgccacaggataaggtgatagaaacatcaggctaaagagaccctgaacaccagagcagcatttccaggaaatattcattggtcttaaccatcttatttatgtaaagcaggtgaagttttttggaaaaaaataaaaacctgaagcttacctaacaaagcctatgccttggcagctcccatcctcgtttgttctctttctttgctggcatgaatgttcagataacccaaaaggtkttatgaaaatattctaacctctgagttcaggtct

SEQ ID NO: 840931 - DNA, 620 bp, Homo sapiens
caaagagctttcatttatgtggattataacctttaatatttaccatactagaaatcaaaacagaaaaaattataaactttatatattaatttaaaaactaataaacccattatatatatttatatrttttatttttatttttatgttttttgatggagtctcactctgtcactcaggctggcatgcagtggcgcaatcttggctcactgcaagctctgcctcccgggttcatgccattctctgcctcagcctcccgagtagctgggactacaggtgcccgccaccacccctggctaatttttttttttttttgtatttttagtggagatggggtttcaccatgttagccagggtggtctcgatctcctgacctcgtgatctgcctgtctcggcctcccaaagtgctgagattacaggcgtgagccaccacacccggcctaaacccattatatttttaaatgagacaattttaaatgaaaaataacatttttcaaaacaataacttaagaagaatggtattactttacagttttataaatctctttaatattttacttaatagaagacaactggattttcatgtctgcttctgatttcaatctgttgcagtatgttgcttt

SEQ ID NO: 840932 - DNA, 539 bp, Homo sapiens
gttaccagctatctacaaggaataatttgcataactgtttcaccattacatgtcatcagatatgatccactggaaacaggatcattaacgcctttgcatctaatgaggtcagataattgattccagaaaactcagaaccaattgagaaaattcctcattaatattcagcttcccctgggcactctcagggcagctggttaagccattctctgtaaggtttactgtctttgaacctgaagcctctagtccacaggtcagagcaaggacagctggaatccacaatcatgagctacagagcaggatagactgaaccaggtcagctcttgtctctgaccttgatggtgtggatgccctgccatcagcctccccactgagcccagctcacctagggggagagggagcttctaaaatgcaaatcgcatcagatcactactctgcttaaactcttcagcagctcccagtgcccgmaggacagtccagactccttactggtatgaggatccctcctcctcccatttctccttccattgacaccaggc

SEQ ID NO: 840933 - DNA, 248 bp, Homo sapiens
aggaaacactctgtttgtgaagyctgcaagtgtatattcgcacctctttaaagccttcgttggaaacgggatttcttcatattatgctagagagaagatttctcagtaacttctttgtgttgtgtgtatgcaactcacagagttcaaccttcctttagacagagcagatttgagacactctttttgtggaatttgctagtggagatttcaagcgcttcgatgccaatggtagaaaagggaatatcttc

SEQ ID NO: 840934 - DNA, 248 bp, Homo sapiens
aggaaacactctgtttgtgaagtctgcaagtgkatattcgcacctctttaaagccttcgttggaaacgggatttcttcatattatgctagagagaagatttctcagtaacttctttgtgttgtgtgtatgcaactcacagagttcaaccttcctttagacagagcagatttgagacactctttttgtggaatttgctagtggagatttcaagcgcttcgatgccaatggtagaaaagggaatatcttc

SEQ ID NO: 840935 - DNA, 248 bp, Homo sapiens
aggaaacactctgtttgtgaagtctgcaagtgtatattcgcacctctttaaagccttcgttggaaacgggatttcttcatattatgctagagagaagatttctcagtaacttctttgtgttgtgtgtatgcaactcacagagttcaaccttcctttagacagagcagatttgaracactctttttgtggaatttgctagtggagatttcaagcgcttcgatgccaatggtagaaaagggaatatcttc

SEQ ID NO: 840936 - DNA, 630 bp, Homo sapiens
tttttatgggaagaatttttgtttttcaccacaggcctcaatcgctccaaaggtccacttccagatactataaaaagagggtttccaacctgctctatgaaatggaatattgaactctgtgacctgaatgcaaacatcaccaagtagtttctgagaatacttctgtctagattttatatgaagctattcccgtttccaaggaaatcctcaaagctatccaaatatccacttgcagattcttctgaaagagagattgaaaactgctctattaaaagaaagcttcaacactgttagtggagtacacacatgacaaacaagtttctgagaatgcttctgtctagtttttatgggaagatgtttcctttttcgccgtaggcctcacagcgctccaaatgtccacttccagatacggcaaaaagagtgtttcaaacctgctccatggaagggaatgttcaaccctgggacttcaatgcatacatcgcaaagaagtttctgaaartgcttctgtctactttttatataatgatatccccgtttcctccgaaatactcaaagctatccaaatatccacttgtagatactacaaaaagggtgtttcaaaactgctctctcaaaagaaaggttcaactc

SEQ ID NO: 840937 - DNA, 539 bp, Homo sapiens
catcgcaaagaagtttctgaaaatgcttctgtctactttttatataatgatatccccgtttcctccgaaatactcaaagctatccaaatatccacttgtagatactacaaaaagggtgtttcaaaactgctctctcaaaagaaaggttcaactctcttagttgagtacacacatcacaaacaagtttctgagaatgcttctgtctagttttcatgggaagagatttcctttttcaccatgggactcagagccttcggaatgtccacttccagatactagaaaaagactgtttcaaaacctgctctgtaaaagggaatgctcaactctgtgagttgaatgcaaacatcactaggaagtttccgagaatgcttctgcttttcatatggagataatcccttttccaacgaaatcctcasagcaatccaaatatccacttacagatcctacaacaagagtgtttcaaaactactctatcaaaagaaaggttcaactctgttaattgtgtacacacatcaaaaaacaagtttcggagaatgctt

SEQ ID NO: 840938 - DNA, 644 bp, Homo sapiens
aatgcttctgtctagttttcatgggaagagatttcctttttcaccatgggactcagagccttcggaatgtccacttccagatactagaaaaagwctgtttcaaaacccgctctgtaaaagggaatgctcaactctgtgagttgaatgcaaacatcactacgaagtttccgagaatgtttctgcttttcatatggagataatcccttttccaacgaaatcctcagagcaatccaaatatccacttacagatcctacaacaagagtgtttcaaaactactctatcaaaagaaaggttcaactctgttagttgtgtacacacatcaaaaaacaagtttcggagaatgcttctgtctactttttggggaagagatagcctttttcaccgtaggcctcaaagcgctccaaatgtccacttccagattctacaaaaagagggtttcgtacctcatctgtgaaagggaatgttcaaccctgggacttgaatgcatacatcacaaagaagtttctgaaaatgctcctgtctactttttatataaagatattgccgtttcctctgaaatcctcaaagctatccaaatatccacttgcagattctacaaacagagtgttcccgatctgctctatcaaacgaaaggttcaactct

SEQ ID NO: 840939 - DNA, 624 bp, Homo sapiens
atgggaagagatttcctttttcaccatgggcctcagagccttcggaatgtccacttccagatactagaaaaagwctgtttcaaaacccgctctgtaaaagggaatgctcaactctgtgagttgaatgcaaacatcactacgaagtttccgagaatgtttctgcttttcatatggagataatcccttttccaacgaaatcctcagagcaatccaaatatccacttacagatcctacaacaagagtgtttcaaaactactctatcaaaagaaaggttcaactctgttagttgtgtacacacatcaaaaaacaagtttcggagaatgcttctgtctactttttgtggaagagatagcctttttcaccataggcctcaaagcgctccaaatgtccacttccagattctacaaaaagagggtttcgtacctcatctgtgaaagggaatgttcaaccctgggacttgaatgcatacatcacaaagaagtttctgaaaatgctcctgtctactttttatataaagatattgccgtttcctctgaaatcctcaaagctatccaaatatccacttgcagattctacaaacagagtgttcccgatctgctctatcaaacgaaaggttcaactct

SEQ ID NO: 840940 - DNA, 537 bp, Homo sapiens
catcgcaaagaagtttctgaaaatgcttctgtctactttttatataatgatatccccgtttcctccgaaatactcaaagctatccaaatatccacttgtagatactacaaaaagggtgtttcaaaactgctctctcaaaagaaaggttcaactctcttagttgagtacacacatcacaaacaagtttctgagaatgcttctgtctagttttcatgggaagagatttcctttttcaccatgggcctcagagccttcggaatgtccacttccagatactagaaaaagactgtttcaaaacccgctctgtaaaagggaatgctcaactctgtgagttgaatgcaaacatcactacgaagtttccgagaatgtttctgcttttcatatggagataatcccttttccaacgaaatcctcasagcaatccaaatatccacttacagatcctacaacaagagtgtttcaaaactactctatcaaaagaaaggttcaactctgttagttgtgtacacacatcaaaaaacaagtttcggagaatgc

SEQ ID NO: 840941 - DNA, 503 bp, Homo sapiens
tttattcatggtggagggcaaagagggagcaggcatctcacatggccaagtgggagcaagagagagatagtggtgggggaggtgccacacacttttamaaagaccagatctcagccgggcgcagtggctcacgcctgtattcacagcactttgggaggctgaggcaggcagatcacgaggtcaagagatcgagaccatcctggccaacatggtgaaaccccatctctactaaaaatacaaaaattagcctggcgtggtggtgcatgtctgtagtcccagctactcaggaggctgaggcaggagaatcgcttgaacccaggaagcggaggttgcagtgagctgagatcgtaccactgctctccagtctggcgacagagtaagactccgtctcaaaaaaaaaaaaaaaaaaaaaaaaaagaccagatctcctgtgaacccagagtgagagctcactcttcaccaagccattcatgagggatccacccctatgatccaaacacctc

SEQ ID NO: 840942 - DNA, 605 bp, Homo sapiens
atccaaaatgaaactagagagaaaaagaaggcttagaagagcatttgtgagttgtggtacaactttaggtagccaaccatacaatatacatggagttgccaaaggaaaggaaaggaagcagcagaaaaagagaataatgaataatgactgaaaattttccaaatttgataaaaactataaaccaacagacccaagaagctcagtgaaccccaaacacacaaaaaaagatgaatgaggctgggtacgatggcttacgtctgtaatcccagccgtttgggaggctgagatgggtagatcacttgaggtcaggccaacatggtaaaaccccgtctctacaaaatataaaaaaattagccgggcatggtgccatgcgcctgtaatcctagctacttggaaggctgaggcaggagaattgcttgaacccaggaggctgaggttgtggtgagctgagatagtgccattgcacttcagcctagccracagagcaagactgcatctcaaaaaaataaaaataaaaagatgaatgaaattacatcaagtcacatcataatcaaaatgctttttaaaaccagttatggaaaggaaagtcttaaaaacagagaaaa

SEQ ID NO: 840943 - DNA, 605 bp, Homo sapiens
cttcctgatgctgtttctcctgccacctcccatcctctaccaggccccagtttgtgttgtttcccaccatgtgtccatgtattctcatcattcagctcccacttataagtgagaacatgcratatttggttttttgttcctgtgttagtttgctgaggacaatgacttccagctccatccatgtccctgcaaaggacatgatcttgttcctttttatggctctgtagtattccacggtgtatatcaaccacattttctttatccaatctatcattgttggacatttagttggatttcatgtctttgctattgtgaataatgctgtaatgaacacacgtgtgcatgtatctttataataatgatttatattcctttgggtatatacctagtaatgtgattgctgagtcaaatgtatttctggttctaggtctttcaggaattgccacactgtcttccacaatggttatactaatttacactcccaccaacactgtaaaagtgttcctttttctacacaacctcgccagcttctgtttttgtttttttttccccccttttaataagctgttctaactggtatgagatgatatctcattgtggttttg

SEQ ID NO: 840944 - DNA, 458 bp, Homo sapiens
attctcctgcctcaacctcctgagtagctgagattacaggtgcctgccaccacgcctggctaatttctgtacttttttagtagagacagggtttcgccatgttggccaggctggtctcgaactcctgacctcaggtgatccacccacctcggcctcccaaagtgctgggattacaggtgtgagtcactgtgcccaaccgaaaaaaaattctttttttttttttttacttcattcactgatactgtttcttctgcaacagtattttcacatgttaaatgaaaatatgctgaacagttaaatttaataagcagaaataaagctatgctggatttagcaggtgtcaagtagtcctctgactagcaattgttatcctgtcagcatgtatagtttagtgctacagtgctttytagatagacaaagaaaatgtgtcatgagggtaggccaccaaaatattagga

SEQ ID NO: 840945 - DNA, 361 bp, Homo sapiens
ttagaattaattaccctttaatatctttaaatttaagccattaaaatatctgtactgatagtcamccttttcttataggagaaattataggtctgtttttttggataagagtaaaataacattatgtaaataaatttaccgaaaagtgattaatttggatatcagataagtgaaagaaataattaatgtaatgaaatgaaaaatatagcctttatgcattttatattaagtaaaaattctagtttagtgtaacagagcttttgaaaggagtatcagatcattttataaaatgcttaacaaaaatatgattcatgaagtatttaaaataatgagtgccatttattgagcatctactatgtgg

SEQ ID NO: 840946 - DNA, 361 bp, Homo sapiens
ttagaattaattaccctttaatatctttaaatttaagccattaaaatatctgtactgatagtcaaccttttcttataggagaaattataggtctgtttttttggataagagtaaaatamcattatgtaaataaatttaccgaaaagtgattaatttggatatcagataagtgaaagaaataattaatgtaatgaaatgaaaaatatagcctttatgcattttatattaagtaaaaattctagtttagtgtaacagagcttttgaaaggagtatcagatcattttataaaatgcttaacaaaaatatgattcatgaagtatttaaaataatgagtgccatttattgagcatctactatgtgg

SEQ ID NO: 840947 - DNA, 223 bp, Homo sapiens
agtgagctagggggtaagtctttgactgtatgtccctcagaaagttacagtgcactgactatgtgccatatcttatacaggcaggcagcttcccacatgaggcttgatgagcaaagcactgtaattgcctagggttgasctaaaaacaaatcacatatagaagttttggcctggaggcagactcttcatgtacattttatatatatatatatatatatatata

SEQ ID NO: 840948 - DNA, 599 bp, Homo sapiens
taatggccttctgttgcatccatgttctgcaaaggatgaaatttcattcttttttatggttgtaaaatattccwtggtgtatgtgtaccacattttctttatgcaatccactgtcgatggaagcctaggttgagcctacatctctgctatggtgtatagtgctgcagtgaacatacaagtgcttatgtccttttgatagaacaatttattttcctttaaatatttacccagtaattggattgccggatcaaatggtagttccgttttaaattcttagagaaatctccaaactgcttttcacattggctgaaataatttacattcacaacaatagtgtgtaagggtttccttttctccacaacctagccagcatctgttaatttttgactttttagtaatagccactctaaattacctggtatggtttcttactgttgttttgatttgcatgtctctggaaatgcaaattaggaatgttgagcattttttttcatatgtttgttgattgcttgtatattttcttttgagaagtatctgttcatgtcctctgtccactttttaatagggttatttgtttttcacttgttgaattatttaag

SEQ ID NO: 840949 - DNA, 587 bp, Homo sapiens
ttcgctgactcttttcggactcagcccgcctgcccctaggtgaaataaatagccttgttgctcaaagtctgtttggtggtctcttcacacggacgcgagtgaaaaaatatctcatcaaagcatcaaaggtcacagaattcaaatctgtccttcctgatctaaaattatagccagtataattcacttacataaaatattatttagtagacgatgatgattattattttgagacaggatctccctctcttgcccaggctgaagtgcagtggtgtgatcttggctcactgaagcctcaaacacctggggtcaagcaatcttcctacctcaacctctcaaatacctggtactacagacgtaagacaacatgccttgctagttgttttttttgtttgtttgtttgtttgtttttgagacagggtctccctatattgccccgtcttgaactactgggctcaagcgatcctcttgtgctggattagaggagtgagccactgtgcccagccagagcagattattaacaagctcaaagatagtgwtctatttcacagttgctctgtatcagggtaataaaatacaactttagccaa

SEQ ID NO: 840950 - DNA, 364 bp, Homo sapiens
gttatatgaaaataatttaaattgtgaaggttagaatgaggtgctgcattttatagcataacctttaaaaataataattatttgaagtctgtttccagagttataatggtttgagccacactgttttctaaatactcaaatttggtatgcagctttatgacaggaagttggctttcagagcaggaatgtatgtaaacaaagaaatgtggctcacaggaaggtttagctaaatyaaatcccgaaggctgcctccattctgagcttctttctgtatcttgattatttgcagatgctttacatgaagttagagatgaaacccaatagttaacctccctaaaactcccaaggcaattcacagttagcc

SEQ ID NO: 840951 - DNA, 364 bp, Homo sapiens
gttatatgaaaataatttaaattgtgaaggttagaatgaggtgctgcattttatagcataacctttaaaaataataattatttgaagtctgtttccagagttataatggtttgagccacactgttttctaaatactcaaatttggtatgcagctttatgacaggaagttggctttcagagcaggaatgtatgtaaacaaagaaatgtggctcacaggaaggtttagctaaatcaaatcccgaaggctgcctccattctgagcttstttctgtatcttgattatttgcagatgctttacatgaagttagagatgaaacccaatagttaacctccctaaaactcccaaggcaattcacagttagcc

SEQ ID NO: 840952 - DNA, 428 bp, Homo sapiens
aatgaaatacataaagaattacattgttaaaaatcatgccagacatattgattgtaatgattatcataaaacatgtattattatcaaagtaaattaaccacatctaattcatcagtgttatagccagwgacaactagaattagagaatattaaaagtagaatgaaacattactatccagttcaagttcagaattttgtacgtatatgtacatatatagcccagaaacccaaagatgtgaagaaatggctagaatgtggcagaaactggagtttgactcagattcctatattgtagtgatttttccatgatgctccattagcccttaagtttcaagaatcaggataattggccaggaaaacacaaaattttcactaatttaaaaggtagatatcattggaaaagaacaggcaagtgacaaccaacagag

SEQ ID NO: 840953 - DNA, 604 bp, Homo sapiens
ttattttcaaggtagccctaaaagaatcagtaaagatcaattcagagaattttttttcctsgactacctgagtaactttttgagcttctaggatttccaaatgatttaaataatgaagacttaatctctaagttctttatgcactttaaaaatcacattttttatagtacagttgctacacctgtgcataatcaggtttttcagtttcctttttagaagttctccctacctttccttaaatatgcaagttcaccaggtgtttggaatgtcgtagcagagttatgaaatcttaatggtgcttttcccctctgtccttttgaactaacttcatctgtgctataacagacttgtgggtagtctgttatagcatttgtcaggttcacagtaaactaaaatgtcattcatttacttcaaacatctctatatttgagcaaaaagaaatgaaaagacataattgtccctcagccacatggttttaattttcatcttaaaaaaaaaaaggaactgtagtctgtttgctgtatttttttccccccatcattgggtctctctgattttcctttttatgttcagtagggacttttttttaaagcattttaacaag

SEQ ID NO: 840954 - DNA, 540 bp, Homo sapiens
gtctcattatttgataattatatgaacactcaataaatctctacatgaaacataattagaacactttttttttacacattctcaggaaacatactttttaagcaattagattttattagatttcttaggaaatgaacgattatttaaaactagtcagaatatttttttcaaagagtaaaattaaggaaactcttatggggaaaatgattgtattattaagtataataacaaaatagtctctgttccttaattatatcaattcaatttgctaatgatattaatattattagcctgtatcagaatagatataatgcaaaacaatgttaaatcttattgaaagtaaatggcaatgatacaaagccctccttaaaaagagaattatctgtgtaatagccagcatgaaaatgatatgctttgggtattttttttwaattcccaataataattgatttgttaaagttgcatttgattttgaaaagtaggatatatgtaaatttttaactcactaatttgagtggattataaaaatatttgacatag

SEQ ID NO: 840955 - DNA, 612 bp, Homo sapiens
aacccagaaggcagaggttgcagtgagccgagatcatgccactgcactccatcctgggaaacagagtgagactccatctgaaacaaacaaacaaaaacaaacaaacaaaaaaccrttgctctagatgaaattaattatttagaaaaaaaaatttgcttgaagagacgggaacttagaactgcaccttagggcacttacgtgtcaaatggaagaaaatagcaaaaaagtttatgggagaaaagcaaaaatggaagagataaaagaaaaacaaaacaggaaaatggtaggaccgaagtcaagaaaaaatactgtttccacacatgtcaactgtactgaatggtgttgaaggatcaagaaagtaaagagacaagttttgctaattattacatttagcaaatctcttgtgatagtagcagcttcctcaaggagtggaatgtggggtcattttggaaagattttaggaaaaaaatgaaagtgatgagaaagtgaagatatgattgtagattattctttcaagtggtttaactgggaaggggatcagaggagttcagcaatagatggaataaaaagtgagaatttagagttttacttactttttaattggatatttaa

SEQ ID NO: 840956 - DNA, 632 bp, Homo sapiens
aagtaaacaaacaatggatgaaataaaaagaaaaaaatcgcaagatcttagccttaaattcagccatattaattattatattaaatgttgaagggcttaaaaacttccattcaaaggcaaaagttttatatctggattaaaaaaactatatgctcttcacaaagctacattaaatattatgatacgttaaaagcaaaagaatggaaaagatacaccacaaaaacactaatcacaagaaagtttgctttgctatattaatatcagacaaagtagatgtcaagataagaaaaattaccagaggaaaaggtttgatgttttataataataaaagggtcaattcaaaaaattataaatatctatctgataacagagattcaacatatatgaaggaaaaattgatataactaaagcaggaaatttaaacaatacttatttatggctagatatttcaacttcattttttttttttttttgagacggagtcttgctctgttgcccaggctggagtgcagtggtgtgatcttggctcactrtaacctccgcgccctgggttcaaatgattgtcctgcctcagcctcctggatagctgggactacaggcatgcaccaccatacccggctaatttttttgta

SEQ ID NO: 840957 - DNA, 576 bp, Homo sapiens
cagctgaattccaattcagttgacttgtggtcagggcaccctggaacataagcaatttaaactgagttttctacacttggataaaatggcacattttggcagaattttaaggtttacagtttcacattccaaggtgtggctgttgtaccattctgacacagaattggcatctctaattaacgttatgtaaaacagaggcctgtgaggcagagctggaggagaccgttccttgtgaggcaaatagtggtatttttagaaccaaaccggatttttcttttggggtccacatggcacttaacagatggtgatgtgggcgactgtggtttaagatctgactcggttcataaagacacccagtcttgtcctggtcccaccctataggcagtgatggctccaggctcatccaaacaactctgcaacaagatggtgtcagccatccacgtgggtggacaccgctggacccygtagacaggcagcgcctggactgcagggcatctgggaactcagcctgcttcagcctgctggcgatgttcagaattagcataagcatgcttattttaatttggaaaagaactt

SEQ ID NO: 840958 - DNA, 598 bp, Homo sapiens
caccaggtactgcccactggcccagggaaactcaaaacccagagaagacggccatcagaatagataataacaaattttrttatacgacccaaagtccttcacatgacggcctcctgtaacctatctgaccatgtgtttggagagtctctaaaaatccctaacagagtgaaaccactaaacctcttacaaaatagaaatcttttcagaactgggggaaatatttcttttatctcagtttgtggaaaggcatcaaataaaagtaagcaacattctctttaggtattccttcttagattttatttttaatgaaacatttggcttcaaaacatactttcaaagtctaatgccccataaatggcaattactattttaaaaagcaaagcgtttaccctccaaaatctaaaaccttcagacctcacatggcattaaccagctcttcaaagtttactaaaataaatcttaagagcttcttctgttttattttgaattgtatgttgacttggaaacaacagaatttttcccctctcctgtctcctgagtactggtcctcaagagcaaaaagttctccatatgtaagaacaaaaaaagggaaaacagc

SEQ ID NO: 840959 - DNA, 598 bp, Homo sapiens
caccaggtactgcccactggcccagggaaactcaaaacccagagaagacggccatcagaatagataataacaaattttgttatacgacccaaagtccttcacatgacggcctcctgtaacctatctgaccatgtgtttggagagtctctaaaaatccctaacagagtgaaaccactaaacctcttacaaaatagaaatcttttcagaactgggggaaatatttcttttatctcagtttgtggaaaggcatcaaataaaagtaagcaacattctctttaggtattccttcttagattttatttttaatgaaacatttggcttcaaaacatactttcaaagtctaatgccccataaatggcaattactattttaaaaagcaaagcgtttaccctccaaaatctaaaaccttcagacctcacatggcattaaccagctcttcaaagtttactaaaataaatcttaagagcttcttctgttttattttgaattgtatgttgacttggaaacaacagaatttttcccctctcctgtctcctgagkactggtcctcaagagcaaaaagttctccatatgtaagaacaaaaaaagggaaaacagc

SEQ ID NO: 840960 - DNA, 598 bp, Homo sapiens
caccaggtactgcccactggcccagggaaactcaaaacccagagaagacggccatcagaatagataataacaaattttgttatacgacccaaagtccttcacatgacggcctcctgtaacctatctgaccatgtgtttggagagtctctaaaaatccctaacagagtgaaaccactaaacctcttacaaaatagaaatcttttcagaactgggggaaatatttcttttatctcagtttgtggaaaggcatcaaataaaagtaagcaacattctctttaggtattccttcttagattttatttttaatgaaacatttggcttcaaaacatactttcaaagtctaatgccccataaatggcaattactattttaaaaagcaaagcgtttaccctccaaaatctaaaaccttcagacctcacatggcattaaccagctcttcaaagtttactaaaataaatcttaagagcttcttctgttttattttgaattgtatgttgacttggaaacaacagaatttttcccctctcctgtctcctgagtactggtcctcaagagcaaaaagktctccatatgtaagaacaaaaaaagggaaaacagc

SEQ ID NO: 840961 - DNA, 594 bp, Homo sapiens
tgggtatctgattattttgttttttttaaggtctatttctctctgtccttcagattgagcaatttctattgttttacattaagttcattgaatctttcctctgtcttctccattctgctattgagcctatccagtgagattattattattttttaatttggtcattggttcttcatgtctcctattttatttttttcttgcaaaagatatactttgtcatttgtttcaagcatgcttgtaaattacttaatacaatatttttataatggctgctttaaaatccttgtcagagattttcagcatctatgtcatctggtgaattattgactatattttcttatttaagttgcaatttgtctggttcttgttatgacatcaaagtgattttttttaccgtaccggtgcattttgggtatttcattatgagaccatggatcttagttaaatcttttgttttagttggcgtcctctaaaggaaggcrttacgtcattactgacaaatggtagtagagtccagggtccctcttcaacctcttgtgacacctcagttggggagggatttctcattattgttaggcagagttggaagttctg

SEQ ID NO: 840962 - DNA, 602 bp, Homo sapiens
caccaccgatcccacagaaacacaaactaccatcagagactaccataaacacctctacgcaattaaacyagaaaatctagaagaaatggataaattcctcgacacatacactctcccaagactaaaccaggaatctctgaatagaccaataacaggctctgaaattgaggcaataattaatagcttaccaaccaaaaaaaagtacaggaccagacggattcacagccgaattctatcagaggtacaaggaggagctggtaccattccttctgaaactattccaatcaatagaaaaagaggaaatcctccctaactcattttatgaggccagcatcatcctgataccaaagccaggcagagacacaacaataaaaagagaattttaggccaatatccctgatgaacatcgatgcaaaaatcctcaataaaatactggcaaaccgaatccagcaacacatcaaaaagcttatccactatgatcaggtgggtttcaccccgggatgcaaggctaattcaacatacacaactcaataaacataatccagcacataaacagaaccaaagacaaaaaccacatgattatctcaatagatgcagaaaag

SEQ ID NO: 840963 - DNA, 430 bp, Homo sapiens
aaaagaggcagaataaggcaaaagcaacatttgaagaagtaatgcctgagaatgttctaaattaataacagacacgaatccttagtttcaagctggatakattatattcccaggcattgtctggtttcctgaatggccatcaagggatagggtaacacagttacccagttttggagagttagctctgttctttcttccatggaatattcctaggtgtggttccttcttgcaccccttattaagaagttatgtatgccggaaagtaaactcagctactgagcagctaccacgtttcttggcagcttgatgtaatagtcagcatggtaacacattttatgacattccttgcatattttcttgtctcatttcccgttttccatatctatactaccctgggtttgcacttctcaaataaagtaatgccacattc

SEQ ID NO: 840964 - DNA, 430 bp, Homo sapiens
aaaagaggcagaataaggcaaaagcaacatttgaagaagtaatgcctgagaatgttctaaattaataacagacacgaatccttagtttcaagctggatatattatattcccaggcattgtctggtttcctgaatggccatcaagggatagggtaacacagttacccagttttggagagttagctctgttctttcttccatggaatattcctaggtgtggttccttcttgcaccccttattaagaagttatgtatgccggaaagtaaactcagctactgagcagctaccacgtttcttggcagcttgatgtaatagtcagcatggtaacacattttatgacattccttgcatattttcttgtctcatttcccgttttccatayctatactaccctgggtttgcacttctcaaataaagtaatgccacattc

SEQ ID NO: 840965 - DNA, 559 bp, Homo sapiens
tttgctttaaaattttaaattttatttaattatacgctttctgggtgggtgccgtggctcacacctgtaatyccagcactttgggaggcggaggtgggtgggtcatctgaggtcaggagtttgagaccagcctggctaacatggtgaaaccccgtctccactaaaaaatgtaaaaattagccaggcatgctggcaggaacctgtaaaatccctgctactcaggaggccgacgcaggagaattgcttgaacctgggagggggaggttgcagtgagctgagatcgcagcactgcactccagcctggccaacagagtgagcctctgtcttaaaaaaatcgaaaaatgttaagtgttctaactttggatgacaaggagcttgcgaagttcctgaatggtgagctcttgggggtgggtacctctgactctggcacagcctggacatgagtcctcaaagggtgctggtcacaagagccctcacaccaccagcctgactcccgcccctgggtaactgaggacggtggggtccccttaggtaaggaggtctcctggcagttccctgg

SEQ ID NO: 840966 - DNA, 624 bp, Homo sapiens
agataagcagtctgactccagaatctattctatccatctattgtatccaacaacatggctaaatggctaaaccattcaaygtgcttttgagttgaagaaataaacgaataggacaaatccaaaccaagacagaagccatgcagtaataaggctttgtctgaattaccattatcaaatacaggctaactctttaagagacattgtaacaaacaagaatatgttcagagagggattgagactgtatagagtgtaaattatggaaaggatcaataatcaaaagaactgaaaatatactgataatattgaaactgaaatgagaaaacgtgaagactacagtagacgtctttagagatttgaatctacatcacgtagaaacgaggtccgtgtcattttgtgtgggtcaagagagaagagccttggtacagttaatgaatggtagatttggggttcaacataagtaataatttcttaataattagatagacttatgtaataattaatgggatcccttattggataaatatgtttttaatactacaggcatttattgaaggatgcttaataatatgtcaaaaacattgtggagtttttacacacatagctgaattcagattacatgatctt

SEQ ID NO: 840967 - DNA, 655 bp, Homo sapiens
tactagaaagtacttattttaggatttgtctagggttaggtgatttggaggagaccttaaggaagtgaggctttattctggatttgatgctgggaagaaacaggtaattctatgattgggcatcttaataattcttctcttgaaggtgagtgaggcaaatgtttcaatgagtagtgatgcaactactcatattggccaagacagaggatatttggtctatctgtttggttgggatgatgtttttgttttgtctatgatcatacatgattatatagctgttttgtttttgtcttgatttatcacagtcacgtatggtcggaagatggtacctgtgaaagtgtttatgttcaacagaacagaagcttagccatgagtgctagggcatttcttccttaactcctcacagtgcctgtggcaggatctcctttgtggctccaagtcctgcttgacaggcctacctttgttctaacctccattgggtaacctattctccaagaaaaatcacaagagaaggtcctgtgttttatttatctgtgtatctcarcaatggaggcctgtatcttaaagagtaggcagtaatattatcatattattaccatatattataaatattatatagtatatattataacccttattatatatatatagttat

SEQ ID NO: 840968 - DNA, 549 bp, Homo sapiens
ggcgtttgagattgtacctctagaatggagactaggtggggaaatgaatataggttcaacaaagagacagaaaaaaaagatgwacactgtacttctacttccatttaatcccctcagtaaatttatgaggaaatgactcccatcattctacagaggagggaactaaggaccaaaaaagttaaatcgtttttcttaagcacacaggctagaaatatgtgaacaggggtccacctcaaatctgtttaatccaaaatcaattttcttggcaatacactgtgctgcctgcctgcaccactgccatacctgaccacctgagcatagttcttcaatatcaaagtatgtttctctggtggatacaaagttttttttttcaatacatttgcccagcaatttcaaactcttttagcagtgattctcaaatcttatgctgcataaatatcacctagaaagcttgtgaaaaatgcagattcaccacctgatcacacttagagaaactgtgatataaaagttgaggcattattataatggagtgaagcatcatcatagaca

SEQ ID NO: 840969 - DNA, 608 bp, Homo sapiens
ggtagaaaaagatattccatgcaactggaaaccaaaaaaagggcaagagtagcaatattttagataaaatagactgcatatctaggactgtaaaaagagataaagaaggtcagtataaactgagaaaggkatcagttcagcaagaggagatagcaattataaatatctatacacccaacagcagagtgcacaagtatataaagcaaatatgaatagatttaaaggagagataaattccaatattgccatagtagaagactgtaatacttcattctaaataacggacagataacctagtcagaaaatcaacaaagaaacatcataaactacacactagatcaaacaggtctcactgacatttgcaaaacatttcacccaactgctatagaatacatattattttcaccagtgcacagagcattctccagaatacactgtaactttggctacaaaatatgtctgagtacattttaaaaagtagaaattacatcaagcgtctttcctttattccacaatggactaaaactagaaatcgataataagagaaatttcagaaatttcacaaacacatgaaaattgaacaatatgctcctggatgaccaatggat

SEQ ID NO: 840970 - DNA, 404 bp, Homo sapiens
ccacaggcgtcctgtgttcacagtcctcgtaaatgttctctggaggccacagattcattatgtyggaaaaggtagagcaacagacagaaaatgctggcagaggtccagccctctgtgggcttcgagtgtggtattgcctagagtttgttcctacaggtatttttgcataaagacctctgtctgaggaagtgagtctaagacagcagagctcaggacggtcttttagagtattgggtgcccacgactcttttgaaagaagtccattgatactcctctactatttcccccgatctatttgagagccagcaaactgatttgataaaacagtgatagatttgtcagattaagatagtaatttgcttccattaatttgagaggcatcagtgtctcacagtgagaagaaa

SEQ ID NO: 840971 - DNA, 491 bp, Homo sapiens
aaattgttacattttcaaagaatggatatgtagatatattcaatttatataagaattaggttaattgaatatgttgaatactgataatttgcttggatctgtgttagacacattgtactgatagccaccatcatccttaaagtcattctgtggttccccttaacacgtggagtcaggtaactggcccactgtctcactgcaggatagggggctaggtgtttgcctaggactgacttttaagcttttcaaggatatcttgcttatattgggtgatctgtgacttttcttatggcataagcatcagtcacacccaaaaatatatgtacatatatagtttgtttataaaggccattgggaaaaaaattctcaagaacatctgagaaagctgtgaggacaatgtcattaagtctggttcttttgttttttcagattccatatccattctccaggscccccacccttgtttcttcattcctaaggcattgtaaata

SEQ ID NO: 840972 - DNA, 465 bp, Homo sapiens
taataatatctactgcagcactccctctgcctgatcttgcttcctcacagatgttgtcaatctctagtaaacacatcccatcacaaactttatctccatctcttcttcagagaacccaacttttgacagtaccatgtgataaccaagaaggtggctctggatcctctgtgcccaactctgaattctgacctccactccctgggctctctcaaatgtgtcacttagtcatatgttgccttggtttcttcacctataaaatggaaatgacattaatctgtaccccataaagttgtgaagatcaagtgaattaatccatattaaacacttaaaagagtgcctgggatcattaagcattcaggaaatgttaggtgctattatttccaacattacagcatgctaggccctgmgccacaccctgggaacacagagtaaaatcaggtatggcccttgcccatgaaggagtaa

SEQ ID NO: 840973 - DNA, 568 bp, Homo sapiens
cctcagggcttccattggctaggagagggagttcccwgaccccttgcgcttcccaggtgaggtgattaccccccctgcttctgtctgccctcagtggctgcacccactgtctaaccagtcccaatgagatgaaccatgtacctcagttggaaatgcagaattcacctgctttctgcattggtctctctgggagctgcagactggagctgctcctatttcgctatcttgccagcctcctccagtaattcttgtgtgttgaattctgcaacgcacctttaattatttttgaagttgctaacgttaattaaagtttgtgtctgaacctcctgctgatggaggatgaattaccagagtatagctgggtttgtgaaacccgcagtggatcaggcaatgttaaagatgattaaacaatttccctccttccatggaggcttctttttcttattacctaaagcagtttcacactcctttttgttatctatctaataggatattatctagggtcaaatttctttatagtgttattgcttatatatgcttgaatatagtcacagtttgaaagactgag

SEQ ID NO: 840974 - DNA, 504 bp, Homo sapiens
tacagaaaagttccagagtgcagagtacacagcaggtctgtggcttctgatgtcctcctgggcaggttgcctttctgactaccatataaagcctagataagatctctgaatatcaaatggttctttctctaccatcctgcaaatattaggcagatttgggccttatataacctcaacatgacatcctgtcatggcttttttacacacaaatctatttctgttttttaatgaggctagataattaagtcagcactgactaaaacattcaattttgtcatacaagtacaccactttgtattgtccacacaaaaagaaatggttcctgatgtttatattagatgtttctctgagctcatgcatttatatcactgcctgttttaggttaggttcttcaggaacagagtctgagacaggaatctggggacatgtgaattattgagtaggtgcttaarggaaaaatgaagggagagaagcataaaaaaaggggaagtggtctgaaaaggg

SEQ ID NO: 840975 - DNA, 591 bp, Homo sapiens
tatactagtgcttaatgtcatgttattcgatagagaataaaaatggtaaagtaacagtaaataatttttaagagagcctatgactaaaaattttcatattaaatgacaytcaagctattttacttggtttatctcctgagtgaggaaaggaattcatgatgggagtgtaccttcagggtggaataggtagattcagataggtttctaactctttagatgtgaagggcagggctgggcgcggtggctcacgcctgtaatcccagaactttgggaggctgaggcaggcggatcacgaggtcagaagatcgagaccatcctagctaacacggtgaaaccccatctctactaaaaatacaaaaaaaaattagctgggcgttgtggcgggcgcctgtagtcccagctactcgggaggctgaggcaggagaatggcgtgaacccgggaggcagagtttgcagtgagccgagatcgcacttctgcactccagcctgggcaacagagcgagactccgtctcagaaaaaaaaaaaatgtgaagggcagggccaaggcttattttaagtttcccatagctcctggcacaaggatgtgcatt

SEQ ID NO: 840976 - DNA, 625 bp, Homo sapiens
ttataatcccctaaacctcaatcatgtaaaatcttggccttacccgttctcattttcagaaagaaaagcattcagaagaatataaaatgaaaactacrctgccactcctttcttccttgtgatggccatggaaatgctagcgtttaaccagagacttggactctcaatatttcaaatgttttaaaagaactttaagtagaatatacctgtgcttagcactgcttgggtgctaagttaacatgcagtgaaataagattacgggaggtgattcatggtttcaggtaggggtgaaataaaggcaacaaagggcagtttgggtttagaggacgcttcatactgtggaacatgtgaaaatttagtttattttaagcaaaaatctttatagaaatccctgttttgcttttcttattgttaaacaataaaatgtgctaggctttacgaccagagaaaaatgggaaggagatattttaaggacagcctgatgattatgtttttgtaaataagatcccaaacagatggaaattaaaccaaatctttcaatgacagagggtgacagtaggtctgaaggcagctacttttatggagagtgttgaggaagtcagaactttactcctatatctggatt

SEQ ID NO: 840977 - DNA, 533 bp, Homo sapiens
cgtcggacttttagaagtcatcctttgccattctcccttcctcactcccaaataagaatcctctggaacattcctaaccttcaaaatgacatcttttgttgttgttgttgttgtttttgagacagagctcactctgttgcccaggctggagtgcagtggccaaatctcagctcactgcaacctccgcctcccaggttcaagccattctcctgcctcagcctcctgagtagctgggactacaggtgcccaccaccatggctggctaattttttgtatttttagtagaggcggggtttcacatgttagccaggatggtctcaatctcctgacctcgtgatccgcccgtctcggcctcccaaagtgctcggattacaggcatgagcaccacgcccggcccctagttaatgactttcttaaatatcataatgctaaaaggaatttgtgctagaattttcctaaataaattgataactaccttctctgacctgtaaccccctgccaatwgcatatatcagccagacttgaaaagattt

SEQ ID NO: 840978 - DNA, 567 bp, Homo sapiens
gagatcctgccggtgggatccagaggaagggtctggcttmctagcctcctggaaggaccttgctgccaactcttcccttctcacctgctcagtgacttgtctgaacttacataactagttactggcagagctgagtccagaccccaattatctcgagtcaggacaggtgactttttgccatcccagggtgcccacccctgtagcttgaggccatctcccctggtggagtcccagtttcctcagctgagaaagggggtgagcccttcctgtcccactggccttccagggaggcggtggacccacctgccatgtgaactgtgcaaaccagagtcaagagtgtgtgccgctaacatggtgacatcagcaccgattgtagttgaaagttttattggattaaaaaaaagacagacaatactggtcacataaatgggtgttttttttttctcttaaggtttgaggccttatttattgttttatgtacgtagttccatacttccagcagtaattcaggaaacaggagagagagataaggtaagaaaaagagagaaaggcagctgggctcccaag

SEQ ID NO: 840979 - DNA, 619 bp, Homo sapiens
gtagtcccagctatgtgggaggctgaagcatgagaatcgcttgaacccaagaggtggaggttgtggtaagctgaaatggcactgctgcactccagcctgggttacagagcaagaccctgtctcaaaaaaaaaaagaaagaaaaaaaaaaaaaaaggaggggaagagagacctgagctcgcatgctcagcccctctccatgcgatgtttgtgccaccttggaactctgcagaaagtctgcaccagcaagaaggccctcaccagatacagcccgttgttcttggacttcccagcctccataattattaagaaataaattcattttctttataaattatccagttttagatgttctgttataagcaacagaaaatggactaagacacactctcttaaatgtataataaatagactatttaatatcatgttataaaaaattatatatttttataatttatatcttatatataaaaaatttcccttaaagtgatttgaagagattttaataattagtatatacasagagagttatcttattaaagaatgctatgtggcattttatattgtggatgcaccataatttttaaagtaatttaaaaaattgaagtgtaacgaacatag

SEQ ID NO: 840980 - DNA, 452 bp, Homo sapiens
ttatatgtactataaagattgtatttggatgtgggtggcgtrgagtaatttctgatgtttcctttatttacctaccctcacagcaagaagaatatcttgtaggaatggttaatgcacggtgacaagcaggttagccagggccccttctctttggaatccacttgcctgcatcgagcgtatactctcttctgctcttagccatgctatcagtggcgaggctaaggttcttccacagcaacagaagcctgcaatcctcctgcactgcctggtaattaaacactcctaattcagggactcagtgtttggaagctattgttgcttccaaacaataaattattataagattaaaaaggaagaagttctaatataagtttgggaatcacttgtggtacagattaagaatgagatcatgaagcaaaaatatgatgtgtatacattgatcaaattgcctt

SEQ ID NO: 840981 - DNA, 485 bp, Homo sapiens
atctgtctccatctcagtctacaataggattattttacttatgtttaagacaactcaaatgtatgttgtaaagttttgtacatatgtccaggagttcccacagttacatggtaaatgtgcaaaaaaaaagtaaatgtctgtattcatttggtcttcctaagggaggcattcaaatttgaaagagaagtataagagatatttatctaaaatcaccaagtatggtctttagaatagtctagcctttcttttttctctaattataatattcaggattatttttcttaagtttatgtaaaagtggtcatactaaagcaaatggaaagataatctacaaaacaaaccgtagtaaagggaaataatttctggatattttcattaaattcatttgtggttattttactctttayatttcctgatgatatcacaaaactataattaatagaatcatattatgtgtaattatatgtaaaaaagtatgtgtaatt

SEQ ID NO: 840982 - DNA, 573 bp, Homo sapiens
tgtcttaaaatgtatagaaggagatagttatattaattatctttgaaacatagtgataatgaacataatctccccatcaccaatacaggaagtctcaaatgagaattagacagtgtatatttcaaatttaaacaattaaatggactcttaacctttctgatttcatctaaaaatcctgcttcccattgtgttcttaatttgatcccattgcttatgacatttttggcttcaagtgtggttttacagtttggatgagctgctaaacttggcactgaatacgttacaaaaataaagaggaatttctccctaggatcaagggagtttgaaagagtatgaatatattatgctaatatatgtgtgtaaatttgtgaaaggaaatatttaacatttatttttttcaatgtgtttctatggaaagtagtggaaacatctcatcttatacatttgttttgtaaatgtggagaaacactgactcaacaacagcygatatataaaatgggaacataagcagaagaacgaagcaaaggtttcacactgagcttcatatctatccaccgagctggcattcttcag

SEQ ID NO: 840983 - DNA, 665 bp, Homo sapiens
cagttcacttcttctgtatttctggatcctatttaatatgatggatatagaccatgttttttcatcggttgactgacatttgtatggtttccactttttgcaattatgaataactctgctataaccatttgcatacaaatttttacgtggacacattttaagtatagaactagctgtggatttgctggttcatatggcaatgttatgtcgaacttccggagtattttacaaaatagacgcaccattctatattctcaccagccatagggaagtgaaacacccatacacctcctcaccaacacttactgtctttttgatggtacctattttagtggacatgaactggtatctcagtacggctttgatttgcatttccttgatggctaaggatgctgagaatttttatacgggcttcttggccatttgtgtatcttctttggggcagcgtctattcgattattgtgcccatacttggtaatttgtctttttattgctgagttttaagagatctttatgtattccagatgcaagttatttatattttatataatttgcaaactttscctattctatagatctttttctgttctaatgttttttgaaatacaaagtttaaaattttgatgaattccagttaattcttttcttgtgcttttgatgtcata

SEQ ID NO: 840984 - DNA, 544 bp, Homo sapiens
tatttatattttatataatttgcaaactttgcctattctatagatctttttctgttctaatgttttttgaaatacaaagtttaaaattttgatgaattccagttaattcttttcttgtgcttttgatgtcatatctaagaagactttgcttaacatcaggttacaaagatttactcctatattttcttcaaagagtttgagctgcacttcttacatttgggtctatgatttattaatttttttgtggatagtgtaaggaaggggtaccctcttgtggatactcagttgtctgagcaccatttattgaaaaactatttttttcttgattgtttttggcatcttgtcaaaaatcaaattgacgggtaatgtcagtggtttttatctctggaacgtgaattttatttcattaatccatgtgtctaatgcaagcataatggaatcatgatcaatgcggtttcctagaaagtgctgaatcaggtaggtatgaatattgaaatttttcttttttaaagattgttttgagyattctaagtcctttgaatat

SEQ ID NO: 840985 - DNA, 633 bp, Homo sapiens
atgaaaataccttttacttaaagaactatagttctgtaaaggtgcataaatgaacaagaactgtgaatttgaatcttagaaaactatgtataatggatatgctttttttacgtgaagtgtgcttttaatatatagtctctcttatcatccgtctaagccaggtaattcctcttgtactgtaaaagtctacagcgtcatagtgtctatgatcattgcactttgccatggcagcctgcttgacatttatgataagaaggtgttgaagtatttgctgtcattcattcaataactattgagtgactaccatttaacattttttatgcctaccatcatactcaacttttgctcaactgttttgaatgtatcagctaataaaataagtcgagaaaatacatttatattcgcaatatgtttccaaataaatttagaaaaagatacttacctatacatattattatattcttagaaaatccaagcactcacacctgagacaccgttaaatccaataaatgattttgtcaaatggattggtakgtgataaacatataaaaataaaaataactgcattgacccagccagcttgagtaatgatcatcactgcaaccgaggcccaacacatgattttttgctaac

SEQ ID NO: 840986 - DNA, 633 bp, Homo sapiens
atgaaaataccttttacttaaagaactatagttctgtaaaggtgcataaatgaacaagaactgtgaatttgaatcttagaaaactatgtataatggatatgctttttttacgtgaagtgtgcttttaatatatagtctctcttatcatccgtctaagccaggtaattcctcttgtactgtaaaagtctacagcgtcatagtgtctatgatcattgcactttgccatggcagcctgcttgacatttatgataagaaggtgttgaagtatttgctgtcattcattcaataactattgagtgactaccatttaacattttttatgcctaccatcatactcaacttttgctcaactgttttgaatgtatcagctaataaaataagtcgagaaaatacatttatattcgcaatatgtttccaaataaatttagaaaaagatacttacctatacatattattatattcttagaaaatccaagcactcacacctgagacaccgttaaatccaataaatgattttgtcaaatggattggtagrtgataaacatataaaaataaaaataactgcattgacccagccagcttgagtaatgatcatcactgcaaccgaggcccaacacatgattttttgctaac

SEQ ID NO: 840987 - DNA, 553 bp, Homo sapiens
gttatctgtgttctcatgttcattgctgtgtaattcaaaacagtggaggtacagaaaaaatcctactatgtccactgattgatggataaagaaaatgtggtgtatatatagcccatggaggattactcttcactcttcaaaagggagatcctgccatagcaacaatatggatgaacctcaaggtcattatactgtgtgaaccaagtcagttacagaaagtcaaataccgtaggattccatttccatggggaatctacaatgcacagaagcagagaaaagaatggaggttgccaggggtagggaagaaaggaaaatggagaattgctatttaaggggtacatggtttgggttatatctgatgagtatgttctggagatccgatgaacaacattgtgcctacagctgacaatagtgggttgtacacttacaagtttgttaagaaagtagatctcatgtgaagtgttctttatttaagttctggaatacatgtgcagaacaygcaggttcgttacataaatatacatgtgccatgatggtttgctgcacctatcaa

SEQ ID NO: 840988 - DNA, 476 bp, Homo sapiens
tataccatgttaatagtatggaagatggaagactcaataatgtaaagatataggttacttccaaactgatacacaggttttacacaatttccaccaaaatcccagcaagaatttttgggtatatagcaagatctttctaaaatttatgtgggaaggcaaacaaacaaaaaaaaatagaatagctcaaayattttgcgagagaataataaagcaggagaaacagttcacctgattccaagaatttattttatatctacaacggttaagactatttggtatcggcagattggcaaagacataaacccgtatgtcaatggatcagaacaaagaacccaaaaataaacctgaacaaatatctccaatttattttcaacagattcaaaagaaattgcatagaataaaccaacaaattatgatggatcaattggatgtccatagcaaatagtaagtttaacaccttatataaaaattacctc

SEQ ID NO: 840989 - DNA, 476 bp, Homo sapiens
tataccatgttaatagtatggaagatggaagactcaataatgtaaagatataggttacttccaaactgatacacaggttttacacaatttccaccaaaatcccagcaagaatttttgggtatatagcaagatctttctaaaatttatgtgggaaggcaaacaaacaaaaaaaaatagaatagctcaaatattttgcgagagaakaataaagcaggagaaacagttcacctgattccaagaatttattttatatctacaacggttaagactatttggtatcggcagattggcaaagacataaacccgtatgtcaatggatcagaacaaagaacccaaaaataaacctgaacaaatatctccaatttattttcaacagattcaaaagaaattgcatagaataaaccaacaaattatgatggatcaattggatgtccatagcaaatagtaagtttaacaccttatataaaaattacctc

SEQ ID NO: 840990 - DNA, 535 bp, Homo sapiens
cacttgagaaactggtatacagtacacagaaactctttgtataatttcttttaactacatgtgaatctataatgatctcacattaaataattaaatacattggaraggttgagactgagaggtactcaagaacatattaagattaaaataatctagtaaccaaaataatgctatttaataacaaaacattaaattctaaaagtaagttgaacaaaaactattgaggataatttagtaattgcccatcttgaagttttacatatatattcgcataagttaggtacaaaataatgtgatagcacttaattaaatacaatttcatgtccctttaaattattaagttttataaaaaattgtgattacgaaggggtgtggtcaaatgatattagttcaggaagtaggaacaagatactaagggatttttaaaacgagtgtcataagactactgttcagaggtttggggtaatttaatatggacgtatgtagggaaaatatatgcatgtgatctgatttcaaatagctgcaatgaaatgga

SEQ ID NO: 840991 - DNA, 638 bp, Homo sapiens
aatattttcagtgttaaaaaacttttaaaaatagacattatggttacatgttcaccttgaggtgatacgagcgatacacattggtaaaagtgagaactaggaagagatcaagaacatakagaagggaacagaatttccactggacagctaagcttaggggtgatattccaggaaacctcatgcggaatcactttagttttttagttttaccacctgcccctggcaaaaatttccaagaggctttttggtactattagcattgtcttttaaaaaatatggtgagtgtggtaattgtcgtcatttccgaaagatgagtaatcgaacaataaaattgtacattcgtcgagcctcctctacttacactttaagtttatcacttaaatctttgaaacgttgtgacttcttagttgtgttcgtttattttcttctccttttataacacttgatacataactgcaaaagagtcttaaatcttaatttggagacttaattttggttttattaactatgagtgcactttctaaaacaagaggtcacaggagagtgtggaaaccattccttccttttccgtaaacctgtcgactttgaacaagcttagtcaagtgggaagtattacatgaaagcgttttctgttgaca

SEQ ID NO: 840992 - DNA, 479 bp, Homo sapiens
gatttaaagattttgtttactgtctatgaataatataaattctactccttcctctgggtccagacaaatgccatccacttcaggcttcctttcccaatcattcaaggagctgaaagggatttctatttcctcttaacttgtatagcattttgaatgaccacattctgataattcattgtaataataatgatcacggtctgcctcagactttgatttgctttagttgtatctaacctgctataacgtaagcatccatcaggcaagaactttgtcatgtatatttgttttcccttatccataataattgggaaataacatgggatcaataatttattaaaatgttgtttgtctttaacattctatttkcaaatgtacatttaagtaagtaccttttcccaaagaaacgctgtcataactgaggctaggctcccagacctgacacaggctgatgatcctttttgttaactccacaatccctt

SEQ ID NO: 840993 - DNA, 590 bp, Homo sapiens
aaaatggagcatggtatgcagtcacaaataacaatggcaggcctggcgcggtggctcgtgcctgtaatcctagcactttgggaggctgaggtgggcagatcacaaggtcaggagatcgagaccatcctggctaacacggtgaaaccccgtatctactaaaatacaaaaaactagtcgggcgtggtggcgggcacctgtagtcccagctactctggaggctgaggcaggaaaatggcatgaacccggaaggcggggcttgcagtgagccgggatctcgccactgcactccagcctgggtgacaaatcgagactcggtctcaaacagacaaacaaaaataaataaaaataaaaaaattaaataaatttaaaaaaaaaaaacaatggcagcagcatgggcagcaacctgacggtaacctatgcacgaattttgatttaaatgaaaaatttgtacctaaagattttctacggcagcagttctgaaacttttgctgtcaggaccgctttatagtctgaaaaatttgtaagaaccccatagtasgattgccacatattctatgaattatacttacactaaaaactaatttgctgtt

SEQ ID NO: 840994 - DNA, 576 bp, Homo sapiens
catacataataatgccctgtgcttcmtacaatcactgcaggaagatgttactgtgggaatgttaagaggcagtgaaatccaaactgggtcttggaaggctaaattagagtcctgtaagtgaagtagagaggaagtagaattccagctggagggataagccttcgactcaaggttctgagctctatctcattcttttagaaaactgagaaacctgtttctttcagtcttcttaccatattcctttttttttaattcgtaaactgaattaatataggtgtcatgtgatataacaggaaatgagacttatagctaaatggaatttcaatatcccatattgggctctgttctctagtcctgagctgctgctttcttttaatcagagctatattgaaatgattcacataccacaatattgacctgaagtgtactcttcagtgctttttaatatattcctggggttatgcattcatcaccacagttatttttggaagatgtttaatgcaaaaaacccagtatccattagtacccactcactattttccctcagccccacggcccaaagcaaacactaattta

SEQ ID NO: 840995 - DNA, 452 bp, Homo sapiens
atcggcagttcacttcttctgtatttctggatcctatttaatatgatggatatagaccatgttttttcatcggttgactgacatttgtatkgtttccactttttgcaattatgaataactctgctataaccatttgcatacaaatttttacgtggacacattttaagtatagaactagctgtggatttgctggttcatatggcaatgttatgtcgaacttccggagtattttacaaaatagacgcaccattctatattctcaccagccatagggaagtgaaacacccatacacctcctcaccaacacttactgtctttttgatggtacctattttagtggacatgaactggtatctcagtacggctttgatttgcatttccttgatggctaaggatgctgagaatttttatacgggcttcttggccatttgtgtatcttctttggggcagcg

SEQ ID NO: 840996 - DNA, 567 bp, Homo sapiens
tttccttcataaatcacccagtctcaggtagttctctataacattgtgagaatggagtaatacaacagacaatcccagttatttttctgggtgcatttccaaagtgactatctttttttaaccacaagaagtatacaaaagttccaagaacactacttccttgccaacacctaaaattgtccatctttagaatttttagaaattcagtcctggtaaaagtttttttattgaagatttaatttgcagttccttaaaaacgagtcaggttgcaaatctcttcatgagattttccttcaagtcttccattcttttttttttctaatggaatattgacattttcttactattttctaagacttaaaaattccaggctctaaatctttttgtaaattatatgtttgataaataactctcccaattatgggacttcactktttacttttttactgaagattttgatgaagataagttgttaattttaacgtctttggaacttatttctgaagttttatgtctgaattaaaaatgtatttttctaacatgatatcatgaacaaattatgtttta

SEQ ID NO: 840997 - DNA, 618 bp, Homo sapiens
ttatttctgaagttttatgtctgaattaaaaatgtatttttctaacatgatatcatgaacaaattatgttttatattctccaatttcataattctgcctgtcatcttgatgctttgattgacctcatgataactgtcttcaactatttctcgacaatagtgcctaattggctgttgaacccagtcactgtagtttcatttaagctaccgtaatttttttcttttcttttcttttcttttttttttttagacagagtcttctttgctcaggcttggaatgcaatggcgtgatctcggctccgtgtaatctctgcctcttgggttcaaacgattcttctgcctcagcctcccaagtagctgagattacaggcggctgccaccacaccaggctactttttgtgtttttagtagagatggggtttcaccatgtggaccaagctggtctcgaactcctgacctcaagtgatccgcctgccttggcctcctatagtgctgggattacaggtgtgagccactgcacccagccctgtatttttatctcyacaaattttatttattcctttaaaacagcattgttaaagaactttattcttctcttttcaaaatatttatttaaatg

SEQ ID NO: 840998 - DNA, 499 bp, Homo sapiens
gtgaattttatcatattactttattaaggtattaaactcaaattattttcatatatgcataatacactccctatttggtaatctttattatattgatgtcttgttcacttctgtagtcctatttagattataagatccctatactggaattaagtatcagttaacaaatgttagcggcattcagattctgggataagtctttacatttgtttctatttacttaatagctttgtaagatttgcaaacgcatattttttctaagtttttatattattgtcagtaaaattagtatagtagtatttcttatatacagttctttaaaataataagataaggtgcaggaaaaggttcagcatattgtaagactgaaataatactaccatttatcaatattaatgtgcatcttcagtaaatataygttaaactaccacacaagagcatgtgttacaatcatgaagcaaagagatagagatactgcaagtaatacataaaattttaa

SEQ ID NO: 840999 - DNA, 624 bp, Homo sapiens
cgttgactaatggatttgtgagtttttgttctcttccattttttkttaaataactgtttttaaaaatgtgtgtatggtggggtggggacggctgctaaagcaatgagaagtgagtccttaattcctaccctgacctcttccctacccccttatttccatctgctcttttcaatctggctgtttggatgtgaggtattctaagatcccaccgtcttcctacataataggacagcatttcacacaaagctgctgcctggcaggtggcaatgaggtcatgtttgaagagtgggcaaggtgagccacttgcaaataacgtgaggaagggctcagtgtgacttgtgctctaaagagatgcaggggcttcagacatggatctttgaaacaaaccccgtggaggctgcagagagattttaacgttattaaggcacaagttgcacaataccactggggccactgccatctgatttgtgcctcatattctgggagcaattctttcgtttgcttttgaatgactctgaaaaaagtggcatcagtcagcgaatgcatgtctgtataaattatgcatctgtgagttcatgctcacatggcattcaggaagctccatgatgtacggcagaggccttt

SEQ ID NO: 841000 - DNA, 536 bp, Homo sapiens
gtgttctctccctgatgggggatgcccagacatggtagacagaggatgtgttggttgctctaagtgtytctgaccctgaagatttgagaataagccccagccgtcagcccctgctcaattgcagtcacccacccaggaatttccccaacccttcttgagacttcatatctgttttactttttccttcctttggaatcataacattaaaggatgatatataccaaagcactttgtgaaaggagagttagcagcaactactcagaaaaggagctaacatttagtagaacctactaaatgccaggttctgtgccaggtcctgcaatccttgccattatcagaacaggattcgtgtacccatttcacaggttggggaacagctttagggaaattaaagtccttggccaaggttgcaggtagaagtggaactttcctgtgaggttcccctgtgacccagcaatcccatctctagggatttatccaagggtataaccagaccaacatgaaaaggataattagaaggatcctggttattaatg

SEQ ID NO: 841001 - DNA, 139 bp, Homo sapiens
atcctccagagacagggtcgatggctctttgccatttataaatggaaagaaaggtctagagagggacagtgagtgcctgggggtcacccragggcccagcccggctcgcaccagatcccttgtctccagtctctagaga

SEQ ID NO: 841002 - DNA, 549 bp, Homo sapiens
ggcctctgggtgcctgtggagggctctgtggccagccaggctgaggtctgggtgtcacatcggttttgagatctgcaaagccatggtcatgtgattttcttggagctggggctgcctgcctgcttaggccaggttctctctgctcatcaacaaccacgggagggagggaagaaaggaagcgaggcaggggctggtgggaagtttgaggggctgggctgggttctctttggtattctgtcgagtgcctgcctgcaactcggtgggtgcttaataaatgtttattacgagtaacaaaaccagccttatttacactaggcctatctccaaaggctgctttccatacttaaaaataaccttaatcatctctcccaacatcctccagagacagggtcgatggctctttgccatttataaatggaaagaaaggtctagagagggacagtgagtgcctgggggtcacccgrgggcccagcccggctcgcaccagatcccttgtctccagtctctagagagcacaggcaggatccaggaaaacctccatcttttttt

SEQ ID NO: 841003 - DNA, 482 bp, Homo sapiens
aggctgcaaagggttccaaatgtccacttgcagatcctgcaaaaagagggaatcaaaactgctcaatgaaaagataggttcacctctgtgrgattaatgcacatatcacaaagtagtttctcagaatgcttctgtgtagtttttatatggaggtattttctttttcacaataggccacatgggctccaaatacacacttgcactttctacaaaaagagtgtttcaaaactgctcaatcataagatagtttcaacattgtgagatgaaagcacacatcacaaagaagtttctcataatgcttctgtgtagttttcattgaagatatttccttttccaccttaggctgcaaagggctccaaatatccgcttgcagattctataaaaagagagattcaaaactgatcaataataagataagttcaaccctgtgaatcgtatgcacacatcagaaagaagattctcagaaatcttttttgtacttt

SEQ ID NO: 841004 - DNA, 707 bp, Homo sapiens
gtaaaaagagagattcaaaactgctgaatcaaaagataggttcaacactgtcacttcagtgcacaactcacaaagatgtttctcagaatgcttctgtgtagtttttgtgtgaagataattcattttccacagtrcgcctcaaagcgctccaaatatccactcacagattctgtaaaaagaaagattcaaaactgctgaatcaaaagatacgttcaacaatgtgagctgaatgcacacatcacaaataaggttgacagaatgcttctgggtagtttttatttgaagaaatttccctttccacaataggcctcaaattgctctaaatatccacttgcagattctacagaaagaatgtttcaaatctgctcagtcaaaagaaaggttgtactctgtgaggtgaatgcacacttcacaaagtagtttctcagaatgcttctgcatagtttttatgtgaagatatttccttccccactataggcctcaaaggctccaaatatccacttgtagattctaaaaaaatagtgtttcaaaactgctgtatcaaaagaaagattcaactctgtgagatggatgcacagatcacaaagaagtttctcataaagcttctgtgtagtttttatgtgaagatatttgtttttccacagcaggccccaatgaactccaaatatccacttgcagattctataaaaagagtgtttcaaaactgc

SEQ ID NO: 841005 - DNA, 611 bp, Homo sapiens
atggctagccatatgtagaaagctgaagctggatcccttccttacaccttatacaaaaattaattcaagatggattaaaaacttaaacgttagacctaaaaccataaaaatcctagaggaaaacccaggcattaccattcaggacataggcatgggcaaggacttcatgtctaaaacaccaaaagcaatggcaacaaaagccaaaattgacaaatgggatctaattaaactaaagagcttctgcaaagcaaaagaaactaccatcagagtgaacaggcaatgtaaaaaatgggagaaagttttcacaacctatttatctgacaaagggctaatatccagaatttgcaatgaactcaaacaaatttacaagaaaaaacaaacaaccccatcaaaaagtgggtgaaggacatgaacagacacttctcaacagaagacatttatgcaaccaaaaaactcatggaaaaatgctcattcttaactggccatcagagaaatgcaaatcaaaaccacaatgagataccatctcacaccrgttagaatggcaatgattaaaattcaggaaacaacaggtgttggagaggatgtggagaaataggaacacttttacactt

SEQ ID NO: 841006 - DNA, 603 bp, Homo sapiens
atggtgagacctgtctctactaaaaatgtaaaaaattagctgggtgtcgtagtacacacctatggtcccagctattcagaaggctgaggtgggaggatggcttgaccctgtctcaaaaaaaaagcttggattaatattgaaatattgaatctaatgaaatattcaacataccatgagagaatggtaacaatgcatctttgcctagaaagaatccatgtaacagagccgcacagggcaaatgcactatcaaaggctcaatccttcaattaacttgaaatgggccatagtgaatgtgttttctgagttataacagcactttcattttcaagaacagtctgtatgtagtctaacctagttaataaatacaggattatgtaacttggtaattaaccgggtttccaactcacatcttcaattcagaatgtcaaatactgacaaaaaaaaaacatagcaataagacactttcaagagagttgatgagccacttatttttgacaatatttaataatgaaacctcaaaacaagaaaatgaaggaaattcacagcttgataygatggaatcaaatagtcaaaactaagcaatctagggaaaaaattagcctt

SEQ ID NO: 841007 - DNA, 630 bp, Homo sapiens
actgaaagcagtcagtgttgttaaatactaaatctcaatcattacataaatcatcttttatgtaaaaaatgtcggccgggtgcggtggctcatgtctgtaatcccagcactttgggaggccgaggcgggcagatcacgaggtcaggagatgaagaccctcctggccaacatggtgaaaccccgtctctactaaaatacaaaaaattagccaggcgtggtggcacgtgcctgtagtcccagctacttgggaggctgaggcaggggaattgcttgagcccggaaggcagaggttgcagtgagctgagattgcaccgctgtgctccagtctggagacagagcaagactccgtctcaaaaaaaaaaaaaaaaaaaaaaaaaaaaaaagggtcttgttagttttagaacaagaaaggagtatttattgtctgctaacacaatagttaacatctgtgagtttgcaagcatctgggtaatcttagtacctatagttgatttgtgagcatactctaatggtacttgttttcccagctttttttttttttttttttttagagaggcaattactgttcattgtagctgttcttgttttttwaaatttttattttttattatactttaagttctagggtac

SEQ ID NO: 841008 - DNA, 596 bp, Homo sapiens
gtcaggccctcagttcccactctccagggaggaggaggggaaggtgaatgtggctggcatttcgcactaggaacaaccacacgcagttgttggagaggtttaggggcctgtggtgccttgggttctggttccatcaggagacaactggccaggctccagagccccacaaatgggagtaaaagaatgtggaaaactaccgggtcctccaggaagcttggagtggggcaaaggtggaacaagagctccgtttccgccaggacctgtgtccctaagaaggctgatgctgttatttacccacagggaagtcacaatttctaatgcttgagacagaggcagccttcatttctaaacctgtgtccctcagggaaggggacctgtttcagaccttggaagcctcccaggcacctcctgatgagcttggtagaaacagtgtgcagctatggctttcaggccgtcccagagccacttcccaccagacaccgtttcccagcccatgcscaagggcatgttctggaactacaccggaagactctacagaccagatatccctcagagactctgtcagcaagtgagggagagatctgcaaagagaaaga

SEQ ID NO: 841009 - DNA, 575 bp, Homo sapiens
aatatgtgtgttcccttaataactaaatttaaaattttggttgttttacacattctaatttggcttgagaaacacaaagaaatctctcttcatcamtgaaaggacattttcctttttgtaatgctaagtcaggttgtcacacactgggcacttattgacatgtgagactggataattatttgttatggaggctgtcctatgtactatagggtgtttagtagcaagcctggccttcaccctccagatagcagtagtacctatacaccccagcccatacttattgacaataagaaatgtctctgacaaaaccaaatgttttctgggagacataatctgtcccaagtcaagaatgactttggtaaatgacaacacttaattgaagagacattcaagaagtatatattagtagaaggttttttatgaatactgattgagtactctgccactgctttatcagctctggttatgtaaatattttaaatccttttttatcatttcaacagtgttcacattgtcttcaccaggagtagactccatcttgagaaaccacgtttcttgctgattcataagaagtg

SEQ ID NO: 841010 - DNA, 575 bp, Homo sapiens
aatatgtgtgttcccttaataactaaatttaaaattttggttgttttacacattctaatttggcttgagaaacacaaagaaatctctcttcatcactsaaaggacattttcctttttgtaatgctaagtcaggttgtcacacactgggcacttattgacatgtgagactggataattatttgttatggaggctgtcctatgtactatagggtgtttagtagcaagcctggccttcaccctccagatagcagtagtacctatacaccccagcccatacttattgacaataagaaatgtctctgacaaaaccaaatgttttctgggagacataatctgtcccaagtcaagaatgactttggtaaatgacaacacttaattgaagagacattcaagaagtatatattagtagaaggttttttatgaatactgattgagtactctgccactgctttatcagctctggttatgtaaatattttaaatccttttttatcatttcaacagtgttcacattgtcttcaccaggagtagactccatcttgagaaaccacgtttcttgctgattcataagaagtg

SEQ ID NO: 841011 - DNA, 543 bp, Homo sapiens
ttactatgagtagtactttgtgtgacattaaagaataatgaaaatggtccaggctctgagagatgcagggctacgtgaaaatagtcgctcaggcttattgactgrgaaaaatgatcttccctctctgagtctcattttcttcacatgtaaagtattgcaggtggcattgcattcacagagatgctgagtggattaagtatgaaaacctggaagtggatgatcaagtgcctggaatcaatcaagttaaaattatgtaggtaaagcaaatctagcttatttaataagtgtgtctcactttcatagatttttcaaatggataaaacaaactttgccctatttattttatgtgtaaaacaaaataatgattatgaaagaattttatggagataagaatgctagaaaatctaggatgttatcaattgtgaaatgcccctttatttcctcagatgaaatccaagatgacctcatatctgggttccagcaagatatgctacaaaatgaggccttggtgttctttacgaaatcatctacaccttagtagaa

SEQ ID NO: 841012 - DNA, 648 bp, Homo sapiens
tgaattaaaagtggatattcaagctctaacagcctggacttattgggaaaaacaggaggcaccagagacccttttctggccctgttcttctaaggactccaccctaaagccaataaccaattaagaaacttaaaaactggcaaatgaaaaatcttacaactgagagacaggactagctggatttcctaggccgactaagaatccctaagtctagctgggaaggtgactgcatccacctttaaacccggggcttgcaatttagctcacacccaacattcaggtagtaaagagagctcactaaaaagctaagtaggcaaaaacaggaggtaaagaaatagccaatcatctattgcctgagagcatagtgagagggacaatgatcaggatataaacccaggcattcgagctggcaatggctaccctctttgggtcccctccctttgtatgggagctctgttttcactctattaaatcttgcaactgcactctcttctggtctgtgtttgttacagctccagctgagctttcctttcccttgtcatccaccactgctgtttgccgccrtcacagacccgctgctgacttccatccctccggatccggcagggtgtctgctgtgctcctgacctagtgaggcctccattgcca

SEQ ID NO: 841013 - DNA, 516 bp, Homo sapiens
tgaaactgaagtttcaagttcttccaagtaattcttccaattacttccaagtaatttttgttattttgcattcttttgttttcaagtggaccctccaaactgtataagctgtggtcccacataacttggaacctcttgactccagcaagcacaatgattcaattcatgagaacaccatcaaaatacaaaaatgcaattaataggctctaactgtctttcagtctttacattattctgctgaagatttaagttcctagaagagagagaacccagtaggcctacctttcttcggtcatgagaacacactgtaaccagaagttaaacagtcctaggaagggtacatatagtggagaagaaattcatgaaggtttacccctacatctatcctcatctttagtcctaaaagtatgctttcaaaaaacttcccacstgacataatgcaaacattccctgtaaaaataaaatcgtcatcctacccctaagaacattttccagattcaattccaagatttctaa

SEQ ID NO: 841014 - DNA, 592 bp, Homo sapiens
tctaaaaattagagcaaactttattttaagatcttagatatctgtttttattttaatcacttattttccawttctttgggtagtcattcaaattacgggaaataagaatttcaatttgctttaattaacatattcttcatttctacgtgagacagcactattaccttcataagataaatatagctggaagattgacagatgttattatgaacataaatggccgtaataatcggcatgagttttgaatgctgtaattacccaatgggatggactaatgctgagtttgaccacaaaaaattttccctgaagccttgcatggaaaatttcatacatgatgtcaactcattgattttacaataacgtaattctggagcaaatactaactgtgtgtgtgttttgtataatatgctcttgatagttcaatatatcatgacactctacaaggcaggattcaggagggagtgctaacttgctgcaaaactctcactttttaatttactttactgactcattttgagattcaatgtcacgtaagtcagaccacagcttgtgtcattcttattctgataagaaaccatttggcattttgaaa

SEQ ID NO: 841015 - DNA, 592 bp, Homo sapiens
tctaaaaattagagcaaactttattttaagatcttagatatctgtttttattttaatcacttattttccatttctttgggtagtcattcaaattacgggaaataagaatttcartttgctttaattaacatattcttcatttctacgtgagacagcactattaccttcataagataaatatagctggaagattgacagatgttattatgaacataaatggccgtaataatcggcatgagttttgaatgctgtaattacccaatgggatggactaatgctgagtttgaccacaaaaaattttccctgaagccttgcatggaaaatttcatacatgatgtcaactcattgattttacaataacgtaattctggagcaaatactaactgtgtgtgtgttttgtataatatgctcttgatagttcaatatatcatgacactctacaaggcaggattcaggagggagtgctaacttgctgcaaaactctcactttttaatttactttactgactcattttgagattcaatgtcacgtaagtcagaccacagcttgtgtcattcttattctgataagaaaccatttggcattttgaaa

SEQ ID NO: 841016 - DNA, 346 bp, Homo sapiens
gagggtaaatattgagtcaggatctaaacacagttggactttacagctctcaggatcgtaacacctaacttcttccaaaaagtgaaatgactttacttctaatttcctccattcatccaataccatttgaaaatagtgtctgagtgtatactatttttcaagcactgttcctgggaatccaggtacacagtaaactttagagacaaagttcctgatcttagtccrctgttccagtaggaaaagacatcaacatcgggccaaatagataataaagaaataaaagttaagaaagtcttaagcgtaccaaaaaacataaagcaatgtcctgggatagaggatgactggt

SEQ ID NO: 841017 - DNA, 503 bp, Homo sapiens
taattctttttttgttctttttttttgagatggagtcttattctgtcacccaggctggagtgcagtcgcacgatctcggttcactgcaacttcyacctcccaagttcaagcgattctcctgcctcagcctcctgagtagctgggactacaggcatgcaccaccacacccagctaatttttgtatttttagtagagatggggtttcgccatgttgaccaggctggtctcgaactcctgaccttgagcgatccacccacctcagcatcccaaagagctgggattacaagcatgagccaccacatccggccaacatacattaattcttacctcaacctggagaggaaacaagctactgttattctcattttacagataacttaacaggcttggagagggtaaacggtgggcacccatcacactgctctctgttcagctgccaagtccttaccctcaaaccacagctccctactggattgctggatcctaacaataactttgtgagc

SEQ ID NO: 841018 - DNA, 615 bp, Homo sapiens
tctcttgaccaattttgataataagtgaaaaggtgcagtagccatggcttgatgagggcatagtgactgggagctcaggggcatmtcaccaggtatgccacatagagaaacagaggttctgtccatgggcatgaagaaataaaaggaaggatatgatgagtttttagataagctgcatcaacagagattatgatctgttccactcaccttcaacttttaagtttcctgaggaaatgagacaaagcagaattttgcaaaagtagttcctggatgggttgattacagtaagaagcaaatggatctgagtgggtggtaataaaatagatcttttggtgcactgttcattcaggaccaaagtacttattctcccagcagagagacctttggctgctgagatctcagagctttatcccctcccaggaatccccctcactcattaatgcaggagtgagagttgcctctatgtcagattactctcaaagcaaaccacggggcaggtgacctctcttttgcaattgtattacaattgcatttggtctctagtacccaatcctgctttcctcctatccttagaagtgttgttcccaagtgcacactttactatatgtctgcata

SEQ ID NO: 841019 - DNA, 687 bp, Homo sapiens
tctggaacttagtataattttttttttaatattttctatctgcagttgggttgaacgcatgaacatgaaacccacagatatggagggtaaactgtatctgtctaccttgccagatttaaaaaaaaawtgtgctggagtatcaccatacttatggactgtgatggctttctgcatctatgaatggaatagtcaatatcaatagtatgccattaaataagacctccttccacaccaatgaacttaacattggcttctctttaatgctagtaaatcaaaacaaaatgaaagcgattttcgacgtttatatctgttgcacatttttaagaatactgatgtcaaaagcaacatatttcctagagaaatacctttcactgggaaagtatgggcatggcataagagtctatgttaatattattctttcaagtgttttcaatgtatataaacatgaccttttattgactcattgaagactcctaatggaaatcttatagaacatgttacaataactgatctttagggattcaagttggtaattactcaactaaataaagtgattgcttttctaatctgctcttgtaatgtttagttaatatgttcaaaacaaagcacatagtggcactatttcttgtttcctttttcttatgagactcatgggactattaatgaattccaacagagctattataa

SEQ ID NO: 841020 - DNA, 616 bp, Homo sapiens
aaattatcattctgctttccacattgaattttgtaccctagattcagcatctctgagtacataagctctggaaatctggcagatcagattyctgagcatgtgaggactagataatgggccttgttgaatacaagattattctactttgtgtggctttttaaacattaatttttagaatatttcctggagataccctaaacttactgaagctgctctttattcaagtaataggcaataggcaatggcaacagaggaaaaccagcagaggataaagataataccataaatcctagaatgctctttcaattttataataggcatcatagattcaagctcttcctcttctctatgagggtgtgtgtgtgttttaaattcttgttattgatatcctatcacagaaggttgcatccttggctggatataaatgtcacttgagaagcttttagaaatcctgatcctccggcagcaccctgaaccaattttatcataacacctaagggtgagactcagcacttttttcagcactaaagttgagttctcaacacttttattctttaaaaatatttggcaaataaaaaattgaatatattcaaagccaatgtaaacctacatatac

SEQ ID NO: 841021 - DNA, 320 bp, Homo sapiens
tgggggagactttggcagttttggataaagacgacatggtcttacatgaaatttaaaagggtcatactggttgctctgttgtaatagaggtgcaaatagaagtaagtyggcaatcaggaaggaggctattgtattatccaggagataaatgatgggagcttaaataaggttggtaagagcatagggaggagtgaatatatttcaaagtagaaactataggattcaaatattattttactgtgttcttaaaatatctttatgtaataagatacaaaaatacccaaaaccagttggagaaaaaaatgtaatattcaacaaat

SEQ ID NO: 841022 - DNA, 462 bp, Homo sapiens
ccctgcaaaccttccccaccgcacacttggactgtggcaaccacagagggccagtgggattcagaagaatgcaggattcccataggtctaactctcagggcagactgctcctaggggaagggagaatacagtgttccaaaggagtaccccttggaacaaaggaaaccagagtgcacacactcctgtgcctgagagtttcctgcttgtgaactgaaggtgactgtgctccttccagcagacatgtggacacagcactgaggtctgtaggggaagagtgtggttctagcccactaacaggcagctctggtgctcaggaagagacatgaagatgggaccctctcctcctcacccctgcccactgtggtggatgcagctgtaactgctcccccaggcggtttgcatargtatacttgcagatggcctttccagtgctattaggggctgttgcatccctactagtgg

SEQ ID NO: 841023 - DNA, 478 bp, Homo sapiens
tctatgcctcagtttcttcattattaaaatggtgataataacagtaccaatcttaataggattgtcaggattgaaagagttaatataagtaaagtgcttagaatagtgcctggcttgtagcaatcactaatacgtgttggttatttgcattttcagttctaattcttttaaaatacaatgtgcattaccaacaagatactatttaaagagtgtaagagtgaaacctgaaattatttgccctgtagagtttgctaatgacttatatttcctattagaaatcactgaaggattcagagtagaataaaattaaggcaggggatttgtcataggaaacagataactggttaaccataaactggaaaaaatcacaaactaraaaaaagccagcgttagggtaacttgctgtgataaaggatgtgagataaagtattctctatagttctcctgtctagaagctaattttttctcagattttggc

SEQ ID NO: 841024 - DNA, 555 bp, Homo sapiens
ccgaaatgtaaccatgtaatttttcataaacagcctttgacccagcactgcaactcctgagaatctaccatgcagaagaaaaaaacaaatagcctgagtagaaaaggatatttattgcagcattgtttgcagtggcaaaacaaaaaaccctggaaataaaacaaatgcccatttttcagggaatgattgaataaaatatggcacatctgtactcttggcctatcagctgctaagaagagtgggtaggagcactgcttgctggcctggaggcatttctgcgatgtatttaagggaaagcaagattcagagaagtaaatttgataagatcctgttgatgtaaaatacagcgacaaaagtcattgtcattttgttggggacagtgggtatctacttcattctcttccacgtcacatggcctgctcagcccggcattctgcytgggagaccttgccaggatccttacttgtggtcagagtaaacttcacccactggtcattattagaggcctgtctgcgagcatcctccacccagccacaggtggagagcccatggcat

SEQ ID NO: 841025 - DNA, 618 bp, Homo sapiens
acgctccggttgccgcaggagtatatggacctttctcaatgaccctgattcaggggcactacgattatacccattttacacagcagggactcaaggcccagagaggtgagatcacttacctgagatcacacagctaggaagtagccaagaaagaactcaaattcaggtctaattctgagatcaaagcgctttttttttttgcttttttttctcttttgagacagagtcttgctctgttgcccaggctggagtgcaatggcatgatctcagctcactgcaaccactgcctcttgggttcaagcaattctcatgcctcagcttcctgagtagctgggactataggcacacgccaccatgcctagctaatttttgtatttttagtaaagatggggtttcaccatattggcctggctggtctcaaactcccgacctcaggtgatccgcctgcctcagcctcccaaagtgctgggatcacaggcatgagccaccaagcctggcctaagaccaaagctcttaatagcatgkttttagatgaaccttaggaaatcaatatttgagcatttttggcctacaaagtcacttgtgccaactgggaaaatacgtacacttacttcctaa

SEQ ID NO: 841026 - DNA, 549 bp, Homo sapiens
ggtgggattaaggcacctgccacaacacccagctaatttttgtacttttggtagaactggggttttgctccattggccaggctgatcttgaactcctgagctctctatgaggctgctctgacccgcgytcccccgagagcacaggagggtcccgcttccccatacctctcgccactttgctgttgtcctgcttcccagtttcaccaatccgaagggtgtcaagtggggtctccggggttttaatgctctgatggtgagtctggctgagtgcctcttcatgcccctgttaacctaattcaggctcccctttccaagagaggcccagtcagcacaggcattggaaggcaaattctggagccggtgacctgcgtttgaatcctgaccctgccatgtaacccagcaagttagttcacctctctgagcctcagagctgccataaatataaaatggaaataatagtaatatctatattgtaaggtattttgaggattaaatgagataatatatgtaaagcatttaagacagtgctggctgggcatggtcgtcacg

SEQ ID NO: 841027 - DNA, 740 bp, Homo sapiens
agggatccgcccctgtggtccagtacctcccactaggccatgcctccaacattgggatcacatttccacatgagatttggaggggactaacattcaaaccataccattctgcytctgccctcaaagagctcatgtccttctcacatcacaaaattcaatcatctctttccagtagtccctcaaggtcttaacttgtcgcagccccatctcatatatccaaagtctcatgtgagactcaagatatgggctgtaaaatgaaaatcaagttattcacttgtctaattaccatgggggcgcaggcattaggtaaacatcttcattcctagaggaagaaatcagccaaaacaacagcacagcaggctctatgcacgtctgaaacctggcaggaaaggtattaaatgttaacgctccaacactcactccatgtcctacgtccagggcacactggtgtgaggactgggctcccaaaaccctggcgagctgtccccatggctgcctgcatgggttggagtcaagtgcttttggtttttccaggctcaggatgcaagctgcttctggctctaccattcttgggcctggagggcagaaggttccttcctacagctccactagccagtgtcctaatggggactctgtggggacttcaacctcacatttcccctaagcattaccctagtgcagtctctctgcagtggctccacccctgtgtcagtcttctgctgggcacccaggctatccca

SEQ ID NO: 841028 - DNA, 570 bp, Homo sapiens
  misc_feature 1, 2, 3, 4, 5, 6, 7, 8, 9, 10, 11, 12, 13, 14, 15, 16, 17,18, 19, 20, 21, 22, 23, 24, 25, 26, 27, 28, 29, 30, 31,32, 33: n = A,T,C or G
nnnnnnnnnnnnnnnnnnnnnnnnnnnnnnnnngaattcttcttggtatttgtcctgcataatggggaaaattaagctgccacgtatctggctcctagcccgagcaaggsgtttacaccacccccaccctgctttgaaagggaagaaaatctgaaaccaggaagcactcctagaaactgcccaacatggtaataagaaggtgggttctcagccacgtggcttcctgcagtccctctgccacagccaaggcctgtggatcaaggttgatggagtcactgatttagcgggaacattcgtgtgtttttgagcgtgttcacagaagaagggctgcaacataatcgcttcttggtcttgaggtcctcccttttctgcatagtgtaggcattgcatggatgaaaagagacggccttccctcctggctccctgtggacctcagaacttgccttgtcagcttggggcgggaacgctgaggggcccagcttattgtgatggatgaaggcagtccctcagaatttcccattaataaggaggtaatagagtatatgttaattttacaagaacatgttccac

SEQ ID NO: 841029 - DNA, 570 bp, Homo sapiens
  misc_feature 1, 2, 3, 4, 5, 6, 7, 8, 9, 10, 11, 12, 13, 14, 15, 16, 17,18, 19, 20, 21, 22, 23, 24, 25, 26, 27, 28, 29, 30, 31,32, 33: n = A,T,C or G
nnnnnnnnnnnnnnnnnnnnnnnnnnnnnnnnngaattcttcttggtatttgtcctgcataatggggaaaattaagctgccacgtatctggctcctagcccgagcaaggcstttacaccacccccaccctgctttgaaagggaagaaaatctgaaaccaggaagcactcctagaaactgcccaacatggtaataagaaggtgggttctcagccacgtggcttcctgcagtccctctgccacagccaaggcctgtggatcaaggttgatggagtcactgatttagcgggaacattcgtgtgtttttgagcgtgttcacagaagaagggctgcaacataatcgcttcttggtcttgaggtcctcccttttctgcatagtgtaggcattgcatggatgaaaagagacggccttccctcctggctccctgtggacctcagaacttgccttgtcagcttggggcgggaacgctgaggggcccagcttattgtgatggatgaaggcagtccctcagaatttcccattaataaggaggtaatagagtatatgttaattttacaagaacatgttccac

SEQ ID NO: 841030 - DNA, 649 bp, Homo sapiens
gaacagaattctgccaacaatctgggtgagctcggaagcagattcttccctagagtcttcaggtaagagcccagcatgactgacatttttattgtggccctgtgagacccttagcagagatgccacccctgacgtagagacaaattactataaacttttgacctatggaactgtaggctaataaatagatattgttctaagttattatatttatggtaatggttatgtattaatgaaaaccaacacatgatctttgactaatcaggtagaacagaatccatctgaatgaaccagtctctactcagctctagttgattgttgtcataggaatgggtggtcaccatcgcaccatgtttcatcttttatgagatgttggaaattgatatttttcgattggatttctaattcttttttaattgccaactaattcaatttcagaaaaatggaatttattcaattttcagaaaaattacaaaatttaattaatttgaagcagaaaataaatcactttgcaggccaaataacatctgaaggcagccagattgaattctggcctaggtaataattaattcagtccctttcaattccagtgttccatggatccactraacaaatattataaagccttttcctttttgttttaaataat

SEQ ID NO: 841031 - DNA, 642 bp, Homo sapiens
gcaagttgaataaagaagtatggcaaggcacaatggctcatgcctgtaaycccagcacttagggaggccaacatggttggatcacctgagctcaggagtttgagaccagcctggccatgatggtgaaaccctgtctctatgaaaaatacaaaaattagccaggcatggtggtgcacacctgtagtcccagctactcagggggctgaggcatgagaatcgcttgaaagtgggaggtggaggttgcagtgaactaagatagtgacacttcatccaggctggatgaaagagtgaaactctgtctccaaaaaaaatttaaaaattaaaaataaaataaaaaagaagggagacccaactgtgtgctgtctttaggagacccatctcacatgaaatggcatccataggctcaaagtaaagatatagagaaaagtctaccaagacaaaggagagcaaaatagacctggggtggctactctaattgcagacaatacagactttacaccagctacgataaaaaaagaacattacataataaaaaggattcattcaacaagaagaattaactgtcctaaatatatatgcacccaatgctagagcactcaaattcataaaacaagctcttgcagacctatgaagagacttata

SEQ ID NO: 841032 - DNA, 634 bp, Homo sapiens
ccgggttcaagcgattctcctgcctcagcctccagagcagctgggactacaggggcacgccgccacgcccagcttttttttttttttttttttgtrtttttagtagagatggggtttcaccatgttggccaggctggtctcgatatcctgacctggtgatgcgcccacctccgcctcccaaagtgctgggattacaggcgtgagccactgcacccggcccatactatgctctttggaaggaagtcattccactttgcccacactttggaagtacaaattcagtatgcttcttctccttgaggctatctacataagttatccgaaattccttgaaattctttggcatgtgagacttatttcttctgcattgttttatttatttatattaactcatggatatgtatttatagttcaagctataattcaatgctattttatgaatttttttggtcaaatagttttacttttggacattgagaactctttcagttactttctgcgtgtttgacgtactcccaccagtgtgtgtgtgtgtatgttaagttttgggatacatgtgcaggtttgttacataggtaaacatatgccatggtggtttgctgaacctatcaacccatcaccttggtatcaaacc

SEQ ID NO: 841033 - DNA, 623 bp, Homo sapiens
catatgaacatgccaatttttctacatcctttctaatactgtctgtcttttttattttagccatcctagtgggtgtgaagtgatttctatttccctaatgacttagcatcttttcgtgtgcttacttgccatttgtatattttctttagagaaaggtctattcagatcctttgcccatatttaaattaaattaggttgtcttcatattgttgagctgtaagagttgttcatatattctggatataaataccttgtcaggccgggtgtggtggctcatgcctgtaatcccaatgctttgggaggctgagtcaggtagattgcttgaacctaggagttcaagaccagcctgggcaacatggtgaaacaccacctctacaaaaaaatacagaaattagctgggcaggctggcaggcacctgtagtcccagttattcaggaggctgaggtgggaggatagcttgagccaggaaggtcaaggctgcagtgagccgagatcatgccattgtrctccagcctgggtgacagagtgagaccctgtctcaaaacaaaagagaaaaagcaaaaaatcttgtgagctctccactgcctgtttttgtagaaaaagttgtattgaaatgcagccat

SEQ ID NO: 841034 - DNA, 446 bp, Homo sapiens
aaaatagcaactttatgttggttctcaaattaaaaaaaatatttttactggtttatgaaatagaaaaatctgagaatctgtagcttagagacctacagcgtgggatgtctgtaaagactaggttatttatcagctcctaacacctcttgatagaagcttagccaagacttgcactatttcagtctttcccattccacattccatggaatcttgaagagacattgataaaacggtgcagccatgaaccaccctaactcaatcctagtgtcagaatcccccttttactgcagaatgagctgcttgctgcagtgatacttgaaccccttagatatattctctactaattatattaaaacaccaccaatgcttttgctttgttttcccccaaattaaamaccttagtcatgagaacccagagaattggatttagtgtgactgattcccaa

SEQ ID NO: 841035 - DNA, 626 bp, Homo sapiens
gcatgcagacacaaggtaaaaatcattcgtgattcactcactattaacatcttttttagatcattgctgccactgttgaaaatgctgggatcattttgcacattgacaagccagattggctgctgatgacttcagactgaagtaagaaacataaagacttgaaaacaagtgttacgggagaaaaataaattttattccattttataaataaataaatatatatatatatatatatactagaggatcatgacctaaatttacaaacatcccaagggtaaactttagaccattagacaaatctccactgatgctggggcaggtagatcctctctgctgagcacctaagccagtagctacacaccggccgcttctgctcctttcatcagcctacaacagctgcaaaagaaaaaagaaaaagaaaaaagaaagaggcaaatttagaatgagaattttattattaaaaatgttagacatgattagaattaacattacattggtatttttctttacaagggaaaatttcycaagagaaaacttaataacctttatttattaaaatgcccacaagtgagaactttttcaatatgtaagaatggaaggtaccctttgaaacacggccaggtgag

SEQ ID NO: 841036 - DNA, 612 bp, Homo sapiens
gattatagaaagcattaaaagttaaagataatgtactctattttgcataaaagatttagtttaaaaagaagtgccaaccaaaattaaagaagcaatgatataacaatataggttatatggcgaaggtgcacttctagtgccacataaaattgcatttttaaaaaatcatccaatgatttattttcatcatgaattttttatttgctttttctcttagaaaagctccctggagggaaccctggctgacacagaagctggctacgtggctcagctgtcagaaattcaaacgcagatcagtgccctggaggaggagatctgccagatctggggtgagactaaatgccagaacgcagagtacgagcaattgctggacatcaagacacgcctggaggtggagatcgagacctaccgccgcctgctcgatggagagggagggtaaaccaaagtcatgaacaaactaaaatgcataccttagtgaatttattttataaaaccaaaatgggactcagggcttagacttgtatatatagagagtaataaagtaacagacacaggctgcgtgcagtggctcargcctgtaatcccagcactttgggaggctgaggtgggaga

SEQ ID NO: 841037 - DNA, 303 bp, Homo sapiens
acagatgtgcagcagcagagcgggcacctacagcagactatagcagatyacaaggcctgggggagactttcagaaagatagacttcatagcatacctgatttgtctgaccatctaaacggagccttaggcaactgtttaagagtttgtgtttgaattaataataagtatatagaaaatcaagcaagttaatagtacatatttttaaggctgcacaaaaaataattcacccaaggcttaactatgagtatcatttacatactcataagaatgtaaatagcagttatgagtactatcaaattata

SEQ ID NO: 841038 - DNA, 492 bp, Homo sapiens
aaaaattaaaaaagaattaaaacagcattgaaagactcagtactgctaagatatctattctccttaaattgatatatagattcaatgcaatcactctcaaaactccaggaggctttcttgaagaaaagacacactgattctataatttatgtaaaaatttaagaatataggatagtcaaataatctttaaaaagagaaacaaagttggaggactcccactgtctacattcaagatttactataaagctatcataatcaggactgtgtggtgttgacattagaatagacaattgtaagaatagaataaagagtctagaaatagacctcctgttcaaatgaatttcagcaaaggcaccaagtaaattcaataaggaaaggaaagtcttttaaacaaatggtgatttgacaactgagtaaatatataagggaaaaaaaacaagtctcaattcctactctcagyatacacagaaaataatttgagatataatatcc

SEQ ID NO: 841039 - DNA, 583 bp, Homo sapiens
atttattttactggtaaggcagtcagcagtactttattattagttcagtttttagggagtcaaaagctagaagtggatttttgactgcaagaggaatcagtgcccctaatcccycctttgctcaagggtcaactgtatgtatatacgtatatatctatatgtatatatgtatatataaatatatatacacaaatatatgtatatatgtatatatacatatatacacacacacacatacacacacactcacacacacatacttataggaatatcattcagccttgacaaagaaggagatcctgccacaacatgaatgaacctggaggatattatattcagttaaataagctggacagataaggaggaatactgcataatctcacttacatgtgaaatattagaagaaaaatcaaaaagtgaaatatacagatgtagagaataaatcagtagtcatcaggggttgtgggggaggggagaaaatgaggagctgtagatcagagtatacaaagtagcaggtacctaagatgaacaagtctagagatctaatgtacaacataaagactacaggtcataaaattgtact

SEQ ID NO: 841040 - DNA, 583 bp, Homo sapiens
atttattttactggtaaggcagtcagcagtactttattattagttcagtttttagggagtcaaaagctagaagtggatttttgactgcaagaggaatcagtgcccctaatccctcctttgctcaagggtcaacwgtatgtatatacgtatatatctatatgtatatatgtatatataaatatatatacacaaatatatgtatatatgtatatatacatatatacacacacacacatacacacacactcacacacacatacttataggaatatcattcagccttgacaaagaaggagatcctgccacaacatgaatgaacctggaggatattatattcagttaaataagctggacagataaggaggaatactgcataatctcacttacatgtgaaatattagaagaaaaatcaaaaagtgaaatatacagatgtagagaataaatcagtagtcatcaggggttgtgggggaggggagaaaatgaggagctgtagatcagagtatacaaagtagcaggtacctaagatgaacaagtctagagatctaatgtacaacataaagactacaggtcataaaattgtact

SEQ ID NO: 841041 - DNA, 627 bp, Homo sapiens
tggtggctcacgcctgtaatcccagcactttgggaggccaaggcaggtgggttacctgaggtcaggaatttgagaccagcctcaccaacatggtgaaactccatctctactaaaaattcaaaaattagctggatgtggtggtgtgtacctgtagtcccagctactcaacaggctgagacaggagaatcgcttgaacccaggaggtgggttgcagtgagccaagatcataccactgcactccagcctgggcgacagagtgagactctgtttcaaaaaaaaaaaaattccttcatcaagagtcatttgtaaaatgatatattagacatgtatggaaatcaaactcctaaatcataaataaaatggtgcatgcagatggtttttatattgtgattgtttctattgcaaaaatggcctttctcaaatagttttttttttgtaccacaaaagtaattacatttcttataatgcattctaccaagctccaaatgtagtaggaaaatagtgttgttatagaaaagtaattaaataatttttgtaagctmtttctcaccttgtactctatgcatatcaatgcttttacttaaaagtgtggaaatatatattttgaaattctatgaatgtgaaaga

SEQ ID NO: 841042 - DNA, 609 bp, Homo sapiens
aaattattctcttcaatatttcatgcaggaattttctagtatttcataagtgaatgattttcttgagaaatttttgtatggtcccatgaaattagaaaaaaactataaatagaataatrtaaatgagaaggtaattgatttcatgtgttagtcttctgtgaggcaatgtaattctcaggaacaaaggcaataagaaaagagagagaaattctcagtctccagaaagtcagtgtttattgaattctaacttataaggagtactatgagaagtgctgcaataagtaaaatatgtggcccctgtcctaaagaagctgtggtgtcacagtgagacgaggataaatatttaacaaaggaacaagttctaaagtatgagggatcatgtgggtcacacattacattttattccagtgtttcaacattatatttctcattcagttactcttattagatcttctcttctgcacaggaaagctcactctttttaagcaccaactaaaattcaattcctccattattttttcttttgtgttgttttttaattctttagctatgtattgaacacctactgtgtgcaaagaaaagtgaaagcaagataatgtcacaagacaa

SEQ ID NO: 841043 - DNA, 605 bp, Homo sapiens
ggagaaaggacatgaatagacagttcttaaaagttgataaacaaatggcaaacatgaaaaaatgctcaatatcagtaatcaacagggaagtgcaaattaaaaccacaatgaaataatatcttattcctacaagaatggtcattattaagtcaaaagatgatagatgttggcatggatgtggagaaaaggtaatggttatacactgcttgtgggaatgtaaattaatgtaaattagtacagcctccatggtaaacagtatggctattccttaaaaagctaaaagaagatctatcatttgatccatcagtcccactactgggtatctacccaaagaaaaatatgtcattatgtgaaaaagacattcacacacatatgtttatagtagtacaagtcacagtgaaaagatgtcgaaccagcttaagtgcccattgactaatgagtgaataataaaaatgtgatatatatatatatatatatatatacatacacacagacacacacacacacacacrcacactctgtggaatactactcagccattaaaaggaataaaataatgtcttttgcagcaatttggatggagctggaggccattgttctaagtg

SEQ ID NO: 841044 - DNA, 431 bp, Homo sapiens
tacattttagaagacatggataaatacaccctctgctggtcagctttgtatcagtttactctactgtgactctgactggtctccccttccactcctgaagcccctagtcatcacattaatctcccacttacaaaaattgcatgcagccattcacttgttataattctcttctctttcacttgatactttggttcactgatcagttaccctatccacccttggggttcatagccactgtctgcttctcgtctcatgtcttgctggcttcccttggctttctttccttatcccctggctctccatgctttcaccacccctaccacacacaarcatgcttaatttgatttgccttcttggcccataaaatatactaattttttattatgtttaaacctattgaaatatttatgccataatcagaaaaagaaaaa

SEQ ID NO: 841045 - DNA, 626 bp, Homo sapiens
tgatattgattttttaaatcacgccattttcttgtttaaaktccttaaatagctccccacagctttcaaggataaagttcaaactctttcatttagtacatacagcctttcatgaccccatttcttcctgtaatttcagctttattgtctgctactccttcacattcgccctttgctccagccatactgagctatttgtagttctttgcagtttccaagagaaccagaccacttttcaggataatcccctcctgggatgacttaatgcactttatgtgtgctcctaacactctctgaccactctgtccatctatcactgcacttgtactgtgccacatgctctttgatttgcaccttcttgagagcaaacaccatgtttcagtcagatttgcatccctagcacctggtaggtgtttgctcaataaatgaataaagaaaggggtaaccaaagctattctaccgatagataatggggtacaattttgagttgtttggaaagttggttggtgttgactagttaattttccttctattgcttcctatgaagttaatgttgcatgtgtatgttgggtgatattggtaatggggagagggtatggctgtgtgtgttgtgtgtgtttgggaag

SEQ ID NO: 841046 - DNA, 626 bp, Homo sapiens
tgatattgattttttaaatcacgccattttcttgtttaaagtccttaaatagctccccacagctttcaaggataaagttcaaactctttcatttagtacatacagcctttcatgaccccatttcttcctgtaatttcagctttattgtctgctactccttcacattcgccctttgctccagccatactgagctatttgtagttctttgcagtttccaagagaaccagaccacttttcaggataatcccctcctgggatgacttaatgcactttatgtgtgctcctaacactctctgaccactctgtccatctatcactgcacttgtactgtgccacatgctctttgatttgcaccttcttgagagcaaacaccatgtttcagtcagatttgcatccctagcacctggtaggtgtttgctcaataaatgaataaagaaaggggtaaccaaagctattctaccgatagataatggggtacaattttgagttgtttggaaagttggttggtgttgactagttaattttccttctattgcttcctatgaagttaatgttgcatgtgtatgttgggtgatrttggtaatggggagagggtatggctgtgtgtgttgtgtgtgtttgggaag

SEQ ID NO: 841047 - DNA, 584 bp, Homo sapiens
aaaataatctgagtgtgtctttttgaatgaactaatcagaagatgacgaaatacagttgaataaaagggatacagaagtataaatacagygtattatcttaaagaaaaatgaaaactgtatcaatatgctaatgtgttacctacctcttttgagttccggggttctgagtagtttttaaactttttcacactcatttggagtatcatttccaaataatttgccatagaactaaaatacatttttaaattaacttgcacagtaaactaggaattcagccaaagggaactgaaaatttagatttatagtaatcaggaagttgatccttgaacaagatagagttggctcttggacaggaaagctatctccttgaccatatggatttccactggccttacagaaatacttgtgctttgatctggcataggtatctttttccaactagctggactctattttctgaacctaacacccaaggattttcagtatagatagaaaatctgactaaacatgtaactacctaaattggtttactgaaattttgatagactctgcccatgtagataatccttggctactgagttga

SEQ ID NO: 841048 - DNA, 654 bp, Homo sapiens
aattctaccccacattaaaagaaaaaaattgcacatattccacacaatcttttccaaaattttccaccttactttctgaggccagccttactctaataccaaaaccagacaaggataatagaataaaactacaagccaatattgctcatgaacatagatacaaaaatcttcaacaaaatattagcaaattgagtatatatatatatgtgtgtatatatatatgtgtgtgtgtatatatatatatataccatgaccaagtggagtttattctaggagtgcaaaggcaaatttaaatatcagtcaatgtattaggttggtgcaaattttgccattaaaagtaatggcaaaaaaggcgattacttttgcaccaatctaacagttcaccacatgtaagaaaaactaaaaactctacagaagaaagaccaaaaattcaatcaattaatgcagaaaaaagcatttgacaaattcaattcaattcatgatccaaaaatctcagaaaactaaaaataggaggaaactttctcaatgtratactactaacatcatatttaattgtgaagggctgaatgctttcctcctcataatgagaacaaggcaagggtacaactcttaccactcctatgcaacactgtactggaagtcatagtcagtgca

SEQ ID NO: 841049 - DNA, 553 bp, Homo sapiens
ttggtgggagtgtgaattagttcaatcaytgtggaagagagtgtggtgattcctccaagatctagaaccagaaataccatttgacccaccaatcccattactgggtatatactcaaaggattataaatcattctactataaagacacatacacacgtatgtttactgtggcactgatcacaatagcaaagacttggaatcacccaaatgtccataaacgatagtctggattaagaaaatgtggcacatatacaccacagaatactatgcagccataaatggatgagttcatgtccctttcagggacatagatgaagctggaaaccatcattctcaggaaactaacacaagaatagaaaaccaaataccacatgttctcactcataagtgagagtagaaaaatgagaacatttgaacacaaggaggggaacatcacacactgggacctgtcgggaggtaggggattaagggagaaatagcattaggagaaataccaaatgtagatgacagggtgatgggtgcaggaaaccatcatggcacatgtatacctatgt

SEQ ID NO: 841050 - DNA, 622 bp, Homo sapiens
ttcgtagacagtaccttgtcattatgttctcacatggtggaaggggagaacaagttcccttgggcctattttataagggcactaatcccattcatgagggctccaccctctgatctaatcacctccctaaaagtcccagctcctaacaccatcactttgggagttacaatttcaacatatgaattttaggcaggacacaaacatttagactatgtatcacctaggaaggtgctaaaacattaacttcccctcagaaaccctagtgcactaccccttacagatataagaatcctgtatgaattcgcttatatctctagtcaataaatatttattaaagacctactatgggccacacactgtgccatttcacctaactacactaaaaaataagattcatcacatttaatgtctcaggttttcaaatctgaactatccttcctaaagagtccttagtttttcctcaatgttgctgtttaaaccaaagaagcttaatttcagtgtatcatgccctgtagtcagaagtagaaccaaatgaatgagaaatgcattcattcagtcggtcaacagcatcctgagccctggytctgtatgactctaaaaatataaaaagaaataaaatgtc

SEQ ID NO: 841051 - DNA, 575 bp, Homo sapiens
attctcctgcctcagcctcctgagtagctagaactacaggtgcccgccactacgcccggctaattttktgtgtgtgtgtttttagtaaagacagggtttcaccgtgttagccaggatggtctcgatctcctgacctcatgatctgcccacctcgtcctcccaaagtgctgggattacaggcctgagccaccgtgaccggaagaatattttcaaacagccaagcttgcctgtggtcagcagtatccaaaggggatttccagagttgaagtacccaaactggaggagtttaaaaactattcatttgctaaaatacagattctctgggctccccacccacattctgacttggagtatctggggccagaacctacgtacctgaatctgtaaaagctgcctagatggttctgagtctatacaggtttggggaatgaagttaggaatattctcaatcattggcatttaacaacagtcttcctaggaaagagtcacagagaaaatcccaaatcccaatggtgattttttttttatctcaaagcacacacagaaattgagttgtctcacctctgctccaatcc

SEQ ID NO: 841052 - DNA, 575 bp, Homo sapiens
attctcctgcctcagcctcctgagtagctagaactacaggtgcccgccactacgcccggctaattttttgtgtgtgtgtttttagtaaagacagggtttcaccgtgttagccaggatggtctcgatctcctgacctcatgatctgcccacctcgtcctcccaaagtgctgggattacaggcctgagccaccgtgaccggaagaatattttcaaacagccaagcttgcctgtggtcagcagtatccaaaggggatttccagagttgaagtacccaaactggaggagtttaaaaactattcatttgctaaaatacagattctctgggctccccacccacattctgacttggagtatctggggccagaacctacgtacctgaatctgtaaaagctgcctagatggttctgagtctatacaggtttggggaatgaagttaggaatattctcaatcattggcatttaacaacagtcttcctaggaaagagtcrcagagaaaatcccaaatcccaatggtgattttttttttatctcaaagcacacacagaaattgagttgtctcacctctgctccaatcc

SEQ ID NO: 841053 - DNA, 504 bp, Homo sapiens
tacagtattgaaaacattctcctcttctttcatggtgacagaggaggctgaaggcttcttacattaagccaagtgaaggggcatcaacaaaacagctcagagagcttgatatgcattttttgaatttggagaacagagacacttctgtttcaatctgctgggagaagcctacacacaaaaggtgggttagctgggcattaggtgggagagagaaggtatgaaaatttaagtggcttatgagaaagctgctttattcccatcaatggagaagccaatatgcatgtgtcctagaggttggccccagagctcacctgaaattgtcttcacagggatgtcatctaagatgccagtccacaggggccaagaaacccctgcagaagggaagtttargggaagcccatgggctgagaaggggagtgtcctaaaaacctgttagtgtttagagtgcttcaccaggcattcctcagcagaagaatctctccaaaaaccatgtgagctccctgg

SEQ ID NO: 841054 - DNA, 628 bp, Homo sapiens
aatcacaaaatctgagactgcttcagatgcttgctttgtttctccmgactgtgggtgttcagttgttgttgtttgtttcttagcatacatttttgttgacagtgagacatgatgccctgggtaaaagcaattgagaaacacagattttaggtgttagggtttatgtttacttggctaggagtaaggctgtgtttactctttgctgttgctgtggtttcagaggctaaaatttcctttaatgtcctttttatctccctaattgtcctgagttttcctagaaactccaccttaagtacagtataagccttgctattgtttcagctgtaatcccctgtttctttattttattttattttttattttttggcaaaggagtctcactctgtttccgaggctggagtgcagtggcgcaatctcagctcgctgcaacctccgcctcctggattcaagtgattctcctgcctcagcctctccagtagctgggattacaggcgtgcatcaccacgcccagctaatttttgtttttttagtagagaccgggtttcaacatgttggccagggtggtctgaaactcctgtcctcaagtgatccacctgccttggcctctcagagtgctgggattacaggt

SEQ ID NO: 841055 - DNA, 603 bp, Homo sapiens
gggtgcagtggacggcgcctgtaatctcagctactcaggaggctgaggcgggagaactgcttgaacccgggagtcagaggttgcagtgagccgagatcatgccactgcactccagcctgggtracagagtgagattctgtctgaaaaaaacaaacaaaaaaaacaaacaaaaacccagactatattgtttagggatacttagttgacaaaataacagacacaaacaggacataattaccataaaaatcaggacctggggggcggttggggggggagatttaagtggaaagaatggagcggtgacaatgtgtgtcaacctgggaggtggtgaccctggggttcgctttgtaattcctcaaaatgagcatttatgtgctattcacttttcacagggcagaatctctgaactaacatgtttacgcagccatatgcaaaaaaaaaaaaatggataatttgtattctaattaaaatatttaaaaattggagacaaggcggccgggcgcggtggctcaggcctgtaatcccagcactttgggaggctgaggcgggtggatcacaaggtcaggagatcgagcccatcctggctaacacagtgaaaccctg

SEQ ID NO: 841056 - DNA, 540 bp, Homo sapiens
taaatccctagaaggaacctatgggaaaagtccatgtttctaaaaactattctagaaaagtagagtcctgcaatcacaagtcaaatgcttgcaaatttgaagcccccttgaggtgcctgagctgaagtcaatcgttttcctttccacctctcaggagaaagtatcaagagatccagagggaagagtgaccagcagatttgaccacttttacgacagtatattatagcaattatttagaaccttgacatatactttagattaattttattgattttcacaaaatttacagtttatagatttttttttaagaaagttttccctattcccattgccagtcctcaatatgagcctggaaatcttttcagaaaggagaccatcagttgagacaaacagaaacgaaaactgatttgccttccatccctcacactattttactccagaaacaggaaaagggaatgcctgaataaggaatgattgttggggacaaattcttaaattagaaragctagttcagttcattaatagatcttcccaaaccaa

SEQ ID NO: 841057 - DNA, 661 bp, Homo sapiens
tcgtcatgacaagagtaccctacacatcaacccattagtttgcaacctggtttctgtagctgctttggattttgttttcttccawaatccagctcttcagtatttccttcaactgagctttcccatatccttttattaattttatccttaatataaagtagttagagttgatttttgttctttacagccaaagaaactgcaatgaagtagtctgcccataggtaaaaaaagtgctggttatttgggctttttaatacttactctctatttacagtgattcaacaagttttcttttgattatgatttttgtgccctctatcataggaggagagttaaatgatcatgtaaatacagagattcagcttcccatggcagttatattttccactgcacactaataatttggcattctgctttctacctcagtcttctgcattgcagttagcatgattactcacggtcactttcagagctctcagaggttgtctctgaaacctcaaagtgggaggccaagcctggtcacccacttttagattccatcactcactgaagatcaaataccatatactacctctcatcatcctccactaatttttagaggtctcaatgacgcttcaggtactgaggtggaaaggttaacacaaaattacttcctgaagct

SEQ ID NO: 841058 - DNA, 580 bp, Homo sapiens
tagctcgaagtaacatcctaacactaacatatcagtgcatgcaggataaaatgccggaagttcgacagagttcttttgccttgttaagtgacctcacaaaagcttgctttcagcatgttaagccttgtgtagctgatttcatgtctcaatattgggaaccaacctaactcctagaattcatttcagtctgcaacaatgacacatgagcaattggagaaatctccattcaaatgggtatagagatgcagccttatatttaccctatggtgttgcaccagcttgtagaaatcattaacagacccaacacaccaaagacgttgctaaagaatacagcagtaacaattggttgtcttggttatgtttgtcctcaagaggtggcccccatgctacagcagtttacgagaccctggtgtacctctctgagaaacataagagacaatgagaaaaagattcagcattccgtggaatctgcatcatgatcagtgtgaatccccatggyataatccaagattttatatttttttgtgatgctgttgcatcatggattaacccaaaagattatctcagagacatgttctgt

SEQ ID NO: 841059 - DNA, 515 bp, Homo sapiens
gggccgtccacatgctgcgagcattgaacgtgatgcgttgccagagctcacgtgggctggaaagaaggcatcaccgggtcactgcaatcaatgcacarcttcccttctgggaatggacttagtgatcctggaagggaggtgcagatcctggctggatgagggcagccatcaggctttgaacattcactttatgtgctaagtgcttcacacacttcattgatttggtcatcaccacaagcctgccaagtagcaagatcccacttcccttatcaacaaggagacggaggttccaggaggtgcaggaacccgtagcggggctgagggctgtcttggtgtcccccatggactcaggggactggggaaaggggagttagtgtttaatgggagtttcatttggagatgaaaaggttctggagatggatggtggtgatggttgcataacagtgtgaatgtacttaatgctagtaatttgtacatttccaaatggtttaaatgataacttttatattctgtac

SEQ ID NO: 841060 - DNA, 550 bp, Homo sapiens
ttgtgagtatatagtaggtgtatatatttatggggatgctttgatacaagcatgcaatsgataataatcacatcatggaagacagagtatccatcccctcaagcatttatccttgttattacaaacaatccaattatactcttttagttattttaaaatgtatagttaccttcttgtgctatcaaatactaggccttattcattcgtgcaaacctttgttttgtacccagtaactatcccaacctctggctctgagagcctgtttacccttcccagcctctggtaactgttcttctattctttatctccgtgtgttcaattgttttaatttttagatcctacaaataaacaagaacatgtgatgtttgtctccctgtgcctggcttatttcacttgacataatgacctccagttccatttgtgttattgcaaatgactggatgttgttctttttgtggctgaatagtactccattgtgtatatgtaccacattttctttatccattcgtctgttaatggacatttagggtgcttccaaatcttcgctatt

SEQ ID NO: 841061 - DNA, 550 bp, Homo sapiens
ttgtgagtatatagtaggtgtatatatttatggggatgctttgatacaagcatgcaatcsataataatcacatcatggaagacagagtatccatcccctcaagcatttatccttgttattacaaacaatccaattatactcttttagttattttaaaatgtatagttaccttcttgtgctatcaaatactaggccttattcattcgtgcaaacctttgttttgtacccagtaactatcccaacctctggctctgagagcctgtttacccttcccagcctctggtaactgttcttctattctttatctccgtgtgttcaattgttttaatttttagatcctacaaataaacaagaacatgtgatgtttgtctccctgtgcctggcttatttcacttgacataatgacctccagttccatttgtgttattgcaaatgactggatgttgttctttttgtggctgaatagtactccattgtgtatatgtaccacattttctttatccattcgtctgttaatggacatttagggtgcttccaaatcttcgctatt

SEQ ID NO: 841062 - DNA, 560 bp, Homo sapiens; identical to SEQ ID NO: 837334

SEQ ID NO: 841063 - DNA, 609 bp, Homo sapiens
  misc_feature 310, 326: n = A,T,C or G
ttcccaggggcaaggacttgggctggctaatgaagagggccagagtctgactttcagaagaccaggtcagaagctgaatgggaaaatcaggccacctagcctggcctggccagcccatcytaatcccccatggcaggtcacagggtaaatttacatgaggctgaattttgagaaaagagcaactttcagggcctttcgcccagctgcccaccactggagtgagtctagcagctaataaaccaaagggcatttttccaggttctagctgggccagtccagggctgaggtcacaatgcccctgtagacacanatgcatgtgccagggnatttagccgcctcccacccatgtgcagcagcacccctttgggaagcaatggcttttcttcctcaattcaatactttaggacctctgcctggacttcttgaaataaagtgcagagatgtcaccgtaagtaccatgtacactgggtctgttttgttttgtcttgtttgagtctctctgtgtcacaggctggagtgcaatggtgcgatctcagctcactgcaacctgcgactccctggttcacacaattctcccgcttcagcctcccaagtagctgggtttacagg

SEQ ID NO: 841064 - DNA, 563 bp, Homo sapiens
gaaataggaatgcttttacactgttggtgggagtgtaaactacttcaaccattgtggaagacagtgtggcaattcctcaaggatctagaactacaaataccatttgacccagccatcccattactgggtatatacctaaaggattataaatcatgccactataaagacacatacacacgtatgtttattgcggcactattcacaatagcaaagacttggacccaacccaaacgtccatcaatgatagacgggattaagaaaatgtggcacatatacaccagagaatactatgcagccataaaaaaggatgagttcatgtcctttgcagggacatggatgaagctggaaaccatcattctcagcaaactatcacaaggacggaaaaccaaacactgcatgttctcacttataggtgggaattgaacaatgagaacacttggacacagggtggggaacatcacacaccagggcctgtcagggggtaagggccttggggagggatagcattaggagaaatacctaatrtaaatgacgagttgatgggtacagcaaaccaacatggc

SEQ ID NO: 841065 - DNA, 555 bp, Homo sapiens
ttttcatcagtggccattcatcattttgcttttaggaasctggaagaaattgtcttctttgagtttcaaatgttctggtaaatcacatcatttcttagcttcctcaatatcaccgtgaattgctgaaacaagtgactctaaagaatccgagaagtttttttctgattagtaatttcctttatgaggtagtcaacgatagtcacattgaggattttcccacagaagtcctagttcactgcagcctcaaactcctgtgcccatgagatcctactacctcagcctcccaaagagtagctaggactaatggcgaaccaccacacctggcttttttttttttttgtacgaacaggatcttgctaggttgcccatgctggtctcaaactcctggcttcaagtgatcctcctcccttggcctttcaaagtgctgggatgacaggtatgagccactgtgcccagccagaagtcctctttaaaggcatgcatggtaggagtttttgtggattttttgggtatttttgcagtatggattccaccctatgttcaccaccatcttat

SEQ ID NO: 841066 - DNA, 633 bp, Homo sapiens
ctgctgccttttgttcgactatgccctgcccccagaggtggagtctacagaggcaggcagacctccttgagctgcggtggggtccacccacttcgagcttcctggtgactttgtttacccactcaagcctcagcaatggcaggacgcccctcccccagcctcgctgccaccttgcagttcaatctcagactgctgtactagcaatgagtgaggctccgtgggtgtgggaccctctgagccaggcgcgggatataatctggtgtgccatttgctaagaccgttggaaaagtgcagtattagggtgggagtgacccgattttccagtgccttctgtcactgcttcccttggctaggaaagggaattccctgaccccttgtgcttcccgggtgaggcgatgcctcatcctgcttaagctcatgctcggtgggctgcacccactgtcctgcccctactgtccgacaagccccagtgagatgaacccggtacgtccgttggaaatgcagaaatcacctgtcttctgcgttgctcatgctgggagctgtagactggmgctgttcctatttggccgtcttggaacccattaatacccttaattccccctcccccagttatggatatggctcctaaaaatt

SEQ ID NO: 841067 - DNA, 602 bp, Homo sapiens
  misc_feature 484: n = A,T,C or G
taagtccttgtctcctctatatgttgctcatgtctacttatggttkgtggtctatatatttactctcttttgggtgacttctgataaatagaagttctttattttactataaatgaattcatccaaatattcctttatgttttatatcttatttaagaaattctccatacccaaagtcataaagcttttctctatttgctaaaggtttctggtcctttcaaatttaagtctttaatacttaatgtgtgtgtgcacgcacgctcatgcttgtgtgtgtatgcacatgtgtatgtggtagatttatgctgtctcgtcctcattttgtcactgtggaagattaaccactgcttcaattttgtttatatttatgggactatttaaaatttttaaaacattaaaaaaacttgtatttgagtattttgttgggttgtatttatgcaagaatttgtcaatttcatctaatctatttcaaacgtttgcatanaactgttcatgaaatgctcttatttcttttatctctgcagcacgtttaaggcccttcttgcttcctatattttaaaattgtgctttcttatttgtttcctctctttatttatattgtc

SEQ ID NO: 841068 - DNA, 615 bp, Homo sapiens
gtgctccatcttaaaggaaattaacacttagcataaataaattggaagaatggatattttcctattctcatttgttattctgtaaagaatcattcagttctttcctctttgacaatacattggatgyttggggcaaatctctaggttatcaaagcccaaattagaaaatgtctactactgttttccaggaaatacaagataatttttttatattcatgtaataattctccacttgatcttagcaagaccagcttctcactgaaataccagccaacccttttgagactataaattttataatgagcatgggccctggaatcttgctatgttctacttgagttatttggacactgtattacggaacaactgtgtgtttagttgagcagaatttctcttctgaaccataaatcctgtttttaaattattgaaaaagttattatgccaattaacacatctcaacataggggaaagaacatgagctctgaaacagatggttcaaatcccaggcctaccgcttataagctgtgtggcctaaggcaagttgcttaaggactctgagcagtagtttcttcatttataatttgggaatacaatctaactcagaggtccaacaaa

SEQ ID NO: 841069 - DNA, 633 bp, Homo sapiens
ttgttgttctatgagttattattagtcatcttattttaattttccatctgtytcccttcttagttattttacatacctttatgcttccccttttttttttcttcttcttcttttttttttttttttttgagatggagtctcgctctgtcacccaggctggagtgcagtggcaccgtctcggctcgctgcactccacctcccggggttcacaccattctcttgcctcagcctccctagtagctgggactacaggcgcctgtcaccacgcccagctaatttttgtatttttagtagagatggggtttcaccattttagccaggatggtctcgatctcctgaccttgtgatccgcccaccttgccataatttctttctgatctggaggttacacctgataaattttatttatcttgtggttattcttaactttctacagctgtgtaggcatgcatatataatctattcctgtaaatttcttcagcttgacatattcgtatcttcatccagaacaaagagatgccttggcgcattttgtaatttcctagtctccacaaagtccctgactctctaccctctcatcatagtgtttaatctataagtctagcttaaattgtttcatatagaaaagtaggt

SEQ ID NO: 841070 - DNA, 600 bp, Homo sapiens
tattctttttcccctctacttaaaaaaggaagaaaaaggctgaatgttraggaagtaagatatgcattttttaacttgtgactggccaatgacttctgttagattgtgaatattaacttcttagatgagtatttctatagaaaaaaatagataaatcacaccagaagagtctattgagaacagctaaccgttatctagtctgtttttctaacagtttcttcttcagtatcatggttgtgcctatcttacccactgtagcatctgaagttcttggtgtccttgtctctagtgtgtcagggtaaaagagttagctggggaacaaaccaaacatgagaatagaaaatatctttgtgggtttgggtgagagcatggaataggtgatttagagtcagacaaacttgaattcaaatcccaatggtgtgacctttgggcaaatttctgatgtcagttttcttatctgccaaggaagggtaacctaaattcaccaagctattgttaagattaaataagatggcctatggagagggcccagaacataatacacaagttgcttaatcactgttttcttatcctttaggactgaataatgaagcaacacag

SEQ ID NO: 841071 - DNA, 526 bp, Homo sapiens
aggaacaccatacggcagtggcaagtgagagaaagagtagccaggagctgttgtacagttgtaaatgaccagatcttatgtgaactcagagccagaactcacttatcaccaaagagacggcccaagccattcatgagggatcctccccaatgatccaaacacctgctaccagggtccaactccaacactgggattacatttcaacatgaaatttgggtggggacaaatattcaaactataccaacaatatatttgataaagggttaatttaaaaaatatataaggaactcaactctatgcaagaaaacaaacaaactgattaaaaaatgggcacagaactttaataaatatttttcaaaagaagagaatcaaaaggccaataagtatacaaaaaaaaaaatatttcacatcaytaatcatcaggggaatgcaaattcacaggtgtgaatgagctatcacttcacacctgtgagaatagcatttattaaaataccaaagacaaatatttgcaaatatgtagagaaaa

SEQ ID NO: 841072 - DNA, 612 bp, Homo sapiens
agaaccacctgcacatgttcaccaggatacacgttaaaaatgttcatagaaagacaaaaataatgctcatggaagtgcattatcatcttagaaacaacccaaatgggccgggcacggtggctcacacctgtaatcccagcactttgggaggctgacacaggcggattacgaggtcaggagtttgcgaccagcctggccaacacagtgaaaccccatctctactaaaaacacaaaaaattagccaggtgtggtggcaggcacctgtaatcccagctactcagaaggctgaggcaggagaatcgcttgaatccgggaggcggacgttgtagtgagctgagatcgtgccactgcattccagccagggcgacagagcaagactctgtctcaaaaaaaaagaaaagaaaagaaaagaaacaatccaaatgtccatcaaaaacagaatggataaatggattgtagcatattactataatggaayacagagtaataaaaactaaaagaaccatagctacaagttcttttcgtttttgacatggacaattcccacaaaaaatgtattaaaggagtaagccacagagtaatacagtattattccatatatataaagttcaa

SEQ ID NO: 841073 - DNA, 563 bp, Homo sapiens
  misc_feature 547: n = A,T,C or G
taaattttttttttttttttcattgagacagggtcttcctgtggtgcccaggctggtctgaaactcytgggttcaaacaatcctcctgcctcggcctcctaaagtgttgggattacaggtgtgagccactgtgtcctgccagaattgaatgttaattttaaaagaaaaacactgaaagcaccgggagaaattccatttctggaaacctcgtgggctggggtatttggatccacccacctggcaggagacaatgtagaaagtctcactctaaaaacagaagatcaacacggcgcccaccaaaccaagcacgtatagtcagccgcggattccgggatgtggtatcacatgagttgcgagatcacctggagagactggctaaaaatgcgattcccaggggcttgtccattgagactcagaatcagcacgtcctggttgggggctgggaacctgcagttgctgcccaccaggggctacgagctgtacttggagatacactgtgccacagcatcgtggcagctcaggctcatcttgcatccctctctgggcntcagtttccccatctg

SEQ ID NO: 841074 - DNA, 550 bp, Homo sapiens
cttcaagacatcagcttcctctggccattcagacgccacatcccggagacacctctcctcaccgctccgtgaagacgccmtgctccccgctgtctcctcaccactccgtgaacacagcctcgttccctgaggtcatcttctactgggctgttctcttccactttcttcctccactgattcaaagtgactaaaaaatctgctggtttgtttattatctgtctttcccactagaacacaaactcctcaagagcaggactgtgttgtttttcttgtttacagcggagcccccagcgcccggctcccagcaggcgcccagtgagaatctgccagagggacagatggagggatgagggatccctccttggatccccccaggtgcagtctgggggttgctgtgcgaagcacaccgcactgactcgattacacaatcatgggctcctcggatatttgctgcacccaatacatgcaggaccctggactacagaagccaagagaatggattccgtctgtaaacacaggccccatggagtaatgtgcccagggcccgtgg

SEQ ID NO: 841075 - DNA, 550 bp, Homo sapiens
cttcaagacatcagcttcctctggccattcagacgccacatcccggagacacctctcctcaccgctccgtgaagacgccaygctccccgctgtctcctcaccactccgtgaacacagcctcgttccctgaggtcatcttctactgggctgttctcttccactttcttcctccactgattcaaagtgactaaaaaatctgctggtttgtttattatctgtctttcccactagaacacaaactcctcaagagcaggactgtgttgtttttcttgtttacagcggagcccccagcgcccggctcccagcaggcgcccagtgagaatctgccagagggacagatggagggatgagggatccctccttggatccccccaggtgcagtctgggggttgctgtgcgaagcacaccgcactgactcgattacacaatcatgggctcctcggatatttgctgcacccaatacatgcaggaccctggactacagaagccaagagaatggattccgtctgtaaacacaggccccatggagtaatgtgcccagggcccgtgg

SEQ ID NO: 841076 - DNA, 576 bp, Homo sapiens
acacaaattatttttaagcttttatrtataaactcttgattataatctccatgaatgagcatatttgtgtgaataataaccaccacaagtgtgcgggtctttaagtttagaggtacaagtgcaggtttgttacacaggtaaacttatgtcatggggatttgttgtacggattacttcatcactcaggtattaagcctagtacccgttagttatttttccccatcccctccctcctcctaccctccaccctctgataaccccagtgtgtgttgttcccctctgtgtgttcaagggttcttatcatttagctccacttacaagtgagaacatgtggtatttggttttatgttcctgtgttagtttgctaagggtaatggcctccaactttggtgtggggatcttaacttcattccttctgctggagaatttgctgttaagccatctcactttatcggacttttgttgaagccaaaggcaggccaggagcttagtccatcattgatgaatcatccatagctctgtcctccacccatccaagttctgtcatcctaaatcctgaccaaaagtgctgagtgc

SEQ ID NO: 841077 - DNA, 601 bp, Homo sapiens
cttactgggcactctgacctctctctgccttcatttcctcatctctaaatagtagtacctatatcccaggagttgtgaggattaacaagcagttattaagcaggaaaaactatgagtggcatatggtaagactatatatggattagccattttatatctcttcattccatgtcccacagtctgtggtcagatcacatctactttcacagatgttgctttggggatgcctcccacctcctgggatgcagttgtccctgtttactcatcatggcccacagcctcctaaaaaatatattccttggcctccacagtctgtgcaagcttcctcaatcatgagtttgggcagcaccacataccatacctctattggaatgcctatattattttttaactggctgttgtctgttcgtcccacaaaaatgtgagctcctgtagggtagggacactctttcatctgtagatcctcastggggggtgtgcacaaaaaatggacctcccaaaatgttggacattgaggagttcctggaccacagagacattttggggtaagaatatatatccccatgtttgactatgtttttgaggcattaaatggataaaa

SEQ ID NO: 841078 - DNA, 608 bp, Homo sapiens
tgtcttttaaaatgaaaaagaaaaaaaaaagaaagtctcctttctaaatttataagttgtgtaatttttcagtagacaattacataacacaatttacttactcaccaatgggaagttaggtcrcttctaatagtatgctattttaaacactgctgcagttggcatcttttacgtatcttcttatgcacatgtgctggagtttttttctagaaatactgtgaggcgggtacattttaagttgtactagatattaccaaaatgctctgtgcatcagctgtaccacttacagctctaccacagggttcttgtctttctgcctcctattcagcatgtagcattgtcaatgtagtaaatatttgtcatttgttttggctacccagtacgctgaccatgctttccatatttggagaatctctaattatgagtccccaccttccactacagacatgagtttcttccctaccctccctaggcttcaccaatcagattcacccaaatcagatcatgaatggaaagccagtgacttaacaggaagcaggtgctccttggaggccactcttggcagtagctgcatccatttttcggaggcctcagagacgagagattcc

SEQ ID NO: 841079 - DNA, 632 bp, Homo sapiens
catttcagcactgtgggtcacatttttctctttttattgaaattccagtttgtccagagtctcattttttcatgttcagccattgtaatttgtacagctgatttgagccacraaggtatgaagatgatatttttctgagacaaaaaatgcaccacatgccgtaacagttttgggaatcagacatacatggattagaatcctgggtccatccctctccagctgaacttgactttgggtatggtctctgactatcctgagactcagtctcttcatccataaaatgagcctattaacatctacttagcagtatcgccatggctaaacttccaatacaatgtctggcaggtagaggctatatatacactttctttataggtcttgattcttgcttgagatcctggaagtaatcttagtattttaggagaccgaaaaatcactattgggtctttgcttaatcaaagcaaacagttccaactgttacaagttgaattgtgtccctcaaaaagatgttgaagtcttaacttagtacctgtgaacgtgatcttatttggatttagggtctttgcagatgatcaagttaagatgaggtgatcaggatgggccctaatccaatgtggctatgtcctaataaa

SEQ ID NO: 841080 - DNA, 329 bp, Homo sapiens
gagatttaacaccatatccttgtgattcaaaatttatgcttttattctgtagttagtggcagtgggcccccttctatcacartgagttgacactagattcatcagatttataaaaataaaatagtgatattgaagaaacaattaagggcctggcctgaaagaccattcacctacgtcacctccgttgaaatcagtgggaattgtgagtatgttggagcctggcctgggaatgagtactctcaagttgaagcacgtaagtattgttgctaagccattgtgtttgctcttcctttttgtaggtgtcgagacagcccctcatggcaactatt

SEQ ID NO: 841081 - DNA, 564 bp, Homo sapiens
actcctctttccaaatgctctaccatggaaacacaggctccacctttgtacaaaaccctattaatttgaaatacaagagactggaatgaaaaacagtctctgtattaatctgctttttatttttccatggttttgttttgtttttcttttttgtttcgttttgtttttttgagatggagtctcactctatcacccaggctggagtgcagtggcgcaatcttggctcactgcaagctccacctctcaggttcccgccattctcctgcctcagcctcccgagtagctgggactacagggtgcctgccaccatgcctgggtaagggttcttttttttttttttaggggagacggggtttcaccatgttagccaggatagtctcgatctcctgacctcgtgatcctcccgccttggcctcccaaagtgctggcattataggcatgagccaccacacccggctccaagtttgtttttaaaaataatagagcatctcattatgggagaagagtaagggctttggatttcacgttggtttggacaakccagcagcagctagagaagattat

SEQ ID NO: 841082 - DNA, 620 bp, Homo sapiens
agttacttgggaggcttaggcaagagaatctcttcagcctgggagatggaggttgcagtgagcctcgattgcaccactgtgctccagcatgggcgacagagtgaagctgtgtctcaaaaatacaataaaaatwaaaataaaataaaatttcgcagtattagggagttttttatttacacttgtattctttttcatctcaaactgtattaatcatttatgtcaaagcagaattatgtaagtcagaaaaggcatatggaattgtatggagtagatttgagggagaacaaatattacaatgagttataaaaagatgtctaaaatttctgagatattttaattagcagctagagaaacagtgatggggaagagtgaagtcagaatcttccactcccatcgctaatcagctgttgctattgtacacaatacagttgaacattaataaaacctccattcgtgtttcagcagatgccacgtgacatctgtcagagctggtatttgctttgcagtgtttcttgcagtctttttggcttctgtttcttgcagtctttttagcttcatgggtatacctttaaaacattgtattaaaaaagtatattttcaatgagtacttcatgcaggta

SEQ ID NO: 841083 - DNA, 442 bp, Homo sapiens
gaagatatttcctttttcaccataggcctcaatgtgctcccgactatccctcacagattctacaaaaacaatctttccaaactgctcaatgaaaagaaaggattaactctgtgagataaatgcacacatcacaaagcagtgtctcaaaaaacttctttctagtttttatctgatgatatttacttttccaccatagtccttaaggcactcccaaatatctcttcacagattctccaaaaacagtgtttccaaactgctcagtcaaaagagtagtttaactctgtgagatgtatgcacacatcacaaagcagtttctcagaaacrttctttctggtatatatgaagatatttcccttttcaccataggcctcaatgctttcctaaatattcctttgcagattctacaaaaacagtttttccaaactgcttgatcagaagaaag

SEQ ID NO: 841084 - DNA, 517 bp, Homo sapiens
caatatgttgtatttacaaatataaatgcaaatctgtattagtattttaatcctcatagtcattatgaaccttatctcaaaggatttgatctgcaaacgtcaaaatttcaggtttgggtttatttatgagtcttccaatgatcttactttcaatgtttttatacttagttctgaaaattaaattaaccaaataactaaaaagatgattttaaattttattttatgaaatgacagatggtttctggttaactgtgttttattttttgttgcatatttgttaaaaagagaatggttagatctggaaaatgctgttaaacattccttcttttagttttatgttcagacatttattattcagcagtgagtatgatggctttttaaataaccaaatcasttggaaattaaagctgcttttaaaaatgtcttagtcatatatttgttgtatgccacatcagaatgtgtgtgtgtgtgtgtgtgtgtatagttttcagtctggttgttataagtctcttggcaa

SEQ ID NO: 841085 - DNA, 633 bp, Homo sapiens
aaggatttttaaatgcactgtagtcatatcaactctctagcatacatgatgagcatgaaaataccttttctctaacttgtatgctggttcgtrggtgtgcaattgggaagggagttagagttgcaggtttaatagataacttcagttgcctagagtagtgtattttttacatttgtccttttgttgttaattgtaaactttgtgaatcagttttccctttaaatttcttaggtaaaaatcaacccaaggcagtgattaagaaaaattgagaaaatttaattcaaatcacttgagccaaagcttaaggcagttgaagtaggatggaaactgaggaaatgctacaggtgatcattgcgggatgaaagtaagaggggatggttgatggaaagcctagtttacttctcaggttagtaactagctctgcaccagcctaagaggttgttctcagatcatggtttgctttctatggttcagatataaagagtttctaccgtttaaaatgaataccatcatatatgttctccagttggtctgtgtgtacttcaaacgactatatcctttttaactcattagtaagcttctgaatggttattttcatatttttaaaattacctcaagtatatagcaatagac

SEQ ID NO: 841086 - DNA, 582 bp, Homo sapiens
cactccctaatctcaagtgcccagggacacaaaacactgtggaaggccgcagggacctctgcctaggaaagccaggtattgtgcaaggtttttccccatgtgatagtctgaaatatgacctcatggcaagggaaagacctgaccatcccccagcctgacacccataaagggtctgtgctgaggaggattagtaaaagagaaagtcctctttgcagttgagataagaggaaggcatctgtctcctgctcctccctgggcaatggaatgtctcagtgtaaaacctgattgtatattccatctactgagataggagaaaacccccttaacgctggaggtgagaagtgctggtggcaatactgctctttaatgcaccagatatgtttatgtatgtgcacatcaaaacacagcacattttctaaccttgtttctgacactgagacatttcttcacgttttcctgctgacccttcccccgctattaccctattgtcctgccacatctccctctctgagatggtagtgataatgatcagtaaataactagggaactcagagaytggtgccggtgccggtcctccatctg

SEQ ID NO: 841087 - DNA, 605 bp, Homo sapiens
catttcaatgtctgagtttgataaccaaaaggacttgcatttttagataaaaattttctatttcccaaatctcaagacctagatacaaaatgtagagctgcagatttagggcccgaatggctggagtagcagcaggtgttacctgcacatttgtgaacattttaccaagagaaaaaaggggaaagtgaagattctcatgtctgaatgtgtactcaatgaaaacgttactctgattaggtttgtgggccccatggtctctgaatcagtttaaggtctgaagatacaagagtcattgagataaaactattgattgttgccctgtgaagttggtagaaatttggtttagtctctctagaagtgactgtagaggactatagataccaaataggcagaaacacagttctgcctgcatatttaggggacagcatgcactttgttgcacaagtgtgagttgactggaagtctgagagggaaagtcccctctagagtaaattccagttggcaccttatgtgtttatatcatgtctggtaattatagacagtgtttggaaawaacaaaagaatgttctccagccccagaaaaactccacaatagaacagaaaga

SEQ ID NO: 841088 - DNA, 549 bp, Homo sapiens
catattgttttttatattctataaaaaagaactttaaaggtttcatgtataataattttgatttttttttttttttttgagactgagtcttactcttgcccaggatgaagagcagtgaagggcagtgggcacyattgcacctggcctttttattattattatttttttgagatggagtctttctctggcacccaggctggagtggcatggcatgattttggcaaactgcagcctctgcctcctgggttcaagcaattctcttgcctcagcgtcctgactagctgggactacaggtgtgtgccaccacacctgggtaatttttgcatttttagtagagacggggtttcaccatgttgtttaggctggtctcagactcttgatctcaggcaatccacccacctcggcctcccaaagtgttgggattacaggcatgagccagcatgcacaacctcttgtagtacatcttgtaggactgcgcaaatgctgatgaaccctcttaacttttattttggaaagtctttatcttctttttgaagtaaaataatttaa

SEQ ID NO: 841089 - DNA, 595 bp, Homo sapiens
tttccactatttttctttcatcaacataacctcaaatcaatattattatttttcttcttttacctcactgcagaccagactttcccttgtggcaccatttcctgcttctggaaaatgaaaacagrcacatttctacatttttatatgatttgtccctaacattgctcctggcttctccaatactgctattttagcatctgtaagcatttggcttcatcattctaaaaaacaaaacaaaaaacaaacaaaaacacacttcatgtctttctaaactatgcagaggttatcaaggtacaacaatgttacatctgctgtgattctaataaattctaaattaagagtatgaaatccagaatgtctcttgttggtagcccatgccatgccaaaaaaaaaaaaaaaaaacaaaaacactggctgtctttgcttctcttgactactttccagatcccctcatgaagtaaatttgaatgaaaagaaaggatgaaaggaacactgttcaaccatgggcaatctgagcaagaggctgggttagaaaaatgtgtaaatggaaaattggtgggggggatgatgacaacttgagctgaaaattttaaga

SEQ ID NO: 841090 - DNA, 595 bp, Homo sapiens
tttccactatttttctttcatcaacataacctcaaatcaatattattatttttcttcttttacctcactgcagaccagactttcccttgtggcaccatttcctgcttctggaaaatgaaaacagacacatttctacatttttatatgatttgtccctaacattgctcctggcttctccaatactgctattttagcatctgtaagcatttggcttcatcattctaaaaaacaaaacaaaaaacaaacaaaaacacacttcatgtctttctaaactatgcagaggttatcaaggtacaacaatgttacatctgctgtgattctaataaattctaaattaagagtatgaaatccagaatgtctcttgttggtagcccatgccatgccaaaaaaaaaaaaaaaaaacaaaaacactggctgtctttgcttctcttgactactttccagatcccctcatgaagtaaatttgaatgaaaagaaaggatgaaaggaacactgttcaaccatgggcaatctgagcaagaggctgggttagaaaaatgtgtaaatggaaaattrgtgggggggatgatgacaacttgagctgaaaattttaaga

SEQ ID NO: 841091 - DNA, 607 bp, Homo sapiens
gccaagacaatcccaagccaaragaacaaagctggaggcatcacactacctgatttcaaactgtactacaaggctacagtaaccaaaacagcatgatactagtatgaaaacagagatatagaccaatggaacagaacagagcctcagaaataacaccacacatctaccaccacctgatctttgacaaacctgacaaaaataagaaatggggaaaggattccctatttaataaatggtgctgggaaaactggctagccatatgtagaaagctgaaactggatcccttccttacactttatacaaaaattaattcaaggtggattaaagacttaagtgttagacctaaaaccataaaaaccctagaagaaaacctaggcaataccactcaggacataggaatgggcaaggacttcatgactaaaacaccgaaagcaatggcaacaaaagccaaaattgacaagtgagatctaattaaactaaagagcttctgcacagcaaaagaaactaccatcagagtgaacaggcaacctacagaatgggagaaaagttttaaaatctacccatctgacaaagggctaatatctagaatctacaaagaacttaaaca

SEQ ID NO: 841092 - DNA, 509 bp, Homo sapiens
ggtggaaaaagatttatggacagaaaaagcaaagtgacatacagaaaatgggggtgagatacagaaacagccagattgattacagctygagatttgccttactcgaacatggtttaaacagctgatgtccttttattgccaaaaacacagtagttggtacaagagtgggttacagtctatttacatatcaagttaggtttcagtttgctatgtacagagaacctattgacaaaaattaaacagaaaagaaggcagctttaggctataattgatttaataatttctcctttttggtcatcttcccaattttgagagacagacccaaactttagacattgatagcatcagttaccatcaaaagtatacttatttagtctcaaatcccactgtgaaatagcagaactgtgggttttgtaaagtaaaaacaaggacttcaggttattatttttaaaaagaattacagtagaaaggaactccttgtgttaaaatctgctgtttacagaagaaaa

SEQ ID NO: 841093 - DNA, 662 bp, Homo sapiens
aatgtaactcccttctcatgagagcccccccccmacttgggtaattgcaacatataatctagcctagtttctaggttacctgactcttaccttattcctgagccttacacagaatcagaaacatctctgggcttctcacctaggtgaggttacactcctttctgatctctcccttcagggaatattttgacacatagctagacccaaaacctgtgtgataagactcttctatctcttgggatctgtccaagaagaaattgggatgtattgctaggctcagcatctaagttatgtgaatcttttctcctgcttgggccttgcatacattgtgtattttgacatatcgtgggctccaacacctaggaaattggcgatttctacctgtggcctgtccacaggaggccttgtgatgtatctctgcatcatgacccaagaaatatgacccttgtttttagcctccactttgcccacagggaaaattgtgacacatcgctgggcccagcaacaggtgatgaatttgttttgcctgcaccttgcccacagaaaacagtggaacatagcccttggcctagcactaaggtgatgtttcttttatccctggtccctggcctcaaaaatgattgtgattttaccctttcccagcactcatgtgatgtgaccat

SEQ ID NO: 841094 - DNA, 662 bp, Homo sapiens
aatgtaactcccttctcatgagagcccccccccaacttgggtaattgcaacatataatctagcctagtttctaggttacctgactcttaycttattcctgagccttacacagaatcagaaacatctctgggcttctcacctaggtgaggttacactcctttctgatctctcccttcagggaatattttgacacatagctagacccaaaacctgtgtgataagactcttctatctcttgggatctgtccaagaagaaattgggatgtattgctaggctcagcatctaagttatgtgaatcttttctcctgcttgggccttgcatacattgtgtattttgacatatcgtgggctccaacacctaggaaattggcgatttctacctgtggcctgtccacaggaggccttgtgatgtatctctgcatcatgacccaagaaatatgacccttgtttttagcctccactttgcccacagggaaaattgtgacacatcgctgggcccagcaacaggtgatgaatttgttttgcctgcaccttgcccacagaaaacagtggaacatagcccttggcctagcactaaggtgatgtttcttttatccctggtccctggcctcaaaaatgattgtgattttaccctttcccagcactcatgtgatgtgaccat

SEQ ID NO: 841095 - DNA, 631 bp, Homo sapiens
acattggaatcaacccgagtggaatggaatggaaaggactggaatggagtggaatggaatggaatggaatggaatggaatcaactcgattggaatggaatggaatggaatggaatggaatggaattaacccgaatagaatggaatggaatggaatggaacggaatggaatggaatggaatggaatggaatggaatggaatggaatggaatggaatcaacccgactgcaggggaatggaatggaatggaaggcaatggaatggattcaacttgaatggaatggaaagaatggaatcaacacgagtggaatggcatggattggaatggaatggaatggaatcaacccgagtacaggggaatggaatggaatggaatgcaatggaatggaatcatccgtaatggaatggaaaggaatggaattgaatggaatggaatggaatggaatcaactcgattgcaatcgaatggaatggaatggaattaacccgaatagaatggaatggaatggaatggaacggaacggaacggaacggaacggagtggaatggaatggaatggaattgtatggaatkgaatggcatggtacggaatagaatggaatggaaagaattggaatggaatggaatcgaatgg

SEQ ID NO: 841096 - DNA, 192 bp, Homo sapiens
cattccattccattacattcggattgattctattcaattcccttacactccwttacattccattccattcgggtagtttccattccattccattccattccattccattccattcctctccattccattgcactcgtgttgattccattccattgcattccattccattccattcaattccattccgttcca

SEQ ID NO: 841097 - DNA, 470 bp, Homo sapiens
caattcccttacactccattacattccattccattcgggtagtttccattccattccattccattccattccattccattcctctccattccattgcactcgkgttgattccattccattgcattccattccattccattcaattccattccgttccattccattccaatacattcggattgattctattcaactcccttactctccattacattccattccattcgggttgttccattccattccattccattccactccattccattgcactcgggtttattccattccattccattccattccattccattccattccattccggatgattccattccattccattcccctgcactcgcgttgattcctttccattccattccattccattccattccattcctttctgttccattccattccattccattccattccaatccattccattccgttccgttccgttc

SEQ ID NO: 841098 - DNA, 470 bp, Homo sapiens
caattcccttacactccattacattccattccattcgggtagtttccattccattccattccattccattccattccattcctctccattccattgcactcgtgttgattccattccattgcattccattccattccattcaattccattccgttccattccattccaatacattcggattgattctattcaactcccttactctccattacattccattccattcgggttgttccattccattccattccattccactccattccattgcactcgggtttattccattccattccattccattccattccattccattccattccggatgattccattccattccattcccctgcactcgcgttgattccwttccattccattccattccattccattccattcctttctgttccattccattccattccattccattccaatccattccattccgttccgttccgttc

SEQ ID NO: 841099 - DNA, 541 bp, Homo sapiens
ttccattatattcgggttaattccattccattccattcgattgcaatcgtgttgattccattccattccattcaattccattccattccattcctttccattccattacggatgattccattccattgcattccattccattccattcccctgtactcgggttgattccattccattgcattccaatccatgcccttccactcgtgttgattccattctttccattccattcaagttgaatccattccattgcattccattccattcgattccattcgattgcactcgggttgattccattccattgcattccattcaattccattccgttccattccattccattacattcggattgattctattcaattcccttacactccattatattccattccattcgggtagtttccattccawtccattccattcctctccattccattgcactcgggttgattccattccattgcattccattccattccattcaattccattccgttccattccattccattacattcggattgattctatt

SEQ ID NO: 841100 - DNA, 510 bp, Homo sapiens
gtagatgcaggactccaatctctgccttcgtcacgtggcatcctccctgtgtctgtctctgtgtgtcctttcttctaggacacctgtcatattggagtcaggacccatcctgatctcaggacctcatcctaacttaactaattatatcttcaaagacactgtttccaaaccgggctacattctgaggttccgcatggacacgaattttgaggtgacactgttcaacctagtacagtctactcactggtacccaaaattcacacacaccccatgtgaacaatacgttcaccctaccccaagacccccaaaagtcttaacccttccagtgtcaactctaaatcccaaatctcatttaaatatcaactcgagaagtcccaaatctcctcatctaaattatctaaaaaggtatgggcgagactctgggaatgatccatctttcracaaaattcctctctgttcatagacctgttaaacctagaaaacaagtgatctcttttctaaatgcaatgg

SEQ ID NO: 841101 - DNA, 520 bp, Homo sapiens
atagctaggaccacaggcatgtgccaccctgcccaggcaacttttgtatttttkgtagagatggggtttcactatgttgttcaggctggtctcgaactctgagctcaagtgatccgtccgtctcagcctcccaaagtactgggattacaggagtgagccgccgcacccaggctggactagttcaacacatgtggctagtgattaccatactaggacagcatgataacgaagcacaaatcagagggccagacactatgccaaaaagaggggaaagaggtgactgaacagaaggctggcagttcagggtgaggaaactgaggtttacaaagaaaacccaacaacaatgagctaaatagatgctgaggcttactatgggatggcagcatgagacaggaaagttagggaccactaattccacgcatgctgtgagagctgtgtgtgccggggacagaaagaagatgaaaaccaagctccagaagattgacagtacatatcgaattaatgtgcacacagataacca

SEQ ID NO: 841102 - DNA, 606 bp, Homo sapiens
cccctcagtgcagagcttagcccggtgacccagcacaggtggccacycccaagacagtgtcccagagcagctgcctttctcatgtgtggggcatctgggagaattgcctggcagctcccagcatccccttggccctggaaggggttgctgccatgagtggtcctagacgcctcttcttcctgctgctccacagttctccctctgcctcaccgctgtgttcctgctgcagctggccgctgggatcctgggcttcgtcttctcagacaaggtaacactgggagccaggaggcctcctcaggtgtgacccagagggaggaaggaaggttcctgcccatgtttagcctggttaattaaccacagctccttcccctgagaaacatcagtcgttgaaaagttcattaggggtgaatgaatagcctgtaaactcatcatatttgaagagaattttaagatcataaggtgctttcctctgacagtctgagaagctaacagggaagtaaattatacaaacacaaagttaaaataacttagaaactttaatagcaaatgacagaatcaaactcaataatcaagtggaccactgacaatatgaagagcctcttattt

SEQ ID NO: 841103 - DNA, 585 bp, Homo sapiens
tcagccttgccagcatctgttgttttttgccttttataatagccattctgactggtgtgagatgttatctcattgtggttttgatgtgyactttgatgattaatgatgttgagcttatttcacatgtttgtcagccatttgcgtgtcttcttttgagaagtgtctgttcatgtcttttgccctttctttaatgggattattggtttttttccttattgaattgaacttccttatagaatctggatgttagacctttgttggatgtgtagtttgtgaatattttctcccgttctgtaggttgtctgtttattctgttgatagttttttttactgtgcaaaagctccataatgtaataggtcccacttgttaacttttgcttttgttgctattgtttccgaggacttagtcataattcctttcacaggctaaagtccagaatgatgttccttagagtttcttctaggatttttatagtttgaggtcttacatttaaatatttaatgcaccttgagttaatttttatagaaggtgataggtaggggtttagtttcattcttgtgcatatgaatagccagctgttcaag

SEQ ID NO: 841104 - DNA, 543 bp, Homo sapiens
ttctcctgctgattctttctcacctttctgggcttatatacattaaatctttgaggttstttacctttagtattttttcttttaacagtctggacaattttctatagggctgctgtggtttgctggggctccactacagaccctagtcacctcagatttcccagtacttggaggtatcactagtgaaggctgtgaaaccgtgaagagggcagcctgtcctttcctcatcccagggggatatgaacatgttgccagcctgaatacacttacaggagttggctggggacccctgttgggaggtctcactcagtctggagcaacaggatcggggattcgcttaaagatgccatatagctatgcttttgtagagcaactgtgctgtgatggggtacttcttctgcccccagttggcttgggtgctccaaagcttggaggctgaaacagctaagtcatggaaacagcaaagatggcaacttgtcattccctctagaagctctgtcccaggaagttttcaaaagagaacatcagcaggaatggctggag

SEQ ID NO: 841105 - DNA, 543 bp, Homo sapiens
ttctcctgctgattctttctcacctttctgggcttatatacattaaatctttgaggttctttacctttagtwttttttcttttaacagtctggacaattttctatagggctgctgtggtttgctggggctccactacagaccctagtcacctcagatttcccagtacttggaggtatcactagtgaaggctgtgaaaccgtgaagagggcagcctgtcctttcctcatcccagggggatatgaacatgttgccagcctgaatacacttacaggagttggctggggacccctgttgggaggtctcactcagtctggagcaacaggatcggggattcgcttaaagatgccatatagctatgcttttgtagagcaactgtgctgtgatggggtacttcttctgcccccagttggcttgggtgctccaaagcttggaggctgaaacagctaagtcatggaaacagcaaagatggcaacttgtcattccctctagaagctctgtcccaggaagttttcaaaagagaacatcagcaggaatggctggag

SEQ ID NO: 841106 - DNA, 642 bp, Homo sapiens
ctgtgcacacagttacaaactgtacatggcaccatttgccgttcacagaaactgaaagatgcagtattaaatcatagctgcagaaaattaactatatgttctgtacgactgcagctatgtcatagccacctcctgttgctattgggtgagctcaagtgttgtgagtatctgtgaggtgctcatcatctccgtgtgagcagttcacctctccagtatattgcgcaccacagtaaaaagtcatctttcaaggttctcacatattttttatcgtgtttagtgcaatactgtaaactttgaataacaccataggacccatatgaactgccactggtgatgctggaagtgctcccaagaagcagagaaaagtcatgacatgacaagaaaaagctgacttgcttgatatgtaccatagattgaggtctccggttgtggttgtcatttcagacggttcatcttgcaaacagatgatgtaaacttacagtattgataaatacaatacagttctataaacatatttctcttatgactttcttaataacaatttcttttctcaagcttactttattgtaagaacacaggatgtaatcyatataacatataaaatatgtgttaatcgactgtttatgttatccgtaaggcttc

SEQ ID NO: 841107 - DNA, 381 bp, Homo sapiens
gggtgcaggaggggctacacaggaggattctgtaatgccctctgattatgccgccctgcgggtcccctctgtaagacacagggcacatgcacagtcaggaggagatcaaagagggccccaagggggtacagtgggcacgaacaaccaaaaccactctgctcttgtgtgtccccagggaaaggacagtcaaagtcatcactccacaccgtgcttgctgcaccccagggcttagcaaaacaccctcagaggagacagacttgctttctctgcctcctcacctcagatgcccaccgcccctttcctacccgyccccctcaccagctcctggagacgtgtaccccgggtacttcacactccacactcagcaaaggccctgtttct

SEQ ID NO: 841108 - DNA, 509 bp, Homo sapiens
agagaataatacctattttgcagtgtgagatgacccatgtaaaaccctcaagcaattcctggcagatggccatggtgatcactgagcacagctgcctcttcttccagctagttagctagtgcacccctgacctcccgcctccccatccactgggcctctctggcccccacctcctcactgcccagctcagatgcctctccctgtccttctggccctctcagctgctaggctggtataaaccctgagcaaaatgcatggatcagctccgccgtcctggattccagctgctaagaaggcaatgaccacaacgtgcacacacatgcgcacacatactcgtgcatgcatgcacaaacacacacgcctgcatacagtccacaccagcacaggctcgagggctcaactctgtaccccactctcctcaacmtaagccacctggtctgctgtgcagtcagttttccctcaaatgtccccctcggctgctttcaaactgcccttttctcctccagccc

SEQ ID NO: 841109 - DNA, 506 bp, Homo sapiens
taaccttctcctttaaatcaagctaattaggtaactcctgtgcccacactggttttttccccctcactgataaaatgccttcaaatggctcaaaaatatacaaagtgtaagaaggactccatgacagcaacagggttgggtgggggatgcccagctctggacaggagaggggtgtgtgggagacagggatgccaacacctgacaacccctctctccacctccctccatcttgggtctccatgagaaggattggtagctctgagtgagataatgtcactgtcctgggggacaatgcagacaccctggacacctcagctctccaggaacgggcacaatccggagatccagcccggagcagacaggggcaagagttccaagtccctcygaggctcgggatttctggattctgtggaaaagattatttgttccaccatgtggccagaaatagggaaagggctactggggaagtcacagctttggcttctgaaaaatcccacccccaaccc

SEQ ID NO: 841110 - DNA, 582 bp, Homo sapiens
tgtagtcccagccactcgggaggctgaggcaggagaatggcatgaacccgggaggcggagcttgcagtgagccaagatcgcrccactgcactccagcctgggggacagagcgagactccgtctcaaaaaacaaacaaacaaacaaacaacaaaaaaaagaagatatcagcactcatgtttatcgcagcactattcacaatagcaaagtaatggaaccaacctaagtgtccaccaatgattgattggataaagaaaatgtcatatatatacaccataaaatattacgcagccataaaaaagaatgaaatcatgtcctttgcacaacatcgttggagcttgaggccattatcctgaatgaattaatttagaagcagaaaatcaaatatttcatgttcttcttataagtgggagctaaacaatgggtacacattccataaaaatggaaacaaaagacactagggactctaaaagggggaaggatgaaaggaaggtgagggttgaaaaattacctattgggtacagtgttcaacatttgggtgatgggtaccctagaagtccaatccccaccattatgcaatatac

SEQ ID NO: 841111 - DNA, 562 bp, Homo sapiens
cttccttgcatttggttagaacatgctcctttagcgcagaggagtttgttattacccaccatctgaagcttacttctgtcagttcatgaaactcattctctgtccagtttttttcccttgctggcgaggagttgtgatcctttggaggagaagaggcattctggtttcggaattttcagccattttgtgctggcttttcctcatcttcctggatttattaacctttggtctttgatgctggtgaccttcagatggagcttttctgtggacgtcctttttgttgatgttgatgctattcatttctgtttgttagttttccttctaacagctccaaccttttctttacagatctatagttgttaagatttagtcagatgtttaactaatcttgacattgctaagatccagattttggtgcattctctgagatttggataggagayaatctagaaattacatgcatttaagtgaaaatagcatacctaaattaagatgtagatgttgggatttcatcctaggacaatgttttccatgtctttgtgtctttgtttcttgatatata

SEQ ID NO: 841112 - DNA, 537 bp, Homo sapiens
gggagatgtttgggtcatgggggcggatccctcatagcttggtgctggcctcaggatagggagcgagttctcagatctggttgtttyagtgtttagcacttccctcactcatgctcccattctgccatatgggatagctgctcccattttgactgtcaccttgagtaaaagctcctcgaggcctccccataagccaagcagatgccagtgccatgcctcttgtacaacctgcagaaccgtgggccaattaaacttctttttttaataaattacccagcctcaggtatgtctttatagcaatgcaagaatagcctaacacacacaaggatgaaggatttctacttctaagaatttatgctaataataatcaaggatttgtgcaaaaatggggcttactctctcccagtgctgtttataatactaaaaccaaacaagaaaaagaagaagaaagagaaaaaggaggagggagagagagaagaagatgaaaaccttaatgttaaacagccagaaattagaaaaccaatttatgttacggct

SEQ ID NO: 841113 - DNA, 604 bp, Homo sapiens
ttgtttatcttctcaaagaataaaattttcattttgttgattctttgtattgttcttttgttctcaattttgtttagttcttctctgatctttgtttttcttttcttctgctagctttgtgcttggtttatttttgtttttctagttcttgaggtgcaacatcaggttgttaattgtggtctttctagacttttgatgtaggcatttaatattataaacttccattttagcactgcttttgctgtatcccagaggtttttgtatgttgtgtttccattttcattcatttcaaaaaaattttaaattttggtcttaatttcattgttgacccaaagattgctcaggagtatgttgtttaatttccgtgtatttgtatagtttcaagagttcctcctggaatttatttctagttttatcctgctatagtctgagaagataattcatttaattttcattttaaaaaattattgagacttgttttgtggcctaacatatggtctatattggagaatgtgccatgtgctgatragaagaatatatattctgcagttgttgggtagaatgttctgtaaatgcctgttaggtccacttggtctaaaggcca

SEQ ID NO: 841114 - DNA, 646 bp, Homo sapiens
acataccactgcctcactcatagactttttagcaatctcttctctggatcctttacaagtttctccttttaaaattgactacttaatgttggatttcctccagacttggtcctaggctccttcatcctcacactctaacctctctctcttggagagctcatcaaccttgtggctttagattccacctatgcacagatgaaccctggaatccaacttcgccttggtctccagttctttcactccttcatgctatttgttctgccagactaccaggtctctccttgaatagtctggtcagaggtcccacatccatcataccccacagcctcatacagatgtcttgagatcagaatgtctgggaattccaaaaccagttcacctagcatccagcagttcttctgacctcatgctgctggagaacatcctgtaacagagctcattcacttcaacctccctcagggccatggtttgaatgtgtccccaaagttcatgtgttggaacttaatcccaaacctaacagtgttgagaggaaagacttttaataagtgattaggttaygagggctcggtcctcatgaatggaaatgtcattactgagggattggcttccttattgaatgagtgtttttgttataaagtgagcttgg

SEQ ID NO: 841115 - DNA, 525 bp, Homo sapiens
ccccatcctcacctcgcatcttctcttgccatgtgatctccgcacaggccagttcccctttctttccaccatgagtggaagcagcctgaggcctcatcagaagcagatgctggccccatgcttcakgcacaggctgcagaatcatgagccaaataaaccttttgataagttacccagcctcaggtattcctttataacaacacaaatagactaagacaactctgggtagccaataagatagactgggtctggacagggtgatctcccaggcctcacagtgggaactgtgacacagaattgaagtccagaacttcagagccacacgagagccactgctgagagacactattgtaaggacagtgaggagagccacagcatcctggcagctaggaggtactcctcggccaagggtaagccactgtgcactaagtggaccaaggacatttaaagtcccaccagcttagttgttgctggggtaacttccaacaaacccacagatacatgtgttttggggaagcatttcca

SEQ ID NO: 841116 - DNA, 509 bp, Homo sapiens
aggctagacaccagcaggcttgccatgtaggcatgcttcctccctgaaaaagggcaaaggcaaaagatgtgttcatccttcctcttggagattctgatactgttcctgccttcctgcctcaggactgctcatctcttatctggtctagaacaggagcttcttaaaggagtatctcatccaatgtcactgttctccagccattccccacccaaagctgagggatattgctgatctgctcatgcctctccatgcttaaaataattccccagattccatcacttcaggatgaaatctacattgccccactggctgattcagtcttctcaacctgaccctggtcctttccagcttcccctctgccatgtgacttcctgagtcacatcctcctrgggaaagcacttgcagtaccaggagtgccactctctcacacccttgtcacttaagtcccatttccttcaatgcccagattgggatccactcattggaggagtcagaaccccttgcctcat

SEQ ID NO: 841117 - DNA, 577 bp, Homo sapiens
aaataattagcattttaccatcatattaaaaaatattagtgtactggccaactttttgactttcaaactgtttttatatcaggtaatctacatgtattgggcaattatttttgaccattctctctaacttgattttctagttgaaacattgtagtcggtatatacatgacttatttccttcactcatcaagaatttggatcccgtaccacttagacatctacttaatctggtctcagctcttgagccaagtgttcatactgaacaggtaatacattcaaaacatgatagttttttttttttcccgtgaagtgaaaatttccttgtgattcagataatttaactttcattttattgtcttggcatttcagtttgacaaaaaggatattaaatttgttagtgttgcctggaattctcaaactgaaatctctccctcttttttttagacactgtacttggcatccatgttaattaaagcactgtggaataacgcactagcagctaaggctcagttatctaaacagagttcttttgcrtctttattaaatactaatattcccattggaaataagaaaggtt

SEQ ID NO: 841118 - DNA, 624 bp, Homo sapiens
tggagaacttatgattaatgaatgttacaataattcttccagaggtagaacttttatgtgaaatcgaccccatgttttggtaataagtctagagaaagttgtctaccacaarcaatacattaagaagatgtgttgtatgctttattctaaataagcttttggagagatttcggagacatttgaattttagggaaaattcgacttgttgaaggattcatttgtgagatcaagttctcaattctaagcttaggtggtaagaacacttgcttgctttcacagtggagtatcacttttacagttcttggaagtctgcactataattccagattagatgaagttaattcttctgagtcatataccttgcttctaattgttcttttaaagggaatatgtttaatctggacctttattattatttagaagtatcttagtctctttctttggttaatactacagtaagaatccagtgaaggttctgtttttgcaaggaaggtccttcagcttccaaaaggaggggtaagggaaagcatttaacatcactgaagaacaagaatagtgtgagccatttttcattgcctctttctataatttttaagtggctgaatttcaaaattctaatgcagt

SEQ ID NO: 841119 - DNA, 621 bp, Homo sapiens
tatataatatgtatttttaatggacagggtcttgctctgttgtccaggttggagtgcagtggttcagtcacagctcattgcagcctcgacttcctgcactgaggtgatcttcctgcctcagcctttcaaaatagctaggactacaagagcatgccaccatgcccagctaacttttaatttttttaaattgttttgtagagactgggtcttgctgtattgcccaggcagatctcaaactcctggcctcaagcagtcctccttcctcagcctcccagattgttgagattacatgtgtgagccactgcacctggctcatattgttttgattactgtagtcatgtaatgtattttggaattaaaaagtgtgatacttccaactctattcttactcaagattgttttttgctatttggggccttttgtggttctgtatgaattttagggctgttttttctatttttgtaaggaatgccattgaggctgggtgtggtggcacacgcctattawtcccagcactttggggaggccaaggagctaacttctgatagcttgagctcagaagttcgagactagcctgagcaacatgctgaaaccctgtctgtaccaaaaatacaaaaaact

SEQ ID NO: 841120 - DNA, 516 bp, Homo sapiens
gtttgtaatatccagtgggggagagggtgacattactacccgtatcccgggggtgtacaccttcctgtgatctggttcataatatccaatataggaggaggtgtacacctttctgtggtaatatccagaaggagagagagtaatattactcctaatatcgtggggggtgtacactccaaatatcactggggcatacactcccctgtgatattattcgtaatacccaggggagagagaatagtactcttaatatcgcagggggtgtacacaccactgtgatattgttcctaatatccaggaagggagagaatgatactactcccaatatcgcaacaagtgtacacctcttctgtgatattgttcctaatatccagaaggggagaggamatattaccctcaatatcacagagggtgtatacacagccctgtgatattgtttgtaatacccaggaggaaagaggatgatattactccaaatatcgcagttggtgtacacccccccgtgatattgttcct

SEQ ID NO: 841121 - DNA, 635 bp, Homo sapiens
aattcttgtcctgagaaccaaaatatatatttgatgaaatagttctcttcttttactcattctgaagtcattggaattgaatttggcatatgatataaatcctaattttatattttatgatattcaaaatttctaacaaatatttacttaataatctaatccaggtttctattgtttcttctgtttcctttataatgctttttctgaagttatttttcctagacttaaatattagtataatattatcatagaggaaaaaatatctgttagctatgaataaaaggctttcatcttattgttgcattaatatatttaaatgtagagagcatacagattagcaaagaaaaagtataattgcctttttttatagttgacatgaacatgtataaagaaaagccaaaaaaatcaataaaacaactagaacttattagtgaatttagcaagatcatagcatacaaagccaagattcaaaattccattttatttatctactaacaaaaamtatttgaaatttgaaaatttaaatatgccatttacaataacatcaaaatattgaacaataaagtatttaggaatttataaaatgaaatctcctataccaggaattacagaccattgctgaaataaatgaaaga

SEQ ID NO: 841122 - DNA, 611 bp, Homo sapiens
caccagaagatgttctgtcgaagctgacaagctatttctataattcaaatggaaatgcaaaaggcagtcactgccaacaccagcatggactgtctgggttccagtaggttacttcactactgcctcttctgtcagccacatcacgacagctgcccagaagccagagaaactcctcacacctggcccactgctgcagctaccagcatccaggcaagccaccatcagcccactggtaactgccaacagaggtaccactgtacactaccctggggaacaaagataggcatgtagtcagcccacctctgccaccactagggcctgaagcctggcccacctgacactgcagtcctcagcacagcttcatcacagcttctgttaataaccacaccctaacctaccaaggaaatcacaaatgtcactgacactgtttgtagccaaagaaatcatagagagactacattactgcacacacccataatcaaagccacagtaccctatccaracaacatcacaggtatatctaaaggaaaaaattttcccatatgaaagcgaattcaaatataggaagaagcgactgttacaacagatatgcagataaagcttcaacaata

SEQ ID NO: 841123 - DNA, 563 bp, Homo sapiens
atttacattttattactgagtaggcaaaaaatgttaactttttatgagtcctgctagttggtaatctaagtctgtatcaggcactgaaaatttgtaagtttgttactaaaatgatttcattttcctctataamaatttgttgtaatatattttaaaaatgaagtgacttacatttgctgaaagctgagatgtgagggtagcaactttttcttgtgatgcaaccagctctctccgcagtttatggatttgctgaatgcaattaaaaaaatcaatggaataggcaagtagatttttacttaaaacccagaattcaaaccaagaaagcaaatgctgtatttagctcattctaaccccattgtatcagcagcaactcctgaaaataaaggatatgaacactgactccacagtaacaagcaaatgtcattcaaaagcaaagtgttatgtgtcaaactctaatctacaaatcaaagtacgctcacttgctccatttgccatccctcaaatggcaaatgactcaagagcagtttaccctctgtattgattcttctccttctagaaaaact

SEQ ID NO: 841124 - DNA, 620 bp, Homo sapiens
taagatgcacccattgaaaatgtatagttctrtgcttttagtcatatacaagcaatgtaatcaccacccccaaaaattgcttctagttcctttctagcaatcgctgccctgctacctctagttatgggcagttattaatctgcttttctgttattacaaattagttataactgttccagcatttcactaaaatggaaccatgcacgtattctgtgtctgatttctttcacttagcacaatgtttttgcaattcatcttgcatgtttcagtagtccatttctttttattgctgagtagcatttcattgaatggatatccatgagttgcttatccatgtatttcttgatagacatttaggttatttctagtttggggctttttctttctttctttctttctttctttttttttttttttttgagatgaagtcttgctgtgtcaccaggctggagtgcagtggcgcaatcttggctcactgcaacctccgccttctgggttcaagcaattctcctgtctcagcctcctgagtagctgggactacaggcacatgccaccatgcccagctaatttttgtatttttagtagagatggggtttcaccatgttggctaggatggtctc

SEQ ID NO: 841125 - DNA, 620 bp, Homo sapiens
taagatgcacccattgaaaatgtatagttctatgcttttagtcatatacaagcaatgtaatcaccrcccccaaaaattgcttctagttcctttctagcaatcgctgccctgctacctctagttatgggcagttattaatctgcttttctgttattacaaattagttataactgttccagcatttcactaaaatggaaccatgcacgtattctgtgtctgatttctttcacttagcacaatgtttttgcaattcatcttgcatgtttcagtagtccatttctttttattgctgagtagcatttcattgaatggatatccatgagttgcttatccatgtatttcttgatagacatttaggttatttctagtttggggctttttctttctttctttctttctttctttttttttttttttttgagatgaagtcttgctgtgtcaccaggctggagtgcagtggcgcaatcttggctcactgcaacctccgccttctgggttcaagcaattctcctgtctcagcctcctgagtagctgggactacaggcacatgccaccatgcccagctaatttttgtatttttagtagagatggggtttcaccatgttggctaggatggtctc

SEQ ID NO: 841126 - DNA, 575 bp, Homo sapiens
ttgcaggggagcattgctgatctgaattgtaagctcaattcaaggaaccaaattggggatacacatttaagcccataatgcaaaaagctactatcctgatctgtagcagcttgatactttgttctacctcttagttggttcaggactctgatgtgaaaaggtagagatgctattaatcagttccctaaaatctcaagaggttttatataccttttctgccacattattttatttctggacaggccaaactccctttttttttttttttttttttttttttttttttttttgaaagcaggaactctagtaacctgaattacatgtagtagtatcttgacacaaacttatggaattgaactatgaagccaatgtgagaaaggcatctagagtttgaaacccagtattatcaaatgatcatagtatttccaaggggagatgctgctaacataggcttaaragaaaatggcttagtctgtaaaataaataagggaaagaagttacaaaataatgagagatttcatagaagtttcataatcaaaactgtttacagataactataattcactagaaaattg

SEQ ID NO: 841127 - DNA, 575 bp, Homo sapiens
ttgcaggggagcattgctgatctgaattgtaagctcaattcaaggaaccaaattggggatacacatttaagcccataatgcaaaaagctactatcctgatctgtagcagcttgatactttgttctacctcttagttggttcaggactctgatgtgaaaaggtagagatgctattaatcagttccctaaaatctcaagaggttttatataccttttctgccacattattttatttctggacaggccaaactccctttttttttttttttttttttttttttttttttttttgaaagcaggaactctagtaacctgaattacatgtagtagtatcttgacacaaacttatggaattgaactatgaagccaatgtgagaaaggcatctagagtttgaaacccagtattatcaaatgatcatagtatttccaaggggagatgctgctaacataggcttaagaraaaatggcttagtctgtaaaataaataagggaaagaagttacaaaataatgagagatttcatagaagtttcataatcaaaactgtttacagataactataattcactagaaaattg

SEQ ID NO: 841128 - DNA, 567 bp, Homo sapiens
aatgaaaaattttctaatgaaatccaggctggaagttgactgcttttggttggactccccatagcaggttacatacatgatccttgtatcacctttttagcccacttctccacatatttctccaatttcatgtttatttaagtttttctcttattaaattcttcttcatttagcctgcaaaagttctcctaccgcttcttgattcggggattctttctctactttcctggagtcttatctctcttatttcccactttgttgtatgcacttttttacacacacatttgatttacagcaaacagtaatctatgttcccctgggaaaagtttgtttgcctcagagaacacactgctaaaataatggaaagttcacagttgattatttgtatttaattatagttcagatactcatgaaaaattctttgctcctctttgcaattaggtrtagtgattaggaaaccttgtatatcactctccagttatcttttaaaagccctcctctatttgatgatggtgtaactggctcttaattttatattgcataggtagattaaaaagaggcagctta

SEQ ID NO: 841129 - DNA, 567 bp, Homo sapiens
aatgaaaaattttctaatgaaatccaggctggaagttgactgcttttggttggactccccatagcaggttacatacatgatccttgtatcacctttttagcccacttctccacatatttctccaatttcatgtttatttaagtttttctcttattaaattcttcttcatttagcctgcaaaagttctcctaccgcttcttgattcggggattctttctctactttcctggagtcttatctctcttatttcccactttgttgtatgcacttttttacacacacatttgatttacagcaaacagtaatctatgttcccctgggaaaagtttgtttgcctcagagaacacactgctaaaataatggaaagttcacagttgattatttgtatttaattatagttcagatactcatgaaaaattctttgctcctctttgcaattaggtatagtgattaggaaaccttgtatatcactctccagttatcttttaaaagccctcctctatttgatgatggtgtaaytggctcttaattttatattgcataggtagattaaaaagaggcagctta

SEQ ID NO: 841130 - DNA, 579 bp, Homo sapiens
gatttttacatttttatatgtttgaaaaaaattwaaaaaagaatagtattttctagcacatgaaaattatataaaatttagcccagcgtggtggcttacacctgtaatcccagcactttgggaggccgaggcaggcagattacctgagatcgggaattcgaaaccagctttaccaaaatggagaaaccccgtctctactaaaaatacaaaattagtcaggtgtggtggccatgcctgtaatccgagctgcttgggaggctgaggctggagaatcgcttgaacccaggaggcggaggttgcggtgagcagagatcatgccattgtactccagcctgggaaacaagaatgaaactccatctcaaaaaaaaaaaaaagagaaaaagcaaagaaaaatatataaaatttaaattttagcgtccataaatgaagttttatcagaacatagccatgctctttgttttgtcgtatctatgtctgcttatgcacaaaaatagcagagttgagtaattgccacggaacccatatgtggacatatttactatctggccctttacagaaaatttcttgacctctagacta

SEQ ID NO: 841131 - DNA, 584 bp, Homo sapiens
agcactttttgttaaaacacatcattcattttcctccgatgggggatccatgcttaataattttattgaagtagggcagaactaactaatgttcctttaactcttgccatctgtactcagccaaaacaatccttgtttactatgctaagggtcaaattaaagattgggagataaatgatcaccaggacacgttgtctacagaaagaatctcagtgaaaatgtggtcttgtcctgtgtttgcgcagttaacatggcaataggctcattttacaattagtggacttggtaacagctgtactgacaccataatactgattctccatatataccctcttgaattgtacaattgagtctagagaaggggttagcaaatgtttcaaatgagaagttatcatctggatatttgagcgaggctgctctcccaggatggtggtgaagcagggatcctaatgcagctcttgtaccatamgagtttggaggatccattcctcaagaagacttggttgactttctgtctatgacactcaatagctttgtgtaccactgggaattaaagaaatactatgcgctactaaagatcatga

SEQ ID NO: 841132 - DNA, 582 bp, Homo sapiens
tttcattcattcactatatatttgccaaataatccccacatgccaggcactgttctaaatactacaaatataaggataaataagatacacacatggytcctgcaagttaatggaatagtcaggattacctttacaacccagttcttctgacacctatatttgtgcgatgcaaattaagagtgttttgtgaccttcaaaatatttggggtgctttgcttatcattttactattaattacagaattaaataaattttgacaatcaagtttcagatgagcttttttgctttgtggatattactgaagcgaacaaagctctatgaattgtggaatgataaaatattcacagaaacttacaactctgcagttgaataacaattacatttgttccaaacaggcaattggtttccaaacacattaaacaaaggcaatttagaaagcttcttcttcttcctggcatcattaacattgttgaacgtcctgggattctgcagtgtttcacaaaggtaagtaagtgtgtggtaagatgaaaaatttctgagtccatgaaatattggtctgggaaccatcactgagccagggaa

SEQ ID NO: 841133 - DNA, 582 bp, Homo sapiens
tttcattcattcactatatatttgccaaataatccccacatgccaggcactgttctaaatactacaaatataaggataaataagatacacacatggctcctgcaagttaatggaatagtcaggattacctttacaacccagttcttctgacacctatatttgtgcgatgcaaattaagagtgttttgtgaccttcaaaatatttggggtgctttgcttatcattttactattaattacagaattaaataaattttgacaatcaagtttcagatgagcttttttgctttgtggatattactgaagcgaacaaagctctatgaattgtggaatgataaaatattcacagaaacttacaactctgcagttgaataacaattacatttgttccaaacaggcaattggtttccaaacacattaaacaaaggcaatttagaaagcttcttcttcttcctggcatcattaacattgttgaaygtcctgggattctgcagtgtttcacaaaggtaagtaagtgtgtggtaagatgaaaaatttctgagtccatgaaatattggtctgggaaccatcactgagccagggaa

SEQ ID NO: 841134 - DNA, 596 bp, Homo sapiens
acaccactggatttggtgacggggagatcactggtgcttcttagagcaggtcacttgacgtattcctatccctctacccttccggttataattacttcctcttctgggtaaatgaagttgctgtcagcagaccagcaccctcaactagaataattagaaaagccaaatacaatgcagaaattacctatttgagggaaagtgatagctgctgaggcaaggaacactggaagggctaatgcactggagagagaaacttgaggagagtgagctggcttctgcagccgcttttaccagcggggcattttgcaggaggctgagaacccattgcaaaatgcagtgcaaaggctggcaaaagactgctcgggatagagaaaataagagttttagtggaagatttgaaagggcctcaaacaagacagcctgttttcacctgaggacttttgctgcacactgaatttcttcagagcagggattytaaaatgcaaatggaaaacctgcctctaaaaagcagagtgcagtttttcagcattcttgtaagactaagattagggtttactactggctgggggagggttcttgcagaatacaatagggcc

SEQ ID NO: 841135 - DNA, 551 bp, Homo sapiens
cagtgcctgggagggacagcggcacagcccacccgacagcaagccccacccatatgtccgtggtgaggagcgctggcttgaggtgaccgtgggactaaataattaaagaagacgcagacgtcggccacctggagggccctggggtctttcccggcaggaaggcacaattacagcccagagtctcccaggccggcccatctcttctcaggacctggatctgcatcgcacccccgggcagggccacggggccggtagacaggctcagtgctcctgaagtgagcccctcataagcaggggggaagccaggcctggcagagccgcacaggtgcccctgctccatgaccccagagagcaccacaggctcccagggaaatcggccacgcaggcttggcgttggtgacctggggaaactcagccactttgaacattaagggggctcctgggtgtggcttccgcgggcccagggcgtctttggcagagtggagaggattctttgagcagagaatgttcccctgacaacccgatcggrtgggttgagcttggccgaaaga

SEQ ID NO: 841136 - DNA, 435 bp, Homo sapiens
ctgctaagtagctggaactacaggcatacgaccaccatgcccagctaatttatttagatttttgtagagaccgggtcacactatgttgcccgggctgatcccgaactcctggctcaagccatcctctcactcccacctcagcctcccaaagtaccagaattacagatatgagccaccacacctggctcaagtctaagaactattggtgttcaagaggaagttgagcaaaagcaaggagtggaaagattattcaaaaaatactacaaaaaacttttcaaaacttgagaaagatataaatatcctgatatggcgaggctttgtgtycccacccaaatctcatcttgaattataatccccacaatccccaggtatcagtggagagagaggtggaggtcattggaccaagggggcggtttcccccatgctattctcatt

SEQ ID NO: 841137 - DNA, 642 bp, Homo sapiens
  misc_feature 269: n = A,T,C or G
gcttatgtttaaaattattctacagttttgatttctgagaatgctatgccatcaatatccataaaactcaactcatccactgattcttaatgttaaataaacmcctacacttatccttggcccccatctgagttcaccagaagctacagtagactacttaaatgctgaaatctcccatctcaggtgcctctctgcttccctatctgaaggattctctgacatcaggagagctgtacctgaaggaccagtattgctgaatctgagcgcanacctaaaccaatgttccagcttcccaagagatgttaatcccatgttaatatcccaagagattaatctaaagcatatgtcacctggtttctggcattcacctgaacatccatgcactttgtaatggctttcccccttccttccctttcgttcgacccttccaccttccacaccaccactcctccccaacgcacactctctcacatgttcttcctggaattaccttctgaataaacaacttgctcccaatgtccttgactctggtatgctttggagtgacccaaaactagggtttgtttgtttgtttatttgttgtggattaaggggaacttagcacattttgcaaaagtttagcctcttatgtttttgtttcta

SEQ ID NO: 841138 - DNA, 358 bp, Homo sapiens
tgctttggctttaattctcagtgggtgaagtattatagtttctgtatgatttatttggttgtaaatcaatgttagtggtgtctgcaatttcyttagcagctttggctgtggttgtgaaaactgttgtgagtctttgttggtgataaggacactaggtgagctagtccttaggccctttgggagtgcacacaagcacggcaatagcagcaatagacacctggtgggccagtctccaggctcctcggcagtgagcacagatatgcagttgtcccactgctaaactgggtggggttcctggcagtggtggtggtgcgctacagactgactgatcttcagcccttaagtgacacacatgggc

SEQ ID NO: 841139 - DNA, 587 bp, Homo sapiens
atattaagcctacagacatctttatttgttgaggttcttcaaatcttttgcccatatttaggttgatttgtctgctgaattataggcattctttatttattctcaatacaagttctttgtcaaatatatggattccagttgggcgcagtggctcacgcctgtaaccccagcactttgggaggccaaggcgggcagatcacttgaggtcaggagttcaagaccagcctgaccaacatggaaaatcctgtctcttctaaaaatacaaacttagctatattttatatattggaatccattacatatatatggattccaatattttctcccagtttgtggcttgcctttttcctgtcttgacattgtctttcaatcaacagacattttcttaatttggcaaagtccaattcatcattgtttttcctttgtcattagtactttttgtgcttaaataatctttgctctccaaagatcatgaagatattcctctgagttctcttccgaaaattttataattttaacttttacttttaggcctaggttccatgttaaattmacttttatgtgtgtggtgtggtactggtcaaggt

SEQ ID NO: 841140 - DNA, 561 bp, Homo sapiens
tggttatatggtgttggaaggttgaggcaactcagatattaataactgcaggaagcagttcccactccaggttggaggaacaaagtgaagagaattaccacaacttaggagctcgaagggtaggtggttagatttctggttagattcgccagtgcttagatttctgaggggtggtgcattgcacagctgctggaaggaaagacttttgaagggtgggcaccacacagcaggttccagaagtactgaaagaagctgggagcctggcatgtgctgctggcaggatgctaaaggaagctagaaacaggacgtctcccctcctcctgctttcccgtctcccactggagctctacttggtaacatgttaccatgtaacaggacaccagacaaaacagaatccaggatatctagtttgcacactccaaccctaaccaagacaaatttcacatgaatacaaaatgaggtgaggctcgactcaaggtggctgattggamcggtcatattgtaaacactgggaggcaagaaccacagaagataatggccaacataccctttaatatttac

SEQ ID NO: 841141 - DNA, 626 bp, Homo sapiens
tctctctccatatatatatatatatrgtgttgtaatttagctagtcattgggatgagattctgattctgattttcagcaatctcagccctgcagctacaggatagaagggtctccttcaggcatgcatagaagatttcagatcatttatgtggtttttgagctgggaattaaaatctctgacctcatatttttctttccccactttgtccagtgacattaggagcaaccagtcaattttattgtatgcattagtttgctagaaatgtttgaaatatacagtcacccagagagttgcttcttataagtgataaattaggaatatccaatgatattattttgtgtatctttattgccagatcattaccactatcagtgctctctttactactggaaattgagtcattaatgtctttaaacatgatcagattagccaatttcagaaacccaagaaatagttcagagaactcattcttaaaattctattcctctagaacccctctcactaccaaatatggattagtcaggtttctccagagaaacagaataaatagtatatataaagaaataaaacaaataaaatatataagtataaaaaaacttattataatggctcttgtgattatgg

SEQ ID NO: 841142 - DNA, 492 bp, Homo sapiens; identical to SEQ ID NO: 828161

SEQ ID NO: 841143 - DNA, 554 bp, Homo sapiens
gtgtgtgtgtgtgtgtgtgtgtgtgtgtgtgtgtgtgtgtgagagagagagagagagagaatctcgctctgtcgcctaggctggagtgcagtatcaygttctcagctcactgcaacctctgcctcttgggttcaagcgattctcctgcctcagccttctgagtagctgggactacaggcgtgtgccactatgaccagctaattttcgtatttttagtagagacagagtttcaccatgctggccaggctggtctcgaactcctgacctcaggtaatacacccaccttggcctaccaaagtgctgggattacaggcatgagccacagtgcccagccatatttgcctacaaggtttcattcagtatcttccaaatgcctcacctcttctcttagagatgctcctgaaaaaaaacaaactgattttgtaatttccttcttgtacaaggtaacattttcgagttttatttttgcgaaggaatttataaaatcaaatttattttatagatagacatctctggcctacttctactgcacacagccactccctccttaacaa

SEQ ID NO: 841144 - DNA, 584 bp, Homo sapiens
tgggaacctgccttgtctgtggacacgtggatctgtgcgcgctgctctcctgtttgctactgggggagccgtatgactgctagttttgtaggtcaaaagtggtcgagtattgacagctttgtatataattyagtgcagtcgttttctcggctagacaagcggcagacctgagtggttccagacactttgttctcatgcaccttatcacatgactctgcctcagtttcctaatatgtaaaatgaggacctaagcagtcctcaccttctagggttgttttgagaattagaagggtaatagacacagcatccagaaccgtggcattagctatcattatttttatctgtatgattacaggttttcaccatgtgctggtgcaaaccagctttgatccagttggctaattttaacttcttgtagtattttgtcatggggatgtgacgtgagcttggtgtgtttcctggagaaagctacttggtgcttgccatgggaaggggctgccggggactttctagagagcacctctgggtgcctgggtgccgtggccagtggatttgccagctctgggcttctcctggtgatgcca

SEQ ID NO: 841145 - DNA, 532 bp, Homo sapiens
agttccagctgtatatttcccccctgttggatttcctttgggtaaatacggagtcaaatcaaactttgaacttccaactccctgccagactgtttyttactacccctatcccttgctccccacctcacccagatctctcctccctgcctctgtcccgaggtggcggagaggctgggggaagccccagcgtgggaatcctcagagcggtaggagggagagaggctcagcgtcaagggctgaccccggggtctctgctggcctctgctgtggtgtggccagtgtcatgcgccctggggattccggtgcctggggagcaggggcttggggacatgtcccgccaaaggtgaggaccttggcagctgcattcagacagggctacccctgacacacaggtgagcatgcgcacatacacacatgcacacacatgcccccacgcacatgcccgcacacacgcctgcacacacatgcccacacacacacacacgcacacacatgcccgcacacacacacggacacacatgccccccccaca

SEQ ID NO: 841146 - DNA, 532 bp, Homo sapiens
agttccagctgtatatttcccccctgttggatttcctttgggtaaatacggagtcaaatcaaactttgaacttccaactccctgccagactgttttttactacccctatcccttgctccccacctcacccagatctctcctccctgcctctgtcccgaggtggcggagaggctgggggaagccccagcgtgggaatcctcagagcggtaggagggagagaggctcagcgtcaagggctgaccccggggtctctgctggcctctgctgtggtgtggccagtgtcatgcgccctggggattccggtgcctggggagcaggggcttggggacatgtcccgccaaaggtgaggaccttggcagctgcattcagacagggctacccctgacacacaggtgagcatgcgcacatacacacatgcacacacatgcccccacrcacatgcccgcacacacgcctgcacacacatgcccacacacacacacacgcacacacatgcccgcacacacacacggacacacatgccccccccaca

SEQ ID NO: 841147 - DNA, 570 bp, Homo sapiens
ccgggaatcaaggctgacagcttcaggcgccagcagaggktcggccggggacattgccttcagaggccactgctcagttggagctgacagggagcccagccatccctggcctggtggggacacggcggtggtgcccgtgtgggctgagagagcctgtctccctggcctgccctcggatggatcgggagcacccgaccagcggcaggctccaggccttgctttctcatccgagctgacctccgtgtcctgtcttcctgcctgtgaaatgggcatcattacagggctggcgtcccagggtcagtgggtcaaatgctgatacccccttcggcagaggctgggcccagggaaagcttcctgcacccaaggtcattgtcataattacgtgctcatggcaccccccgacactccactggcaacccctggggcctcctcccagggctcagtttccccagactcctcaccagggtcctaccccacccctcatctcccaccagcttcctctccttcccctggcaggggcctctgggccatgtagggcataccaagcacattctccctttggaaacttca

SEQ ID NO: 841148 - DNA, 646 bp, Homo sapiens
caagactagtctgggtaatatggtgagaccctcatcaatacaaaaaaaatacaaaaattagccaggcgtggtggtgggcgcctgtggtcccaactactcaggaggctgaggtaggattgctggaagccaagaggttgaggctgcagtgagctgtgatcatgccactgcactccagcctgcgagacagagtgagacactgtctcaaaaagaaaaaataccatcaataggtggcttaaaccatttatttctcacagctctggaggctggaagtctgagaccagggttccagcagggttgggttctggtgaggcgtctcttcctggcttcagacggccgccttctctgtgtcctcacatggcctttcctcggtgtgaaagggggaagagagagggagagcgagagctctgtggtgtctcttataaggacactgatgctatcagatcagggcctcatttaattattttcttagaggccccatctccagacacagccacactggaggttagggcttcaacaggaattttgggtcaacacaaacatttagcctataccatctggattgcctttcaagtctcaggacacaattggtcaaaactatatyactatgttttatgtgacatatcaaagtagcaaaattttattggaa

SEQ ID NO: 841149 - DNA, 586 bp, Homo sapiens
ccaaattatcaaatctgttactgaaatcaaaataaaatccaaagagcaatatactttaccaggagaatgtctatcttatgtgtcactattatacatcattttttcttggggaaaaaaaaaatgcaatgaataagaataaaaattcttcatagaaaaatcattaggtttcaaaatgccaaaaatatctcattcaattcattctgaaaagtccatctgacattagaaaaaataattcctgagacagcaaatgttacaaagggagtaatttacaaaatatcaaggtaatagcaatcactgtaactgaacctttcttataactacacgaatttatcaatagatactctctagtatcaaatattaaaacttcagttcacaataaaaaaaaggctatcataagctgaacttcaaattttaagtgtacttcaagattttgtgattttaaagcaaaaccttagaagaaaacacaatttataaatgaaataatttccatatcagaatatgtttgccactttttttttagggktttttttttttcattatttccctagttgacagaccaccttcttaatcctacatgtcaagcact

SEQ ID NO: 841150 - DNA, 535 bp, Homo sapiens
gtagtcccagccacctgtggggctgaggtgggaggatggcttgaacccgggaggtggaggttttttgagctgagattgtgccattgcgctctagcctgggygatagagcaagcctctgcctccaaaaaaaaagtatcatgcaatgtgtattttaaaaaatttgggtgactggtctgcttcattccagataatatctgtgagattggtccatagattgtatcaatagttacccctttttattgctcagtaatattcccgttggtgaacaggccagtttgtttagccattctctattgatgggcatttgggatgtttccagtatttggatattatgaagaaatatccaaatattatccagtctttttgtttaaacttctgtgtattattctaggactatttagctttgaaaagaaatttgggcacatgctacaccaggatgaaccctgaggaacattatgttagtgaaatgagccagtcacacaaagacaaataccgtacaattctatgagatacctaaagtagccaagctcactga

SEQ ID NO: 841151 - DNA, 489 bp, Homo sapiens
aaggcactatgccaaattgtgattaaccactgtctgtggtgatgaaatggcaggtttttatcttctttttattttagatttgtgttttctggattttccacagtgaatctcttttataatggtgttttgtttggttttgttttgttttttgagacagagtcccgctctgtcgcccaggctggagtgcaatggcgctatctcggctcactgcaacctctgcctcccaagttcaagcaattctcctgcctcggcctccagagtagctgggattacaggtgtgcatcaccacgcccggctaattgttgtattttttttttttttttttagtagagacggggtttcaccatgttggtcaggctggtctcgaactcctgacgtcaggtgatctgcctgccttggcctcctaaagtcgccyggcctataatagagatttttttttctttaatgaggcagagcaggaagctcattggctatggagttaggaaacgc

SEQ ID NO: 841152 - DNA, 363 bp, Homo sapiens
cagtgacatacaatggtcaccacaaaagcagtgcattattctcctttcccaaagcatctacttagcaacctctctttattccttctctttgaatcacatatgccaggatgaatsagccgttcattgattatagaggatacattgaagatttggcatattattggccagatttgttgaatagtaaggataatggattgtgttgcgtccgcatgcaataaaaacttttgaatgagaattgttaaatgaggaggaatgcctccttaatttgcatatacatacataaacctagaaagggctatgactatttctaaaagaaaacttttttatatgccttatcctaaaaggagttgttctgtgcaccag

SEQ ID NO: 841153 - DNA, 363 bp, Homo sapiens
cagtgacatacaatggtcaccacaaaagcagtgcattattctcctttcccaaagcatctacttagcaacctctctttattccttctctttgaatcacatatgccaggatgaatcagcygttcattgattatagaggatacattgaagatttggcatattattggccagatttgttgaatagtaaggataatggattgtgttgcgtccgcatgcaataaaaacttttgaatgagaattgttaaatgaggaggaatgcctccttaatttgcatatacatacataaacctagaaagggctatgactatttctaaaagaaaacttttttatatgccttatcctaaaaggagttgttctgtgcaccag

SEQ ID NO: 841154 - DNA, 363 bp, Homo sapiens
cagtgacatacaatggtcaccacaaaagcagtgcattattctcctttcccaaagcatctacttagcaacctctctttattccttctctttgaatcacatatgccaggatgaatcagccgttcattgattatagaggatacattgaagatttggcatattattggccagatttgttgaatagtaaggataatggattgtgttgcgtccgcatgcaataaaaacttttgaatgagaattgttaaatgaggaggaatgcctccttaatttgcatatasatacataaacctagaaagggctatgactatttctaaaagaaaacttttttatatgccttatcctaaaaggagttgttctgtgcaccag

SEQ ID NO: 841155 - DNA, 420 bp, Homo sapiens
tactgggaagtgaaggaagagcagagagaaaaaaactgaaaagcaatttaccagggagcaggaaacaaggagaaaatgataacatgaatgtcagaaagagagagagagagtggggaggcacaaaggaaytgagttttgtaattagcaggtcactgggtcatttttggacaatcagagcctttaggttctaattataatgtggctttctttcatcttgagagggtagtggatcccctgggaatctgatggtaggtataaagcaatggatgtagaaacaggcaaacataaataaacttttttcctataacttagaggagtttttcacagattcccttgaaataacttcatgatacccactctagcttgatgaaaatgaaatcttagattgaggcactgatgcaccggcattaaaagtctttt

SEQ ID NO: 841156 - DNA, 566 bp, Homo sapiens
atttacattttattactgagtaggcaaaaaatgttaactttttatgagtcctgctagttggtaatctaagtctgtatcaggcactgaaaatttgtaagtttgttactaaaatgatttcattttcctctataamaatttgttgtaatatattttaaaaatgaagtgacttacatttgctgaaagctgagatgtgagggtagcaactttttcttgtgatgcaaccagctctctccgcagtttatggatttgctgaatgcaattaaaaaaatcaatggaataggcaagtagatttttacttaaaacccagaattcaaaccaagaaagcaaatgctgtatttagctcattctaaccccattgtatcagcagcaactcctgaaaataaaggatatgaacactgactccacagtaacaagcaaatgtcattcaaaagcaaagtgttatgtgtcaaactctaatctacaaatcaaagtacgctcacttgctccatttgccatccctcaaatggcaaatgactcaagagcagtttaccctctgtattgattcttctccttctagaaaaactgtg

SEQ ID NO: 841157 - DNA, 564 bp, Homo sapiens
  misc_feature 354: n = A,T,C or G
ttactccagtcaaacaaagtgacttcctaggttttcaccagcctatagataaacaagcccacaagggcccctttgtggtatgagataggtctgttgtattttctggagctccttaatgtcatgwcagtatcacttctcctttgttgcacaagcctttacctgaaggaaagaagaaacagctggagaagcaaaacagcctcaagttggggtatctgtgtggcaaaattgaaatggtgataatggcggtagccagtaggaactttaaacagctgcaaggcaggcagtagatagaaggataagagtttgtaaccaaaagccactatcagctgaaagaagatcacaaacagaacacanacagaagtgaactctttgagaaaaagaaaaccatgaatctttgttcactggaactggtggtgcctgcctgataaaggtgttcagatttagtttcttacagtctagatattcactgttccccaggtgtctctacatttggtttctggttttgcaaaaagaataacattttgaaactttataactatgtgttccctgtgaaaaggtcaaggg

SEQ ID NO: 841158 - DNA, 604 bp, Homo sapiens
catcttattatgatatcatcttcagggctatagaacccacccctggactctataaaatgtcaataacttcatcggattctgcatggtaatcttttccttacagtagtcaaaaaagagagagaaaataagtgagaggaatgggtgaggaggaagacatggggctcactgtgctgagcaggaggtaagacaagcctagaaccaggagcagttttctcccattaatatccaggaggctattgggcttcagacatgggatatagaatgggaaggaagtaacagaagacaaggaagtgtaagcagaccaaaagaaagaagatgaggtagccaaaagaataagattaaaggatcaaaggggttaaaaaaacagtggttttagtattggtgatattccttccactaaaatagtctccagaaacagaaatcacaagcctatacaataaaaatgaaccgtgactttagtttgttttgctttcttcacaaaagtgccagggtattaggtaygtattgggatggaggtgaacttagaagttctagaggccaaagcatttgtctattgcacagtgaagcgttcacttcacggaaccatatgcagatcagcacccag

SEQ ID NO: 841159 - DNA, 604 bp, Homo sapiens; identical to SEQ ID NO: 809890

SEQ ID NO: 841160 - DNA, 643 bp, Homo sapiens
taattacaaaagtgcttagtgctacaaagtacaaggtattatgggcataaacaaggacctatcctagtgtgagttgttgggggcagggtatggaaaggggaaaaagacagggagcattccagttctatacacaccgaatttctgaaaacgctgaaaaagcagcgaccctaatttgaattaagatcttaaaagatgttcttttctttggtcctctaaatttctaattgcttcaaagtaaagttttgtattgtcgggcatgatttgttctccacaaacactctactcgttaagattccattttcataacagcccagacttatagtgctcataataaccatttcattacttcagtgattcagtttaaagttctcctacagtaattaccagaaggatttctttttcttcccctctaagacaagtagcatatattcttcgaattggtttccaatgccaaatgtattttgttttttttaatcaggcgaaatgccctagatatttcaatcttgctaaagcagatatgctgcagtattcttggatatagttcttgtaaaccaaaaataaaattctaaggccccccaaccatctgaatggacttcctcctcagccagggaamtttttttttttttttttttttttttttttg

SEQ ID NO: 841161 - DNA, 593 bp, Homo sapiens
ccatccatgttgctgcaaagaaaatgattttattcttctttagggctgcatagtattccatggggtacatgtactacattttctttatctagactatcaaatcttactaaatatagagggaaatttttttcttcaactttaaatttcaggggtacatgtgcaggatgggcagtcttgttacataggaagtgtgcaccatgatggtttgctgcacagatcatcccatcacccaggtattaatcccagcatccattagctattcttcctgatgctctccctcccccaaaaccacccccaacaggccccagtgtgtgttcccctgcatgtgtccatgtgttctcgtcattgagctcccatttacaagtgataacatgtgatatttggttttctgatcctgcattagtttgctgaggataatggcttccaactgtattcatgtccctgcaaaggacatgatgttgtttccttttatgactgcatactattccatggtatatatgtrccacattttctctatccagtctggcactgataggcatttaggttgatttcatgtctttgctattgtgaatagtgctgcaatgaacatatgc

SEQ ID NO: 841162 - DNA, 612 bp, Homo sapiens
gatagaatcctgacattaagtgttgcgggaatcaggaggaccagagacgccacagggtaaagcagaagtattttattcagtgcactcagacccagtggattatcattcagagactgggcccagaacaaagacagcacttgacctttatacacacttcaaaaagggggttggctagcctgaaacaagcttacagtggtgcgaagcaaaagcaaggatacagaggcaaaacaaaggcagttaatcaaattgtgacaggtgcattactcaggattacacgtgacatcttgctatgtggcccagatggctattatctaggcttgctctagtgccttgcctgggcttatctcataaccttcactatgtcgcccaggtggctgtagtccaggcctgctcagatagctcatgaccttcactgtaccgcttagataaaacagaatgcttgaagttaccagttacagagaacaggaatctataaactcataccataagagaaacgaaaattgcttttctcctccctrtgttgagggagtgctgggagagtctccagagcacattcctttgtgtcctaacttctcagatagtgtttatggaggctcttcctgggtctgggct

SEQ ID NO: 841163 - DNA, 631 bp, Homo sapiens; identical to SEQ ID NO: 826494

SEQ ID NO: 841164 - DNA, 613 bp, Homo sapiens
caatcaactgcagcacttcagcactccctctgccatggcagacattaccaatcaactgcagcacttcagcactccctctgccatggaggacattgaacccaccccttcaggcagcccctatcactgctgtggggggttggcacataagacttaacttatttgctactcctgatatagagataatattttggatgggaagttagaggaaaaggcagggcagatggtctggtggtcagcaaaaaaatggagtctggctgggaaaggcatttcaggccgggcagtggcatacccagcattagctaacattcattgagacttagaatggttcagcccatgtggtaagtccattacatgaattaactgattaaactctgtcaacagacaactgaaagaggcaagtgctattattattcccttttttctttgaggcacagagaagtcaagtagtgtgtccagggtcacacaggtagggagtggttggtgtgaacccctgtgatctgaccrtagagcttgtgcccttcatcccccacagctcactgcctctaacagacaaggaggggcccagtcaggccagagctaagggttaatttagggaagaggagattcatttagg

SEQ ID NO: 841165 - DNA, 596 bp, Homo sapiens
atccctctattactagaaagggatcccaatccagaccccaagagagggttcctggacctygtgcaggaaagaatttgtggtaagttcatattgtaaagtgaaagtaagtttattaaggaagaaaataaacaaaagaatggctgttccataggcagagcagcggcatgggctgctcacctgagtatacttacagttacttcttgattatatgctaaacaagaggtggattattcatgagttttctgggaaagaggtaggcaattcctggaactgagagttcctgcccattttagaccatataaagtaacttcctgacgttgctatggcatttgtaaactgtcatggtgctgttggaagtgtcttttagcatgctaatacattataattagtgtataatgagcagtgaggacgactggaggtcacttttgtcaccatcttggctttggtgggttttggctagcttctttaccacaacttgtttatcagcaggggctttgtgacctgtattttgtaccagcctcctatctcatcctgtgactaagaatgccttaatctcctgggaatgcagctcagtaggtctcagccttatttttccc

SEQ ID NO: 841166 - DNA, 594 bp, Homo sapiens
ataggttgtctgtttactttgttgattrtttcttttgctgtgcagacgctcctttgttgaattaagtcccatttgtcagtttttcttcttgttacaattgcttttgccatcttcatcatgaaattttgacagggtctacatttagaatggcatttcctagatttttttcaagcttttttatagttttaggttttatatgaagactttaatccatcttgagttgatatttgtatatggtgtaaggaaggcatccagtttcagtcttctgcatatggttagccagttatcctagcaccatttattgaatagggagtcctttccccattgcttgtctttgttgactttgttgcagatcagagggttgtaggtgtgaggctttatttctgggttctctattatgttccattggtctatatgtctatttttgttccagtaccatgctgttttggttactgtagctttgtagtatactttgaagttgggtaatgttatggtgccttcagctttgtactttttgctcaggattgctttggctattcagctccttttttggtggacatcagaacttacagaatgagtgtcagcagcttggaa

SEQ ID NO: 841167 - DNA, 616 bp, Homo sapiens
atattgtcctcaatatctcttaaaaatcaaagtaagttcacctggttcatcaaatgaccacaaacaaaagtcaaataaagtactcagcmacttgtcttggtttgtttcttcacataaactttttggtggattatagttcatgtttttgtaagtttatcagtgcatttaagctcatttataatttatgtggaggtttgattatttcttcagtgaagtagccaatcactaaacttagttttctttttatttttatatgtattttaattattatttgaagttctcatgaacatcaagaagataccttttagagtgaatgagatttttttttaaacctgactatataaatttgggccttctttttgggtagaaactattccttagaaaagaaaagatactgtgtaattttatgtgtctgaaaaaatgattcttacataatgcacatatggtaattggttttgttatttttaaaaatgcaatttaacatttgattttagacatatttccctggctttattagaaatgacaaacaattgttcctttaaaaattaaatactcatcacttgcaatatttcttatttatgaaactgcttttgtttgagatgttaaaaacagggag

SEQ ID NO: 841168 - DNA, 624 bp, Homo sapiens
ttagtgaagccaaacatctagtagttcggtgtagtcactgaaagtgtgacacgttcatgatggattctgaacagaaggtaacagactacacaactctccaagtggttggcatttagatcagtacttctcattctatttgtgatgaagagctatcctttatgtttgttttaatttccaatccattgcacactttgtggaatgcaataaaaataaagcattacaaaaaggaagtgaaaaagtaaagcaaaatataaagaaaatgaactcaattatttataactagatttgacaaacaatcacactgatcacatgctcagatatagcggcaatgtcaaagtgctgtaaaagtttctaaatgctcacacgtgacttctgttcttatcgtggactcatgacaagccattctcagaccagttgaggtcagaaggcttcactgtgatggtcatatccagagaacttgatggaggccatatcacttgttactttcctttcyagaagcacactcaggcagtacaaaaatgtcagagcttctcaagttctgggtcattatgcttggaaacttctgaaatctcagcaatttgcacaaatgctgctgattaaaagtaaactgaagcattcagaact

SEQ ID NO: 841169 - DNA, 643 bp, Homo sapiens
tcatttttaatcctactgtcattaaatactatgattgcatcatttcactttcccatttgaagcctaaatttaaaaatgggtatagaattattttcacttaggaagcatgatttaatktacataagtcaacttttacactcaagcagaatatccctttttccctcacttaatgatgaataacaaccccctgcaaatggtgatataagaagggtgtgcaggagatgaggctgattttgctcactcgcgttatctttcggtttgactcattaagattgggtagcccattagtccaccaaatcttcttaaacacccatgaacatatcattctttgtgttttttgtttttttctttgttttttgagatggagtttcactcttgtggctcaggctggagtacaatggcacagtctcggctcactgcaacctccacctcctgggttcaagcaattctcctgcctcagcctcccgagtagctgggattacaggtatgtgtcaccaaactcggctaatttttgtatttttagtagagacggggaacattttggtcaggttggtctcaaactcctgacctcaggtgctccatccgccttggcctcccgatcatatcattcttaatactgtcttcatgtgtatttattttgttg

SEQ ID NO: 841170 - DNA, 527 bp, Homo sapiens
gagggcttcatttgttttgtttgttttttgcttatggatgtccagttacaccatcactmtccatggaaaatattacccttcctttaataaatggctttgcaataattaggaggcttttgctatcaaatgtaaatatagacatttataattcgtattatggaaatcaggctatgtttgatttgtatgcttttttttttttcttcaaatctttaccattctggaattatctttttaatggaaaaaatttttaaagtatatcaaaaataaaggcagaagttaggagatattgtaaagatactgttcattaactaaattctgaccctttagatatgcttcaatcactgactgttataatttaaatctaaaatttagatgaacaaaaatactttgctgttcaagctgatttgatccaaaagctttgagacagaacatttgtaaaatattaatatggttaaagtaacacaattgcactcactcaaatttaatattttaactcaggcattgctttactgtttcttaaaaaattc

SEQ ID NO: 841171 - DNA, 605 bp, Homo sapiens
ggaacttttgacagtcatcatatatgaaaccacaaaaaagccttaataaatttataaaaatataaactcattctcttatggaaattcaataaaattataaatgaataataaaatgtcaggcaatagaccttttagttggaaaattgtaaactccctttaaacaattatggattaaattaaaatttcagaatctagaaaataaaccacatatcagaacttatcatatataactatgaaagagctctgaagtaacgtcattatatcaaactttcatagtacttgatgaaaaagaaataaaactaaatgaaacacttctataattagctatcatggctccacttgtattacacaaactcttttcttgagaacaactataaaactagataacacaccaggaaaataaaaatcccaactgtttgaaggcatgagaaagagagcaataaattcaggacttgaaggggatagaagaaatattctttccctgaatcctttctcctctaaggtcatttctcgattcttgaygcaaaaatttgcagcccggttaaaagcagcaatctagaggttttgcaaaagtatcaaaggtctgggaagatgaaaattggaat

SEQ ID NO: 841172 - DNA, 634 bp, Homo sapiens
acaggagatcaccttttcaaagctgaatatcaaagtcagaaaatcaactaaatgaaaggyaggtttatctataaaaatcaaaatgttatttatcataaaatgccataaatacctttggataaaaagacattataaataatgactgccacattcaatcattcatgacaaatttattcattcatgtcatattcaagtattttcaagatttaggcttttttctattaagatgcaataaagaactaaagcttgaaaatacatttcaatcaggaatgactacacaatacaatatgtttcatctcaagcagagaagtgctcaaacattgaggttaatagtatgaactctaacaataatgatcatgttcaaataaacatcaactctaagggtccctgttgtgaggacaaagttatttaatcactctttgtgactattaccttatccacaaatgaacatattaatagtacctacttcagagctatataagaaataaatgtgttaatacagataaggaaattaaatgaatttaatataggtaaaggcttagaacaaaaaaatcgcacatattcattatcactgtatttcagtaatggtgttaccaatccgtaaaataaaatctaaaacaatggtgagtatatc

SEQ ID NO: 841173 - DNA, 483 bp, Homo sapiens
aacacagccacagctcagtacaagattaacctgccagctagcagtgagccagtggcctggactgtggagccacacaaggctgagagaccacctaggaccttgactacaacccaggcaaggagttgtraggacttcgagtggaggtgagaatcaggaatgtagaataatcaagagatagatcatccataggtggccagagtgaggagataggaattaaggatagctctggagtctgattctggctgaccaggaggataatgtgcaactaataaaaactagaggtgctggatgaaggatagtttttgagaagagaggcatttttttgtatattacttatgctttattacttagggctttgagaccaaaataattaagtgacgtcccaaggcacattttttaccagtgagacaagaatataactttctttctcctagttcacagtatttttcactttatgccttctttctgcttaatgatttgtct

SEQ ID NO: 841174 - DNA, 326 bp, Homo sapiens
ttttcgtgatcacagggctagatacaaagtaggcatgcaattattataaatccctgttgaatttatctaactcctctgggactgcagaagtaggcctagatgatctttcaawcggctgtccccagtcattagaagaagtacaccatctgtagaccagatctgccagcaggactcaacctccccagctacattcatttttcatgaagtagagcctcgctgggagagtgttcgttcttgccatggacgctctgtctcgagccaagtggccaggctgcctgaatgcaagcagatgcagtgtgcctggcctggaggagtcatcagaaggg

SEQ ID NO: 841175 - DNA, 617 bp, Homo sapiens
ttatcagcaatgtgaaaacagactaatayagttgtatacctacacacacacatgcacacacatgcacacacgcaaaggcacacctacacgtagtgtttcatcagctagggtcttaataggaagaaataacagaaataggaagcaataaaaaaactgactgcagtttgtttaaactaaaaacaaattgttgagagggtattgagtagttcatagaattgtagagaatgctaggtaaccaggtttagatatgaggcaggaatatagaaccacagccagtaaatactacagagccagcaagggaagactctgccatcactgctgatgaacaaacaatattgtagcttcaaccctggagactggatgttgccactgaaaaccataagctcttgcatctgggctttcaaagttattgcttccaatctgcctgtttcttaggatcacagactatgatgcaagtctcagggaggcaagtttgattggttgggcctggtctgagtgaaccaaaagttgagtcttagtgaaatacacactgcatttggtcaaatgtcagcggttgtgaaaaaggtagctacctgcaccctcatccccattttattgtatcttcatgagacaggaca

SEQ ID NO: 841176 - DNA, 589 bp, Homo sapiens
catttttttttaattagaaagagaagataggatttcaccttgcaagacartagagatgatgtcatctgtatttactctgttccctttcttagctttagatcacttgatgtgctcaatttatggtaggtggcagagactgggaatttaggatatttttcccccttttagttggaagagttgaggaggagagaactggccatagctcattggacatttatagactgagaacaggctggaggaaaaagagaaagctttgatacccaggaatatttattgaagagaattactttgtaaaaagatcactgaaacatgactgtttattatgtgcaaggcactgcatgcagtaacgcaatgaacattctctgaaagaagaaaccatctttgtaattcaaactctactgcagtcaagtttaatgaagtgactcttatttaagtccctattacatgatccatgtaggaaatttctgttaggatttggtactagcattaactgtgtcttctttgagaagcatcacctgtcttttccttttatagaataatactagataacatccttagacatctcccatgtgccaggcactatgcccaa

SEQ ID NO: 841177 - DNA, 612 bp, Homo sapiens
cgagatctcagctcactgcaagctccgccttccagtttcatgccattcttttgccccagcctccccaataactgggactacaggcgcccgcaccatgcccggctaatttttttgtatttttagtagagtcggggtttcaccctgttatccaggatggtctcgatttcctgacctcgtgatccgcctgcctcggcttcccaaagtgctgggattacaggtgtacgccaccgcgcccagcctatctctttaatttttatgcctccttatgatacggaaaggacgtgctgggaagggaagagcgtggtccctttaaatgatgggggagctgaagggaagtgctgggtacaggagggtgtggtccctggctaggcccgcctctcccccccagcccaacacagacctaagtgaggacagacatttttgtattcctgccccaagtgttgcatttcccaagatcaccctggcctgccatgcccccatcctgtgcctataaaaacctcgagaccccagcgggaacacacaggcagcaggacgttgagaggggcaaatcagcagaggaacacacaagtggctggacgttaacrgggatgcagtgacaggcaccagcacgca

SEQ ID NO: 841178 - DNA, 631 bp, Homo sapiens
gcattgcgtgacatacctatcatttatttgtggtgagaacatttaaaatctactcttttagcaattttcaagtaaataatagttattaactgtagtcaccatgttgtacaatcaatctcttgaacttattcctcctgtacaactgaattttgaatcctttgaccgatctctcccctttcctacttcccctttccctcagcccttgataaccaccattctactctctgcttcagtgagtgtgactttttaaaattccacatgtatgtgagataatgcagtattcatctttctgtgcctgttgtatttcacttgttaaacacaatttacaggaagccattggtttggaccgagctcctgcactaggcccaacagactaaacctaaatggagttattcatgctaaagttccacaccaccaagctgaaattaagttgtttagctgattctcccagaaatcaggagagatagtagtcaaatccccaaacaggctagttttacctgcagaagggagtcccctctgctttaacttttayaaggaaagtaactttgaaacacccaatctactttttgttctctgtttctgctctctgtgtctctgtttccttttctggggataaagctaacctcctttg

SEQ ID NO: 841179 - DNA, 500 bp, Homo sapiens
gatactctcctgatatcctccctacatccccccaacacacacataccccaagccatttttcataattctggaagtaagttgaacwttaagaatgtttccacctgaaaaataagttggagagagagagatttccatctgtgttttgttggatcattgagaccttgctcaatagtttcctctctaaaagttttacagtctcatcctccaagcagttaattactcagtctcctgtgatccaagagcatttgcattcacccctattactggctcagccatcctatcataaaaattgctcaggtctttctgcccagtagattgctacccagagatatgtactgggctacatattgctctgtaaactcagtcacagcctggcacatagtaggagcccaaataatctcccattgaaggaattataccaggtgcctaggaaacaatacactaatacagaataatacttaggaatgtttttagcacaaaagagatggtttgtgtataaa

SEQ ID NO: 841180 - DNA, 581 bp, Homo sapiens
tttctccatgcctttactttgagcctattcatgtcattgcatgtgagatgggtcttttgaagatagcataccatcgggtgttgcttcttgatctagcttgacactctgtgscttttaattggaggcatttaacccatttacattcaaggttagtatcatatttatggatttgattccgttatcatgttgatagctggttattatgctggcatgtttgtgtggttgctttatagtgtcactggtctatgtacttcagtgtgtctatgtagtggctggtaatggtctttgcatatttagtgctcctttctgaacctcttttaagacaggtctggtagtaataaatactctcagcatttgcttgtctgaaaaggaccttatttctccttcacttagtttggctggatatgaaatttttgttggaaattctttttttaagaatgctgaatataggcccccagtctcttctggcttgtagggtttctgctgaaaagtgtgctgttagcttgatggggttctctttgtaggtgacctgccctttctctctagctgcccttaacattttttttctttcatatcaacct

SEQ ID NO: 841181 - DNA, 581 bp, Homo sapiens
tttctccatgcctttactttgagcctattcatgtcattgcatgtgagatgggtcttttgaagatagcataccatcgggtgttgcttcttgatctagcttgacactctgtggcttttaattggaggcatttaacccatttacattcaaggttagtatcatatttatggatttgattccgttatcatgttgatagctggttattatgctggcatgtttgtgtggttgctttatagtgtcactggtctatgtacttcagtgtgtctatgtagtggctggtaatggtctttgcatatttagtgctcctttctgaacctcttttaagacaggtctggtagtaataaatactctcagcatttgcttgtctgaaaaggaccttatttctccttcacttagtttggctggatatgaaatttttgttggaaattctttttttaagaatgctgaatataggcccccagtctcttctggcttgtagggtttctgctgaaaagtgtgctgttagcttgatggggttcyctttgtaggtgacctgccctttctctctagctgcccttaacattttttttctttcatatcaacct

SEQ ID NO: 841182 - DNA, 473 bp, Homo sapiens
tttgagtatgctaaatgtgcagctaagaagaatgtgtattctgtggttgacgggtggattattctgtacatgtctattagatccagttgctaaagtggtcagtttaaattcagcaaacattrttttgtttgttttctgcctatatgatctgtctaatgctgtcagtggagtattgaagtcccccactattactgtgtagctgtgtaagtctttgtaagtaaaaaagtagttttataaatttctgtgctccaatattagatgtgtatatgtttagatagcaaattctaattgttaaattgaattctttatattttttccttttttactgttgttggtttacagcctgttttatcagatataggaatagcaatctctgctcgcttttttttttttttctttttgtttgtgtccttgatctctctccaactttttcctttgagcctatggttgttattatgtgtgagatgggtctc

SEQ ID NO: 841183 - DNA, 623 bp, Homo sapiens
gttataaactgaaccctctgtggtgttttgtcagagactgaagcaatgattttaaagtgctttccattcttttgtatgtggggtgttttcctacataataaggcatcatattgagatcagctgtaaggaggtgttacacataaatattttaaaagaaagcagttatatttctagagttctaaaaaatatatcaagtgctaaatacactagttatgttcttcaaatcaaaagatactggttcttgcatctgggataagaaacatattcaaaaatgaaggatttgctgctagaaaccagaggaaagagtttgtcagccttctctcaaggactgagagcaaagcccttttggtatgagtgatttgaaagaaactagccatagagccaagattgatgtgtagcatttttctaatgctgttctccatgagaataggggtcaggaagaaacgaatatttaagtaactgtacacatgaataataaaacagatgggaaaatgtagtgtcatctattctgtcttgggggtgatagtgacattgtttttttttcttcayctttgtctttagggatgtggatgcaatgtgaacataaaagattgccttcttatggaaactgcagctaagtacag

SEQ ID NO: 841184 - DNA, 656 bp, Homo sapiens
aataatgtgcctgtctatacctaaagggcaaccgttctggtttttgtttttgtttttttctcttggcaggaayagttggaaattttaaacaatttaaatatcaactgacttatgttcttcttactctttcatggaaatgtcaagcattcatattttcaatgctaatgaacaaccaccaattgttttaatttcattattttctcaactgaaagagcacttacagagcacagaaataactgggctttctttttatatagatctcactggtaagcctgaaacaagtttagattgaaagacaaaaaaacctccaattttcccccctgaataggatctcttgattaaactgaccttctttattcacaccccacccccacccaccgccagtgaaaaaataggccccaaagagaggattttaaacccagggcttacaaggtctttgagaggttgctcaagtcacttgcttatctctaggaaggactgaattatatttgcactgtcagaagtccacctactcttaaaaatagccagagaaagttctgccaccttaaatggtaacaaactctaggagaaacggttttgctttctctcctgtacccaggcacagcacacagcacaccacagcagaaaacttgaattgcaatcattttcaaattcaa

SEQ ID NO: 841185 - DNA, 622 bp, Homo sapiens
aaacaaatcctggaaacacatcagaacagaatctcattaaagcataaatcacacaagacctataaaacaaaaatacragttaaaaaacaaaacaaaaaagtcccaaaagtacacaggcaacaaagagcatgatgaatgcaatggtacctcacatttcaatactaacattgaatgtaaatggcctaaatgctccacttcctaaacatatatgcacctaatactggagctcccaaatttataaaacaattactaataggcctaagaaatgagatagacaaaaacactgtaatagtgggggactttgagtactccactgacagcacttatgtcatcaagacagaaagtcaacaaagaaacaaaggattttaactataccctggaacaaatggacttaacagatatatacagaacatttcatctaacagccacagaatacacattctattcaatagtgcctggaactttctccaagacagaccatatgataggccataaaacgaggctcaataaatgtaagaaaattgaagttatatcaagcattctcttagaccacagtggaataaaactggaaatcaattccaaaaggatccttcaaaaccatgcaaatacatggaaattaaat

SEQ ID NO: 841186 - DNA, 622 bp, Homo sapiens
aaacaaatcctggaaacacatcagaacagaatctcattaaagcataaatcacacaagacctataaaacaaaaatacgagttaaaaaacaaaacaaaaaagtcccaaaagtacacaggcaacaaagagcrtgatgaatgcaatggtacctcacatttcaatactaacattgaatgtaaatggcctaaatgctccacttcctaaacatatatgcacctaatactggagctcccaaatttataaaacaattactaataggcctaagaaatgagatagacaaaaacactgtaatagtgggggactttgagtactccactgacagcacttatgtcatcaagacagaaagtcaacaaagaaacaaaggattttaactataccctggaacaaatggacttaacagatatatacagaacatttcatctaacagccacagaatacacattctattcaatagtgcctggaactttctccaagacagaccatatgataggccataaaacgaggctcaataaatgtaagaaaattgaagttatatcaagcattctcttagaccacagtggaataaaactggaaatcaattccaaaaggatccttcaaaaccatgcaaatacatggaaattaaat

SEQ ID NO: 841187 - DNA, 292 bp, Homo sapiens
tctccaagacagaccatatgataggccataaaacgaggctcaataaatgtaaraaaattgaagttatatcaagcattctcttagaccacagtggaataaaactggaaatcaattccaaaaggatccttcaaaaccatgcaaatacatggaaattaaataacctgctcctgaatgagcattgggtcaaaaacgaaatcaagatggaaaataaaaaattcttcgaactgaatgacaataaatgacacaacctatcaaagcctctgggatacacttaacatgtagtaagaggaaa

SEQ ID NO: 841188 - DNA, 582 bp, Homo sapiens
aggatccttcaaaaccatgcaaatacatggaaattaaataacctgctcctgaatgagcattgggtcaaaaacgaaatcaagatggaaaataaaaaattcttcraactgaatgacaataaatgacacaacctatcaaagcctctgggatacacttaacatgtagtaagaggaaagttcatggccctaaatgcctacatcaaaaagtccgaaagagcacagacaatctaagttcacacctcaaagatctagagaaacaagaacaagccaaacccaaacccagcagaagaaaggaaataacaaagatcagagcagaactaaataaaattgaaacaaacaaaaatacaaaagataaatgaaacaaaaagctgtttctttgaaaaggtaaataaaattgataggccattagcaagattaaccaagaaaagaagagagaaaatccaaataacctcacacagagaaacgaaacaggagatattacaactgacgccactgaaatacaaaagatcattcaaggctaataagaacacctttacgcacataaactagaaaacatagaagagatggataaactcttggaaaaat

SEQ ID NO: 841189 - DNA, 582 bp, Homo sapiens
aggatccttcaaaaccatgcaaatacatggaaattaaataacctgctcctgaatgagcattgggtcaaaaacgaaatcaagatggaaaataaaaaattcttcgaactgaatgacaataaatgacacaacctatcaaagcctctgggatacacttaacatgtagtaagaggaaagttcatggccctaaatgcctacatcaaaaagtccgaaagagcacagacaatctaagttcacacctcaaagatctagagaaacaagaacaagccaaacccaaacccagcagaagaaaggaaataacaaagatcagagcagaactaaataaaattgaaacaaacaaaaatacaaaagataaatgaaacaaaaagctgtttctttgaaaaggtaaataaaattgataggccattagcaagattaaccaagaaaagaagagagaaaatccaaataacctcacacagagaaacgaaacaggagatattacaactgacgccactgaaatacaaaagatcattcaaggctaataagaacacctttaygcacataaactagaaaacatagaagagatggataaactcttggaaaaat

SEQ ID NO: 841190 - DNA, 585 bp, Homo sapiens
tttgtgttcctggaacctggttccatgccttgcacatagtgcatgctcaatgtatatttctcaagtgagtgawttagtgaatgagttctatttctcagtttgaaagagcttgctagttgatgggaaatgcctgtaaaacactgctggatgtgttaaatgcttccagaagttcacagaacatgcactcagaggaagatattactcccccggctcgttcatacacattcctcatcccttgctttgtttttagaaactttttgtagtatcattcacagacaatggtgttgttttagaatttaaagtaatatttattaagcagtcctacacctgaatccatgcttatttcatggattaaccaacctttctctgtgcagagatgtctgtactctctagtagcctggttgtgaagatgtccttcgagtaaccttaagaaagaaatgtggaaatgccatctttataacatgactttgtattatctgtgagtatgaacagaaacatattttggtaagtttttccccaaataaaaatagatgtcttattttttctttttttaaattagtaattcactaataatcaaagaaaaaa

SEQ ID NO: 841191 - DNA, 524 bp, Homo sapiens
aaaagtaaaaattaatgggaaattcaagacaattataaccaggaaatcaagagagaaaactcaacaaaacaaaaaactggtyctttgaaagatcaactgatgaaactacagtcaggctgtcaggaaaaaaaaagtaagagagaagaaactaataactaatattagaaatgaaagaggggtcataactattgatgctgtggatgttagaaggataataaagcaatattatgaataactctatactgacaagtttgaaaactcacatgaattatttgaaaaacacaaattactaaaactcacaagtggagaaaaacataatttaaataggcctatatctaatgaaagaaaatgaatcaataattaataaccttccaaaaaggaaagcaccaggtccaaatggtttcactagtaaattttaccaaatacttaaagtgtaaatggtatcaatactctaatctcttccagaaaacaggaggactacttcctaactctttctatgaggacagcattaccatactgccaaa

SEQ ID NO: 841192 - DNA, 524 bp, Homo sapiens
aaaagtaaaaattaatgggaaattcaagacaattataaccaggaaatcaagagagaaaactcaacaaaacaaaaaactggtcctttgaaagatcaactgatgaaactacagtcaggctgtcaggaaaaaaaaagtaagagagaagaaactaataactaatattagaaatgaaagaggggtcataactattgatgctgtggatgttagaaggataataaagcaatattatgaataactctatactgacaagtttgaaaactcacatgaattatttgaaaaacacaaattactaaaactcacaagtggagaaaaacataatttaaataggcctatatctaatgaaagaaaatgaatcaataattaataaccttccaaaaaggaaagcaccaggtccaaatggtttcactagtaaattttaccaaatacttaaagtgtaaatggtatcaatactctaatctcttccagaaaayaggaggactacttcctaactctttctatgaggacagcattaccatactgccaaa

SEQ ID NO: 841193 - DNA, 649 bp, Homo sapiens
gaattctccttacaactaatattggtaataaaacatttggcagactttcggttgcctttaaggtaaaggagaaggatctttaaacccttaaaccattcagatgcctcakatctctgctaacactaacattttatgcctctatgttaattaagagcaacagaaagatactggcaagagcaaaaattcatctgttcaagttttatagcccatctattttcaaattgatgtgatgagatctatcaattaacaaaatacaaaatgagatgaagacgatctaaagcagaaacataaatacaaataaaaatatgtgagtcacaaatgcaaaccatgtatattcttttcgaatagccacatttaaaaagtaaaacaggtaagattaattttaatgatgttatatgacttaatatatatttaaaatattatttcaacatgtaatcaatagacatggaatattaataaactttttgtactatatctttgaaatctgctgtgcattttctacttaggctgtacctcaattcttgccaaccacatttaaacgttcaataggtacatgtggctactagtttggacagagcaaatttagggttctttctccagaaattctgtcaacagaggcatgaagatcaaagctaagacatgaacatca

SEQ ID NO: 841194 - DNA, 625 bp, Homo sapiens
catatgttattttcgaaggaatctgatgacagcaaatattagtattcacattagttgtaaataaaacatgttttttaaactgatctcaagaccttgtgacacatgtaagaaaggactaygatgaagctagctttatttggactcatcttgcttgtctgaggttgcaaataaatgcaaatgtatgctatatttattatattatattgttcatattattatgttccaaatgcccagtcagaacttttccacataaatattaactagtcttaattatcaccttgcaaagtcctgcccgttcttgacagtgtctgtcttatttgttcaatagttattccttctttttaatgtttataagctcctgtgattttcaagaaacatttgagtttttagtgaacttgtaaatgaaagagctctcatttcaaaataaaaccaaaatcccaaatcatgtaggtgttcataataattacatttatttgagcatgaacatgaacattcacgtttagctttcaatttctgtaacaaatattttttaattcaagggtcgttaaagagttcattcagagtactaaggataatctagttaccacagagtatttcttacttcttcactttagatgctgctatt

SEQ ID NO: 841195 - DNA, 601 bp, Homo sapiens
tattgaacaaatatatattattcttgctagttgtgatctcagaatmcactgattacccatttattcctgaccaaataataccctaaagtaatgtgctgttcccttatcagtgttttactatggaaaaacacagtgtggtgtctaaagtaggttaaacatcactgtcatgtaataaatcattatgctcttcttgctattacattctttattctccaaatatgatttatattacaaaggtctcaatgcatttctctggaaaatacagctttcatctcataaatcttacatgatcacctattataatgtttcaaaaaacgaaggatttcacatgactctattgtgttgttagcagcagtttttaaataaacaggaaagaatgtaataggaaagaatatatcatttgcactgttgaggcccccaaaataaaacacaaatcctgcttctgaataaacttgattattatggaggtgcaatgtgtacatgggaatagcacagcagcaaaggcaaattaaaggaacggaattgtaagatttcaacatcactgttttggggcagaaaacatagaggattgggaaaagtttcctttgagttgaagtgctta

SEQ ID NO: 841196 - DNA, 514 bp, Homo sapiens
agcagtacttactttctttttttttttttttgagatagtgtctcactctgttggccaggctggatgcaatggcatgtgttggctcactgcaacctctgcctcacaggttcaagcaattctgtctgcctcagcttcccaagtagctgggattacaggtgcttgccaccgcgcctggctaatttttgtgtgtgtgtgtgtttttttttttcccagtagacagggttttgccatgttggccgagctggtcttgaactcctgacctaaggtgatccgcctgcctcggcctcccaaagtgctgggattacaggcgtgagccaccgcgcccaggccgccagcagtactttctactgtgctgtttttttttttttttttttttgagatggagtctcgctctgtgtcacccaractggagtgcggtggcgccatcttggctcagtgcagcctccacctcctgggttcaagtgattcttctgtctcagcctcccgagtaactgggactataggtgtgtgccac

SEQ ID NO: 841197 - DNA, 617 bp, Homo sapiens
tgtttaatcatcgacaaaatcactgacatccaaacctctgttcttcacccatgtgagatcttgttggagctgtgttcagggttacataaagctgtgaatgaaaacggcagagaagagaacccaaacagataaacataacagcatcccagggacacaaacagctaaaacaggcagtgattacaaccaaagtatttatatgaaagaacaggttcaaagatgacatatcaggacagatttccatcactgcagaccagtgatagaaggctccagactggtttaacgtaggacatgaacccatgttttgtcatctgtgtctcctgagccattggaaaaaagctacaagaaatttttgtgtttattgagacatgaacaatgcattgggaggacttgtaagaaaaacgaagtcactttggaaaaactgatttactgtactttactttccttaaatacgaattaaaccagagaggccatgccagctacaaatttactaagccataccaaattcttaargcaaattgatagtttcatagtcctacaaacggatccttgcccagaggaaatagtttattccttagaagcttcaccatagccaaatgcacagattgaaaactatttgg

SEQ ID NO: 841198 - DNA, 651 bp, Homo sapiens
tccgcccacctcggcctcccaaactgctgggattacaggcgtsagccaccgcgcccggcctgtctgtatgtgttttaaactgagtttaatccagtgattatttatatatttggatttttaaatatttggatttttaaatcattttacttttttatttctctatgttccactttctcttaatttcctctcttttttggatgattaatttttattatgatgattgttattattatttagttctttaattttccagctatagatttatttttatttatttatttttttattttgagacggagtctggttctgtctcccaggctggaccactgcaacctccgccttccaggctccagcaattctcctgcctcagccttcagagtagctgggattatagaggtgtgccaccatccccagctaatttttgtattttagccggggttaaggtagagacggggtttcgtcatgttggccagactactctcaaatacctcaagtgatccgcccgcctcggcctcccaaagtgctaggattacaggcctgagccaccgcgcccggcctagacttaaaattatactgtataaagtttgtaataatgttataaatctagattctggaaattatataacatatagtcattatcttcagtatttt

SEQ ID NO: 841199 - DNA, 546 bp, Homo sapiens
acatagtttcaggaaaaacgttctcagtcctacatgaaatagttttctacacaaatacaaaattgtattaccatgaaacacacatgcaacatttgtggtcagaatggtgaaactgcatcatcaagaaattagtaaattacattaaatttacacttttttttttgagacagggtctcgctttgtcacacagactggactgcaggggcacaatcatggctcactgcagcctcaacctctgtctcatgcgatcctccctcctctcagctgccctagtagttgggactagagatatgtaccaccacacccagcaaattttttgtacaaagagggtttctccaagctgctcaggctgaactcctgggctcaagtgatctgcctgcctcagcttcccaaagtgctgggattacaggcgtgagccactgtgcccagctgtacattttcatcaaagtgattgtcttcataaggggctggcatttgaattrtgtttcaattacccagagcattcctttaacacaaaaggcctctatctccagcaatgtctgttaa

SEQ ID NO: 841200 - DNA, 598 bp, Homo sapiens
acaaaaaaaaagaggataaaatgtaagcagtattttttttttttttttgagacagggttttggtctgtcacccaggctggagtgcagtggcacgatctcagctcacctcaacctccgcctaccgggctcaagtgatcctcccgtctcagtctcccaagtagctaggattacaggtgcacactaccatgcctggctaatttctgtattcagtattctttcttggtggttgtacataggcaagcacagtgacaaataaccctcctttcttgtagagccgtggttctaagtgtggtccctggactagcagcatcagcatcaacgtcacctggaaacttggcagaaatgccaactctcaggccccacctgactttccaaatcagaaactctgggggtggggtccagcaacccgaatttcaacaagacccccaggtgattctgatgcacattcaagttaaggaaccagtgttctagagaggccagataagtacatgaagccyggactggggtttctcaatatcagcactattgacatttggggctcaataatcctttggtgtggggcataacaggatactgagatgcatccctaccctctacc

SEQ ID NO: 841201 - DNA, 553 bp, Homo sapiens
atgacctacagggtgggtaatgttacacaggctttctgagagagaacactcagaatttccagagtaaatytgataggttttaagtgactttagcagtaatgattacatgctggcatttgtattttttagtactgggtagcttagtcttctatagttccttggttaattagcagcttcaaatattagactcaaatagctggaaaagctggctgggcccgatggcatgtgcctgtaatcccaacactttggggggccgaggtgggaggatcacctgaggtcaggagtttgagactagcctggacaacgtagtaaaaccccatctctactaaaaatgcaaaaattagccaggtgtggtggcaggtgcctgtaatcccatctacttgggaggctgaggcaggagaattgcttgaacctgcaaggcagaggttgcagtgagccaagattgcatcattgcactccagcttgggtgaaaaaaaacaaaactctgtttcaaaaaaaaagccagttaaatggttcatttgaagataaacattcttaaacacttattagattt

SEQ ID NO: 841202 - DNA, 598 bp, Homo sapiens
tagccttctgcgtagctgggactacaggtgcatgctgccacacctggctaattttttaaatgttttgtagagatggggtctccgtgtgttgcccggctgcttctgaattcctggactcaagctgtccttctgccccggcctcccagaatgctgggattgaaggtgtgagccaccacacctggccgaggttgagttttgaaggacaagttaaagtcgatggggaaggtgtgttgtgtgcggtagaggtgagtaggctataggacattctgagtggcagaaggtctgagataaagcaatgcatttgggaaaattgcaaaagagttcttaacattgtcaagttacattaacattgaatatagtattatattcaaaaatacaaaatatttttgagcaagacaaattgtccaaaacataatattgcacttacgttggggtcctcctaactcactctaaccaaccataaaaacgtttgttttgcataatggcttcagatttccatgatatttacattcatattgatgaattcaccaaattcacctgcyagggaatctctttattgggaattctccttattgggccattttaactatagcactaa

SEQ ID NO: 841203 - DNA, 388 bp, Homo sapiens
ttcaccttctcctttccaaatcctcccactatggcccgttaagcacaaccctggagctattgtgactttctaggggctgggagacaactgaaatttctgagagcgctgagctgatagggtcctattagagtgcctggtgcacaaaacctgcacctttggaatattggggtaatcaaagggagacaggcctgctaggtaggaatcccaccaccctgagttgcacttctcttgtgtattcaaaaattcaatatacaaagtgggtttttctctctttttttttttttttttttttttttgctgaataagatattttaatctgttstaattaaaaagtcaaagtagaatgaacaggaggtttaaaaacaggtccccatgccaacctcaagca

SEQ ID NO: 841204 - DNA, 497 bp, Homo sapiens
ctggaaaggattggaaggggaaggtcttgaggagaggctcctggtaggttttttctgatcaatagtcccaagggtcaaaaatatcaacagtgacagtcagtgctgggatcattctccctcacagatctgaacccttgagtatgttgattttaatgacagggacgttctttatccagccttatgcctgaccaactctgattcatccttcaagtgaggagatatctcttcaccctcgaagctttccctgatgcacaccccccggccaggcctgccccagagctccccactgccaccatcacttccccagtgcaggcccttacccccgtctggcctgttgggcttattgactgaggcccccaccctccccagccagcagcatgcctgccccacaaagstatccagcaaatacagattgagacacaaatggatgaaagacatggaaggaatgtatggatggaatggagggatggagtggacacatggaatggatggataga

SEQ ID NO: 841205 - DNA, 607 bp, Homo sapiens
tataaagtaaaaaaagttaaagtaagctaaggttaatttattattaaagaacaagattgttttgtaaatttagtgtagtcttctaagtgtacagtgtttataaagtctacagtacagtagtacatggtaatgtcctaggccttcacattcactcaccactcactcactgactcacccagagcaacttctagtcctgtaagctctatccataactgctctatataggtatatatcttttatcttttatactgttattttatcttctatactgatatcttttaacttttatactgttatttttatgtactttttctttgtttagatatgcttagatacacaaattcttaccattgtgttataactgccttcattgtgttacaacagtattcagtatagtaacatgctatataggtttgtaccctaggagcaataggctataccctaagcctaggtgtatagtaggctataccatttaggcttgtgtcagtacactgaygttcgcacaaggatgaaattgcctgaggacacatttctcaaaatatatccccatcattagtaatgcatgactgtatattcaaaggaaataaaatcagtatgtcaatgagat

SEQ ID NO: 841206 - DNA, 652 bp, Homo sapiens
ttgaaaatattattaaattaaggcttttgatatggggagattatcctgaaatctgaygacagtctctctatatctggtagtatatcttgccttaaagtctactctttctaatgttgcctaacacctccaggtttcttaagcttactgtttgaataacttttttcatcactgtaatttcaatctgtctttaatttaaagtatatcacatgtagacatcatagaattggtgtgacaatctctgacttttatttgtagtgtttagtctatttacatagaatattaactattgatttttttatttaggtgtaccattttcctgtctctttaaatttgtcccatctatagtttatcttctatttccctttcctatcaccttctagataaactaaatacttttaagtttttattttaattcctttattgacacattagacatacctttttggattattatagtgtttgttattgagattatactatgcacccttaaatttcacagtctattaagagttgatactgcaacacttcacataaaatgtaagagccttggaaaagtacacttacatttgtgctcctatccactacaccatcatcacataaattaaatctatagatgctataacccccagaatatgggattatagtattttct

SEQ ID NO: 841207 - DNA, 583 bp, Homo sapiens; identical to SEQ ID NO: 818153

SEQ ID NO: 841208 - DNA, 313 bp, Homo sapiens
gaagtaagtgcttacttattaataataatattgaatgtaaatggattaaactttccaatcaaagtacatagagtggctgaatggatgaaaaaacaagacctaaygatctatttcccacaagaaacacactccacctataaagacacatgcagactaaaaatgaagggataaaaagagacattccatcccaatggaaaccgaaaaggagcaacagtagctatacttatttcagacaaaatagatcttgagacaaaaactgtaagaagacacaaaggaggtcactgtataatgataaaggggtcaattcagcaag

SEQ ID NO: 841209 - DNA, 621 bp, Homo sapiens
ccactgaaagtgcacctgagcggaaaagatgacatcaggcatggtattcaaaaataatgttaactcttyggaatgaagctataggaactaaaatggatgacgattctaaaataaggatctgataaatgtacatggcttctgaggagttgtaaagcctgttagatacttttgtacactgctgtcgtggcaatagaaagatataagatttaagcataaagtcactggcacacactgatggaagacttatgaggaagcctgatgccatggagaagagacaaatatacctaaattaaaaataagacttgagaacatggatgggagacagaaaaaattagggattggcttcctaccaccaaaggattgccattcaaccatgcgggtaaacatttagaattacacatgaattgaaagaatcctattccttgaggctttaagacaatttgatctaaggtttcaatacattcctaatcaaaatgtcagcaagttttttgtggatatctacagaccgatttcaatatttatatggaaagtggttagagaatagccaaagcagttctgaaaaataaaagtaatttcttaaattatttctttattcaatcattcatttacattatatattta

SEQ ID NO: 841210 - DNA, 588 bp, Homo sapiens
tgcatgttcctgacatatgataagcaccctatgaatgaccaacctcatccctgacattcacctcctcattcagtagaacacatactcacagactcatataaacaggatcctaagagtttgtacttagaagtagaatataataagtacaaatctacacatcttaaattaacaaaagctagtgatttattgtaagctgaataagagatcggttgtgtagtgcttagaataggtgcttatccaatccatttcaatgtaccttgctttgaatgtgtacaatatgccaaacaccatgagaagatgacactttttcagtaatattaaaaaatgcttcacctctcaatgaagcaggagtaggctaaatgcgttctgtttcacctatacctgctaaattaattcatcatgaaggactataaacacttgaagtaattaaataaatgaccttctaatctctattagcgattacttggtggcagggccatggccagcacttcatctacaaagatttatgatgttacctttcaatttttctttaatttaaactcaytgtgactcattgtgtcattgagactaggtgttcctgctgacatt

SEQ ID NO: 841211 - DNA, 614 bp, Homo sapiens
gcacgtggacattgagactgtagaagagctctcagaggaaattaatgttgctcacctgaagaccacagcggcccacacacagtcattcaaacagccgtaagtcttatttctctttggattgttgtttttgtagttttgtaaccagaaacaaaatgagatgttctgttcaggagctctgggtaactcatctggttccttcttcctctagctttttttctgattagtatagatgaggagaggaactagaatttgggtaattaattttctttggtcgttggtaggaggcagtgtgtaaatgtgaataacatgcttttggagcccgatagactggtattataaaatattagttttgctagtttgtaggtatttaaccttgggcaaatctttaatctctctgaacctcagattctttacctatgaaatgaggaaaatgcccccatttgaagtgttaaatgaggtagtatgtgcaactagcataataactgatataagtggactactcarcaaaggttagtttcttttatcatttaagaataggcattacattctaaatttggttactttactagttgaacaggtgagatacaggtaggaaaatttttcttcctgtttca

SEQ ID NO: 841212 - DNA, 621 bp, Homo sapiens
atgacatcgtattcacatttttttacttcccccttttccccttctgattattaaagtaatattaatgtagaacacttagaaaatatcaaaaagtatgaaaaaattgctcctgttctgccaatgttagcgtaactgtaggcatggagatattttccttctggtctttaagttttttttaatcctgttttacatttaagttttcagaagcaatatgaactactatttttttttttttttgatgtataggaagctctagacattcatgcagttgatgggacaacagaagaatcttctagtctccaggcatcaaccacaaatgactcaggtattataaaatagtataaaaagagttgtatttgtggtttgggctccagcaatgaaacatgcaacattcatttgtctgtagtgtacagtagcttattttattactatttattttgggtgtaggttacagagcaagaatttcccagttggaaaaggaattgatagaagatttgaagwctttgcggcacaagcaggtgatacatcctggtcttcaagaaggtaatagactagcgacttctttttttttgttttctttttttctttcttccctactgtttctcctctttttcctctctc

SEQ ID NO: 841213 - DNA, 588 bp, Homo sapiens
ctcactgcaagctccacctcccaggttcacaccattttcctgcctcagcctcccaagtagctgggactacaggcacccaccaccacgcccgctaatgtttttgtatttwtagtagagacaaggtttcaccttgttagccacagtggtctggagctcctgacctcgtgatcctcctgcctcagcctcccaaagtgctggaattacaggcatgagccacggcacccggatgaaaagctgaaaattctaaaaaccagagtgcctcttctcctccaaaggattgcaactccttgccagcagcagagcaaagctggacggataatgactttgacgagttgacaggagtaggcttcaaaaagtcagtaataacaaacttctctgagctaaagggggaggttcaaatccatagcaaggaagctaaaaccttgaaaaaagattagacgaatggctaactagaataaatagtgtagagaataccttaaatgacctgatggagcagaaaaccatggcacgagaactaggtgatgcatacacaagcttcagtagtcgattcaatcaagtggaagaaagggtatcagtgattgaagatca

SEQ ID NO: 841214 - DNA, 549 bp, Homo sapiens
aaaaaaaatggataaatccccggacacatacaccctcccaagactaaaccaggaagaagttgaatcactgaatagaccaataataggctctgaaattgaggcaataattaatagcctaccaaccaaaaaaactccaggacaaggaggattcacagctgaattctacagaggtacaaagaggagctggtaccattccttctgaaaatattccaatcaatagaaaaagagggaatcctccctaactgatttcatgaggccagcatcatcctgataccaaagcctggcagagacacaacaaaaagagagaattttagacccatatccctgatgaacattgatgcaaaaattctcaataaaatactggcaaactgaatccagcagcacatcaaaaagcatatccaccaagatcaagttgacttcatccctgggatgcaaggctggttcaacatatgcaaatccataaatgtaatccatcacatamacagaaccaaagacaaaaaccacatgattatctcaatagatgcagaaaaggcctttgacaaaattaaa

SEQ ID NO: 841215 - DNA, 559 bp, Homo sapiens
ctgcatagtggtactgtcccaattccatcgtcaagcagtccatgaaatccatgatagatgtggcagagctgccaagccatgtgaaatatccatccccagaatgcactctgstatgggacagacatatgcagtgtataactatggagccaaacggctgatgcctaggtgcagagatacaggtttcactttcactgaccggcctccatagccatctatgtatgcagctttgcccagaaacttatccaggttcccacagacgaggctacaattacttcagcaacttccctaattaaacacaaaaggctctattcctctgctcatttgcaagtaatccgtgagctggagcatccaggtgggactgggtctagcggctaaccctacccacttatggacatttctcagaattgctgctccgaggataattgcctccacagtggggcagaacaggaaatactgtcagctccttagttccagaggccaagcatccaggggaggtgggagctccccaggaggctgctgacattgtttacctaattcccacaactcagttgggatatag

SEQ ID NO: 841216 - DNA, 626 bp, Homo sapiens
gagagtcctcgctagagcaatcggaaaagagaaagaaataaagcacatgcaaatttaaatggaagaawccaaattatcattgtttgcggatgatctaatcccgtacttgataaaacctaaagactctaaaaaaagtgagaaccaataaacaaattcaataaagtcgcaggatacaaatcaacatccaaaaatcagtagcaaacagtgaacaatgtaaaaaagagatcaaataagtaatttcatttacgatagtgagaaataacattaaatacctaggaattaaccaaaaaagtgaaagatctctattatgaaaactataaaacactgatgaaataaattgaagaggacatcaaaaagtggaaagatattccatgttcatgaattgagataatcgatgttgttaaaatgtccatactacccaaagcaatctataaattcaatacaatccctatcaaaataccaattacattcttcacagaaatagacataacaatcctaaaatgtatatggaaccacaaaagacccagaatagtcaaagatatcctatgcaacaagtacaaaactggagaaataacattacctgccttcaaattatactacagagctatagtaaccaaaacagcata

SEQ ID NO: 841217 - DNA, 478 bp, Homo sapiens
tagtaaatacatttttcatttatttttgaatgaataaatttaaatcaggattatatatatacatatgtawgtatatttgattcattcatttctgaactaatatatgccagatcctgttctagggggtccatcctacctattcagaacaacattcctataattaattcctcacttgttgcgtagacttgctccatgcctggtatggagaaggtgcttatcagtgataattggtatcatgatcacaagtccctgaagggtaagtagattgccttaggcagcatagttaataaattttgaatccaggatggaacctaggtctgatttcaaagtccaggtcttttttccagcagattttacgtgtaaagccttccactctaaggaacaaaatgtcctcaagcactctttgttagttaagttgaacttctatattcacagtcattaaatgtatcatattatggagagataataaaatagcaca

SEQ ID NO: 841218 - DNA, 561 bp, Homo sapiens
atttgatcactttttctgttattcacaatgtgacagctacagagtatacatacttttaaaaataaaactttatttcaaaatgattagaggttcacaaaagtaaaaagttatatgyggaggtcccatacacccttcacttctccacctccactgttaacaccttacatgactataggagaatataaaaaccaggaaattgacattgctacaattcacagagcttattcagatttcaccagttatatacactcatgtgtgcgtaattttatcctgtgtagcttcatgaaacttccaccatcaagatgcaaaactgttccatcaccacaaatatgcccatgttattccttcatagtcatacctgtcccattcttggcccccaaatagtaactcctggcaaccaggaatctgtgatcctttctataatttcattacatccaggatgttatataacctttcgaaactggcttttttcaatcaacataattctcctagggcctacccaagttgttgcatgtatctaatagttcatacctgttcattactgaatagtattccacaata

SEQ ID NO: 841219 - DNA, 611 bp, Homo sapiens
ctacctgttaattaaaatgaaataaaatatcctagtttatgtacttagctattatttagagttttagaacgtttttctgttctgacatattaactttatatamaatataactgtagggaaatcaagcgttatttgtaaaatatatttcagatttgtgacatgactaataagagatttaggatttttaaagacacttatgtcttaaaactatgtattaagaacatctaaaatttttgtttaaatacattaagcaaggaatatagaagatgcgaagaattttggaaatttaatgaagtaatgtttataaggtaatgcagctagaaattgtgtggttttataaggcaaacttttctcaataagaagcagtttaataacttatcaaatacatattatgaatatgtgtttcaattttctgcattttgtcaaaggaagggagaagagttgattgataatcctgactgatctttttagcaattctagtatataaacaacactcatcatttttaattgacaaaaatttaactaaatttgaaattaggattgctaatgaatcacaatttattatgaaccagcagctattttatgttttccaaacacctgtgttaattttc

SEQ ID NO: 841220 - DNA, 611 bp, Homo sapiens
ctacctgttaattaaaatgaaataaaatatcctagtttatgtacttagctattatttagagttttagaacgtttttctgttctgacatattaactttatatacaatataactgtagggaaatcaagcgttatttgtaaaatatatttcagatttgtgacatgactaataagagatttaggatttttaaagacacttatgtcttaaaactatgtattaagaacatctaaaatttttgtttaaatacattaagcaaggaatatagaagatgcgaagaattttggaaatttaatgaagtaatgtttataaggtaatgcagctagaaattgtgtggttttataaggcaaacttttctcaataagaagcagtttaataacttatcaaatacatattatgaatatgtgtttcaattttctgcattttgtcaaaggaagggagaagagttgattgataatcctgactgatctttttagcaattctagtatataaacaacactcatcatttttaattgacaaaaatttaactaaatttgaaattaggattrctaatgaatcacaatttattatgaaccagcagctattttatgttttccaaacacctgtgttaattttc

SEQ ID NO: 841221 - DNA, 618 bp, Homo sapiens
tattactttataaaattgatgtgtttttgtcacgataaaggggttgagccaaatcagattttatggctcttaattgcttccttggtaaatattaaaaaacaaaggcrgggggagcaatatcctctgtaaggcatgagctgaatatgtgaccgtttcttgaaaaatcaatggaaagttcctaatctactgtaaagtctttcattttcacccagttagaattctgcttatagtcagcttctgcgactcaaccaaggagtcattaaacagacggaacacaacatcttagagaacaaaagtgcatggaatccaattagagtttggaagtgaaagtgacttataattaaacagaaaataaccaaataatgacagttattgggcatttgagtgtagtctgtccatttttaagacttcctatccaaagaatttggttatgttttatgacaagagaggtggagaaaaatttaggctcttctggccttccttaaaatccattgaacacttaaaatccgttacacccttaaaatccattacacaggagaaacttttttaaaaaaaattacattttaaaggctcttctgttgctttcaaagtgggttgtaagacagaatagccttatgc

SEQ ID NO: 841222 - DNA, 472 bp, Homo sapiens
tcctgggggcccctcattcctggtccaggacatgtgtccaggctaaacccagtcccactgtggctctgtcatacctttcttcactgtttagcctgagggctgggaagagattggcttctggggaaactcagtgtctgttattgaatgcacatgcccgggtactaagagctggctccgccatgctgctccccactcatgcagagcaagcattgctggttaggtccagaaggggcatcagagagtcctatcctgatcacaaagcaagtgagtagggaaatgagggctggatgtcagcactttaagggctcccccttctctcccatgtccttcctgttgcagtgctagaatttccatcctatagagaaggggtttagggacaacaactcaacaggggagggrgcttgaaggtgtatttgcatataatttatttgatattgaggaacactaggtgtccgcattaaggaatgagatg

SEQ ID NO: 841223 - DNA, 570 bp, Homo sapiens
gaccttgtcacatgatgatgtcacatggcaatgtcttaaccatttcttagcaagggagatggtattaccatgatctgtttaggttcaccaagattcacccttaagaactgaagaagggccctgtcgctagacattcagactctaaaaggctgaacaccaaaacagaatcatatcttgggatgtgtaagagagttgggaatagacaaccaatggtgctgtctctgaaccccatgtctttttgttgctgcataaaaagccagaaaatcatgtttccgatgagtttggagttaaggggaggggctatggttgtttgctcagaaaaaagccatctcatcccccctccctggcatctttctgatctgtcctgttctgtaggtggaatgttcccacctttgtttgcctgttcagacgtgtttgtccttccattatttttccrgctggattgccagcagaatgcagagcagcctggagaaatgaaacagagctgacaggtctcttaatgaaagcttgtttgcacactctgcctctcctgtgatcgctctgtgcctgagagcctctaggtgtggattt

SEQ ID NO: 841224 - DNA, 515 bp, Homo sapiens
ctccgtctcaaaaaaaaaaaaaaaaaaaaaaaaaaaaaaaaatttaaaaactaaagacagaaataaacaaattcacagtcataactggacacttttaacatgmcttctcattaattgatagaagaaatagacaagacaattagttatttgaacaacattattaactgacataactgaacttgtattttcccagtggttccataataaatattattttcaaatttacatggaatgtttaccaagatagatcatatcttaggccaaaaataagtttttattaaatttaaagaggttacaacatttcagagtatgttatatgagtacaatgaagctaaaatacaaatcaaggagatatgtataaaatcctcaaatatttaaaaattaaataattcacttctcaataacttatgagccaaagaataaaccacagggatattagaaaatattacacatgaattgtaatgaaaacaacatatcaagctatagaggatggagccaaagcagttcttagagga

SEQ ID NO: 841225 - DNA, 547 bp, Homo sapiens
aaaacactttgagtgtatttttatggaggtaatgattaaaggcatgagtctgagcaagagaagatggaaatatggatgtatattgtttatctattgctgtgtaaygaattacatcaaacctagcagcttaactcagaagtctgaaaacagttgagctgggtggttctggctaacggtctctcatgaggcgcccatgaaaagctgaccagggctgttggcatctgaaggcttgactagggctggagaatcaccttccaggatggctcactccagtggctgatggctggaggcctcagctccacaccacatgaacagcgtggatagctgcttgagcgtcctcatgatatggttgtcagcttcctccagagtaaacaacccgagagagagcacaagggacaagtctcatgtcttttatgaccttgctgtagaagtcacataccctcacttctgtattctactaatcaaacagactgatcctgatacaacatggaagacggttacacgggggcatgaataccaaggggtagggaacatttggtgcattctc

SEQ ID NO: 841226 - DNA, 650 bp, Homo sapiens
cctgggcccaaagcttttggccaggtaacacttagcactaatgtgccatgccatrcactatcctaggtgctgatccccattcacccatttaagtccaccaagcacccttggcaggtattgttgctatccttatttgcacatgagaagctgagacatagagaagtggaggaacttgcctatgtcacaaatcttataaatggcagtcaggaattgagcccggcagttcagggctctgaagtctatgctgcgttgcctctcttcacaaccgtggcaacaatacctgcacagcagctcccctggagaatgtgctctatgtcaagtgctttatagaactttctttatttaatcctcacaaaaggcaaacggcatgccttcccgcaccaagcccctgacaccctaagctcgctcccctcacagggtctttggacttcacaccccatgtccctatatctgacccttcccaccacacttccttcagggctctgtgtcacgcacatgcgcagagggccttccctgaccacctgatacaaacagcatccctgccccacctgggctgcactctctagccccttatcctgctttagttttttacttagcacgtatcacctcctgacatattataccgcagttcatcaaatataagactccat

SEQ ID NO: 841227 - DNA, 585 bp, Homo sapiens
tagctccctcggatcccttctgttcctgagaagtagrgagtgcgccgatgtaattctgtgcaggactccggcagccggcaggggttctggtggcatctatgtcccacgttttaaagcagaggccccttacagagatggtgcaggagggtgaatggaggcagggaatgagaagttttcctgaccctccctcccttaactccacccccaggtctctgcctgcacgcccctcccctcctccagcttggcactggctgctcctgcgtgctgggaggtgcccccctctcccgtgcccgcccgaagaaccaggcgccccagtgccctctccgggagaaagcgtgcccctgtcggcgagcctgttgccaacgtatggttccgagttcccaagagcagaggccagctggaaggggttttcagtttgactttggcctttctcacggtctcctcgctcttcgcctgcttagcaggggcctctgctgcggtgacagccaaggccacagccacccacgcaggacccgttcactttcccctccgagcttacttgtctttctaccctaaggggctgctgcggccagagcagcctatctg

SEQ ID NO: 841228 - DNA, 481 bp, Homo sapiens
catcttgatccacctttttttttttttttaagtggkgaggtaaacgccaccctatggtcttttgaggaaacaaatgcattggtgccaggtgagaggggctgcaccaagtcactgctgcacgaggaaaccaccttgtgggagaccagccccaggagacagcagctgcccacgcatgtacctgtgtgtaccctccctggtctcccttcactaggtgcctttcccagccttagccctgctgcattgacagcatcggctgcagggcatcgtccattccgctgacccctggctccttgccctggggatccagcttttccctttgtgagatcagaatcctatgggatttttgtgaaacaaacaagtaaacaaacaaacaaaacaaaccattataagaaaccaggagaaaataaagggaagatatgcaaaccacaaaagtaataaaacaggtgagctgtaggtgcacagatttctgaattttcagtga

SEQ ID NO: 841229 - DNA, 611 bp, Homo sapiens
aataacatgtgtatgcttgcagagtttctttatgcatatacaaacaggtgaaaatatatttttattttctcccccttttttgcacatatatactgctgtataccttacctttttcacctaacaacataccttggagatctttatcagtacataaaaaatcctcactttcttgtatagctgccctttgtgatagggcatgataataccacaatttttaaaaatcgtctgctattgatgggccttcagtttgttttcaaacttttgctaatccaaatgatgttgcatcaaaaaaacttgtgcatacattattttgcatatatgtaagtattcctgtgggataaactcccaaaagtgtaactgctaagtcaaagggagtacgtggttgtgatattgactgatttggcaaattgccctctgtaagtgttgcattaatttataccaccaccaggagtatctaagagtgtcttttccccacagctttgccaacagagagtgttatcaaatttttggaattttgtcagtctgataggtgaaggttatctcggtgtggttttaaaatcatccttattgggctatgattttaatmcaacagaatggactcattttagtca

SEQ ID NO: 841230 - DNA, 604 bp, Homo sapiens
ttggtttggtcaataaccatcaaatctaagtctaaggggaagytggatgaggagcaggatatttatttgcatgattgtaaagtgtctacccttggaatgcttctaacttacacagggaacatgagagagtgcaggaaccagatagcatcttgactgagtgaacgcaattaacatcatctgaatcctgaaaaattgctaggtgaaagaactcagtcacaaaaggccatgcattgtgtgattccactgatatgaaatttccacagtgggcaaatctgtagagacagtatgtcgggtggggggtgaggttggggggaagtggggagtgaccattaatgggtatgagctttcttttggggtgatgaaaatgttctaaatgttctaaaattgattgtggtgatggttccacaaagctgtgaatatactaaaagccactgaattattcagtgggtgaattttgtgatatgaacattgcatctctggcctggtgcagtggctcacttctgtaatcctagcacagtgggaggccgaggtgggtggatcacctgaggtcaggagtttgagactggcctggccagcgtgatgaaaccccgtctctactaaaaat

SEQ ID NO: 841231 - DNA, 555 bp, Homo sapiens
gatagaaagctgaaactggatcccctccttacaccttatacaaaaattaattcaagatggattatagacttaaatgttagacttaaaaccacagaaaccctagaagaaagcctaggcaataccattcaggacataggcatgggcaaggacttcatgactaaaacaccaaaagcaatggcaacaaaagccaaaatagacaaatgggatctaattaaactaaagagcttctgcacggcaaaagaaactaccatcagagtgaacagacaacctacagaatgggagaaaatttttgcaatctacccatctgacaaagggctaatatccagaatctacaaagaactcaaatttacaagaaaaaaacaaacaaccccatcaaaaagtgggcaaaggatataaacagacacttttcaaaagaagacatttatgcagccaacagacacatgaaaaaatgctcatcatcacttgtcatcagaaaaatgcaaataaaaaccacaaggagatacmatctcacaccagtaagaatggcgattattaaaaagtcagaaaacaacagat

SEQ ID NO: 841232 - DNA, 573 bp, Homo sapiens
caaagaagtgtcataccattagaacacaaaatgatctcagaatatctgactcttactcaagagtttggcaattctttctcaacaaagtgttttcacaccttttgacttttacagacacaagagcaaagcactctttaggaattttttacatcttcactgaataagacaaagtccagagacagaaattttcaccagtgtttttgtatgccatgtatcacatttcctactaattgttggaacagagaaattaaagacatataattagcatgaatgtatccagaaataagcaaagtaattactagtttctcatcatgattattcagtacgacttaaatgtttttggtgggaaacttgatattgaaataattaatattcaaaatgatctttccttgtaaagaaatgtawaggcaagcttcacttcattaaataaccatgaaatcatctttataataagttattttgaacccggaaagataaagttgtaagtgatgggtgggctcccaggtcctctgtataagtaagccgtagacaggttgcctgacagtgctcaggagctagtgttgggccgggcac

SEQ ID NO: 841233 - DNA, 615 bp, Homo sapiens
aggataaaaatagtgtcaccagctttctaaggttactgtgaggattgtgcagaaaaataggaaatctataaatgttgcctgttttattacaacaattccaatgtgtgggacctttatcagaaaacttagagaaacagaagacgccttacttccagagactggtaaaataggctgtgtctgtttttacaggttccagaatttctcctacctcaaatccccctatcagcctccaatcccctgaaagctggcagtgactcagatgagcctgtcagtctggaatcaatggttcatttctgctgtaaaagggacattggaagagagcactatgcctcactggtcatttgactgaatttatcagctcttttcctgagagcaaaagtgggagaattagactcgggtgggcctgcggcagagagtaaaaaagcagggatggactggaggtgaggagtcctaacaaatatgtttatcctactcaacattrcctaaaaactagatatagccacacaaggaaggagaaaaacatctcttctgtgtgcatctttgcgatggatttagaggcaatgtataggaaggcattattgcctgggggttatgaacagaagctctggtaccaga

SEQ ID NO: 841234 - DNA, 609 bp, Homo sapiens
tcatcatagtaaaggtccccctaactgattgtttggtatatataaagaataccttatacaaactggatggcaaaacttgtccagtaattactaattttttttattctggtgtaataaagtctytttattggcttcacacaatatttacattcattcattcattcattcagtcagtcagtcagccagcaagccagcaatagatatgaagtgcctgccacatgtttgacaaagtttaggagaggtcgcttacctggatttaagagtcatgtataagcagaaaaaaatttgtaaagaacaaaggactcaggattgagtggtgaatggccatggttaggaagaagagaggagaaagaaagagaaagggctgtgaactaggcagtctggtcacagagttttgggtaggaacagatcagggagagaatggtattggcaatgtcccatgcagaggggccagtaggctgctgagctgttcagctgtcgctgctgatcggaaggccaattccaggagccttgtggagggaacagctggagggaaaaggaaagcacctgcagcatgagtagcaacagaggagggaaagaagagaggcagaagtgaggtgagaggacgtg

SEQ ID NO: 841235 - DNA, 604 bp, Homo sapiens
agagtcataaaagagagcaaccaagtgggaagaaagacatttggtataatacttcwttgactgaaaaggaaattggattttacctattgcaaaggaggtcacaaattttattgttaaatgggctaaagtgtacttatttaataagatgtgggcttaaaatggaagacttctttaatctcaggcctccagcaaatacacaataatttatattttttcacagaattttcacatttggtaaccttaaacttttatggtaactttgatcgattgttttccataattgtttttgaccttgctataatggataaagcatacttgtttaaacacaaaaatccttatgtgggaagtagagttatttatatttgacataagtttctggaagtgatttacaaggcagctgaaatgtattaagctaatgttgaaagaagaaagtagttaaatatatgtgcagagtgcttatgctggcaagaattccaatccagtcttggcctgaattgctttaagaatcattgtttatgttttaggggaactacatgcaaaatagagaaaacgaagcaaacaaatgtagaattatgtaatatactaggctgtaggcattctaaat

SEQ ID NO: 841236 - DNA, 530 bp, Homo sapiens
ttaatctcaggcctccagcaaatacacaataatttatattttttcacagaattttcacatttggtaaccttaaacttttatggtaactttgatcgattgttttccataattgtttttgaccttgctataatggataaagcatacttgtttaaacacaaaaatccttatgtgggaagtagagttatttatatttgacataagtttctggaagtgatttacaaggcagctgaaatgtattaagctaatgttgaaagaagaaagtagttaaatatatgtgcagagtgcttatgctggcaagaattccaatccagtcttggcctgaattgctttaagaatcattgtttatgttttaggggaactacatgcaaaatagagaaaacgaagcaaacaaatgtagaattatgtaatatactaggctgtaggcattctaaatccacacccccaaataaaatgaaataatgttgtctgaatatcatacctgttgctttggtrtgggccacaggatcctcccaaatctggaccaatagatg

SEQ ID NO: 841237 - DNA, 615 bp, Homo sapiens
agtatctttaacatcaaactttcattaaaataatccatgtttaaaactcaacaaatattgaaaatctctttgtgygtgtgtttgtgtgtctatgtggcgatgttcaaactcctatgcattaaaatcagaacaattggccgggcgcggtggcttacgcctgtaatcccagcacttcgggaggccaaggcaggaggatcacgaggtcaggagatcgagaccatctggctaacatggtgaaaccccgtctctactaaaaatacaaaaaattagccgggggtggtggcacgcacctgtagtcccagctactcgggaggctgaggcaggagaattgcttgaacccaggaggtggaggctgcagtgagctgagatcgtgccattgcactccagcctgggtgatggaatgagactccatctcaaaaaaaaaaaaaaagaaaagaaaaaaaaatcagaacaattatactcaggttaggtacatgggagttgggaatactggaatcaaaattttgaaacgttgatagttttaaatctcaaggttcatatttttaaaatattttcttctggttatacttgtaacagagtaaggtgatagcttttaaagatgctgcaataatttta

SEQ ID NO: 841238 - DNA, 615 bp, Homo sapiens
agtatctttaacatcaaactttcattaaaataatccatgtttaaaactcaacaaatattgaaaatctctttgtgtgtgtgtttgtgtgtctatgtgscgatgttcaaactcctatgcattaaaatcagaacaattggccgggcgcggtggcttacgcctgtaatcccagcacttcgggaggccaaggcaggaggatcacgaggtcaggagatcgagaccatctggctaacatggtgaaaccccgtctctactaaaaatacaaaaaattagccgggggtggtggcacgcacctgtagtcccagctactcgggaggctgaggcaggagaattgcttgaacccaggaggtggaggctgcagtgagctgagatcgtgccattgcactccagcctgggtgatggaatgagactccatctcaaaaaaaaaaaaaaagaaaagaaaaaaaaatcagaacaattatactcaggttaggtacatgggagttgggaatactggaatcaaaattttgaaacgttgatagttttaaatctcaaggttcatatttttaaaatattttcttctggttatacttgtaacagagtaaggtgatagcttttaaagatgctgcaataatttta

SEQ ID NO: 841239 - DNA, 615 bp, Homo sapiens
agtatctttaacatcaaactttcattaaaataatccatgtttaaaactcaacaaatattgaaaatctctttgtgtgtgtgtttgtgtgtctatgtggcgatgttcaaactcctatgcattaaaatcagaacarttggccgggcgcggtggcttacgcctgtaatcccagcacttcgggaggccaaggcaggaggatcacgaggtcaggagatcgagaccatctggctaacatggtgaaaccccgtctctactaaaaatacaaaaaattagccgggggtggtggcacgcacctgtagtcccagctactcgggaggctgaggcaggagaattgcttgaacccaggaggtggaggctgcagtgagctgagatcgtgccattgcactccagcctgggtgatggaatgagactccatctcaaaaaaaaaaaaaaagaaaagaaaaaaaaatcagaacaattatactcaggttaggtacatgggagttgggaatactggaatcaaaattttgaaacgttgatagttttaaatctcaaggttcatatttttaaaatattttcttctggttatacttgtaacagagtaaggtgatagcttttaaagatgctgcaataatttta

SEQ ID NO: 841240 - DNA, 491 bp, Homo sapiens
gaataggccttttgaaattataaagttattgggtttgatggtgttatatttacagtggccttttcgaaatacccctatygcataaagcgagctacatctgtgggaatcattcctctggaccaatcagctacagctattcagcccttaaaagtctaaaatgggtaaaggatttaatagacatttctccaaaagagacataaaaatgggcgacaggtatatgaaaatgtgctcaacatcactaatcgaaaccactgtgtcgcctcacaccagctaggatgggctatcataaaaaagataagagataacaaatgttggtgagggtgtgtaggagagggaacccttttacactgctggtgggaatacagattggtgtagccatataaaaaaagcagaatgaaggttcctaaagaaactaaaaatagtactaccacatgacctagaaatcctccttctgggtatataccccccaaaaatgaaatcaccgctttgta

SEQ ID NO: 841241 - DNA, 620 bp, Homo sapiens
ttttgtatttttagtagagatggggtttctccrtgttggtcaggctggtctcgaactcccaacctcaggtgatccgtcctccttgacctcccaaagcgctgggattacagatgtgagccaccatgcccagtctatccatcacttttgagaagatataataatattgtttcatttacaaatctagttagctaaagctaaataatctttctaaaacatcacatcactttaataggctagattttataagtttaatatatttgttttctttttaaatattttgcttttatgaactaaatgagttcttaaatgcttaactgctgtgcatgtacatgtgcataaatgaaaacgctctgaaatatgttaatgctgcccataaatttagtgagatttcaacttaaaatcaaaagtataaattttttttaattttttattttttggaggcagggtctcactctgtctcccaggctggagtgcagtggcacaatctctgctcattgcaacctctgcctcccagtttcaagagattctaatgcctcaggctcctgaacacctaggatcacaggtgtgcgacaccatgtctggcaattttttttttaatttttagtagagatggggttttg

SEQ ID NO: 841242 - DNA, 620 bp, Homo sapiens
ttttgtatttttagtagagatggggtttctccatgttggtcaggctggtctygaactcccaacctcaggtgatccgtcctccttgacctcccaaagcgctgggattacagatgtgagccaccatgcccagtctatccatcacttttgagaagatataataatattgtttcatttacaaatctagttagctaaagctaaataatctttctaaaacatcacatcactttaataggctagattttataagtttaatatatttgttttctttttaaatattttgcttttatgaactaaatgagttcttaaatgcttaactgctgtgcatgtacatgtgcataaatgaaaacgctctgaaatatgttaatgctgcccataaatttagtgagatttcaacttaaaatcaaaagtataaattttttttaattttttattttttggaggcagggtctcactctgtctcccaggctggagtgcagtggcacaatctctgctcattgcaacctctgcctcccagtttcaagagattctaatgcctcaggctcctgaacacctaggatcacaggtgtgcgacaccatgtctggcaattttttttttaatttttagtagagatggggttttg

SEQ ID NO: 841243 - DNA, 524 bp, Homo sapiens
aactttatatttaaactgggtttcttatagtcaacatatctttgggtcatgttttygctctactctgacaattttgggcttctaatttgtatatttggaccattgacatttaaagtaaatattggtatagctcgatcaatatctgtcatatttgttattattttctattggttgcccttcttctttgttcctattattgtcttctacatttttttctgccttttgtggttttaattaagcattctatgtgatttcattttctctcctttattagcatattaattttacttcctcttttttaaactttttaaagtggtttccctagtttacaatatatatttacaattaacccaactccactttcaaacaacactacagtggttcacaagtagtgcatgtactttaaaataatgaaatgtccctaattcctttctcccattttttgtattattgctgtcattcatttcacttatatataaaatacataaatataactatataagcatacctaattgaatacattg

SEQ ID NO: 841244 - DNA, 595 bp, Homo sapiens
cccaggagatggaggttgcagtsagccgagattgtgccactgcacttcagcctgggcaacagagcgagactccatctcaaaaaataataataataagataccattttggggggaaaatattgggggaaatatttaaaatattggtagcattcagtgctgacaaagatattgtgcaatagacattgcgatatgttgctgttaagactttgagttactacaagttttggggaaggaaacgtagcagtatgcaccaaaataaaaaatatgatacccctttacccaggaattgttcttcctgaagtctctcctaaataaatgaaagtaccagaatataaagctattcatataaggatgtttactgaagcattatttgggcaaaaattttggaagcaactcgaatgaccaataagatggaaaaaatgaaaaatttttatatattcacactaataaaaatagtgaattagtgctatatgtattgccttagtaatattcgagatatattgatgggaaatcaaaaatttgtactataatgtgcatagttcaatctattcaacatttttttttccctcagagatggggtcttgctctgttgcct

SEQ ID NO: 841245 - DNA, 602 bp, Homo sapiens
tcccagctactcggcatgctgaggcaggagagtggtgtgaaccggcgagcggggcttgcagtgagccgagatcatgtcactgcactccagcctgggcgacacagcgagactccatctcaaaaaaaaaaaaaaaagaagcagtttggcagctattcatagtggtctcaaagatcttttttttagtatgaaattagtttttatttttaactaaaaataaatgcttaacatctttccaaaatcaaaactaaggacgaatacttagaaaaaaaggtggaaacatatttttccttccctggagaaaccagtaaggcagacattttaacggagcttgtttttttccacaggactagtctacgcaacagaatctctctccagccctttttctatgtcagttctgtctacctggcaggaaaaaccaaaagaaaccctgaaacaacccctccccacaaatacaacacaagacaagggacttgaaaagttggggaaaaccttttaacgcgtctaagaccattktagtgtttaattcctctctttgggtatcttagccagtttggcctgctatacagagcaccttagactgggtagcttaaatgttcttagac

SEQ ID NO: 841246 - DNA, 612 bp, Homo sapiens
ttgcccctgttcttggaggcatcttggttcaccatgctgcccttcaaaacaaactctctggttcagtctgctttttgcttgtttgaaagcaagcagaacttgctacttcagtagatttccttttaaaatttttttccttagaatagttttgaaaactttgaggtaatatatttcaaattttatacatagatagtaggatatattggaacaaaccttaaacaaaaagtccaaagtctagggttctaaacccagctctgccattatcaagtcaggtcacttaatagtgacctttcagggttttgctttcccctcctacagatggtctgcaggtatgcacctagttaattattctagtataaaaatagcatgtttcttctgttaaaggtgacccaataaatgatctgaggtttgtataatactaacacctgcacatacattatctcaggcagcactaggtcatactggttaggagtcacagatttgaaagcagaaagaatctatgccctgtcacttactatatattcttaggtaagttacagaagctctatagcttcagttttcacatctgaaataaaragatcctcatagcatctaacttggtattgtgaagag

SEQ ID NO: 841247 - DNA, 625 bp, Homo sapiens
tgacaaggccccagaggcagggatttgctttaatttgaggatgtctttgctcaaatctgtctgaccatgttggcagccaccccccacccaactctgtgcacctgggtggggcatgggcccatctgtcttggcaccatggccttttcacctgcagacctgcctctgtagcctgagcaccatttacctcatccattgccagaagttactctctcacatgcttcaaatttactttccagaaagcaaaagggcttccaatgatttgaagagagtgatgctgacagtgtgcattattaccattctcatctctaggaactcccacttttttcagcaggctgatgggcatatgtggtctacatggccaaacgggcaagaagatgtaaggaaatcttttttttttaacttagataatttgttttttaaacttggatacttggatcacaagagaaaatttcgagagactttgacttgaggcaccatttccacatgggttgaaggatttcaggaagagtcccaagtagggcaaccagatctgctaagaggatgtcactgcagtttctggactcagctaatgacatcagggaaaagggaaggtcaktttcctttgtatgaaatggcaaacatgtga

SEQ ID NO: 841248 - DNA, 442 bp, Homo sapiens
tctttgttttgcccccggatccatgccacaccatccttccaccctgttctatgctccagaagcctgacctgcagcaagggcttcccctgcccatgactctcagctgtgttggccaaaggtgaacaratggccaagtgtgagcaggtgatgggaggcagggaagagagtaaggctgagatatccatttccctgagactccctccctgtggggtcccacagattaactgcacccaacagaggagatcaccactcctgctgggcctttccacacagacctctctgtttctacctcctggtgatggtgacttccctttgtgacttctctattccctgcccacacctttgaaatagtcttcttattcacctctccctagataatcccaccttcagggtactgcttcccaccaccctgccaggacactgacaaatattggaagttttg

SEQ ID NO: 841249 - DNA, 456 bp, Homo sapiens
tgaatttactgattcttctgtatcgtgtgtagttaccattatgtaactatacacacatacagctayggatataatgaaaattatctgcaaacacctaaattaaagagaaaaaaaagtagtttgtaaactcatttgtgatctactgaaaagaggttatattaaagcaaattaaaatattttccttctctgtcctctgaaatgactgcagtagatactcttagttatcccatttagggtggttggagggcctttttaatttaattgaccccccgaggtggtcttttgttttaaacagggggcaacagctggatctccaagtacatatggattttgtatatataggagatttttagaaaaatcaacaacctaacaccagattcaagtcacataaaagtgttccaataaaatggatggatgtctttttcctccccattttgctttatactgagtaatgca

SEQ ID NO: 841250 - DNA, 621 bp, Homo sapiens
aaataaaggtattactgcctgtgctctcatctggagcccaggttcctcttctatctcattaaggtcgtgggtagaattcagatcctatggttataggactgagatcctcattttcttgctagctgtccactggaaccactcatttcctaaaggctgcctatagatccttgccacatggccccctcataggcacttcacaacagtgctgtttgcttttttccaggctagtaggaagtatacatcttgcttacttcagacttctctttttatcctctagacccagatttaaagggctcatatgggcagagcatggtggctcatgcctgtaatcccagcactttgggaggctgaggcaagaggatcacttgaatctaggtgtttgagaccagccctgacaacatagcgataccctcttctctacaaaaagtttaaaaatagccagacatggtggtgcacacctgtagtcccagctatttgggaggctaaggtgggaggattgcttgagcctgggaggtcgaggctgtagtgagccgtggtcgkgccactgctctccagcctggacaacagagcaagagcctgtctcaaaaacaaacagaagggctcatatgattggatctgacc

SEQ ID NO: 841251 - DNA, 617 bp, Homo sapiens
ccctgattcagctaccacattctcctgagctctggtctcagtactgtggggacagctayaaacatgacacaccctgcccctaccctcatggagcttaaaatttaaacccaaggcctgggcgcggtggctcacacctgtaatcccagcactttgggaggccaaggtgggtggatcacctgaggtcaggagttcgagactagcctggccaacatgggaaaacctcgtcactattgaaaatacaaaaactagccgggcatggtggtgggagcctgtaatcccagctactcgggaggctggggcatgagaatcacttgaatccgggaggcagaggttgcggtgagccaagatcgcgccacggcactccagcctgagtgacagaatgagacccagtctcaaaaaaaaaaaaatttgtttaaatccatggcaaagttgcccagcccaacacaaaaggatttctttggaggctgtttcccaagactgaaaaaataagaacatccaacagcagggcccttcctaatttgaccaaatctccctttccagctcacccttgtccccaggcacctctttagcccaaattcaatggctcctcaggtgagcaggcacaagctagaagacaa

SEQ ID NO: 841252 - DNA, 486 bp, Homo sapiens
acttggaatggagcagagaacaagacactgttccagttctcatacaggttatggtccaagagagagaaaaagagaaacaagcaactgctatgatagggaatgtattagtcaggactctccagagacatcgaatcaacaggagagagagagaaagagggagagaaatttatcttaaggaattggcttttgattgtggagggttggcaagcctgaaaatcctagggcaggccaggcacggtggctcatgcctataatcccaaggaggccaaggccagtggatgggaggccaaggcaagtagatcacctgaggtcaggagttcgagaccaacctggccaatgtggtgcaaccctgtctctactaaaaagtacaaaattagctgggtgtggtggcrggtgcctgtaatcccagctactcaggaaactgaggcaagagaatcgcttgaacccaggaggtggaggttgcggagggctgagattgcaccactg

SEQ ID NO: 841253 - DNA, 569 bp, Homo sapiens
gtgtcccatcatgtttcgtgcgcttccattacggatcatacctcgcamctcaccgcgtggcctctgtagttccagagctcgcgagggccagggccgttggcggcggttggaacgaaacgatgagtgcctcctcgtggccccagaatggaatgccgccgtcggtaggggtctgccgggcataaaggggccttcggaaccccaccagagtcacagccagggagggcagcggggcgcaccaggccgaacgtcacgccacagggagggcagctaggacatggggggaagcgcgttaaaccagggagtcctggaaggggacgacgcccccggccaggtgagggcccagacgtttcgggggcgtagacgctgaggggtggccgggtgggtctgcggctctgaggcctggctttcattctccatcagtccctgtacgagcggttaagtcagaggatgctggacatctcgggggaccggggcgtgctgaaggacgtcatccgagaaggagctggagacctagtggcgcctgatgcttcggtgctaggtacgccctggggcggtttgtcctcaggatc

SEQ ID NO: 841254 - DNA, 611 bp, Homo sapiens
acctgaccctcatggacactgtgcacctctgcctgggccaggcacctccatcccctcttcacacacacacgtggccctgcctcctggcagcagctcctcaaagggcactggaaggtccacttgccccaccccacctggcatttggactataaagcaggcgcctagatgggcgaccctgtgtggacacagtccatagctcacagccatcaatagcacagtgttccacggtgcgtacagagagcctcactccggctccatggaatagacgtgaaagtcaccgaggtgcgtttccaacctcagaattactcagcagccctttcctgcgtcactggctcctttttgattctgcaaggaggcccttcccagcttccctcttgatgcccacatcccccttcccttccaggcagccccacgcctctccaggcccagagaaaataaaagccaccaggtgggaaataagccctcccacgggccaaagaccccttccctcacacctcctcctactcctgaatcttcacccaccctcactgcctcctctgggtccttgaggggcagacatgcmtcttcctctgtgccagtgacactggccccaccggctccattgccatcct

SEQ ID NO: 841255 - DNA, 573 bp, Homo sapiens
atcggattgtgaagatgaacaagagtgaggatgatgagtctggggctggagagctcaccagggaggagctgaggcaaattgcaggtgaggggcagggkagagagaggaaattccgtttacatcctagctcccttttcccccagaaaataaaacaaccttaacttctctacagaggaggatttctacgaaaagctggcagcttcaatcgccccagaaatatacgggcatgaagatgtgaagaaggcactgctgctcctgctagtcgggggtgtggaccagtctcctcgaggcatgaaaatccggggtaagaagaaacaagggagaggctcagggtggatgaagtcatttaggaggaaaaaaggatgacaagtgtccctgtaggtcacagtatgagtggacatcttgccttcgtggacacagggagggcttagaaatagtgctgggtgttaggggtaggcagaactcaaaattgctctgttgttggccaagcactgggagaagagtcattccagggctgccttcccttcctccaggcaacatcaacatctgtctgatgggggatcctggtgtggc

SEQ ID NO: 841256 - DNA, 614 bp, Homo sapiens
ggtaatttgactttttattattgagttgtaagagttttyatatattctaagtaaaagctgcttataatatgtgatctgcaaatattttttccaagaatttattagtaatgtaacctgtgaggctgtgtatgtaggaaccaaaagatctctctccatgttccagatttaagggtaaggtgcctgtgacattttttccaacatatccttttggggtttggacagggtttaatatattattgcaagaaaattaaaagaattaagtgagctaacattttacagtaaaacatttccctgttgttgttttatgtttctctttggccaagcgcctaagcttatgtcacactttgaagagtttctgcgtatgtctaaaatcagggcagtaagtttagggctgtgggtcacctcatctcaattcagaatgtggatcttggcttcttcttgaaataaactcaaaccttacgggtcaatggttgggtcagcagctaaggctttctcaaagatggcctattagtgaagaggtcagcctgtttacattgatggaagcataaatcctgtcttgaataattaattcaattattcataatgcatggtaaaagggtgaagctccaggaaga

SEQ ID NO: 841257 - DNA, 687 bp, Homo sapiens
ttctccctttgtaatctaagacctctataccagcagaagctagtgttacagacagaggaagcaactacacatcggtggggttatagggagaytggccactatcatttccagtccttgattctcagattcataagtcctgaatacgggagaaacagtacccatagtcactcattcagagtatatactgcatcctgaagaatatacaccccacccacaaggtgtggccaaccaactggctccataactgagtcttcaaaagactaatttgctcttcccacaggccagatacatcagggtaataaggaacatggtaagaccaatgaatgtcataaacctgaacccactgcaacattttctacaaagtgagttgctttgtcagaagtgatgccatgtgagacattgcgaaggagaataaagcatgttgtaaatgcaaggatggtgatattggaagaattgtgaaaaagcaattccacatacagaattagtgtctattccagtgaaaataaagtgcgctcttcacatgatgaatgtgatctaaaataattgacatggtggctggcagaagctcaatcactatttataatctagccttgaaagtagcatttatcaccagtgtattagttgaaacagtcaaaaagtctcccaagtttcaaagggaggggtcatatactccacttattgaagggg

SEQ ID NO: 841258 - DNA, 619 bp, Homo sapiens
cgccaccatgcctggctaatttttttgtatttttagtagagatgggctttcaccgtgttagccaggatggtctcartctcctgagttcgtgatccgcccgcctcggcctcccaaggtgctgggattacaggcgtgagccatgcgcctggcctaatttttgtatttttaatagagacagtgttttgccatgttggtcaggctggtcttgaacccctgacctcaggttattcacccccttcggcctcccagactgctgggattacaggcgtgacaccatgctcggctctaaatggtacattttcaatgcgtattctattcttgtttctctagatttttaaaccttctactcttattttgagaaaacctttccattattaatctctttgatggtttttgccataatcacatctccacagtcacttttgacatatatggtactaatctcaggaattaaaatgtggatagagtggttggggggcataatttagtgtatgaactccattttattttattgatctatttctccatcacagtgtcttatttactatagctttaaaatagatctcaatattcaagagtggaaaaactattcttattcaagactgtgtcattttttgct

SEQ ID NO: 841259 - DNA, 634 bp, Homo sapiens
aaatgactgagaaatagggatgctatcaccttctatgttcagatttcagagatggttcccagattcttgaggatgacattttctgaattataaaactagcaaaatatttacatacatttcaaagggacagagaaaaatttacatttgttaagtattctaaagtaaatgttctaagaaaagagagtttggcagcctattgtcaggaagaaacctgtgtaatgtaggcaagcttaggctttttgggtcaattacattcaaaaattgcctaggaaatgtaaaatgaacaaacctaccaaaaaacaaaacaaacaaacacataaattccaggtcctactgtggaccgattaaatctgaaaattagaatctctagtgacctgggcatcaatattttgaaaagctactcaggtgactggaatatggactgagcatcatatgtctatatgcctgtcccataacattatactccaacacctctcccctaactgagccataatggtctttagccccatgatcggcttattgrctaggattattttagatgtatttttagatgtagtgacggtttgtaggggcaaaggggaagttttatctctgaaggcctctgaaaatcaactgacgaaaggcagattaatac

SEQ ID NO: 841260 - DNA, 539 bp, Homo sapiens
cctcattctcactttccagtgcagggacccagctccccactcaagtttagggagatggccaccaattggaatccagagtcattcatgttattagtcaggaacagctcttcacttatctttcaacatctacatmctactccgccattccttaatttatacatcacacaacggagaactgtcggtgccctctcacccttcctaaatggcatttacttatttggttatggaaatcagtcgcatcaccttatctgtaataccatgtcatctgccaagagaaggcatcccaccccacctccgcagatgccacccccttaggatatcaggtcatcaaatgtgccatcaggggccacactagggtgcatgtttcctccttttcccgccaatctgcataagattctttgtcgcttccccaggacagcttacctgttgagtcccccaactccccggcacacccagtagccgagggactcacctgctctgagttctcagggtacagctgcaggacagctcgggatccccggacctgaaagaaacaggaa

SEQ ID NO: 841261 - DNA, 594 bp, Homo sapiens
ggaggaagccctggctttctcccctgggcagagcagcaggagtgccggccaccacttctgtggcccccacctgttggctagaagcctaggggccagaatccacataccccaccctgccatctcccttctttctgtcccagccaggggcagttttggtcctcctcatcccagggcccacctggacagggtttctccactggcatgtcatctgcccagggcagggagagccagagggaggaaggccctccctcctgactccctgggccccctctcagctcctgggagaacctcccagaccaggatggaagcccagcccagtccagccagtgggagacacggggcttccaggacccgtgtgcacttcaccttctagcaggatgaattcttggattcctgatccggagtcctccctggggtacgagtttgcctccttcctcctggcagctgaggctgagcgaggaggccacataagcctatgaaccccttcaacccagctgagccagagacgcgcgcctctatgggcagaggggaaastgaggcccagcacagaggcggatccaattccccttgggtgaggcccctgcacccacctga

SEQ ID NO: 841262 - DNA, 640 bp, Homo sapiens
aggtgcacaccaccacatccagctccactcctttattttttgttccgcctgtgcatctgccttcagatgtacctgtgcttccaattccccagtcttcctgggttttgcaacatgaatagtttgtcccttgccttccctattctcgtctcatcctccctccccacccccaggcaaatatcagccttttcggatctgctaagacagttaacactgtcctttagctttccagtttccacagttctattgatatctgtcacctgtttccattttctttgtctttatgtgtttttgccttttttaaaaaagatctttactctgatttttattggatttttggaaggacctgaaagcagacagctgtgttcaatcagttagtttagtcattttaaacagaagtccctgcattagttcttgaattttatcaaaacctcagttcattgactgttccttacttcttctttattaggtcttcttgtttttacttctctccttaccaaatgtggattccaagatctatcattctagtcattttataaatacaccatcacctttcccctccaatttggtcagacttcagcatggttgtatgcagctgcttctcctcttrtcagatctaggtgctttgcatctctcaatcttc

SEQ ID NO: 841263 - DNA, 663 bp, Homo sapiens; identical to SEQ ID NO: 831840

SEQ ID NO: 841264 - DNA, 515 bp, Homo sapiens
ccattgcatttagaaaagagatcacttgttttctaggtttaacaggtctatgaacagagaggaattttgtygaaagatggatcattcccagagtctcgcccatacctttttagataatttagatgaggagatttgggacttctcgagttgatatttaaatgagatttgggatttagagttgacactggaagggttaagacttttgggggtcttggggtagggtgaacgtattgttcacatggggtgtgtgtgaattttgggtaccagtgagtagactgtactaggttgaacagtgtcacctcaaaattcgtgtccatgcggaacctcagaatgtagcccggtttggaaacagtgtctttgaagatataattagttaagttaggatgaggtcctgagatcaggatgggtcctgactccaatatgacaggtgtcctagaagaaaggacacacagagacagacacagggaggatgccacgtgacgaaggcagagattggagtcctgcatctacaagcc

SEQ ID NO: 841265 - DNA, 498 bp, Homo sapiens
caggaaatatcctctccgcagggcatacgccgggtaaatgactttgtaactttacttcatcttcttcctttacatagggtgtaccccaaatagagggtatttaaactccaaaaaattctgtaayggggcctttgagaccctatgctcaggcctgctcccacaatgtggagtgtactttcattttcaataaaacccttcattccttccttgctttgtttgtgtgttttgtccaattctttcctcaagacgccaagaaccggacaccctccaccgttaacagtgccagggaaacacagtctcccagtagatggaaacacctgaaactggtgatcagcagcttcccagtaagatctcaggagctgagtgagtgagctcaagcatgtccattaacaggcaaaatgggagagttttactggtatatgaccttcctttaggaatgctagactggtaagggaaaaacgcctcaagtgagcatgggcacaactccagtaaacacac

SEQ ID NO: 841266 - DNA, 567 bp, Homo sapiens
tattcaagcacctttgagtttcatggatccggttgccctatctctcctaagacggaaagttttcagcaattatttcattaaataatctgactgtccttttctttaactgttctgcttcttgaaatcctgtaatatgaatatgtgtttgcttaatggtgttctgtaattcccataggtgtctttactctttttcattttttccttttttctgactcatttcgaaactgaagaaaatccttcttctcatatctcatgtctcaaatgtgtgacctagcggtgccctctacacagtcactcaagaagccaagctgatggcagtctgtgatctcttctgtactgtcagttattgcaacagttgacaaagatgtgaaagctcttcaatgctcctgatgttcattgcctgatacttccatccacatgaaactggccagaatttatagcattattctttttaattgtaggggtctgaaatatgcagggggcakaaaagatgtttaaggacaaccgctgtctctgcaacagccaacagtcctacttaaattctttttatgagcaaagttttcatgg

SEQ ID NO: 841267 - DNA, 596 bp, Homo sapiens
gcgtttctttcagatccacgcagaaacaaaagtctaggttcctcttgatattttcacaggatatcctctgacccctaaattaatttgagagtactgtaggaagcagggaaagatttgtttgggtttcaaatcccaaaacctgaccccctgactctcggccccaaactacacaggaaatttctaacagtaaatcaagagcccaaagtgcatttagcacagacagagaaaagaaaagcaaaaactgggaatgaccataggatcattcttattgtaatttaaagataatctgtcagcatagaggaaatgtagtcattgactgcaccacgtaatcgtataactcgttgcagaaaaactcactggtcccttttttatcctcagtcagagttagaggtacagagaataaacagaccacatgtaccactttctaaacataggattaattacccactgttcagaccccagctctttgcttttattcactctctacctctaattcccacattcrtatcttacctctgtgcagctgattctcaaatttgtaatttagatccagcttcatcaaagtcaagaccatataccaagtgcactgcatgtct

SEQ ID NO: 841268 - DNA, 579 bp, Homo sapiens
tccctggtgggctctgtatttgttttgctgctggacagaagagctccttcttttagaatcatttgcagcagtggcctctacatactggttggaaatctataattatatggaataaatagacacaaaatgagaacaagaaggattgaagtgatgaatgtttcacacagctaaagttactcattttcaaagaatgtcctctgctcaataatctgttcttcctacttcgtggtgtgaaaacagcctttgtgttgtgaaatggtaatgacagcagagaatgctctgggaattgtttgctattttccagtgtcccaacttaccccagccctgccatgcccatatttggacaaatatctggtatccctatgttggtatctgccccacagtatttttttggaggggagggggcggtggggagggcggatattttttccatttcttactgccaacaatgtgggaactactgatttgtagtaattaaagactgtgaagatttccaaagaragaaatggaacacaaaattgtgtcaggtgtggcggctcacacctgtaatcctcgcattttgggaggccgaggctggca

SEQ ID NO: 841269 - DNA, 657 bp, Homo sapiens
cctcaaaacactctgagagaataaataggaattgggttgtgatatttgcgacctatcctctctgtasccaagcaggataaagagagttctatactgggcccattttatttccgttttctcttggggtagctgaaaaatctgacccaatggggaataagggacatttgtaattggggtgaaaagcattgctagaaatgaggcattgtggtagtcccaaatgatagggtggaagatagcctaaattgacacagcactttccagcttgtaaagcatatttataaacacgatcttattttggtttggattcctaaaatgaccagtaggtttatatggtaggttttacacctgagaaaatggatgttcagagatatggagtcatgtgtacaaggttattctggggaactgcctcagagccctctgctgtacatcgaataggagccccatgaaacagaaacacatcacctccctgatcctataggtgaggaaactgggactcaaaaacttcaagagggaaggcccctgaggtttttttttggaaatggctgacatggggctaaaatgtagagcatctttttccgttagcgtgggtcagtttttagtacattacacagagacagagagatggggataaaaacaaacttttctatggtctaataa

SEQ ID NO: 841270 - DNA, 415 bp, Homo sapiens
tttttctattcctttccttcagttttattttcaaataaaagatgtttcatggaagtaagagcacaatttgagttaaaggagctttactctaataagccataaaaggarttgctgatgtgggttgtgtaatggactctgagatgcctcaagagaaacttctagttgaccttctttcgctagtaaccatacatctcttgtctcctcctagcgccccatgcaggagtcagcccagcagaatactatcatcagatggccctgctaactggccagcgcagcccctatgcagacattattccctcagctgccaccgccggcacgggggccatccacatggaatatcttcatgctatggatagtaagtgacggggctggtttctagagtcttgggaaatggcaaaggcaactttatgaaaca

SEQ ID NO: 841271 - DNA, 525 bp, Homo sapiens
ccatttggtgtgttttttagggctttgctttctattttcattgatattttgcctagcatcttcctctttgtcttctttctccactcttcactttactatgtctctcaacaaacctatatctagatgtaaacatatccataaagaggggagctaaggccaggtgcagtggctcatgcctgtaatctcagcactttgggaggctgaggcgggtggatcacgtggtcaggagttcaagaccagcctggccaacatagtgaaacctgtctctactaaagatacaaaaaattagctggatgtggtggtgggcacctgtaatcccagctactcaggaggctgaggcaggagaatcgcttgaacccaggaggcggaggttgcagtgagccaagatcatgccattgcactccagcatgggccacagggcgagatcygtctcaaaaaaaaaaaaaaaaaaaaaaaagcgggggagctaaaggaaatatattgagaaacattcagcaagaaatcacaacttcctgatccagggaa

SEQ ID NO: 841272 - DNA, 577 bp, Homo sapiens; identical to SEQ ID NO: 826422

SEQ ID NO: 841273 - DNA, 487 bp, Homo sapiens
acaatattgtagtctattatatgtagtagaattatgtctaaaaaagcaatgtatatacctcaattaaaaatacttcattgctaataaatggtaacaaacatctgagccttcagcagttttaacctttctgctagtggacagtcttgcctccatattgatggttgctgatggatcagggtggcggttgctgaagtttgggtgactatcaaaaatttctaaaataggacaacaataaagtttattgtatcgattgactcttcctctgaagcatgccatgctatttggtagcattttgccaacagtagaaccttttcaaaattggattcaatgctctaaaatcttgtcactgttttaacaactatttstgtgatataatgttttgtggtcatgttaactatgttttcagcatcttcatcaggagtagcttccatattcagaaaccactttctttgttcatccataagaagcaacttcttatccatttaca

SEQ ID NO: 841274 - DNA, 613 bp, Homo sapiens
ctagagggagacgcttttacagagttccttttttttttgaaacaaagacatttctgagtgtctaaactacattcttccttaaaaacccaggagtagcttctgttgcaataactgttttagtcaaaaaatgaggtgaaaagttaagctgacttttaaccattgagctccttaaaacaatttttttttaaatcttattacagtatttcagctaggacaaaatgctgctaaacgaacaatgatcacacaaattatacgatttctgagcgctctaagggtaagcagaaattaacaccagctggttgttaatgctaactttaggcatttaaaaagaatttgcaagacagaatcccaaaccagtttcttacctattgatggttctcaggttgtacactgctctctaccatgctagagcaggaaaaagaaactcgtttttcctgttggaagtaagctctgcctccataaaggagttacctgccttccatcatcatggaagaaagaaaamcttaccttccttgttggaagcaagtaaaactccaaaaaaggaggagttgtacagcaaaataaactttagatctcgaccaaattttgggacatcagaacaagcactaatagg

SEQ ID NO: 841275 - DNA, 576 bp, Homo sapiens
aacaataatactactgggtatatatcccccaaattgaaatgtttcccaaaaaatatatttgcactcccatgtttatttaagcattattcacaataaccaagatatagaaacaacctaagggtgaatgaatgaatgaaaaaaatttttaagtgtgatgtgcgtgtgtatgtatatgtattcgactatttttaaaagaacaggaaattcagtcatttgcagcaacacagacaaatctagaaaacatgttaagtgaaataagccagacatagaaagacgaatactgtatgatctcactcatacgtgaaatcttaaaaagttgaacttatagaagcaaggaatagaatggtggttatcactggctgttggggaagggtgagaggagaaagaggagaagttgatcaatttgttcaaccttacagttagatagaaataaggtctgagattctattgcacagtagagtggctatagttaatrttctattatgtctttcaagatgcctggcagagaagatttttaatgtttttaccacaaaggaataataaatgtttgaggtgatgaagaatacgctaattacc

SEQ ID NO: 841276 - DNA, 577 bp, Homo sapiens
tttttttctgacccagtcagatgtaagaggcctctaactggatccaagcctgttaattaagggatcaaatcccmtcctggacccagtcccatttctgttaaaacgtccaaacccagtttggaagagaaatttgctcaaagaaactcagagagctcaaaacacaaattcttggagctctgaacttgggagagagaacttaccacaaccctcagccgctctgaggaatcaaggacacaagtgggtccttgcagggtccttgcagctaccttgcttgttcactcagcattcctggggtcattagaagctctactttggaccccgcttctgacaccatctgttaaaaggaaaactttaaccgaatttaaaggagtgtgattgagcaataaatgatttgtgaattgggcagcccccagaatcacagtaaatttagggagactccagggatgccttttggtcagaataaatttatagacaaaaacagggaaatgacacacaggaattgaaagtgagatacagaaacaactggattggttatagcttggcatttgccttatttgaacacagtttgaacactcag

SEQ ID NO: 841277 - DNA, 645 bp, Homo sapiens
acttgaggaactgttacatcagtggatcccttgcagactttcccagcaccaacctggagtgtggcaactccactgggttactagacccagaggaacagcagcattcatagtggcctggytctcagggactcctggtcctaggcgaaaggaaagtatgccacattaaggggacgctccatgggacaaaagaatccagctggcaggccttgagtcccagatctttttgctgttgggaagtttctttcttcagaggcacagttgcagtactgggttcagcagggaaagtctgcagctgtaccccaacagtcaggcagctctggtgctcatgaagggtcttggagaaggggaattctttttcctcccatccaccactgcaagacacaactgggtcttctcttacaggtgttcagcatgggtgcacctagacaacctttttcaaacatttcagggtgactgcatcctggaggatgcacctttcaggttcaggtgtggttgagaggtagagtcagaactcctctatacttggaacatcaacattcctgaagatgaaaataggtgcctgtctgatggaatagcaggaatactggaacaatgggtcatgagtgtgtctggaatgtggattgcttttctgctgccctgacacag

SEQ ID NO: 841278 - DNA, 612 bp, Homo sapiens
ctgactgcctcaatgctcaacaaaatctagttgctctgtgtgagttgggagattctgcttatagatctcctgctattttttttgttttattttgttctgcctcacctgatgaaatatttccgttgaaagtaatgattagtatttagctgaaggctaagcaaacctatgcaagttattggagccctttttctctataactccttcccaaccaatgctctgtcccacagatcacaactgatttagcttccccaaactccaactagtgtctcctcaacttggcaatatctccatttactgcttgagttcttaaccacggcatgatcctgatattggctccaggtggaagctgtggcaatggtaagatgtctcatttcttacttttctctcagcaatcacagttctgcactgcttcttctccaaatatgtgaaagcaactattctccctatatttggtcaagttttctaattatttatggtaggagggcaagtttcatactagtaactctttcataaaaagaaaaagttcttaattatatttcatgtcactgaatttccatgatataaaccaccataagttaatgggacawtcaattatgtatgtaaccacaaaat

SEQ ID NO: 841279 - DNA, 607 bp, Homo sapiens
aatttctgtctgcctttagtgccatgcaaatcatcatatgtttaatttcagtgagtctttaaaatttaagaatagaaatggctacatgaaactctatctttgtttaggttcaaccaggtgaatacygtggtgtgagaatgtgactgaaggtagtgtttatctgtgggacatccagggtagctaggatgaaaacagaatcatttcatggaggtagctggtatgtggtacaaaaatacacggtgggaagcataacttgatttgcatatgcactcatttgtgcactgaatcttgcttgcgttcaggttcccatcttttccaggtaaaggggtccaatttattaaaaagtttaacccaatattagaacatctggatgttattttttcccattcatttatttcatcttaagaaaatgaccgtaactttaatctcagttctgaagaacctggattcttaaattgctgcaagagaatggattcatcaaatcaactcgtcttagggtttataaaggctttttagatccaaagtccatgcttttaattaaacctcactccacagcccaaaatataaaatacatattgtcagaatttactttattgaagtagaagaa

SEQ ID NO: 841280 - DNA, 517 bp, Homo sapiens
taatctatttcttcctgtcacccattggttttctttcaaacagtatttttgtatattcttttctttctgttctcatgacaatatattgtgtgctaagcttttcctaccatgttacaatgtaacatgatagcaaatcatcttagatttactcactagagcaaatttatttattttatgacatttacaatggcaatttattacatttatctgttctatttttgaaatttcttactagcaggaaattttaaaatttatctgcaaggattaaaaaaacttcagaatcctctcacaatgaatgctatcccagaagtgaaagtaaatttgtttgactaatctaacacaaaatcctaggaataggtctgtcaggcatggctggaaccaagtactgtgaggatatcattgttacctggtgtattagtcagggctctctagagggaaagaactcatggaattacsgaattttatatatatatatatatgagcttattaagtatccgctcaaggatcacaaggtccc

SEQ ID NO: 841281 - DNA, 499 bp, Homo sapiens
tcacagaagagacgtgagagtgacagctttaaacacagatagtctaattcctgaacccatgcccttaagcactacccaagctttgaatcctgggcaaaatgaaaaattaaaatatctcatctcttaattccattatcttaaatatccatgtgcaaagttgtaaataacagacacaataaaatatagacttcagagacaagaggaaacaaatttgaaacaggttacttaaggatcttcctaacagtaaataattgggatggattttgatggtatgtttaattttgacttggaaagatggtgggagcaatatttgagttaacaaatgagatgtaatgggggaagaaataatctcttttgggaaacccagctggaatagcttaactggagtcagtagagaaaactgtagtggaaaaawaatggttaaaagatgaagcagagtttttcatagaagacattgcatagaaagcatttaaagatttccctgtgagagtacaatgct

SEQ ID NO: 841282 - DNA, 449 bp, Homo sapiens
gcataaattgtttatacatggatcatggatatttatccctatgwaaacatttggctttggagaatagtctgagagaagctgtctgggggttgaggtgggaagtaatgtacatggggttatagagtagcctttttcttcagcgatgcttgcagagaattcttttttagagttgaggattctcaaaatgactatgtcatttaagcacacaaaattagtgacttttgaaaactatgatttaaattttctggtggcaagcatatctaagtggataaatttataaataatccagtttattcctgagtcactgttgacctgtatactcagagatgatacctttctgttttgttcagccacttacttttgtacatatctcaatgtttgcactttcggctgaattttaatcgtttgattatatgtctgtctttggtctgtgaaaaacacattttaat

SEQ ID NO: 841283 - DNA, 647 bp, Homo sapiens
ggaatatttttccatttgtctgtgtcatctctgaatcaatctttgagcaatgttttctagttctccttgcagagatctttcacctccctgttagctgtattcctaggtattttattctttttgtgacaattgtgaatgagattgtgttcctgatttggctttcagcttgactgttgctggtgtataggaatgctagtgacttttgtacattgattttgtatcctgagatttcactgagagttgtttatcagcttaagtagcttttgagctgagactatggagttttctagatacagaattatgtcagctggaaataaaaatagtttgacttcttttcctttttggatgccatttatttctttctcttgactgattgctctggccaggactttcaaaactgtgttgaataggagtggtgagagagggcatccttgtcttgtgccagttttcaatggaacatttccagcttttgcccatgcagtatgatgttagatgtgggtttgtcatagayggttctttttattttcaggtatgttccttcatacgtagtttattgagagtttttaacataaatgggtgctgaattttataaaaagcttttcagcatctattgaggtgatcatgtggcttttgtcttatgtttatgt

SEQ ID NO: 841284 - DNA, 643 bp, Homo sapiens
cccaggaggcggagcttgcagtgagccgagatcgtgccactgcactccagcctggggggcagagygagaccccgtctccaaaaaaataaaagaaaggctttaaggaaaactgttccttacagctttaaggaaaactctcaagttctcaaatgcaaacctttcattctatatactgtcttcctcactgccactaaatccactctttgcccttatatcttgccacaccctttaagtaaaattaaactcatttttcttccaaactcttgctcttgtaatgcttggcactactaagtcacaaagtactaacagctccaactactataaaactcacacttgctataactaagactgcaagagtacttaatatatattcatccctaattgacctatcttgcattcccagtaccatttaaaagcccctttctcaaaaaattaccttatttcattttagaagccaaaactgcaatatctttagcttctcaagatctgtctatatctttatccatcttttctcctttccctatatctcaccaaactgttctttgatgtcatccctctctcccatttcttctgggacctcactccattatctcctacctgatatatattcaatctttccctctccacccctttcccactccct

SEQ ID NO: 841285 - DNA, 602 bp, Homo sapiens
ttcagttcttaccctcccagaagaactatgagagctgtctcccttgaatacrcattttgaaacatgactcccaggtcctaaattgtgagactgagaagaggtttatttagccattataaagatgtaacatacatttgaaaaggacagaggattaaattctgaaagaaaaaggagaggtcagagctgtgccttcccttatttccacagaaaaaaaaattaagtcttttacttttttttttttttttttgagttagagtctcactctgtcacccaggctggagtgcagttgtgcaacctctgctcactgcaaccttcacctcctgggttcaagcaattgttgtgcctccgcctcctgagtagcttggattacaggcccacaccaccatgcccagataaattttgtatttttagtagagatggagtttcaccatgttggccaggctggtatcgaactcctgatctcagatgatccgccggcctcagcctccaaaagtgctgggattacaggtgtgagccaccatgcccagcctggggcaattatttaaaaggcattttatgcctgactagctacctaagccattatcttcatgttcctagaattt

SEQ ID NO: 841286 - DNA, 602 bp, Homo sapiens
ttcagttcttaccctcccagaagaactatgagagctgtctcccttgaatacgcattttgaaacatgactcccaggtcctaaattgtgagactkagaagaggtttatttagccattataaagatgtaacatacatttgaaaaggacagaggattaaattctgaaagaaaaaggagaggtcagagctgtgccttcccttatttccacagaaaaaaaaattaagtcttttacttttttttttttttttttgagttagagtctcactctgtcacccaggctggagtgcagttgtgcaacctctgctcactgcaaccttcacctcctgggttcaagcaattgttgtgcctccgcctcctgagtagcttggattacaggcccacaccaccatgcccagataaattttgtatttttagtagagatggagtttcaccatgttggccaggctggtatcgaactcctgatctcagatgatccgccggcctcagcctccaaaagtgctgggattacaggtgtgagccaccatgcccagcctggggcaattatttaaaaggcattttatgcctgactagctacctaagccattatcttcatgttcctagaattt

SEQ ID NO: 841287 - DNA, 602 bp, Homo sapiens
ttcagttcttaccctcccagaagaactatgagagctgtctcccttgaatacgcattttgaaacatgactcccaggtcctaaattgtgagactgagaagaggtttatttagccattataaagatgtaacatacatttgaaaaggacagaggattaaattctgaaagaaaaaggagaggtcagagctgtgccttcccttatttccacagaaaaaaaaattaagtcttttacttttttttttttttttttgagttagagtctcactctgtcacccaggctggagtgcagttgtgcaacctctgctcactgcaaccttcacctcctgggttcaagcaattgttgtgcctccgcctcctgagtagcttggattacaggcccacaccaccatgcccagataaattttgtatttttagtagagatggagtttcaccatgttggccaggctggtatcgaactcctgatctcagatgatcckccggcctcagcctccaaaagtgctgggattacaggtgtgagccaccatgcccagcctggggcaattatttaaaaggcattttatgcctgactagctacctaagccattatcttcatgttcctagaattt

SEQ ID NO: 841288 - DNA, 494 bp, Homo sapiens
caaggactgaaagactttattaactatatcaactattttggttagcagttgggcattactccccaaaatgacctccagattccattcactccctaccaaaattccaacagcctgttttgcagaaatggacaaactgatctgatgattaattgctagaggctcagaagaaccaaaacaatcttgaagaaggagagcaaaattagaggactcacatttcagtttcaaaatttactatgaagctagagtaatcaaaataatgttggcaacgggtaaacatacagatttatgggacagaattgaaagtctagaaataaacccatatatctaggaccaataattgattttcagcaaggatgccaaaaccattcatgagagaaaaataaactttcaacaaatagttctagaacaactgaaccgccacatgcaaaagcaggaacttgcacacttgcytcacatcatattcaaaaatgaattcaaatggagagaagacctaa

SEQ ID NO: 841289 - DNA, 283 bp, Homo sapiens
ggccaacattcaaattcaggaaatacagagaacaccacaaagatactctgtgagaagagcaaccccaagacgcataattgtcagattcaccaaggctgaaatgaagggaaaagtgttaagggcagccagagagaaaggtcgagttactcacaaagggaagcccatcaaactaatggtggatctctcggaagaaaccctataagccagaagagagtgggggccaatattcaacattctyaaagaaaagaattttcaatccagaatttaatatccagccaaacta

SEQ ID NO: 841290 - DNA, 610 bp, Homo sapiens
ctgaggagacaagaattgaagttgctgcagacccatacaaagtcgctgctgccggtaactcagataccttccaacagtaacaggactacaagcatgcaccaccatgcccagctaattttttttagttyctatagagacagaatctcattatgttgcccagggtggtctcaaactcctggactcaagtgatcctcctgcttcagcttcctaaaacgctgggattataggggtgagccatcatgcctggccaagcactttttaaataaaattcttatgattctaatatcagagctcctacctatcttaaaaactttatgattttaacatcagaaattctatttataggaacaatggggatgcaaatctggtgctatgtaacttttggttatgaggaagtgagtcaaagtgcagcttgattaatgcttaattataattgtatttctgtccattattcttgctaaccccgtgacaacaacttcattaagtgtgtgagtggtgggaggaacaccttcacaagaggaaatgtatgttttactctcaggcagataggagagggcagagagctcatgttatgtctgctttttattaattgtcttcagctcaaaataat

SEQ ID NO: 841291 - DNA, 557 bp, Homo sapiens
aaattttttttttttttttcattgagacagggtcttcctgtggtgcccaggctggtctgaaactcytgggttcaaacaatcctcctgcctcggcctcctaaagtgttgggattacaggtgtgagccactgtgtcctgccagaattgaatgttaattttaaaagaaaaacactgaaagcaccgggagaaattccatttctggaaacctcgtgggctggggtatttggatccacccacctggcaggagacaatgtagaaagtctcactctaaaaacagaagatcaacacggcgcccaccaaaccaagcacgtatagtcagccgcggattccgggatgtggtatcacatgagttgcgagaatcacctggagagactggctaaaaatgccgattcccaggccttgtccactgagactcagaatcagcacgtcctggttggggcctgggaacctgcagttgctgccacccagggcctacgagctgtacttggagatacactgtgccacagcatcgtggcagctcaggctcatcttgcatcctctctgggcctcagtttcccc

SEQ ID NO: 841292 - DNA, 521 bp, Homo sapiens
ttatctgtataattctagtatttagaaaatctctatttgccaaatttccatttcttcaatcggatataaacattgtttttttaaaattctattataaatactaygaagatgaagaatccagtttctgccatggcctagcagttctgacagttctttagaaactctaaggcatgatggagatctaaggaatgataattactgtaattatctgcttggcctcccagacccctaaatagagcgggtgaagtgagccgccccaaacttctggaaacggctggagccagctgtgccatgtgccccaggaccaggaaactgctgggtaatgacatgctttgggtttgttttaagttctcttttcctcattacaaatgtcatgtataaaatggcatgcttataaactttttaagaatggcctgcaatttattggccagtgccatttatggattcagattaatcaaccatcacagcttcataaggctgtcccctggggagcagaggcaagaaattgggccgcctgaggc

SEQ ID NO: 841293 - DNA, 257 bp, Homo sapiens
tctaatggtggttggcagtaggggcagtaaacaaatgaacaaataaattccgtgacatggtggcatgagcgttctgaagacagttaaagcaagagttaggagggatgagaataagaccagtaccagtttctgtggctgccatgacaacatgccacaatgggggtcttaaacagcagacatgtattctcacagttccagaagccagargtcccagttcaaggtgtgggcagggccatgctgcctccgaaggctgcagg

SEQ ID NO: 841294 - DNA, 446 bp, Homo sapiens
cggggcccgagggcgcctcctcactctccggctgggactcagcgactcggggacgccttgtctctctccctgtctctcgcttccacatgctgtccctggggctgagtcgtaggcctggagtcagagacagagagacagtgagacccagagagagatatagagaggcccagagagagatagcgagagacccagagacagtgagagacccagaaagagacagagagacagtgagacccagagagagagagagagatacagagagccagtgagagatccagagagacaatgagaccctgagagaggcccagaggtagatacagagagatagtgagagacccagagagagacccaaagacagtaagagacctagagagayagtgagagacaccaagagatacagaaagacagtgagagacccagagagacagagacagggagacacccag

SEQ ID NO: 841295 - DNA, 631 bp, Homo sapiens
tccttgacacctggctcaccctggatccytggagatcctgaatgtcctggctccccctgcaaagagattgaggtcaaaaacctatttgccccctcaaaaaatcctggtgttccccacatctcattcttttatgtctccccagtcaaaattggcagaaaaccaactttcatccctcagttgaaatacttgtccattcacccccttcccagtgaccatctctccagggggactcaggttcccaatgcctcctggggcgctttgtgggcctgaaggaggagcagaaataggcgtcattgcttagggaggtgggcccatttctggggcagaggccaggataagtgctccaaggtcactacagggagacagtgaagccctcctggggaaaggggcttcttttggcccctgagacaagactagagtttatggcctggggaaagggaggcagaggaccagacacattaatcaggaagaccctagggacagaggtgggctgagtcaggagaatgggggcaggggctggggtcctcactggggtgaggaaggagctggctcacccaggctccctgggagcatggagagagaggacactcatgccacacacaccctgtctctggggggcccatggaggcct

SEQ ID NO: 841296 - DNA, 631 bp, Homo sapiens
tccttgacacctggctcaccctggatccttggagatcctgaatgtcctggctccccctgcaaagagattgaggtcaaaaacctatttgccccctcaaaaaatcctggtrttccccacatctcattcttttatgtctccccagtcaaaattggcagaaaaccaactttcatccctcagttgaaatacttgtccattcacccccttcccagtgaccatctctccagggggactcaggttcccaatgcctcctggggcgctttgtgggcctgaaggaggagcagaaataggcgtcattgcttagggaggtgggcccatttctggggcagaggccaggataagtgctccaaggtcactacagggagacagtgaagccctcctggggaaaggggcttcttttggcccctgagacaagactagagtttatggcctggggaaagggaggcagaggaccagacacattaatcaggaagaccctagggacagaggtgggctgagtcaggagaatgggggcaggggctggggtcctcactggggtgaggaaggagctggctcacccaggctccctgggagcatggagagagaggacactcatgccacacacaccctgtctctggggggcccatggaggcct

SEQ ID NO: 841297 - DNA, 567 bp, Homo sapiens
gagtccctggtgaggaaggagaagcggggaaattgagaagttatgagaggtcaggctcgggaaggrgcagagggggccagcagaggccatgcaggcagcagcgtggagacctggatcctgccacaaatgaggtggcctgggacaaacccctgctgctctcggcctctctgttatctgtagactgggggccgctaaacactcttgagggccccccactgctctgctagtctgtgctccctggaatcgaagtcagggaagtgaaaaggaggaggggcacacacccggtgtcaccctgagttcctggcatccggggtagccaggcagaccaggaacacccagcttgccctgtggagggacagggagcaattaggagtgagaggaggcccaggtgctactttctggagaccccgaccctcacatgtgaggccatgccccatcccccagtgcacccacacaccccagctcctagccccttctctcctgccccatggctgccttttgcagtctctccttccagagggcgaattttccccaactctagtgctgggatcctgctttcctgtgcct

SEQ ID NO: 841298 - DNA, 361 bp, Homo sapiens
acactgtcctccctccctggcacaagccctcaggttcctcctctcctctgcagtggctcctgcggaatgaggtgccccygtgtgctgtggccgccatccagcccaccagcgctaaggggccaacacattttctcatcttgtgctcaaattcctgttcaatcatgtgtgctccttcccaggtgaacgggacagatcactggctgtgagcacagcccgtctcccccggctctcacagattcctctgtcatccctgaagttccctacaggtctgaactctgcttcactgacctcaaatccatccacacacttgtcatttctgcctaggcagctgcaacctctatgaggtcaccacccactctaa

SEQ ID NO: 841299 - DNA, 639 bp, Homo sapiens
aaggttataaaagacctcgttggcgctgggattttggcagccccctcagtgactgtcgtctgctggactwaacgtgggcgctcttctccgcagggcccggtgccgctctccatcgctgctggattcgcagccctggggactgcccctcgcgataaaccgggctcttctctcgtaaccacagaaaaccgaattagtcaagatgcacgtttctcaaattaggacctgggcgccaccatgttggtacagtcgaggtatgttacttctagtcccagtcttttgagggtttttttttaatcatgaatggatattaaattctatcaaataatttttcagcctcaatttacataatcatatggtttttctccttcattctgctgatttgatgtatcacgttgattgatttacatatggtaaaccatccgtgtatcacgaagataaatcccagttggtcatgattaatgatgtttttaatgtattgtcgaattatgtttgctagtattttgttgaggatttttgcatccatatatatcagaagtattggtctgtagttagtttatttatttatttacttatttatttttatgtgtctttgtctagttttggtgtcagtgtaatactggccttacaaaatgcatttga

SEQ ID NO: 841300 - DNA, 639 bp, Homo sapiens
aaggttataaaagacctcgttggcgctgggattttggcagccccctcagtgactgtcgtctgctggactamacgtgggcgctcttctccgcagggcccggtgccgctctccatcgctgctggattcgcagccctggggactgcccctcgcgataaaccgggctcttctctcgtaaccacagaaaaccgaattagtcaagatgcacgtttctcaaattaggacctgggcgccaccatgttggtacagtcgaggtatgttacttctagtcccagtcttttgagggtttttttttaatcatgaatggatattaaattctatcaaataatttttcagcctcaatttacataatcatatggtttttctccttcattctgctgatttgatgtatcacgttgattgatttacatatggtaaaccatccgtgtatcacgaagataaatcccagttggtcatgattaatgatgtttttaatgtattgtcgaattatgtttgctagtattttgttgaggatttttgcatccatatatatcagaagtattggtctgtagttagtttatttatttatttacttatttatttttatgtgtctttgtctagttttggtgtcagtgtaatactggccttacaaaatgcatttga

SEQ ID NO: 841301 - DNA, 500 bp, Homo sapiens
aaccccactgggcggctgtaagacatgcaaycatcttagaccagtgcccgacacaaagttggcactccataaacgccacatgctaatgctgccattactactgttcatgctcacattagtgcttgccattctcactgcactgtataggctcacccagcctcatcgggacctttggcaccagcaggaggttccacgcagacaatgccaggcacagctgcaggcagcacccacactggagcggcccatggggctttttctatgaagattctgctgcccagacctggagaggccggagaagccgaaccccaccaagaacgctgttttcacaaaagccgtttgccttcacactgggtggcagcacatgacactaactcattcaaggtcagagcgaccagactctcaacccttattttcgtttgcttgttcggcttttttttttttttttttgcattccattttgttgacatttctgttggacatgaccttaggttgactatcat

SEQ ID NO: 841302 - DNA, 523 bp, Homo sapiens
tctgagggcatgaaccgagcctatcttgtttctgcatcactgtggggcccagcagggcccagcaccgcaacaaatgtgtgttgaattgggccccctgagccgagggtgtggattaaacgacccccacagagcccttctagccaaaaggtctgccatctcaggggtgtgtgtgttgacagagagagggagggaaatcaatttaaagtgagagagagaaaaaaaaatgctgcatctacagttcttatttatttttccattccaattttatgtaattcacaataaaaagatgctcaatgtcattactcattaggaaaatgcaaatcaaaaccacagtaagatagcacctcacacccactaggatgctataatcaaaaactgggaaagaagtgtcggtgaggacrtggagaatggaggtcctcacacagtgcagcaggaatgcagagtggtacagctgctatggagaatagcttgttccccacaagttaagcatggaattactgattggtggtatcgttggatattc

SEQ ID NO: 841303 - DNA, 593 bp, Homo sapiens
atttgtatatgctttgtgttgttgtctattgtccttttgttttaatttccaggactccccttagcattttttgtaaggcagatctggtggtaacaaagtccctcagcttttggttatctgggaaatcttttttctttttcatttttgacaagcaattttgccagatacagtattgttggttgacagttgttttctttcagtactttgaatatatcattctactttcttctggcttgaaaggtttctcctgagaaatccactgctgatttatgggagctcccttctacatgataagttgctttcctcttgctattttcaagattctctctttttctttgaatttgacagtttgatcataatgtgtttcagcatgaacttctttggattcatcctagttggaggcttttgagcttttttttttttttttttttttttttagacaggttcttgctctgtcacccargctggagtgcaatggcatgatcttgcctcactgcaacctctgcccccttgggctcaagtgaccctcccacttcaaccttgtgagtagctgggacaacaggtgcacaccaccatgcctggctatttttttt

SEQ ID NO: 841304 - DNA, 535 bp, Homo sapiens
cagccacacggcttctttgtacgtaaaataagatgaatatatatattatttccctccattttccacaaaagatagtaaatgctctacgttgtacattcggcattcttttttacagctgcaaggtgttccaytgtgtggatctgcaaacatacgtaaccagtctcctaatggttacatttaggtggcttccaaacttggtattcaaaccatggtactatttcattgtgtctgtagactaaatccttaacacaccacaccaagggaactccatttgttattttgctaaacctccacagaggttgtagagtttgcattctactagtaaagtacaaaaaaagggcccattttccccaggcaacttgtatcaaacctatatcaaaatgaaaccaatttttcctaatctcttaaagtttgtttattgaggtacaatttacatgcaataaactcaccctttttaccgtaaagtacgcaatgtaatttgaatttgcatgtattttagtataagcatgatgaactatttttataatcacaagaa

SEQ ID NO: 841305 - DNA, 368 bp, Homo sapiens
cgccagcacctcccatggtgcgtaccccaggcagaaatgtgaggataagtagagcacgactcttttctttatgcagcacgtgggaccgggctgggcagcggggccaccagagatcgaatggggactgacggctgttggctggagagaagggaatgtgtcctagtgccctgcctcaggcagctctgacttcaggggcctaaagtaggaacttctttctaggcagttgtatccagcactgcgggcggaaatgattccatctgccctcaaaacagtcatgtccagtgttgatggctaacttcttaaagggttgtttagttttcttgaacttcccgggggactgtcaccrggcagaaaatgcacctgcttgt

SEQ ID NO: 841306 - DNA, 555 bp, Homo sapiens
atgggaagaaacagaaattacagaatggtaactcagagaaggagatataactgcaatgagagccagggaaacctaattcatagcaacttggaggcagatgtgctgatrtaacttcacgtttgtctttatatttcttagcttgccataagtggggtcaattgataatataggtcttatgggctaaatcttaataggctgaatcatacaagctgaatgataaaatcaaatcatcattcactgaagattgccaataaaatcagcaatataactatagtgatagaaactatcatttattgagaaccttaagtggtccagtcatttttataactttatgtaattcatctagtttaatacaatacttctaataggtagatgttatccttcctagtttaccctaaggaagccaaaagccaaaaagttaagtaatttgtccagattactcaactactggccaaacaagtctttaagtgcagttctgttactccaaagcctgacttcttttcactctgccaaactataagacacagaacatggtataacataggcatctttata

SEQ ID NO: 841307 - DNA, 646 bp, Homo sapiens
aagaaaaggctgagattatttctaaggctgctaatcatttattatgtagaatatttggagacgaacacagcaagtcagaggtcattatttttcttcttgtaatcagcacatgccatccatgaatctctttcctcaggcgccagactcttgtcagtgtgtcaatatatacaaatttcaattgtgatttccccactaaggaggtctaatacatatcagttccactatggtgagctaattgcaggcctgaacgtttaccctaggtctgcatagcaagtgcaaaggcctgcgtgaatttactggcttatgaaccctatgttaaacatggttcctggaaaaaaaaatcaatgatatacttcattttctggctctaaatctctgaaaaaccatcttaatcctttgtgtgggaatctcatgtcacatttctaaggtaataataacaaaagggacagaaaacctgttctgggcccttactgtatgtgtagaactgcaacgcacttaacgagtcgttccctttaatcctcacaacaagcctgtgggacagtactatcrttattcctgtttcactgatgataaaattgaggcttctgaaggtctgcatgtctggtaaaggtcatgcaggaaataaaaagctgaatcttaagggaga

SEQ ID NO: 841308 - DNA, 564 bp, Homo sapiens
gtcaaggatgagaaaatggaaaaacaagatgaaggaaaaggaggtaggtcaatggaccaagatgctggggaatccagtttatttaagtacatggaggacacctgccttggatcatttgaaaagtccaggtgagcactcaggccgtgcagtctttaaaaggctttatgagcctctgaaatcattctccctttttaaataacaaaatgccctaaagagcaatgaaagtatggaatgttaccaatgctttccttagaaatcagttactgaagctttattagataaagcttgtaaagcattctgggatcagaaaataataatttaagtaattgaaaattttcttgttagttggccacaaactattggccatttcttaaaatcagtaaatgtcttttaaaagctaacttttcagacaaaatatgaactgctatataattgcttgaccactttacaaccaaacccatagcacaaaaatctgatagaaattgacttagtcacaaamccataactgcttgtgttcatttttctgaagtgttagtgaattattattcaaaaatacattataca

SEQ ID NO: 841309 - DNA, 621 bp, Homo sapiens
tttagtatatatgcaactttttaaaaaacatggattkttgaaggaaaggacttattttttttctgcagtatcttatttaatctttatgataaagccaacattttggtgttattattgttattattatccttttcaagaaacagactaactccaatcttccctatgacatcagtactgagcactccctttagcggatatcttaatctttctgaatatctcttcctatttgtattcatcgtcatattttttcatttaatttttcttattttttgtgagttcatttgttgcttccaaagattgtatgcattgaggaatcatgtgcttaaattttcagtaatggctaacagagtgttgggcacacaaaaactctcagtgaatatttgccaaatgattgaaattaatataatgtgttttaccttaaaacattttccaaatttaccatatattaataaaaaccatctagtttatatcagagttaattctttgaaatagaggaagtttttttttctttttttaattgttttttcagcatatagaacattctcactttctgtattccttattccaatataagatatacctccaaaataatgacaatgattttcataatctacgcacaga

SEQ ID NO: 841310 - DNA, 627 bp, Homo sapiens
aattgatttgtttgagcttcttatatattctagttattaatccttatcagatggttaatttgcaaatatttcctctcattctgtagattgcctcttcactcttttgattgcttctgttgctgtgcagaagctttataacacaatgtgacaaactcccatttgttcatttttgctttggttgcctgtggttttgagatattactcaagcaatatttgcccagaccaatgtcctggctagtttcctcaatgttttcttttagtagtttcatagttttaggtcttagatttaagtctttaatccattgtgatttgaattttgaatatagcaagagatagagacatagtttcattcttcccatataaatatccagttttctcagtatcaggtattaaataaactgtcctttccaaatgcatgttcttgacaccattgtcaaaaatgaattcatggtatatttatggatttatttttgggttctctgttcttacctattggtccatgtgactgtttttcttttgttgytgttgttttgttgtgttttctttgccgttagcaatctgtaggttactataacactgttgtgtaatttgaaatcaggaaatgtgagttttctagttttgttcttt

SEQ ID NO: 841311 - DNA, 568 bp, Homo sapiens
cacttaaaaataagtggacctatttctttatccaggacttaaattgtgctttaaggggatggggccactgatttaaattacaacatgtgagtagataatgcttgttgttagaaaataagatgcttatctttaaagttctaagtgaacatttgtgggaaattattaaaataggaaattaatgtgtttttaattctaggaaagggccattttcaatgtcagcatacaattcagaatttagacagttagtgacactaaaaataaagtaccaagaatagtaaagtaacaaacagctttatcttatttgccttagcttgctttctttctgaaggtgctgctgagagcttggcactctgaaacccattctgtagcagacagaaccagcagtaaagcaaaaggagacatagagcaaaggaaggtacctgcctacagtggggttttcctacgtggctggcttgggtctgactrtttcatgggacagaagaagaaaagcaatagggccatgtggaggagtcccagttgacttatcactgatgtgcacttattaccttcacatctaaaaaagggccca

SEQ ID NO: 841312 - DNA, 597 bp, Homo sapiens
ctttttcgttttgttttgtttgagacgtagtttcactcttgtcacccgggctggagtgcaacctcctcytcccagtttaagcgattttcctacctcagcctcctgagtagctgggattataggtacctgccaccacgcctggctaatttttgtgtttgtaagtagagacagggtttcaccatgttggacagtctggtctcgaattcctgacctcaggtgatccaccctcttcggcctcccaaagtgctgggattacaggcatgagccactgtacctggccccgtttgtctatccttgaatctagtaccatcaagtcttttgtttctgtagttgaattctgagagcatcatcaaatgcaaaagttttatacattagcacacacagtattgaagatttgagatctgccacaatgagaggaaaattaaatgataaaacatgttgaaatgatttatctcccttgaagtcaaagcaaacaaaaatttttaagatatattttaaagacaaaacaccatgttgccctgacgtcaataatggttccatgaacatgagtgtgaaatatcacttttccaagtgggccaggatttattgcattggaag

SEQ ID NO: 841313 - DNA, 587 bp, Homo sapiens
tgagactattaatcaaggtagtacatacagctagttaggaatgatgtggagccagggataccctcttccaaagcctgtatttttgtccctggaacaatggttctcacayttgaacgtgcataagaatcagcgaaacagctggttaaaacacgttcctgggaaccagccccagagattctgagtttgcagtgctttctaaaaacaagtaaacaaaaaactaggtacataaaggaaatgggccccataaatttgtatttctaacaaggtcacaattgatgccaatgctgctactccagtgcccatacttttagaagcagtgcgctaaggatggttacacttctgctgggaagctttggcagttacagttcactctgctagaatgcttttcccacaaatatgcacttagctctctcttcccctcttttttcatttgccaccttcacaatgcagcctccaccctacctgaaaatgcaaacctacctcctgcatacatacactcccttttcccattctctattttattattgtccttagcacttaacagactatataatttactttttcatccgcctttccccattagagtg

SEQ ID NO: 841314 - DNA, 587 bp, Homo sapiens
tgagactattaatcaaggtagtacatacagctagttaggaatgatgtggagccagggataccctcttccaaagcctgtatttttgtccctggaacaatggttctcacatttgaacgtgcataagaatcagcgaaacagctggttaaaacacgttcctgggaaccagccccagagattctgagtttgcagtgctttctaaaaacaagtaaacaaaaaactaggtacataaaggaaatgggccccataaatttgtatttctaacaaggtcacaattgatgccaatgctgctactccagtgcccatacttttagaagcagtgcgctaaggatggttacacttctgctgggaagctttggcagttacagttcactctgctagaatgcttttcccacaaatatgcacttagctctctcttcccctcttttttcatttgccaccttcacaatgcagcctccaccctacctgaaaatgcaaacctacctcctrcatacatacactcccttttcccattctctattttattattgtccttagcacttaacagactatataatttactttttcatccgcctttccccattagagtg

SEQ ID NO: 841315 - DNA, 629 bp, Homo sapiens
taaacatttaatttgttcacttatatatgaaaggtactattatcagtcccattttgtaattgaggaaactgagattctgattggttaactaactgactcaaggttacataactagtgagtgatgtacacaatttttttctggggtcagggacagaatcttactctgttgcccagaatggagtgtagtggcatgatcttggcccactgaaacctccactcccgggttcaagcaattctcctgcctcagcctcccgagtagctgggactacaggcatactccaccattcccggctgatttttatatttttagtagagacagggtttcaccatgttggccaggctggtctcgaactcctgaccttgtgatctgcccggctcagcctcccaaagtgatgggattacaggcatgagccactgtgccagaacaatgtacacaaaattttaacccaacagtgtaattcaaatcttatgcccttaatgcctgatcagtgacaccttatcagtatcatttataagatgaccatatataatggttgcctaggactttccaagtttacagtgttattgcagcataattattaaaacrtacccctttatactgaaagtcccaataacggtagtgaactaca

SEQ ID NO: 841316 - DNA, 632 bp, Homo sapiens
taatgatttaattaagtccactgcccacccccacagcagccccactctcaccacggagaacatgaaggcggctagcagcagacaccggaaggaaggcagacacagaacagcagcttgcattcatctgctgatgacagctttattattacattttgaattaatgccattggctcagtaagtcgcaggggaaaagttctgattgatcagactcaaggacacctatgctaataaagaacaggactacaagtggaccacaaggaaatcaaaactctcctttttgacgggaacaaaggtctcagtctgtgcattaccgcacttttaatctaaccacagaggtttcaaggtcattttgtagccaatcctgtattcatggacagtaaaagtggcttggacgttggctcttttttctactgaatgcccagtagcatacttagtacacatttactgagagaatagtagaaagaaacatcaatgcaaatcctagctcacctgcagtgtaatcatcagtcagttcctgcattyatttatttcattcattcttacaacttttgcttatgttcttttcattattaagcataggcacttgggatgcattagagaaaacagtcatggatttctatcttcatggagct

SEQ ID NO: 841317 - DNA, 593 bp, Homo sapiens
tcttttgggtatacacccagcagggggattgctagaacatatggtagcttaatttttagtttttttgggaacctccaaactgttctccatagtggttgtactaatttacattcacaccaactgtgtagcagagttcccttttctctgcattttcatcagcattcactatggcctgttgtattagtctgttttcacactgctgataaagacatattcaatttacataggcagtgtacaaaataaagaggtttaatggttaattaaacttacccgtggctggggaggcctcacaatcatggtggaaggtgaaacggatgtctcacatggcagcaaagagaagagagcttgtgcagggaaactcccatttttaaaaccattagatctcgtgagacttatttactatcacaagaacagcatgggaaagacctgcccccatgattcaattaccttccaacagataagatttgggtggggacacagccaaaccrtaccagctgtcttttggatataaactgttttaactggtttgagatgatatcccattgtaattttcatttgcatgtctttcatgatcaatgatgttgagcaccttt

SEQ ID NO: 841318 - DNA, 589 bp, Homo sapiens
agatgacatttctacacaccccttggaccagaagggaaaccactgccttgaagggaagaacccaattctggcagcattcatcacctactaactgaagagtcgttgggcccgaataaccagcagtgatacccaagtactacgttgagggcctttggtaaaaccttgagttgtgctagcttcaagtgagacttagcacattttcaactgttgtggcttcagggtgagacttcttttgcttgagaaaagcagagggaaaagtaaagggcactttgacttgcatcttaggtaccagcccaaccataccagggtagcgtaccaagtagggacttgggtaccctgattccaggacttggttttggacagcatttctggacctgccctgggccagagggaagcccattgccctgaaggcctagtcccaggccaagcagcattaatcacaagctgactgaagagcycttgggtctcaaggcaaaataaatggtagtctggtagtactccttgtgggcctgtggtagtggaggcatggggtgaggctcctctgcctttagaaaggagagggaagagtgggaaagactgtgttttgtgg

SEQ ID NO: 841319 - DNA, 548 bp, Homo sapiens
tgatgcccattttacatttggcttgtaaatgagtcatttcagtattaggagattgccactggatttttttagtgcatatgggctatattatatttattttataataaattacataatgttcctttacccttaactattttgcttcatggtcaaaacaagaaaaatgccactatttcttaatcttgagtgagtccaatatgatattgaatcactttatataattgctttcccgccttgacttgacatttataaaaaagttacttttgaacttctcttgtaattgctactgattttatctttggagtataaataatcttcttttaaattacagaaaatctaaaatatgttaaaatcatttttcttgcagtagcgcagtgtagaagtattccaggatgtcaaacaaaacagggacctccaagatgatgtctttaaccacaaattactaattaatacacatgatgagaatcagactgtcctgtcagagaactytacagcaccaggagctctctggaagttcaaatgcaataagaaaattgcatctacacgct

SEQ ID NO: 841320 - DNA, 604 bp, Homo sapiens
cgaagcaaatatcgaatgctgtctaaacctggggactattgctttcttggcagtatggctaatataaaccctggcttaacggaatgtgagttcctgagccctttccccacaggagtgttgacagcacttccacgcttccacacaaatatagctgatgttccttgcacttatgtggatttctggaaaacgctctgggtttggccttaccactgaaaatgactttggggagagtgaggcagagtaaccattggcagtcgtgcttcacgtcttcgtgaaagttgacaggagctgacgtttcctggctacatcccaatggtctgcatttggatagttgtcagtatcctgaacccagtcaaaggaagagagaagcccaggttttggagggcacattcaggtttgtctgacctaaacatccacctgaaacaggctgccatacagtctctgcccaaagatttctcataaagtagaactttcccatgcacaaggtaacccactattcactattgcatgaattagtattattaaatccctgttttatatgaaagtggggtctccttcyatgttgctctcactggtgctttctggctttctacattgacattgg

SEQ ID NO: 841321 - DNA, 617 bp, Homo sapiens
gtgatattagattgttaatttgagatctttctaacttcttgttgtaggcatttggtkctgtaaactttcctcttaccactgatttagctgtgtctcagagattctggtatattgtatatttgttttcattcatttccaagtatttgtttttatttctgccttaatttcattctttaaagtcattcaggagcagagcaattaatttctatctaattttatggttttgagagatgttcttggtattaatttctatttttattgcactgtggtctgagagtgtggttggtatggttttggttttttgaatttgttgagtattgcttttatgacccagcatgtggtcaatcttagagtatgtgccatgtgcatatcgaggataatgtatattctcgttgttgcggtagagtattctgtagatgtctgtttggtccatttggtcaagtgttgaatttaggttctgaatatatttgttagattttctgctttgatgacttgtctgacactgtcagtgtgttgttaaagtctcccactattattgtgtggtatgtaagtatcaatataagcctctaagaattttttttatgaatctgggtgcttcagcattagattcatgcata

SEQ ID NO: 841322 - DNA, 631 bp, Homo sapiens
tgtgtgttttctgttccttgcaaccaaaagtatcctcagtaatgtaattcccttaaaagcaagagttttctttcaagaattattgaactccatgaaatcttgtattagcacttcctaatcatgtaagttaattgctttctaaataacctgtgcttttttaaagggcttagcttcatttactttggttatatcagttaagactgtcaaatgcctgtctcagacactgatgacacccactgctatagaattatggccctgttctccaggtgccatagatgttctatacactcctgagcccaggactctggctctgatgttgctctgatcacctatgtgctgaatactgggaccaccactgccacaaaaatgcctgtgccctggaaccagtgctactgtggttaccagcatgcccttgtgacagactcagcaccaagaggatccctttggctaggactccccacagtgtcataggaggccccaggaaaaagaatagcaggaggacyacagcaatctttgacactaaggccctctaaaactttcatcactactgctgccttcaaatacatctacaaccttggccactgaggacccccacagtcctgtcaaatattgattacagctgatggaactg

SEQ ID NO: 841323 - DNA, 617 bp, Homo sapiens
taggttgtttatttgaagtttttcttttttttatgtaggcatttatagctatatacttcccttttaatactgctttttctgtatcccataggtttggrtatgttgtgtttccattgtttccattatcatttgtttcaagaaatttttggtttcctttttattttttcattggtgcactggccactcaggagcatatcatttaatttccatgtatttgtatagttttcaaaattcctattgttattactttctagtttcatttattgtgatcagagaagattcttgatattattttaattctttaaatgttttaagacttgttttgtgatccaacaaatggtctatccttaagaatgatccatgtattgaggaaaataatatgtattctgcagccactggatgaaatgttctgtaagtatctattaggtccatttggtctatagtgcagattaagtctgatatttgttgattttctgtctggaagatctgtttcatgttgaaagtgaagtgttgaaatctccagcttttaatttttctacttgggagaagagtagtttacacaccacagttacagtgttataatattttgtttttctatgtccttactattaccagtg

SEQ ID NO: 841324 - DNA, 616 bp, Homo sapiens
tcttaatttttaaataatttattttcaattgactaacaaaaattatgtatacatttattgtatacaatatgatgtattgaaatatgtacgcattatgtaatgactaatttgagctaattaacatatacattacctcccatacttattactttttcgtggggagaatatataaaatctaccttcttagtggtttttaaaaatacaatagattatttttaactaaagtcaccatgttgtagaatagatcttttgaactcattcctcctgtccagctaaaattttgtagcctttgttcaacaacttcccagcccctggtaagtaccattctactctcggtttctatgtgtctgacatttttatcctctacatgtaagtgagattatgtaatatttgtctttctgtacctggcttatttcacttaacatactatcctgcattttcatccatgttgtgcaaagacagggtttccttcttgtttaaggctgactrgtatttcatatataccacattttctttatccattcatctattgatgaacacttaggttaagtccatatcttggcaattataaataatgctgcgatgaataatggagagcagatatctcttcaacaca

SEQ ID NO: 841325 - DNA, 598 bp, Homo sapiens
tccaaattctacaacttgacggaacataatatcaacaaaaagtaatctatttgagggaaagaataaaactctcaagcatcaggcattgaaactatagcatcttcccatgaaataatgtgtctctaagccttyagagttcaaaatcagactgatttatgatgaggacaaacttgaatacacatatcctcaaatgctttataagtgttcatttcctcacaaatgaatattagaataatgatcacatttaagagtaaaacttaaagatagtttaattacccagtgcttttctaaaaccatgtggacctagatggcacgtgttcctggaagatgttgttgtcaattgtgattgccaagttacattcttttccttggagatgtttaaaaactatttttctaaaccatatgagtcacggcaaaaaaaaaaaaagtttgtgtgcatgttattctaaaaatatcatattaacttaggtgatttttttctattcacaatggaatttaaaacatctgtaaaacacatccttaatgatcactggacatcttctttacatgttaaaagatgattgttaaagtattcattaaaatgtgaagaaagtttgaa

SEQ ID NO: 841326 - DNA, 558 bp, Homo sapiens
tttgctaaattcctaattgtaaaataaataatcaatgccttcttatacgacctaggagacacagttacattgaggaactckcggttaagcaggggaggtcctctataggacagaggctcaacattcatcacaaagagttttagcttcaactgcatgggaatgaacaagggagaataaatactctcaaatcatcctctgcattcgaagtagggaccaacatgacttttgttccttctctggctccaaattcttggcttcaagtgcctgggctctgtcctccattcctttcttgccttggggttgtagtgccttctaacaggaacatagcccacttctcccgtatctccaaagcccagcgcagaatatcacctctgagagtctgggagatttagggggaaagtcagagtcaaagttttcttctctggctctcctttgctaatggcctgtggccggtcctggaacagaggagggggggacatgggggagactccttaaacaggggctcagctacaaaacatttatatctttgaaagggccttcttaatagttaggttacag

SEQ ID NO: 841327 - DNA, 558 bp, Homo sapiens
tttgctaaattcctaattgtaaaataaataatcaatgccttcttatacgacctaggagacacagttacattgaggaactctcrgttaagcaggggaggtcctctataggacagaggctcaacattcatcacaaagagttttagcttcaactgcatgggaatgaacaagggagaataaatactctcaaatcatcctctgcattcgaagtagggaccaacatgacttttgttccttctctggctccaaattcttggcttcaagtgcctgggctctgtcctccattcctttcttgccttggggttgtagtgccttctaacaggaacatagcccacttctcccgtatctccaaagcccagcgcagaatatcacctctgagagtctgggagatttagggggaaagtcagagtcaaagttttcttctctggctctcctttgctaatggcctgtggccggtcctggaacagaggagggggggacatgggggagactccttaaacaggggctcagctacaaaacatttatatctttgaaagggccttcttaatagttaggttacag

SEQ ID NO: 841328 - DNA, 558 bp, Homo sapiens
tttgctaaattcctaattgtaaaataaataatcaatgccttcttatacgacctaggagacacagttacattgaggaactctcggttaagcaggggaggtcctctataggacagaggctcaacattcatcacaaagagttttagcttcaactgcatgggaatgaacaagggagaataaatactctcaaatcatcctctgcattcgaagtagggaccaacatgacttttgttccttctctggctccaaattcttggcttcaagtgcctgggctctgtcctccattcctttcttgccttggggttgtagtgccttctaacaggaacatagcccacttctcccgtatctccaaagcccagcgcagaatatcacctctgagagtctgggagatttagggggaaagtcagagtcaaagttttcttctctggctctcctttgctaatggcctgtggccggtcctggaacagaggaggggrggacatgggggagactccttaaacaggggctcagctacaaaacatttatatctttgaaagggccttcttaatagttaggttacag

SEQ ID NO: 841329 - DNA, 631 bp, Homo sapiens
aaaatcaagatgtgggatggagccttcgtgctagctataatggaacacaattaatatgaaattagtcctgccgatacaatccttagacaatcattggtctaagaaatctgaggaggtgattatagcactgtaacataaaaatcctattatatgtatcttaaaatagtgttacgtcgtgtgtgtgtgtgtgtgtgtgtgtgtgtgtgtgtgtatctgtgtgtgtctgtgtgtaaatacactaaattcagtagaaattaaattaagccagaaatcattgtcagggcaaaaatgtgctcacatatctgggctcacatagaactaactcccataagaaattgaaaaaatgctgaaccagcagcctggatacttgcattttagtttaagctctgctactattagctgtgtgatctaagaaaaatcaatcttttcacatgtcaggacctcagttttcttatctgtgaaagcaggatgatagactggttgatcttccagccttaagatttcgtgattctaaactgaatgaaatgtccatgaacaagaatgctcagaaatagaatgctatgrctttttttttttcctttctgattaggattctctgttactgaaaatgtaagatatatgagtctatttt

SEQ ID NO: 841330 - DNA, 607 bp, Homo sapiens
ttccattatcatagcttacttttatctaccacctaatttcatataaatactgccatatggtttgtactctttttgtgactagctagaatatatttttcataaaactcattatattgatgatgttgagtatcttttcatgtgtttgttggccatctgtataactccttcagtgaaatatctgttcaatgattgactttgactttttttttaataagttcctttaggttcagaaagttgaataattttacaagttccttgtaatggacaagtatatgtgtacatataaaatcacagttataatactagcattgtcaaagaagtatatatatcatacatatcataatatattttggcaaaggatatatttcccacggtctgtgggcctcttatgtactttcttagtgtcctttttatttgaaacttttattgagataattacagagtcacatgtggttataagaaataatatacagaaggattatgaactctttacccagtttctccaaaaataaaattttgtaaaattctagtmtaatatcatgaacaggatattcacactgatacattcaagatacaaaaatttctatcactgcaaagattcctcatt

SEQ ID NO: 841331 - DNA, 575 bp, Homo sapiens
tggggaataatcttttaatgtgttatatttggtttgctactcttttcttgaggaattttgtttttatactcatcacagatatcgacatgtgattttcttttttgttgtgattttgctgctttagtttttgtttggttattaggataatgctggcctcacagaatgaatttaaaagtgtttcttcctctaaaattttcagaatagtttgagcaaaattaatattagttctttttaaaatatttggtataattccacatcaaagccatcaggtcctgggatttcctttgatggaaaaacttttattactactttcatcttgttacttgtcagtggtttgctcaggtttactatttccacatggttcagtcttggttggttgtatatgtccagaaatttatcagttttttctaagttttacaatgtgttggtgtatatttgctcataatactttctaatgatgttttgtatttctgtgacattagtcattatgyctccttttttgtttctgattttactaatttgggtcttctctcttcttagtctagctaaagctttgttaatattactttttttta

SEQ ID NO: 841332 - DNA, 603 bp, Homo sapiens
tgatataggatttattgctatcaacttaccttttgtactgatttttatgttttctctgtatttttgtatgatctatttcatttgtttcaagaaattttttgacgttcttcttaatttcttcatgagctatttattgctcaggaccatgttgtttaatttccatgtgtttgcatagtgttcacagcttttcttgttattgatttatagttttattctattagtcagaaaacatacttcatatgcttttgacacttctgaagttgctgaaacttattttgcaacctaacatatggtctatcctagagaatgtttcatgtactgattagaagaacatgtgttctgcagcagttgaataaaatgttctataattatcagttaggtccatttgatctagagtataactccatgtttctttgacaaatttctattgggatgatattttcattaattacagtgggatattgaagtcccctaatattaaggtatgttagtctatgtcttttttagtattaatgtttgttttatatatttaatatgactkgtgttggatgcatatatattcataactgttatatcctcttgctgaattgattgctttatcat

SEQ ID NO: 841333 - DNA, 640 bp, Homo sapiens
ttcctctatctttctggaaacttttgtagtatttaaaagctgaaaatcttcagaacaaccatgagtggctatggtgaagrcaagctggaagcaaaaattatgagacgaatctttcaagctaaaacttctctgaacttataggtcagaaagcactaaatgatgttggggcacatcctcttgcaatggcaagcactggggcaagggaggagggctgagaaaatacgtaaaccatgaccagcaaacagaagaaaaggttcacttgtcatggacatcaacaaattctagtgcaacttcttaacagcgtttaggcaatatgaagacatgtggaccagaagccattctaagtaggaagaggatgtgggataaacatctttaacaatgctttaaatgtaaattgctttatcatatgtctggaaacttttaaatcaaaaaacattgtttaacctgcaaaactcattgttaccttcaattatcaaacacaatttctcctctaatttcatccctacaagcagtagaaaataatagaagtgctacatttttttttcagttctgatgggtgtaaattacaaaattctctggtttaactttccttatagaatatattacaaaatctagattatatttaatttgattttatttt

SEQ ID NO: 841334 - DNA, 640 bp, Homo sapiens
ttcctctatctttctggaaacttttgtagtatttaaaagctgaaaatcttcagaacaaccatgagtggctatggtgaaggcaagctggaagcaaaaattatgagacgaatctttcaagctaaaacttctctgaacttataggtcagaaagcactaaatgatgttggggcacatcctcttgcaatggcaagcactggggcaagggaggagggctgagaaaatacgtaaaccatgaccagcaaacagaagaaaaggttcacttgtcatggacatcaacaaattctagtgcaacttcttaacagcgtttaggcaatatgaagacatgtggaccagaagccattctaagtaggaagaggatgtgggataaacatctttaacaatgctttaaatgtaaattgctttatcatatgtctggaaacttttaaatcaaaaaacattgtttaacctgcaaaactcattgttaccttcaattatcaaacacaatttctcctctaatttcatccctacaagcagtagaaaataatagaagtgctacatttttttttcagttctgatgkgtgtaaattacaaaattctctggtttaactttccttatagaatatattacaaaatctagattatatttaatttgattttatttt

SEQ ID NO: 841335 - DNA, 641 bp, Homo sapiens
gtcaaaacttttgggactgttacaaataacagtagtcaactacagagggaaacactatcyttgctagttgaaattctgccctagagcaatgatgccctatattgcaaggaaaacatctgttcagtttgatgggcataaatcatattgttaaggcagtccaatcagtttaatgccattacagttttgaattatataattgattgttgtgaatttctgcaggccatgcaatcatttaataatttgactttccaaatacttttccttgagcaaagaatgttcatgtcaacttaaaactttcgtgtaacttacattattgatctaaatcaatatcttggtactttggtttacacacgccagtctttcagtttctattaagttcagatagcatcattagtctcatcaactctatggtcctgagaatgtttctggagtattaaatcattaggaaaatcctatcctttgagttacttcattagaaagttattgatcttgtttgatgatgaattgttacttctctgaaagtttgaaagtcctaccatctcaacaaattagactgcttttgttatttgcatcagttaattaggcagttttgttatttgcatcaacattttgtcttggtgcattttttgcattgtttaatt

SEQ ID NO: 841336 - DNA, 640 bp, Homo sapiens
  misc_feature 614: n = A,T,C or G
tcctttaatacctgaaattcgcccccttcgcggcgcacgagtctctgatcccgattggctgggcagggcaggcggcgggacgcagggcgcgcccgggcggtgctgattggccggaggaggcyagccgggggaaacttccgggaatgtccgcactccgcgtccacggggcagcatccggcggcagcggagcctgtggctccccctgcgggctgctcagcggcgtgcacagtcctgccggctggcttgggtgggtggtgggctgcgggtaggggaggggatggaccgagtcccggcttgtcgggatgagggttccggaagatctggccagtaagattctactccctggctgtgcaccgggttccctacccctgtctacgtcggctccgccacttcgcggcttgagactaaaagagcatcccggcagggggccttccagccccaaagcagcctgtccagagacccccaaattctgatcctgaagttggaggcctccggggatgttcttttttaatcttttagaagggttagaggggttgaggctgcctgaccccagcctaatggggtaggaggccttgggaagtggagcatgggggcaaaggatccaagcattgacncttcatcctctattccccatccagtg

SEQ ID NO: 841337 - DNA, 539 bp, Homo sapiens
taatataacatatcttcaaagtttcatattacatgacgagttcatttatagatatttatactatttacattctcctaatttatttatttttagcagtttacctagattgtttatgagaactaagaggttaggcaaagttagtcaccatttcaagttacttccctattaacaatttttatagcatgtgaatatcagatgttcacctaagtaagaaccttaaagttaaaaatatgggtatcttgctgctacctcaggagatacagctgttttaattaaaccagcaatattaaattagttttacccataaaaattacataaacaaagataattctgttttagactgggtttttatagttttataaactttgaatcaaagtctggtagcttgaaacatctaacagagacagatataaaacttactgatcaataaacccaggcaaaaaagtatgctgacaattttgaagatttctatttgtaytttaccaataatttaaaaaccagcttattattaaatattttcttaagtcatgtgaactaaa

SEQ ID NO: 841338 - DNA, 630 bp, Homo sapiens
aaaatttaccccttttagatgtacagttttatgaattttgataaaggcctatggtcatatgatcactaccacaatcaagatgtagatcattttcaaccattggagggtcttaagcaggggggttacctgacttgttttccattttaaatacattactcaaacttgaagaaaggtcataggaaggcaatagtacagcagagtctggttaagagactactgcagcagtgtgggcactgtgctggacagtcagggtacagtagtgaatgatcttttgctcttaaaaaagattacagtttagcaggagaaatcaacaaggaaacagaacattataattcagcgcagttgcctgtgtgacatgttgaaatgtggggtgctatgggagtgcctgggaagaaggtatagggattagcaatgtgcaaattctgccttcctgtggcctctctggtctacccaatccctttgggttgggctagaattctccgcaataggtctgattccaagttcttatggagagaggggttcggaggttttgaattctttaaatcctaatagttcaaggtatgaatatcactcctttgaaatgyagaacacaaaggtaaaaagattaatacatcaatgccagataacacg

SEQ ID NO: 841339 - DNA, 591 bp, Homo sapiens
agcccatcttctgcaaggtaatagccctgccacattcccatcaagataagscctcacctattctcttggctgccaggcctatattagtgttaagtcacagcatgacccagtttgggatgtcctggatctgataaaggaagaaaggtattatactccaaaaaagttacatgacctagtcagcatgtaccaacatgtaccagcagcacccaaggtactagagtttgagggttcttgaacataagactgggtaaggatgagtttactggcttggaggcacccttagaatgaaggatttgatgtcttggcaaagactccagggcacagtgcaaactgactagtgaggcttcaagaagcaagagaaaaatgaaaatctatactgagtgaagtggtaataccagaattgtcattgtaaatactgcagtaagagaatgaaagtgtcagggaagcaggcatgctggaatggagatactacgtgaggccagaaaatccaccagaggtttatgttccatgagagggcaagaagacacataccatttaccaaagccaccaggaaggcactggttaaaggcataccagcatcattaaaacatt

SEQ ID NO: 841340 - DNA, 575 bp, Homo sapiens
gttattcagttcttttcctttgcacacaatcttctcttcatcgaagagcgatttcactgaaaaagatgcacaaatggcagataggcacaggaaaagatatttaatcaacatcattagccattagggaaaagcaaagtaagaccacgataaaacattaactacatacctattacaacgactaaacttgaaaacaatcacagcgacgatatgaaacactgccaaggatgcagggacactgcatctcccacaccttgctgatggagatgtaaaatggtgcagccacttgggaaaatagtttggcaatttctttaaaacactaaacagatacttagcatatgactcagccattgcacccctgagcattatcccaaagaaatagaaactcaagccaggcacggtggctcacgcctgaaatcccagcactttgggaggccgaggcagcagatcacctgaggtcaggagttcaagaccagcctggccaacatgacaaaaccctgtctctactaaaaatacaaaaaattagccaggcatagtsgcaggtgcctgtaatgtcagctactcaggagactgaggca

SEQ ID NO: 841341 - DNA, 595 bp, Homo sapiens
ctgtaatcccagcactttcagaggccaaggcaggtgaatcacctgaggttagaagttcgagaccagcctggccaacatggcraaatcccgtgtctactaaaaacacaaaaactagctgggcgtggtggtgtgcacctgtaatcccaactactcaggaggctgaggaaggagaatcgcttgaacccggaaggcagaggttgcaatgagccgagatcatgccactgcactccagcttgggcaacagagcaagacaccatctaaaaaaaaaaaattgtacagtgtcaatgggattcagccagctgtgtctgctagctggcaattgtcatagttagaattctatcctcccgcagagactgggagatggaggtcctctccttctgacaattctatttcaaaggaatggctttcagatcctctagaaacacccctgagttgtaggatatagatacatatacacccatgtctgaaaaaggaaggagtcataattgtaggcccttcttagtaaatgctctgaaaagggaaattaggggtatattgccagatattggctaggtcagacagtaaattctcctggcaaggtagagctttctcgggt

SEQ ID NO: 841342 - DNA, 618 bp, Homo sapiens
ttgcactgtagagattgttctttcttgatctacataaatgctttatatcatagaggctgttctcttccttacttttttcctcaatagtgtttgtaatacctctccacgttgctgctcattgtgcatctagtttattacttttcactgatgcagagaactccctagttgtttcttccagagcttacaaatgatttccctcgtcatcaataactacattgcctccgactccctgctgtcataagcaatgctgcaataaatatcacaattcgtatcctatttaccgaggacttggatttgtggagtcaaagggtcattgtatatacaatttcaccaagcctcagaaaggctgtgcccatttaaatgtccaatagcaatgcctgcagagtcctgtttcctcacatcctcactaacactctatattctccaatctgtagctttcgtcagtcttacagatattgtgtcacacacaaacatacatacatacttatgtacagaytttttttcttaggataaaatgtggaattaaaatattgttaagcataatcaacaaaaacagactactttgaacctacagaagttttgaatagatgctgtgctctgaaaggccttattttgata

SEQ ID NO: 841343 - DNA, 611 bp, Homo sapiens
tttaaccttgtacgtaattgttatagaaacaaaacagagcttaagatcgggggaggaagcccttaagaagtcaagaaacttgagaagctatttcaaccataaaacaagaacaagatactaaggaaccaattacagaacaaggaagaactttaaaaagttaaagtaattgctctagtaaaacaattcagtaagacggattgaaaaacaaagctgagaatggttcccaaacacaaagcaagaagacaaagatatagaaaatatgaaataaagaaaaaaaaacaaaaatgaaatcagaaggtctaccatttgactaacagtgaccccaagaaaagtgaatggaggaaatggagtgaaagaagttaataggaaaattagagaaaaaaaatttctggccacagagaaggcacacagagtgctgaatacagtaaataatatactttttaaatcctagaaacatcctgatgaaatattaggctgccaaagataaaaagaagacagtaaaagtttccrgagagaagaaaatcaataagaaacaattgagaatcacatggttgttatttttaaaaccaacgtaataatggtggattaccacaaccttaatgttatagtcc

SEQ ID NO: 841344 - DNA, 567 bp, Homo sapiens
aataaccattatttacatgatctttttaastaaaagtgaagagctttaccaaagattaagttgaatatatcttatttatttagagctttattttattaagtattttggtatacattattatacccaatttatttatatatctccctgagttaggcagggcagatattattattcccattacagacataggaaaattgcaatttgtagagaaatggctcacttcaggcaatttggcaacaaagtaaggaaacaaataccagtatccaaattttcagaattcacattatcttttaacatcatctacatgatctctggtatcagacagccagtatataaaacttctatactaacaccttgcataaagtctgatacatctctcaggaaatacaccaaatgtttccttaataaataactcacaagattccttctattagcaataggaattgcccaactagacataggacactttttttttcatattcttttaacattgacatattaacatacaggaatattgtaagactaataattaggaattttggactagtggcatagagtttgtaaata

SEQ ID NO: 841345 - DNA, 562 bp, Homo sapiens
agagctgtgctgtgtcttggtagattattttaaaaatagtattattataaaatgcatagaaatttggaaaaggaggatatgcagaaaagctacaaaatgaagcagaatatattcttccaggatgtttaaattaattgtagtttctgaattatttggagacatttttgctgtgtttctgccccctcgtacttataaagtccttgaaagctttgcagtcttttgaatggattagatagatatataactgttaagatatgatgaactcccaacagtagctttttacaaaataagcctccttcaacttttcttagaagctctaagtccctctttcattcaatgcaatttaactcatttgaatattttattagttgctttctgtatgtcagcatggtgttaaaccatgaggttatatataaacacacatactagcttctgctttcaagaagctcacagtctgaaggggaaatagactttccgataaataattatgatatggtatgaaaactagtaacataattgmaaatataagatacagaaatagcactgagaatgtatcgataaa

SEQ ID NO: 841346 - DNA, 629 bp, Homo sapiens
tataatttattaaatgctttgtctttcttttttttccctcaaacttgtaagagaaatcagaatgaggttcggttttctttgatttctttttttattttctttctttcttttctttctttcttttttttttttttttttttgagacagagtcttgctctattgcccaggctggagtgcagtggtgccatctcggctaactgcaagccccacttcccgggttcacaccattctctttcctcagcctcccgagtagctgggactacaggcacccaccaccaagcccggctaattttttgtatttttagtagagacagggtttcaccgtggtctgatctcctgacctcgtgatctgcccgcctcggcctcccaaagtgctggaattacagcgtgagccaccacgcccggcctttctctttgatttttaagaatgagtttgtacttcatttctgagtgagttatttggttagttgttagagatatttcccattcttattttcaaaactgtatgyatctaagtgagggaaataattctggtgtcaatccaaacagaattaacctctcacctccacagtccatactgagttaacattcagttgtcttctacaacccagtgttaatgaaaagctatg

SEQ ID NO: 841347 - DNA, 577 bp, Homo sapiens
catattttaaaagtaacaaccaatggggtttgctccaggaatcatagtttgttcaacattagaaaaatcaatcaatgaaattattcataaaacagactgaaaaagaacaatcatatgacagaaatagaaaaagtattttacaaaatttaacactgttcataacaaactctctcagcaaactaagaagagaaaggttcttcctcaatctgacaagggacatctataaaatacttatagcatcatagtttatggtaaagatggaatgtttttatactaatatcaagagcaagacagctgggcacggtggctcacgtctataatcccagcacttttgggaggccaaggcaggtggatcacctgaggtcaggagttcgagaccagcctggccaacatggtgaaaccgtgtctctactaaaaatgtaaaaattagctgggcgtggtggtgggtgactgtaatcccagctactcggtaggctgaggcaggagaactgcttgaacccgggaggcggaggttgcagtgagmcaagaagaagccattacatttcagcctgggtgacaaaggcgaaactccataaaa

SEQ ID NO: 841348 - DNA, 564 bp, Homo sapiens
tcattttgggctttttcagttttgaaaagctatggcaatgctgaacacacattcccctgtggattcctggggaataggtgagtagcagctggcctttttatggcaggcatgatctctccagttaaacacagccctcagctgtgtggcttcattcattttgattgcctgcctggcccaggaacttcagtttgtgagccttgcactgagtctttccaagcaactagctctatgaggcaaaggagaatggaggcttgtgtgagtggaagagagctttctctggcagacacagtataagtaatgcatgacattgtcctactttgaaataaaagcagtgaataaaaagatagtacctgcactctgggcataatgaaaatttcctttcctattgatataatcaaatgaagatgaaaagcagttttaaaaatatgaaatcaaagcagagatttcagaatatrtagaaaataaaagtgaaaacactctgaatcaggacctatgcaacacagctaaagtcgtggccaaagggtaatttgttgtcttaaaaaacttatcaaataagaaaaaagt

SEQ ID NO: 841349 - DNA, 523 bp, Homo sapiens
accaaattatacacattataaatatataatttctatttgtcagttatacctcaataaagctggaaaaaggtttattaraaaaaaaggaaatggatgtagaaataaaaataaaccattggattcatcagtcaatccagttttcaatcatctaagaataaaaatgttttccacttatacaggaaggaaaatggctgaagactcttcaacaaagttatgatacatcaaatatttcaaaatgatgcaaataacggattttgtcaaggcaagtgtaagaagaaggaaaagagataatgataggctagaacttattagggacatatttgaatctcagaatcagtatttacaaggtggatatgttccaggttcatatacaccacatgtctccacatgcagctggttgcattcacagaatgttgcccaattggaatatatatgccttcaaaaccagaaaaatataaggaaaaaattaggtgtgctgtgcttaagtttctattataacttctaattatgttgtttttctact

SEQ ID NO: 841350 - DNA, 539 bp, Homo sapiens
atttcaatccttaaaacaaccttgcatggtacattaaaattacttccatttaatagrtaaataaattgaggcagggtgaagtttaaatatatacagctactgatttatgtactgacttacaaataaccggtatatatttgaatatcacttaggaaaagtttgtatcatatatgagagtttgttaaaggaatatatagaaaacctccatcccttccccacttcatctcctcccctgacacacaagcacctctgggacactgttctgcttttgaagactatacagcttcagggtagaagaaaagaagcaaaaagagttataaaaagtttctgatacttgtcaacctccccatcctcaagtctatccccagaaaaccctccacccccggactggatgtcttcatataacaggattgaacaatgattcctattagagatttggctcaaaaagcatctttgtgctaaagtgtaatgaaagaactcttggaaagattaaggaattcttggttattagcacattattgtcagctagttcaatgaca

SEQ ID NO: 841351 - DNA, 614 bp, Homo sapiens
tatataaaccttttgctaataattaaaattctcaaatgattggtgctacctctgtgaccccaagaagaatcaaatgagatgatatatgtgaaaatgctctacacaactctagaacttcargtttttttagtagatacaactctgtgaatatcaatgttttgcttttatgggaggggagggaaagaaattcaaagtttacttccccatcccatgacatccagacactgtaagcattagcagtatgttggaccacttcatcatacttacatacatacatgcatacatacatacatacatgcaatcttacaccatcaaaggatgtgagcagttcaaataatctgcatagaaacaattcccactgctagaaaaaaaagagtaaatgctaagtaattgttgctgtcactaaaagcatgaatggaaaacttttgagtttcaaagaacaataaaattccaaaaacattttgcagactgacataaagtaactaacttttatttatcaatgacatttttaaactagctcaattaacaccactttaccatttaattccttacgttgaataacctatgcattaataaaaagtccattgtctatgtttttctaagcccataaaaac

SEQ ID NO: 841352 - DNA, 553 bp, Homo sapiens
aagtctataaattaagctaataaatatgatctcttcttctaccttgactttcataatggcctaaaagaccagatttgaattgggaattcagaatgcaggagtgttggaggtgacaagtacccttatccttccacccctagctccattcagcaccacaaggggcctcacctctgcataatcatgggcacctgtgccagctcatgaaattccattcacatctctgcaattagctgctccttagacaccccttgggactgagagtgtgtatactggcttctctgtttgcccccagtaggaacccccacaaagaaccccaaacaaccccaagaaacaggcttggggcttttgggcatggaaatcctatatctcagagtgccacaggcagggcacgggctccaggtgcatacattcccttgggcctacggactccttgccctgtgcagaggggcaagatakaagagggccagagaaagggaagggcctcttgcctagatctatgggcagtagtgggttcatctacaggcagaggtagattgttcagtgtcagtcaaga

SEQ ID NO: 841353 - DNA, 560 bp, Homo sapiens
tagagcccattatcaagcaatcagtgtttgtcagtttacaaatactgtaatcagcatgtgtctgtgaagtgaaagcaatgctagatatgtctgtttttctkttataaaagagttattgattttatacagggaatttacaaagcttttagtatttttcaaagtgtgttcaatggatgttaatagggttatgtggctgaaaaatattacctagtcaaataaatttaagaaactggaatacagaagataaaacagatttctttactgtaaaacgggtcagagcctttaatattgctgattttcaagaagggttacagaatgcaacatagcaaaagctgattctatgatgaatcttgagaatcttatgttctaagctgccaaaatgctcaggtagacttacgtaagcacctgctttggctgttcaagagcagaacctgtccctgttcccctttctatcactggtacctagcagagtgcctgatactgacaggtgctaattgagtatttgttgactgactgaatgaataaataaatattcagtagaaccctaaagaaaaagatag

SEQ ID NO: 841354 - DNA, 615 bp, Homo sapiens
ataaccttattcttaagagctgaatactggagcatttataagtaaaacatccwatgtatatacttggaaaaaaattaagcaaaaataatagataagtaaatatggaaaattttaacaattgctaaatataagttttgaatgtataaaagtttattatatgattttatctactcttcatgacaaaaagtaaagcaaaaatccttaaatataatgaaaatatatattattaaatcgtagccagatattgcctgcagaagacctaagcctaaggcttactctttctttactgaaatggatgaatatcacagactagcaccaaacgaagacactttccttgatgtaatcagaagtaaagagcaagcaaagtggggaaagaggaataacataacttaggacagccgtctgctgtgacaactcattacacactgagcatctgtctattcaccaaacttgaaacatatctcaaaatgtatttcaaggaatcaagacaaaagccaactgaatgagacttgataaccagaaatgccttcctttagagataacaaagtgtttattagtacgcaacttcttggcacgaccaaaggcagactgcagtgcacttactttttgcttgcc

SEQ ID NO: 841355 - DNA, 511 bp, Homo sapiens
ttggcctcgcaaagtgttgggattacaggcgtgagccaccgcrcctggccctcccctacacatttctaagtatcttacctgattttctatggcacctttgggttgcagaaccttagctgtaggagaaatggtggtgacggccaatgtctggcactgactttaacagagtacagatgtgtatgtaaatagtacttattttaacaaaatagaaagttcaagaaagaaatacagcaacaaaagtgacaattagattggaagagacccattcttgtttgcttgttttctccataagccatctagcttttttttttttttttgtgagacggtctcactgtctcccaggctggagtgcagtggtgccatcacagctcacctcagccttgacctcccaggctcaagtgatcctcccaccttagcctctcaagtagctggaagtataggcatgtaccaccatgcccagctaatttttttttatttttcatggagacagggtctcactatattgcccaag

SEQ ID NO: 841356 - DNA, 546 bp, Homo sapiens
tcgaccagttctcaccttatactttcttttctttctcacaggtgtcttttttgttcccrttgttagttctgtctggtctctgaatttcatttctttttgttttttctttcctttctttcttcaaatggacatacatttctattgcctgaattcaacctgagaaagaaaaaaaaaattaaaagtacatattttgctgttctatttaatcaccttgaaaagattaattcattactctttgattaattgatatttatttattccttcacatacactcttaatatttacagaaattttaatcttgtcaaatctttctcaagactttctattaagtgctacagagactagagagtgtgcaaaagtgtaataactatcaaggaattcatggcctagtgatgtgtctaaatagcttgcattagatatcctcaaattagcagtacagcagtgaaaaaaggaatttccagttgtcgttttaggcttgggtaatttggatgcagatagtactagagaaacaaaagacagaaaaagggtcagttttggagaaaaggt

SEQ ID NO: 841357 - DNA, 306 bp, Homo sapiens
tcagggtagtgtaatactggcctcataaaatgagttgagagatatattccccctcttctatttttctggaatatcatgtaaagctgatataaattattctttaaatgactggtacagttctccatctgggcctagagatttctgtttgggtagatcattagtagttcaatttctttwctggatatagggcttttcgatactcaacttcatcatgggtgagttttggtagtttgtggtttttaagaaattaatccatttcttccaagctgttgaatttataagtgtgaagttgttagtagagatcct

SEQ ID NO: 841358 - DNA, 622 bp, Homo sapiens
ggaggatcccttgagcctggagttcaaagttgcagtgagctctgattgtgccactgcatgccagcctgggttagggagcaagaccgtaccaaaaaaaaaaaaaaaaaaaaagaatgctgatgttgcagacttcatctaagataaaatagattttaaggcaaaaagcattattgggggtatgaagcgttgttacacaatgattttttaaaacccctatttaaccttgacgcatcaaacaacatagccataagcatataatccaaacatcagcagaattataaggaaaaactgaccaatctctagtcatattgtgagattttaacccatttccttctgaaatgggtagacaaaaatggcagacaaaagttaaggatatattaatagaagattttaataggaaattaggctcagaatggtgaaatttgtttgtttttgccaaaagtcatctagctggtaaaggaaaaagttgattgaaactcaaatctgttttaatacagatcatataaactgtgtttttcctarcagcacctgttaaactgatttgcatttcagcattcacagtgaatattgagtgaatctcacaattactttatttctgatatttccttatctgtttgcagag

SEQ ID NO: 841359 - DNA, 560 bp, Homo sapiens
ctctctcaaaaaaaaaaaaaaaaaaaaaaacaaactaaaagttacagttcatgtctcacgttcacaaagstcttcccaccggctaactgctaagtctaagaaacagcctggggttacagaatgtgaaatgcagtatacattcgtaattccttatccagaatgctgaaatccacaacattatgaaaactgggttttccttaagctcgatgtcaaaattcaatgagcggcaaaatctgacctaaactgagtcatggctatttataatcttaactcctcccccttactgtgaatactcacatttcactggagagctgtgtgaatgtgcctgattacagggtgcagtcctagaccccacctggggattacataatacacctcttatacattgtactatcttcctaaaatctgaaaaattctgaactctgaaacacatacagccccaaccattccagagaaagcactgtggacctatgtaacatgccctggtccaagaagaaactcacttgccatttgaagaaacaaagcatacagcacaggaaaagatatcctgtgatacaagg

SEQ ID NO: 841360 - DNA, 580 bp, Homo sapiens
gttttcatggctcatgctattgctctccaaacagacttatcaccaaaattatcatgcagtgattcggcagccgccagtggtcccaaatgcygcaggctcattctgcagattgatggagaatgggcatttcccacaagctccgccaggtctagcttgtgcctctgctgagagacccaccttcccagccctaccccatggaagagagaaaaatcctaaattaacaatgtgaaatcctgaaatgaccaagaaaacatcaagtaactgaacgtgtcctcaagcgacaagattctctttcctgttcttgagcagggcccgggcgtgagagctgaagcaggccggggtatacacaggacagtggcccaggggacacccaggcctgagagcaggaagagcggtggggtcacagaacaacccggaaagacgcagacacactcagaacttccaactgccagtcgtatccagctgcagatgctggcataggtacgcagaggattcgtgccctcacagaatggaacggtgcccacctgaagggaggcaactgggaggagcagggaacaaggtcccccccacgcccaggagt

SEQ ID NO: 841361 - DNA, 580 bp, Homo sapiens
gttttcatggctcatgctattgctctccaaacagacttatcaccaaaattatcatgcagtgattcggcagccgccagtggtcccaaatgccgcaggctcattctgcagattgatggagaatgggcatttcccacaagctccgccaggtctagcttgtgcctctgctgagagacccaccttcccagccctaccccatggaagagagaaaaatcctaaattaacaatgtgaaatcctgaaatgaccaagaaaacatcaagtaactgaacgtgtcctcaagcgacaagattctctttcctgttcttgagcagggcccgggcgtgagagctgaagcaggccggggtatacacaggacagtggcccaggggacacccaggcctgagagcaggaagagcggtggggtcacagaacaacccggaaagacgcagacacactcagaacttccaactgccagtcgtatccagctgcagatgctggcataggtacgcagaggattcgtgccctcacagaatggaacggtgcccacctgaagggaggcarctgggaggagcagggaacaaggtcccccccacgcccaggagt

SEQ ID NO: 841362 - DNA, 580 bp, Homo sapiens
gttttcatggctcatgctattgctctccaaacagacttatcaccaaaattatcatgcagtgattcggcagccgccagtggtcccaaatgccgcaggctcattctgcagattgatggagaatgggcatttcccacaagctccgccaggtctagcttgtgcctctgctgagagacccaccttcccagccctaccccatggaagagagaaaaatcctaaattaacaatgtgaaatcctgaaatgaccaagaaaacatcaagtaactgaacgtgtcctcaagcgacaagattctctttcctgttcttgagcagggcccgggcgtgagagctgaagcaggccggggtatacacaggacagtggcccaggggacacccaggcctgagagcaggaagagcggtggggtcacagaacaacccggaaagacgcagacacactcagaacttccaactgccagtcgtatccagctgcagatgctggcataggtacgcagaggattcgtgccctcacagaatggaacggtgcccacctgaagggaggcaacygggaggagcagggaacaaggtcccccccacgcccaggagt

SEQ ID NO: 841363 - DNA, 622 bp, Homo sapiens
gtgtgcatgcatgtgtgtgtgtgtacatgcatgtgtgtccacatgtgtgaatatagagggggctcagcatgctttataacatgtttatataacatagaaattgtcagcctgggcaacatggtgaaaccacgtctctactaaaaatacaaaaattagccaggtatggtggcactcacctgtaatcccagctacttaggaggctgaggtgggaggattgcttgagccctggaggtcgaggctgcagtgagccgtgatggcaccactgcagtttggcctgggcaacagagtgagactctgtctcaaaaagaaaaaaaaaaaagaaatcaacctatggttaaatttgtaatgccttcctcagaattttataaattattttcattgcagagaaattgggttgaatttgaaatagtgggagtacttgcccttcatcttaatgaggccagcacagaaggaaaggcgggagtgtgtggagtctacagcctggcctcgaaggctgagggcacctggaattttgtgtctaacaaccgaggattactgcaggggctgaggagggcagggccgacrgtgctcatcggaggcaacatcactgctgagatgttgagaaagatggaaattgtgctgg

SEQ ID NO: 841364 - DNA, 646 bp, Homo sapiens
gaaaggggttcccttcttttgaggatccctttaagtgggtgctacctaagactgcaggtccacggtctcaaataattctcttctttcctccaaaccaagaaktcacgaataacctaaattaaaaataaatgttcactgcatcaaatgtgtagccaacaatttggtgccaggcaccgtgcctcacgcctgtaatcccagcactttggaaggccgagatgggcggatcacttgaggtcacgagttcttgaccagcctggccaacctggtgaaaccctctctctactgaaaatacaaaaattagcctggcatggtggcgggtgcctgtaatcccagctactcaggagactgaggcaggagaatcacttgaacccgggaggtggaggttgcagtgagccaagatcactccattgcactctactagcctgggcaacaagagcgaaactccaattcaaaaaaaaaaaaaaaaaagtgctgggattacaggcgtgccaccacacccagccctagggtttcaattacttagaacacaaaagatgaactacaaataattcatctaataaaccttttaaatttttagcaaaaaaaattatttccattttaaaataaaacatttattaattaattatttcttggaataccttttagg

SEQ ID NO: 841365 - DNA, 551 bp, Homo sapiens
gggacgccaccgtaggaggaaagttaacagatccagaagttgtgtgaactgcctggtgagcccaggcattggtgagaccacagcagggctgaatggagggaacaaaactctgtcccytgagcattcactctggccatctctcctgttcttctctcttcagagtggaggtccatgtgctcagacagaggaggcattatcctgacctttctcctcccagaatcaagttttatcacttacgctcagaaatctgagcttgctcttggaattcagcactggcttcatggatccttctctgccaatgtgcattttatggccaacgaatgaccaggactggttggttggattgtcgtaaattcacaagacatgttcatggagatcttgccaagggtgtggccacttcagccattgcatcagagctagtggaggggagatcggggtggccagcttggccgaggatgtacgaagtatgtgtaaacattctttctccactgatatcaagtgtattagtcagggctctcgattgcaagcactctgactttcttaggcaaaaa

SEQ ID NO: 841366 - DNA, 606 bp, Homo sapiens
  misc_feature 187: n = A,T,C or G
tacaaaaaaaccctcccgggggggaaaaaaaaacaaaaaaacggtgtagtgtgaactgctgaagaacttaaatgttcaagacatctttaaagtctaggagtacctgaaaactgtgggtaaacatggaccattttccttgcgtatcaacttcacactaagcatctaacattcaaacaaaaaagtgcanaatttgtaattatttttaacagcaagaattcccaacctcctgccatccactgatgttccatcctgtttgaggttctacattaaaacatgattacttttgccataaaagaaaatattacccttaaaatatctatttgatatgtacaaaccacatttttattctgacaggtcacagattttgagcaagtgcttccctaggtgaccctacctagccaatatgaaggtggagcaaacactgctttagcttaactgcactaatatttacaccatgtaacccttctaaccaaatagaatactgctgacctgtcatcatcagtttgtgtgacatggctcaaatgtacaaaaataaacatagggagaaattaacccaayagatttcaaattaagtgataaaagcaaggcaattcaaatattaacatg

SEQ ID NO: 841367 - DNA, 570 bp, Homo sapiens
ggcttgtgttgtaagttaagtcaacatgtagcttaagtgcattttttaaaaattttattattattatactttaagttttagggtacatgtgcacaaagcagagcaaagctgaaacatttaaatattcagatatctccctctaaaatatttaagccaatgggggatgaaacattgagtaataatattgtgaaatatgtgacataagaattttgtcctagaaagtacccatgttaggaatgttgatgggaccaccagggtcatagtgatctttctccacatggctttcaaattttcttctccttttgctgaacattacttcagaaataaagtgaccccattttccagaataaatttatcttttaagcattggtaacattatttttagcatggaaataaatattgaaattttcagttgtctaattattttacccccaaatatccccttttgaatttcagcattttaccgtaggagagagaaagtagtataatttcctcacccttcacaagggtcacagctaamaaccctgtaataaaagatagattagcaagagaaaagcatattcatttatt

SEQ ID NO: 841368 - DNA, 664 bp, Homo sapiens
agttaaacctcccacctaaaacactcagagacttctcattgttcctttattgtcagaaagcgaaggtactgatttgaaattcactgattgtttctggaacattgctattcaaatgactcacctctatacggtttgtcatccaatcacaccagcctgaattttgccatcatttcccttaactcagcatcacattctgtgtacatatgtggtccacatttagctcaactcttttctatgcccttcatgctgacttttgcaaaattcataacattgtcacctgcactctgggttgtaagacaagtagactttgatcatgtatgtgccctataagtaaatgtaattgcatttaatattcaccagttctgccactttctgatagctgtaatgaaattaaatgactcacagcttctatgttgcaggagaatgggaacatcataatttttcttccttagctagtgataatattcttttcgattcacccaatttgaggaaaaaatatgccagagaaagaatagcaacatcttggcaaaggttagagttaatactatattctagctcaaggaaatgatttaaatttctatctcrgtattttcttccatattgaacaccagggttgcctcctcagaatctattttaccactgctctatcatgtagcagcatcag

SEQ ID NO: 841369 - DNA, 636 bp, Homo sapiens
tttattactgttttaaatatttgtaacattataggaaaacaagccataaagaatattcattttgaaaccaaaggtagaatttagaccagactccgctrtaatgatctaaatatttaatcttgttaagggtgtggagaaatgtctctagacatggacatatgaactaatatgacctttcaggagtgccatctaggaatacatttcaacattttaaatgtgcagctgttttgatctattaattcaacatagagaaattaatcctaaaggaagagggaaaatattcaagcacgaacatattgtatagtgttgtttatattgatgaaaaattaaactatgtgttcatatggaattgataaaactaatgctactacaaataataatactaatcatatgtcacctttattgagtttttacgatgtgtcagcaaaatagtaagcactttacatgtgttatgtcacttaattttctccacatcctaataatataggtactataattgtccccatttttcagacaatgaagctagctaagcggtagagatgttaaataccatctcaaggtcttatagccagtgagtggcagaattgaacacatattataaattcataatatggagtcattaagaaagagataagc

SEQ ID NO: 841370 - DNA, 556 bp, Homo sapiens
taggctccctttttattggaaagtaggccttcacctttggcaggtggctctattatgctaagcagctcacaaatctggtggagaagcacctcatactttctttgaatacttgtgttccacattcatasgtggtgttcagaaaacctgcatgagagcagtaaccatgctctatttagagggagtgatgtgtcctaaaaagctggcatgggtaggccatgcgtagcccctaaaggtatctgccgcagttgtaacaaaacacaccagcagtcataatcatgaaatgcttcgtggatttctcgcccagcttcctaattatgaaacatatatttcacaaccatttgaagtctttttttgaagaatcgttatttctctcagcatgaaggcatgcaatgtaggtagtttacatagtcatgggaggtaaggttttagttttatttttcaagttcgatatcactcaggtcttgctctagcagcaggcattggctcaagatgtaataaaaggactgaaccaaaataccctgcctgaaatacctcttcttatcagcatctaaaaatc

SEQ ID NO: 841371 - DNA, 593 bp, Homo sapiens
ccaaattttatatcattgtgaatttttctaaggagagatccatagctttcatgggattcatgatcaaaacgaagaatcaccagaaaaactaacccaaattctattttaatgagtatgtatcaactgtaaatggtatttccttttatatctagcatattccatcatggaatgactgtttttataggtcaaacatagcgaaccaagcaccagaaatttcaattggtcccacctaataacaaacatttaatataaatatataaataaaagtgtattaaataagctttttataaatgaaaatcacattttaatataacttatacaaacaatgtatttaatcatgtaatacttcaatatatctgagtaaatttatgctaaatgcatctgtttatggctatgctttacatagacagcagcaattattagagctttctaatatgtataccagacacataggcacttacaaggtcataaaagcactttggaggccttttgtacacagctattggtctccgggatgactgggtgagattgtttttcttttccagaatcttwtttttaaagggaataccgtaccttatatataaaggcatcaa

SEQ ID NO: 841372 - DNA, 597 bp, Homo sapiens
agaatctgccccattgctggccctgccttcgayggccagagctctgtgtaacaaaggtttgtcagctttttgccatactcaatccttggggatctctgccaagactgagaaatcggagcccttgctgccctattgaaaaatgagagggtgcatatccagcagggatgtgatagagacgaccaattggtatccaagcgttcatttactctttcaaatggaaaactctctttccaaacacagtgtagaggaaaacaagaccaaccgcttcccaccagccaccgccctccacccaaaaaaaagctttttgataagctgctgacagtgtagatttggctggtgttttacttactttagagacttgctttgtagatcttacgacatttgctacatgacagcgtgatgtgttaagcatttaccttccaaaagaagttcaggaaaataaggcaaagaaaaggaaagaaactggaaactattgttaatgctccccttcctaacgaagaaagcttaataggcctaccaagacgctagcagcaatttaaaaaaatcaccagattccaagattcctcttgggtttcacagagaaacgtaagggttcac

SEQ ID NO: 841373 - DNA, 587 bp, Homo sapiens
gcctttatatataaggtacggtattccctttaaaaawaagattctggaaaagaaaaacaatctcacccagtcatcccggagaccaatagctgtgtacaaaaggcctccaaagtgcttttatgaccttgtaagtgcctatgtgtctggtatacatattagaaagctctaataattgctgctgtctatgtaaagcatagccataaacagatgcatttagcataaatttactcagatatattgaagtattacatgattaaatacattgtttgtataagttatattaaaatgtgattttcatttataaaaagcttatttaatacacttttatttatatatttatattaaatgtttgttattaggtgggaccaattgaaatttctggtgcttggttcgctatgtttgacctataaaaacagtcattccatgatggaatatgctagatataaaaggaaataccatttacagttgatacatactcattaaaatagaatttgggttagtttttctggtgattcttcgttttgatcatgaatcccatgaaagctatggatctctccttagaaaaattcacaatgatataaaatttg

SEQ ID NO: 841374 - DNA, 591 bp, Homo sapiens
agaatctgccccattgctggccctgccttcgayggccagagctctgtgtaacaaaggtttgtcagctttttgccatactcaatccttggggatctctgccaagactgagaaatcggagcccttgctgccctattgaaaaatgagagggtgcatatccagcagggatgtgatagagacgaccaattggtatccaagcgttcatttactctttcaaatggaaaactctctttccaaacacagtgtagaggaaaacaagaccaaccgcttcccaccagccaccgccctccacccaaaaaaaagctttttgataagctgctgacagtgtagatttggctggtgttttacttactttagagacttgctttgtagatcttacgacatttgctacatgacagcgtgatgtgttaagcatttaccttccaaaagaagttcaggaaaataaggcaaagaaaaggaaagaaactggaaactattgttaatgctccccttcctaacgaagaaagcttaataggcctaccaagacgctagcagcaatttaaaaaaatcaccagattccaagattcctcttgggtttcacagagaaacgtaagg

SEQ ID NO: 841375 - DNA, 553 bp, Homo sapiens
ttttagatgctgataagaagaggtatttcaggcagggtattttggttcagtccttttattacatcttgagccaatgcctgctgctagagcaagacctgagtgatatcgaacttgaaaaataaaactaaaaccttacctcccatgactatgtaaactacctacattgcatgccttcatgctgagagaaataacgattcttcaaaaaaagacttcaaatggttgtgaaatatatgtttcataattaggaagctgggcgagaaatccacgaagcatttcatgattatgactgctggtgtgttttgttacaactgcggcagatacctttaggggctacgcatggcctacccatgccagctttttaggacacatcactccctctaaatagagcatggttactgctctcatgcaggttttctgaacaccacstatgaatgtggaacacaagtattcaaagaaagtatgaggtgcttctccaccagatttgtgagctgcttagcataatagagccacctgccaaaggtgaaggcctactttccaataaaaagggagccta

SEQ ID NO: 841376 - DNA, 583 bp, Homo sapiens
attactaaacatatgtttgctatgactatttctactttgtgagatacactaggtaagaaagcaattagtagtaaacaaagttgtataaaaattccaatctgccagcttcatctttccctgtaggagacagaaagtcacaagagaatgtcactcccacccaaataataaaaatattctaacctacaaaatcacagtttatggaagcccattggaaagctgaattaaaaaaaattcaaaaaaatgccaaacccctactgagaaagaaggaagccatctctgcttttctcctcgacagagcacctgaaaggggtagaaaattctgtaaatgctgataaaaagcaaccaaatacatttcaaaaagtgaaagtctgaatgcatattggagtggcagtctagaatcccaggttatgacaggaacaaatgatatctgcaccaacatttttgtccgcaagccttcaccaaatgtttttgagaaagactagaggtagtgcmtgatagctggctcttactgagacaaaggtaaagtatgtggcttcctaatatctgaaggtggggcttgaaatttagaaaaaccctatgggta

SEQ ID NO: 841377 - DNA, 609 bp, Homo sapiens
ccctgtccccacctggtgcccacctgcggacgagggcctgtcctcccacacgcggttggtgagcggcgtccggcggttgcagtctccctccgagtgcactgaggagacagagggtggccggtccccagatgccaggcccggggccggggacttggcttttcggctgctgggtctgccagagaccttggccttcccgccgccacctgcagggggacaagatgggaaggggctgcgttgggcagtgaagacagcaccgacgctacggtggggccacaggggcagggtgaggtcctgccatgggcccctccaaagagggagggagagcagtaacgtgaacccctcctaccctgctgcccgccccagctgggaagccagggttgaccagatggccagccatgagcctggagggtggagatagtttctgctgggcagggggaggtggctaaactgtctgctgtttgcaatagccccctgggctgtcctgcagckaccccagcccccaggggctggaaccctaagcaaaagaaaggcttccagctttgagcgtggccccaggaccatgctaaggctaggcaggatccaggccccgtgcagagaagtcaggacccc

SEQ ID NO: 841378 - DNA, 597 bp, Homo sapiens
aacccagcactgccactcctaggcacacaccaggcaaatgagagcaaatgtctatgcagaaacctgcacgtgcccaccactgcagcaccgcccagcgcacaacagccagaaggcagagacaacccgacatccaccaagagacgaatgaggagacaaagcgtgccctgtccgcacgatggaacacatggccatcaaaaggcatgaggctctgacacgggctatgacgtgggtggaccctgaagacacgatgcgcgtgaaacaagctagtcgcagaaggcctctagtgtagattccgtttctgtgaaaagtccagaacgggccaatccatcggggacagaaaggagatgagtgggtgccagggctgggaggagggaggataggggtgactagtgatgggcatagggtttctttcttagtataacactgaatatactaagaagaactgaatgatacacgttttttttgagacagggtcttgctatgtcactcaggctggagtgcagtgctgtaatctcackgcagccttgaccccctgggctcacgcaatcctcccacctcagcctccggaattgctgaagctaaaggcacacatcaccg

SEQ ID NO: 841379 - DNA, 365 bp, Homo sapiens
ctaggtggacccaggaatctgcatttaaccaacttctcgatgtcctaagacatggtgacatttgccaccaactgtcctttacagagctctttctagctttcttttgagaactagacactcgcagcgtcacttcacaacacacttgccagggaggttcagagccaaaggcagggtcaggaggagaaagacaagagctctgcccctcgagggttccgtcgggtttgagacaaggattgcactgtgttatcagagacccagaggggagagaagataggccagggyagtgtgctcttcaaggaagtaatgccccagctgggttttgaagtgtgtataggggttttccagggagatgggggtcaggggaa

SEQ ID NO: 841380 - DNA, 573 bp, Homo sapiens
aataatcttctctagctgctgctggmttgtccaaaccaacgtgaaatccaaagcccttactcttctcccataatgagatgctctattatttttaaaaacaaacttggagccgggtgtggtggctcatgcctataatgccagcactttgggaggccaaggcgggaggatcacgaggtcaggagatcgagactatcctggctaacatggtgaaaccccgtctctactaaaaaaaaaaaaaagaaaaattagccaggcatggtggcaggcacctgtagtcccagctactcgggaggctgaggcaggagaatggcgggaacctgagaggtggagcttgcagtgagccaagattgcgccactgcactccagcctgggtgatagagtgagactccatctcaaaaaaacaaaacgaaacaaaaaagaaaaacaaaacaaaaccatggaaaaataaaaagcagattaatacagagactgtttttcattccagtctcttgtatttcaaattaatagggttttgtacaaaggtggagcctgtgtttccatggtagagcatttggaaagaggagtgtaaatttc

SEQ ID NO: 841381 - DNA, 580 bp, Homo sapiens
acatgtgggaattatgggagctacaattcaagatgatatttgggtggggacacagccaaaccatatcaatctgtaaaaagggtcccagtatctaccttgtttgttgtttgtgaggattaaattgaaagcatgtaacacactgtgtggcatataataaactaatagttaataaaagttagctacctttatggtcagctttccctatgaaaagatagaatttggaaaagagcacattaaaagcaaacatttccaaggcacccacagttgagtttgtgttcactgtgcaaagaagctcagcataaaggtataatttctatagtcagagttccttcttccttcatctcttctttaggcattttttttctctatccttttgccagtttggttccgggcacaaagttgtttctggcttgatctatcagataaagcccaaggctggtcctagccacaaaataatcttctctagctgctgctggcttgtccaaaccaaygtgaaatccaaagcccttactcttctcccataatgagatgctctattatttttaaaaacaaacttggagccgggtgtggtggctcatgc

SEQ ID NO: 841382 - DNA, 485 bp, Homo sapiens
tgcagctccaaaagagaccccttccttctgcttgagaagaaaacatggaagagtggggaggatttgtcttgcatcttaaataccagctctaccatagcataatagggcaccagttaagagtagtgaggccttattccaggcactagctccaggacatttccagacagaccctgggcccaaagagaaccttctaccttaaagggaaaaacccagtcctagcatttgttacctgctaactgaagagcccttggaccctgaataatcagcagtgatactcacatactacctcaagggctgtgcgtgagccttaggcttgttggcttcaggtgagacccagcacattaccacctgtggtagctgtggggaaaaactccttcttgagaaaagtagagaaaaaaataaaggggactttgccttgaaccttaggtacyagaatggccacagtgtgtcagagaaccaagctggattttgggatccctgattct

SEQ ID NO: 841383 - DNA, 650 bp, Homo sapiens
ttttctttattcattttctttatttatycatcccttgatggacatgcaggttgattccataacttagctattgtgaatagcgctgcaatgaacatgggactacagctaactcttcaacataatgatttcaaatctttcagttaaatacccagaatcagaattgctgggtcaaataatattatatttttagtttttttgagtgatctttatactttctctttcataatgtttatactaatacactttcctatcaatagcatgtaagggttcccttttctccacatcctcaccaacacttgtcttttctctttttgataacagatttaacaaatgtaaagcgatatctcattgtgtttttaatttgcatctccctaatgattagaaatgttgaacatttcttcatgtatctgttagctattcagatgtcttatttttagaaatgtgtttcttgcccattacttaattagattattggttttctttctgagaaagtttgtttgaatttcttatatattttggatattaatagcttatcagatatatggcttacaaatattttctcccaatccatagattgtctcttcactgctgttttctttgatgtgcagtagctttttattttgatataatcccgtttgtctttgtttcta

SEQ ID NO: 841384 - DNA, 650 bp, Homo sapiens
ttttctttattcattttctttatttatccatcccttgatggacatgcaggttgattccataacttagctattgkgaatagcgctgcaatgaacatgggactacagctaactcttcaacataatgatttcaaatctttcagttaaatacccagaatcagaattgctgggtcaaataatattatatttttagtttttttgagtgatctttatactttctctttcataatgtttatactaatacactttcctatcaatagcatgtaagggttcccttttctccacatcctcaccaacacttgtcttttctctttttgataacagatttaacaaatgtaaagcgatatctcattgtgtttttaatttgcatctccctaatgattagaaatgttgaacatttcttcatgtatctgttagctattcagatgtcttatttttagaaatgtgtttcttgcccattacttaattagattattggttttctttctgagaaagtttgtttgaatttcttatatattttggatattaatagcttatcagatatatggcttacaaatattttctcccaatccatagattgtctcttcactgctgttttctttgatgtgcagtagctttttattttgatataatcccgtttgtctttgtttcta

SEQ ID NO: 841385 - DNA, 568 bp, Homo sapiens
caaaacagattcctttttttctatctttcttcatcaaatgaatacacccttttagtggggtagtaaatggggattgagaaggtctgtgtgggaaaatggtctcatcgtttgctggttgtctcctggaaactcaccctgaatattctttttaggtaccataaatttgcttttgcaatgtccaaattcctagactattgtatagtttcatattccagaatctgataataaaaactaccatttgcacaatcctgaagtttacaaattacattttattttcaacatgaggcaggattatgttgagtagttaacaagacgtgggcattcattactttctgtggaatttccctttgcccagcctcttacaatgcatctccttagttgaatgaaggggcctctgctctgtagccatgacctgctcactgcagaccctgacwtgcttttctttgatacatccttgctctcagctttccttggatgcccaaacctgtgacagagtggtcaaggtggggactctggagtctgactgacaagctttgaattttgcttctgcagctgcccaacacttggc

SEQ ID NO: 841386 - DNA, 568 bp, Homo sapiens
caaaacagattcctttttttctatctttcttcatcaaatgaatacacccttttagtggggtagtaaatggggattgagaaggtctgtgtgggaaaatggtctcatcgtttgctggttgtctcctggaaactcaccctgaatattctttttaggtaccataaatttgcttttgcaatgtccaaattcctagactattgtatagtttcatattccagaatctgataataaaaactaccatttgcacaatcctgaagtttacaaattacattttattttcaacatgaggcaggattatgttgagtagttaacaagacgtgggcattcattactttctgtggaatttccctttgcccagcctcttacaatgcatctccttagttgaatgaaggggcctctgctctgtagccatgacctgctcactgcagaccctgacatgcttttctttgatacatccttgctctcagctttccktggatgcccaaacctgtgacagagtggtcaaggtggggactctggagtctgactgacaagctttgaattttgcttctgcagctgcccaacacttggc

SEQ ID NO: 841387 - DNA, 516 bp, Homo sapiens
attaagtatgcaatagcattttgtctaaaaatatacttacattagttaaaatattttattgctaaaaaatgctaacaatcatctgagcctttaacaaatcatactctttttgctggtagagggtcttaccttcatcttgatgtgactgatcagagtggtgacgactgaagttgggtggctgtcgcaatttcttataataaaacaagggtcaagtttgctgcatcagttgattcttccacaaaagattttcctgtaccatgctatgctacttgatagcatttgactcacagaactctttttaaaattggagtcaagaccctcaagccctgccactgcttgatcaattaagtttatggaatattctaaatcttttattgtcatttcaacaatctagctatgaaagttctacctgttatgctcttccaagataaggctgttttgtctacattgaaaagytcttgtttagtgtagccactttctgcagttgtctcagctagaccccctggataactcgct

SEQ ID NO: 841388 - DNA, 607 bp, Homo sapiens
aactaaactaaacagactaaayggattaaaaattaattataaaatcttatgaagccaataaaatcatggtctgattcatttccatgacttccaaatcctgtaattaaggttttctctgatttattctggcgatatcagtcattttggggtagttctacttattgtcacatactcagtcaaaaatctaattctccgttgtctcatatatttgtggtaagatacttaaatcttactcagttcagaatttgagtcatattaattttgttcccaaattataataataattttctgaaattatttaaatatgtgagtctcaaaatgaactataaaatttattttcaaagcgtgatctgctgaggcccatcagcaggcacaagctgtaaaggttatcctcagcaaagagtttaaaaaggcaaatcctttcttcagctctcaagggttgatgccacacaatcttttttatgcctgtgttaatttctagtaatctaccaaatgaaatttttttgtttctatactgtggtgtttgtaaattgctttttaaaactctgtagcctatagaaaaggctgattgctgtacaatatttagcaactttgtaaacatttaaca

SEQ ID NO: 841389 - DNA, 586 bp, Homo sapiens
ctgtgtgccctgagtaccttgtccccctggcctctagactctgatttagttgagtatgataaaaataatccaatttgcatgatcaactttcacataatatatttttaacagcacactattccattaggcattttagctagctttttaaaagtagaagctgagttaattcctgcaatattggtttaagtattaccaaagtgttctacagtgtttgtaccaaattaaatacagaataaccaatttaaaatcttagtcaactttataggtgaaaagtctttcattgttttttttccctacttttttttccaatatgtggagttgtttcattgccagcgttttgaatagaaacactttcattgaggaattatgttttaaggctacctaagatttgtttcaattagggatggccagataggcagacatggaaattactatcttgaaggaggagttttactgtactcacagattcctggaaacaggaggcatgacacaccatgcagggccacatgaggcagccccasggtcagtcaggaggcagagggaggtggtaaaatgtgggcaagagcccctattgtggtttccatga

SEQ ID NO: 841390 - DNA, 618 bp, Homo sapiens
tttttttttcacatttgtatagtttgatttctggctgtcttcttaaggatgcaaatactatatagcatcaaatactatagcatcattgatttttaaagccctgtaggctgttaaasgctatggcagttttcacaagtaattgagctgtttcagcttgaaccaatctgattgtcctagcaaatcctttgaagtgaagttatgtaagcaaaaactgctcttcacagaataccacattataaaaagcaacattttcttttcctcttggtcacaggtaaaaagcttaagaactttaagatagactatagtcataatactttctgtatatttgatatgctggctgttttataaatagtggttttcttttgaggggaaggtagatctctagctgtagatcaacaggcatggtgattagaagcagcagtttttatataacacccaggttcttcttcctttacttgatggacactcttgttttgagcagaaacatattaaaattaaatttaaaggatcccaaaacataccttaaaaggtatttgtatgtgacttggaaaaatacattattttttctttggcaatattgtagtttgatctgtattccagttaaacacaaaccacaca

SEQ ID NO: 841391 - DNA, 618 bp, Homo sapiens
tttttttttcacatttgtatagtttgatttctggctgtcttcttaaggatgcaaatactatatagcatcaaatactatagcatcattgatttttaaagccctgtaggctgttaaacsctatggcagttttcacaagtaattgagctgtttcagcttgaaccaatctgattgtcctagcaaatcctttgaagtgaagttatgtaagcaaaaactgctcttcacagaataccacattataaaaagcaacattttcttttcctcttggtcacaggtaaaaagcttaagaactttaagatagactatagtcataatactttctgtatatttgatatgctggctgttttataaatagtggttttcttttgaggggaaggtagatctctagctgtagatcaacaggcatggtgattagaagcagcagtttttatataacacccaggttcttcttcctttacttgatggacactcttgttttgagcagaaacatattaaaattaaatttaaaggatcccaaaacataccttaaaaggtatttgtatgtgacttggaaaaatacattattttttctttggcaatattgtagtttgatctgtattccagttaaacacaaaccacaca

SEQ ID NO: 841392 - DNA, 592 bp, Homo sapiens
ttaataaagaaaaaagttagagaattaacaaagtaggatttaaaatgtattataaagctataataatcaagactgtgtgttattaacataaagacagacaaaggaacagaactgaaaatctggaaataaacttaacacatacgtggacaactgatttctaacaaatatgcaaaggctgtttagtagagaaagaatagtagtttcaaaaatattattagaacaactgaatgtctatgtgggggggaaaaacaactccaatccataacttataccatgaaaatattaattcaaaatgtaaaaatataaaattataacagaaaacatatggagaagaacttgtgtaaccacttgattagacaaatattccttagatatgacccaaaagtatgagtcataagagaatggattggtaaattagatatcattaaaatttaaaaacttgtgcttttcaggccgggcatggtggctcacgcctgtaatcccagcactttgggaggccaaggtgggcagatcacttaaggtcaggagtttgagagtagcctggccaacatggtgcaacyccatctctactaaaaatacaaaaattagctgg

SEQ ID NO: 841393 - DNA, 583 bp, Homo sapiens
aataaaaatctgggcttggagcatttcaaagtacagtataagctgggtttgtcagttcaaacctcaatatggaatcaacacttcatcagggaagccacacttttctttgactgcaaaaggggcagttgaatcatgtttccatgtgtttacaagtcataactaatgaaacaattatgtgcaatgacaacttctgctggtatagttagagtacttgaaataaactttacatacttgccactgaattgcatcataattagataggtaatggttctcccatcctttttttccttactcaattttgaagtttatagttcagctttaatttagagccttatctctggtaatggcttctaactcttccaacagctcatcggttttccttgtactaaacaagagccatcagctcacttttcattgaaaactcatttaactgtctccccatatgcttttaaggacaaaaaggcaatartgcttaattaagatttgaaaaacaacaactaccacaacttctccagattaataagtattccttcttcaacaaagggagatctagataaaatatttgaatgatgcttaccgaata

SEQ ID NO: 841394 - DNA, 521 bp, Homo sapiens
tggaaaaacccaaaaatatttttcctcagctttcccataacacagaatacttctgtgcccagatgtatgaggtttctccaygcaccaagcaattctacagcaggcaatagcagctgagtgtcctgtaattcaattctgacgccatccacctggaaacagtgtcagatcccacaggtcaaggactcagtccccaagactcccccgctgcaaaatctgatgataatcggaagccacaggttgtttcgcccatgcttctgactgacctcctaccaactggggtttgcacacccccttgctgggctcagttaatttgctagagtggctcacaggactcaaggaaatacctacattaacagattcattataaggaatattacaaaggatacaggtgaagacatgcacagggtgaggtatgaggaaattggagggcagcttccacgccctccctgggtaccaccctacaggaacctccatgtgttcagctctccagaagttcctcaaacccttttgggtttttatgg

SEQ ID NO: 841395 - DNA, 603 bp, Homo sapiens
  misc_feature 517: n = A,T,C or G
tcacctagtatacatgtgctagagtttctcaaagtggacttgctgtgtcgtggaatatgcacataattaattttactagatcataaattgttttcccaaatgggtgtgccagtttatagtcctgccagcagtgttttgagatttttctactgttccatattctcaccaacactttagtattgttaggattaaaaaattggttttgctcatctggcagatgtaaaacaatattgtagttttcttgggaatttccctgattactaatgaaggtgaggatggataatcaaattacatccacacagatcagaaatcttgcccagtgtcaagctttactaataatgtaggaatacaaggaatgaaaaggcacaaatggggcagagtgaggcccgggcatctgcccggctcccctggcccttcctgctctttctgactcaggaggaaacccgaggcaggcgtgagcaatccatgcacacagcaggaarcaccgaggttgtgaatcacctgcattttacactcnaagttgcacagctgggtgacatttccggaaagcatgcctcataatgcattgattctagactttttaccaaatgcagttctaaagtc

SEQ ID NO: 841396 - DNA, 624 bp, Homo sapiens
gtcaattgaagacatttaactgtgaaaatgaggctccataaaaagaatttagaggccgaagccgggcacagtagctcacgcctataatcccagcacttygggaggccaaggcgggcagatcacctgaggtcaggaattagagaccagcctgaccaacatggtgaaaccccgtctctactaaaaatacgaaattagctgggcatggtggtgggcaccggtaatcccagctacttgggaggctgaggcaggagaatcacttgaacccgggaggtggaggttgcagtgagctgagatggggccactgcactccaggctagacaacaagagcaaaactccatctcaaaaaaaaaggaattgagaaattaaaatagaggagagaacaaaggggccagtccataaaaaatcccccaaacctctttaacaggagtttaggtaataatataaatgtgtggaggatactttttgccttcgttgatgaaggactccagcgagattgtgctgatgatattgttatacttggaatggactggtccttccatttcctggatttatccctttattcttctgagtgcaggcataactcatgttattacactttgcagatattgtgcttttcacagattg

SEQ ID NO: 841397 - DNA, 598 bp, Homo sapiens
agcgagactttgtctaaaataaaataaaataaaatggtgaacttaattgataaatgtgatgtgtgttctgactgctccacggactggcctttcccacttctctctccctctcctcaggcctccctaatccctaagacaacaatattgaaattaggccaatgaataaccctacaattccctcttagtgttcaagaaaggacagtcacacatctctcactttaaagcaaaagctagaaatgatgaagcttagtaaggaagacctgttgagagctgagataggtggaaagtgaggcctcttttgccaaacagttattagcaaattgtgaatgcaaaagaaaagttcttgaaggaaattaaaagggctactccagtgaacctacaaatgataagaaagtaaaatagtgttattgctgacaggagaaagttttagttgcctggatagatcaaaccagccataacactctcttaagccaaagcctaatccagagcaaggccctaactctcttcaattctatgaagctgagagaartgaggaagctgcagaagaaaagtttgaagctaacagaggtttgttcatgaggcttaagggaagaagcca

SEQ ID NO: 841398 - DNA, 691 bp, Homo sapiens
attctcaccagatgggttttatttgaccctatatatcgtaactcacytttcaatctgactctggcatagcattacgagccaaggaaaaagtatttaaccctaaaatatatttccttgccataccttgaattgccctgctaaggcaatttccagatcctatagagaatcccctttcccttttgttttccttcctttctttccagatccaggagataataaactaagagccaggcacccatttaggtcccataagaaacattttacaagatactttctgtctccgaagcctgctatctgagagattcctctgcataataaaacttggtctctacaatcctttatcttaaccagaaagttcctttccagtgatcctaggtctgcagataaactcaaccaattgtcaaccggaaaatatttaaatttacctataggctggaggcctcccctcccctcgccaattttgagttgtcccgcctttctgaaccaaaccaatgtatttcttaaatgtatttgattgatgtttcatgcctccctaaaaatatagaaaaccaagctataccccagccacctgggtcacatgttctcaggacctcctgagggctgagtcacaggccatggtcattcatatttggctcagaataaatctcttaaaatattttacagtttgactcttttcatggataataatccg

SEQ ID NO: 841399 - DNA, 542 bp, Homo sapiens
atactgcaaatcaaatagcagtcagaataatgagctgctgccagttggagtcatagttggtgctacatattgtcaaagattgttcatgctaatcaactaataatggcattgctgcttccattgcrctaaacagaattccctccgttatgcaacacaattactactaataacctctggaacctttgcgtgcttaaggagactgtttcagagatcatccggagacctatcagagaataagccagggaagacagaatctaccagatggagattactctttagtaattaactagacatggctcctttgggtccataacattttctaacatcgtgaggcatttcctttagcatattgatgcgtctgtattaatatattagattgtgagcagctaggaggtagtgttaaatattaaacatttcatacatgaattatattgttaatatcctttctttagtttttaaaataagtatgctaaaatgacactcaataaacaaatttagaggcattaatattaaaggagaaccaatgaattcagactcatgac

SEQ ID NO: 841400 - DNA, 624 bp, Homo sapiens
tcaattcttagagactgcaatcaccttctggctccctattaattatcatcttatcagccacagacaggagcagtatgctgttayggttttcacagcatgcactattgccttgatgctttttaacccaagtagttctttatcctgcagcagattcttttcttccatctgtggctgagtaggttcagaaatccccaggagaattgctggccatagcatttgtggatgtcagtaattaagatatctactccagctgcaagctgtttgacaacgtgggtagtagaaggccacagtcctgtgcaaagcctggtcgtagtgagaacagaaaggtcaagtctccccgactggttcatcatgcacttgggagcttggcttatccagggttcactgaatggttttttcatcagtctcatatttttaaaagagaagagtatttgccacaagccacctggcctgtaagttgcttttaggtctttgctgtgtccgtacacaaaaactgttttctattgctgttccattacatgaaattatgctgggcacattcctgattctattacaggcctggagtttattttatagcttgtccctgacctggactgggtttggtttcatgtcactcataattat

SEQ ID NO: 841401 - DNA, 639 bp, Homo sapiens
agatgaaagaaatactgtacatggaaaggccctgcaaaccataactcactcataaacatgttaccttttaacaaaacagatagattagcgaattgactcttcctccatagtcatcaacaagtgtctcgtcaatttggatattaaaaagcaaaccctattaaagatgctgtgaaattaactcagttatgtctgttattatgtatctaaggcctttagtaaagacagcacaattaatttattcagaacttttaattttctgagtgatggagaaagggaagtaaaggtggtaactttcattaagtcttaactaggttcaaggtgacacatcccctgaggattccctgcccgcaggaggcatgtgggagggacagatggaggcacacaggcacttggtgacagcgtaaggggactgagacctgacgaataaacaggagttagacaggcagaagaaatagcaggtccaaggtccttccagacttgggagagcatgggctgcccatccttggagaagcaagtgattcattgtgagagaagtgtgatctgaaacctgtcaggggactttaaaacccatccrgcgtcttagagtgtccaggaatggcaaaggtgaaatggtgtgggctggatcccgggggtcttata

SEQ ID NO: 841402 - DNA, 634 bp, Homo sapiens
ggcacaaacctttggaaggggtcttcttgctactttttttgttttctacttttgttaaggacagttgaccagcaaagacaagtgcagcatcttaagatcatagccccagaacctcaccccagagatgatgctctstggtttgtcccagtctttctggaaactgctacatagactttatattctctgtcagataacatgtcctgatcactgaggctgctcaatgttcatcatgctctattaaaacattatttcaagtctaggaagggaagtagaaaagaagagcccaaataataaagattgaaactcctgtaacaacaatattgacaaaaacatctctaggagtttgcttgaaattataattatccaattgctgactttctcctccagttcccatgtccttaggcatcagatcagagctagaaatatattcttaattattggcttcctggaaaagtctcagaatggtttcttgagaatgcatttgtaagggcgatgtctagagcctttgagattctgcacagccaggttgtacctgcatctggtagaaacagagaggctctgactgaggacgtggtcaacaccatgccccaccagtgtctagacaggagcactacttgagggtcagtcactgata

SEQ ID NO: 841403 - DNA, 670 bp, Homo sapiens
aattacacaggaaacattttaaaataaggagccatcttctaatggtagattttcatatattatggtttgataatctgcatcataaattcattgtaaagaaaaagcagaattagaaacatgcttttgtaagagcctgcacaatgatggatgatacggaaggtattaaacttagactatgattctgtcatcagcgccttctttaacagaacttggctattttatagaaggccattcagaagaaaaaaaaggagcaaacatttcttcatcgggaatctgtttcccaatggtctcagggttctgtttactgggctttctgtgtgtaatctcaactactgcattccctgaggagtgggagcggcagaggtggttctgcacaaatgcaagctttcgaggcagacccagctgcggttgctagaagaaacagctgtatggactctccgggaaagcctgtgtattttaattcagctttttttttccttcctagcaaataaaaagaaaatggatcttgattttccaaaaacaaaatttaaaaacccactctagtaaaaatactccyggaaacttcaggctaaagaacttataagacttgtaattctttactgaacatcaggcttcaggctaaggaacttataagacttataattctttactgaatatcaggtgcaaatta

SEQ ID NO: 841404 - DNA, 579 bp, Homo sapiens
aatgatcacaagagatctattttaacacttttcttagatcgataggagatttagatgtsttcattattcatggttggaagagatgtcattataggaaaaagaaaattgaggcagaaaaaacagcaactgagtcctgctaatgcccttaaagcccctggaagaaaaggagccttgtggtttcagaagtcagttatctgcctcctagaagcaggccctcaagagaatgtctacttgggtagagaattctgttgttgaagcaaacagagtcattaaatataagatcaataaatataagatagagtgctggttgggaaaaggatggagagatgaatggatagctgcagagaccatgcacttgtttggtagaatcccactgacacctaggagggttttctctccaggcttcataaagcttgtacttttactgtgaaatgctaagcagatcatctgctgagactgaaggggcaggaaaacaattggctcagcaaaagaactgagggtttgaaatagccctgagaggaatggtggaaagagaagaccagggacatgtaaccacagcacagcggacccaagagatta

SEQ ID NO: 841405 - DNA, 571 bp, Homo sapiens
cagcacagtgagaggggaaagaagtgaccctgtggaaggagccagaaattgcaacatttttcttgttttctaggyaacctgaaaggagaaaataaagaatggaggagagagaatgtttgaaaaaataatggctggtaatttcccaaaactaaagaaacacttgaatcattagattgtgaggtctcacaaagtggaaggaatgatttttagcaacctacaagtaatcaaatcttcaaagaaacctagatataccaaagtgatacttaagactgtcagagaccaaaaaaaaaaattgctcaaaataaccaaagagaagagacaatgtataatatatgctggaactgaaatcccagagaatgagaatcagattgatatcagtcaactcccattatccaccgtgcatataaaaagataatggagaatcaccttcaaagggttgagggaaaatacctttgaaccagaattcaaaacacaaccaaaccatctttcaaaagggaagtgaataaagacagttttgaacatacagaggcgctaaattaatcatcactgaccttctattttgaaaacaatc

SEQ ID NO: 841406 - DNA, 606 bp, Homo sapiens
tcagctccataaactagtgataatgtgcttatgccaaagaatcctcccaaaactaagaaacctggctgcatcttgcgkgcatgttcttagtaagagttttgcaaagttgccaaacagatcatgtaagccagatccttaagtagaatactaggctgtggtcctcagtaaattctataatgatacgctaattttaatgtatggataccagtttagtagcctttaattcattcattaaacaaatatttgttgagcaccttccatacgcctgatattggtgtatcatccctgtcctcatggatcttcttccatggacacagataatgaagagatgaatgagatatctagatatagacacacagttactcatgtatatgttagaaactatttgtatttgtgtcatggagaacagaaggctggagctttttacatacatataacatatatataaataaaattatcagcttgtctattctccatcatacacatacaaatggacagattttcatcaaatttaaagattgggtttgagatggtcctacataaaatacagaccatgtggagtatgttaaactcatgttggggtcccaggaggggatacctaaagag

SEQ ID NO: 841407 - DNA, 595 bp, Homo sapiens
tttggtgtcaaagtccatatgaatgctccacagatcaccagaattgggaagctaaagtacaaaattaaacaccactttcaatagggaataagcaatattgacacacagtagtagatacactcacatagaaaaaaaggcagtcaaaaaacctaactggatttggatttctttttcctttgtagatacatagttatttaggtatctgagactagttatttaaacaaaatcatgcaacacaatgcatggaaatatctgttataccgattatattaaaacccatgtcagaattgtatagctttttaattaaatttaacattcacagggcttacgccatgccaaatactgtctgtgatgctgaggacaagtgctgaatgagacccagcctctgtcttcaatgacctggtaatccccctgagggacataagcacttcagttaatacccatggggaaataagggctctaaaggagtttattacaatcayacacacacacacacacacacacacacacacacacacacacacacacagagggatggctcatttctacttgcaggggagttatggtgatggctagagattcaggaaggcttcca

SEQ ID NO: 841408 - DNA, 633 bp, Homo sapiens
tgttcatatgctgtattatctggaatccttctgtaagaaagacttgtctttcctatttatctgtccatttgcttattcaatcagttatttatatcagtatggactcatgtattttcttatactctggcttatagtatgttatttattttcttgctcaaattcttccagtttgggcattggagctctttcaggttggctctggtgtccctttgacatgcccctatacttttattttttggcatcttcttactttctggctatataacaagatccgcactcattttatattttccctgccctagacctagaatcagccatttctccaaggagctctggttccttttattggagaatggaatttggaaaccaagatctcggtgatttgtgtgctccttacaactgggatatcactgtttctagtcttctcagcagacagaactaagaatatatgtatatatactagctcatgtatgcacatacctataattatgtctgaatctagccatttgcatctttattaatctcaacatgagctcaactggaytacaatgtctccgattgtaatccagtacaacatggttcattctagacttcctcctttattaactgtaattttcctctctaacaggaaga

SEQ ID NO: 841409 - DNA, 616 bp, Homo sapiens
atatggaaatccttctacacacacacacatacamacacacacacaaaaacacacacacactccctcgctccctctttctttcattctctccctttaatttctaggatgtctagctacagagaaaaagtaattttctctctttaggttaatactctcaatctctcctcctatcaacaatccattttatccaagagatctcaaaattggggggaaataaaatgtaatagatatttgatagaagtatataaaggatcctcaaaatacaataaaatctttaaatagtgccttcactatttttatgaaagttctgcaaatatgaacactagaatacaatgagagaagatttagaagaaagagagctatagcatcacagagcctacaaagacagggagaagcaatttacttgaggtgagaagtaaaagaatctcagagaatgtaagaacttttgttcatgtgtggatgaacagaaatttgggcaataggccaaaatgagacaaaatcccttggtgattagttaagtttaaggctgacgttttgctgcaaggcagtgtctttctagcataggccttacaggatggggtaatgggttgattttagttacaaggcagtacctttt

SEQ ID NO: 841410 - DNA, 477 bp, Homo sapiens
agaattgaaagactgttgatattacatagaggaaaaaaaaaggtggggggggggcaacagttgtttgtttkttttttttttaaaaagacaagaaatagagaagaaattataaaagtgattgtttatgatgatgggattattgatgctatttctacttaatatactatcccattttttgggaagtaacatattattttataatctaaaaaatggttaccattgtaaaatttttttaattcagaaaagcatttagattacaaaattaaagaatttagaaactataattaatgagtattcctattgttttctttgaaaggcatattttaaatttttattcctcgcattatttaaaagccaagcatggctagcctgacatgtaaggggcttggaagtcaccactgcatcctaacaacaagtaaaaggctgagaaaactgaaaaatcaacaacacttcttaaattcataagagaagagaggt

SEQ ID NO: 841411 - DNA, 613 bp, Homo sapiens
ggactcctggattagatatatacacgtttgtcctagtgattgactaaagtatttaaaaacagtattttttttgattcttagatagatcctggagaatgtggcaaaccacaacctatagttctcttacttctgcaactgtcaaattgataaagtagaaacaaaatcaaacaaaaggtttaactttaaaaatgtaccatgtgaaaacctccaggtgtcctgaagggccaaatctcatgtatgataattttttaaacaaaaattctatatgatgtggagtttttctcccttttctttcccagtataaatatggcagctcacgtagcctaattaatagtgggtgacatcttctgctggctcagtggcatttttacaaagtgaacaaaaacaattattgagggcacataaggagacaagcatagtgacaatatgtttgctgccatcgacttggtggcagtctaccctttagcttatttaactaatyaatatgctaattaagaaaaccaaagccattgatgaaaacatttttacaaagagtagattaggtctttgggctataaattaatcttcatgagggctaagtcttttttttttttgttttgggggacggaatctc

SEQ ID NO: 841412 - DNA, 578 bp, Homo sapiens
tttctttaatcctcttttttaaaaaaamaaaaacttacctgatttcagccatttattccttcatgaaaatttttaaacatttcatcagtttgatggttctaatttaaaatgaatttcatttttatgtaaacatttagaagattcataatgttattaatcttttaatccaaaaatgtattctagctttttatttatatctcatgttcttcaatacaaatctatagttttccacacagggatgaatccagcatcagctctcccttcaggaccttggcaagatccaggtgctcactagaacacagacatcataaacacaccaaaatttcttttttccttctttcccttccattttcttacttcaatttaatatttattaacttaatgagaatttgagttctgtattaattatggttctccagaaaacagaactaatctaatgtacatatacgttgtgtgtatatatatatgtatacacacacacacatacagatatagaaagaaatatttattataaggtattggctcacacaattgtggaagctgagaagtcctacaatctgctgtctgcaagctggaga

SEQ ID NO: 841413 - DNA, 528 bp, Homo sapiens
aagataaaatgctaattttatcatttctcttagtaggatcgatactgtaagacaaagggtataatacacaattatattcatgaaagcaaccactagaaggaaaaaaagaattctgaattatcagaaaatatgcaggccgggtgcagtggctcatgcctgtaatcccagcactttgggaggccaaggcaggcagatcacttgaggtcaggagttcaagaccagactggtcaacatagtaaaacctcgtttctactaaaactaccaaaattagccagacatggtggcacacagctgtaatcccagccacctgggaggctgaggcaggagaattgcttgaacctggtaggtggaggttgcagtgagccgagatcacactactgcactccagcctgggcaacagagtgagactccatctcaaaaaaaaaaaraagaagaagaagatatacaaggaatacaaagcaagagaacaaaccatgtagtaagttttcaaacatgtgaaaaatgaaagaacattaagattctaggtac

SEQ ID NO: 841414 - DNA, 609 bp, Homo sapiens
cctttgagaagaggtggacagtgagcaagagtttagggggaaagaagctgaaaaaggacagtaccggtccaggggttggaacagctggaggactccctggtaccacagcacaaatggggctgggtgccccaggaacaagaacatacacacataccccaccttccacacaccttttttctgtaaacagacctcatttctcggaccacagaagtggacacatggctgagctgttccctgccttgggaacaagccaatctgcacagaagcagaagcagcacagagagcagaggcagggggacgggaaacacatagggaaaagacagcaggggaggcctgaagagagaaggaacaatggtgagacaggaggaggaagggagggagtaggggaaggagagagagagaaagagggaaacagagatagagtgcgcatgtgctagctgactgaccgtggagccatggatctaggtgttcctgaggccagttccatgtcccaagcatggtgatgtaaattaatgcatgtgcctgctcggcttatgctattygaaattaggctgtatcattcacagtccaaagagttactatttcagttgtatataaagaaccttaaaa

SEQ ID NO: 841415 - DNA, 378 bp, Homo sapiens
ttgggatttatcccaagaatgcaagaaaatcaattaatgtaatataccatatagagtaaagaacaaaaaccacatggtcatcccaacagacacaggaaaatgcatttgacaaaactgaatgcccattcattacaaaaactcccaacaacttagtaatagaaggaaacttcctcaacttaaaaaaaaaggtttactgaaaacctctaactaacaccatttttcacagcaaaagactgagtgctttctccctaagattggtaacaaggcaaggatattcactctctccacctctattcagcattctacyggaagttctggactgtacaaacaggcaagtaaaagcaaatgaataggattggaaagaaagaagccaaactg

SEQ ID NO: 841416 - DNA, 572 bp, Homo sapiens
gcgacaagagcgagacttcgtctcaaaaaagaaaaaaaaaaagagtgtgtggacagcctggaggctggcacctagraaacactcagtacataaactgcctgccctggccccagcctcctttgggcggagctcaggaggacgccaccgcggagaaggggactgacatttacgaggagctccccgagcaccaggccccgcttagtgctcacacctgcgctgcccaggagggcacgtgaaggccctgtccatggtttgttcgtttcatgggtgacactagagggaggagcaccttgccaacattgctgggtaggtaaggccaggcggctgcctcctccaccaggcctgtgtgatcctgaagcccaggctcttccgcatagccggccttcttggagacatcgcttggtttctgcagcagctggatgaagagcctgcggttggcaaaagcaggaagactggggcatccctgtggcccctcggcctcgcagcagctcctgcttcccagggccaccctctgctctgagcctcttcctgggcagtagtcgtgttttcccaacccctgtccttcgggtgac

SEQ ID NO: 841417 - DNA, 612 bp, Homo sapiens
  misc_feature 42: n = A,T,C or G
agaatttaaacaattcactgacatattggtgctggaagcctnctgtgcttccctaacaccaatagcagggtctccattgcctgctgggtaataagttacctgrctttaaaatcttatcttattcctttctcagaacactcctggtaacaagttcacatataggattctctagaaacagttctgaagtggggcttggtgtttagggtatttattgagttcggcccggtggaaaggagggagatgaagcaggattaagcagaggaaaagtcaaactgccactcaagcccaataaaaccttattcaaccccatggagagctttggaattacatgcagccagtcaaagctatcttacctttggccagaatggttaggcatttacactagcacttcaataagccgttggatgtggagccactcccctcctgaccactggaaggggcagacgcttgggtaaggctctctgtagctgaggcaaaccctaaaagagctgatagttggagcaagaaatccttccttacagggatatctggatagcacatttctgtgtccactataattgttctacaggatgttaacagaagtgctggaaaacagtgcaatactctcaaacc

SEQ ID NO: 841418 - DNA, 586 bp, Homo sapiens
tgtctcagtagaaccattcctcagccacccaattttatgggccagtcagttccctagcctatttgtaagataggcaagcagtttttagccttaatagtggttgttttttttcttaaaaattttaatgtgttcattgttaatatcagaaattaaatactaatatacattttgtgtaagaaatatcacatgattaaatagaaaaatgaggcattctaaattcaaaattagtacgttaatcggtcattttggggttgtagcattataattgttaaatatttatattactttgtaatttccaacttttctctaataaacattaaatgttatataattgaaaatagaacaacaaatgacctatattgtaatgctgagagtgaaacagacaattttaggctcaattaccatacttgatagtatagttccccactgccactcccagaaatcttgcctccttcatccatgtaatccgtaatttccaacagccacatgatatgtaaccttacctattstcactttgtacatatcgacattggccatacttctaggataagccactttcaaccaaactacttctttcattttttct

SEQ ID NO: 841419 - DNA, 611 bp, Homo sapiens
ctacccgaaatatctcgtgagaagctctggcaggaacagcagggtgtctggattcttaagcacaacacattcagcagccagacccagaaactcaaaggcagcgttgggaagccactgcacgtttgtaaggagtcaggttgtccacacaatggcgctattttgggattccggcttctctgcctgtgacctgctgaaaccattcatgccggcatcatgcctattggaaactctttgaagttattttgaaacgagaatcgactcaatctattccactatagtttcatacaaagcatatttttttttcctcatttcaaaataatttcagacttccaaaaagttccaaaaataggacagtgtgtatacccagttccccaaataacatcttacataacactgggccagcgctgccagtcacttcgcagaaggctcctcggtttgggtctgtgtctgttgtctccttgggattacattcaggccatgcagttgggcaagagaaccagaggtgataccgtgccctcagggacgcccccaggtcggtgcggyctgtgcggctcgctcccggcggtggctgctgggttaagggggcctctgccgttctgctgtgacatgac

SEQ ID NO: 841420 - DNA, 537 bp, Homo sapiens
caacggatccacctgcctcccaaactgctggaaccaccggcgtgagccaccgtgcccgacccttttttgtttctaagacagagtcttgctctgtcacccggcctggagtgcagtggtgcaaacacagctcaccgtagcctcaaactcctgcacgtaagggctgctcctgcctcagcctcccgagcagctgggactacaggtggtgccaccatatccagctaattttttcttttttttaaagggagggcatcttagatgttgcccaggcttgtttgaccaccagtgatcctcctgccttggcctcccaaagtgctaggattacaggcctgagacacggctcccgacctcgtgttccgccattccagggcagcctctctcttacacaagggcagtgggggcagtgctggggttgcaggtccgggccctggggsgtgcttccttcctcacgtggccatgcccagcagcaccaaacatccccatccagcctttggaccccgccctgcccgtgctgacgttcagaaccaggccctagggcta

SEQ ID NO: 841421 - DNA, 537 bp, Homo sapiens
caacggatccacctgcctcccaaactgctggaaccaccggcgtgagccaccgtgcccgacccttttttgtttctaagacagagtcttgctctgtcacccggcctggagtgcagtggtgcaaacacagctcaccgtagcctcaaactcctgcacgtaagggctgctcctgcctcagcctcccgagcagctgggactacaggtggtgccaccatatccagctaattttttcttttttttaaagggagggcatcttagatgttgcccaggcttgtttgaccaccagtgatcctcctgccttggcctcccaaagtgctaggattacaggcctgagacacggctcccgacctcgtgttccgccattccagggcagcctctctcttacacaagggcagtgggggcagtgctggggttgcaggtccgggccctggggcstgcttccttcctcacgtggccatgcccagcagcaccaaacatccccatccagcctttggaccccgccctgcccgtgctgacgttcagaaccaggccctagggcta

SEQ ID NO: 841422 - DNA, 632 bp, Homo sapiens
attgataaaatggattttatcaaaactaaaaaccatgttttaatagataccattaataaaatgtaaagataaaccacagactgggaagaaatatcttactaaaaactgaaataayacttttatactggatatataaagaacactttcatctcaataaggcaaaaaaaatcaattacagatttgtaaaatatttaaataggcatttcactaaagcagatactcagatgggtaataatcaaattaaggaatgttcgacaccattaataatcaagaaaatgctaattaaaactataatgagataccatcacaaacagtctgggatcactgtaccagtagcaaatgtggcgaggacgtgaagacacgggaaacttcattcattgtttgtggaaatataaaatttcacagccacttttgaaaacagtttgatagtgtcttaaacttttaaacattaagtgactacatgacccaacaatttcactcctaggacttcaccaaagtaaatttttaaagggctatgtaggccaagtgtggtggctcgtgcctgtaatcccagcaattttggaggctgaggcaagagaatttcttgaggccaagagtttgagacaagcctggaagcaaagtgagatgcccca

SEQ ID NO: 841423 - DNA, 602 bp, Homo sapiens
catcttctccctgtgtcttcacatgccttctctctatacaaatctttgtccaaatttcctcttctcacaagggcacccatccagctgaactcaggcaaaccctaatgatctcattttaacttaatcacctttgtaaagatcctgtctccaaattcagtcatgtttgggggaagttagcacttcaaaatgaaatttttagaagcgggaacacaatttactccataacacacacaaaattcacaaatcaatatttaggagacttcaagtagccataacttctttgaacttcataaaagcaacaattttttatgcttggtatacagtggcagttttattaattctgaacatttagctatttttttttctgaactactttggttgttacagaatagtgaaaactaagagtaccacatttgcaaaatacaaaataatagtatttaagatgataggaatattaatgaaatacacaataagaagagtttatacagctttataattttcatactacarttttcatacatcttggtttttcagactttgagatgaacaaatcaagttaaaaagaaccccaaagtctggtcgtaaaagcaaaaataaactgt

SEQ ID NO: 841424 - DNA, 588 bp, Homo sapiens
caaaatcttcaataaaacactagcaaaacaaattgaacaacacagtraaaagatcattcatagcaaccgaatgggatttatcccagagatgtgataaaggttcaaaacactcatattagtcaatgtaatacattataccaacagaaaaaaggagaaaaaccatatgactgtttcaactgatgctcaaaaatcattaaaattcaacatcctttcataatgtaaattctcaaaaagctgggtatagaaagaacatacttcaacataatagccatattccacagatccacagctagtatagtagtcgatggggaaaaactgaaagccttttctctaatatctgaaacaaaaagatgcccactgtcaccactgttgttgaacatagtcctaaaagtcctagctagagcaatcagagaacagaaagatataaatgggatccaaattgagaagaacagttgaattatccttgttttcagattatataatgttatatttagaaaacctaaagactcaaccaaaaaactattagaactgataaatgaattcagtaacactgtaggatacaagataaacatacaaaaatcagtagca

SEQ ID NO: 841425 - DNA, 478 bp, Homo sapiens
gtgaattaatccagttcctgatttggtctcagtgtggatgtcattggtttataggaatactactgatttttgtttattggttttgtattctgaaactttgctgaaggtttttttttttcagatcaaagcacttttgggtagagaatataggtttgtctacatatagaattgtgtcatctgcaaacagggatagtctgacttcctctcttcctatttgatgccttttatttatttctcttgcctgattgatctggccaggacttccagtactatgttgaacaggagtggtgataaaggacattcttattttgttctggttttcaaggggaatgcttctagtctttgcccattcagtatgatgttagctgtgagttttttcatagrtggctcttattattttgaagtatgatccttacgtgcctagctattgacggtttttactacagaaagatgttgaatgttatagcaagacttttcc

SEQ ID NO: 841426 - DNA, 614 bp, Homo sapiens
ggagatatcagattcttcctaactctaatttataaaccagaccactactacaaccctgactagacagaggactggccttacaatctttgctgataagcaataacagaccttaaaccagtttcagcaagcttataggggctgtgcacaaatggtcttggtgtcctatagctcaccttttgacgtaaagagacaaatttcatccatttttatgccagcactctgctccaaagtgaacatggaaagtatgtcatagttatgtttactcattgtgcatgtgcttggtttccctcagaaagacataaaacttttcccccaaacttgctaaatatgtatgactctattgtgtgatataggccctatgaggccctttttgaagagagagcaccttcagcccatatcaaagactttttctttgtgatttgtaaacgaatatcaccaaaaaagctcttctttctatgatttagctatcctgatggtcttttggatggcacctagaacgaagatctcacgcctccactctggtgtgtctcctacttgaccatttatagggaagttccartttttcccctgaaagtttgataaggtgagtctatagaacaaactgataataaacg

SEQ ID NO: 841427 - DNA, 591 bp, Homo sapiens
tttatagggaagttccaatttttcccctgaaagtttgataaggtgagtctatagaacaaactgataataaacgtattaatagaaaaaaggcacacatattttatgtgcacacatatgcaagggagtcatacaaaatacaaaaactcaaagaaaggcaaatggttgatacttttatactatccagaggttacagaaagaataggggattagagagaagcctgacaggttatagtggccagacacgttactggaggaagagaagaggaggcttgggtagtaaaggtgatcttgttaggaacataaaacctcatagatagcagccctcagaaacaatagatagtgatctctgcttaatctttctctgtcagatttttagagatgtcaagctttcacttaatctttcctatatccagacgcaggatggcctcagagaaagctcaattgtgtctgtttacttcactatatttcctctacagatgcaattttcctccgcgaaaggcagattcactaggctactgttgtctgcaagttctctgaatrggcatctcaaaatatgtaaaaaaaaaaaaaaaaaaaaaaaaaaagacatat

SEQ ID NO: 841428 - DNA, 621 bp, Homo sapiens
gagaattttgactttgatgtgttttgccatgaatttccttgagtttatctttttgaggttcactcagcttcttgaatttgtaggttgatgtctctatcaagtttggaaaaatgttcagccataatgtccccaagtacttttccagtcctgccctctttctctttctcctttcctctaggactctgatgacaggaatgttttatcttttttgctattccacaaattcctaaccctctgttatttttttcagtctcttttctttcttgttcagtttgagtaatttctattgttctatctccaagttcagggatttctttctcccctttttttctcggttttgctgttgagcccatttaatttattttattttatttggttattacatttttcagttctgagctccattcggctctttgtatctatttgtttgctgagatgttccattttttcatttgttttaagcatgttagtaattgcttgttgaagcatttttatgatacttgttttaaaatctttgtcagataattccaacatttgtgtcatctcagtgatgatatctattgtcctttctyattcaaatttagagttacctgatttttggtatgacaagtgattgatttt

SEQ ID NO: 841429 - DNA, 585 bp, Homo sapiens
ttttattatttattctttacagtctgttgactgtttcaaacctctgagggaatggtggaaaggattcatggctttgaaacactgtcatttaacaaggtaattttcagtggggcattaggggttgtgaaacatataataaaacaaaaatggtggcttataataggaagaaagaaaagaattatatttctgccatctaacaaaacaggataaataaaaaagcaagtgcagagagagacagcgagaaaggagggggatgagggagagagaaagactggcttttgaagggttttatcatatcaagagcagagccgagctttcataatgctgacatttctcatcctgacaatcctaaacaagtggaaaggatgagatcgcagatatcatctttcatcacattccccagcttaagaaccaacatgacagctcctttcccctttacactgttaattactaaataaaatactactctctgtcagcaccagattattgcagatagcaaccacaaacatttctscattgttttcccccctcagaaatggtgatacctaccttgaactctttagaaaagaaattagacttgtctca

SEQ ID NO: 841430 - DNA, 641 bp, Homo sapiens
ttatttgaacaaacaacactgggcaggtcattttttgcttgccaaggaccaaggtgttgggagatctaaggaaaaggaaaggccacgtgattgataaggaaggaccaacagtgcacaggagaccctctgcatggggcagagaagatacaaaaaggacaggagtgggaagtcaagtctctgttgaccctgatcttttctagatactctataaacaaaatgtcagagtgtttttgttccatttcaacaaatatgtttgagtgacccaatttatagcattgggagaaacaaaaattggtcttgaggccagggctatgaatgcatatgagagattaatatctcattgtaagttgggagggggtgtgtgtgtgtgtgtgtgtgtgtgtgtgtctgtgggtatgttgagaaaatggagagggtggagatgtagaagaaatgaagagaacatttagcagaagatagacagtggagagcagtctgatattagtggctgttgtgtaataaatattggtaaaaatattgtatttgcttcactagacagtccaagtgatcrctagaagtaaaagccttataagtgaatcagtgttaaacagtaagaggcttcccatttagaaaagcacgcatattctgaggattttcccaag

SEQ ID NO: 841431 - DNA, 473 bp, Homo sapiens
atttcatttgatacgacatagactttcctgttgcattttgtttaccagtgggcattggatgttggactttttgtagaaatttgaccttatttcttaggattcttaacattttctggtcagaaaacatcacaaaaaccaaatggtgggagggactataaccacagtgagtccttcttcatgccaaaagaaattacagcccactctcttttgtacctgaatgagtccattattagcattattcaattaaaaagagggaaaggaggcattttataaaattgttggcatgcagccgccatccctgataagatatagtggatataattcctatatatgtagacattcagttgaatgaggtttgcacacattgatcacacctgtttgctacaatttgccatgccagttatcttgtttcccttttttgcccaaggatgttgtacatgaaagtagcrcatcctgtggaagagctttttcta

SEQ ID NO: 841432 - DNA, 702 bp, Homo sapiens
aatgagagatggatcccaacacaycagtggtgtgtactgtatgttttattcagcagcttgcttttcacttagtaatgtaccacaggccttgttccaagtcagtacatatagctttatctgattttttttatggttgcgtgatcttctgttgcatcgatggaaccatctctctatggataaacttttgtgcattttccaatttttcacttcacaagttatcctgtaaagaagtatgatgcttatataattgaggtatttgtgcaagtctttctgaagttcagattcttagaagtggaggttcgttggtcaaaagacatgtaaatttaaagtttgactactattggtagattgctctccaaaatcattgttccagtttatacatcaaccaattctccatcttctggtgatcttttgattgaaatcaatcttctaaattttctaattttataggcaaaatgataagtatactttaattatctgtaaggttaaccacttttttatgtttattggtcatttgaatgtctttttgatttatttataggtaccctttatattatggatactacatttttgttacatgtgttgtaaatattttcttccaatatattcttttttatttccatcttattgatggtttcttttgtcttataagagataaaattttgccttatgatatctagctttcatgccagacttataaag

SEQ ID NO: 841433 - DNA, 651 bp, Homo sapiens
aaaatgttttactttcattttttggttaatgtagttattacagtttttaaaactagggtgaaaggactaaatacctacccccccacacacactttagagatgtcttcctatttttttaaaactccagatcagaatccacttttattttacttaaagccatagtttatccaaggtgtggcttaggcctttctctcaaaacccattctcagaagagggacccttgactcacaggtgttctcctctcacctgccgtgactcacgggatgcttttggatagaacccaggaaaccttacttcatttctctgcctgagcagtggtgtttacgcccaccagctgtagagatctgggatggtgattcattggctggttttggtacagttttgttacatgtagagatgaaaagggttatgtgtgtatatttaagcagtatcactcagaaaaaagctgcatttcattaagtgtgtttaggtgaaaagcttagctgtgggtttcccgaaattgtaccttgccgtctttcccagtagagcacacttgtcttcccggccagatgcagggctttagcacgggaagtattaaaatctsttgtttccctgctttatgtagggtaggtcataaaaagcatatgaccttcataaagtatctgaaggaat

SEQ ID NO: 841434 - DNA, 574 bp, Homo sapiens
tattaattccaagggcactaatttttctccagaatttttctttagtttccattgtagttcaggtgatttttattgccctgttttctaggtcattatttttctctttttgactgttcaatttgctattgacaccattcaatgaattttctaatttcaagtattgcatatcttagttacaggcattctagctggttgtctttctacaactcccatttatctctttaaactggtccatttttctcattcattcaatctgtctttacctgtaaatgctttaccacatttccccttgttattttaaagtcttcatcttctaattccaataaataggtctggtttatatgtaggttcacttctacaaactgttttcttttgattgttggtcacatatttctgcttcattgactgtataataattttttattaaattccagttgctgtgcgtgtgtgtgtgtgtgyatatatatatatatatatatatatatatatatatatatatatacatacacatgtatggatattagggtgagatatagatcaattagatacatgtaagagttgagttgagctgcag

SEQ ID NO: 841435 - DNA, 630 bp, Homo sapiens
tggcagatgaggctgtcagacacggagaccatcagaccttgaagggaccctagagagcatctgtactggcctcctcatttcagatgtgtgttgctcaatttccaaacagttggggattttcttatcttttttttaaaaaaccatttattaagatataattcacatagcataccatttacccatctaaaatgtacaattcaatggttttgatgtattacattaatttttaaaaactgtggtagaatatgtatagcaaaattttccattttaactattttaagtgtacaattcagtagcattaattatattcccattgttgtacaacaattaccactatttccaaaaacttttcatcatcccaagcagaaactctttgaccattaaacaataataccccacgtccccttctctccaactcctggtaacatctattctactttctgtctctatgaaattttttattctaagaatctcatataagtggaatcatacaattatttgtccttttgtgtctgccttctttcacttaccgtattgtttcaaagttcatccatgttgtaacatgaatcagaacttcattcctttttatggctgagtaatatcccawtctatatatatgccagattttgt

SEQ ID NO: 841436 - DNA, 633 bp, Homo sapiens
tttttggcaaatgattctggtagggatttagaatggatatataaagtttccttttgaaatatatttagttttagaaaaacagtcagtagtggtgcagatggcacttgaatataacaaaagtcatgctggcgattctcctcgagttggggcttgggaaacctaaatccaagtctactcggcctcccaacagctctagtctcccttactgccccccttacctacaggcctccactgccttctctttgctccctggatgcctcattctctcctggcctccaccctcccgcccccagtcatatctatactgacctagtcttggagctccccacctttttttttctttttttctttttttctttctttcttttttttttgagatggagtctcactctgttgcccaggctggagtgcaatgttgtagacatggctcactgcagcctcgacctcctggagttcctttcctaaaaaattttatgcttgggtgttaatgggtgctacctgttcctagtcatgataggctcattttaataatgaccttggggagagggtttcttaayatgagagagatagtggtaagagcatatgagttcagtgctcagagagatcacagtctacctcctgctttgaccaaat

SEQ ID NO: 841437 - DNA, 636 bp, Homo sapiens
ctcccaactaaatgataagggaaggagcctccatccatatagaaggaagagaagtgccctgctgagttctgggcatttgagtttgtgggatgaccagggtgtggcctgatacctgagctagcagctggttgatctctccagaagtgagctgcctgttgtcagattagaggcatgagatcagggccagccctcacttttgcagggtcttactcaacccctgacaggaatggccttgtatgccagcacctgtagtcctgccctgtgcaaggggcctgcagtttagggaggcttgggagcaacaactcccacacagggctgggctccccacattggtttttttttttttttgttcattggctgtaagttccttttctgagatgaagccttcttcccttttttcaaagagagcttggtaagggaaagctaaagggattggtagccctgttcaacttgcaaccacatggaaccacatgtacatgttcctggaggcctctcccctctgtccctgtgtgtccctggtttctcttctgtctcccatctgggagtctcatggctggctgatctgatcctggrttcaacttttatagatgttgtttctccattggctaaaagaaaggtatgtcgcctggggtgctc

SEQ ID NO: 841438 - DNA, 636 bp, Homo sapiens
ttatttctcgctctggttctccattggtctgggctcctgcttctcagtcttctctgacstctggtaagtggaactttcattaatacttctgtcgcactttgtacctgacctaggtggccttgcaaatgttgactcagattgtggattttccactttcctctgttttccctattttctcccctgggaaatcttgcagatgatgcatattcattttctgtattcagccttccattattaaggataaaattgatccctacattgaatctgaaattaccactatatggattactctggctcactgctgtccaagcttggttttctctttgcttacttcctgtcatattttcagtttgcccaaaagaggtaagccactttattacagacccattactagtgctagacgtcatccacctctgttttcacctgattcttgtggggaatcctctttaatttgttgtaaccttctcagcaactcttctgtacttcacctatagtgcctagcaaattgttatcactcataagcctgtaatcttcatcactcaggttatttgcaagtagaaagcttctggaaccatttgtccatccgacttctgcactgggccacatccatcttcttcattgtcagaatctgagttt

SEQ ID NO: 841439 - DNA, 640 bp, Homo sapiens
actgagctctcccttcttttctgtggctcccaggcatccaaaatatatgagtttccatagtgctcaagtcaggggaawcagaagctagttcttcaagtattcttttgaaaaagtaaaaataaattgtcgtatgtttcctcattctttccctttcaagggagaaactgtatgttgggtgttttcttccaattgcaccaagttctgcttgcttgaagggatagcttttgagagtaaaatgcaacagatattcttagacatttcaatgcagctttcattgattttgcacttatctggggtactattacttttaactgtcttttgagttttcataatgtctttttggattatatattgttgttaatttggtgtctctgtaggaaatctataagcacggttttgtttctcactgccaccaaaaatcccaataccagtataaaattattgttgtcttagtccactcaggttgctataacaaaatactataaactgggccacttataaacaacagaaatttatttgtccagttttggaggctggaagtcaaacatcaaagtactggcagattttgtatccgatgaaggcccattgcctgaataatagttggtgccttcttgctatgtcctcacataatggaagggtc

SEQ ID NO: 841440 - DNA, 656 bp, Homo sapiens
ttaaaatgaaagtattagttggatgcatgttttttacttttcttttttttctttttatttgtcaagctgcactccatttataactgcttgtgctttgattcaattaagtttgacaagattaatgtctttggggttcagagaggccgagttgtgactacatactgcagctggggcataaaatataaagattgctaataaaaagccagggcttagagaaaaatgtcattccatgtcaatgctttcaggttaggttgggaaacagcaatgatcttgtttacatgactttgtatctgtgttcatagtgatagcatgaaaaagagactgacagagagagagaggaagagagagatacacacattgtactcaaagacagagagacggtacaggatcacatgaataagtctttagagtatgcatattatactctaggccatatggcataacctgagattaaaatggtcctttcaaactaacggtggggaacccagcaaaacaaatatgttttctatacaatatatcatctattctgggaggtgatggtacatggtgaagcaagaaatgcacctaaaatagtctttcaggtgaagaagaggtaggacaccattccagacagatgctgcagcctaagcaagggatccragctaaaagtaaataaa

SEQ ID NO: 841441 - DNA, 567 bp, Homo sapiens
tttgaattctccaactataactgtatatttgtcttttttctcctttcagttctagacatttttacttcacatatcttgcagttcagctctttagtacatccacagttaraaatattatatcttttgggtggattgaacatttagtcattatataatgcccacctctgtctctgaaaatattttttgctatgagttctgcttcatctggtattaaaagtagtaacttctgctttcttttgactaacgtttgcatgacatgcctttctgcatccttttacttttaacctgtcaatatcactatatttgttgcaatttcacatacacaatatatatcttggtaattttcttaaacctccagtctgccttttaattggtgaattaacccatttgcatttaaagtaagtattaatatgttagtaattaagtaggccattttagtttttgttttctttttgttctctttgttacacagttttctgcttactttttcttgccttactgtcagttaattgaatatattttagaattccattctgattttcataggcactattgatagtgtttttg

SEQ ID NO: 841442 - DNA, 544 bp, Homo sapiens
acccaacttaaaaagtattcaagtaaaaagtaaagggagaaaaaagatataccatgctaacaattttcaaaagaaaacttgaatagctataacaacttcagagaaagaagatttcagaacaagaaaaataatcagaggcaatgaattgtcacttttccaagaagacatagcaaaactaaacatgtatatacctaacagagcatcaaaatttatgagacaaatgcaaacagcactgcaaggagaaacagacaaatccactgttatagttgaagactttaacacacttctatcagtatttcatgcttgaagcaggcagataatcagtaaggatatagttgacctgagcatcactatcaatctgcttgatctaattgatatttagagaatattctattcaactacgccagaacccatattcctttcaagctcatgygggtaattcatgaagaaagatgatgttatagtttataaaacacaccatattaaggaaggaaggaagaaaggaaggaagaaataatttaaagtattgttaagtcaagtttag

SEQ ID NO: 841443 - DNA, 638 bp, Homo sapiens
gaaagatgatgttatagtttataaaacacaccatattaaggaaggaaggaagaaaggaaggaagaaataatttaaagtattgttaagtcaagtttagcttaaagctgcctccttagatattttatattgagcctaaatttttctccctaagttgtgaagtataacaggtgaagatgtaaacagacattagcctacactgtgccaatcaccaagttttggccaatcaaatacagccaactgtacaaatcatgttcaaataaggcaaatgttgattcataacccatccagccatttctgtacctcacttccattttctgtatctcactttcctttttctatccataaattttctcccaccacttggctgtgctggagtctctgagcctaatctggcttaagaggctgcccaattaacaaatcattcattgttcaattcaactctttaatttaatttggctgaagtttttcttttaacagtatgctcttagactacaacrgcattacactagaaaactagaaactaacaactggaaataactggaatatcatcaatatttggagatgaagcatgtactttctaagtagcacatggttcaaagaagcagcctcaatttttttttcaaaatatatttttgact

SEQ ID NO: 841444 - DNA, 622 bp, Homo sapiens
tttttactttgttgagcgtgttgagttttgttctgtggcttaacatgtggcttattctagagaatgtttcatgtactgatgaracaaatgtgtatgttgtaactattggaagaaatagtctgtaaatgcctattaggtcaacttggtctgtaatgcagattaaacccaatgtttctttgttgatttcgtctacatgatctgtccaatgctgaattggggtgttgatgttttcagctattattgtattgggttctatctttctctttagctacagtaatatttagtttatacatctggtgctcttattttggttgcatatatatttacaattgttatatctttttgctgaaatggcccctttatagttgtaatataacctttgtcattttattattaatattattttatttaaattacattctatccaagtatagctatgcctgcatacttctggtttccacttgcatggattttttttttttcttcacttctttcagtctatctgtgtctttactggtaaagtgagttttcggttggcagcatatagttggatcttatatttttaattcattcatccagtctatattgtttagttggggaattaaaaatatttataattaat

SEQ ID NO: 841445 - DNA, 541 bp, Homo sapiens
aaagtgttgtgagagaaaaaccatctacctagaattctgggacctgtgaaattattcttcaaamgtgaagaaaaaataaaatgcaaaattatgtatcttcaatttacagaagataacacaggagaaagcctagatgaccttgagattactttttagataaaacaccaaaggcttgattcatggaagaaaagattgataagctgaacttaaataaaatgaaaaacttctgctctgcaaaagacactgttaagagaatgagaagacaatccacagatggggattgtctttttttgcaaaagacatatttgataaacaactcttccaaaatgtacaaagaactcttaaaacacaaccataagaaaacaaacaatccaattaaaaaatgggcaaaagatctaaacagacacttcaccaaagaagacatacagatggcaattatatataagaaaagatgcttaacatcatatgtaattagggaattacaaattaaaacaacaatgagataccactgcatacatattaggatggccaaaatccagaa

SEQ ID NO: 841446 - DNA, 592 bp, Homo sapiens
ctagggctgccgtaacgaaaccacagactgggtggcaaaaactatagactgggtagcttaagcaacttaatggtcttttctcacaattccagaggctagaagtccaagatcaagggggtggcaggtacagttttttcttacttctctctacttggcttgaggatggcctccttctctctgtgtctgatggtcatccccttgtctatgttgtctgtgtctgaatctcctcttattataagggttctagtcatattagattagggtccattctaattaccccattttaacttaagtacttctttaaaggccatgcctccaaatataaccatattctacggcactggggaattatatcttcaacatataaatgttgggggcacacaattcaaaccactgcaggccatgtagaattaaactaggaaacaataacagagagataataaaatatctaaacatgtgcaaattaaacaagacacagaggaagttacaaggtaaataagaaaaatgaataaaaatgaaaataaaacatytcataacattgtgggatatagttaaaaatacttagaggaatattgataacattaaatgctta

SEQ ID NO: 841447 - DNA, 634 bp, Homo sapiens
gaggatgttattgtacacctgcttaccaatgtcaaggaacatgtaacaacagcaataagaaaaacacaacacattctctaacctactgagagcagattttatttyactgatgtgtttatattcatttcactgattattcgtaaagttaacgtttttatttcacatttgcttgccacttgcaagacttcttttgtaaagtgccttttgtattctttgaacacttttctattaagggggagtggatgttcaggcttttcctatagctttaaagcccttacatgatgaggatgtaaaacatcgctatgcttgtggtagatttttttttgccatattttattttattattgtttaaggtgttctgtttataatatctaaggaaatatatttttaggacagaagtcaaattccctgaaggcatggaaatatagcacttcccaccagaaatacattcttttggtattagcacagagcttttaaaacaataaacatgagattcacatcagaattgtctctctcatttttttttaagtgaggtgcaattctcggcccataacaatagcaaagtctataattttcatcttttaagtctatagctttttaaaaaataatgcaaagtatctaaagaagaatgcaa

SEQ ID NO: 841448 - DNA, 634 bp, Homo sapiens
gaggatgttattgtacacctgcttaccaatgtcaaggaacatgtaacaacagcaataagaaaaacacaacacattctctaacctactgagagcagattttattttactgatgtgtttatattcatttcactgattattcgtaaagttaacgtttttatttcacatttgcttgccacttgcaagacttcttttgtaaagtgccttttgtattctttgaacacttttctattaagggggagtggatgttcaggcttttcctatagctttaaagcccttacatgatgaggatgtaaaacatcgctatgcttgtggtagatttttttttgccatattttattttattattgtttaaggtgttctgtttataatatctaaggaaatatatttttaggacagaagtcaaattccctgaaggcatggaaatatagcacttcccaccagaaatacattcttttggtattagcacagagcttttaaaacaataaacatgagattcacatcagaattgtctctctcatttttttttaagtgaggygcaattctcggcccataacaatagcaaagtctataattttcatcttttaagtctatagctttttaaaaaataatgcaaagtatctaaagaagaatgcaa

SEQ ID NO: 841449 - DNA, 332 bp, Homo sapiens
tttttaaaatgtatcagtagatgtcaatggtaatatatcttggaagggagctaatgagctgttttcttttgtctttgcttttactcctccatattaaaatatgtatatttaagatgaaaacaaaagaatcataaatgtaagagaagaaaacaattacccaaacttaaagatgtagtgtggcttttagccaaacagtggtgtttatgtccttctctggattggtttcaccaraatcgcattggaagctacatagaaatgcagattttaaggatcagttcctggagattctgattcaggagggctaaggcagaagtcaaggtacatcaaggaaa

SEQ ID NO: 841450 - DNA, 332 bp, Homo sapiens
tttttaaaatgtatcagtagatgtcaatggtaatatatcttggaagggagctaatgagctgttttcttttgtctttgcttttactcctccatattaaaatatgtatatttaagatgaaaacaaaagaatcataaatgtaagagaagaaaacaattacccaaacttaaagatgtagtgtggcttttagccaaacagtggtgtttatgtccttctctggattggtttcaccaaaaycgcattggaagctacatagaaatgcagattttaaggatcagttcctggagattctgattcaggagggctaaggcagaagtcaaggtacatcaaggaaa

SEQ ID NO: 841451 - DNA, 313 bp, Homo sapiens
tagcagcaacaaaaaaatgttggtgcctagtttcatgcgggaaccactagccaggtcaaatgctgtggctcaatttcttcattaagtaattctcagatttggagttgggatgccaagttactacgccttctcctatataaccaactcattgttatcattttgatatatttgtgggatagtatagtgtagtagaaaacatygggcctttgaagccagaagtaactgggtttgaattttgaccctaaaagatgctcactgagtaacagtaagaaattatccaacttctctgacctaacaagtttagaataagaat

SEQ ID NO: 841452 - DNA, 545 bp, Homo sapiens
aatccatttttggttggtttttgcttacagtgaaagatacggatccagttcctttttctgaaagtagctatccaattttcccaataccatttattgaacatggtatcctttccttaacctaagttctcctaggctttgctgaagatccattggctgcaaatatgtgactatttctggattctcttttctgttccattggtctttgtgtctatgtttataccaatatcatgttgtttgggttactatatagccttgtaatatattttgaagtgaggtgacgtgatacctccagctttgttgtgttttgctcaggattgctttggctatttgggctctattttggttccatataaattttaggattgttttttctaattctgtgaagaatgacattggcattttgatagggattgtattgaatctgtagaktgctttgggcaatatggtcacactaatgatattaattcttctgatccatgaacatgggattgttttccacttctttttgtcaccttcaatttctttcattagtatttcgcagttct

SEQ ID NO: 841453 - DNA, 585 bp, Homo sapiens
ttgggagggtaaggagggggaattgcttgggcctgggatgttgaggctgcagtgagccatgatcatgttgctgcactccagccttggagatagagcaagaccctgtctcaataataataataatagcaactctgwctggtataagatattttatcattgtggttttaatttgcatttctctaataattaatgatgttaagcaattttttcatgtttgttggccatgtgtatatcctcttttgaaacttgcctgttcatgtcctttgcccatttttaaatgggtttgtttgctttttacttgtttgagatccttgtagattctggatattaatcctttcttggatacacagcttgcaaatcttttctcccattctgtagattgtcttttacctgttgattacttcttttgtggtacagaaactttttagtttaattgtctcatttgtatatttcattgttgttgttgcatttgcttttgatgtgttagtcataagttatttgcctatgacaatgcctagaagattttccctaggttttcttctaggatttttatagttttaggtattacatttaagtctctaatcc

SEQ ID NO: 841454 - DNA, 541 bp, Homo sapiens
tggcctgaactaagagaagactgaagtaatcatttttgacttttttgcttacaacattgccgatcaaccagcatagcacatgtttacctatgtagccaacctgcacatcctgcacatgtattaaagtaaaatamaataaaataacaaaaaacttaaagtaaaataaaataaaatttaaaaacccacaaaaaatgttgctaatcctttgttttgattttcagaattaagaaaactaatgtgagctatttacagcttgtagcaattgaagaaagtacactactgtgaacaaaatttggagcatatttctttctctctacctgatttctccagggtttggaaactatttgtgagtattcttaatttacaggaatatagttattcgcatcagtgcaataagcatgtgttacaactggataccattagagaaactggttattttaccaagactttgactggaatggtgtgctttccttaaggaaccaaacttgacttatagatccaataaaagcccattgggaaaactggcctcataccttgtctc

SEQ ID NO: 841455 - DNA, 517 bp, Homo sapiens
agttgtagatttgtcatatatggcctttattatttgaggtatattccttctatgcttagttttttgagagtttttatcatgaagacatgttgaattttattaaatgctttttcaggaattttgtrtctatgttcttcaaggatcttgttttttttgttgtgtccttgtctggttttggtatcaggtgatgctagccttgtcaaatgaactagaaaatattccatccttttgattttttgtaatagtttcataaggattggtattagttctttgtacacttggtgtaattcgactataaatccatctggtacagggcttttcttttttgggaaatttttaaaattactgattcaatctcactactcatttttagtctgtttaggttttctatttcttcttgattcaatcttgacaggtcatatgtttctaggaatttatccatttcctctgtgttttccagtttgtcagtatatagtttttcataagtctctgatgatcttttgtatttatgtggtat

SEQ ID NO: 841456 - DNA, 562 bp, Homo sapiens
cctgaggcacagtctcaagaggtcctgagaacatatacccaaggtggtttgggttacagcttggtttgatacatcattcaatgcatgtgagatatacattggtttggaacgsaaaggtgagacaatgcaaagcgggaagggggtggggctgaaggtcagaggtggattcaaagattttctgattggcaattggttggaagagttaggttaccatctgaagacgtggaatcaatagaaaagagtgtctgggttaaaataaggggttgtggagaccaagggtcttaagaagtccttaggtggccacccttagagataatagatggcaaatgtttcctattcacacctttaaaaggggctagaatctcgattaatctcttcaggatttcagggcctggaagggaaaagatctaattatgttaatagagattctttacagatgcaaactatcccccacaaaagacggctttgcagagccatttcaaaatatggcaaagaaatatattttgaggtttttcagtctagttaaaaaaaaagtgaggtaaaatattttgatttccttttt

SEQ ID NO: 841457 - DNA, 639 bp, Homo sapiens
agggaaaggtacagacttagaaaagatttgagaagatcctaagtttatacctcaggttgatccttggcacagggacaacygtctacaacaataaaagcaaacaaaaacaatcaacaaaacaataacacaagagagtaaaccctggaaaaaaggaagaaccatatttccagagctactatattaatacatttgaatgcccacttttcaacaaaaaactacaaggcatacagagaaacaagaaagtttggctcactcaaaagaaataaactaacaaaagttatccttgataaagacttaaacaaaactttaaaacattgccttaaagatgctaaaagtactaaaagaagatttagagaaagtaaaaaaaaaagtatgaacaaaataacagtatcaataaagagaagaaatctaaaaggaaaccaaaaagaaattctggagctgaaaagtacaataagtgaagtgaaaaatttactagtatgatttgaaggcagatttgagtaggcagaggaaagaatcagaaaacttgaagatagaacagttaaaattattaagtctgagggacagagagaaacaagattttgaaaaaagtgaacagagcctacagggcctcgtgggatactatcacgcagacaagccata

SEQ ID NO: 841458 - DNA, 517 bp, Homo sapiens
taagatccagggagaggcagagacaactcaggagtgcatgaggttgggatccaagtacaagtacagatggggatgttggggtctggtcttgacctgaggaggaactccttatcttctaagattgggagaaaagggatcgagaaaggggttagatagagaaaatggataggtagtgtaaaccaagtatctgagatagatctcaatcagtttagaggtttgttttgccaaggtgaagaaccatagcccgtgacacagcctctggagttcctgagaacatgtgcccaaggtggttgggctaccacttggttatatacattgttgtgagacagaagttacaggcaaagacataaatcaatatatttaaggtttacattggtttgacttggaaaagtgggacatctagaagtgggggcttccaggtcacaggtggattcaaagatttcctgattagcarttggtccaaagaattaagctctgcctgaagaattggagtcagcttgagttaagataaagggat

SEQ ID NO: 841459 - DNA, 597 bp, Homo sapiens
agaaaagaaacagataatataaaagacaaactaaaagatatagaggttgtgtattcagaatatactcaggactcttacaactcaataataaaaagaataactcaattttaaaatgggcaagggatttaaacagatattttcccaagagacatacaaacggccaataggtgggatttgaacagacatttttccaaaagagatacacaactggccaaaaacctacatgaaaacatgttcaacattatttagtcattagagaaatacacattatactcataataagatacaactcactctcccaccaccacacactaggatggctataataaaaaaaaaagtagaaacaataagcattaaggaagatgtaagaatctggaaccctcatacattgctggtgggaatgaaaatgatgtactacagtgaaaaagagtttgacagttcctcaaaaagctaaatatagagttaccataaactctttatataaacttctaggtatatatccaggaaaagtgaaaatataagtgctcaaaaaaaagtatacatgacagtttatagtggcatyatacataatagcaaaaagtagaaacaacctaagtg

SEQ ID NO: 841460 - DNA, 470 bp, Homo sapiens
aagcttttatgaggcactatattagaactttctgmagttttaacaaaatagcttatagtcccatccagagtttgacctttggtgtggtcctttcttaatttgaaaatcatttccaacctggaaacactggaaatgaaaatagtcttatcttcaagcccaacacgtccttagtccttgatatttattaacagtttttttcttattcctcaacttattcctttcatattttatcaaaggcttagaaaggaagccaggtgacaattgtaatattatgctagaaatctccttagctatatcattatattcaagaagcacatgaggtacatattctattttttttttcacattacagagggcaatggtgttgataaactctccatcattatgtaacaagggacacattcctgtatttgcagtagtttttttgttgtttctgtttttgtttttgtttttttttccatttaagcctt

SEQ ID NO: 841461 - DNA, 580 bp, Homo sapiens
aggtcagaatttcttcaccatggaaaatttagcctccattccctctaaattaattytccttctttttctttctttccagagcattagtatgcctcagtgaagtatgacattattgtgttccgaatgccaagtggaataacttataaaactttttttaatagaaggaaatagaagatagagcccaaagccctcccaaatatgaaatgtgaaaagaagtaaatgagaggagaaccgatccacagtagacaaaatgaaataaaatattctacgctcttttgaaatgatgacaagcacctctctcaacatccttgattacctgttaagttaccacaattttccaatacatacgccaagctctcagcactccctgctactcctttccctcacaaaaccttttcttccttaattatgtatccccacaaattagtcatttttggaatttaaagaatgatgagccaagagtactttaagagctctctaaactaaaacttctttccaaactccctctctttcctccaatatttggaatataagctatacaataagatatcctaagatcagcattgctggagttggccag

SEQ ID NO: 841462 - DNA, 586 bp, Homo sapiens
cttatctagctgcttgaccctggaactcttgtctgaaccttgatttttctgtgtagaatattcctctaacacttgagcaaacactcttatcaagaaagacattcactagtactatataattgcgcatttgtttcaacacaaatttattgagatttagatagttttagttacaggacaattaagactttcttattattatatgtataccagaaatgcctgcattgactttttcagaggtgagggttccactagttttcatatatatcaaaaaaattgataaaaactctaaaaatatattattatagtattattatttcggttggtttaacagcaaaaaccgtgattacttttgcacaaacctaatattttgagagaagctaagtgtatgatattttaaaatatttcttcattttttaccacaaagaaaacttgttatgagttaacactggttattattaacaataaaattttaaaataaaatataaataggttacataaagatttatcaatgaccagtaattattattattattattattwtttgagacagagtcttgctctgtcgctcaggctggagtgcagtagc

SEQ ID NO: 841463 - DNA, 522 bp, Homo sapiens
ttagcgaatcctttggattaagctacaagccattataatttgcagtagcaagccttgtaatgctaatgacaaatataagtcagtttgtttcctatgcactcatgkatcagtggttacttcggaaatttgtgttttgtctgatagttttttttttttttgaaaagcccttttttaaaaaagattttaaaaataaaggtgaatttcacacaatctaaaattaaccaaagtgaacatctttggtagccttttactttgatttttatgtatattattatagttatttaatagcctctaaaaatacccagaatggcttaccacttccttttcaagaaaagaattctttagtctccccaaatcttatgcccactggctcattgtacagtctctctgaattctatgccagttccgctcttataaattgtgagcctgtgtttcttgtgccaggttctattccaggcgcaggtgggcatcagtgcagccagcccgccatagcgttctaccacctggtgtagaaatctgtta

SEQ ID NO: 841464 - DNA, 610 bp, Homo sapiens
gatattacaattgatactcccaaaatacaaaggatcataagaactgaacaattatacagcaactaattgaataacatagaagaaatgaataaatttstagacacacacaacctatcaagattaatcatgaagaaggagaaaacctgaacagaccaataataagtaagaagattgaatcagtaataaaaattctcccaccaaagaaaagcccagaattggatgactcctctactgaaatctaccaaatattaatgaagaactaataccaattctaagcttttctagaaaatcaaagtagacagaatacttccaaactaattttacaaagctagcaatacaaaagctagacaagcccaggcatggtggcttacgcctgtaatcccagcactttgggaggccaaggtgggagaatcacctaaggtcaggagtttgagaccagcctggccaacatggtgaaaccccgtctctactaaaaatacaaaaattagccgggcgtggtggcacttgcctgtaatcctagctacttgagaggctgaagcaggagaatctcttgaaccttggaggcataggttgcagtgagccgagattgcaccattgcactccagcctcg

SEQ ID NO: 841465 - DNA, 548 bp, Homo sapiens
agatttttaaagtcatattgttttatacattttttatttttttttagaaacagggtcatgctctgtcacccaggctggagtgtagtggcacaatcatagctcactgcagcctcaaactcctgggctcaagygatcctcccacatcagaccccgagcagctgtgtctatagatatgtgctcccaggcccggctaatttttttttttttaattttttgtagagacagggtttcagtgtgttgcgcaggctggcctcaaactcctggcctcaagtgatcctcctgcctcagcctccaaagtattgggattataggtgtgagccactgtgctgaaagtaaaatttaatagaaaaaaaataaatttacttttgcattctcaaaataactaaatcttccccactatttcagtgcctataaagatctctgaaaagaccttcaggtcttttgtgaacatattactttattttagactttcaaggacatttgtacagcgaacagccttggaagataaagatatctttctctagaacaaagagcaagtttgagtacag

SEQ ID NO: 841466 - DNA, 594 bp, Homo sapiens
gtctgtggcttccctatagaatgcatgatccagaagggcasaattatttgtatgttttgttcattgtcatatcctatctctagtaccagactgcacatagtaagcaataccttttgaatgaatacaaggtgttgaagagattaatcacagtgcctactatacacacaatcctctttcaatggacaaagcatcattcatagtcattcctaagataaacctttttttttccttcagcagttgcatgttctgtactacagaactctgtggtttcacccttgtatgactttaccatagatgattgaaccaagagcagatacatgacaaaagggcaatcagcccatagactgctcagtgatctggatgaaaaaactgtaacctaacaagggggaagtgattagctacattgattagagtctctctcctaggaatctgggccagaaaataagagaagaattactcagatggaggtgagaaggaatgaaaagagagagagagagagaaaaattagctagctcccaagaatgtcaatgcccaagggttaaggacaaggaacacttgctactgaaggaataatacagctgtaaggagtttctg

SEQ ID NO: 841467 - DNA, 655 bp, Homo sapiens
ttttccagacaaacaaaagctcaaagaatccaccaccaccaaatccagcttataataaatgataaagggagttctttaatctgaaagaaaaaaacactaatatgcaaaaagaaaatatgtgtgaaggcccaaaaccaacaagcaaaattaagtataaggaaaaacccagaaaactctaacactaaaattgtggtgtgcaatacaatcatagctctagcataaaatccaaaaagcaaatctatgaaaaacaaaagtagtaatgcctacagcaacctgttaaaaaaataggctatattaaaatatgtaaattgagagaacataaagtcaaaatgtaaggagggatagagttaaagtgtagacgctttttttttttttaattgttttttgagagacttgttgcccagactggagtgcaatggcactatctcagctcactgcaacctccacctcccgggttcaagtgattctcctgcctcagcctcctgagtagctgggattgcaggcatgcacaaccatgcccagctaatttctgtattttwgaagagagggggtttcgccatgttggccaggctggtctcaaactccttacctcaggtgatcctcctgcctcggcctcccaaagtgctgggattacaggcatgagccactgtgccca

SEQ ID NO: 841468 - DNA, 574 bp, Homo sapiens
ggagtatccagaatgtatacattcctacaaatccattggaaaaacaaaaaaacacctataaaggtatgggtaaaagagtgaaataaacactcttagatgtgctaatccataatcaagattaccacctgccaattttgcaaaaattcagaaactcaactttaccaatgaggatgtggggctttgagagcgctcatccatgctgaagagatgtattttggtggaaccaatttataaagcaatttcatctagtaaagttgaagataggcatacatcatggccagcaattccatttccaggtgtatacccgtagagaaatgcaggcatatgtggaccaaaatacatatgtaagaattttcattaagagcatttaaaggcaagccacagactgaaagaaaaaatgtgcaaaacacataaataaaggacttaataaatagagagactatagcaaataacaatgtagtatatagttcaagatagctagaagattttgaatgttgttaccacaaataaataataaaygcttaaagtgatggatatggtattacccagatttgatcattacactagtataatg

SEQ ID NO: 841469 - DNA, 601 bp, Homo sapiens
acctttatccatgaaatgagaggcttggcttaatyggcaggaattagtgatgctcacctgcactgtgccttttaacttcattattgtctgcctctgcatccctcagatccagttttctttcctagggcttcaactaaaagcttggaattgagtttgggaccaaaaatctgtcttggggaggtttcttggactccttatcataagctgaatgctaaagtgaagctgtggaattaagtcctcctccaacaagggacccaaaaaggaaacatttgggcatcctatttatttccatcacccaggaggatttgcaggataattgcccagaactagaatattgatccagagtttttcattttccatcccctcttactcttttttttttttttttttttttgagatgaattctcactctgtcacccaggctggagtgcagtggcaccatctcagctcactgcaacctctgcctcccgagttcaagcaattctcatgcctcagcctcccaagtagctgaggttacaggcatgcacctccacacccatctaatttttgtatttttagtagagaagggatttcaccaagttggccaggctggtcttgaact

SEQ ID NO: 841470 - DNA, 578 bp, Homo sapiens
tacagttttagtttttcattccagaagggaaatgctttctcatctttacgattggtcaagactccttgctcccacccctgcgattagcatttgccgttttcaacctggagatttcttttccatttaccctgtctgtacagtagtttgtgaccacctctgccttttaaagttgagttttgacaattgatatacaattgatttcttctctaacctcttcagttttatagtttgacctcttgttacaaactgcttttaaaggcaccatgcttatgctttaaaagccacttaaacagaacatatatttagaagacaggatgtttttgccacagatgtcaagagggtcttggcagtgttttcacagaatgtctgctggtgtctgtgcagctctgagactctaggcactctgtacttagagaacatgtagaggttaagtgttcatcaggagacctgcgatgtttgtgttggaaatactaagagatgtgaggtttaggatgttttgtgttgtgttgctctgtgtgctyatccagagcagacatcctcaagtcagaacttaatgaggtatgcggaaaatcaccagg

SEQ ID NO: 841471 - DNA, 578 bp, Homo sapiens
tacagttttagtttttcattccagaagggaaatgctttctcatctttacgattggtcaagactccttgctcccacccctgcgattagcatttgccgttttcaacctggagatttcttttccatttaccctgtctgtacagtagtttgtgaccacctctgccttttaaagttgagttttgacaattgatatacaattgatttcttctctaacctcttcagttttatagtttgacctcttgttacaaactgcttttaaaggcaccatgcttatgctttaaaagccacttaaacagaacatatatttagaagacaggatgtttttgccacagatgtcaagagggtcttggcagtgttttcacagaatgtctgctggtgtctgtgcagctctgagactctaggcactctgtacttagagaacatgtagaggttaagtgttcatcaggagacctgcgatgtttgtgttggaaatactaagagatgtgaggtttaggatgttttgtgttgtgttgctctgtgtgcttrtccagagcagacatcctcaagtcagaacttaatgaggtatgcggaaaatcaccagg

SEQ ID NO: 841472 - DNA, 635 bp, Homo sapiens
ttgaaaaaaattaagtaaaaatataaaggatttaaataactaagttttatttaatagttccacatagcaacrttgcattttatacccgataaatggtgaatgtgtattattttcaaataaaaattgagatatttacatacactagaatgttaatcagggtcctgtcaggagataaaaactacattagcatattagggcccataggaaatattgataaaatttaaaaacaaaaacaaacagatcacattttctaatcacaattcaataacactgtaaataaaaaattaaatgctccaatttacttcttatcttggaaagaaaattaaagcatcaatgtattcattttccattgctagcataacaaatcatcacattttagtagcttacaataacacaaatatattaccttacagttctgtagatcagaagtctgaaatgggtctcaatatactctcaagatgatggcaggctgcattcctttctggaggctctagggaagcatgtttcctgtttattctagggaagcatgttttgtctttattcaggctgttggcagatttcagtttctcgtagttataggactggggtcttgattttctcactcactgtaagccaggggtcattccagcttctag

SEQ ID NO: 841473 - DNA, 619 bp, Homo sapiens
gactccataagtacatttcttgtattgtgaaaggaaggaagatgacaarttaggcttacagatctagtggttgaaactttaagaaattccattcagatggtttctatcaaataatagttgacgttgttaagctctttcaatgtaggaaatattgagctaaacaattgtacatgtacttggttatttttatggcaaagagccaagatacatattgatatttcattttatactatcatatatttatgaaaataccgttttcttgttattgttaccttgaattgtttatttcttattactttttgctattgctcatatactctttttcttttttctttcaattctgaaacgtcctttgttatttaaatcctttaagtaataaagagtctcccaattttatatcctataataaaattttggggggatttagacttacttttttcagggccagtccacaaatattttcccaccttttctgcttaattatttaatactacatagcaaaactcatacttgatactttattatttatattctatatttattttaacatagttatataatttatattcagtagttactttgatttctccatggtattttgtgggaagcaaacagtttt

SEQ ID NO: 841474 - DNA, 629 bp, Homo sapiens
ctgttttctgcctatggctagacagttttcccagcaccatttattaaatagggaatccttcccacatttcttgtttttgtcaggtttgccgaagatcaggtggttgtagatttgtgatgttatttctgaggtctctgttctgttccattgctctatatgtctgttttggaagcagtaccatactgttttgtttactgtagccttgtagtatagtttgaagtcaggtagcatgatgactccagctttgttctttttgcttaggattgtcttggctatatggggtcttctttaattccatatgaaatttaaagtagttttttttctaattctgtgaagaatgtcaatggtagtttgatgggaatagcattgaatctataaattactctgggcaatatggccattttcacgatattgattcttcctatccatgaggatgggatgtttttccactcatttgtgtcctatttccttgagcagtggtttgtagttctccttgaagaggtccttcacatcccttgtaaactgtatttctaggtattttattctctttgtagcaattgtgaatgggarttcattcataatttggctctctgagtgtctgtccttggtgtaaaggaatccttgtgatt

SEQ ID NO: 841475 - DNA, 634 bp, Homo sapiens
agagagtatagtaaataattattctattctatccttagagtttaccaatacttgcatgaaggaagactagaataaagtaagcctgaacatatttatgaagtgggaaatttgaggaaaactgaggctaactgcaaatatataaaaccaagaaacaggattttacaaatctccatatagcgctattttaaaaaaatattttcaaaagataagtgctgaatgggacattattatataatgcaatagacttaatgttttctgttcccttccttccaaattcattcgttgaaatcctacccccgaatgtgatgatattcggcagtggggcttttggaaggtaattagatcatcaggatggagccctcacaaataggattagtactcttataaaagggacaccaaagagtcctcttactccctttctgcgatacaaggatacgatgtaagactgctatttgcaaaaagagtctgcaccagaactgaactatgctggcaccctgatcttggtkgggacttccagcgaccacaattgagacaaatgaatttctgtttataagccatccagactgtgctacttagctacagtagcccaaaatgactaagacatatggtgatgtatatgtattctgctttgttt

SEQ ID NO: 841476 - DNA, 602 bp, Homo sapiens
tatttttaaaattgtgaattttaatagataagtgaaatttgatattgatattagragaggttattccatgttttctcaaagtcaggatgcaggaggtagagagaatatttcctaaataaaacatatgccctcaaaatggcagtacttttaaataactccaatgtacagattattttttctatcgagcctcagttttttttacattagaaatgtaaattgaagaatccttcatatctcatactggcaacatttgagcaactacacagaaaacaacctttaaaccaatttcatttgacatgtcttggaaaatcatattacacatgtgaatcagatttatgtgtctaaatatcctccattttcctaagattatatcagcactatgagataatccaatttaaaaaagattaaagtacaaagacttacaaattgaaaagataagacaaatttttattgttagctttatctgattaaagtacaataacaaactgcatgtcaaatgctgttgaaggatggagaatactttgtttttcctctcagcaatgaattcaactacattatatttattaaatcactgcttaagataatttctttatatagaaatt

SEQ ID NO: 841477 - DNA, 615 bp, Homo sapiens
tctcttggtctccaccttccagggaagaggaattttaggatttatgtcatagttagctctaaaaattatctttagtggttaaaagcgtttgcaagctcaaaattaactactctagattccttctgggaagagcagtggagattgccctgtgctgctgtagctcagtagcgaaggttttgccctttcacacttgcagtctgtgtttgattcctgcttaggaagaaagttgtttttggtttaatatttgcatgatcttgtctagtcttttcttctccaagggctatcttaaattttcctttctctgagcacctgaaaggttacctttggtaaagctcaaaagccagaaatattggccatttgaccatttaaacaaaattttaaaaggactttattagagtgctgctgttaaaagtcagcttaattaaaagaggatattcaagctctaacagcctggacttcttgggaaaacaatgaggcagcagaaacccctttcctgacctkgttcttccaagaactccaccacaaagccaataaccaattaagaaacttaaaaactggcaaatgaaaaatcttacaattactgtagtaatcttctgtctgtctgtgtaattatat

SEQ ID NO: 841478 - DNA, 615 bp, Homo sapiens
tctcttggtctccaccttccagggaagaggaattttaggatttatgtcatagttagctctaaaaattatctttagtggttaaaagcgtttgcaagctcaaaattaactactctagattccttctgggaagagcagtggagattgccctgtgctgctgtagctcagtagcgaaggttttgccctttcacacttgcagtctgtgtttgattcctgcttaggaagaaagttgtttttggtttaatatttgcatgatcttgtctagtcttttcttctccaagggctatcttaaattttcctttctctgagcacctgaaaggttacctttggtaaagctcaaaagccagaaatattggccatttgaccatttaaacaaaattttaaaaggactttattagagtgctgctgttaaaagtcagcttaattaaaagaggatattcaagctctaacagcctggacttcttgggaaaacaatgaggcagcagaaacccctttcctgaccttgttcttccaagaactccaccacaaagccaataaccaattaagaaacktaaaaactggcaaatgaaaaatcttacaattactgtagtaatcttctgtctgtctgtgtaattatat

SEQ ID NO: 841479 - DNA, 529 bp, Homo sapiens
ctaggataatttgttttccaataagcattctttatgtgtgtcacttttagatttgttactctgttttttctttttttccatacayaataaaacacaaaacactgaagtaattttcagttagtattgtgtcaagttttacttactttatatttactataaattcacataaatattatgaaaatgtatgtaaatacctcagttctgcctcctcacacttctacatttttcttttaaaaaagtgattcactaatttatttgtcttatacttcgatagaagaaaaattaaaaatgttgttagcagtaaatatttcttagaccattgagatataattaagtcacccagatggcttaactatgctgtaatatgtacagtagagtcttaatattataatacgagcaaattgtggtaatttcaagatttttgtatgtaatgctattgtgaagttttgctgtacccgctatgaatgaactgaacaagtgatattatttctctttagttggctctttatttaatctatttattggaact

SEQ ID NO: 841480 - DNA, 637 bp, Homo sapiens
aagaaagcaaggaaatgctcaaagaattaatggcatattttcaggacatgraaaccagtttgaagaggctatactgattactggatgaactgaaaaattagagtgtcaaaataaataatgatcatgagtacagtgtgtgtacaagcactcccccgacatacatacacacctttatattacattgaataaaatgagaagccacaagaacaccccagtataaacgaatgaaaggatgggaggagaaaaattgcattacagtagtatgcctaaaataaacatagaaaaaatataaaattagaaaatcacccctgagaagcatcattacaataattacattcaggtaagtaatatcaattgatgctgaaaggttactagaacctgagtatgaaataggatatctactgagtctccatgtgtctcctccagactgcttacttatttacaaagaaaaagaagtaattttacagaaaagaatccttgctgttgtcacttcaagtaattaaatcaaacatcacaaataatgagaaaaattgacatcgcatggcaactattaggattcaatgacacaaatacagcagttttcctgtgatatttatgccccaaaggcataatctaaatctaatcatgaagaagtatc

SEQ ID NO: 841481 - DNA, 578 bp, Homo sapiens
cacatccctgcattaggagggtcatcttattcctctctatctacaacctctatagttcactgtagaatttcagagcratggctatgacgattttgatcttagaatcaatttgattatttaacgccatccctgatacataacccatttatcttcatacaggcttttaaggacttcccaattggattctgtttctactgacatccatataaattggaacctgctccttcccttcaattctttccccagaagtgagagctgatagccccaggtaagtccccagcccccactgaagacgcatttcttctctgagggttaccttgagagacagaggctctgttggttatgattagatggtttactaacataattgtgaacataatttgttctgatctgcttctgccttccagtcaacccacgttccgtatattagaagaagaaagggttggtgtgtgtgcatgtgcgtgcacacacacaagtgaagagtgtttagttctgcctgtctgtgcctcagggaatggaatgtaacagatgttacagtaacacacattttttgctttaagaaaaggatgaaggaggtg

SEQ ID NO: 841482 - DNA, 658 bp, Homo sapiens
acattcagtccataacacttcctatatgcaaagcagagcaaaataaaggcaaatactacattttcaaagttatttgcctcagtagcatcagcatttggttccagctgtaatcctcagccccctcccatgatggtaatcaaaggcttgccatttgctggaaattcctgccctgcaataggagtgttcttcaccctctacatctgacaactgccctccacagttcacaaatactgacggcgcactaaaccataagctctttaggaacaggaactctgacatatatgtatttataccccggagagtaatcaaattgtactacatatactcctggtgctgatgaggaccagtaatgagacagatagaatgtatscagagacatctgttggtgctaagaagggctcaggcaggtaataggcatcctaaccatttaggacaaagtaaaggacaaataaatctccaattttagtcatttattttcttccgctagctttcaggttgatgtgttctttcctagttcctttaggtacaaagttagattgttaatttgaaacctttctaaacctttctaacttcttgatgaaagtgtcttggggctacatgctttcctcttaacactgctttggctgcatcccagagattttggtaagttgtgtcctcg

SEQ ID NO: 841483 - DNA, 470 bp, Homo sapiens
agcaattctaaaaatgtgctatttcctatcattggatccttaagtataacctatctgtttctccccaaccaaatgtggcagagatgcaagtagaagcatgggcttcctaacagtgactgcactggggttttgttctttcaaatctgaagtcccacaagcggggcaaacactgcaatattagttctgtgagctctgggcaattaatagtaagtatcaaatgatgggaaggaatgtgaagtgaagcatagttcaacattagactctgtgaatatccctggcccaaaaaaacaaggatgactaaaattactgggtttgagttatatcagttcctgagcctgagagggatgaagagatcaaggagcaaagaggctttccatggatttcttactggacagccagtgcctcctatctagtagagcctctgccttccttttcayctatgggattgctgtaggtaagcattctagaat

SEQ ID NO: 841484 - DNA, 617 bp, Homo sapiens
gaaaaatctgatttttagagttactacattatattacttaaaatgtgtttaaaaaaacaaaaaaaaaawgaaaagaaataaagtttggcacataaaactgtggcacatatgcaagaaaaaaatcagtcaatagaaactcttttgggaagtccagatgttggagttctggtacaaatattttaaatccgttatttagaatatgttcaaacaactaaaagaaaccatttctaaagaactaaagaaaattatgaaagcaatgtcttatcatgttaaaatatcaatgaaaatatataaattatttattcaaaagaaccaaatggaaattctggaaatgaaaaagaaaataaataaatcatgagaagagctcatagcagatttgagcagcccaaaggaaaaaaataagtgaacttgaaagagttcgaatgagattatctagtctgagaaacagaaatataaaagaatagaaaaatgaacagagcctcagagacatgtatgacaagtttaattgatcattatatacaagaactcctctgtaagattatgaatggatttctcatcagaaatcatgaatgcaagaaggcagtgggaagacatattcaaaggctgaaagaaaaaga

SEQ ID NO: 841485 - DNA, 597 bp, Homo sapiens
aatggtcaaatttggaaaaatttgagcaacaaaagaaataatacaatattggatttaaatcaaacataaaacaaatagccacaatttcatactgatattaataaataattgaataagtcaattaacaggaaagaagaaaacatttacatacagaagaactgcaaaaaataatgtagatactccccactaaattaggtgagaaataataccccatccttaattgcgggtcttgctgacttgctttcctgttcggtacagaaagaatgagaaaagtaattttgcagtggagagacttggcaagcattgcctcagctaggtggtggaggcatccctaatcagtgatacgtcttgttgatagcatgtcccctttgtataatgtactgtgatccctctccaaaactcataaccccagtctaaccatgagaaaaatatcagacaaacccaaaccgaagaacattctacaaaatagctraccagtactccttaacactgtcaaggtcatcatcaataacgaggaaaatctgaaaaactatcacagcccagaggatggctatggagacatgatgactaaatgtaatgccatatcctggatgggat

SEQ ID NO: 841486 - DNA, 591 bp, Homo sapiens
taactaaatttctaatcaactgtgttgtacacaaaaagccacattcaagcaatcgttactaagatttattattctccaaataatcactcctcctttttcactggaatgcttctcgttttttccctttayactttggtcactacacctggtaacaacacacacctcactgtggggaatgctggcttagaatgtacatttgaaaatcagacgaaattggctggcctctgtctaaattcacatggcagaaaacttctacagacccaaatatgatgttaaaattatttatttatttttacagacagggtcttgctgctgcccaggctgaagtgcaatgacacaatcacagctcactgtagcctgcaactcctgggctcaggtgatcctccctcctcagcctcctgagcagctggtactacaggtgtgcaccaccatgtccagccactgacattaacatttttagacaattttttaaaatccctaattctgtatcttacttgattcagtcaagaaacacttactggctatgaacaacgtactaggccttaaaattgttctgcattcaataaacttccaatctttttgaaaaaaaat

SEQ ID NO: 841487 - DNA, 511 bp, Homo sapiens
ccagggaccttggagaagctgcctagggggaggctgggaccctggaaccagctctaaggacaacatgtggcccccaaactatcctcagaggaggcggggcctgtcagcaaaggccgtcatccttgggtgtggtgcaggcctgggctccagctggactacgcaggacagtagagcagcgctgggcagaggggggcccttctcaccctcctcttgctccatgactgacccactgctctgggccaggctgggcttgaagggccaccaaagttggggacagtgggagcacctctcctctaccctgcaacaagctagaacagccccaggtagcagtccccagacctggaccctccaggctggggactgactaaaaacatgcaagcgacccccaccaaccaccactgacactrgagggtccttggtgagacgccgatcctggccgtgctgaagggtccatgttgacctgccccctgactctctccctggccaagactcagagagaaggggaggccag

SEQ ID NO: 841488 - DNA, 609 bp, Homo sapiens
gtgttatgctcctcttctgtgtttatgtggtttttccaaaaatgaatgttttttaggcaggttttcttaacagaggcaccattaaccttttgggactaataattatttgtcatgggaagctattctgtgcactgtaagaatgtctgatggcgtctctggcctctaccccctaaatgccagtaggaccttccctcaccctagttgagacaacaaaatttttccagactttattatatgtgcccttttgggggttggggtaaggtcaaaataatccccaaggctgggagcagcggttcacacctgtaatctcagcactttgggaggccgaggtgggcgaatcatttgaggccgggagttcgagaccagcctggccaacatggcgaaatcctgtctctactaaaaatagaaaaattagctgggcatggtcgcacacgcctgtagtcccagctacttgggaagttgaggcaggagaatcgcttgaacccrggaggtggaggttgctgtgagccgagatggcaacactacagcctgggcaatagagcaagactccatctcaaaaaaaaaaaaaaaaaaaaatccctggctgagaactattggattagggcctcc

SEQ ID NO: 841489 - DNA, 573 bp, Homo sapiens
cctatatgtcttggtaagaaatgttgcttgacaggacagaagataagttagcctagaatacagtgctgattgcttcaaagtccctagatgttcttaggtctagagcagaggttggcaaactatggcctgaaggycaaatccacccccttagctggttttgtaaatagtctttttttgtttgtttgtttgttttgagacatagtctcactctgttgcccaggctggagtgccgtggcgtgatctcagctcactgcaaccttcacttcctgggttcaagtgattctcctgcctcagcctcccgagtagctgacatttcagacatgcactgccatgcccagccaattttttgtatttttagtagagacggagtttcaccatgttggccaggctggtctcaaactcctgacttcaggtgatccacccaccttggactcccaaagtgcagggattacaggcatgagccactgcacctggcctgtaaataaagtcttattggaacacagccatgaccatttgcttatgtattgtttatggctgctttcctgcaactgggtcagagaatgaatggcatgc

SEQ ID NO: 841490 - DNA, 604 bp, Homo sapiens
aggaagaactagtttccctttttctttgacagtggttaccacgcagcattccagaacaattaaggaaacatttggaatctaagcctgatttccttatctgtaaaatgatctatgtatctcataacatatgtgaaagaacaccataaactatcatctctaaaggtatgagttattactacttctagttggtgagtgtcttatgtgttcagtgatttcaaagacaacaacaaaaaccaagaataaaaattagttacctttgggttaaaatatctacaagactgtggttgagagcctccaaatagggctatgcggtagtcatgtttctttcttctaggtcttgtgccatctacaagttcttctcggtcctctggagacagtagatggtacctcattccacctgtagtaaaatacatggcaacgcttcaagaacttcaggcactaaccagygctttgaaaacgaaatacccagacataatagggcctttatttcagtaacttacttttatgatatctctatagcatttgaggaaagtgagggggaagaggcaggagaaatgcataaggatccgagtactaaccaattcatttattctcagcaatcacc

SEQ ID NO: 841491 - DNA, 604 bp, Homo sapiens
aggaagaactagtttccctttttctttgacagtggttaccacgcagcattccagaacaattaaggaaacatttggaatctaagcctgatttccttatctgtaaaatgatctatgtatctcataacatatgtgaaagaacaccataaactatcatctctaaaggtatgagttattactacttctagttggtgagtgtcttatgtgttcagtgatttcaaagacaacaacaaaaaccaagaataaaaattagttacctttgggttaaaatatctacaagactgtggttgagagcctccaaatagggctatgcggtagtcatgtttctttcttctaggtcttgtgccatctacaagttcttctcggtcctctggagacagtagatggtacctcattccacctgtagtaaaatacatggcaacgcttcaagaacttcaggcactaaccagtgctttgaaaasgaaatacccagacataatagggcctttatttcagtaacttacttttatgatatctctatagcatttgaggaaagtgagggggaagaggcaggagaaatgcataaggatccgagtactaaccaattcatttattctcagcaatcacc

SEQ ID NO: 841492 - DNA, 510 bp, Homo sapiens
tttgaggaaagtgagggggaagaggcaggagaaatgcataaggatccgagtactaaccaattcatttattctcagcaatcaccattattctaagactgccccacccagtaagcaactactatgtaccagtgaattatctggctcctcaagcaacagctgccaaaataataattattgaaatccagatctcctaacccagtggttcttgatctttacattagaatcacctagaaaatctctgaaactattgatacctgggacctaccacagactaattaaataaaaatctctaggtagtgtttaggaattggtattttaaagggcttcttaaatcttgccacttaaaatgtggttcaaagaccacctgcttcagcatttgggagtttgttagaaatgctgaatcccaggcccctatcccagacctactgaatcagcatctgcatatttracaccccacggtaattaggatgtacataaaactttgagaagcactgtcttagatgactctaa

SEQ ID NO: 841493 - DNA, 641 bp, Homo sapiens
atttcttctttttttttttttttgagacggagtctcgctctgtcgcccaggctggagtacagtggcagagcttggaggcaagctctgcctccaaggttcatgccgttctcstgcctcagcctcccgagtagctgggactacaggtgcccgccaccacgcccggctaatttttttgtatttttagtagacacggtttcaccgtgttagccaggatggtctctattttctgacctcgtgatccgcccgcgtccgcctcccaaagtgctgcgattacaggtgtgagccaccgcgtctggccgaaaccttgttctttcaagtccacataaacgttgctatttgaaattatatcagaacgagtgaaaagtcccatccttgcctggaggatctaagtctctttgacgcagagaagcagcctcaatttctatccaggtgtagagcttcagataaacggttctgaaaacactctgtattttcttaactttgcagtttccaaggaaacatgccctacattcaattctcgtccagacctgatgttaatgcctttacacacagctatgctttgagatttcatttaaatttcacctaaacttcactctccccgccaaaacatacaataactaccttttattttgtacggtgag

SEQ ID NO: 841494 - DNA, 658 bp, Homo sapiens
ttctttatcgtggcttgtgttttggcaaaaccgatgaggtctatgatcttttttcaggagtaggctatttttcttttctatattattttcattgaatttggttggttattaaaatgataatatatttttactttaataattaggaatattactatttttattataaattacccaacagtcaatcccagaaatgaaacccttttatcatttgacagatatttattgaacatctgttaggtaccaatccagtgatgaatgctagaaaaacaaagttaaataagatacagtctgtaatacagattaacatcctcatatatcaaatatcaaaaaaaattaaaaatcttgactagaataagttgagtacctgaaggaagcagtttaaatgctgtatttttctgtttctacagtcatgatcatgcatttcaactagtacatgtattcaccgcccatccaaatataactaactacgtgctgccaggtatttgtgatactaaccagatgatacaaggagttgaacgggagagggaactggagctggmatatctttgacaaataggccaagtcaatgcaaattttgcaagtcatgggccataaaactgttacataaaccttttgtgattttggcaaagaagtatgtgaagtttttattgaagaaact

SEQ ID NO: 841495 - DNA, 603 bp, Homo sapiens
tggcaaacatggcaaaaccccgtctccactaaaaatacaaaagttagtgtgggattacaggcatggtggcacacacctgtaatcccagctactcgagggggatgaggcaggagaatcatttgaacccgtaaggtagaggttgcagtgagattgcaccactgcactccagcctgggcaacagaaaaagataatttcttcaagtgatttcacatggttttcaaaccatagaagcacaaaagttagctaagtagcttttataaattctgggtggcttttttgaatcaaattcaatgttccacagtcaggactcttctgttgctggacagtcacgtggtgcaaggctgtaagttgaagagtgtcccataggccttgtgcagtaaaagctctgctcttcatcataatggttggctcatcaggaccatcagagtgatctcttggcaatagttaagcaatcaaacggagctatagtaatggcttataaccaaagtacacaatcagtgtcaaaaagaaagacagggatgtgaacacacaggttcccaggagacgcggagccagaacttagcatgggatccsagccctggtgagtcagagcccatgagcatg

SEQ ID NO: 841496 - DNA, 594 bp, Homo sapiens
tcttttgggtatacacccagcagtgggattgctagaacatatggtagcttaatttttagtttttttgggaacctccaaactgttctccatagtggttgtactaatttacattcacaccaactgtgtagcagagttcccttttctctgcattttcatcagcattcactatggcctgttgtattagtctgttttcacactgctgataaagacatattcaatttacataggcagtgtacaaaataaagaggtttaatggttaattaaacttacccgtggctggggaggcctcacaatcatggtggaaggtgaaacggatgtctcacatggcagcaaagagaagagagcttgtgcagggaaactcccatttttaaaaccattagatctcgtgagacttatttactatcacaagaacagcacgggaaagacctgcccccatgattcaattaccttccaacagataagatttgggtggggacacagccaaaccrtaccagctgtcttttggatataaactgttttaactggtttgagatgatatcccattgtaattttcatttgcatgtctttcatgatcaatgatgttgagcacctttt

SEQ ID NO: 841497 - DNA, 625 bp, Homo sapiens
gagtgtaaattagttcaactattgtggaaagcaatgtcatgattcctcaaagagttaaaaacaaaattaccattcaacccagcaatcccattactgggtatatacataaaggaatataaattatcctaccataaagacacatgcacacatatgttaattgcagcactattcacaatgacaaagatatggaatcaacctaaatgcccatcaatggtagaatggataaagaaaatgtggcacatatacactatggaaaactatacagccacacacacaaaaaaattagatcatatcctttgcagtaacatggatggagctggaggccatcatccttagcaaaccaaggcaggaacagaaaacaaataccacatgttctcatttgtaagtggaggctaagtgatcagaacacatggacacaaagaagggaaaaacagacaatgaactctaccttaggatagagggtggcaggaggtagaggaacagaaaaaaataaccattaggtacgaggcttagtattcsagtgacaaaataatctgtacaacaaacccccatgacacaagtttacctacataacaaacctgctcatgtacccctaaacctaaaataaaagttaaaaaagtgtata

SEQ ID NO: 841498 - DNA, 625 bp, Homo sapiens; identical to SEQ ID NO: 813860

SEQ ID NO: 841499 - DNA, 614 bp, Homo sapiens
catggtatgatttgtcatatgccaaaaactaaaataaaaccatgtcaatatcaacgtggatatgccgagtgatgaggwcaaagtgatctaaaatcagaggagcaacacatacacctgagaatcaatgtcaaagcaggtgctacatgatcccacttatctttcatgcaacaaattaaaaggatttacaccattatactacaaacattcatcgtgctctttaacttgcccaataactgagaaggcacacaattacgacgacaattcagttgaacgtacacttcacatcacttcagtggaagtgtgctaaattaatcaccttggatatctgtttgctgatacctagtagataatattcattatctctctcaaccatatggtgtaataatctgcctaagtttcttgtatccactagtttagccttccgaaagtttcttcatccagtcgtggcaacaaaggataatatattagcctcaataaaaatatcatcaattatcaattttgacatacatatacaaagtaaaactgctgcaagcattagatattgatcagtttttcattcagaaatcagtgcaatattcattgaaaatgaccattttaggagttaattagaatcc

SEQ ID NO: 841500 - DNA, 612 bp, Homo sapiens
tgagcggcctgtggccaccacaatagtkaccacaaattgggtggcaaaagacaagagaaatgtattccccccagttctgggggccagaagtctgaagtcaagtcatccgcagagccctgctccctctgaagcctgcagcggggatccttgctgcctcttccaactgctggtggccccaggcgttccctggcttgtggatgcatcactcccatctctgcttgcgttttcatgtggcctctcctctatgtgtgtctgtgtcttctcttctgcttcttatgaggacacctgtcatcggctttacaacccactcgtagttcaagacgatctcatctcaagatccttatcttaattatgtctatgaagattctatttccaaataagttcatattcgtgcggtctggaagattagaatgtggacacatctttttcagggacacaattcaccccactgcagtgaccacagccggatcagactcgttcacccacttcagtgaccacagatggatcagactcgttcgctccctgcagtgaccacggccggatcagacttgttccctacaaaggggatttctcatgagagccagtcacacgagggcagagactttggttatc

SEQ ID NO: 841501 - DNA, 619 bp, Homo sapiens; identical to SEQ ID NO: 836121

SEQ ID NO: 841502 - DNA, 560 bp, Homo sapiens
caggcgaagggctctgcctaccccaaacttggagccctctggatcccagagtctcacagtgctcccgggaaatttcataagggcaagcatgatgcattaggcttgggggaagggaatgagatccaaagcctggaagatgtgagaggtagcagacaccgtctaggaaagctggggtgatttccgagctttccgtgcagggtgcacggtgtggcggaggcagagctccaagagctaaaattcccagctcggcttggggccccgggttgtgcctaactagctgaggaccctcaggcaagctgacaccactcccttcaatggcttccaaaaccctggccaaggttctaaggtgtgcacagtgggcactgctcccctccccaccccgtctcccacctctgaccctcacccttcccagcgacagggttctgtattccgtgcggcctgccacgggcccgcctcgggggtgccctgcagagcagcccgagcacctycctatgcacgtagctccctccctcgcggcaacaggccgacttcatctcccaccccgggaagccaggcaggac

SEQ ID NO: 841503 - DNA, 538 bp, Homo sapiens
aaacaggtaagcaggaaggccrcagttgaccacactcacggcagctctcctgggctgccgagcacctccctatgcacgtacctatgcacctccctttgttgtgggctgcttgtgacccccagaagggtagatcctagtcgtaaccctctgtagctggggatgtgaccttactttccgaaaaggtgtcatcgagcagctgtcatcaagttaagatgagtttggacagacactcagggagtaggcttgggaaacaatggagacagagagcagaacgatgcgtctacgagccagagaacactaggaaccgctggcagcaacagaagcagggagggaggaaggaacggattctcctcctgacttcccaagaagggaccagctttgcggactccttgattttggacttttggcctccagaaccacgagagtctccagagagacatacagacgcccgctgtccccacgtgagttagatgagctcttagagctctgcaactgtgtcacacggggcccaagtgtgggctcccgagacggcctgatt

SEQ ID NO: 841504 - DNA, 592 bp, Homo sapiens
tctccaaaatctccaaaatgaggccccttgctttctggatagcagtagctcaagaaatatttgttgggagactgrcagaataagtgaataaatgaagtgccctccctcctattattgtctctcacaattatgtttatttcttcatagatttatcatagtgggtaattaccattcttatttattggtttgcttatgtagtatctctccctctctcgactataaaccctgttatggcaggaactgtggttttcttatttacatatttatttcttatatatagcataatctccagggaacataactttcttatttactttttggatttttatttcttttttactgcattatctccatattataccccaagtagatgtaaatggaatgaagaaaggaaggaaagattcagcaacttgcttgaggaattaagtacatcccaagtatcttttttgtttgatactgacattggaaaaatgaactgaggcaatacctctgaacagcaatccctttcctatgtctgactaaatggagcgatctgtaaagcaagacaacttgtggagttttagggttagaagagaacttctggtgtcataca

SEQ ID NO: 841505 - DNA, 632 bp, Homo sapiens
tcatgcaattatagtggccaagaagtcccacaggataccatctgaaagttggaggaccaggaaagccagtgtgtaaatcaggcaagcccaaagacctgagaaccaggggagctgstggtatatctcccagtctgagagcctgataactggagtgcaggagtgggtatcactggtgtaagtcctggaaagagaaccaggagccatgatgtcaaagggcaggagaagatggatgtccaaactcaagaagaaagaattcacttttattccacctttttgttctatccaggccccaagcagattggatgacacgatgacacttgcccacattgacaagggtgggtcttctttactcactccactgatacaaatgctaatctcttctggaaacactctcacagacacagccagaaattgtgttttaccagctatctgagtgtcccttagccaagtcaagttgacacataaaattaatcatcacagtgcgtatatacaatacagaggtttaaatattagtagtaaaataggcaccggtgtacctgccacttagactaagaaatagaacaagtaccacccctcactgttctactgggataactactttactcgttgtatttgccattctcttgataggt

SEQ ID NO: 841506 - DNA, 451 bp, Homo sapiens
tgtttctgttgggaagaaaaatagtgatgaatatcagatacatagctcattttcatacttaataagtatccatgctactgaaagttaaacatgtcattttacaaattaagtaagtgcaaaatctatgtgacttcttagcacattaagatcatataattacaaaaggccttatgtacttctagcagttacttaactcttaagctactagcttcaaaaactgaatgatatagactgattttgctaatcaaaggaaaaaaatgtacttgacactccaattatactctcaaccattcataatcaaaaccaacctaagtcacttccatcaaataaatataacagattttaattagtaaagttgatttttaaatgtatttatcaaagyacaaataattttgaatacatgctttctatactaagaaaaatataatttaattaaaaagtatttatatta

SEQ ID NO: 841507 - DNA, 619 bp, Homo sapiens
ctacactgactgccaacagtttggtttttagcacagattaaataaaaaccgagatctcttcaacataagctgcttttcacaaagccrcaagtgtggagtggcttgtttcgttctcaggggtcatgcaagtctcatttaacctgtcggcctagttgtgtattaataagaaggcatttggtgcctaggttgcttcttctggtttaagtaggtgttaacatctggcaacatgtgtattttgtaggcctcaaagtacaaaaggatctgacttactcttcttataaggaacatactccactttttgttataaagctctctattataaggctgtcttgttacgcatccctgtcagaggaggaaaagcacaattgggaaatgccatcaggagttctggggaatggtgttttgcagctctgcctctgtgacagtgggggactaagtctagttcaagaggaggcatgggtttgtgtgccaataagttctttgttgttgggggaggattggtttaaaaggtcttatttggaaggagtttaaaattgtaatctcttctgtctttccttttggttttgctttctaaatttgtttgacgaccttattctttccacacaaactcaccattttc

SEQ ID NO: 841508 - DNA, 457 bp, Homo sapiens
ataaagaatggaaacttgttctctccccttttagcaaagaacttccctagagacttatacagttctaacactccagtttttttcaatctatttttcagaactgttaactgatatgtatatatgtataaaagacaaaacatcaacactttttcactgctaaaatacttcctcctcttctctcctgcttcctctggtgactttctcaccatccacaaaacaaaactcttatctttctcctgtgcaggctttcaagcaataaaacaaaatcaggggccgggcgcggtggttcacgcctgtaatctcagcactttgggaggctgaggcgggcggatcacggggtcaggagatagagaccatcctggctaacatgggaaccccctctcttctaaaaaaawaaaaaaattccccggttgggggggggccccttttatcccccgttcccggggggcttaggccg

SEQ ID NO: 841509 - DNA, 514 bp, Homo sapiens
catgtttctgagtcacatcctgaatatggagacagctagagccaacttgggacatgatgaagtagacaggcttcaggtccaagattccaggtcttgataagtgtgactttggggacttagatctaaggacttaagacagatggctggctattaatccatagctgtcataaccaaggaaagactggcactggcagcccagtggcattgcaggacacagtgacaaagactccacataccacctttgcacttattggtgccatgattataactggcttgaatccattgtctttttccaatttcaagtcttccagtagactgcataaatccagtcccattatctgttaaacactgatacagcccagtatcttccatgataaccccactgactttcagtcaatttcctgcagttagatgtcatggggaaggatgaataggctgtgcaatataaaaccaagtatggttggcrgctgggtttccatgaatatgacaggtaaaatgtgctgtggcacccaga

SEQ ID NO: 841510 - DNA, 218 bp, Homo sapiens
ctcaagtgcaacattcaaaggacctcgaacaagctcagtaattaagataaatgatatttcaatatagtatttttttaaatcaaaatgaatgcaaagcacctacaacaaaatcaaacctttaataaagacaagatacaacactggatttgcrggccttgtattggcctcacttgccttaccctaactccagtcttgtttatcatggacagttttgcttt

SEQ ID NO: 841511 - DNA, 542 bp, Homo sapiens
tgttggaatactgatctgcacatatgtgagataaaattgcctgagatagtagaaataaaaaccaggaaacctttaggccaaacaatctctggagctcacacaaaaatgagaatagtgctttatatagctcaaaaaaaacaacaactcataatacatggggtatagaaaacaaccttcaaagatttatatataaaggtttcgtatatatatatatatatatatatatatatatattttacattttatataacaaaaaagattatcttaattgataattcatcactaattgatgatgcaaattatctgataaatgtaacaacaatgcatggcaaaaaaagaaacaaaactctcagctaacttagagggaaacctcattgtcctgataaaaagcatatatgtctaacctacatgyaaaatcaatcaaaaatcatacttcatacaaccaaaatcatagttaataatgaaagactaatacctacccattataattgaaaaaaagacaaggatattctctcaaacaaattttatttaacattgtgctg

SEQ ID NO: 841512 - DNA, 617 bp, Homo sapiens
tttttgtctgcttatttggttttcctggaatatctattaacatgacagaacttagcactgttctctcccagggagctcatctctgtaccacctagtgctaccgagtgacatcacaaaatgccaccacttcctgaaagccccgatcctagaatgaactgccagaggtaattgatgactccatccaccagtagagacactcagcactttacctcccacctctcttatcctatgctgggaaggatgaggagaagcctgccgttgtggttccagactcagacccctgagttggggcagggagaaagggatccctgtgtgttctctcaccaccctgccatcaaccccagcaagcccaagcaccagtgaaagtttgtctgctgcaagagggatagtagggttcctgggtcctggcagggctgtctggattccctctggctctttgttgccttcttatgcttctccaccagatgcccctgccacctcctgtcacaagccaggtcctgcctactctttgggacaaggaggccttagcagaaaacaggagagatttgaattgtagatattgmattttaggaaattgtagttttctgggaccctgggtgtctcagataggccgctga

SEQ ID NO: 841513 - DNA, 454 bp, Homo sapiens
cacaatgagacatcaattcagacctgttagaatagccattattaagaaggaaaaaaamaaacaaaaaaaaacagaaaataacaagtattggcaaggatgtggagaaatcagtaccctcgaatactgctggtgggaatgtaaacagtgtagcccttatggaaaacagtacggagcttcctcaaaaacttaaaagtagaatgactgtatgatccaggaattccacttttgggtctgtacccaaaagaagtgaaagcaggaccttgaagagataattataacaagcatgttcacagcagcactattcacaatagccaaatggcagaagcaactcaagtgtctatcaacagatgaatggataaacttttgtttgtggcatacacatacaatggaataatataatctcaaaaaagaaggaaattctgacatatagtacaacatgggtgaattttaagaa

SEQ ID NO: 841514 - DNA, 511 bp, Homo sapiens
agtagttcttcaccgtcatgtaaaccaatagacasacacacacacacacacacacacacacacacacacagagtcaacaagcactaaaaagtaaaaatctactttctacaaataaaagaaacgtattaccatgtgatacaaaacttacttaaaaatcaataagcttttggaaacacttgttttaaaaaaattctcaattttttaaatatataaattaccacagtatttacggcaggaataactttgtaagaagctcatagttttgtattttatgacttcaaaaccagatttaaaaaaaaaatctgttaaagctgacttcattaaggaaagtatatttctactaatagaaccaacatctatgctaaatatttaacaatttgactataatgtgacatggtgtgggtctctttgagtttaacccatttgaaattcatttttcaacaaattagggaagttttcaaccattatttcttcaaatattattaccgcccctttctctctctctctctct

SEQ ID NO: 841515 - DNA, 657 bp, Homo sapiens
gaagaccaacaaggaaacagaaaatttgaacarctaaacccactagagctgaaagacatctatagaacacaccacctaacaacagcagaatacacattcttctcaagtacaaactgtacattctacagaataaactacatgctaaaacataaaacgagcctcaataaaacttaaagacagaaatcatacaaagtatgttttccaacaaaaattgaaccagatgaaacataataacagaaggaaattaaacaacacattcctaaataaccaaagggtaaatgtagaaaaatcacaatgtaaactagaaaataagtttagatgaactaaaacaaaaatataataaaccaaaacttaggacatgcagctaacacagtgcttaggaatttatcaatttgtatacatatttgtaataagaagaagaaagagcttaaatcaataacctaactgtccaccttaaaaaacagaataaaagcacaaactaaacccaaagcaaatggaaggaaggaaaaataatgactagaatgaaaataaatgaaacaaaaatcagaaaagaaaaataaagattagaaaaaaataaagaaaccagtttatttgaaaaaatcagcaaaattgacaaaatttaactagattcaccaaagggagaacaaaagaagggaa

SEQ ID NO: 841516 - DNA, 373 bp, Homo sapiens
ttgcatttgtataattaaaaatgaatttttatatgttcattaaaactcatcagtagcatacctttcttggtaacaycttgttaaaaatgttataatatttggggtgttaactgtaataaaactgaatttcttaaaaacagaaacaagcatttagactttttcctgaatggtcccatacttccaagtggcctagattattaaaagtagttgactggtaataataattattacgggtcatatagtatgttaaacactcttctcagattatctcatttaaccatcatcaataactctgtaagatatgagactatcttttttttattttacagacaaaaaaacgaggaaggtggattagcaagttacagtaaaaaaa

SEQ ID NO: 841517 - DNA, 373 bp, Homo sapiens
ttgcatttgtataattaaaaatgaatttttatatgttcattaaaactcatcagtagcatacctttcttggtaacaccttgttaaaaatgttataatatttggggtgttaactgtaataaaactgaatttcttaaaaacagaaacaagcatttagactttttcctgaatggtcccatacttccaagtggcctagattattaaaagtagttgactggtaataataattattacgggtcatatagtatgttaaacactcttctcagattatctcatttaaccatcatcaataactctgtaagatatgagactatcttttttttwttttacagacaaaaaaacgaggaaggtggattagcaagttacagtaaaaaaa

SEQ ID NO: 841518 - DNA, 537 bp, Homo sapiens
gctacaaacaaaaaacatacctctctctaatcggagcaaaaacaataaataagaagaggtcaggagtttgagaccagcctgaccaacatggtgaaaccccgcctctactaaaagtacaaaaattagccaggtatggtggcagatacctgtagtcccagctactcggaaagggctgaggcaggagaatcgcttgaacccgggaagcagaggttggagtcagccgaggtcgtgccattgcactacagcctgggcaacagagggagacactgtctcaaaaaaaaaaaaaaaaaaaaggacttatctttaaggcataaaataccagttaaaaatatccaagtttatgaatcgggaagcaaagcattgtcagatgctttatatagtttatatacattacaatttattgtatactcattgcatcagcaagtatgaggtcytctctaaaggactgatttaaatgtagtaaatcatttaagtatgaaagtaattagtggacatctgcgttacaggggctgggctgctaggcagagagatgcctga

SEQ ID NO: 841519 - DNA, 645 bp, Homo sapiens
ctcttggtggtgggagtggggatccacaggatggcttccttttgagcactagtgagtgccctttttcctttgtttatctcgtaycctaagtaggaaactctgggaagacaaagctaggccttcttggctgagacccaatacccaagttcctgaaggaggtaaagtaggtccctagtgtgttgcaggcagctgtcagtagtttcagtagccaaaaacaggtcgtccatgtactggaggagagtgcagttagggtgactggctcggaatggtataagatcttgttggagggtttcccaaaaagggtgggggaatttttaaaaccctggggtaactgagtccaggttaattgggtggtgtctcctgagccaggatctgtccattcaaaagcaaagataggttggcttttgggggccagaggaatagcaaagaaagcatcctttaagtcaaggacactgtatgctgtatgttctggtggaagcaggctgagtaaagtataagggttagggacagttggatggatggtgactgtctgcttgttaacttcccgcaagtcctgtactggctggtaatcatttgttccaggtttctggactggcaaaaatagagtattccaggtggactgacatggtgtgagtataccagctt

SEQ ID NO: 841520 - DNA, 594 bp, Homo sapiens
catgttggtgacttggcgtatactgtctcatgccattatgggtctttgaagattatgtcctcagctaaacccacagcccctggagggccaggggtggttttgtcttgtgtttctccatgggtttttctctcggcatttagttctgtgcatattatacaacagaccttcactaaagtcatattgggttttaaataacccacagggtgtacaggtcagaagttaccctgccccgggccaggtgcagtgactcatgcctgttatcccagcattctgggaggccaaggagggtggatcacctgaggtcaagagttcaagaccagcctggccaacatggtaaaatcccatctctaataaacatacaaaaaaattagctgggcatggtggcacatgcctgtaatcctagctactcaggaggctgaggtgggagaataaattgaacccaggaagcagaggttgcggtgagctgagatcgtgctagtgcactccmacttgggtaacagagcaagaccctgtctcaaaagaaaaaaaaaaaaaaagaagacggtcccctgcctgtgtttttaggcctgtcatttacatctgtgccagacaacc

SEQ ID NO: 841521 - DNA, 594 bp, Homo sapiens
catgttggtgacttggcgtatactgtctcatgccattatgggtctttgaagattatgtcctcagctaaacccacagcccctggagggccaggggtggttttgtcttgtgtttctccatgggtttttctctcggcatttagttctgtgcatattatacaacagaccttcactaaagtcatattgggttttaaataacccacagggtgtacaggtcagaagttaccctgccccgggccaggtgcagtgactcatgcctgttatcccagcattctgggaggccaaggagggtggatcacctgaggtcaagagttcaagaccagcctggccaacatggtaaaatcccatctctaataaacatacaaaaaaattagctgggcatggtggcacatgcctgtaatcctagctactcaggaggctgaggtgggagaataaattgaacccaggaagcagaggttgcggtgagctgagatcgtgctagtgcactcccacttgggtaacagagcaagaccctrtctcaaaagaaaaaaaaaaaaaaagaagacggtcccctgcctgtgtttttaggcctgtcatttacatctgtgccagacaacc

SEQ ID NO: 841522 - DNA, 639 bp, Homo sapiens
gcacttaggttggttccatatctttgcaattgcaaattgtgctgcartaaacatgcatgtgcatgtgtctttttcatgtaatgacttattttcctttgagtagatacccagaagtgggatggctggatcgaatggtggttctactttcagtctttaaggaatctccacactgttttccatggcggttgtactagtttacattcccaccagcagtgtaaaagtgttccctttcaccatatccaggccaacacctattatttttttgactttttaattatggctgttcttgcaggagtaaagtgatatctcattgttttaatttgcatttccctgacacttttgtttatgttgagcattttttaatgtttgttggctggttgtatatcttctttttagaattgaccattcatgtcttttgcccactttttgatgggattatttggattttttagatcctatttttaatcacaaacatcacactaccatgtggttcctaggactcatgtggtttggttcctagatttcctgacatccttccagctctcagcaccatcctgagaccatgagccacctaagtagctttcttattcattgccagtgggaaaggtgaaagagtatccaaagtaatggctaacacag

SEQ ID NO: 841523 - DNA, 657 bp, Homo sapiens
cttgaaacactgcagtcactcagtccacatctgctgagtgtccctgtagatgtggcccattccaatcctcactctacattaaaacaaaacagaaggccttttaatattcaattttgcactktctcgaaagtgatccatctgcatttgcaccaaattgatatccctctttctgtgctttttcccaaaatgaaaatgtctttctgatgacatttcctataacaagcaacaatgaagttgcttgttataaaaagtgtgaattaaaagaaagtgttttctttaaccatcaataattcttccatccaaagaaaaccatttggcatatgtctttccaaatttctttctctgctttcgagtttttttcttaaacaaagattagaccatatcacgtatactgttctttaaacaaaggtgatcttttcttgttcataaacatagatctacattaatctgactttgttcttcattgcttaagaagaaaatataactgcttatttttagaaaccatagtttatttaattttagttgttcatacacgttatattaagcctagaaagcctcaaccacaacaagcagcaaggaaattttcgtctgtcctttgtgtgtcaaatttatcagcacacactttaaatctctgggtttgcattctcaaatatctgc

SEQ ID NO: 841524 - DNA, 620 bp, Homo sapiens
cgagttcctcggcatctggggcctttttgactgagtacccatatggatacatcagcagctgcgagtagctgtgcaggtcgatgaagcmcttgaaattcccatgtttttggatgaaatctaccactgatttcacctccacttccgaattggcgtggggtccatggtacacttcggagcaagggttgtcgctggctccctttcctgttggggatagcccaagaacaaacattaactcatagtccaagaacacagaaatgcaagacgctccacctagagaggggccgaaggtattgggaatgggcaggccatggcgagacggcccagagcacctagtccatggtgggtgtggactgcagagaaggcatggaagagggagggttgggtgttgggtctgctacagctgaggagaaaaactgttggagttgaccttgccttgtaccaatagcagttgtcataaataattaatatcacccttgagaatgagttgtaattaataagtagactagataattaatatgaataccaataaataatgaaaatgactccatttattctggtgtcaacttattctctggttgagatcttaaaggccaagtgtgccagaaataatcaattgttgt

SEQ ID NO: 841525 - DNA, 646 bp, Homo sapiens
agtccaaaacctacagaccatctccatttgaataccctacaaggagctcagcctcaatatgtccacagctgaactcattatctttgcaacctcacccctctttcaccttcctggacttctccctcagtgagtggcaccaatgactttcagtgaggacctctccccatccaataaatgacaaagcttcttggctttatctcctaaatctcttccatcgtcactggacctgctgtagtttgggccattgtctctcacctgaactcctcctcctcttcctatgggatgtctctactgcagtccctcatcactccatccacactgctgctatgttttagctaaacacaatgcctcaattccctcaccgtcctgctgaaaaccaccccgatggcttttagaatcctctggattaaacctaaactccttaccacggcacacaaaaccctgaacttccccaactcccttttcttcctctttcatttcagcgatctcaacctacttgtagctcccagaacccatcacrcaattttatacttctatgcctttgcatatgctgttggctatgagaatgccccatcctttttctccttctctagctacctggcaaccagtctttacaaccctaccctcctcttacatgaagtttttc

SEQ ID NO: 841526 - DNA, 536 bp, Homo sapiens
ctttatgtcactttagaatattggagaattttgcctggacttttctagccttttaagctttttctctaatgggaatctatctttactttctttcttttggggtaaagagagcagggtgagagtcrtggtgttttaatagaactgcagatagctaattttgaaaaaaaaatgcttgttaagatgattgcccttgaggaaaatccttcatgtgtgagtaactattcttactatttcatctactttgctgcagaatagaattacctgatgtattattctgttctcatgctgttatgatgagatacctgagactggataatttataaagaaaagagttttgattgactcacagttccacatggttgggagggcctcaggcaacttacaatcatggtggaaagggaagcaaacacatccttcttcacaaagtggcaggagaggaaagtgctgagcaaagggggaaaagccccttataaaatcatcagatctcatgagaactcactccctatcatgagaacaacaggatgggggtaaccgcc

SEQ ID NO: 841527 - DNA, 517 bp, Homo sapiens
aatgtcaaaatagccaatatctgtcaaaaaaggctagatatatcatcaaattctccccaaaatytaccaaatgtatacaaatgtactactgtttcttattcatacttaacttgcatagatttcatcaccaccattagtgaagaaaattgctgtgcccttgatatttaagctacattaatgttaatttttatgcatccattagagttgcactaacagagttttttttttttctgaatttgatgtccattccttagaaagaatgcattggaaatcgtagctttcaaataagggacacattgtgaccaaggaacaaaccaatttaacatgaatggtttaaaattattctaataagcctgatactcttttaaattgagaatcaatatatatatcaaagtacaaagcaatgagtaggattctcagcaaaaatagccaactgacataagcatttctccaagaaacatcatttttcttgccatcaattattacattcttctcaagtcaaaaaacacaccacagg

SEQ ID NO: 841528 - DNA, 568 bp, Homo sapiens
gtttgaagcaaggaaaagggtcttgaaagccataggaagaacatcagatgttatgctaaattttatgttaagcccctgggggattgtgagcagggaaaggacatgatctaatctctctctctctctcwcacacacacacacacacacacacacacacacacacacacacacatatgcacatatgctccccaaacatgcctgtgttcctgtttccaaaacacaaagatgtttggcagcccattctctccttgagcatttgttactgccaatttctaccctccagtccttgaagtcccatttcctccaacaaagacagtgctacaatagagagggtcaaaggaaagaacactaatacagttcacattttctagcagcttctcacatgccccatatggacctccccacccccaccaaggaaatcctgttggttatgtaaggccactatggtatcctcattttatagagaaggaaataaaggttaaatttctttaaacaatgaatggctcattagtaaaaggtgaaagagtgaagcctagaactcacatctgctgccaagtccaaggtgtat

SEQ ID NO: 841529 - DNA, 492 bp, Homo sapiens
gcttattttattaacagggtgcttctggatttttgtacaaactctcaagcaagaaactttgattaaaaaatgttattcgtcatttttcactagtctatccccttcttatytctgtcccactttcttctttttccttctcattcatgatcctctccccaaatgcatttctccaccatgttaatagcaaactcctcacccatgcatcttactctgtaattgctaaaatcccctttcaaaaactctaatagaagcattttgtttagaaagtcatgtgaaaaatgtcaggaacaaccctttgccctgtctctctggcattctgaaagttgccagttaacctcactgtggttccttaactggaccacagtttcaagaactgaactgtggccccttgttcagtatcccctgctgaaaatcagagtaaacagtttagatcaaattgggctttctgaactcacatttcagcatgttgagccagcactatggaatgtttgg

SEQ ID NO: 841530 - DNA, 623 bp, Homo sapiens
cacttaaagtacgctgatgtaaataccaccagtgacttcccataaccttgcagccactggctggtggctccctgcaccagttaaaaaataacaggagaggatgtgggggcacagatctctgcaagcttccttcagtgtgtactcacactgctataggaaccatacgaataagacatgtatttgtataatggaatgcgacttttttctttctttgtctgtggcttctttgtgtaggtgttgacttccattgctcataagcggcatatcacaaatgcaatagtattaaagatatacaagactgggcgcagtggctcatgcctgtattcccagcacttcgggaggtctaggtgagcggatcacgaagtcaggagatcgagaccaccctggccaacagggtgaaaccccgtctctactaaaaatacaaaaattagctggaggtggtggcgcatgcctgcaattccagctattcgggaggctgaggcaggagamtagcttgaaccagggagtcggaggtggcaatgaggcaagattgtgccactgccctccagcctggcaacagagcgagactccgtctaaaaaaaaaaaaaaaaaaaaaaaggctatacaaataagtctcactttgt

SEQ ID NO: 841531 - DNA, 600 bp, Homo sapiens
aacaatcttctatttcttagcaagtgactacatcatgtgacttattttatgactaaaaatgttttcatgaacataagaaatgactttattatagrtgaaagtaatgcatactttactttcttatttgtatttaccttacagcaatatctaacaatttaaccatttctttcttcaattaacttcttttgcatcagcatgcttgtcacatttatttcctatatctatgattttctgtctcagtttcctttaaagatttctctgagtgtgttattaggcatctcagagttgtctcttaggctttctccatcgcactgtatgtactttcgtagaagattgaatcaatttatgtggtttcaatcatcatctgatgtcatgatgcctctactatcaaagctctagcccagacacatatgtcccaatgccttctgggcatttccacttgaatatctcataggccccacaagttaaaatgttccaaactgaacttttcaccttcccctcactcctctactgaccaaatgactctttttcctttgttgtccacctctctaaataacattagcatctattcagtttccaaagtcagaaataaagacataa

SEQ ID NO: 841532 - DNA, 421 bp, Homo sapiens
ttattttaagttttctgagataggaaatattgaattggagattattcatattttaggaaagtagtgaatggagccaattaaaaataaaaatctttttttagcataaattcargttagtgattagaaactcgagattttgcagcccattacctaatcatagactattactacttacaaaaaaattctcatgtgtaaatcgtcccttttcctttgtaaaagcttgatcaggtattttgcttatgtctcagactgtcatggggccaagaggggctggaagcagtggatgcttttatttcaattgattgctttttgaccctttcctaagtgacaggaggagtttcattctttccgcctcaattatcttctcactgattctttaaacaagtggaccatctcttggttaggtaaatctatagaaaat

SEQ ID NO: 841533 - DNA, 570 bp, Homo sapiens
gaatatattttttgtatagtattattaattacagagctctcccattctaacctaattccctgaccgtgagtaggcaccattatcatcagtttgcagataaggaaatgggaactgtgatggttaatactgagtgtcaacttgactggaatgaaggatgcaaagtattgatcctgggtgtgtctgtgaggctgctgccaaaggagattaacatttgagtcgtgggctgggaaacacagacccacccttaatcttggtgggtaccatctaatcagctgccagtgtggccaggatataaagcaagcagaaaaaaacgtgaaaaggctaaattggctcagcctccgagcctacatctctctcccgtgctggatgattcctgccctcaaacattggactccaagtccttcagctttgggactcagactggcttccttgctccttagcttgcagatgkcctattatgggacgttgtgatgatttgagttaatactacttaataaacttcccccggcttttttttttttttttttaattgagatggagtctcactctgtggcccagactggagtgcaa

SEQ ID NO: 841534 - DNA, 689 bp, Homo sapiens
cttaattaagacctctcaaagcagctctctgtgggatccaccctttagaagcagctgtggagatagkgacacaagaccaaattaggaatggttgccatgatccagattcttttatggaactcctacagatgcgttttggaatcaggtttttaaagtcccttttatagcaaataaataggaggttttgagggctgtttatgagcgcattccattacagtgtctttcagcgggccagagctcagccaatcctaattaagaagcaatttcagctgcagtcattgcttattataataattgtgacatttttatagccctacattgtctttctcaaagtaacggattcaggaggagtccttttctgagtagagtccacagaagaggtattctattggtaagcatttcaaatgacttccttcatacagtagtataaaaataatttgatagcagtccgtttgaaaaatgtttataaggaaccagcttaaactgatcagatggaatatattttcatcagtcgcttacctgaaataagtacaaacttttttattttttaaaaaggggggcctaaatttcgctcctaataatattgtaaggttacatattaagtttcaaatagataagtagtactgtgagggaaggaactgctaactgtaaatactacctaatttgaatcaagtaattttggctcctga

SEQ ID NO: 841535 - DNA, 606 bp, Homo sapiens
gaaaatgtaaagaagtacatatggtaatagccagttttcaatacaggtaacacaaaaggaaagggaaagctaatcttaaaatgaaatcrccatcctaatgaattaccaaaaagtgtgaaaagtacttttacatcaaatgaaaaaatgtaatctttatcaaatttattttttacaacatttatatttattgatctgaggtaggcttttgttagaacaaaattaatagtaaatactgaacaatatgtcaggcatggggcaaattggtttctgttctttacaacaagccactatgaccctattaggaaatgttttaaaggcgtttcttagcattttcaacaaaatatttgtactccctactgaaaatagcttaatatgaagtcccaaaggaattctgtctgcctcataaaattgcttttggagttttcagtttctggcctcctccttccaaatgcacagtgaatatatggtggagttttgtctaattctttcagtagaggaattttgctacattaaaataatttgttaattcatcatttccatggtaaaatagaaattactcaccctgattcctaatacgatcaacataactttgcttttcatacataa

SEQ ID NO: 841536 - DNA, 632 bp, Homo sapiens
acccttattattatggtgaaaaaatacaattttatgctccagagttagaagcctaatttccgaaaggtaaaaatagttgctaacatgaagcaacttctttgtgcatcagtttacgagttctccttcataggttctcactgtatatgggttatttctccaaagacgcagagaaaaactataaaagacaattctttattgaataaaactcttccattcacctcaaaagtgatttctcagtccctcagcctgccttttcttatcaatcccaacatcatcccaaatgcagaaaagacttgaacctgagtttttctgactgaagtttagcattgattttttggatattttatagactgtgtgccaggcatctaggcacggctagaggaataatagtgcacaggcaaacaccagtcattttcaatttgcaaatgatctcttttcctataaatagatgtatgtgaagtgtgtcacacccctaactctgtttcatgaggtgcttgtgacatttctggctcctattaccccacaaagcctttgctgtcatcatactcttattagtgaaatacaatccatgaagagcaaattcccgcarcaggaaacaatagcaaatatgatttaagattgcctgaatctgg

SEQ ID NO: 841537 - DNA, 598 bp, Homo sapiens
gcctaatgaaagcttctttattctataggaggtgtttccttgataaaataatcscaacccacacaattaaagttagttacttctgcttctaagacttcataacagttgtttgtatttctattattgctgtgctactcaaagtggcagttcacaaactgtaagtcactagtctgtgatgagataggcagagaaactgacagtaggcaattaggaactactatatacttaaagtaattttgtgtctcttgcatttaataatttttttaattggccctgtatttgtcttttaagtaataaatttttattgtgtttttaaaaatatcaaccaatgattaatttttgtttataaaaaggttcctcatcccagataagaaattgtattatagcacttatgtcattctatccagcactgtagttaacttacacatctgttttgctcactcatcttccttccttttttaaaaaaaaatctatcaaaggtgacatcggtattttgctcaagaggtgatactgatagatatggagtttagagtctgtagttttaaatctaaactgcacttttaatattctctacgaaaaacaaagggtaattttttta

SEQ ID NO: 841538 - DNA, 644 bp, Homo sapiens
cgtgagccaccgtgcccggcttggaaactgccatttttaaaaccatcagatcaccaggcrtggtggctcacgcctgtaatcctagcactttgggaggccaaggtggttggattacctgaggtcaggagtttgaaaccagcctggccaacgtggtgaaatcctgtctctactaaaaatacaaaaattagctgggtgtggttgtgtgcacctgtaatcccagcaactcgggaagctgaggcaagagaattgcttgaccctgggaggccatgttgcagtgagccgagatcatgccacagcactccagcctgggtgacagattgagactttgtctcaaaaaaataaaaaataaaaataaataaataaagccatcagatcttgtgagacttattcattatcattagaacagcacaggaaaagcctgctcctatgatttaattacctcacaccaggtccctcccacaacacatgggaattaaagatgagatttgggtgaggacacagccaaaccatatcgttctgcccctgcctccttctaaatctcatgtcctcacatttcaaaaccaatcatgccttcccaaagtcccccaaagccttaactcatttcagcattaacccaaaagtccgcagtccaaagtcttacccga

SEQ ID NO: 841539 - DNA, 516 bp, Homo sapiens
ttgaaagctttgctgcttaaaaatatcttctaccagataccctaaatmatcactttgaagttcaatactttcatatatcactaagtcatgaacaaaatgcagccaagctctttgctaaggcatcacatgtgtgacctgtgctccagtttccaataagatttctcatttcaatctgagacctcagcaatccagacttcactgtccatatcactatcagcattttggtcacaaccattttaccagtttccaagaaatatcaaactttctctcatcatcttgtcttcctctgagccctccaaactcttctaacctctgcccattacgcagttccaaagtcacatccacattttcaggtaactttatagtaatgcctcacttctcagtactgattttatgtatcaggttgttcttacactgctctaaaaaaaatacctgacactgggtaatttatttaaaaagaggcttaattggctcatgcttctgcaggctatataggaagcatagtgacagctgcct

SEQ ID NO: 841540 - DNA, 635 bp, Homo sapiens
ggacatttaatggtacaatamaaatgcaaacatttaattctttctgccaaacactcaatggcaatacatcacatcacacactaagcaaagctaggcaagaaatttgctatatagttaacagtattcaaaattgttataatatattcttttattttcttcactccttatccttatccttatcttcactccttttttcagcacataatacttttgttccactgatgaagcatataaatataatgtcacttctttctctgatacacatagctaattttatttttagtgagagtaaacatataggtgtatcctaaatctgaactacaactctcaacttctagcttccaaatcacaagcaaattagaaaagaaatcttgatctgtttttatcttttatagaaaaagttgaattgttaactggtttcttttgtttgattgtctctaaactcaagactctacaggctgaaagataatttcttcttggttgctcctcacacttcctatctttcctgttcttttaacattctaggtcttgtgacaaaatgctgcttaattctctatgaaatgatatcatatttaaaagtgttggcaccactgaagtgaacagcaatctgtgttaatgtggccagggtaaagcta

SEQ ID NO: 841541 - DNA, 320 bp, Homo sapiens
cctcatctttactaaaaatagaaaaattaccctggcgtggtagcccacacctatggttccagctattcatgatgctgagatgggaggattgcttgagcctgggaggtgggggttgcagtgagcctagatggtgctgctgcactccagcctgtgggtcagaatgagaccctgtctcaaaaaaaaaaaaaaaaaaaaaagaagaagaagaaaaagaagaaagaaaatgtggtwtatatacatgatgaaatactattcagccataaaaagtaatgagatgctgtcatttgcaacaacgtggatagatctgaaggtcattacat

SEQ ID NO: 841542 - DNA, 519 bp, Homo sapiens
gctagttatgataaatcagtttcaaccttyataaatgtgtcttggagccactgttaaaacgtaactttttgttgattcctgtaaatcctctacaactatttctggcctgatatggttttgtatccagaaagcagtcccaatctagaccccagaagaggcttcattgatctcacacaaggcagaattcagcgggggagattccaaaatgggtgaataagaacagctccaatctacagctcccagtgtgagtgatgcagaagatgggtgattactgcatttccaactgaggtactgggtttatctcactggggcttgtcggacaatgggtgcagcccacggagaagggtggggcatcgcctcaccagggaagcccaaggggttgggtaattcccatttctagccaagggaagctgtgacagacggcacctggaaaatcgggacactcccaccctaatagtgtgcttttccaatggtcttagcaaatggcacaccaggagattatatcccatgcctagctca

SEQ ID NO: 841543 - DNA, 483 bp, Homo sapiens
acactttatgtcatttattttaataaatcattaaaatttaaaattacctgtttttttaattataaaattcatcaaacaaaaaactataaagcataatacaataaatattttactcattacttaattttagcaaatctgacaatgttgacagataggcttcaaattttaaaacaaaaatttacaaatgcattggaagcccttgtgtatcccaatctgattccatcacaatctatctccatacctgcattgctcccttgccaggggaaaccatgattctgatgtgaatttttacattcccattcattcccttgattttatgtctgtactaagatggatgcatccacaaaaaatgtactacctgttgtattttttaaacattatatraatggcatacaaatgtctcaaaactattttttcattatttttctgtttagtaaattgtattggtttatagtatacataaaataatacaatcattgtatg

SEQ ID NO: 841544 - DNA, 388 bp, Homo sapiens
agttgttaatatttgtatagctgagaaaggacagagcccttcacttagtgatgacagtcactagaaatctggtggcctagtgcaccaaattctgaaactaaaacaccctgagtggtaggcccttttaataaactttatactgaacttaaattcaaataattgtgcagacaatttaaattgaaggtatatagagctgaagttttctgttttgtaagttgatgttaaaccatatattcatttatgtttattcttttaggaaagtgatmataacgaggtacactaaaaaccatagagtattttctagaatattttccactattaagttagacttacagggatctgcagatggcaaagttacaaataagtctttgaatgtgcttattttaaa

SEQ ID NO: 841545 - DNA, 582 bp, Homo sapiens
tgacattggaattttgaggaggacacaaacatgcagtccataacacattccctctcatgatatgcaagacctctttttttttttttttgaggtagggtctcctctccgttgcccaggcgggagggcagtggcatgatcatagctcactgcagcctcaacctcctgggctcaagtgatcctgccgcctcaccctcctgagtagctgggctacaggcacataccaccacacctggctacttttattatttttgtagagatggagtctcactgttgcccaggctggtctcaaactctttgcctcaagcaatcctcccaccttggcctcttaaaatgctgggattataggcatgagccaccacacctggctatgatggttaattttatatgtcaacctgactgggtcatagggtaaccacatatttggtcttactctgggtgtatctatcaggatatttctgggcctcattcaacccattgaaggcctgtacagaacaggaaggctgattaagagagaatctctgtctttgaggtggaaaatcagtcttctrccttgtgacgtggactcagactggaactcatacc

SEQ ID NO: 841546 - DNA, 602 bp, Homo sapiens
agtatatttgtgtgtgcatgtggggtagggccgggtggggaagcaactgaggagccagcgatgtaaaaatcacactgagggcaacttggtgttcgattaagcagcttcaattagattcatgctggatttcacagaagcagtggtctaggtgctcccagggattttcagaggctatttataaggcagcatgttcccagaagtggagttgggaggtccttcagtcggaaattctgaacgtcttaattataaggggtcttagacaaagtgctcatctagcatggaatcctctgaccctgataagtccatgaaggagtcaggattatgggtctttgctcttctattttcctagctggtattgcttgttagcaattgacacccagtagcttagcatcaccattctaggttagagatttctagccagtgatttctatttcaatgtctgcatgacacctttgtctggcttgagagtggtggttctcaaagcgtgrtccctgggccagcagcatcagcatcagccttacccaagtgaacttgttagaagtgcagattctcaggttccaccccagacacactgaatcagaaactctgagcatggggcagct

SEQ ID NO: 841547 - DNA, 604 bp, Homo sapiens
atgtatgtgtatgtgcgtgtatatatgtgtgtatatatacacacatatatatattacactaatatatatacacatatatatkcatatacaggtatgtatatgtgtatatatgtgtgtatatacacacacatgcatacacgtacatacctgtatatgcatatatatatgtgtgtatatatataatagaaggtatgtctcatgcaatatttgggatatacttgtattgaaaaattacttgtttattgaagaatcaaatttaactgggccctgtatttttatttgctaatttggcaacttaggggttctggttaaaaaacatttcttacattgcatagataataaacagcctaaagaagtttgggaatggttacacaggggcccttcatgcttccatgtcagtgcctaagtacttaacccgatgtggtagttgtgagcatctgttctttcattaagcacatttgcagtacagaacccagtatgtaatttgtaaaagcacaaattaagcctatcttcctctctctccagagagaagttctctcttaggaaaaaaaaaaaaaattacctgcagtagtgagttttcatggcgaatatcttctggaatgcc

SEQ ID NO: 841548 - DNA, 543 bp, Homo sapiens
gaactccaaatggtaactggctcccacaacttcgaagtgctgctgagaccctcatcagcttttatctttgcgccccgtcattctcccatgggcaaagaattgcacaaaaatcttggagtaaacacaaacaagtgccaaaatgaagaccatcaatgatccaaatccttgcaaggtataaaagagaatttttttctgagtcccgaagtcaagattgttataggctgcaggatttttatgtgagaatggaattgtaagattaatctttggccaagagcacttctctgtttcttgcaaaggattagytgacttaaactagaggctctgcgtcctgctcctggagctgcagtcagctgtttttcctttgtggagcttcctgatatgcccaaacacctttcttcttaacctttgtagttatttcagtatttacttcattctaaatccttatgcagactttttttttgctttccaaggcaaaccttgtagatagccaatctgtactgtttccaccaaattaatgtgagagcttgttttagcaactgcaaa

SEQ ID NO: 841549 - DNA, 620 bp, Homo sapiens
attgcccctcacagccatttctctggcttctgcaattgacttccacgcccaccctgcccctgaaactgctctgactcaaggtcactcaatgacagcccaactgccaggtacaatgagagctctcagtgcttccctccaagaggaatttgcagccctgacatttgcactcctggaagcctcttgtctcccagcatccaggacaccacgatcccctggcttccctcctaccgtccagccccactttgtctgtgttcctcatcagtggatcttctgtggactgctcctaaaacccacaggtgagcacagaacaggaaagagcgtagcctctcagccagccagacccgaggtttggtcccagaatcccagttaacagccgtgtaaccatcagcaaacgggtcaccctctcagagcccatttttctcttccgtgtaattggggttgtacatcagaagttatttagaagattaaatgagatcctgtgcttagtatgtttaataggatgcctgccccaaagcagggatcccggatcactgctgagggtccctgtcagacttgagctccaatccatcaatctgtcctgygcaccagattaatatttcattgtctgcagaatcagatca

SEQ ID NO: 841550 - DNA, 681 bp, Homo sapiens
tgggctcaggggatcctcctacctgggcctcccaacgtgttggaattacagccatgagccaccgcgcccagcctttatttcctttacttatgaaaataacattttaaattaaatgccttaagtccttttggcgatagaccaggtatgttcaatagtctgccaaagacatgtgagttttctaaagctatttccatccatgtcggattggggtgagagaagggagacccagttaggctgctggtaaatgtgtacatggcctgcacctgcaataatataacctgaacactagagggcaccagagcccaagagtcaggcagccccagacttggccctgagcaggaagcaccaggcgcaataaaagccccctccagaccccataactatccaggctgcaagagctgcaagatccagaccctcctcagcctcacacctccaaacacccacctgcccgtgttcacctgtggggtggtcagtaagcaagtgcccagggacacacggagcagggctgcaaccccaggccatcagtcggcctgtgctctgagcccccactgcgtgccaagtgctgcagggagggaaccatgatggtgccgtgcagtgtgcagagcctatcacttaccaaacatgttcgcccacacacagacacacasacatgcacacgccacctctttatatcatccccag

SEQ ID NO: 841551 - DNA, 553 bp, Homo sapiens
aattctcctaaacagtgagtccagtctctatcctcccatccctccgtctccacaccaacacttccaaaatactcgctcttcactatgtgtgccagattaggagttagagtgggagggctggtccacaaggtcagtacctatccacgtcatttcactgactagtgctttaatgcccctcctgtaaaacaggatgacacctgatcatttcaccaggttgaaggtactatcacatggcatatgggcacaaaagcaattggaaaactccagttcaaagaatcagggcctacggaacgtgctaggtcatcaaaccttttcatttagaaagaatacttgtggcagattcagagctgggcgccacccccaccaactcggccgctcctcacttcctggacacttcactcttcgtgaagatggctttcttamagcaaaaagcacttcacacacattaggatggctattctcaaaataaataaataaatagataataataaaagaataagaaaacaagtcttggcaagaaaatggaaactttgtgcaccattggtggggatgt

SEQ ID NO: 841552 - DNA, 535 bp, Homo sapiens
aatagatactaaaatattaatctctgggacaaagaaagagtgactgaatataaagtcagaaagaccatgatgctatatttttcyggatagtttgaaatctccccaccaatcacatattaaagtacttttgtgtaattaaaagaagaaaatttaaaatgcaggagcctatatcccattcattctaggagaactgaattaagttctcactttctcccctgagctttgaaacctctgacgtaaccattccctattcttgtgtctcatgatctgaaaagcagggatggtattaacatttgtttcagtaatggttataatttaaaagtaccgaaattccttagaatgccattgctattatgggccaaattgttttcccgctgtaagttcatatgttgcaatctcaactcccagtacctcagaaggtaaccatatttggagatgaggtttctaaagaggtgattaagtttaaacgaggctgttagggtggggccctaatccaatatgacttgtatcttcctaagaagtcagacaccaggga

SEQ ID NO: 841553 - DNA, 590 bp, Homo sapiens
atgattctataatctatcatatgattaaatatacatgatagattatagaataataattgcatacagcttaaaattcaatttattcacttgtaattcaaatgagactggcctcactgggcttccctcgtctcctcccaaatgtgccttgaagtcagacctgatattgatataggagctagaaagaaattatttaggaagttagttagtgagggtaagagaatccttggtaaggtttccttctaataaaaagcagccccaaaatcatttcttttctaacaaaaagcagcctgaaaaatcaagctgcaagcacagataagcaagtgaaaatcttccataggtaaatgctggcagctgtaccaataggaaaaggctacctgggggctaggcatgttcagcatagcagctccatcttcccttttgtcaaccacatgtacagtaaggaacagataacatggcgctggccaggtagaaaacccatctgcataataaaagattagggtggggtraccagcttcttcgcttcttcgcacactatgtaaatgccacacctggtccaaccaatctttgggccctatgtaaatcagacacca

SEQ ID NO: 841554 - DNA, 626 bp, Homo sapiens
ggccacggtacgaatctgaaggtccgaattctgatcaggtctggagacccaggttattctctcatcagtacagttggtttccttggtctcatttgtttctttcytgtaggcttttgtgcaggaaggctggcctctcaggattatttcccatgttattatgatcaaatttcttaatgcgataggagggcaacaaagcacagcatttgtagccatctttacaggccatgaagtgttaactggacatgaaaagagaatgataaaagaaaagcttgataaagaacttcatgtgttacatttatccacaacatatgaagttacactagaacataactttgttggtgatcttattccaaaaatattagaccttcataaaaaattaaaattctcaaaatataaataatatattgaacccaatctagagattaaccaattttctcctgtattatgtattattagaaatatgatatataataaagtattttttatattaatggagaagttttaatatctagaaacaaagagaattgtaaattaaacaacaaaggcaatgttctacatctaatctttaggtggtggagactattgcctttatcatacaatgtatgtgccacaggaaagaaaatgga

SEQ ID NO: 841555 - DNA, 608 bp, Homo sapiens
gccaggaaaccactggaaactaagaccgaagcaaagattctacccttctgttttataagattaaagattcttttgatgacaggacacaacatgaagactcttggataggtgaaaggcaaacctctttgttacttatagctccaaacaagagaagaattccatgtagggccacacagtggttgcacacagggacagggtaacaacacactggagctgtagagagtaccttatatatggtaattggagtagaattaggtttcctgagaaccctgtgccttagctaatttgaataacttcacaagctctaggacatagctgtccatggggctgtttgtagttgtctggtacttagccctgggcaattagggcaggtatatagtgacatacagtgtgagaaccagataagggaagaggctggggggacttaaatcagatattcaagaaggggagctaactgttaggggctcaaaactgggacwagaaggcattttttttttacatgaaaactatattaaaattgacttcttgatctccacattagtgttaagcttgattacttgaattatttgggtggcctaagttgtagagcagagttttagtaagtagtg

SEQ ID NO: 841556 - DNA, 494 bp, Homo sapiens
acacagaagataatcacctgcraagtctataatttccaggctgactctttagagcaaagatggggatcagttaagtgaaacatctaagagcgaatgaactcaaaggaaaggatctttagaaaattccatccatgttgtggttgttaattaaccattgatcacccatcaagtgcctggatgcatatcatttcagataatttctactctgcaggaaggaaccttaaattgttacttttgaaagtagaacaaatgtttttgttcttataatttggtcagatatttctgtaacacatgctgagtagagaggaaagagcaggtggcattgtttagaaagagctgatcagggattaagtgctgcaaggttacagtcagagcttttcatgtgctgtccaggcagaccacagaggatgactttattacaggaacgtcccgcagagggtctctgttctctttacaagtttggcaataaattaggctggacagggtacttccgg

SEQ ID NO: 841557 - DNA, 584 bp, Homo sapiens
accctatgcccctgttgcaggattttagaaaaaccactggttgccatcattggaaagtggtaatttaaaagctttaagcttggtaaccccaaaggtttkggggaaaatattagttctacctggtttaaagtatctagagaggaccctgcagtctttgaaccacagtggtccaatctaaagatatagtcaatgcattattcagtgtgttttaatggaatgggagacagaggtgagtgggagacagaggtgagtaggagacatcgtatatgacacaggacatttgacaaagactagagacatttttgatttggagcgcactgatggcatctagttggtagaggccagagatgcttgtaaacatcctacaatgcacacgacagcccctgccactacaaagaattatcagtccccaaataccaatagtgtcaaggttgagaaagcacgctggaaatccatatgatctctccaacggaagagactgctgcttctatatcttgcttagaagacagggtaccttagttccagacttccttgattcagaactgcttttccaagctaggatcccatcacctccgctggtccct

SEQ ID NO: 841558 - DNA, 580 bp, Homo sapiens
gcatcacctccaaaagttttctggtgccccctactttttgtggtaagaacacaacaggagacagcctttaaacaaaatttktatgtgcaaaatacagtattgttaactagatccactatgttaatgaggcagatttctagaatgtattcaccacacatgaatgaaattttacacccattgaaaacaactctcatttttcccatcccaacccaccccttgataatcacccttctactctgcttctatgagttcgacaatttcatatttcacatgtaagtgaaatcatgcagtgcttgtcctcctgtgcctggcttacttcatagcataatgttttcatccatattgtcacagatggcagaatttctttcttttgaaatgctgagtagcatcccatggaatgtagagaccacattttctctatccatcagtctatcaacgaacacttagtttgtttccatatcttggctattgtaaataattctgtaatgaacataggagtgcagatatctctttgagatcctcatttcacttttattttttatttttaaaataaaaacacagaagttgaattgctggatca

SEQ ID NO: 841559 - DNA, 604 bp, Homo sapiens
tgtgagttttatggaatacctgtagtatgagtaatattccactgctgaaaaaatgcagccatggctttgctgcaataccctgcaccattatcagttttgattttttctgggattcccataactgcaaagcaagagaaaagatgttttttaacatgagctgtagcttcctcttttgacatgtggcccagataaaatgtgaataagtatctcctgaaacatgaacaaaggacaattttccaaaagcaggaatgtgtgttacatccatctgccagatggaatttggggataaacctttagggttaactcctgctcctttatgtggcagatgcaggacttgacaggcaaagcagtgttttacagtctccttagcctgcttccaggatgagccatatctttttctgaggcctacagctttaagatgggttaaggaatggaatgtttgtgcatcagcaaaagccacagaaaccagtgcatctgccctttgattaagtttagtcaagggccagacrggttagtgtgtgctcttacatgagtaatatagaaaggggaatgtctttgttgtaaagaacgaaataaaagattaagttgttcatcagtcacattg

SEQ ID NO: 841560 - DNA, 612 bp, Homo sapiens
cattctgttgttgtaagtgtcacttagtcctgtgtgaggacagatttgccctatgtgtaacagctacatttaagaaagttawgaaattgtccttagtttcacaatggaatatttcaaaaacaaaattctccaatcgaacaatgtatgcaaagattattatggttttttcttctccctgcaacaagcgttaaggatcattatgtttgttatgttgttaaagtcctggaacatagagataagaggtaagtgagcatcccctggtggagaaagggagtcttttcccagaatcagtgttttccctcgccttgtgtccattggcaatcactcaacacaaactggtggccattcggtacaatcaaacaagcaagcaaacaaaatcatcaatatgcttgtgcagctacacttgataatttatgtacagtaaaggaataaggaaggagaaagtgaagaatagagaaggggatactggaccaatcagacgtggtggaaccatattgcagttttccacatgagaatgtctgtaggaacagagttctggggtaaagccgtgagtgtgttctcagtagacactccagtctgcttctggaacacatcaactgaatctttgtcctc

SEQ ID NO: 841561 - DNA, 581 bp, Homo sapiens
aaatggatccaacatggtgctggattcaaccaagattttacccaggacctcatgatacacgcattaacatcttaaaccacacacccaccagcaccatgacagtcccaagaacacctgtatgtggtataaaaatgggtggcaccacattttcaagaaatctccacctttttccaggaatttccatgaatatcccaccccttggtcaaagaaacccctaaaggtggaaaccccaaacctcttggcacatctctcttgagtgcacctgctctcctctttctggagtgtgtactttttgctttgcaataaatctctgtactttcactattttctgagtcatccttgaattccttctcacaatggtgttaagaatctggatactggcatgtttgggaccttccacagctcactggtatcagaaccactccccatgagatggtgtagacatgatctgatagagctgcaggctgtgggagcttgcasagcctggggaagtcaagccagtcttcataaatgaggcaggatattcatgctggcagttctgggaggatagactagcttgagtctagctatagactcaagtc

SEQ ID NO: 841562 - DNA, 532 bp, Homo sapiens
aagcaattaatatgggtttttctgggcaataagattaaaaacccattatagttcattgaattattgaaccctgagagggagatgtgattctggacccatgacccctcaaaaaggcaagaaccaccaaactgtgcatttatgccaatatttgatatacctcgatcttgaatatgaccaaagaaaggaggaaggggaaaatgtcatattttgggtgcctacactgtgtgggggcactttgtgtgatctctcttatttctttcttgagctaccgaagtgactattatcagcagccccgtttttcagataaggaaactgaggacaggaagtacacattagttcctaatgctttctagttgacaagagccatggtaatgtagggacagaggaaaagtgtcctctctgcccacggamggttcactgaaatgactgataaataaacaatacacaggagaaaaaaaggcatacagatttcttggtgtgtatatggatgccggagtcctgcaaatatgaggctcaaaaagagaccaggtcg

SEQ ID NO: 841563 - DNA, 532 bp, Homo sapiens
aagcaattaatatgggtttttctgggcaataagattaaaaacccattatagttcattgaattattgaaccctgagagggagatgtgattctggacccatgacccctcaaaaaggcaagaaccaccaaactgtgcatttatgccaatatttgatatacctcgatcttgaatatgaccaaagaaaggaggaaggggaaaatgtcatattttgggtgcctacactgtgtgggggcactttgtgtgatctctcttatttctttcttgagctaccgaagtgactattatcagcagccccgtttttcagataaggaaactgaggacaggaagtacacattagttcctaatgctttctagttgacaagagccatggtaatgtagggacagaggaaaagtgtcctctctgcccacggaaggttcactgaaatgactgataaataaacaatacacaggagaaaaaaaggcatacagatttcttggtgtgtatatggatgccggagtcctgcaaatatgagsctcaaaaagagaccaggtcg

SEQ ID NO: 841564 - DNA, 566 bp, Homo sapiens
gctatgccctcaagtcattaccctcccagctcctttcctgtgttcccaaactttgttgatcttcatcaatccctctgttgcagacagctctgaagtttgcatcscattaggttggtgcaaaagtaattgcagattttgccattacaagtaatggcaaaaacagcaattatttttgtaccagttaagtatcttttctccttctaccaaactttgtccctgagtcatctcatcacctataactacctcctccatgcagttgattcccatatctgtattattctactggaagtccattccccacctttctcggctagaatagcagaagcccaattagaattcatgctacaagtttcccaccaccaccaccaccaccaccaccgtcaccctgccattgttagcaaaaccgtctcttcagtggagcccaaagatttgtaatgatctcccactccccagaaagataacttcagactcagcctagaagtaaagatcctccagatatggcctcaactaccctccaacccatgtccccagtgcatccctttgatgcccccttcagtggagttaca

SEQ ID NO: 841565 - DNA, 633 bp, Homo sapiens
ataccaattttataatgctttaaaacacacaaacatatgtacactgtttgcagatgtataaataaaggtgggggaatgataaacaccaattgcagaagagtagttacctcttgggtcaggggcagtggaggggaagctaaacagggtccaggcgcagcacacagaggcttcagctccactggtaaaattttattttcttggctgggtcatgggtgcatggatatttattttactattattatgttttttggtggtcaagacattccataataaatacaaaaaccaaggcctattcagagatgcagatttgaaatccggtcctcccactgaaaagctgagtacaggcgagtgacttaacttctctgaggctgtagttttgttcgtaagaggcagaaactcaaaccaactccagtgactctagaagaacttaaaaatcaaattgaaagaccacctgaaaggaagtctgttctctttcctccagggcttcatgatgtctccygattctatttctgtgcgtgtatctgtcttattctccttgtcccgcaaacgaacttcccctgtttcctcgtccgctagtatatttggctgttcataccctctccagtctacagcatgaccttcctgcttcaagtt

SEQ ID NO: 841566 - DNA, 587 bp, Homo sapiens
tgagtccattggttcgagaccagagcctgggcaaatcataaagagaccccatctgtacaaaaaataaaaaataattcgctgggcatggtggcatgcacctgtagtcctacttatgcagcaggctgaggtgggaggaccccttaacccctgaagttcaaggctgccgtgagctatgaatgcaccactgctctccagcctgggcaacagagtgaggtgctgtttctaaaaataaatacataaataattatataaaatatgtacatatataaatacacacatgaagatatattcagcatcaccagtcaatagagaaatgtgaatcaaaaccacagtgaaatactactcacacccattgggatggctaagaaaaaaaggagaaaataataaatgttgtcaaggatgtggagaaactggaacccctgtgcactgttggtgggaatgtaaaatgatgcagtcagtctggaaaagactctggaggttccttaaaaaattaaatatagaattaccatataatcsagcaatttcacttctgggtatatacccaaaataaataaaagcagagactcaaagagatattcacacaccca

SEQ ID NO: 841567 - DNA, 602 bp, Homo sapiens
atgaagacttggtttcccacccaacsaccatgtaccccttcctccttgctaagacagctggcatcttcttcattatgctccatgaagccagtgaactttgggtgccttcccaacccatgaatcttgacttctctaagccaatgccagtgggctcactggcttaccaagcaatcttcaaagcacaagcacatgactcagctctggtcattgaaatacgatggaaattctgctgcagaacttctgggaaagctttgctcactctgaagaaaaaaaaaaacaaaacatgacgtggatgttttctttgttctgtctgggtgttgtcacctgcatatactatctagataagcagccttcatcttagacgatggaggatccagcctaagaagaaaagccagtattctgtagatgtcagcacagaaaaacagagaacaaaatcagcaaaataaaaacctgatgacttggtaacatggttgacctgctgacttagccaactctgggaccactggaccccagcctttttgtataagccacttttaattatgttttctgttttctgtagccaagaccatcgtaaataaaaacaggattactgaccccacttt

SEQ ID NO: 841568 - DNA, 644 bp, Homo sapiens
cttgatccctttgccagctggggacctccagccagcaatgaccctgcccaggcctcacttgagcatgctacctgttgcagraggtggcctgcccacccagcccacctgggctgcacctgaattgtgaactggcttagcccgaagctgggctgggcatgctctagctcacctgtgttatagctcatacctgtgttcagtggttcctgagttcttgtcccgcgtccaagaagaatgaggatatgctgacaattgaagggtgaggagagcagagaagaattttattgagtgatggaacagctctcagcagagaggggatgtgggggtagtcccccacctgaagttgggtggtttctcttccagtgtagctgaatctgaggcttttatggactcagaataggggagtgcatgctgattggtttgtgaatatgcaaaaatggttaaaacaaaggcaccactcaaatgtgggcatgacagtgtaaataaaccaattagggaagggtaggtatatgtaaaataggtgaagggtgaggatcaatcagaggaaagcatgcccaacaggaagatagattctcagtctggtctgtggatttgacttgtagttaggcttaaactgtctttggcttggagatggggtttcaccaggg

SEQ ID NO: 841569 - DNA, 567 bp, Homo sapiens
tgtttctgaaagtgattagcacttgacttagtggactgagtcaagaagatctgccctcaccaatgtggtcagggattatccaaaccacygagaccctaaaagaacaaaaaatgacttgttttgcccagttatatgtataccaggatcctagattgaatcctgagccagaaaaaaatgtggcttttgttgttattgttgttttgcaataaagaatattattatgacgattgatgaaattacacaaagttttagattaaataatagtattatatcaatgttaattgtttttgataattatactgattttgatcattatactgtgattaggcaagaaaatattcttgttaataggacactgaagtatttaacattaaaatagcattattgagaaggcagagcaagatagccaaatagaatcctctaacgatcaccctctccccaaaaggaacaccaagttgagcaactatccacacaagaaagcacctctataagaaccaaatatcaggtgagcaatcactgtacctggttttaatatcttatcaaggaaagaagcactgaagagcatag

SEQ ID NO: 841570 - DNA, 567 bp, Homo sapiens
tgtttctgaaagtgattagcacttgacttagtggactgagtcaagaagatctgccctcaccaatgtggtcagggattatccaaaccactgagaccctaaaagaacaaaaaatgacttgttttgcccagttatatgtataccaggatcctagattgaatcctgagccagaaaaaaatgtggcttttgttgttattgttgttttgcaataaagaatattattatgacgattgatgaaattacacaaagttttagattaaataatagtattatatcaatgttaattgtttttgataattatactgattttgatcattatactgtgattaggcaagaaaatattcttgttaataggacactgaagtatttaacattaaaatagcattattgagaaggcagagcaagatagccaaatagaatcctctaacgatcaccctctccccaaaaggaacaccaagttgagcaactatccayacaagaaagcacctctataagaaccaaatatcaggtgagcaatcactgtacctggttttaatatcttatcaaggaaagaagcactgaagagcatag

SEQ ID NO: 841571 - DNA, 477 bp, Homo sapiens
actcaaacttctcaaccactgatgtcctctttcctgtttgtccttcgaggattttttggtttgtttttgtgttgttgttgttttgagacgagtctcgctctgtctcccaggctggagtgctgtggcgcaatcttggctcaccgtaatctctgcctcccaaattcaagccattctcctgcctctgcctccctagtagtgggattacatgcgtgcaccaccacggccagctaatttttgtatttttagcagaggcggggtttcgccatgttggccaggctaatctcgaactcctggccttaagagatccaccagcctcgccctcccaaagtgctgggattacaggtgtgagccactgtgccggcccttcgagtatttttgttgttgttgtttaccatcattttagagyggtttcaggaaggcaataaatgttcatggtcaatccatcatgtttaaatgacttttatgttaagaacaagc

SEQ ID NO: 841572 - DNA, 632 bp, Homo sapiens
aggcttaaattagcttctagtgttgtatgctttgtgctttcaatgtcatgacatttctaagaattcttttaattcttcatccttttcatcacaaccactttgctcatttatgctgatgaattcacctttactgagtccctctggctgtctatttagagcttctagagctgtggcaggtgtaggagcccagggaatatttccccttcaccctctgatggtttgctggaaaatcaactgacaaaaggcaggttaattggagaaaaggcatacaaatttattaatgtgcacatgggggacaaccacagagtgattaccccaaaccctcgtaggggctcagagcatggccaaaagcagattatggtggtaaatccggttgcattggcaagacaggttatagaagtggggagacgaggaaggctggctagcaaaggtggtcttgttacgtaagtgaaatctcagagatagaaaccctcagagataacagatggtaatgttttttcagaccttttaaggtatcagactctaggttcatctttcctaggtccagacaagggaaagcttctragaaaacctggctgcatcaatgcacattctctacaaatgcaaatgtccccattaagagacagctttgc

SEQ ID NO: 841573 - DNA, 617 bp, Homo sapiens
gtatacagagggtggagtgatcagcaccaaagatctttgcctagaaactggaaagtgtgacacattgatatatgcatgttgatttatatcagtcaatattaaacatatagcacccaaatttccatattcagtcctcatgcttcatctcctccatttatctgctctcctgctccataagaatctcaggagttactgcagttgtgtctggagtttgggagttagggaggaggaagtatacagccattgatcaaaaatgctctgcttaatacacttccctccctgatcaatagctttacatttttaagagaggagattcttgactcagaagggatgttggtacttagattttatttcttcaaggagattgcacctgtcttcatttgtctcgaagtgttcatgatctgttgaactctgggctctgatgatgtcctcgaaagcaggccagttttcttccatgcaccccctgcagcaggaacaggttatgttaatatgggttaatgcaaagtcaaaagaagaggagagaacagagakgagaacaagcagtaactgaaccagtgtgggggaaaaaggaaaaaaacaaacagatgggagtagggattgggaagatcttcaataaa

SEQ ID NO: 841574 - DNA, 532 bp, Homo sapiens
aaaataccttcaaggaacacctggattaatatttggttgagtgaggactatagcctagctaaacagacaaatcggaaggccatcactcatgcttacatcaccatttcttgatttatccagtttctatgttatcacttaccttattattaagttgaagatttagactgtttacagcctccaccctctcgctgtcccccaggaaactccccgcaatatagttataatgtatttggggtggataaaccaatattcagtgtttacattgttaagtctgcataaatattactcacagcagagacaagtaatatactactgggttacctttcttatataactgttgatttcctgaaattaactctccttttgtggtgtcttttaatttctttgtgcctatcactaattttgtcctaaacttttgcacagaactctacaactccttttaatatatttaagcccatgaagcgatctgtcaactggatttttttycttggagacctctccatcctcctgctctgatctggaagcattgctc

SEQ ID NO: 841575 - DNA, 590 bp, Homo sapiens
acccagtagttatgtaaatctgaacaaatttcttaagcttgttttatctccattttctaagctggtggtgattataactaacttgcaagtttgttgagatggttaaaagaggcaatgtctaaaaggccttgtagagtgcattcttagtgcttgtctcagccaggtttgttcattgcaaagaagagtccgactcaagctagctcaagcaaaaggagttaccaataaagctatgtgtgaatggaaagttcactgaggagtcatcagggatgaagacaactcgagaaatgggtttccaaactcctgcttcgttctctaccaacctgcttccactgctcattcataatttttgctccatataacttctatttgcatgtatttttgacttaccacattatgattacaatatcatatggtatctttcaatgtacccttttgcttctgcctctgctagtaattggcagtttatttcatttgtttttagtccasatttgcaggagcaattatctgattgacccagcttatcttttcagtttttgacctagcttataggtaatataggttccttgccagactacaacttggtttcttta

SEQ ID NO: 841576 - DNA, 608 bp, Homo sapiens
tttttcattgtgcttacttatttatttctctggctctttcttcctcatacttgcaaccagctattgtctaggaatccctctggtcctcctactgaaaacaaggcattctagtttatctgtattgaatgaaagcacaaattactcagattacacctccatagagatggcttccaaagaaatctttcctttttaattgactttctagatgtgaggccaaatgtctccagtcctagagatcgcttatcctgctgttccacagtcacgctaaatattctgcaggagcgtaaccaaatgtggtggtgacagccttccacccaggggaaccacagtatatagagaatttacaaaacagaaattagtaaaagcaactaaaaattggtctgctttatattatcaccatatgccagcaattctacacgataatagtggtggggccgtgcatgtggtgtggaggtgggatgactgccatctgcagcccctacctctggtaagccctcctcttgagtcctgacatcgtctatagatcccggggaaaggcrattttttttccttgatgattcctagaagctcctttttggtgtccagccaaccctttcaaccttccattg

SEQ ID NO: 841577 - DNA, 600 bp, Homo sapiens
acctgttgtggcaaatgacaaccttattctcttttaattrccaactgaagccttatttttgtctctccttcctccatggaaatcatcttttgttatttaaaaataccttaaaccagagtttctcaaaccttagtcattcatgtaccaccttcataaatttttctgtatctaattaccacttatattcacctaataattattaaaatcatggctcattatatcagtaactttaggaagcctagttgtaaacatacagtatcaataacagaaatctttccactaaagaaaaggaaggctgctccttttcagtgcaatatcattttgtacataaatcatttttctagatgaaaggcactataactatattaattttgttattaacatacttactattgacattcattaatgccttttttgaaaatcaagagtgaagtctgtgaatttaggaactaattgtaaaaaataggacactaaatcagtaactagtcatggtatggagcccttctaatttctctaccttttttaaaacacaaaatttctaggaaattgagagatttgaggcatctaatcagcagatcgaattattaatcaaattatctg

SEQ ID NO: 841578 - DNA, 615 bp, Homo sapiens
ttggcctttctctctcttcacatagtgtctttctcttcktggagttttccacatagcttgggcttatcacagcatgatcaccttggggtggtcaatctcattacatggctgctcagggctccaaaagcaagctaatagccattggtatgaacagctaagcctgaaactaacagagcttcacatatgttacattctaacgggcaaagcagttacaggctgtcccacgtctaaggggaaggaaagagacccctcatccatgggagaagcaatgaagaatttgtggccagctttaacctgccacatgcatttacccttctaatggcactaatttatgttttatttagggcttattttttggaaggaacagaaactcaggtttccttaagtaaaaaggaatttgtatgggggaataccaaggaatggacaggaattggaaatcactggaaaccagtggacttcagtacggcctgtaataggaatcactgcatgagttctagatagggtcagtctgatgagtacgagcctgctacaatgaataacctccaatccatgttcctgccatcatgtttcaagctccaggagagagcattcatttggatgaacttggtgcacagg

SEQ ID NO: 841579 - DNA, 585 bp, Homo sapiens
tcccaggacagacgacctgaaactggtmgctagaagtctagccaccaggcagcagtttaaatcaaaataatcactttaagaaacggtagggaactttgctggagaaccatttcctccaccctgaaataggaaaacacattctgatttatgctgctggctcagggcagcttgctgaaacgtgtgcagctccgcgtttgatggccccctcccttcatccgccccgctgcagggatgaaaaagcatttagaaggagagtgtggggacggccgttagtgccagagtggctgttgaaaggccccgctctgcaggaaagtggccttcagaggccagaggtgcagacagcagggccggcatcccagggttgggagcagctggaaccaatgtgggggttggttgtgttttgaattgagatttttagaaaaactctgccaagcccttctaactaaacgaggtcactcattcctcaatgagaagcagacatggtccagccaggcggggcatgtgcagactctggagccgggggtggtgccacggggcttgtctctactggggctcctcctgctgcccctgtgttccctgtgattt

SEQ ID NO: 841580 - DNA, 585 bp, Homo sapiens
tcccaggacagacgacctgaaactggtagmtagaagtctagccaccaggcagcagtttaaatcaaaataatcactttaagaaacggtagggaactttgctggagaaccatttcctccaccctgaaataggaaaacacattctgatttatgctgctggctcagggcagcttgctgaaacgtgtgcagctccgcgtttgatggccccctcccttcatccgccccgctgcagggatgaaaaagcatttagaaggagagtgtggggacggccgttagtgccagagtggctgttgaaaggccccgctctgcaggaaagtggccttcagaggccagaggtgcagacagcagggccggcatcccagggttgggagcagctggaaccaatgtgggggttggttgtgttttgaattgagatttttagaaaaactctgccaagcccttctaactaaacgaggtcactcattcctcaatgagaagcagacatggtccagccaggcggggcatgtgcagactctggagccgggggtggtgccacggggcttgtctctactggggctcctcctgctgcccctgtgttccctgtgattt

SEQ ID NO: 841581 - DNA, 585 bp, Homo sapiens
tcccaggacagacgacctgaaactggtagctagaagtmtagccaccaggcagcagtttaaatcaaaataatcactttaagaaacggtagggaactttgctggagaaccatttcctccaccctgaaataggaaaacacattctgatttatgctgctggctcagggcagcttgctgaaacgtgtgcagctccgcgtttgatggccccctcccttcatccgccccgctgcagggatgaaaaagcatttagaaggagagtgtggggacggccgttagtgccagagtggctgttgaaaggccccgctctgcaggaaagtggccttcagaggccagaggtgcagacagcagggccggcatcccagggttgggagcagctggaaccaatgtgggggttggttgtgttttgaattgagatttttagaaaaactctgccaagcccttctaactaaacgaggtcactcattcctcaatgagaagcagacatggtccagccaggcggggcatgtgcagactctggagccgggggtggtgccacggggcttgtctctactggggctcctcctgctgcccctgtgttccctgtgattt

SEQ ID NO: 841582 - DNA, 547 bp, Homo sapiens
gatgctgtctaagcaaacccactgctctaccagtcatataaaagtacagcacrggccgggcacagtggctcatgtctgtaatcccagcactttgggaggccgaggagggcagatcacaaggtcaggagatcaagaccatcctggccaacatgatgaaacccccatctctactgaaaaaaaaaaaaatacaaaaattagctgggtgtggtggcgaaagcctgtaatcccagctactcgggaggctgaggcagaataatcgcttgaacctgggagaaggagactgcagtgagccaagatcgcgccactgcactccagcctggtgacagagcgagactccgtctcaattaaaaaaaaaaaaaaaagtacagcacataaaattatgtccagtacataatacttgataatgacaataaaggactatgttgttggtttatgtacttactatactatactttctatcatcattttacagtgtactcctactttcaactgttaaacagccccaggcaggtccctcaggaggtatccaggagaaggcattattatc

SEQ ID NO: 841583 - DNA, 594 bp, Homo sapiens
tgtgttaagcatacagctgttaaaaaaaagaaaaaaggccaggcaatttccttattttagtgaagcaaatttcctagtggaaaaaagaagtgttatatgaatrgataaataaataagcaatataacttcagattattatatgaaccccaatggctacaaagagcatgacagcagtggcccatagatgagaaatgagtggtcagaggcctgcagtggatgggctggtcaaagacagtttctctcagcaggtaaaacaaaggttaatacatgaagaatgtggagatgcaagttatggaagaaacaaacaaataacattccaggtccaatggggcagaaagtacaaaggctttcatatgaccttcgtagtcttgaagagatttggagattaggaagccaatggccaaaccacagccagccagatggagaatagtttaggatgagatagagatcctagaaattttttccaatactcaatagttggaaggtatgtaacattcctttgtgaaatctagattgacagtgtgtctcttgtgatataaacattatacatataaaatgcattaatttcattaggagagttaattagtgtctagc

SEQ ID NO: 841584 - DNA, 648 bp, Homo sapiens
tccatgttcacatctcctactggtaactctgatctcctcttataaggatccatttgattatatagaatccaacaagataatgcattataattgccttatctcaagattcttaattgcaacaacgaagttcactttgtcatataaggcaatatttcataggttttggtattcgaatatggacatctttgtgggggggggcacattattcagcctattgtagttgggtattatatgcttataatacttacagtattataaaaacacagttcattataaaacatcttataattctttgtatcatcaaaattatttatttgtaatagctttaacatttacttatctttcttgactgtattcttattctgtttgagtacactggagatatatatatatatatatatatgtatatctggcatatagagaatgaatatttttgggtaattgtcattttcatattttaaaagtttaaaaatatgttcaaagcacacaaaaacacatagtatacatttttaggtacattttatgaaacttgtattcagagacaayccttgtcacttttaaacctgcagctacatacctaccttttgatgttagtgtctgaaaaaaaaaagaatcaggcaaaaccatgtcgtatttaaacattacaaa

SEQ ID NO: 841585 - DNA, 567 bp, Homo sapiens
gcaaacctactgcactgccagtggcwtaaaagtattgcacatacaattatgtgcagtgcataatacttgataatgataatgaattactatgttgctggtttatatctttactatacattttattgttattttagagtgtactccctctaatgataaaaagttaattgaaaatagctttaggcaaatcttttaggaagtatttcagaggaactattatcataggagatgatagctccacatgtgttactgccactgaaaacctttcagtgggacaagatttggaggcgaaagaaagtgatattgatgattcgaactctgtgtaggtctaggctaatgtgttaccctcgttaatgtgtttaaaaggttaaaatattaaaaatagaaaaaacattccataatatatgaatttacagaaaaaagtattttagtgcaagtgtacaatatgtttgtgttttaacctaagtgttattacaatgagtcaaagtgttttaaatttaaatagtttataaagtaaaatcttacagtaagctaagattaatttattatcaaaaaatatatattttacaa

SEQ ID NO: 841586 - DNA, 265 bp, Homo sapiens
attttggaatatttgtaaatacttattggttgagcatcccaaatctgaaaatccaaaatcctccaataaccatttcctctgagtgtcatgtcagtgtctagaatgtctcacattttggagcatttcagatttcaaatttttggataagggatgctcaatctgtayagtctaggcactgtgctaataagcactttcataagtattatctcctttattctttacaaataacatgtaaatatatacaatttttatttgtcaattatac

SEQ ID NO: 841587 - DNA, 566 bp, Homo sapiens
tcttcatttttctgggtacttgttggatccttttgatctagaaaccttggctgttcaggaagttttytgcaattatgtcattaattgtttcgtccctctgttttctatggaattttattattcagacattggacctcttggacagaccatttaagttttttttcttctttttttcatctgtatgtcttttccttcttgagagatttctgcacctttatctttctgtcttctctattttgccatcaaggttttaatttctttctctttttttaaagtttttaaaatcaggcagtctttcatgccagagaaggctcagagactccaaggttttaatttctaaaagttcatttttggtttttgaattgtcctttttaaaacataatatcctcttgtttcatgggttgtaaatatctcctctctgttttctccatgttatttttctttttatgtggtctctgttctgcatgttaaaggcttttcttaggtgtcatgtaattcttcattgtagtttttttatttggggatgaaaaaggtgattgacagtttggaatatataggtggggatt

SEQ ID NO: 841588 - DNA, 366 bp, Homo sapiens
catgctgagactacagcccgtgtctcctcactcctgcrcaacagagagctaaaggaccagcatgttcagatgtggccactctttgggtagaagacagcaccagagatgagtgctcagtgtctgtgaagtcacaggggcttggcaatgggaggcttaggagactctaaggagttgaaatacattttgaacatgtgcagaagagtctttcgatccaagtcttggaggaaagcaggccaatttcaggctgagatgggacaggtgctgactgtggggagggagaggggcccatgctggagcagtccaggaatcctaatccacgcctgggtggtccccaggcttccaagccccctgggatcctgggaagtt

SEQ ID NO: 841589 - DNA, 607 bp, Homo sapiens
aaaggtgtacactgcaacaccatttttaayagtggtttgaagaattaaaaacaacctaatccctttcctccttcccactttctctctctctctcccttccccacctttctctcttatacacacaaacacacacatgcaaacacatacttcaaattattttcagaaccatttgcatttctgaagatggcacttttacccctaaaagtatttttttaaactagagttctgaaggagacatagaaaaatgttaacatgtttgtttttgctggtgggcacatatgggactattactttctgtatttctgcgtatttatgagatgttaaaaattgaaagtaaacatgaaaaatttcaaaagaagcatggcatttgttttctgtctttctctttcctttcttctttaaccttcttttaattccccaccttaaggccaagcattcttcccattttgtgtcgtttggctcctgtcctcatgtaatttgaaatacttccgaggtacctgttatgtgtatgtgttcagagtttctttagacatcttcttgcctctagtgatctctgttcaatatcacattaaggtagttgggcctaggttgtcagttatctcccagc

SEQ ID NO: 841590 - DNA, 503 bp, Homo sapiens
tgtggcaggagagctgggcccagtgcagggaagacacaacaccttttaaagaggcattattattcacagacagcaccrgagcatatcatgcaatatgatatcttgcttaatgtattgtttagatatccatgttaggaaagtaaattttgaatgtattgctaacgttttttgtttttgtttttgtttttttaaacagaatcgtcactgtgtttcccatggctggagtgcagtggcgtgatctcggcttactgcaacctctgccatcctgggcttaaagcgattctcctgtctcagcctcccaagtaactggaattacaggtgtgctccaccatgcctggctaatttttaatatttttattagagacagggtttcaccatattgggcagattagtcttgaactcctggcctcaagtgatccacccgcctcggtcttccaaagtgctgggattacaggcatgagccaccatgcctgacctgtcaatcttaacttaaaagcaactgt

SEQ ID NO: 841591 - DNA, 503 bp, Homo sapiens
tgtggcaggagagctgggcccagtgcagggaagacacaacaccttttaaagaggcattattattcacagacagcaccagagcatatcatgcaatatgatatcttgcttaatgtattgtttagatatccatgttaggaaagtaaattttgaatgtattgctaacgttttttgtttttgtttttgtttttttaaacagaatcgtcactgtgtttcccatggctggagtgcagtggcgtgatctcggcttactgcaacctctgccatcctgggcttaaagcgattctcctgtctcagcctcccaagtaactggaattacaggtgtgctccaccatgcctggctaatttttaatatttttattagagacagggtttcaccatattgggcagattagtcttgaactcctggcctcaagtgatccaccygcctcggtcttccaaagtgctgggattacaggcatgagccaccatgcctgacctgtcaatcttaacttaaaagcaactgt

SEQ ID NO: 841592 - DNA, 553 bp, Homo sapiens
gataaattagacttatgagtattgatagtggatgccacgtgatctgtgcctacggtcagcttacaaagagcttttaaagcagtcaggtactataaaaagtcaaaaatatttgtttctggcctctactcttttttaggtaaaggattaattaagggtgtaaattatctttcagaaactcttttcaaagcactgcaagagtaaatacaggtcttttgcctagcagcatttaaaaatcaatataaatattagtcttatggttcttataaagatttagtttaaaaagagaattttgcagctaaaatatttgaacacttgggggaatatttaaaaaatatagtggcttatgcctggcgtgagacaggctgaggtgggcggatcatgaggtcaggagatcaagactatcctggttatacacggtgaaaccccgtctctactaaaaaygcaaaaaattagccgggcgtggtggcgggcgcctgtagtcccagctactcgggaggctgaggcaggagagtggcgtgaacccgggaggcggagcttgcagtgagccgagatc

SEQ ID NO: 841593 - DNA, 553 bp, Homo sapiens
gataaattagacttatgagtattgatagtggatgccacgtgatctgtgcctacggtcagcttacaaagagcttttaaagcagtcaggtactataaaaagtcaaaaatatttgtttctggcctctactcttttttaggtaaaggattaattaagggtgtaaattatctttcagaaactcttttcaaagcactgcaagagtaaatacaggtcttttgcctagcagcatttaaaaatcaatataaatattagtcttatggttcttataaagatttagtttaaaaagagaattttgcagctaaaatatttgaacacttgggggaatatttaaaaaatatagtggcttatgcctggcgtgagacaggctgaggtgggcggatcatgaggtcaggagatcaagactatcctggttatacacggtgaaaccccgtctctactaaaaacgcaaaaaattagccgggcgtggtggcgggcgcctgtagtcccagctactcgggaggctgaggcaggagartggcgtgaacccgggaggcggagcttgcagtgagccgagatc

SEQ ID NO: 841594 - DNA, 555 bp, Homo sapiens
gaaactttctcaataaattaagggaccttcttttygtacatctgcatttgtgaaagatgaaatttctcgaaacctcagctctttggtaaccccatatgcagtggtgacccatggcgatttttgattgatcttgtcaaaagacttaggttgttcatcacagtacttcagatgaccacaattataaagctgagtgcacacaattaccaaccatagtgacatttgtttatacatttccctttttgacctatttctttaccatacagtttacctactcatacctgttatatctgtgtgactgtcattagcatacctgagtatttatgcttgcaaaaatatgtgtgttattattgtccattttattgcttaaagtggcccatgaaatgttcagatgtgtttttatgtgtttcttaaataaatccccttttaaaaatataaataagtgtattttaaataattttaaaaattagtttttccagaccttttggaatttcaacatttgggattgtggcgttcaggattacgattggctaggatatgctggatcccttcatatcc

SEQ ID NO: 841595 - DNA, 555 bp, Homo sapiens
gaaactttctcaataaattaagggaccttcttttcgtacatctgcatttgtgaaagatgaaatttctcgaaacctcagctctttggtaaccccatatgcagtggtgacccatggcgatttttgattgatcttgtcaaaagacttaggttgttcatcacagtacttcagatgaccacaattataaagctgagtgcacacaattaccaaccatagtgacatttgtttatacatttccctttttgacctatttctttaccatacagtttacctactcatacctgttatatctgtgtgactgtcattagcatacctgagtatttatgcttgcaaaaatatgtgtgttattattgtccattttattgcttaaagtggcccatgaaatgttcagatgtgtttttatgtgtttcttaaataaatccccttttaaaamtataaataagtgtattttaaataattttaaaaattagtttttccagaccttttggaatttcaacatttgggattgtggcgttcaggattacgattggctaggatatgctggatcccttcatatcc

SEQ ID NO: 841596 - DNA, 479 bp, Homo sapiens
gaattttcaggaagtacccgtaatgaaaaatcaagttttttgtctgggcaagagtattttggaataataaagttatgctaataaagacaataaaatataaagccatgtcatgcagacaataggttgtgtggaggataagtagtttcagtcgtcagtgtccacactatgcagtggggggcgaggagtaggtggtttcaattcttacaacactgagacctccagtttcagcttagagatatagagagctaaaaaaataaataaaaggatgttctcccttttactaacgaggaaaaagatggacacgctgcaaactaatgacttttcttgaaccggcagagaattaaaattgcagggcaaataattaacctaaaaastagagagacaattacctgtagggagaaacaagacctaagcatttgttacctggaataaatgctctcaaatgtcgtataaaacagaggacattcaactagaaattt

SEQ ID NO: 841597 - DNA, 520 bp, Homo sapiens
aggacagataaactgccacttctgtcaccttgctcaaatattatgcttatattaattatgctcatgattcccgcaggtcaggcccaacaggatgagggtgcatggagctggtgggccagagacacagtgaggtgcattgggaataacaggagaccagggaaacttggctgaagtgtgaagccgagtattgagacaggtagctaaacaggagatgtcttggagtgaacagaggaacgcccagactaaaaactggcagagctgatgggcaatgggaagcaggcagcagtgttacagcacctatcctggaaaaggaatgtgctaggtagttggccccagttcactaattcccctacatgcctcttctgggcaggggtagttctatctgcccctttytactgtgcatcatcttgaaggtgccctgcttcctccagcccacagctgcaagagcaaatctgtatgtgcaatgcagataattcctttaagttaccctttgcactggggactgtcctatctcctcatt

SEQ ID NO: 841598 - DNA, 595 bp, Homo sapiens
aataaaacaatgtataccatataattccacttctggggaaaaaacatacatatgagaaaaatctgtaagaaggtacattaaaatccagtagttacttctggggtggtaggattattgsttattctactctttctccttttctttaaatatgttttctagatcagacaaaaataatgttacttttgaaatactgaaaatattatttttcctctaaaaattatagatgtcttatgaggagtatgtttgtggctacattagtcaattaatgattgcttgaccactagttggagaaatcaggaatgagactttaagtggagctcgtatgttaacagtggcggcttcagagcctggaagatttaggaaaggactagtctgggtaaaaggagaaggtttagacctatgctgttcaagacagaggccactagccacatgtgaccactgagcacttgaaatatggctagttcaaattgagatgtgctttaagtgtaaaaaaaaaataagatttcaaagatttagtattaaaaatattttaaaatcctcaaaaatttttaatattacatcttgaaataattatattttgtatatattgggtaaa

SEQ ID NO: 841599 - DNA, 296 bp, Homo sapiens
tagaaggagtaagactgatagagagaaattaattagtccactattatagtcatctaggcaatgatggtgacagtaggagtggtggggaaaaacgactggggaaaacttcgcagaggaaattttaataggagtgggtgggtgaataaaggaaaggagaaagggggagtaacgaggtctatgcctacttgttaatactggcagaattggcggtgtgtgtgtgtgtgtgtgtgtgtgtgtgtgtgtgtgtgtgtgwgagagagagagagagagagaaaggccacctcagtctcttatct

SEQ ID NO: 841600 - DNA, 606 bp, Homo sapiens
gaagcatgccaccacgagctgaggctctattttaagtmcctgagatagttaataaaacagaacatcctgccttgaaggagtttctgttcacatggttgcatcaacacagaccatgacatttgcaaaggaacatctcttgggtcatcgggaaggcagctggtcctgtagctcatatgccttcaagttagtttaaaactatttcaatctattccaatttgtctagttgtttcatgatctaacaataattattagaaccttcagcaatgcctggcttggaattccaactgtcctctttaagaacaagcaagcagctttttgtggcttcatttcctcaagcttgagctctgcaacagcatgggagtcaagagttcagggcggtcacaggagatctttggcctttgaggcagggcctagagaggctgagatggggaagtggcgcctgactcttcccacccacattcacaaatatgtaagtgttctactaagtactgtggcagtgacaatgatgactaagacatagctgtgtcttctggaaggaaattcacagaatactgggggtgatgaagtcatgtattaagtataacactagataagagggacatcctg

SEQ ID NO: 841601 - DNA, 567 bp, Homo sapiens
ctctctcatagcacagtctctgtagagttttcattccaattcttgcccattggtagcagtgaagatttgccacctaattcttcttgatcatctatgggattctacttacatayatatctcaagggcaaataattatcaccaaagacaattcatattaaagaagaaaaatatctccccaaatataacatagtctgtactgagtcaatcctaaatggagataactggatacattttcatgcagattattgtccatttccacaatattcattctcctgcttctaagcatgcccagattccttcaggtctataagaaataggatccatctgtaaccttttcatgtgacagcaactcccttcctacacaaagatgttgaaattgtgggattactaaagatcatggatatgaacgtgtgtgtatgtacgtgtgtgtgtttgtataaaatgggtggagagtcatttttcagttatatttagcttggctctttaaggtatctgaatttatttactatttgaactaatgtttgggttcttggcgataataaaatattatgtaatcacaaatagtgt

SEQ ID NO: 841602 - DNA, 614 bp, Homo sapiens
ttgaatatatattaaataatttataamtaacttattgattctctttataaacattccttactatattatgataaaatatagtgatgctcccaaaggcaactgctgaatgatcctgttatacttttagacttttgtttcctgccttagcaatcaactgtgacttgacattgtcttggtattttgaatctcctccttctatgtggaaagagaatatcgaaattttctgggtgaaggactaaagattgtttaacttcttcgaagaaaaaattcatgggctttgtgacagtaactggttgctcagggacttttttctttttacgtgaaccaatcctattcatgctctactttctcaccataagccttgactatttaataaggaaaaatgaagtaaaatatatgtatttgaacgttagtaagtcatttgtaaaatgtctcacaagaagaaaaaatacgtgctagatagcattaaaataagataggcctataaggactccaggtttttgtctaaaggctggtggccaatggatacgacatatccaagttatctatattcgatatgacttattcaacatatcaacaatttaggttgtgatagagaaacaacctagtagaaa

SEQ ID NO: 841603 - DNA, 456 bp, Homo sapiens
tgttaagtgattattcatttatcttcttctcctgagttacaagccttcatttcccattatctgctgcccatccatgtctcaatatctccagaaaaaggtgaatacatatacaattttrtgtgacatcctttgtatacagacccttatcttttcttggaatattgcatagaccatttcttctaaggaagatgattccccaaaagattttcaggtacactgagaccttgttttatttattatgtaaccacaatgtcttccatagtcttgtaatactagaaatttaataaatgttgagctgaaaaggaatttttatttgaagatataattcatcttcacctgtgccaaacactttacatggtgatctataataatttttcaaaagtatgaaatgctgacctgtttccttagtaaaaccttagtctcaacttcatgagaggtgagtcctctatgtgacta

SEQ ID NO: 841604 - DNA, 559 bp, Homo sapiens
ggataataaaagtttaaagaattggccgaccagcaccaacaccaagtcagaaaacatttttaaaattcaatttataatataaaaaaataaaaataacctcaatggcatatgcataataactgcacagagaaaaatactgaagagcataaataaatagtgttttgggatgggatgactctatattataaagatactagttgtccttaatttatctatacatttagttaaatttaaataaaaactccaaaaagagtcgtaaatttataacaaattttggaaaaatatttatttctattgagcttaaactaaatttactaagaaaactaaacacataagaaagcaaagctaatttttttggtgactaacaagagatttatcacatagtgactaccacatagtaggtgtttattatttgctatctgcataatttactgaaaaccacaataattagaaaagtatgatacaaattccaggaaaagatagaaaaatcaatgaaacagatccgagagtaaaggaacagacccatgtatatragaaaatttaatgtataacaaatgtg

SEQ ID NO: 841605 - DNA, 603 bp, Homo sapiens
ttgctcactgcagcctcaaactccagggctcaagtgaccctcctgcctcagcctcccaagtagctgggagtacaggcgtgcaccaccactcccagctaacgttttaattttttgtagacatgggggtctcactatgttgcccagactgatcttgaactcctggcctcaagcaatccttcctcctcagcctcccaaattgttgggattacaggtgtaagccacctcacctggcccttatttctttaatatataaatagtgtcttattttattcaatagatgtattagagaaatctcgtgtacttaaaatgaattgtcatataaagtaatcctactgcaaatatttttcccccaaaaaatgtgttagttgaaaaaccttttcaaccaaataatagttttgaaaagtgggtacatacgaatctaaattatgctttcttgattgaattcatcagttataaaaagtataaaattccctccctggtcaactcagtgaggctagaagttyattgattttatcagaattctccaagagtatgcttttcgtttcaatggttttctctattgcttttctgttttctgtttcattgattcctgctctgagcttt

SEQ ID NO: 841606 - DNA, 597 bp, Homo sapiens
cagggagaaatcagggtgaggtgatgcaacttcagcatggtgcttggtagagaatatggttttcaatagaatatatgcaagtcaaatgttaataagcccttgctcagctgtatgtattctctagaggaaaagctcgcattctcaccaggactaaagcattgggagctaagggaaataatggcaagtgatgtcacttcctgaaatcacactttttgcacaaggaaacaatcatcccagcagctcctttactctcatattcatctggcacctacacagaaaataagatggaaagagctgtttaagtactacctgggtagaaatgttggaaggggatttaaaggccattctatctttcggccacaaccaaataaattacactggattaaaatagtacaggtcatttggagaaacacagcccaaggacctctacatttctaaggcagaccaaattttgaattaatcccttcttgcttcggaatgatgaccaagattaaatatagaaasaaaggatttaatttcaattttgcaaagactctttcaatagtttcaaaaatatgtctttctctttgagtcttggcaaaaaaaaaaaaaaaaaaa

SEQ ID NO: 841607 - DNA, 393 bp, Homo sapiens
gcctagacgctactgttgtgaaacagttaaacacgttgggtgtggtgcygagctccttcctaggttatcaaatccaagctctgccatttattaattgtgtcattttgaggcaggtatttatattcttagggccatggtgtcttcatctgtagaataggaataatagcacctattgctagtattgctattaggattttcaaaataacacacataatgcattggagaaagtgcctggcaaattataagtatgtaataaaacttatctctctttttactccttatttcttattacagtggttttgtttttcatttcttttattttttggatagttaaaccttataaggatttaaaagtttcatgtgaccattcaaatatcccaatttatcatttaa

SEQ ID NO: 841608 - DNA, 609 bp, Homo sapiens
tgatcatgcagacaaggctagcagcctagggaatagtattcttggtggaatccagatgctctctcactctctgcactagtcagaaactttcagaaaaayaaatacatttctattttatttgaacaacactaattttaggtctttttagacattatcctaacatagagatcataggaaatttctaaacatttaaaggaattattctaaaatttgatttgtattctctgcaacaataaacaaaatgagctaaatgacctatcagtaataaattactggcattcgagagggagaggtaaactatctttatttgcagatgacataattgtgtatgtagctttaaaatcctaaagaatctaaaagctgtaaaaactactgagtgaatttagcaagacagcttgatataagatcaataatcttatatccagattcatactaaggccattttaatgcataaacccggatgtgcatgaataaagaattttctctactgaattttctaagaataaaagttcatccaatttgttcattcattctattgaggtgaaattatcaaatagtggtcactacacaccaaacctagtatcaatttctagtgatacatacatgtgc

SEQ ID NO: 841609 - DNA, 526 bp, Homo sapiens
aaattaatggatggatttgagtacatttcaagcaactacacttgtattgaattgtttaattcttgtagtaaacttaataaggtttaggtatcaatgaagaatctgaatcgcagaagtraagtgacttgaggtgtcgcatagcttactaagtagctaagtagcttaagtattagagcaaggatctgaatctagacctcagacttttaaactatgaaattctgtgacatcctgttcaacttttcatagttgaagatggcttcttttgttgctacagtgtatgtagaagaatacccagacatttgagagacatttgttaaaattcaaaattcaggaaaaccaaaagattaaaatgtagttgtaaggcttctcctctgtctttatcctttttgattgttacactgattctctaatggtctaacctttaggtaatttgtctactttattaaaattaatccagatttattaaatgttaattttagttttattttattttattaaatgtttactttaattttagtgtttttaa

SEQ ID NO: 841610 - DNA, 615 bp, Homo sapiens
gttcagcaaccccaattaaagcacttcttttttctctgttgatacctctagccagccattatgtmagctttcaagcacataagaaaataaaactgaggattatagaagaaaaaaggattagcaaaaatccatcactaaccctgtataataacttaatttgtatactgcattgtagtgggtgtctggtgttatcaatattgcattgtcattactttaaatataattgattttttaaaaataagattaaaaagttacttagcatgaaatactttgcttacttagaacttgaaccactacatttggaattgggaaaaaagaatgaaggttttaccttattacacaagccacttcttcataaatcataaaattaacccctttcccatttagaaaaaaaaaagtgcagcttgctgccagcgctcatttaattttacataagcatgctgtttgaggttgaggcaaatctgacagattttcagtgtgaaaataaaatataaaaactgttcctggagttatttctaagcagaattcaacttaacagaaatatgtatgatgttacattaggattagagacaatattctcagggcatttggggaaatgggttaagctattgtgaa

SEQ ID NO: 841611 - DNA, 497 bp, Homo sapiens
ctcccaagtccctggctttggagtgggaagtgaggtgtgggaagtaggtcgctttctgatgaattcagtggcagtgaattgagaccggagggaatctggcycctagaggctggtacttgggcccgaaacccccatctccggcggagagaccgtccgaggtaattgtctgccacgagtgcacattctgaaaacaggtaagtcagcctaagtgtagtgtgtgtgtgtgtgtgtgtgtgtgtgtgctctcttttcaagagaaaaaggaagggacagtgttggaaccatatggacagtcactccggcacacacttctgacgaacttaccttgtgtgaaacggcgtacctaaatggtttttggtggtggggaggtggcactgagtgattcagtacccgggaatttaaggacccgggttaattcttcaggaggagaattaaaagaaaccggtagcactttgagtgtagcctatgttttaaatttttcgttgcagaaacggtta

SEQ ID NO: 841612 - DNA, 454 bp, Homo sapiens
caaacataaggcctggcatggtggctctagcctgtaatccagcactttgggaggcccagggaggcggatcctttgaggtcaggagttcgacaccagcctgaacaacatggtaatgccctgtctctactaraaatacaaaaaattagctgggtgtggtggcatgtgcctgtaatcccagctgctagggaggctgaggcaggagaatcgcttgaatctggacagagtgagattctgtctcaaacaaaaagttcaaacatcattagccatttagccatcagagaaatacaaatcaaaactacaatgagataccatctcacacccaccattagttattataaaaaaggtggataagtgtagtgaacatgtgaaggaactggcatcctcatatattgctggcaggaatgtacgacggtacagcaactttggaaaacagtttagcagtttctcaaaatgt

SEQ ID NO: 841613 - DNA, 260 bp, Homo sapiens
agttagaagataggggcccttcaaaattattaagattttcagttttgattttagcaaaaaagaatgagcagatcartttattcaaactagatccataatatcacacatatgctttcttctagattaatttatcatttcagttcagcactacctgccttatatataactcagctcacttttaaggagaaatgatactacaattagttttggatgacctttatattttcaccaaaaatgtattagacatccctgacatgccc

SEQ ID NO: 841614 - DNA, 630 bp, Homo sapiens
cctctgggaaaaacagaaatcctattgactatgtaaaarcaagcatttcctgcagtcttatgattttacagctattctctcaggtttcagagaaagtaaatatacatgtattttgaacaatagaagtttaaaaataacttatttagaagagcttttctttcctgaaatagaataaatatgccaagcaagcatctttggggggctagggggttggtttgaaagcattaatgctcataaatacacatgatagtcattatttttttgtcacaatagcttaatttacctgttcaaagacacttttcaaaatctgtgtcactaaaagaagaacatgatatgctgcagaaataaaatttatcttgttacttgtttttttactttatcactgacaactccactggttactatggaataaaaaatttgattgcaatagggaaacttcatagattgtccttcaataagcatagccatgggcctttttttattactatgtttaaactacttggtgaaaactagtgaaaaggccattttaatattgaacgtgttctgacccggaatcaaaagtctaaattcttctcggagtttatatatggatgctatatatcatcttctaagagatatctatttatatat

SEQ ID NO: 841615 - DNA, 582 bp, Homo sapiens
attcattacagtgagttactttatttgaaaacaacacatgcacacatacatatatacaattccatgtttcctctgtattcacgtactttgaaaagttcaattttatccatttacagaagaggtgtcctcccagagtaagtttggatattagttatttaaggtaagcctatgtcaggtggaaatatgattgatgttaggaccctataaataccttcttttgctttatatgaaactatgaaattggttctaattatattaccaaattgaatcatattgaaaaaaagtaataaaatcattgcattagtcacaatcagccacatttgctggtattcaggcctggtatttgacatatatgttattccaaagccttacaaaaacccaaatagaagttattaccatccctgttttacagacaaaagttcaggggcagaagatccaaatcttacctttagaaacacagaaktgaaatacaaacctttaaaaaaaaaaacaaaccacaacgctaggactgcctctaccacactatgccttcatggaactgttatgagagcttttagaacattattgccaagtacagactaa

SEQ ID NO: 841616 - DNA, 559 bp, Homo sapiens
gcacgtgggccagggagacggctggtgaaagcggacrggagcagacgtttcctaatcatgccactctcagtccccctttccccagcctccaccaggctggcctggctggattcccaccccgcctccccaccattccactgaattcctagtcacgacttcctccccctttcatcattccgtgtggctccattcattttcttgtcttccagaaacgcgctgaagtttcttattcaccgggtaagaactttctcccctttcctgtctgcctcctccccgggaaaaccatatcagccttttgaataggtctccaggcaccacgtggaggcccgagctccacggccggacggccctggacagacagtctacgaagaaagcccaggcgtgatctccgatgataggctgcttgggcctttctgggttccctttatagatgttccagacagttctattcatcctaaacttcctcgaaggtttaataacaatcactcaacctggggccatttgggaagtattgagtcatctttacaagcgggggagttgaggtggtggttgaatcaag

SEQ ID NO: 841617 - DNA, 617 bp, Homo sapiens
gtcttgtaacatattataagagtgatttcaacttaagaaatcactcattataccaaaatcgagaaatatctcaactcgaatgagacaaagcaatcaacagacaccaacactgagatggcacagatgttaaaattatctgaaatggattttaaagctgctgtcataaaaatgcttccataattgtgaacccacttgaaacaaatgaaaatgtagactgtctcagcaaaggaataggaagtcctggcaaagaaatagaagatatgaaatagaagatatgaaaaacaacaaatggaaattttatttttattttttatttttatttttactttttggtttttgagacggagtctggctctgttgcccaggctggagtgcagtggcacgatctcagctcactgcaacctccacctcctgggttcaagcaattctcctgcctcagcctcctgagtagctgggactacagtcacgagccaccatgcctggctaatttttgtatttttagtagagacaggggtttcgccatgtggccccgggtagtctcgaactcctgacctcaggtgatcccacctgccttggccytccaaagtgctgggattacaggcgtgagacacttcatc

SEQ ID NO: 841618 - DNA, 548 bp, Homo sapiens
aaaaactattagtactagtaaactaattcagtaaagttgtagaatacaaaatccatccaacatggatgaaactggagaacattatgttaaataaaataaagcaggcacagaaagaaaaattgtatatgttctcactcatacgtggaaattaataattaaaacaattgaactggagatagataatagaatgatggctaccagaggctgagaatggtattgggccaggggaacttgggatggttaatgaatgcaaaaatatagattaaatgaataaaatcttgtatttgatagcacaaggtctctatagtcaaccataacttattgtatattttaaaataaataagagtgaaattggaatgtttctaacacaatgaaatgataaatgcttgagataatgaatacctccattaccctgatgttattattacmtactgtatgtctgcatgaaggtattacatgtaccccgtaaataaaagcacctgttatgcacttataattttttaaaaaatgcaagtttttaaaaaattatgcttggacttaattttgat

SEQ ID NO: 841619 - DNA, 548 bp, Homo sapiens
aaaaactattagtactagtaaactaattcagtaaagttgtagaatacaaaatccatccaacatggatgaaactggagaacattatgttaaataaaataaagcaggcacagaaagaaaaattgtatatgttctcactcatacgtggaaattaataattaaaacaattgaactggagatagataatagaatgatggctaccagaggctgagaatggtattgggccaggggaacttgggatggttaatgaatgcaaaaatatagattaaatgaataaaatcttgtatttgatagcacaaggtctctatagtcaaccataacttattgtatattttaaaataaataagagtgaaattggaatgtttctaacacaatgaaatgataaatgcttgagataatgaatacctccattaccctgatgttattattacctactgtatgtctgcatgaaggtattacatgtaccccgtaaataaaarcacctgttatgcacttataattttttaaaaaatgcaagtttttaaaaaattatgcttggacttaattttgat

SEQ ID NO: 841620 - DNA, 548 bp, Homo sapiens
gtagccgatttgatcaatgggaagaaagggtatcagtgattgaagatcaaataaatgaaatgaagtgagaaaagtttacagaaaaaagagtaaaaataaatgaacaaagcctcgaagaaatatgggactatgtgaaaagaccaaatctaggtctgattggtgtactgaaagtgacggggagaatggaaccaagttggaaaacactctgcaggatattatccaggagaacttccccaatctagcaaggcaggccaacattcagattcaggaaacccagagaatgccacaaagatactcctcgagaagagcaaccccaagacacataattgtcagattcaccaaagttgaaatgaaggaaaaaatgttaacggcagccatagagaaaggtcaggttacccacaaagggaagcccatcagagtaayggcggatctcatggcagaagctctataatccagaagagagtgggggccaatattcaacattcttaaagaaaagaattttcaactcagaatttcataaccagccaaaataagcttcatcagtgaag

SEQ ID NO: 841621 - DNA, 548 bp, Homo sapiens
gtagccgatttgatcaatgggaagaaagggtatcagtgattgaagatcaaataaatgaaatgaagtgagaaaagtttacagaaaaaagagtaaaaataaatgaacaaagcctcgaagaaatatgggactatgtgaaaagaccaaatctaggtctgattggtgtactgaaagtgacggggagaatggaaccaagttggaaaacactctgcaggatattatccaggagaacttccccaatctagcaaggcaggccaacattcagattcaggaaacccagagaatgccacaaagatactcctcgagaagagcaaccccaagacacataattgtcagattcaccaaagttgaaatgaaggaaaaaatgttaacggcagccatagagaaaggtcaggttacccacaaagggaagcccatcagagtaatggcrgatctcatggcagaagctctataatccagaagagagtgggggccaatattcaacattcttaaagaaaagaattttcaactcagaatttcataaccagccaaaataagcttcatcagtgaag

SEQ ID NO: 841622 - DNA, 475 bp, Homo sapiens
acaaaacctagattgattaaattagcacatgtagatcaaaataaaaatgagctcttctttttataagccactgcattaktctgttctcacattgctataaagaactacccgagactgggtaatttatgatgaaagaggtttaattgactcacagttctgcaggctgtacagaaagcatgactgggaggcctcaggaaacttacaatcatggcagaaggtgaaggggaagtgagcatgtcttcaggccagagcaggagaaagagagtaaaaggggaagtgctacacgaactttatacaaccagatcttgtgagaactcattcactatcactagaacagtaagggggaaatctgccttcatgatccaatcacctcccaccaggccctaccttcaacactgggggataacaattcatcatgtgatttgcgtgggaacacagaaccaaatcatattattctgcccttggcccctcccaa

SEQ ID NO: 841623 - DNA, 601 bp, Homo sapiens
gtaaaagaaaaaaaataaatgacattttctttgatatataaacaacagtaattactattctaggctattgagtttatwtaggatatatatatatatacactcatatatatataggatatatatataggatatatatatatacacactcatgtatatatatatacactcgtatatatatatatacatacacacacacatatacacatacatacacatatgtacacacacaccttctggttttagcgtaggatgtagaaagctgtaaagaacattgttcatacccttataataacaacacaaaatctggagaaaattcaaattcacaatttttctttaaccatcagagagttaaagtcacacggcaaccaactaacctgtacataagtaaagatagatactgacaaggtgagaccagttgtagcagacacagccagaacatagaattttgcaaaaacaacaacaacaacaaaaaggttaatgaatcaatgagtcaagtgtgagataggaaggaaatataaatatggtgagaatttgcacctgcttacaggctctttatagacctcactgaatgctcacataaaaataatagcaagattcctga

SEQ ID NO: 841624 - DNA, 627 bp, Homo sapiens
tcggctccctgcatatcccccttttgtttatgtattaattgaaagaatgtaaggccaggctgagcagctctcattgtccgattggcggtccatctgattttacagaaaacatagcattagaacwgtgttgtgactctgttaggccttctctctctcttgcacccaggctcagctggctcatggctcgtactggagggaccgggcccatggttggccaccctgggttcctcccgtctcccgttcatggtcgcacacaccttgagggcacccaaacggtgtgcccatctcctgtagaaacacaagcatgctctcttccccatgtcagtaaatccaccggacttttccattgtccttcttccagggatttccataacactttcagataaactttcctcttttcctctaacacttgtcaatgtctttctgctggagtcttaccatccggaccaggagccaaaaaaatttaaagtaaataaaaataataaaaagttctgattgaggtggtaagtggcctcctataccccctttttgttttttcaacatgtgttgtaatgtttgatgtgcctgctctataatgccttgtcctctaggattataaggaatttctattttatgggttatagccca

SEQ ID NO: 841625 - DNA, 602 bp, Homo sapiens
ctcttgcaatccttaatgccagaacctacatcttctttctccacccattcatctaagtaaggtgcctgtcctgtgattttatctccataataatttaaaaatkgttctcttcctttcaggttccattcccattaccaggccccagttcactcccacattatctctgcttacactccatccgcttacctgacacccagcctcccctttcccatcagcaaactctgcaatcatttcagtcctcagatgaagtcttcagtggcttgtgggggctaccaagtgaaacacacactccacagcccagcacaaatccttgtcaacaaggacccagcctgctatctcacaccatgctgccattctcccaccaaactggaaagactcatgttttaacgctggacactttgatcatttcccatctgtgccagaaaggggtcccattccagaccccaagagagggttcttggatctcacacaagaaagaattcggggcaagtccactgagtaaagtgaaagcaaatttattaagaaagtaaaggaataaaaaatggcattccataggcagagcagcaacatgagcttctcagcgcttatacttatgttacttc

SEQ ID NO: 841626 - DNA, 603 bp, Homo sapiens
gcaaatctagtataaaattccttttctttgttatttttaccctactttctggccactcataggaacaaaattttaaaattagccgttatcatcttttttgtttctctaatctattttttcttttgttttatgatacctctactatctgcttttatgtactttactttgatcctactgctgccagctgaacttagccactgggagtccagtccctactttttgctctgccagaccttcactgggcatgacacatttctccaggccacagattctgtcatgaagacttctctgacagatacacgttgcttagggttccaagaactaactctatatctttatctttctggcctaggattaggaaagcctttctactcttattactcttaggatacttttccattttttattaatttaaaccctttccataccattttaaattgtctcttcattaaactttcttcattgagctcttcttgatgtrctgtttcttgaatgatcttgactaataaaagaatagtaagtattaaattcacagtgtgtttatctggggcaaatgtgaaatacataattggttctggatccacagggattcaattgtatctg

SEQ ID NO: 841627 - DNA, 603 bp, Homo sapiens
gcaaatctagtataaaattccttttctttgttatttttaccctactttctggccactcataggaacaaaattttaaaattagccgttatcatcttttttgtttctctaatctattttttcttttgttttatgatacctctactatctgcttttatgtactttactttgatcctactgctgccagctgaacttagccactgggagtccagtccctactttttgctctgccagaccttcactgggcatgacacatttctccaggccacagattctgtcatgaagacttctctgacagatacacgttgcttagggttccaagaactaactctatatctttatctttctggcctaggattaggaaagcctttctactcttattactcttaggatacttttccattttttattaatttaaaccctttccataccattttaaattgtctcttcattaaactttcttcattgagctcttcttgatgtactgtttcttgaatgatcttgactaataaaagaatagtaagtattaaattcacagtgtgtttatctggggcaaatgtgaaatacrtaattggttctggatccacagggattcaattgtatctg

SEQ ID NO: 841628 - DNA, 509 bp, Homo sapiens
aataaataagagagcaaaataaacaagacagcaaagcccagagttgcatacatgggaagcaaacattttataatttagtaattaggtaaaacttgaaaggcaccaccgccaaatcctgtacctgtatttccttctaggtatcagatgcttcaagttcctaagtacatgataaaactagttaactgttagcatgatatctcattgtcttttactttccttgtgaagtgagttccttaactgaggacttatctccctcaaacatttggaccatcgttgtatctcctgggtcatacagcaggtaccaattggtacctcctcttcttctgcagtctggatgagctagagaggcttctcttgttctgtacccaaataaggctggcatatctgagttcaccaggtmaatgggttgaagcaaggcaaccaaatgtgttctctgttacctctaatatgcaaggagccctatcaattggagaggattatctatcgatatttcagtccactccactagg

SEQ ID NO: 841629 - DNA, 581 bp, Homo sapiens
tgtcatagactagaagccagctttycacaaggggtcagaaaggaaggagggtgaagctcagattcctgtctgcccctagacttccagaaagaaaatttggattctttctgtatttaggagtacacatagacacaagcagcttcagagtcaaaccagaagtcacgtgagaatcccaagctacagtggagagtctcgaaatgctaggctctcaaggatttattggagacctcattgtgttgtcggccacccctcccctgaggccatgcctccacggaaaaattgtcatttgagagacaggttgtcccactaagagggctcaggatatgatttctccttggccttttagtttggttgttcccttgtgaagggctctcctggatcccttcaaaacctaattatggctgtaaaaactgttcagagagcgaagcagtgcttatgtggatgttgggcagtgtctgctctggcacatttgttcacaggtgggccagccaagcagctcggcactgatgggcattgattttgtaatatgtgagcaacttcactggttctgttctcatagactctcttttgttttggaggga

SEQ ID NO: 841630 - DNA, 630 bp, Homo sapiens
gacccgtcatgttctaaataactccttccttatatatgtaccaacctattagcacaaggcactatcatcctcaatgtcagtgatttgcagaccattgtcctaatctttatgtcttctgtatgtcttctgctattgcttacttaattgcttttatatctaaatcagtctacttttcatgtctgcatcagtcaggatatacctgattatgctgcagtaacaagcatccccacaaatcttagcagctgataataatgcaggattctagtctaaggtgaatttcctgtccacaaaagaaaaggtcatgtagaggaggtgaactgtgaacctaagaagtagcacctaagccaaaaggaaaaaaggaaaacactccaggcaaggggaagtcaggttcttcttgaacccataattgtctcacctgtctaatgggtgttagcaattatctctcccttgcttccttccaattgcccttcaagaatccaatgagaatgcgtagtcacttgaaaagattgctttttagctgctgcaggtgatcgcgttgatgttctsaccatatcctgtgggccttcccctttcttctcgccctgatcaactcccaactgctagtacctggatcattctgctcgaaagcgg

SEQ ID NO: 841631 - DNA, 529 bp, Homo sapiens
gggagagtatgattatctggggaaggagagcttgcctgtcaggcttgttagaaaagacgctcaccaggccaggcgcagtggctcatgcctgtaatcccagcactttgggaggctgaggcaggcagatcacaaggtcaagagatcaacaccatcctggccaacatggtgaaaccccgtctctaccaaaaatacaaaaattagctgggcgtggtggtgcacacctgtagtcccagctacttgggaggccgaggcaggagaatcacttgaacccaggaggcggaggttgcagtgagctgaggttgcaccaccgcactccagcctggtgacagagcgacactccgtctcaaaaaaaaagaaaaaaaaaaaagaaatgaaatgacgctcatctggctctttctgtcattcactcacgaaacagacacttattgtgcacctagcatctactacatgttgggcactttattaggtgtgtgggatccaycagtaaacaaaagagaagaaaactgtcctgtggagtttatagttatcg

SEQ ID NO: 841632 - DNA, 529 bp, Homo sapiens
gggagagtatgattatctggggaaggagagcttgcctgtcaggcttgttagaaaagacgctcaccaggccaggcgcagtggctcatgcctgtaatcccagcactttgggaggctgaggcaggcagatcacaaggtcaagagatcaacaccatcctggccaacatggtgaaaccccgtctctaccaaaaatacaaaaattagctgggcgtggtggtgcacacctgtagtcccagctacttgggaggccgaggcaggagaatcacttgaacccaggaggcggaggttgcagtgagctgaggttgcaccaccgcactccagcctggtgacagagcgacactccgtctcaaaaaaaaagaaaaaaaaaaaagaaatgaaatgacgctcatctggctctttctgtcattcactcacgaaacagacacttattgtgcacctagcatctactacatgttgggcactttattaggtgtgtgggatccatyagtaaacaaaagagaagaaaactgtcctgtggagtttatagttatcg

SEQ ID NO: 841633 - DNA, 592 bp, Homo sapiens
tcattttaacttaatcacctctttgaagatcctatctccaaacacagtgacattctgaggttctggggttagggcttcaacatatgaatatggggtgagggagggacagaattcagcctgtgccaccacccttcaagtctctcctccagtggcatttttccgggagtgtcaccagaggcctctgcacagggctgtctgggcagttcgctgcaggtgctgcatgtctgagccttcttctgctggccaagacccttgcactgcgtggagctccacccatccagggaaaggagagcctttttctttgccagaggctctgtctgctcatgaagccatgcatgggctctgtctgccctgggagaaccctatctctaactctaatacaggacccccatgagcacctgaaaacacagatttcccctctctgcatcctgccacctgcaccctttcaactctcccgcatcaccctgtatgttttctgtgatgcatgccaatagmtcatcctggtggttcagggttctgctctgtatttgactgtcttaacctctggaaaggatctggccctattcagtgtcacatcctccttttagtgcca

SEQ ID NO: 841634 - DNA, 614 bp, Homo sapiens; identical to SEQ ID NO: 813082

SEQ ID NO: 841635 - DNA, 602 bp, Homo sapiens
accaacttaaaagcaaagatcatcagattcaataaaaagcttcaaaaaggtttacaagagctttatccaaatataaagataccaatargttataagtaaaaatggaaaaagacataccatgaaaacattaataaaatacttcaagacaagtattagagatagatattttataacaatgtttagttaatggagaacttatcaattctaaatgtatatgcacctaattactgagttttaagatacataaaagacaatggagaactaaggtgagacaaagttacaatcatagttggagactgagtagacaaaatcagaaaggatgtaagggatattcaatggcattaccaaccactgatctgacatttatagaactactacacccctaaactgcagaatactcattctttttatgtgcaaccagaatattcaccaaaatgggccaacaatatgcttgcccataaaacaagtctcaaaaaatttaaaaagattaaaatatgactgaatatgatctctgacaacagtggaattttagaaatagtaacatatagaaataaatagcaattaactattgtatcttttggtagatggaaaaattatatttg

SEQ ID NO: 841636 - DNA, 604 bp, Homo sapiens
tttaagatgtcagttcttcacaaattgatttttagattcagcacaataattctagccgatttttgggatagaaattgacatgctcagaggactgatgtatctgacttctagacttcctgcatagtcctgacttaccattttttgactagatggtagtacaagagtgatagacattcagtagaaagcctactttgaattttgttctcttccctggctagtaatgtgcccatagaatactcaatcttgcaatgctgggcagcagcagcaagccgtagcttcccgtcagccacagcatcaagagggtaaaaactgattcttgctctttgtgaagaacactattcctgctaaaccatcaagtattgatgcccttagtgccttcaaccaatgcttctactcaagcctaatcagtagggaaattgataatcctgttgctgtagtattccccatcatgccgcaattttagttcaatgcttcaaacattyttcaggcccagtgcgctttcagctgtgtatgtttatagtgagtagctacacaatcattctgttttttgctttcagtttactattcaataaattagatgaaatattcagtactttacaataaa

SEQ ID NO: 841637 - DNA, 453 bp, Homo sapiens
ctccagtttgttatttattttctgattgttttgtggtcttctcttccttctttcctttcttcctgtcttccttttaatgaaggtgatttttttctggcagtatgattttattttttgtgtatycactgtatgtttctcgatttgaggttatcatgaggcttgcaaatactaacttacaaccattattttgaactgatgacagcttaacactggttgcaaaaacaaaccagctaaaagaaaattaataaaaactttacaatttaactctgttagtccacttttcaacttcttgttttttgtctcttcatgtcttattgtattctctatgtcttgaaaagttgttgtagttattatttttgattggtttatcaacttagtctttctacttaagattagagtagtttatacaccacaaatacaaatttataatgttctgtgtttttctgtgggctt

SEQ ID NO: 841638 - DNA, 522 bp, Homo sapiens
cccagggaaatcttatgtctgttagatttccatagcattcatggaaactgacatgcattgaaaactcaataaataagaaattacastcacttttgattccattccataattaaaggagaagggtaatttataactccaattactgaaatgttcactatatttttacatttaaaataatttgaaaatataaatacaacatatattccaaacccaatgctctatttgtttgccactatatataatgcatatggcacatggaccacctttcccttaaatttttaaaaatagggaaaatttttacagatagggaaatcgagaaccaaaaatgtatgcattttgcctcgtgtcttggtgtttgttatgacagagttgggaatatttcaagttagtaacatgaagtgcactaatgggtatgtattctttccttagactttttctctttctttgggaaaacaatccttaaataactttggtccagcagattgcaaaacatgtttttggctgcgtagtttgcgtatcgct

SEQ ID NO: 841639 - DNA, 582 bp, Homo sapiens
gcgatatagacaataaagtccaggttgaggtrgtctcagatggaaatgaggaacttgttgggaactggagcaaagttgactcttgttgtgtttaagcaaagagactggcagcattttgtccctgctctagagatttgtggaaatttgaacttgagagagatgatttagggtatctggtggaagaaatttctaagcagcaaagcattcaagaggcaacttaggtgctgttaaaggcattcagttttaaaggggaaacagagcctaaaagttcaaaaaatttgcagcctgacagtgtgatagaaaagaaaatcccattttctgaggagaaattcaagctagctgcagaaatttgcataagtaacagggagctgaatgttaatccccaagacaatggggaaaatttctccagggtatttcagaggtcttcacagcagcctctccatcacaggccctgaagcctaggaagaaaaagtggttttgtgggctggcccagggtctctgtgctgtgtgcagcctagggactcggtgccttgcatcccggcccctccagccatggctgaaacaggtcaatgtggagctcag

SEQ ID NO: 841640 - DNA, 584 bp, Homo sapiens
gacactttttaaaatattgccaaaacaagaaattcctgtcactaaagttgattctagatgtaagcaaaatcaattgcaactcatttaattgtgaaactgaattatcactaggataaatcaaatattttgtaattgtaattgaatatgaaataattacagtaaaggtttatatgcatacatcaccatgcaattataaacaggaggtaaataaaactacgtattacagctacataaatatctgaaatttctaaaagtaaaagcagcacatatattggttggaatgttatagaaagaccttcaacttgtggattttggattcttggttttgaatattggctgtgtgcccagctaagttatcatgaattgtatcttgctcctccctcctgcctcctccaagcttactggagattggacacacactcctggtcaaaagagtataataagcctttcttatttggaaattatcagaagcaataayctattataatcaggtatttactcactggcacttaatttgtagctatttcttgatgcaatcaaagaaactaaaagtggtttgaagataagaaaagctggaaaaaatc

SEQ ID NO: 841641 - DNA, 617 bp, Homo sapiens
attcctgtcactaaagttgattctagatgtaagcaaaatcaattgcaactcatttaattgtgaaactgaattatcactaggataaatcaaatattttgtaattgtaattgaatatgaaataattacagtaaaggtttatatgcatacatcaccatgcaattataaacaggaggtaaataaaactacgtattacagctacataaatatctgaaatttctaaaagtaaaagcagcacatatattggttggaatgttatagaaagaccttcaacttgtggattttggattcttggttttgaatattggctgtgtgcccagctaagttatcatgaattgtatcttgctcctccctcctgcctcctccaagcttactggagattggacacacactcctggtcaaaagagtataataagcctttcttatttggaaattatcagaagcaataatctattataatcaggtatttactcactggcacttaatttgtagctatttcttgatgcaatcaaagaaactaaaagtggtttgaagataagaaaagctggaaaaaatcytattttacttgagtaataaattataaattcattggatttgatgcatgtgttatcctctttgtg

SEQ ID NO: 841642 - DNA, 631 bp, Homo sapiens
gaagttcaccatgttccagaccatatgataagcataccttacttcatttgattmcttgaagtaggagctccattttctgttttcacagaccatggaactgaagtttgccaggttaatggcttaatagattgaactcatataaatagctagtaccccattctcccattcaaggcttatcaaacagtcttttaatatttttattttttaatctaattttcccacatgaagcttgtctgacggttttgattcccactgtaattaatacttggcattcgagtttatatttttataatttttcgtggctcaaattctattccaaactccaatcaactctgggtcagtgataaataggatttagaacccgcagagttgagggttgttttaaaaattattattaggtcatgctaccatgtcagtttttgtggttagtggtttttctctcaaataccagttgatcctagaaaacttttttgagtttcagatggatgtaaatgctatttttgtagagcccttttgaagtatccctacagtgttatatttatttttctaccttattcatatgatattctttttcaaataatatatgccttatgacagaaactacatcttgccaaattgaattcttcagggt

SEQ ID NO: 841643 - DNA, 631 bp, Homo sapiens
gaagttcaccatgttccagaccatatgataagcataccttacttcatttgattccttgaagtaggagctccattttctgttttcacagaccatggaactgaagtttgccaggttaatggcttaayagattgaactcatataaatagctagtaccccattctcccattcaaggcttatcaaacagtcttttaatatttttattttttaatctaattttcccacatgaagcttgtctgacggttttgattcccactgtaattaatacttggcattcgagtttatatttttataatttttcgtggctcaaattctattccaaactccaatcaactctgggtcagtgataaataggatttagaacccgcagagttgagggttgttttaaaaattattattaggtcatgctaccatgtcagtttttgtggttagtggtttttctctcaaataccagttgatcctagaaaacttttttgagtttcagatggatgtaaatgctatttttgtagagcccttttgaagtatccctacagtgttatatttatttttctaccttattcatatgatattctttttcaaataatatatgccttatgacagaaactacatcttgccaaattgaattcttcagggt

SEQ ID NO: 841644 - DNA, 592 bp, Homo sapiens
aaagcatagcaaggttgacctttactcsagttcccactaagttcctcatctccatctgaaaccacctcagcctgaactgcattgttcatatcactatcacaacaatttaaaaagtctctaggaagtttgaaactttccctatcttcctgtcttcttctgagtcctccaagctgttccaacctcttcccattaaccacttccaaagttgcttctacatgttcaggtatctttatatcaatgtcccacttctcagtactaatttcatgtattagtcttttcttatattgctataaagaactacctgagattgggtaagtttataaaagaaaagaggttttattgactcacagttctgcaccttgtacaggaagcatgactgtgaacgcctcaggaaacttacagtcatggcagaggacaaagaggaaggaggcacgtcttacatggccagaacaggaggaagagagagaatgggaaggtgctatacccttttaaacaaccacatctgatgagaactcactatcacaagaacagcaagggggaagtccacctccatgatccaatccccagccaccaggcccctccttcaatactg

SEQ ID NO: 841645 - DNA, 529 bp, Homo sapiens
gtactgtttctactgaaagcatatcacttttacattatcataaagttgaaaaattggaagttgaaccgtcttaagttggggactgtctgtaaaccacttttctgaaatgttgaacaaggaagatwatcttttttaagcttttaagattcattaatacagaggtgatacatgttttattccttgatctagatttattatgctcttttaattttataaaaaattaactttaaaaaagcaaccttaaatcctgaatgaattattcttaaaaaatcgctgcaattgggtatacctaattacgagaactcaggtcatgaacacacctttctagtgttaaataagaggggtgagctaaaataggagtacaatggggacaagagaggaattgaactcatagtctagaaatttcagccaggaagtgacttcggaggtttatcatctaatcaggtcccttgtctctctctctttttttttttcaaaagacttatgccctggcatttaggtcccttgtctctaaacaaagtgaaagcta

SEQ ID NO: 841646 - DNA, 613 bp, Homo sapiens
aaatcagtcacacagtgtaacttttttgtttgtgtgtttgtttggctttcactcagtataattattttgtgattcatccatgttgtgtcatgaatcagtagtttatttctttttgtttgcggaatggtatttcattgtatggatttttcacagcctgtttaccacttctctgtccgtggacatttgggttattttgagttttggcttttacaaataaagttgctacgacttttcatatgcaagtgtttgtgtagacatacgctttcatttctctcagacaaatacctaaggatgaaatggcaggatcatttggtaagtgaatagttaactttcaaaaactgccaaactgttttttaaaggatttgtactgttttactttcctaccactcttgtaggagagttacagttgctgcatcctacattgattgctcttctatatcctcatcaacatttggtgtggtcagtgcttatttgctatctgtatrttttctttacctgtctttaaaactgagtaatttttctttttattgagttttgggagttttcttatatattctagatataagtccttttattagatatatgctttgcgaagattttctcccatttgtgc

SEQ ID NO: 841647 - DNA, 540 bp, Homo sapiens
cttttttctactaaattttggggtgacttggtttagggctattttaaactcctcatctgttctatgattaggaaatattttcaccactaatgcagaatttttctgatatacattatgatttaaaatctttctgcatattcttatatatacattagaatgtcatgccctgtttctccagcaaaactcttaggatccttaagaacaggagctgtgtatgtattttctttctttttgtcctctctataccagtgtggtaactttcatgtagtaagtaatggttactgattgatatatacacaagtatacaaagtccatgttcaatacttaggttttatttgttgtagagtttgagaaaagaacattgcttcattatccagtgtttattttttatttttatttttacatttagagacagaattttgctctgttacccaggctggagtgcagtggcatgatygtagctcactgcagcctctaactcctaggcttaagtgaccctcccacctcaacttcctcagtagctgggactacaggtgcaca

SEQ ID NO: 841648 - DNA, 582 bp, Homo sapiens
tccacacttctacactcattccttttcattcactcattcattgaacaaacattggaaatcttatgygtcagtctttatgctaaccactaaattcaaacagaaataagatgctgcccttggacttgagaattcacaactgagtggatacctttagccaagccctagaaatcgtcactgaaacacactgttcttaacttactccaccaaagagattttaatctacccaaaccaagaactagtaaatcacagtgcaaaagtgtgaagcatccaaaagattcattagctactgctttttgtcactggtttctaccagattttttttccttctcctctttatatttacaatctgctgacacatataatctataccatatagccatgaaatcagccacagtaaccaattttgaacaggtgaagaatcctgacccagtgaaacccatagactggagtcactcatcaagagctaggattaaatgttggctcaaaagagccgtctgatcttgcttcagtcacctctaactcctctgtgggtgaaagcaggaatttacttttccaaaactttgaaatgttacctgaagcaga

SEQ ID NO: 841649 - DNA, 646 bp, Homo sapiens
ttttttcttttataaggtcactaatcccatcatgagggccccaccctcaggacctaactaacccgagttaccttccaaggaccacatctccaaataccactatactgggagttagacttycaaaatataagttttttgttgttgtttttgggggtggggagcaaatattgagttcataacaggtgagatggaggaaaaatcaatggagctgaatgtaaagaacagagtgaaaaaaagtattgaatggatcatccaaatgaatcttaaaaattgctaagaattttggaatgaatagagatgaagaagaaatagcaaaccaggagctaaaatcatcagtgaatgaggagattgaagaggaggcaggaagttgacagcaatcagaaagatgattgtgtgataaagtctaatgttgtctatttcaaataaattatgtttttgaagaaggaggaagatgaaaatgtttgaaagaagggagaaagaaacagccacctcacacccagtctctgatgtgggaataaaaacaaaactagccacactaaagatagttacagggaaataaggtgtaattgttggccaggtaagacaagagatagaagacaagaactttgagacagcagttgaaaagttagaggagtgtgctgatagg

SEQ ID NO: 841650 - DNA, 623 bp, Homo sapiens
aaatacacagtaaatgcttaaaatgactgatgatggtttaaaaaaaaagtttagtaatatggcctctagttcctttaattccagtataggtatgacctactgttggtgtccaarattttcatcccaactgataaatcattcttcaccagccctcacttaagtctaaatgagatcaaggatcagcttcaatgactcctctcttccaagaggtccctaatcacagcaggaagatctctgtccctcctctagcatcagaagcagtttgtccctgttgctctctctctcctatattttgatccctaaattgaagtcataccatacaagtttcatttcatcacaaaaacgtgtgttcccaagggtccatcctggactggtcgtctgtgcctaactcctttcctcaacatccagagcaaggcccaagcatagactcggggctctggcttccctcttttctggtttcctttgaatattggcaatatagagggccatgaacactgagaagtcacagtggctccgatatataaaactgccttggcatgaggatccagggtttcatttctctgctttgggatagagataatgggagtcactgattccaaaaccattcactgttgtggtctggg

SEQ ID NO: 841651 - DNA, 513 bp, Homo sapiens
agtgatgaaagtaccacagtgaggattgtggtgatgcaaagggcggaagagtctggtggggctgccaagtgggccaggctggggtccctcgagatggagtcccttgagatagggaggctcacccacaccagggatcccaccccaaactcaggcttcgcctccctctgcttctaccaggttgtgacactgacccactgggcttttcacattacttccacacctttgcttggcccttcccgctttcacccattggcaacttaattttgaatgcttaatccatgaacagtatcatccccatttcacagacaggagaaggttcaaagaggcagaggttcagagaggttaagtgacttgccaaagacctcacagctatgacatggcatagctgggatttgaacccagtgctctggcctcaaatgtcaactactctctaatactctgcctcacctctgagaaccacttagttgctaggagacagcaagctcgyggttactatgggaactgggctgatgt

SEQ ID NO: 841652 - DNA, 621 bp, Homo sapiens
atcacgtgtgcttgtgctagagaggaactaaagggacagccatttcacgcagtgtaaggctgatttctccttaggtgctccccatatctagaagtatgacctgaatctttgtctactcratacccattgtcagctccatagttgtggtatcttgctgtatgttgatttagagcctgctcagcagtttggcagataccagctatttctcattggaatgttccgtgttttctctttcctcctaaagtgtgcctcttcactggccagtacttactacgtatcctctgtgaataaggaaataatctttcctatcaagacactagtgaacctgtagtcccagctacttgggaggctgagatgggaggatcccttgacaccaggagttagaggctgtgatgagctatgatcatactgctgcgtagaccctgtctctttttttttttctttttttttaaggggagggggggtgacactaatgagaaaaacgggactactgtgatgaatacaaataagcatatacttgatggaaaaatataaatctagttttctcacgggattgtgaaggagcggcaaggagaaacataatttttctagctaagaagagggccttaaactctagctatg

SEQ ID NO: 841653 - DNA, 500 bp, Homo sapiens
gtggggcctccttctgcgcagacctcgagggtggccaggaccccatctctctggggtctgcgtgcagacagcaggtctctgcatccacaccacgtgtgccctggcagtgcccgtccctgtatgcatgactggcacgtgtgaacacccgtgtgtgcacgtgagcctggcagcaacctggggcggtgaaccctcaggatgagcaggttgtgctggacaggcagcgcattctcctgcaacaggcttttaaaataattgcctgtgaccctgagcagtagctctctgtccgctggctgcccctgccccaggcgcctgctgccaggggtcactgctctgtccatctgcagagacttgggcacctgtgctgtacttggggatggggcarggagggcgggtgaggtggccccgtgggtggcctgaggctgggggcggtgggtggtgggtggctgattgaagggataattgcaggcagcaggccttagctaatgcatgctatgataaag

SEQ ID NO: 841654 - DNA, 500 bp, Homo sapiens
ctttgagaagccaaggtgggaggatcgtttgagtccaggactttgagaccagcctgggaaacatagtgagaccttgtctctacaaaaaataaacaaaattagcctggtgtgctggtgagagcctatagtcccagctactcaggagactaaggtgggagrattgctggagcccaggagattgaggcttcaatgagctgagatggcaccactgcactccagtctgggagacatagtgagagcctgtctcaaaaaaaaaaaaaagagagacagggcttccttcctctctctgtcattcactatgtgaggacaggaggagatggccatctttaaaccatgaagagggcctttacagggcactgaatatggtggcaccttgatcttagactttccagcccccaggactgtgagaaataaattctgttgtttataagctactcagtttatgatattgtattttgttataacagcctgaacagactaagacagtgcccaatacattg

SEQ ID NO: 841655 - DNA, 512 bp, Homo sapiens
acgtagaaatctgatgagtcagtatgtacttgatcgggcccactgttccagtccacgttgcttggaggaatcttccttcgcaccagctgtgatgctagctaaacccacttcctggatctttcttcaccctcatttttatatgtgtggcttccggaggtctcacttggcctttattttttgccatctgtcatgtgtccaatcacaatgtcccaaagaacctctttgacattgcctctgtagtggggacagtagatgcaataacacactcctatctttctatttgtttctttgtacattgagatgaaagactgccttgccttcttcatcagtcaacatctcgatatgtgctatgctaaaaaagatcccacccaaaggaaaactttggcaaatgtcctggaccccagctctgaaattaaagtttgatagaggaacaatctacaacttcacccttctagtgccggaggatccwctagacagaactaaagatgtagaccctgaggggcaagtctgac

SEQ ID NO: 841656 - DNA, 608 bp, Homo sapiens
ctcctcctgcacgatcctcctgctgcaagaattaaggcccctgggcttcgtgagttcctctgggttctgcttcctcacgtagctccgatttttaatctggctgtgtgctgtgggtaattggatcygccttaagctctaattactcagcttgattccctgggtagaagataatgtaccttatattggtgtcgtcttcttatttttgtgaaacagtgattattctgaagaggttccttggaataattcacaggacttaattaaggaatgcacaattgtgtacctttaaaaagtctgtaatggttctttggaaaaaaatcaccagcaagatcttgtgtggcacccagacaatatgggaggattttctccagagaagcccagcaggggatggggatgccaagggggtgttgaccttgtgatatcaccacattcaaggatctagtccttagatttgcaaacttatcaaccttctctccttaggttgaaggtattgtaacaaagctcatggaggctaactagactcgggggataaagcagagacctgagtttagatcaggcccaggttcggatctgcctctgccccttctagccatgtgacttaaatagataaa

SEQ ID NO: 841657 - DNA, 646 bp, Homo sapiens
aaggacattctttttttttttaactttaagttctgggatatgtgtgcagaatgtgcaggtttgttacgtaggtatacatgtgccatggtggttttgccgcacctatcaacccatyatctaggttttacgtcccacatgcattaggttatttgtcctaatgctctccctccccttgccctgcactccccgacaggaccaggtgtgtgatgttcccctccctgtgtccatgtgttctcattgttcaactcccacttacgagtgagaacatgctgtgtttggttttctgttcctgtgttagtttgttgaggatgatggtttccagcttcatccatgtccctgcaaaggacatgaactcattcttttttatggctgcatagtattccatggtgtatatgtgatgcattttctttatccagtctatcactgatgggcatttgggttggttccaagtctttgctgttgtaaacagtgctgcaataagcataaatatgcatgtgtctttatagtagcatgatttataatcctttgggtatatacccagtaataggatcactaggtcgaatggcatttctggttctagatccttgaggaattgccacactgtgttccacaatggttgaactaatttacactcccaccaacagtg

SEQ ID NO: 841658 - DNA, 646 bp, Homo sapiens
aaggacattctttttttttttaactttaagttctgggatatgtgtgcagaatgtgcaggtttgttacgtaggtatacatgtgccatggtggttttgccgcacctatcaacccattatctaggttttacgtcccacatgcattaggttatttgtcctaatgctctccctccccttgccctgcactccccgacaggaccaggtgtgtgatgttcccctccctgtgtccatgtgttctcattgttcaactcccacttacgagtgagaacatgctgtgtttggttttctgttcctgtgttagtttgttgaggatgatggtttccagcttcatccatgtccctgcaaaggacatgaactcattcttttttatggctgcatagtattccatggtgtatatgtgatgcattttctttatccagtctatcactgatgggcatttgggttggttccaagtctttgctgttgtaaacagtgctgcaataagcataaatatgcatgtgtctttatagtagcatgatttataatcctttgggtatatacccagtaataggatcrctaggtcgaatggcatttctggttctagatccttgaggaattgccacactgtgttccacaatggttgaactaatttacactcccaccaacagtg

SEQ ID NO: 841659 - DNA, 560 bp, Homo sapiens
gttgtattattcatcatcctgtttatcatcatcctaatcatcaaattgggatgaagtcagacataggtgctggacagaaacatgcagaaaacatttagatagctatgaagacttggacattctaatttttataagcctctccccaaagaaacacagtcagagaatcactgagcaacgtgaacaaatcaattttttagttactcaagaattctctttatccttaatcccaggtgactttccccttcgttcactccaccatgacggccatttgtccctcaaactcccactctccccttccctccagaacttctgacgccctcttaagtctcctccttacccttccttctcagctaaatgtcctcacaggaggcttttctcactccctccacattatttactctcacaacactctgtattcaccacaataatcacratggacacggcacacttttgcattctcagagcttagggaaatgaccagcactcaaaagtgtttgctgcatacataaccacaaaagtcattctatccaggcacagatgtagaatatgtggtttaccta

SEQ ID NO: 841660 - DNA, 634 bp, Homo sapiens
aatagagggtcctaagatgayatgtgaagctatggatgaaacaaaaaccccacattctggctttcaaagtcctctaccacctggtcattaacttccttctctccatctccaaatgttcccacaggtgtgcctcccctgaattcagaagctaccatcactgtcctgcaacagaatccttggccttcaaacttacttctgtggtttctcaaatggagggattttgttccactatctctatatcccagctgtctctgtgaacctactacttgacaagctgtcagcaaatgttaggcaaaaaacaataggacatgctggttaagagccaggctctggagtacacagacttggtttctcaccagtctcttccactcattatcaagttggtcaaatgctatgcctcggattcctaatctgcaaaacgatggcatattaaatgagttgtacatataatgctcagtgcctgagcagctaaataaaggttagctgctttttattaataaggtggttaataataaatgagtagatggaataaaagaatgaatgaggaaaacggtcagttcaatttctaagaaataacattagtttggccactctagcctacctaccccttctctagatttctataacacttatt

SEQ ID NO: 841661 - DNA, 597 bp, Homo sapiens
tctaatatcttggatttcctttatcacagtgacagtgaacatcaagattgttgaatgggtaaaactgtgttttcaggtatgtggcgtttaagataacttttaatcaaaagagtatgtaccyaccagaaaaattgagttttatacgtcattttcagtaagtttatctgctttattaaaaaaaaaaaaaaggttatctacttctgggatcatttttctttttaaaaaatgacttggcaacaatagaaataaaattcaaataagaatagtaattcttggagtattaaacaaccccctttattctatgaaagtgtctgtgactaaaggtgtgttaaacactgtttacaattcttttgccactaaacattaacatttccaccagataaagcacaatgattaaaaattgcaagctaaagaaactcaattcacatgatgccatttccagcaaaatttattttgatttattctggatagaaatgcaaataaatcttttcagcatatatagactaaagaagattgccatgagacttaaacatagttattataacacaggggaaaatgaataaaaagtgtattagcacagcggcttagaaaaagaga

SEQ ID NO: 841662 - DNA, 599 bp, Homo sapiens
taggagcagatattctatgagaatggaaaattagatccatggcctggctaataggccagtgtaagaatattggattttacactaaataaattggatgttggtaaggaaattgtaatatttggcttagaatttgtaaatgatttgtgtagctgctatgcttagaagagactaactgaagcaagagcagaagcagagagataatgtatggagttagagtatttcctaataaaagttaatgggtgacttggctcagaatggtaggcctagaggtattaagtggttggaatctggttatatttaagccatggtcaaaataatttctggatgaattgaatcaggtgtgtgaaaaaacaaaagagttaagtatatcataaaatctttcacacattttcatcctcctatccagactgcacttcaggttttctgcttaaaaattgcttcccatcaagtcctagaattctttctgagtgccttgagttaattatggttttgacatacatttttaaatggtttccattgttaamaaaatatttcaaatttggcataaccaaagctagtttatttttctaatttattatagtgtacacttcaagactaca

SEQ ID NO: 841663 - DNA, 528 bp, Homo sapiens
atatttattaaataaaacaatattcgtctgaacatatgtctcttggttttcagttaatagttcttggagaagtgttcctgactttatagtgtattagtcaggattctcctgagaaacagaggtaacaggaaatatatacatatgtttatttatttttaatttttgtgggtacatagtaggtgtatatatttatagggtatgtgagatattttgatacaggcatgtaatgtatacatttttatattttaagaggagatttattatgggaattgcattacattattatctagttcaagaaatccccttctatgctgtctgcaagctggaaaaccagggaaactgatgatataattagtctgaaggcgtaagaaaataggaaactgctggtgtaagtctcagagtctgaagatccaggaaccaggatctcttatgtccaagggcagaagatgtcccagctcaaagagagagagawatttcaccttttctccatgttttattctattcaggccctacaaagattggataatg

SEQ ID NO: 841664 - DNA, 529 bp, Homo sapiens
gcagaagacttattgtagaggcaaaacaataggtagacaaaactgttgcttctaaaatatctttcatgtcatcaatagcaagttcacatytacccttaagaatgtcactatttatacaagagataagttgtaaaaataatgaatacatttgtaatatttaccggatttcatgaaggacctacctttttgactatgaaataatatttataccaacacaattagagcaaagaagtgaccagtatattaaatacttgaatgttagagtgaaaatgacacccagtatcaagtatttaaatcaaatattgatttgaaattttagtcagtaatttttacaaaattcaattagatttggtaaaagaataatcaattcacactttgtataatatcaggaattttccaataataaattatgtaatatcaaattattacccttgtgtttatttaaatattgaaattgatcactgtgttgatcaatatgttgactacattgtgatcaatttgtgcatattttatcactgcactgaatctg

SEQ ID NO: 841665 - DNA, 612 bp, Homo sapiens
cagagttctattgacacttctttcacatttagtgagacagagaagtacaatgtcaaactaataaatacattttcttggcagcttatcgtaggaaatgtaatttgcaatgttattccgaaaacttgcaaggatttatctaaataagaattgctttttattgtatttttttcccacaatataacataatcctctcacttaaaaaaaaaagtattattgtacaagaaagtttcaagaacagcatcaaattacccataatgtccccacccagatataatcattgttttcatctgtttttcatctaatatttaattcatttttctatcttttacatactagtgaaataaatatctgaacgttttaaagccttttaaaacttgttttttaattgctttctaaaaaagataaactctctagcaatagagtgtatgtttctctgtacatggttcacagtatgatcaatgaaaatcagaattataatgttttatgtattttccattttgttgcatttaggtagttctatttatttttcttgtatttattttgawacattgcaatttttttatatttaaagtgatcaaatttgattttaatttttaaagttaattatattac

SEQ ID NO: 841666 - DNA, 656 bp, Homo sapiens
aacattggctgggtttccagtatgggccaacccttaatgtgtgaagtcttgtgaaactgaccttgtgcgttcttctatctgtcagccaggggtcagggtagaggcaacactgctctagcataagtttgtctagtctccttcggctatttctatggtataaattgtgtttgcttcctacatttttcagtctttctcttttgaatctcaaaactctgttttggaaatcaagaaaatgaaacacagactctttcttcttttagttattttttttaagagacagagtctcactctgttgcccaggctggagtgcagtggcatgttcacagctcattgtagcctcaacctcctgtgctccagcaatcctcccatctcagccccctgactacctgggactataggcacacaccaccatgcctggcttttttttttttttttttttttaatttttgtaggaacaaggtctctctatgttgcccaaactgggtctccaactcctggcctcaggcaatcctcctacctcagcctcccaaagtgctaggattacaggaacaagctactgtgtccacccttttcttttagttgcctttatgacattcccacttctttttggagtagcagggatgcgtctgatrgcctcggggaaaataaattgggaa

SEQ ID NO: 841667 - DNA, 606 bp, Homo sapiens
tgtttgaggaggctgaagataggatcccaatcccatctggctttagggtttctgctgagaaatctgctgttaatctgataggttttcctttatagtttacctggtgcttctgtctcatagctygtaagtctttcctttgtcttaacttttgataaccctatgacaatgtgcctaggtgataatctttttgtgatgaatttctcagatgttctttgtgcttcttgtatttggatgtctaggttgctaccaaggccaaagaagttgtccttgattatccccccatatacattttccaagcctttagaattctcttcttcctcaggaacgtcattattcttaggtttggtcatttaacagaatcccagacttcttggaggctttgttcatatttacttactcttttttctttgtatttgttggattgggttaattcaaagaccttgtctttgagctctgaatttcttttttctacttgttcaagtctattgctgagactttccagagcatttcacatttctaaaagtgtgtgcaaagtttcctgaatttttttgtttttcctttcagctacctatttccttgaatatttctcccttcgcttcttgtatc

SEQ ID NO: 841668 - DNA, 626 bp, Homo sapiens
ttctcttcttcctcaggaacrtcattattcttaggtttggtcatttaacagaatcccagacttcttggaggctttgttcatatttacttactcttttttctttgtatttgttggattgggttaattcaaagaccttgtctttgagctctgaatttcttttttctacttgttcaagtctattgctgagactttccagagcatttcacatttctaaaagtgtgtgcaaagtttcctgaatttttttgtttttcctttcagctacctatttccttgaatatttctcccttcgcttcttgtatcattttttggatttctttgcattggtctttgcctttctctggtgcctccctgattaacttagtaaataaccttctgatttctttttaggcaaatcagggatttctttttggtttggagccattgctggtgaactagcgtgacttattgggtgtgttaaatagccttgttttgtcatattaccagaattggttttctggttccttctcatttgggtaggctctgtcagagggaaggtctagggctgaaggctgttattcagattattttgtcccgggggtattcccttgatgtagtactctccctccctttcctatggatgtggcttc

SEQ ID NO: 841669 - DNA, 671 bp, Homo sapiens
caaacaaaaaacaaaaacaaatcccttggtgtgtttgtgaaatggcaggcagtttaggtgtcctggttcaaggtatagagagtgtgtgggaggggtcagcaggtgaggaatttagaaaatagaagagctsgagggaggtcagaacagctgagcagacctgagttagcatatggggtatcaagtcaaagccagtgcacaacgtggagctcaaacaataaaaaccaatggaaagctattaatgggttcaatggaggcagactggtctcccttaaggttttctttttttttttttaattaaagaaaaaatcaccctggaatagaatggaggaagaattataggggtaaaaactagagtgggaaggaaagttaagagaatattgagagaaacaatgggggtttctgaagcaggaacaacggacaagggagaatggatgacaaaaagaacaaggcagatattgatatactcgtgctataggtaaacagattgaagctctaaaaaggtgattcgcccatgatcacacatgggtccctattgacttcaaagccaagatgggcttccagctgtattcccttgggtggggccacattcacctagagcaggaggaccacttgcctagtcacccagtggcatttagtagcttggaaggtgtgctcaaagacaacagtctcaa

SEQ ID NO: 841670 - DNA, 575 bp, Homo sapiens
tgggtgtgggaccctccgagccaggtcgtgggatataatctcctggtgtgccgtttgctaaggccgttggaaaagcgcagtactagggtgggagtttcccgattttccaggtaccgtctgtcacagcttccctttgctagaaagggaattccccgaccccttgtgcttcccaggtaaggcgatgccccgccctgctccgtgggctgcacccactgtctgacaagccccagtgagatgaacctggtaggttggttggaaatgcagaaatcatccatcttctgcgtcgctcatgctgggagctgtagactggagctgttcctatctagccatcttggaacctcccccactaatttttctattttttgtaaagacagactttgaccatgttgatcaggcctgtctcgaactcctggcctcaagtgatctgcccaccttggcctcccaaagtgctgtgattacargcatgagccaccacacccaacctcatgaaacttctgtcagcactaacattcttccttgagtgagtttcttaatcttgggttctaatttgattgcactgtggtctgagacactgt

SEQ ID NO: 841671 - DNA, 618 bp, Homo sapiens
ttaaagcttagtgccaggacagwgcttaatgctaagcccagttctggaatttttaattcaaggaggttttaaaagtgtgtctgagttgataaaagaaaaacatcagcctaattacatttaaaggagtttaattgagcaatgaacaatttgcaagtcaggcaggcttttgagccaggagaggctcagagactccagtgcagccaatgcagccacgtggtggcggaagatttatgaacaggaaaaggaaagtgatgtacagaacatggaagtgaggtacagaaacagttacattacagctggcatttgccttatttgaacacagttccaacagctggctatatttgattggccaaaattctgtgattggcataagtagaggctacggtctgtttacacctccacttattatattcacgttgtgtggaaaaacctttaggccaaacttaaaatgtgtaaagggacatctttaggctgaacttggtttaacagagttatttgttccaactcaacatttgctaggctatgagctaggtgctaggcatccactctcttgtttatttctctgaacatcttgtcaggtacattttattatttttattttacagataaaagcaaaaa

SEQ ID NO: 841672 - DNA, 445 bp, Homo sapiens
aatctttctgccatccttccccaaggagacctttggcctttcacctgggtaactgtgtaatggagaaaaggaaatgatcagacatttcagaaactacyggacactggctctgaactgacattgattccaggggacccaaaacgtcattttgatcctccaattaaagtaggggcttatgaaagccagctaattaatggagttttagctcaggtctgacttacagtgggtccagtgtgtccctggactcatcctgttgtcattttcccagtgccagaatgcataattggcatagacatgcttagcagctggcagaacccccacattggctccctgactggtagggtgagggctattatggtgggaaaggccaaatggaagccattagagctgcctctacctagaaaaatagtaaatcaaaaacaatattgcatccctgaaggtattg

SEQ ID NO: 841673 - DNA, 609 bp, Homo sapiens
ggtgcagccacatgaataatcattacgaagtattctctatgtcctattatatacttgaaacatttcacatgaaaaggcgttttgctcctgcaccccaawagactgtattgcaaatcccactttgaaagcttgtggaagaatttaaccactctattcatttgcacgtagaacatctgcagtgcctgagcaaatagattaatgaattgataagctacaatttttgctgtaaatttagtctttatatgcgatagctagatatagatgagcccatgctttcactctccaaaatgctactttatcttacaaatcacaaaaccttatttgattatgttttttgcctggaccaaacaaaggatgacccatttgtaagcttagtctcaaaacataaaagtggtttcttttctaagaaatgtattaaataaatactggtattaattatagcaaaaaatcatgagtgcattattttctgataaacttgtgacaattttatactattggagtttgcagccagtacaggaggggtagacaatattatttactctcacttgtcaaatgaaagtgagaggctagaagtttgctttattgccacaaggcaagtcagttgtcact

SEQ ID NO: 841674 - DNA, 613 bp, Homo sapiens
ctccgaagaggttggattgacaggtttaaagagacaaatcatacagtacttttttgccacataatatctagttagagcagcaagcccttccatttgcaygctatatttcttgataatatatcttacaggcttctttattttagcccaggcatttctgcctctgcaatccagtcttagcagtaggactaatatgaccttcacatatatcagaattgagtcaggcaatatttaggtgaaaaggtaaactagtacacctaccagaaaagataaatattaatttattgcatctctgacatgagaaaaaaagcctttatgttttactgtttttttctaatttttctttttctttttttttttttttttttcacatgaatggaactcgaaaaaggcctttattcagccattgtgatacctgggaccatataaaagtaatcaggattaagcttttggagaaaatgtgttctctaaaaaggagtggctacctaattggtgtctctatgtcttagatgtttttgtggagtctaattgacataacctttactctgagtcacttggcttctaaggaaatgcaacgtaccatttttaatgagttgcaaactgcctggctgcccca

SEQ ID NO: 841675 - DNA, 584 bp, Homo sapiens
cacctaggattcagggccctggaagagttagaggtaaaaagaacaagataaattatttggactctaaaggcaaaatttaagtgtcatttgctccataaaatctttcactatcatcccagtcgacctacacagatctcattcaaattcctagacgttttctcttccattcatttggaacatttaggaagctgatttttaatgctggctatcataccaatttgactgccttatatatttaactagatcaataattcttcctggaagaatatttttcacacacacacacacacattcactcacttactctctctctctttctctctctccctccctccctccctgcttcatttgtagccatccacagaagttaaaacaataccgttcccttttactcattattcagtgattagaaggtaatacttagagccttaagcaagaggttggcaagcatgatcctggcaggtgtgacgtcaaataaattactttgtcttcaaggcttcatttcccttaaagtggacatwaaaaatgctataggtttaagaatgatgattccaatgcgtacatagtgatcagtttctgcgcaa

SEQ ID NO: 841676 - DNA, 655 bp, Homo sapiens
gccaatcattatatacagggaaagctgagtccagaatgaaatcttcagttttccagctcagtttttttctactgcaaaatcaggcccgttttcccaccatcagctccakaggcccatggatgtgctgaattactaagcaagtgatggtcagacaccaaggatgtcatgtgaacctgatggagacatatcctttatggtacttagaatagtttgctggttgacttatacaacaataaataagtgatttcaaattccttgtctctttttattgttttttacttaaattctattttgtctgatgtaagttaattatcccagctctctatcagttcccatttgcatgggtaaactttctccatcccttctctttcagtttgtttccttactagtaatatgagtctcttgtaggtaccatgtggttagatcttgttgtttttgttgttgttttttccattcagccactctatatcacacaatttgctcccagcaaggcaattctgagaaactcagtttccacttggtttactgggcattggtctgaggtttaattctaaaatccctctcccacaaggatagccaaaagtagctgatttctggttacccttccaatttctctgacactctttctagtcacacctctttttttttttttttt

SEQ ID NO: 841677 - DNA, 641 bp, Homo sapiens
tttaattatgttccagctgtggatcctaggacccagacagaagtgcarataaagtctgacttttcagcttctagctccatgagtcccaggccttacctatgtgtaaagcaggcagtatatgaccttgcaacatttagcaaacctggtatctaaattatatgatttagacaacctatttgcattttgatgacacttgccttttactaataatccttcagactatttttatttcttcaagtcatgtgaactaaaacatttgattgaagcacttatttttctttaagccaatcaatcagagctctttttatagacatcacacacagcacatatatagcaacactaagaaacagaagattcagcacttgtaagatttttcacttggtagtctcttaattggattactggctttagggtggagcccttgaaggaacagggctatgtagcatacctaataaacagacgcagctgaaggcaaaggcagatccctaaaattaagggtgccattttatacctgatcttgggtccctaaaaggagggagatactatgggagaagacagtgtagtggttctatcacgtatttcactgcaagggaacccaaagccaattggcttattctgtaatgagcccattccccatggga

SEQ ID NO: 841678 - DNA, 464 bp, Homo sapiens
ggatcctaggacccagacagaagtgcagataaagtctgacttttcagcttctagctccatgagtcccaggccttacctatgtgtaaagcaggcagtatatgaccttgcaacatttagcaaacctggtatctaaattatatgatttagacaacctatttgcattttgatgacacttgccttttactaataatccttcagactatttttatttcttcaagtcatgtgaactaaaacatttgattgaagcacttatttttctttaagccaatcaatcagagctctttttatagacatcacacacagcacatatatagcaacactaagaaacagaagattcagcacttgtaagatttttcacttggtagtctcttaattggattaytggctttagggtggagcccttgaaggaacagggctatgtagcatacctaataaacagacgcagctgaaggcaaaggcagatc

SEQ ID NO: 841679 - DNA, 641 bp, Homo sapiens
tttaattatgttccagctgtggatcctaggacccagacagaagtgcagataaagtctgacttttcagcttctagctccatgagtcccaggccttacctatgtgtaaagcaggcagtatatgaccttgcaacatttagcaaacctggtatctaaattatatgatttagacaacctatttgcattttgatgacacttgccttttactaataatccttcagactatttttatttcttcaagtcatgtgaactaaaacatttgattgaagcacttatttttctttaagccaatcaatcagagctctttttatagacatcacacacagcacatatatagcaacactaagaaacagaagattcagcacttgtaagatttttcacttggtagtctcttaattggattactggctttagggtggagcccttgaaggaacagggctatgtagcatacctaataaacagacgcagctgaaggcaaaggcagatccctaaaattaagggtgccattttatacctgatcttgggtccctaaaaggagggagatactatgggagaagacagtgtagtggttctatcacrtatttcactgcaagggaacccaaagccaattggcttattctgtaatgagcccattccccatggga

SEQ ID NO: 841680 - DNA, 608 bp, Homo sapiens
ttggcaaggggtgctggtctctggagctcttgagagagcttgaggaaggaagcatttgcctcaggtgctggtgagtgaggcggacactgaggagtgctctgagtgtggggagtaaaacaatgtgaactccaggttgaaacctggagatgccctcaaattgtgataaatggaaaataaagtatactggacatgacttggtgcagagagagcaccaagcaggctggctgtgcatctgaggggacaacaaactagggctagggctgctgctagtgggaaccacgtgcctggacaccaaggcaggctgggagatccctcagtccaagaccagcaggaccactgtaattgctgttttctattgccatggttttcattcgcgaacgcaggatgggaaatctgtaaggaatccaggatgatttctgcaaatatttccttctgggatgcttgcattcaggccccattagtaacagaatgctggttactctagagttgattaycagccacagcaaaagtccactcccctatggaaaccaccctcgattcaaggcccgagactgcaggatcataacaagaccagtggagatgtgcagggcaagtgatttattaaagca

SEQ ID NO: 841681 - DNA, 600 bp, Homo sapiens
attcaaaatccatgctaagagtttccagagtgttcatccctcaacacttatcatccatgtcatggrgaggtagagagtaatttccctgaatagccagtggtctatgggactaacctttcatttgggaaagacagatctggaaagcgaacccagttaacagtcaaaaacacattcgtttcataagaggaaagtggaagaaagcccctgaagagaacaatgaaggaaagcaggtacacgtttgccaaggacattaacaaacaattgctaatgtgtgcctgaaatctgatttccttcttgatgtattaagataatgcattggcagctcacactatacatggagagaaatattcatattaatttaagacgttctcatagtttcaaaggtagagagcccctcagtgtctgcacaggtagaatttaggaaaatgttcagcctatgtgagagctatagtgtggtagaggttgtttaatccatgccaaattctttggacgtgattttctgcctgaaactatagtcttctttgcattttgctggcccaatgtcatcaagtttcacacaaagcttggaaaaatagcccacaagtgtagttggatcagcct

SEQ ID NO: 841682 - DNA, 505 bp, Homo sapiens
gtcatttatagtagcaataattcatattctaacttagctttacctcagcaactctttctccccttacttttagtctcagtactacaaatgcccgcatgctttctccccagaaccgaggccttcatatttttctccctaagctgtatatgtcttacaaacttgtaaaatgaatgtaaatgaatgtaaaactttccccttgtttggtgaagaacaagaggatacacccattgcttgagcatacatctccctcagtctctctctttttttttagaatgcaaagtattttctttttaaacttttaaaatctgaaaacaagctagcctatgttaaataacatagtttccaaagctgaacgtgctcacttggagcccagttttctgcttcaaatacaaacacaacttcctgacactcctaggtgggaacactactgtttgacgatctgtgattagatgaactgatygatctcagtgggtaacattcctttattttttccttggtaaaggtt

SEQ ID NO: 841683 - DNA, 406 bp, Homo sapiens
ttctaatccccaatatgatggttttagaaggtgatttgggagggaattaggtcatgagaatgaagccctcatcaatggggtaagtgcctttataaaagatacatcagatagctctttcaccgtactttcaccatctgagaatatgagaagtcagttgtctgcaccctgaaagagggtccttaccagaacctgactatgctggtcccctccctgatcttggacttccagactccagaaactgtgagaaataaatatttattgtttaagcctccccatctgatataatttggatatttgttccttccaaacatcatgttgaaatttgatccccaatgtwggaggtggggcctaatgggaggtgtttgggtcatgtggatggatccttcatgagtagattaatgccctc

SEQ ID NO: 841684 - DNA, 541 bp, Homo sapiens
tatcaaagcagatatacagaccaatggaacagaacagaggcctcagaaataacaccacacatctacaaccgtctgatctttgacaaacctgacaaaaacaagcaatggggaaaggattccctatttaataaataacgttgggaaaacyggctagccatacgcagaaaactgaaactggaccctttccctacaccttatacaaaaattaattcaagatggattaaagacttaaatgtaagacctaaaaccataaaaatcctagaagaaaaccagggcaatacaattcaggacataggcatgggcaaagacttcatgactaaaacaccaaaagcaatggcaacaaaagccaaaactgacaaattggatctaattaaactaaacagcttctgcatggcaaaagaaactaccatcagagtgaacaggcaacctacagaatgggagaaaatttttgcagtctatccatctgacaaagggctaatatccagaatctaccaggaactcaaacaaatttacaagaaaaaagcaaacaaccccatcaaaa

SEQ ID NO: 841685 - DNA, 541 bp, Homo sapiens
tatcaaagcagatatacagaccaatggaacagaacagaggcctcagaaataacaccacacatctacaaccgtctgatctttgacaaacctgacaaaaacaagcaatggggaaaggattccctatttaataaataacgttgggaaaaccggctagccatacgcagaaaactgaaactggaccctttccytacaccttatacaaaaattaattcaagatggattaaagacttaaatgtaagacctaaaaccataaaaatcctagaagaaaaccagggcaatacaattcaggacataggcatgggcaaagacttcatgactaaaacaccaaaagcaatggcaacaaaagccaaaactgacaaattggatctaattaaactaaacagcttctgcatggcaaaagaaactaccatcagagtgaacaggcaacctacagaatgggagaaaatttttgcagtctatccatctgacaaagggctaatatccagaatctaccaggaactcaaacaaatttacaagaaaaaagcaaacaaccccatcaaaa

SEQ ID NO: 841686 - DNA, 421 bp, Homo sapiens
cgtaatgttcactcgaccggggctcacttcctcctgaatggcccagttcctaacagaccacagaccagtattggttggtggctcaggggttgggaacccctgatgtagctgatacctgactcctcaggagacaggcttttggaagcaaactggaacaccaaatagatgcactcccacagatgttgaagttggaagagaaagaaaaacatctatttttctgctgctgtttctgctatgagagatggtagctgcaggcagactcaccattcttgtgtcaagacaatgactttgggagtatcacacatcattggtagtgatgtggtggtggcagtgacaccaaccactatttcctgacctctggattccagctatgtgcgtgaccttgaactggttaaacygaactgtggatccctgcctcatg

SEQ ID NO: 841687 - DNA, 512 bp, Homo sapiens
gacagataggggatctggagggtttcgttctccaggmcctaaccctgtggctggtatctgtgagatttatatgtgaagcctggtatctctcaaaggtttcaaaggaaagaggaggagaaaagatgtttctgctattcctttgtgcctagctgagtaaataggaaaggtcctcgtcgcagccttgccaaagaaatagaattctgttccaggagtcttgggaagtgtggagtcagggtcatgctgctcctcattgtgtggcagtgactgtggaactgtggatcgagtggatgactcagttttccaagctcatatcacctccaggtagctgcccaacccagacagacccccaactcactggcagaaacacttccaactctgaattgctcccttcaggacctccaggtgtgttccggaacactgcatctttgggtgtaaacacatttggaagagccatccctagaagactcagcctggtgacctggcacgtgactcactttgaaggcagtgggagg

SEQ ID NO: 841688 - DNA, 609 bp, Homo sapiens
atgtttcactttggaccactcaagacgcccatgtggagaggaactgaggcttccagcttagagccagcaccaacttgccagctgagtcagctaactagaatgggcatcttccagtcccactcaagccatacagwtttcagatgatgacaggctcatattaataattttttagatgacagatatgttaatgaacatatcactacaaccttatgagacactccaagtgataacagcccagctgagcctttctcaaattcttgatcaacaaaagccaagagaagtaatattgttgctttaatacactaaattttggggtattttgttatacagcaattaataactaatatattttctcctacaatttatcattgcacaatgatgggcatgaagcaaacattaccttcagaagatttggattcagtggcatctaatgtgcatgaagggccagtggagaactttaaagtcttttatttccataatgacaatcacagcaaggtgaaagtgggcagccgatctgggggagaatatttagcctcagggatttataacctgtgctatggtttgaatgtttgtcccttctaaaactcatgttaaagtttaattgccgtt

SEQ ID NO: 841689 - DNA, 567 bp, Homo sapiens
ccaagttcttgtcctgcatccaggaagaatgaggtacgcagactagtaaagggtgaagaagatgaagaggagctttattaagtgtacgacagctcagaggagacctgcagtgggtggctcctctctgtaggcaggttgtcccatcaagtatcaagctctcaccagagaggaagccctggagagggttgttcctctctgcagctggtagtaccgacatctctgcaggtctctgaagctcttagcagagagggtagttcctctctgcagctggttttcccattgtctctctgtcctctccatcctctgcttgctctggctgagctgggggcttttatggacctcagaggggaggaaatttgtgcccattggtccatgggcagccatgggagctggaaaaggcaccgcaagtccccactctggtctgtgggactggcagcccagcccccagccttcagcsccttttggtggtcgggccagcccttaccggtcccaagaaactgtctgcctcctgctgccgttcatggaactcaggcttggccctgacttctcccagattggaatgagtgt

SEQ ID NO: 841690 - DNA, 642 bp, Homo sapiens
cgctcggctgggtcttgtgtgtctttcttaccacttattcaagacaattcaaaagtttggtggaaggatgtataatcaagaaagatagttgctgaattattttaatgtttttaatcrgtgaaaaaaaattcagttctgtgttaaatgttgtatttgtaaaggggcaaaaccagagatattaaattgactggaagttcatgattttctttctttttttttttttgacagagctcgctctgtcgctcaggctggagtgcagtggcgcgatctcggctcactgcaaactccgcctcccgggttcccgccattctcctgcctcagcctcccgagtagctgggactacagactcccgccaccacgcctggctaattttttgtatttttagtagtgacggggtttcaccacgttagccaggatggtctctatctcctgacctcgtgatccactcgccttagcctcccaaagttctgggattacaggcgtgagccactgcgcccggccgaagtccacaattttcttaccctgagtgtggaatcaaaaccttgcttagagtctaaataactctagctatcagcacaataacaaattgaaactcatttttaaaaccacttgacatctgaactttaaataaccttctatatt

SEQ ID NO: 841691 - DNA, 604 bp, Homo sapiens
ccatgtcatctctaatatttgatgctgtcagtcttttaattttagacattttaattgggtgtgtattgttgccattttttagtgaaaaatttgattttgttcatgactaatgctgtgaaatagcattttatttgttcactatttgtatatcatcttttgtgaggtttctgctcaaaatatttgtatatttttattggattaggtatcctaattattattgctgagttgtaggagttcattttacatgcctgataacaatcctttacatgccttttgttttcttctattgcattcttcattgtcaaaaagctctagtataatattgatcagagtggacatccttaccttgttctcaatcttacacaaatataattactatttccacattaattatgaggttagccagaggttttccatactagcaatttaacaaattgagaaaatgtctgtttccagtttgataagaagtttaatcattagttttttattaaaaaatttttttttgcwaatattgataagatctcatgatttttcttcttttttatggtaaactgaaaaattatccttctccatgtttatggggtataaactgatactatgtttt

SEQ ID NO: 841692 - DNA, 608 bp, Homo sapiens
catctgtttcttggtttgacattttatgaaagtgtcaattaccttctttagaagatctcagggggccttgccctactcacaactgaataattagaactaaatattaagatactgtactctctatataaatatctgtacatgggtgatgtgagtatataggagaaagacacaatttaataaactctgagaatatcataggcaccaggctgaaaactacctatagttttttgggtttaaatacattatcttttttttattttttgttattatactttaagttctagggtacatgtgcacaacgtgcaggcttgttacatatgtatacctgtgccatgttggtgtgctgcacccattaacatgtcatttacattagatacatctcctaatgttatccctcccccttccctcaaccgcacgacaggccccggtgtgtgatgttcccttcctctgtccaagagttctcattgttaaattcccacctatgagtgagaacatgccrtgtttggttttccatccttgagatagtttgctgagaatgatggtttccagcttcattcatgtccctacaaaggacgtgaactcatccttttttatggctgcatagtatt

SEQ ID NO: 841693 - DNA, 547 bp, Homo sapiens
aatagaaaaaaaaacctacaattcatgtggaatggcaaaataagctcaaatagtcaaggtaaccatgagtaaaaagaataaagctggaaatrtcatactatttgatttcaaactataatacaaagtaatattaattaaaacagcaatacactggcataaagtagacatattaactaatggaacaaaatagaaagcctaaaataaactgaacataaagagtcaattgattttaaacaaaggtgccaagaatacacaataaaaagggcaatatcttcaataaatgatttcgagaaaactggatatccatgcacagaagaataaaattgaacccttatctcaaaccatacacaaaaatcaattcaaagtggattataaagactttaaaaaagatgtgaaatggcaaaactactagagaaaaacttagggggaaactacacaacattggtctaggcaatggttttctcgattagactccaaaagcacaggcaaaaaaagcaaaaatagacaaatgggattaaaacaaaatgaaaagcttttgcacaacaaa

SEQ ID NO: 841694 - DNA, 483 bp, Homo sapiens
acgatttgaaagcaacctagcctaacttaaccctttatttattgcctaaggaaacagagtccagtgtctcagggcctgcagagttacattttgaagkcttaccagcaatgaggctctgtgtctgttccctgagacactgggttctggacactggtagactttcaggacccctgtgatggaaatctactgcctccaacctgttttatcacgttgtgggtaattgttattcttccttcttaatgatggatataagaatatatttataaactccaatttcactccgataaacagaaaataatctttttctccttcagaaatgacgggatgaaggatagtgctgggatggtgaatggggcagagttggcagtttaagagtaatcttcctttacatgaaactccatctgctttctgtggcgtgttctgccataggtagcttttcccaacagttttcgtcagtttctcctgtttgtgattactcctttt

SEQ ID NO: 841695 - DNA, 637 bp, Homo sapiens
gtttggggagaaataaaaaagatccactcaaattattccataattagaactaaagttttactaaggaaaaaaagtatggtggaaaaagcataaagctgggagaaaccacttaaattgcctctgaattctatacctccaattcaatgtagttgtctagagaacagaactgagatgctcaagaggctggaggtactatcctctgaagacagattggaaagcctggactctttcatctagaaagaaggaggcagagcagatacgtgcttgaagtcactaatgtcaccagtggtctctattgagaaagtacaaggctattttctgaatcccacagtgctgattgaagagaactcccattgaagcctggaagaggaagacacatttagagaggtcaataatccaataggtggtaataactaatacgtaaattgatttaaaaagataagttaaattcagatatggattcctgattttggtattaaggtgggcagatactgctcttcatcaacatctcccttagtgtttctrtcagagctagacctataacctagatgcaccaagaatatcactcactgtagatatccgtatgtctttatattctagctggaaatagcaattttatgtctcaccaccttttaat

SEQ ID NO: 841696 - DNA, 599 bp, Homo sapiens
ctgggagctttagggatagatatcatcagtattggaagacttctcagcttacagtggaaagtactgaaaaattaactcagaagcaactacctacaagcaagtgttctgtgataacaggtgcctctttgtgtaggaaaagagacacaaactgaccctataggggcaagggttggggacagagtgcccagcatgtaggtctttcagaaggcacaggactgaggtcgctcagggaagaaattacagatcacttcctttgttatttatgcctaaaatagcttcttgtgaccttctaaaactcaagaggatacaatttaagcccaacatggaaatgtccaatatattggcgttgttagataatgtactcagtgggtaaaatagtgaagcattctctttaagcaagcactcagcactcatgtgtctcctgtcactagatacactcagctacatgcctgtattttaatcagagatttacatacaaccaaagattgcagatggtcttaggttcttatcttattctcccaagaaatgttagcargatttaaacatctgggatttgtgtcttttggcaaaacatagagataaatgcttttcatttttgt

SEQ ID NO: 841697 - DNA, 579 bp, Homo sapiens; identical to SEQ ID NO: 814733

SEQ ID NO: 841698 - DNA, 677 bp, Homo sapiens
aaaaacaagtcattgctatctcaatgttaaagttggaaaatatgaaacagagtgatataatgctttccctgtgaaaagaccactggtgatttctctccccaagaacgacgccatattcaccccagccacgggcagtatttttagcatctatagattaacaaggactagaggaatgaaaatagatgaaataaattgaattaaaaagactacagtaggccagaaaatatatgatttcaactatctgaattacatatacagataggaataggtttcattttagagttaatttaactaataagtatgtgaaactaaaaagaagaaaattgaagacaaaataattttaacttcctgatattaaatgtgtcaggtagtagtaggatctattggagaaaaataagcaaccataatataacgactttgtaattaaactataaagtacaaaccgatttaaaaaaagacaggaaaagaaaaagtgcatattttctagactaagtattgggaggtttcagatttaggtgattgtaaatttaacaagacttgagtaatgaaatttggagaatcttttactgtagcataatatgattaacagaatttttmaatggatcattgtcctaataaagttaagaacaccaaaaagtaaatcacatacccacagcatgaggataaagaaatcactc

SEQ ID NO: 841699 - DNA, 571 bp, Homo sapiens
aattcccttagatttcgttggtgggattgtaggtaaatccacataaagaaaatagataattctcctacctttctggactccttgctaaaccgctctgtgagaaattagttactgactaaactttgcaatcaattgaaacttgtctaggcacacacatttatagatgtgtatagagacaggcttgttttggcttttgaagagagaatgtgaattatgagttggaggatgtgaattttggtgggagctttgtcactgtgaccttctgcttacccttaacgctcccatctgtgaaatgaggcctttgtacaagacattatgacggactcaccctaacaaggattctttaatgttgtgtttttcaagatagaaaaggagtagaggaaactgaacatcaactctgagtacaatccatcctctctcaccactttatggaacaattttggaggtcatgtcaagtattcatttaaagaaggaatgattatattgcaaattaaaccaaataaacagtcactgkcatcttcaaggagaaggaagtttagataacctcaattaaaaacaaatcactatgaat

SEQ ID NO: 841700 - DNA, 499 bp, Homo sapiens
ctcaaagactgctctattaatgttcattttccctacccattcagcatccctacgtgccaggtgctacacatttagaagtggccaggacggggtccctgtgctctygctgctcagaaaatagcagagagaattagacattcaccaaatcatacaaatgtatgtaaaattacaacacagagcatgttgtgaaggggtggcagagctgtaatcaggatagctgaactgcagggggagttcaagagacccttccttcctgaactgatggctgaactgagatctgcaggcgaggaagatccacctggggagccactgaaaggccttctaggcacaggaagcctcctgtggctggaggcaatgtggccttgctgggggagcagaatggggcctcatggttgaggtgagtgggctcggggagaatgggggagaggagagaggaagaggcagggctgcaactcacaagactttgtacacatgtggaggaggctggcatgctccctgg

SEQ ID NO: 841701 - DNA, 643 bp, Homo sapiens
ccaggcacagtggctcactcctgtaatcccagcattttaggaagcaaaggtgggcagaccatgaggtcaggagctcgagaccagccagaccaacatggtgaaaccccacctctaaaaatacaaaaattascctggcgtggtggtgtgtgcctgttaatctcagctacttgggagactgaggcaggagaatcgcttgaacccagaacactgaggttgcagtgagctgagactgtgccactgcactcaagcctggatgacagagtgagactccatctcgaaaaaaaaaaaaaaaaaaagaaagaaagaaaaaagagtttacatgacccccaacgatacacagctagtggtacagagcccttaaaatcagaagaacaagatggaagggaaatcagggagattcaaagtatgaggaagatttgacctactcttgttggcttgaagatagagtgggtagtgtcaaaagcatgagaagaatatgaattctaggacaaccattgatttagggaaaaatcccacactccagatgagaaccacagcatttgttgacagtttgatttcagccatctgagaccttgatcaaccatgccatgttggacttcagaactatgaaaacagagctcataaacagattttgttataaata

SEQ ID NO: 841702 - DNA, 533 bp, Homo sapiens
catatttgccacataggccaagttttcatttaactttgcctaataacctgaatactgtctttttacagtttgcttgaattaaagcttttatttgtacgttttggcttcttccctcagcccaattttkttttgtttttgaagacctctcatctttctactctgacggcccttttgtcacagttcttccccttatctctgctggcattaaagtggctaaagtcattttggaggtccaactaagagaagttgataatgtggacacagtaaatttaggattagtgaaatacatcttaacggttcgtaacaattaccaattacagttaggctgctgctagccagccagtgtaggtacaggttcctcgagaacacctcgctgtgctgactcatctgcatcttgaaataaaagggcagaatcagattttattgtcatatagatgtgccctatggtgcccacctctggacttatgcaggcagaagagaagatgcaaagaaagacgtggaatagctgaggttggaaactatgtggactacac

SEQ ID NO: 841703 - DNA, 493 bp, Homo sapiens
tagggccttaaaaaaaagactatatattattttctactaaactcataattccttggttatgtccacctctaatgcttatataccatggaactaagaggccactgaccagctcagagttcaaagcagagtttctaaatatcgctagtaacacataagagtcttgaaaagcacttttttgtttatttctttagacattttaaagagtttctgaaaatgtttaattcccttaatatttcaagagtccaatctggtaactaaattacagtttaactttaggccagtttgaagaagagcaattagagaaaatgtcagtgttcctgccaccagctgcaaccttcatcaccattgctcttctgtgagactgcagcttgaaagggaarggcttggcaatatctatataaatatagggaagtaaatattaactgaagataattgtttttttagggcacactgtgaggaggctacatatctttggaaactgagattgtggata

SEQ ID NO: 841704 - DNA, 606 bp, Homo sapiens
ttagcaagaatctcggaaaaggaaaaaaaaaaggcggggggsccaggactccacagccttttcagtctggttctacaaggccacggttgctgtgtaaacttgctgtgaggggaaggagggccagaagcaggcagccttaggcagaaatggaagccaggaaccccagggagcacagcaggaagatgaagaaaaaaatccagcaagagggagacaccctcctaggccaccccaagccctccgggtgaacggagagcagccctaggaaagaaagtaaaaagaagccagttaaaattgaggctccagaatatatcccagcaggagatggccttcaagcccagtgaaaaagaaaatgaagttcaagaaagaggtagagccactaatcactgagcagctggctctgaaaaggaagaaaaagaagaagaaaagtggggtagaaggagacccttggaagtagtaaccatacacagatttggaggtgatgttggaaaagaggctacatggatgaggcacacatagaccaggtgaggtgagagcccttgcaagaagacacccatcatgaagaggacaatacagacgcttccgaaaccaggaagtggacaggaaccc

SEQ ID NO: 841705 - DNA, 549 bp, Homo sapiens
atcccaagaactaaaaatcaggtgagtaatgacagtacttggttctttgggtttttttcttttttwaaaaaattttatttttccaggagttattggggtacaggtggtatttggttacctgagtatgttctttagtggagatttatgagaactttgtgcacccatcacccaagcagtatacactgtcccatatttgttgtcttttatccctcactcccctcccaatatttcccccagctccccaaagttcactgtgtcattcttatgcctttgtgtcctcatagcttatctcacatatatcagtgagaacatacgatgtttggttttctattcctgagttacttcacttagaataatagtctctaatctcatccaggtcattgcaaatgccattaattcaccctttttatggctgagtagtattccgtctatctatctatctatctatctatctatctatctatctatctatctatctatcatctaccagagtttctttatctactcattaattaatgggtatttgggttggttccaccactttgctat

SEQ ID NO: 841706 - DNA, 549 bp, Homo sapiens
atcccaagaactaaaaatcaggtgagtaatgacagtacttggttctttgggtttttttcttttttaaaaaaattttatttttccakgagttattggggtacaggtggtatttggttacctgagtatgttctttagtggagatttatgagaactttgtgcacccatcacccaagcagtatacactgtcccatatttgttgtcttttatccctcactcccctcccaatatttcccccagctccccaaagttcactgtgtcattcttatgcctttgtgtcctcatagcttatctcacatatatcagtgagaacatacgatgtttggttttctattcctgagttacttcacttagaataatagtctctaatctcatccaggtcattgcaaatgccattaattcaccctttttatggctgagtagtattccgtctatctatctatctatctatctatctatctatctatctatctatctatctatcatctaccagagtttctttatctactcattaattaatgggtatttgggttggttccaccactttgctat

SEQ ID NO: 841707 - DNA, 537 bp, Homo sapiens
tgaaagcattgaagagttctgcctaagccctcacagtgtttccccaattttgagtgaccaaatatcattttcttggccctgaccatttataagggacagtgtgatgtaacataagtataagggattttagtttagagggcctgagttgtaataattggatggctccctactgggtacgtatccaagcgcatgtcataataacgtattacactgtcatagcttacatttcaaggtgaaaatttctctatatcatttagccccaatagaacactggaaggaagttttagctaaggttaccccagatgtttcatggttacacaagaatacaaaacaaaacatgttttccccacagaatgaaaatacaatataagttttctttagcagctgtggctggagattgcaaaatggaatagtctggccaccctccaagccattagcaccccctccctttcccccaagggtgaaagacaatcaagccaaagagaaggaaaaacactctgctctcaacttsacagctaatacccagaaacggagctg

SEQ ID NO: 841708 - DNA, 609 bp, Homo sapiens
gattcaaatctggagaataaggcaaggactgaatgaaattgtgttaatttctgtccaatttagttaaattttcttaaggtgtgattgatttccttaggaccttggtatatggtccagtgctgcttagccaatgggttaagtatctccagattcccagatatttttctacccttatctatatcccgtcactgcatgaagaccctgaggacttagaagttaaggtcttaatttgatcttgaagatgatttaaacttctggagtctcatctgtaaggccaggacagttgcacagaatgtttgttaagatttccatgcagaaacctaacctaataagactcagtgaacaggggtatggaaattaccagtgggctgcagcctcactatttaaacatgtcttagtggccggacgtggtcgctcacgcctgtaatcccggcaattggggagtctgaagcgggcggatcacgagatcaagagatggagaccatcctggccaacatggtgaaaccccatctctactaaaaatacaaaaattagccrggcatggtggcacacgcctgtagtcccagcaacttaggaggctgaggcaggagaatcacctgaacccggagg

SEQ ID NO: 841709 - DNA, 462 bp, Homo sapiens
tacattcctgctgttgaactgttttgacatcctggaaaaggggagtcacaaaagaggaaggaactacacttatgatccattgtaaacacttttgggtgtggtgrtgtgtttgtgtgtatcctagaacaaattatctcatttaatgcatggaggctatcaggtaggtttttgttgttcattctaacctgtaaggtgaaatttcttgtggttgcttctaactgctagtattgaagatactcctgaaagaggaccaaaagtagtgaaggaatacttttgcattgtgaggatgaaaccctattctgtagtcatttttgcatgaactgacttattaaaactaacgttttaatcacatagtatactattgcttttcattgttcatgagtaataacattgattcagttaaatagcaataattagaaaaaaatgattaaaataacattttcattgaaattgtgaatacac

SEQ ID NO: 841710 - DNA, 595 bp, Homo sapiens
ccatgtgaataaatgctatggaagaaatggaaatctcatgagtgaaaaaaacaaaataaaaattataggtacaacctgataatagtcatatgaaacattcacatgggaaaagacctgcaggggatatacaaagatcatagttatggagttatggtagaattatgaaatgttttttatttttcattttttggttatgatactcctttttataattaaaatatattaatgcaacttataataaacatatttatataaaactaagaacttaattttatttgggaatttattactgggaacatgcaaattcatatacctaaaagactcttgctgtcaagtgttagatgtgaaaaacttgtgtgttttccttaattttatgtaattactaaatatgtcagtaagataaatgttatttaaaacctgtaggtaataaactaaaaatcctacattccttgacactcaccagttgactagtttgctgaggaaatagcttttgaaaatagatgatgtgtggaggtagtagaagtggcagttggaaagatgggtttcaagttgcttatgttatgtatgscctttaaaatgaagatgtgaaaggatt

SEQ ID NO: 841711 - DNA, 646 bp, Homo sapiens
aggtgtctttctgaagactttagtcatttctcagctcagaaacaatcagtgactcctctttgtctgagatcccctccaatatgtgtttttttagttttatccctctagtttctcaaattctgattggtccgctgatcgctgaaaatagcctggatgtgaaccagactgaatttgaataccaaactccatactcactcacttaggcaaattacttacacactccgtgctccagttgctcatttattgaacggagatgaaaataatagttccagctcctagggctcttgtgaaaataaaatgaatgaactcatgtaaatgcttatagtggtgccaagcatacagtaagcatagcttagatgccagatattactattacttctgctttctctgtggtttgttcctgctgtcattactacctggcaagtctcacagtctctgcatatccaattaccactcctctttaaaaccagggtcagatgttttatatatcatgaaaacttattattagtaaaataaaaggctatgctctcaatgactaaatcatggtttattccaatcataatgcactcttcttagcctgmcctgtatcgtagttgcatttgcaagtgtctttatcttgcccatgggcgaatgaaccattaggagc

SEQ ID NO: 841712 - DNA, 591 bp, Homo sapiens
gcatatttgttctttttagaatagccagagagcagaactgattatcaagtgaagagttgcaaccactctgaaaacattccctgactttgcaatgtaatagttgcatattttataaaatcatgcactgctttataaaatgatttaaggtaattgcttaccaatatattttattctattttaaaatattaatttgaatgtatccaacagcacattttagtttcatattttcacttgtctactggatttatgacactcttcacattttaatcatacacatgctatcttttcaaatgaagctttttagcaacattatttaatttttaaatacgctccttcccaaatttgaaagttttaaaatattatatatctatatagatacatataataatgctctcactaaattcagaatagccattgaatattgcaacacgttggctaccacctacttgctaagtatgtgatatgaaccatgacattacaatcttaaaactgtaacaagaatgagttatgtttgtactatttcccattctcattatattctttgtcacacaatgaattaatgwtgtgccattttctattctcattacaatc

SEQ ID NO: 841713 - DNA, 375 bp, Homo sapiens
aatataatctctttgagaggaaagasttttcagtttcatttgccaatgaatcttcattactagaaaagtgcatggcaaaaacagatgcttaacacatatttgttttttcttttccaaattttaagattcacggggtacatgtgcaggtttgttatgtgtgtgtgatgctgaggtggctcaacaaatatttgttgactgactgactgaacattctcacaagttaccaggtgagtaaatcatttaatttcatttacttttggggtattttctttacttttagtagtcatgtgttggtcctaggggcttaacagatattaacagtctttcagccttcagtatatactggcatggtagccgactacgagatggtctcta

SEQ ID NO: 841714 - DNA, 375 bp, Homo sapiens
aatataatctctttgagaggaaagagttttcagtttcatttgccaatgaatcttcattactagaaaagtgcatggcaaaaacagatgcttaacacatatttgttttttcttttccaaattttaagattcacggggtacatgtgcaggtttgttatgtgtgtgtgatgctgaggtggctcaacaaatatttgttgactgactgactgaacattctcacaagttaccaggtgagtaaatcatttaatytcatttacttttggggtattttctttacttttagtagtcatgtgttggtcctaggggcttaacagatattaacagtctttcagccttcagtatatactggcatggtagccgactacgagatggtctcta

SEQ ID NO: 841715 - DNA, 652 bp, Homo sapiens
atcacagcactattcacaatagcaaatataaaacaattttttgctcattttatatgtgagctttcttaatggtgaaaaactgtagctatgctctataatattccattttgttaaaatttggtcatgtgtatctccatttttatggtgattaaaacataaagtttccaatttttttattgttatacacattgctgaaaacagctttcttgtacaagccccttagccacatatataagtgtgtcatccatccacgtagaaaatttcccttttctctaagaaaaatagccaaaagtcagtattatcatcacttacatcttcaaagtcttattttagagcctgaatagccaaagcaaacctaagcaaaaagaacaaagctggaggcatcacattgcctgacttcaaactattaatatactacaaggcttcagtaaccaaaacagcatggtaccaatataaaaataaacacacagactagtggaagagaagagagaactcagaaataaagccacacactacaaccatttggccttcaacaaagttgatgaaaataagcaaagcrgaaaggactccctattcagtaaatggtgctgggataagtagccatatgcagatttaaactggacctcttccttttaccatatacaaaaatcaa

SEQ ID NO: 841716 - DNA, 512 bp, Homo sapiens
tcaccagaaactcaatggcagactttaaaagctaagcccctgcaaccttaggctgggggagatggagacgggaagagaacaaaataaagaggcaaggtaraaaaagaggcgagtgttggaagagagagaaaaaccacgggatgtcagatggcggaaagggctatagaagtcaggggtcatttatgaactcaaatgactgacaggtcaggcaggtaatggagatcttgatgactcggcttggggagacaggagctgtgggaaactgcctaaaggactcaaattcactccttttaaaaaagatttagacatcggcatagagtgtgtctacacatcatcagtttatgtcctttataattgagtcctttggtgcatcttctgttttaaatgttagttgaatgagtcaattgaataaacaaacccctcattttacagatgaagaaactgagactccaaaagattaagtggcttttctgaattcactcaattagataaaaggagttatcactcaggac

SEQ ID NO: 841717 - DNA, 499 bp, Homo sapiens
tcccctctctctgtcttcctcctgggtgatgcctgtgcacactttcctctcctcccccagctctttcttctttctgttcagttggggagagaaaatgaccttgtcrgggatcttcacctacatcatccactcctggaaacctgggttatcaaaaaagccccagcagtcagggcaatataacccctgaaagttggagatgggccttgagaagaataaaaaaagccatttatcttcaagccttccgtgactgctcgagaccaggcagggcctctcctattagattgttctcaccacaccgtgcacctcttctctctccttcacttttttctacataacacaaaattcactttttaaaccattttaaagtataccattgagtggtttattgtatattcacaatgctctgcaaccatcactgctatccaattccagaacattctcatcaccccaaaaagagatcctgtactcattaagcagtcactccccattcgctctcccc

SEQ ID NO: 841718 - DNA, 499 bp, Homo sapiens
tcccctctctctgtcttcctcctgggtgatgcctgtgcacactttcctctcctcccccagctctttcttctttctgttcagttggggagagaaaatgaccttgtcagggatcttcacctacatcatccactcctggaaacctgggttatcaaaaaagccccagcagtcagggcaatataacccctgaaagttggagatgggccttgagaagaataaaaaaagccatttatcttcaagccttccgtgactgctcgagaccaggcagggcctctcctattagattgttctcaccacaccgtgcacctcttctctctccttcacttttttctacataacacaaaattcactttttaaaccattttaaagtataccattsagtggtttattgtatattcacaatgctctgcaaccatcactgctatccaattccagaacattctcatcaccccaaaaagagatcctgtactcattaagcagtcactccccattcgctctcccc

SEQ ID NO: 841719 - DNA, 592 bp, Homo sapiens
tcaaacaccaccagaaatgatcttggctcacattttgacaccagcacttaccaatgatgtttttggtctacttccttaacttctctgaatctcagttttctcatctgtaaattgggaataagcctagagttgatatgagggtgaagaagaatattttaagtataatgactgaatacattggtggttttaaaagatagaatggaacgcttgattcagttgacaatacaacctttcttttttctttttctcgtttttatttttatttcgtatttttatatcttgttttgtgccaagtctatgctagcacttttcatgcaggccattatcaaatcagcacaactacctcctgaggtaggaattactattttctgcatttttatatatgcaaaaaaacttaaaactctcaggtgccacccagctggtaaataatagaatttagttttaagctcagatctgattgacttcaaaactcatacttttcacagctatgcttggatcacctatatcaaaatttcctggggggttgccaaaggcagatmtctgttctttgctccagactcagtatgatggtgacggctagacttccagcagc

SEQ ID NO: 841720 - DNA, 617 bp, Homo sapiens
agggctaaatgcaggtgtgttgccactaagatacagcctgggaacaagaccaaatcaagagcatggcttacacaactttcactgagatatctgactgaataaataaggtagctcccagtaaattatatcagttggacaaaatagcttacagcaaaaagaagggcatggtcccactgaaggctgacaagcttaaggtaccatgattaagggagaaaaatagagagagggtgagattcatgagtagaaaattattgtgtatatagctattaacatatgaagttgaccggaatcaaatagattaaatataaacaaataaatctccccaacatttaaactagccctgtgttatgaaaagcactttggcacggactaacaaagactgtgagtgaattgcaaaataacctaagtttatagggacagatgtaagaagctgcttaaacactaggggaatagattttctgatgcccttttccaatatggccaaggatgatcataaaagaggacagaactcctagagagtgaaggcaagagatgagaagragaataaactcaggtagcactctcagggagtagaagtggggcctaatcaaggaatattttctattggcaatgtttgc

SEQ ID NO: 841721 - DNA, 395 bp, Homo sapiens
gtgacttaagtgacataaccataattaaatgcaatccttggcaggatcccagtttgccaaacacactatacaagacatcacgggaatgactggagagactttaacatagcacagatattagaaaatattagagaactactgtcaactgatataatagtgtgctggttaaacgggaaactgtccatgttttttacaaatacataacaaaaaagttagggctgaaatgtgatgtttcataatttaaattacttcaggaaaaacatatgggaaaaagttaatgtamggaaataatgtatctaggcaataatcaccgcatggcgtgttaaaaaccattaggcaaaaaagcttaatgggaaatcaagcttttcccatcagactgatggatggatcagtcc

SEQ ID NO: 841722 - DNA, 617 bp, Homo sapiens
tgctcttacattattttacattgtttcttgtggcaacatttccctccgtgtatgttaagaatttagaaatgttatatggtgactgctagggactaaattgtattcctctcccctaaatttatatgttgaagtcctaacctccaatgtgatggtttttggagaggaggcctttggtaggcgattaggtgtagatgagttctaagggtggagcctgcatgttgagactagagcccttagaagaggaagaagagagatcagagctttctgtctctgccacctgaggacacagcaagaaggtggccgtctgcaagccaggaagagagccctcatcaggaatggaatctgctggcatcttgatcttggacttccagcctgcagcacagtgagaaataaatgtctgttggttaagccactcagtctatggtattttgttattgcagccccagctcatgatgacagtgacaattcatctgtctatcccttacaytggtgataatcagtgaagaattaaaaaaaaaaaatagaaggtactacgtaaataaagacaggcaatggtctttaagatcaatgtcagtacatgtattatggcaagtattaaatgatcttatacagccaga

SEQ ID NO: 841723 - DNA, 617 bp, Homo sapiens
tgctcttacattattttacattgtttcttgtggcaacatttccctccgtgtatgttaagaatttagaaatgttatatggtgactgctagggactaaattgtattcctctcccctaaatttatatgttgaagtcctaacctccaatgtgatggtttttggagaggaggcctttggtaggcgattaggtgtagatgagttctaagggtggagcctgcatgttgagactagagcccttagaagaggaagaagagagatcagagctttctgtctctgccacctgaggacacagcaagaaggtggccgtctgcaagccaggaagagagccctcatcaggaatggaatctgctggcatcttgatcttggacttccagcctgcagcacagtgagaaataaatgtctgttggttaagccactcagtctatggtattttgttattgcagccccagctcatgatgacagtgacaattcatctgtctatcccttacattggtgataatcagtgaagaattaaaaaaaaaaaatagaaggtactacrtaaataaagacaggcaatggtctttaagatcaatgtcagtacatgtattatggcaagtattaaatgatcttatacagccaga

SEQ ID NO: 841724 - DNA, 613 bp, Homo sapiens
agccatgctcccacctctaggccaccacacttaccgttccctctgcctgggactctcttcccccagatagcatctcttgccataaaggaaggacttctctcagggagaagcagtccctgaccactcagtcaaaaccacattcttttcacattactctccatcctcctagactattttatttttcttcatgatgttacttatcatctgacacagtacagattttatatttgttcatttcctgtctaccctaagtcctcttaaaatggaactttcctgagcatgggcacggacatgttttattctcggcgttatccctgatgtttagaagagtacctgtcatagtgtgttcagcagacatctgttgaaagaatgacttccagcactttgggaggccgaagcgggcggatcatgaggtcaggagttcgagaccagcctggccaacatggtgaaaccccgtctctactaaaaatacaaaaaattagctrggcgtggtggcgggcgcctgtaatcccagctgctcaggaggctgaggcaggagaatcacttgaacctgggaggcggaggttgcagtgagccgagattgcaccactgcactccagctctggtgacagtg

SEQ ID NO: 841725 - DNA, 613 bp, Homo sapiens
agccatgctcccacctctaggccaccacacttaccgttccctctgcctgggactctcttcccccagatagcatctcttgccataaaggaaggacttctctcagggagaagcagtccctgaccactcagtcaaaaccacattcttttcacattactctccatcctcctagactattttatttttcttcatgatgttacttatcatctgacacagtacagattttatatttgttcatttcctgtctaccctaagtcctcttaaaatggaactttcctgagcatgggcacggacatgttttattctcggcgttatccctgatgtttagaagagtacctgtcatagtgtgttcagcagacatctgttgaaagaatgacttccagcactttgggaggccgaagcgggcggatcatgaggtcaggagttcgagaccagcctggccaacatggtgaaaccccgtctctactaaaaatacaaaaaattagctaggcgtggtggcgggmgcctgtaatcccagctgctcaggaggctgaggcaggagaatcacttgaacctgggaggcggaggttgcagtgagccgagattgcaccactgcactccagctctggtgacagtg

SEQ ID NO: 841726 - DNA, 251 bp, Homo sapiens
gacaaatgcaccagtcaacttagacaggtcttgcagataggaatgagcttcttataaccaaatacgtgtatatttgaccatttttagttggtctagcagcatctttcaaagggacgctattgtcactttgagacagtttcttttttaaaaaaaattgtaaaatgcacatamatttactatcttaaccattttggaaaatatttttatatttccataggtttttggggaacaggtggtatttagttacatga

SEQ ID NO: 841727 - DNA, 611 bp, Homo sapiens
ctccagcctgggtgacagagttagaatctgtctcaaaaaaaaaaaaaattaaaaattagccaggcatggtggtgcrcagttgtagtcccaactactgaggaggctgaggcaggaggatcacttgagcccaggagttcaagactgcagtgagctattattgcaccactgcactccagccctggtgacagagtgagacctcgtctcaacaacaaaactaattaaaatcaagaagtagcttgtgagccagggggtggggtgggaatggaagatcccgttatcagaagctatagcctataactaaccaacttttaagctattcagcagaaacagtcaaacacacccaagttgaattaatgattgtcataatctatttaaattttaatttgaatctcctgtcataaattttaagaattgcttgttaaatgctgtaaataagtatcttttgtgattgattttttgggggtttttttttaagaaaaaaaaagccttttaaaagtgtttagaaatatgaggaagaaagaaaagaaacttggttagccattactccaaatttaaaagacaagtatagttagaatttattttcacataccaattaataatatgggctgggc

SEQ ID NO: 841728 - DNA, 611 bp, Homo sapiens
ctccagcctgggtgacagagttagaatctgtctcaaaaaaaaaaaaaattaaaaattagccaggcatggtggtgcacagttgtagtcccaactactsaggaggctgaggcaggaggatcacttgagcccaggagttcaagactgcagtgagctattattgcaccactgcactccagccctggtgacagagtgagacctcgtctcaacaacaaaactaattaaaatcaagaagtagcttgtgagccagggggtggggtgggaatggaagatcccgttatcagaagctatagcctataactaaccaacttttaagctattcagcagaaacagtcaaacacacccaagttgaattaatgattgtcataatctatttaaattttaatttgaatctcctgtcataaattttaagaattgcttgttaaatgctgtaaataagtatcttttgtgattgattttttgggggtttttttttaagaaaaaaaaagccttttaaaagtgtttagaaatatgaggaagaaagaaaagaaacttggttagccattactccaaatttaaaagacaagtatagttagaatttattttcacataccaattaataatatgggctgggc

SEQ ID NO: 841729 - DNA, 484 bp, Homo sapiens
tggtttctaatcaccatagccccagatgaatcttataatcrgacatatttgatttgagaaatgatgtattacttctgccttcttcacacaacatacttatcttgttgtatatttgtattgtgtgttgttaacctactttatggctttataagctccctataggtataagcacagaaggcatgtcagtgtttgcacttttctgggaagagaattcacagcttttgccctatactaaaataataataacaataataatttttttaaaaaatcattgtctcaaactaaattaaaaatgattagaaaatgtgttatatactattttatattttaagcaaccaaataccagaaactgcatttcttactaaaagtatttctgctagcatttgacaactgtcctcccctaaacactgttgcacaaatggattttaaaattgcatgaaactgggcctaattcctcagacccagtatcccacagtaataagtt

SEQ ID NO: 841730 - DNA, 624 bp, Homo sapiens
tagctatctgttgctgcataataaattactctccaaaacttagcagcttaaaataacaagttcacagcttttgtagatcagaaatttgggagcagcttagctgggtgtttctggcccaggatctctcatgaggttgagtcaagatgtcaaccaggtctgcagtcatctgaaggcttgattagggatagaggctctgctccatttgttcacatggctattggcaaggggtcccaagttcttgctatgtgagcctctacctagggctgcttgagtgtcagctagcaactggctttcctagagtgagtggtccaagagacagagcaaggagaaagtcactatgccttttgtgttttaatagataagtcacataccaagatttctgccacttactaaagcacacagcaaaggagaggggaattaggttccttacgctttgaagagagaagtatcaaataatttgtggacatactttaaagccactgcagtgtgataaatgtgtactatatcacctgaaagtgaattggagttattgggtaaggcttcttggaagagatgtgcattaatcaggatcctaacaggaaacagataatttycataagatttagtaaagaaactatttacaaa

SEQ ID NO: 841731 - DNA, 633 bp, Homo sapiens
gtctaacagcagctctctttctaagatgtatctttccttgagaaaatatagccagtttgcttcttactatttgttcatgaacacagccaattcttaccaaactgaaggtgatggtcctagtagttgctatttgttgaatgctttggttatgctaaagatcatgctcctgatacattccttatctcctttagcctcacaacgcccgcccccgccaccaaattgggcattatcctcattttacaggtggaagagaacattcagcgaggcatagtaaactacatactggggttggaatctgggtctatcaatacattccaacaccttcttgaaatagttttcccttgggttgcctgaaaattttctcttagaggcctcctgcctcactggcagcttcttcagactgaaagcaggcaactcgagtgcactttcggtagtttcaggcttgtttactcaactgcttaacatttgtacttggagtaccagtaggtatctccaacttaattaacataatcaaaacagaacttgtgatatcycttcccattcctgcccccaaactccctgcttattcaaacccattcttttccaattcagtaaatggcattattgcctaccgaagtgcacaaggcaaatatc

SEQ ID NO: 841732 - DNA, 566 bp, Homo sapiens
tgaaagtgaattcataatttaaagccttcctataacaaaagctccaggcccatatggcttcactgaattttattattcttttaagggagaaacaatacaaatcctacacaaactctttcagaaaagggggtgatgtcactcattttctaatgtcatcatgactctgatatcaaaacctgaaaaatacataagaagaaaactacaaatatctctcatgaacagaaacaaaaaatccttaacaaaatattagcaagtaagcccaggcatggtggctcacacctgtaatcctaccactttgggaggccaaggtaggaggattgcttgtggctaggagttcaagaacatcctgggcaatataaggagaccttgtctctacaaaaaatcttaaagattagctgggcatggtggtgcacacctgtggtcccagctactcaggaggcttgggtgggagaactgcttgagccttgggaggtcgaggctgcagtgagctgtgatcacgacacrgcattgaagcctgggcaacagagagcccctgtctcaaaaatatatgtatgtgtatatacaca

SEQ ID NO: 841733 - DNA, 614 bp, Homo sapiens
ggatccaaaaaatatgtggattataagaataggtcagtatttatcaagaattttcaartagaatcactattttcatcgggatttgctaatcacaaaatagatacattttataatgaggcaataataacgccaaagattttctacttactgggaaaaggatcccatcatatatttactgttttttttctttttcatattttctcagaaaatttttaaaattaatacttcagtttcccaggattcattatatgagaatgtcagacaatagcattctgtgacagaggcacaaaatgtaaattctgtgtaaccaaatgtaaccaatgtaaatcaaccaattagtattctaggttataattcattttcttgagtgttggttctcagatcctggtgtcctaggaatgaactgataaaatgtaggtttagattcaggtgtggttgttcacacctgtaatcctagcaactcaggatgctgaggcagaaggattgcctggggacaggagtttgggaccaacctgggcaacatagcaagatcccatctgtaaaaaaaaaataaaagtcgggtatggcagtggacacctgtagtcctagctacttgggaggctgaggcaggagga

SEQ ID NO: 841734 - DNA, 527 bp, Homo sapiens
cacatatgttcattgcagcactatttataacagcaagcacatggaatcaacctaaatgcccattaatgatagatgggataaagaaaatgtggtacatgtacaccatggaatactatgcagccataaaaaagaacaaggccatgtcctttgcagggatggagctagaggccatcattcttagcaaactgatgcaggtatagaaaacctaatactgtttgctttcacttataagtgggagctaaaggataagcacacatggacacatagaggggaaccacagacactgaggcctatcagagggtggaatttgggaggagggataggaccaggaaaaataactaatgagtactaggctcaatagctgggtgaagaaataatctgtacaacaaaccaccatgayacatgtttacctatgtaacaaacttgcacttgtacccctgaacttaaaagttagaaaaatgctttctagcttcaggactttcctgaattctttctttaatatttcaaaatttttattattttgatat

SEQ ID NO: 841735 - DNA, 663 bp, Homo sapiens
agttgaggatccggaattcagttctggacacattacatttgagattgaataagaagcatttcttaaaaatgaggtccatggaccacctgcttctgactcagatgcctgttcacagtatagacccttggcttcaccccagaactaatcatgtgattctgatgcatactgaagtactgagaacaaattctcaccataggaaaggattaaagttctgagaacttctgacctcctaacataaacaaaattcctggagctaggggaaatctctgccaggctgtcaccagaaattataacaatgccactgaccaactatgatatccagcataccacaaatctggcaaacacccctactcatttattcacttggcaagtagttttttagctccctctctttactaggcattgttgtggtaaacaagacaaaaattagcaatttattgaggtatttttattttcctgcacagaactacatgaaaagaatggaaattaatagttaagcagaatcttcataatcaaaattttggtttcagcaaatttcatgaggattrcatatgatcagtaaaataagaggtcctgatattaataatagcatagtaggaaacataacgtttatatcccactactggatgagaattctctgagtttagaaacttccctgttcaa

SEQ ID NO: 841736 - DNA, 601 bp, Homo sapiens
ctataacaagcggagttgtaaaccaaccgtagcccacaactatgccaatcactgggttttggttaatcaaatgcacccaactactcaaatcctggtcaaataaggcaactggagaactttatccaatccacttgtttctctacttcacctcctttttctgtacctcactttccttttgctgtccataaatctcccaccatgtgcctgtgctggagtctctctgaatctgctgtgattctgggggctgcccaattcgtgaatcgttcattgctcaattaaactccttgaaatttgattaggcacccgggggcagtggctcacacctataatcccagcactttgggaggccaaggtgggtggaccacctgtggtcaggagttcgagaccagcctgatcaacctggtgaaaccctctctctactaaaaatacaaaaattagacaggtgtggtggtgggcgcctgtagtctcagctcctcgggaggctgaggcagaagaatcgcttgaacccaggagkcggaggttgcagtgagccaagatggcaccaccgcattccctcctgggaaacagagcgagactgccgaaaaaaaaaattggttgaagt

SEQ ID NO: 841737 - DNA, 488 bp, Homo sapiens
cgtggtggtgggagcctataatcccagctacttgggaggctgaggcaggagaatagcttgaacccagagggcagaggttgcagtgagctgagatcgtgccattgccctcccgcctcrgtgacacgagcgaaactccatctccaaaaaaaaaaaaaaagaaaaagaaaaagacaaaattaattaatgccaaatcaagaatcttgtcttatgactttgccaagtaactttgagtgaaactatgtgtacagagattattttcaatgtaaactttcttgaacatctgtgagtgagaaaacatgttagcttcttggaatataaagtaagacacagtcacctccagtaaaacactggtaacacagtgttggtggaagcaacaaatgttcacaatatttaattaaaggggagcaaaactgtcttctttcctctctgatggagacttaatttgatgttaacttagagtgctgatttataaataaacagtttactct

SEQ ID NO: 841738 - DNA, 488 bp, Homo sapiens
cgtggtggtgggagcctataatcccagctacttgggaggctgaggcaggagaatagcttgaacccagagggcagaggttgcagtgagctgagatcgtgccattgccctcccgcctcggtgacacgagcgaaactccatctccaaaaaaaaaaaaaaagaaaaagaaaaagacaaaattaattaatgccaaatcaagaatcttgtcttatgactttgccaagtaactttgagtgaaactatgtgtacagagattattttcaatgtaaactttcttgaacatctgtgagtgagaaaacatgttagcttcttggaatataaagtaagacacagtcacctccagtaaaacactggtaacacagtgttggtggaagcaacaaatgttcacaatatttaattaaaggggagcaaaaytgtcttctttcctctctgatggagacttaatttgatgttaacttagagtgctgatttataaataaacagtttactct

SEQ ID NO: 841739 - DNA, 602 bp, Homo sapiens
tttatattgaaagctccagagttaggtgcacaygtatttagaattgtgatattttcctgttggactagttcttttgtcattatgtaacatccctctgtcttttttaactgctgttgctttaaaatttgtctaagaaagctactcctgctcacttttggtgtccatttggatggaatatctttttctacctgtttactttgtttttgtgagtccttatgtgttagttgagtttcctgaagatagcaaaaacttggtttgtgaactcttatccattctgccattccgtatcttttaagtggagcatttaggacattttcattcaatgttagtattgagatatgaggtattattctattcattgtgctatttgttgcctgaataccttgttttcttttcattatgttattgttattaaggtcctgtgagatttatgttttaaggatgttctattttggtgtattttgaggatttatttcaagatttagatctccttttagcagttctggtgggcatttgtttttctgggaaagactgtatttttccttcatttatgaagcctagtttggttggatacaaaatttttggctgataattattttgtt

SEQ ID NO: 841740 - DNA, 653 bp, Homo sapiens
gagtttgagaccagcctggacaacatagtgagaccatgtctctaccaaaaatacaaaaattagccaggtgtggtgctgtgtgcctgtagtcccagctactcaggaggctgaggtgggaggaatgcttgagccctggaggtggaggttgcagtgagccatgattcacgccactgcactccagcctgggtgacagggcaagaccttgtctcaacaaaaaaaaaaaaaaaaaaaaatctggagtccagaggcagctaaccctttcagggtcccaaaataggctctgcaaagtcccccactttgcagagcctattttgggattggcccagcaagcatctgagcttgtaatcctgcacatgtaagatacaggcaagaaaatgttcttttttacattttcaagtagtgagagaagagacatacaacaaacagacatatttttacaatttcaaaagcatagcacaatctacgcaatgcttataatggaaaaaactaaataaatacttaaacaaaaaattcccttcctaagtgccytttattttgtgatttattctttttctaggtttttttttttctgcctctttatttgctcaagttgggatttccagagtttcatttcaagaactaacttgctttgcttcatttccgttgtctgggct

SEQ ID NO: 841741 - DNA, 495 bp, Homo sapiens
actaggtgcctggaatttcccctgcaataactaaaacttttcctttatttccatgctttggagaaagtgcatggcaggcccctaagaggagtccctgctacctcttacgaccatcttgcgaattactgtacccgtagcaactatagtgcctggtgcataggaggatgactgaatgaatacatgcagaaattcacaacgtgactaattcaaagtaactgacactcatttgaatatacacatttgaaacagtttttaaaagaaaatagcttccataatttgcaaatacaacaataacagtttataggaaatgtcccaagctagtccacttacttctatttctttttgacacaataccatcttctgaatatattccattttgcaaaataaaaaagcactttayggtgattatgttaaatagagccaagagcatcatccctgttttaatagattagaatgtggggatgtggaagagatgagtaattttttcaacgttag

SEQ ID NO: 841742 - DNA, 696 bp, Homo sapiens
aaacattcagcctatagcacctggatcccctggtcagatgctatattgtatgagattccatgcctgtggatcaagcactctataaacccctggatagtggtaatggctgcagctctgaggacagagamagcaaatccatactcgaatcagtgtctgtttatctgagaatgacactctgcctctccaggacagaaggggcccaattagtcaacgtattgctagtgagtctcctccaggaatggagctgcgtcagggctgaacgttgctctctgttgctgcgaggttggatattcaaaggcagcaatggcaaggtcagatttggtcagtgaagtccatgcttttgggtccacacgtagcctctgtctctgccactgcggccacccccttcacctgcccattgtccccattccaatgacaaagcttgtatttgtacattgagctgacccaccagtacacgaagcataggagtttcttcctccgtcagttggtcatgatgttccccagggccacgggtgtgagctgaggtagggacactagtgcccttatcaggcccaaatgtccccagtaaagttatgctgggattaccccgaattatcgagctggcagccaggagagaaagtgggcacagcttctcagagggacaccagttgcctggagggaagaggcctctgcagtgtatttttgcacagggagggg

SEQ ID NO: 841743 - DNA, 601 bp, Homo sapiens
atcagattaaaaagtaataaatcacattacttacctggctttgagggagatagtttcctacttaaacatcaacatttttatgtgcaacatctggaacactggttttcaaactttgtactgcaaaattctagtgaaggggttctaagaattccgtgaatatttttatattgaaactaacaaaatgcaacacatactactaaacattaacatatgtgctaatgaacacatcacataaccgatgtttaacgtgttaatttgtgctatcagatttcatccaaaccttagaacaaagctctttgatatatctgtttactgcaatcaaaaataatataaagaacaagatcagatattggtataagattataaccattaactaaggccacaatagaaaatgtctgtattcatcaacatagcttcatggttctcaccataaaggtgagtttatatgttggttctcaccatgaggtgagtgtgtgtgcrctgaacacaagtaactgatgacaatttaaatccataagctaaaacactaatgctattttcaatctgctcatattttactatctactgattaaaaaaaaaagagtttgaaaaccagtggtct

SEQ ID NO: 841744 - DNA, 442 bp, Homo sapiens
aactttgtagatcatttttatttatttcatcagattgtttacatagatgatcatgtatggaaacaaagacagttatacctcttcctttccaatatggatgccttttattwttttatcttgtcttgttgcaccgaatggaacctccagtatagtattgaataggtctggtaaggcaactatcttagcttttttcctgatcttaggaaaataatttaatcttttaccattaaatatagttttatatgtaggttttttgtggatggccttcatcaggttgaggacatatccttctattcctaattttctgagagtttttttttatcatgaataaatatcaaattttgacaaatccatctttatcttcattttttatggttgcaaaataatcataactgacatatatgtgttgttcactaatttgctattacaagcaaaattgtaa

SEQ ID NO: 841745 - DNA, 591 bp, Homo sapiens
ttatagtggtagaaatcaaaatagtggttaactcttggtgagaaaggatacaggtttgactagaatgaagcagaagagaaattcctggaatgtgaaaatgttctrttctgattggggtgttagctatatggatgcatacctttatcaaagatcataaaactatatatacatataatatatgtgcatgtgatatgtatatgtatgcatatgtataatatatgtatacacaaaactgtatacccatgtaatacaggtatacattacagaatacacacacacacactcacacacacacacacgaaaaacaacacgacagcatttatcaaaatgactgattccaggtttgggttaggaaatgtacaagatgagccaagagtatcttgtcatgaaatgaaagcaaggatgctatctaagactactagggtttttgtgaagtgaactgtgtccccctaaaattccatgttaaagacctaacccccaaggtaactgtctttggagataaggccttttaggagacaatttaggttaaatgaggtaataagggtaggccttaacctgatgggacaggtgtccttgtaagtagaggaaaag

SEQ ID NO: 841746 - DNA, 265 bp, Homo sapiens
tgctcaggccaaatgagtggtggaaaactaacatctttttgagcttaggaaaagcaagaatctggccttggctgaagcctgagggagaagatgtgccttcagttatgcctcacatactgggtagaatctggttggctggagaacattcaggtgaaaggcaggmcgttcatggtaaggggatgtggagaatctggaataggctagttggccgaaaagaagatttcatgtttgggaataatgcttaagctgtccaacttaatggatg

SEQ ID NO: 841747 - DNA, 669 bp, Homo sapiens
tacatacattgcggaatgactagctattataattagcatakgcattaccacttgtagccatcattttttgtggggagaacactttacatctactctcttggcatttttcaataatactttatattattagttatagtcatcatgttgtgcaataaatctctttaacttatccttcccaactgaaattttgggtccttcagctaacatcttcccagaaaccttcccccgaccccctgcaactacgttagcccctctgtattagtctgtctcacactgctacacagaacttcctgagactggataatttacaaagttaagaggtttaattgactcatggttctgcatggctagggaggtttcaggaaacttacaatcatagcagaaggtgaagcaggcatgtctcgcgtggcaccatgtgagagtggggggggggagagagagagagagcataggaaaaactaccatttatgcaaccatcagatctcataagaattcactcactatcatgagaacagcatgggggggaaccgcccccataatccagtcacttccctccctctacttatggggattacaatttgagatgagatttgggtggggacacagagccaagccatgtcaccctcataaccaccattctactctctctacttctatgacccaacaggc

SEQ ID NO: 841748 - DNA, 591 bp, Homo sapiens
tttatagttttacatcctatatatgaactatttgtaaataataagaaygcaaaaattttcttttatttattctagaaatgttaccattttggtttttacacttttttgtttcaagttgatttttgtatgtggtacaagaaatggataatgatgcatttggtacaagttgtccaagatatcaccacttgttgaacgtagtgtcctttctctaaggacttaccctggaacgtttgttaaaggtcaatttgttatctgtgcgcattgctttttggacatcctattctgttccttttacatacatgtctgtccttatgccagtgctacataatcttgattaactgtacctctgtagtaaattctaaaatctaattaaaaaaagaaaaaaacgtattacggagtaaatcaggcagtaatatttctctagactttataattttgcagaatttttaaaatttataatttattatgacttcttattctgtaaatagctgttggtttttaccactaatttcgtgatggttatttttcttaaagagtttcgctctccctaattacataaacttcaggcccccaaccatggatctgtgtggg

SEQ ID NO: 841749 - DNA, 517 bp, Homo sapiens
agtccaggctgaatttttcaaatacatcaaatgatgtctgattggattctgcatttctttctttgccagactttgaagccacagcactaaagtcacgctaatgaaacagagacctgtgcctctgtcagtggccagggtcccccaagtccacaccatagaaaaacttccctgaagtgtgtagcacttctcagtacctttctgttgctaccatgagaccaggtagctagaaggcttacaatctaagagattttaacttattaaggcttgagacctgaaaatataatcattggcttcagtatattccaagaaagctgcaaaatcgagcttgaaaaatatttgactaaatgtccacaaatatatgttagtgttactaaatgctgaatttaatacttataaaaagcttattacattcaagcacaacttcaggctagccttttttcamtttacaaaaattcctgaggaggcctaatgagtaccaaaatatcagagtcgagtgtaaattacaatgtaatttaca

SEQ ID NO: 841750 - DNA, 331 bp, Homo sapiens
ctagattctctaatcaaatactgaccagataagatcttctgggtgataagaacagatttaaaacccagagtgacattctttgatgagaatcatagaatatctatacatgtcaagatgaaacatgttttatatagtatacatttaactctcaagttattaatgtcttaataaaaaaatataagttattactactgctataattattatatgtttaagagctaaagtcaaaacttttcctttttgcgtaactaagatatgtatttaatctatatctataacccaatacaatgttcagtttgtrgaactcatattgaatcacagttttaacaga

SEQ ID NO: 841751 - DNA, 592 bp, Homo sapiens
ataattcagttgactgagaagaaaaagagtttttccaacaaaacaagatccaagaagagaaaaaaagacataaaggctttttaaatatacctatagcttggctattcactcttaattaagattacttttaaccatagagctctttaaaaaaaatccttttaaatcctttataacctgactttagccacaccaagtaggcaatatttctggcttttgaactttatcaaaagtaacctcaccagtgaaaccaaggagcctcaaaataaggagatgacttaactgcaagtgtatgaggtattttcaaagaagtgataagcagtttttacaaaatctagaatcttgaaaagtagctcagagaaaggaagatttaagaaagaaagctagatattgttcatggaggggaaaagaatgagcaaatggtaaaagtcccatagatattaaccagaaagtactcactacttaaaccaggwttgaacccaggctgccattgtaaaatggcagagatcaaaagaaagtagagccacgtagttttaaggtcaagctcccaaggacatacaagacaagagggaaacttcgttcagctttttgtttg

SEQ ID NO: 841752 - DNA, 631 bp, Homo sapiens
tcagataaacaaattcagtaaagtctcaggatacaaaatcaatgtacacaaatcagtagcactgctatataccaacaatgaccaagttgagaataaaatcaagaactgagtctcttctataacaactgaaaaaaaaatacttaggaatatacttaaccaaggaggtgaaagatctctaaaagaaaaactacaaaataccactgaaaaaaaatcataaatgacagaaatgaatggaaacacatcctatgcccatgaatgggtagaaacaatgttgagaaaatgaccatactgccagaagcaatctacagattgaatacaattcctatcaaaatactaacatcattcttcaaagaactaggaatgatgtcagagtacgtgtagcagtaagtttttgaaaaccactaaattaacagtgagcaccttttagatgatcaaggcttgagaaagaataattgaacttttgagcttaagcctcttaggtggattgtgcaataccagtagaagtaccaattgagcagactgctatctgggtgrcctctcagaagcctgaactcagactggcatgactgatacctagggtggaaatgattggaaagagattaaggatccctacaacttaagtgcttgaata

SEQ ID NO: 841753 - DNA, 609 bp, Homo sapiens
tagttttaagttgctatctgattaaaataatgggttaaaagacagtatttgcaaacctcatggtaatctcaaaccaaaaaacatacaatagacacacaaaaactaaaaaacaagacactacatcatataaccagaaaaaatcattgtcgctagaagaagacaagaatgaaagaaagaagaaagagaagaccacaaaacaacctgaaaacaaataacaaaatggcaggaataagtccttattcatcaataataacattgaatgtaaatcaaacctaactctccaacataaagatatagagtggctgaaaaaaaaaaagaagaagaagaaagatccagtgacctgttgcctacagaaaacacacttcacctataaggacacacataggctgaaaataaagggaaggaaaaacatattccacaccaaaggaaactaaagaaaaaagagcaggagttgctatacttatatcagacaaaatagattttaaatccaaarctataagaagagacaaagaagatcattatataatgataaaggggtcaatttagcaagatgatagaacaattgtaaatatatattcacccaatactggagcacctggatatataaaa

SEQ ID NO: 841754 - DNA, 564 bp, Homo sapiens
agtatatcattgtggtataatttgcatctctctgattagtgatgttgagaattttctcatgtttgttgctcacttgtatatcttcttttgtgaaatgtctatttatgtcctttgcccactttttttttttcttttgagacgggtctctgtcactcaggctggaatgcggtggcacaatctcagctccctgcaacctgcacctcccaggctcaagcgatctttccacctcagcctccaaagtatctgggaccacaggtgcccatcacacacctggctaatattttgatttttagtagagacagggtttcaccatgctacccaggctggtctcgaactcctgggcttgagcagtctgcccactttggccacttggcctcccaaagtgctgggattacaagcatgagagctgccacatccagcctgtctattttttaatggggttatttgaatttttcttgttgagtttgagwtccttgaagattttgaatattagtcattcatcagatgcataatttgcaaatattttctccccttctataggctatatgtttactctgttgattg

SEQ ID NO: 841755 - DNA, 496 bp, Homo sapiens
tgggtttttttgttgttgttggaagattttttrttactaattcagtttaattactctctatcggtctgctcaaaatttctatttcttcctggtttaatcttggaagattgtatgtttccaggaatttatccatttcttctagtttttctagtttgtgtgtatagatatgcttgaagtagtctctgataatcttttgtacttctgtgtataaattatatgtcacctttatcatttctgactgtgcttatttgaatcttctctctcttttctgttaatctagccaacagtctttccattttctttgtcctttcaaagaaccaactttttatttctttaatcctttgtattttttgtctcaatctcatttacttctgaccagatctttgttatttcttttcttctgcttactttaggtttggtttatttttgtttttctagtcccttaaggtgtgacagtaagtagtttatttgagaattctctgtatgttttatgtag

SEQ ID NO: 841756 - DNA, 627 bp, Homo sapiens
gggtttttttgttgttgttggaagattttttattactaattcagtttaattactctctatcggtctgctcaaaatttctatttcttcctggtttaatcttggaagattgtatgtttccaggaatttatccatttcttctagtttttctagtttgtgtgtatagatatgcttgaagtagtctctgataatcttttgtacttctgtgtataaattatatgtcacctttatcatttctgactgtgcttatttgaatcttctctctcttttctgttaatctagccaacagtctttccattttctttgtcctttcaaagaaccaactttttatttctttaatcctttgtattttttgtctcaatctcatttacttctgaccagatctttgttatttcttttcttctgcttactttaggtttggtttatttttgtttttctagtcccttaaggtgtgacagtaagtagtttatttgagaattctctgtatgttttatgtagacatttaatgccgtaagctttcctcttagccctgcttgtgctgtatctcataggttttggcatgttgtgtctctatcttcattcayttaagaacttttttggtctctgctgtaattttattgtttgcccaaa

SEQ ID NO: 841757 - DNA, 560 bp, Homo sapiens
aaatggaagaagagccagggactacttgacgtcaaagctcccactatgacccactacagcactcaggcacagtgctgccacagcccatggaacccacagcatttcccttgatgtccaagacttaygcacttcatagtctgatggaaaatatgtacacacctgatctctgttggctgaataacaagccctctgagacttgaggacaattttcttttccttgctcagaaaggcaatccaggttctttttccttttcttattagctttgtattcatttacaaagagaaatgcaaccgcatgttggcatcaggctccacgcaggctacaaagctctgggataggctggcagggccctcctttcctctcagggtcagtgccagatggctgcctttagaaggactgcacagtgtgggtgcaatgcgggctcacgccttggggaatagaagatggcgactgctgagtcaacagagagtgagcccacaggacgagggtcccgaaagaggctccagctcaccgaggatcccaggactgggagcaaaatggagttccttgaggaacaagc

SEQ ID NO: 841758 - DNA, 560 bp, Homo sapiens
aaatggaagaagagccagggactacttgacgtcaaagctcccactatgacccactacagcactcaggcacagtgctgccacagcccatggaacccacagcatttcccttgatgtccaagacttatgcacttcatagtctgatggaaaatatgtacacacctgatctctgttggctgaataacaagccctctgagacttgaggacaattttcttttccttgctcagaaaggcaatccaggttctttttccttttcttattagctttgtattcatttacaaagagaaatgcaaccgcatgttggcatcaggctccacgcaggctacaaagctctgggataggctggcagggccctcctttcctctcagggtcagtgccagatggctgcctttagaaggactgcacagtgtgggtgcaatgcgggctcacgccttggggaatagaagatggygactgctgagtcaacagagagtgagcccacaggacgagggtcccgaaagaggctccagctcaccgaggatcccaggactgggagcaaaatggagttccttgaggaacaagc

SEQ ID NO: 841759 - DNA, 336 bp, Homo sapiens
aacatactaagacaggcctaatgctaattacctgctaccaactgtactgtgagtaaaagtgcatttaaaaatcaaaatggcttgaaaagcctccataagattaacatgatcaacagggagtttcctactgagaatacctagagtttaaaaagaagatgaaaatccccaagcatgaaccatcattgccctaagcacaggactgattcaagacctctgtcagacaagggtgggtttcacctcctgccccaccaattccccygcagcatccctgtagaaggatccaggacaggaatatctgcccaatgcctgcagaatcctggtgaagggccaagatgg

SEQ ID NO: 841760 - DNA, 605 bp, Homo sapiens
gagtcttggtcttccaagatttctaacaaagaacatatattccagaatccagggctcagaatcacaatgcatacaaaattacagcacaaggtcttagaacctcataacctaaaaccatagtgatcatacrcaacatttatctcttcccccaaacatcttacattcttctgttcattacattttaagatctacaaataaatgagataaaatggaacataagcttaaagactttattactggtttaaatattcacaatgccacaatctgcctcagacaaatcagagtcatgtggttaaatgtgcaaacaattactcgatttaatttcatcttgcagaagttgaaaacaagctgtaatcacagtggatgctgctcattttattccaaaagccaccatcttttgtgttcctgattggattttattcttggacacaagtggagtgactgaccagaatttcttcctgggtttccacactaagcatgctaattcatagggtattaagagggtcatgcctaaataaaacaacagctggatctctcctaaaggggcttatttcagctccttaaagagacagggtccaagctgaggcactgcccaaatcttcata

SEQ ID NO: 841761 - DNA, 562 bp, Homo sapiens
ttcccaaagagagatgggagaggcaagtcccagcaccctgtaccccttagggagcagccaaaggagtaaaacccrcaattctttgtctcctatgccccattccttcctagtgacaggaaatcaccgtttgggattgtatagaaggtgttagaaattgtatgcccgccttctgatgctccagcgaggtggcacctggttcagatgacttttcagttcagacctgaagggaaaagaagagcaacagtgaccacaaagagagcgagcgctcccaagccagcaggtcctcagcatgcgtgggtggcagctgacttcatccccacacagctgtgtgctggtgctgctattgtccccattctacagatgggaaaatctgcacagcagaggccgttggcagggggtggcacagccgggcatcaagccggagccgtctggcgcctgagcccacacacaaccgctgtgctgaacagacagatggtgccggaaggcagcatgcaacccgagaaaatgcgtggagaggagtgggctgttgctttccaaccatttttataggctgactatagat

SEQ ID NO: 841762 - DNA, 583 bp, Homo sapiens
tttatttttaaatttttttgagacggagtttctgtcgtcaggctggagtgcagtggtgcgatcttggctcaccgcaacctctgcctaccggtttcaagtgattctcctgcctcagcctcctgagtagctgggattacaggcgtgcgccaccacacccagctaagttttgtatttttagtagagacggggtttcgctatgttggccagactggtctcgaactcctgacctcaagtgatctgcccacccccaaagtgctgggattacaactgtgaaccaccgcgcccggccttacatttatttttaaaagaaactttctaagactagaagaaatggaaaacttctaacatggttcaccataaattgtaaaaataaacagctgcccatcagggtaaatcgtgtcagctcacacaccgcaagtaggggcgagcactgatcaggccgggaggtctggctctggaaagtcatgtcacagggactcatctgttgaggagggctcctccagaccctgctagcccccgatctgaggacagcacccgtctgtgttccgggaccatacacastgtgtgtgtgaaaatccagccc

SEQ ID NO: 841763 - DNA, 555 bp, Homo sapiens
aaatttaatcaagcttgggagtggaataaaaatattttcagctatgtaaagggctcacaaaaattactctccatgtattcttttttttgggaaactacctgtggattgcaaatggcaataaaggaaaaagcaaataaagaagacatgggccgggcatggtggctcactcctggaatcccagcactttgggaggccgaggtgggtggatcacttgaggtcaggagttcgagaccagactggccaacatggtgaaagcttgtctctactaaaaatagaaaaattagctgggcatggtggtgggctcctgtaatcccagctacttgggaggctggaggaagagaattgtgtgaacccgggaggtggaggttgcagtgagctgagatcatgccactgcactccagtctgggagacagagcaagactctgtctattaaacaaacaaacaaamaaaacccagacatggacccaggacattgaatgcaaccccgttgagaggaagagtatgtgggatggagaagtttaggtggatgacacagctgatggtaaaaattaagga

SEQ ID NO: 841764 - DNA, 558 bp, Homo sapiens
acttttttaaggaaaaataaactagaagaaatggaggtcatgtaataaaaatgaagttgatgtataaaattaattwaaaaaatagaagtctaagaactccgtttaaaatatgaaggtgggctgggctctgtggctcaggtctgtaatcccagcactttgggaagctgaggtgggtggatcacgaggtcaggagttcaagaccagcctgaccaacatggtaaaaccctgtctctactgaaaatacaaaaattagctgtgtgtggtggcatgcgcctgttatctcagctactcaggaggctgaggcaggagaatcgcttcaacccgggagttggaggttgcagtgagccgagatcacaccactgcactccagcctgggcaacagagcgagagactccattaaaaaaaaaaaaaaaagaaggtaactatcataagaaacagattgaagagtcaaaagtgattgtaagagggagttgaactgggggctgggcaggaactgggcagggacctgctgattttctttataagattttgtttttattttattttttatatgtatgc

SEQ ID NO: 841765 - DNA, 635 bp, Homo sapiens
gcacctgcaccccctgaatctgaaatacaagttgaaagtataaaaaatgaaataaaataaaattgcagtgaggttgactcctctctttccctttcaatgcagaggaatgaaagaggtggagtcagaacaagagcagcaacgaggccccttggagtggccttggttttgtccggactgctctcaggcagtcccatgtgcccacagtgttcctatacagagcacactcacatttacagcacccctacaaattgccttatgcccttcgcatatgtttatgtgatgctcatatccagccacccagagtcacagagcacaggaaagctgtgcccacgcagttcaggtgccgagtcctcatattcaagtacagtccaacaaccacaacgtgggttcagactcactcaagttctttacttgcatttctcaaatattctgaaggaagtatgtaggtcacagcaatactcttttaaaattccttcttcatctctcctcttcttccctcaccaacmacaactactttggcacctctactatttcaacacgtccccccccaaaaacttccaaattaaaaactcctgctctaaaagatactgttaagaaaacaaaaatacaagcaataggctaggagaaacatgcct

SEQ ID NO: 841766 - DNA, 631 bp, Homo sapiens
taagaaaattctgattcagtcattcgtctttccattaaaattttccatctgttaacataaagaacctttggtgtccctgtgattcattcactaaacaataccaaatatacagaaccccactggtgtttcttgttcaaatcttgtagagctttagacatgcctaaattataaagaaaaatcataaagtccattccccataattttacacatgaggaactaggccccagcgaagctaagcacttcacctgaggttggaagtcttgttactggcaaagctggtattaaagagacatggctcctgagactccatccagtcctctttctactatccacatatgacttagaaggaagacaagaagcctgcatctcttctaattccaaagcacaaaactcaaagggaagatttccactgggagttgcaaatcagaccactccagtgaaaccagcaattttatccattgtttattaaaacaaatcaagccatgctactctattaacttcggaaagctgaatatactctgttctaataataacgtaaaagagtaggaaactatttaagcaatgagaaaagccaggccatggagtatcagtgattaatgcacaacktgagagcagggaaaactgagttgaa

SEQ ID NO: 841767 - DNA, 614 bp, Homo sapiens
aattttatttcattttattcatcaacaaacccaatttgtactaaatatttggaaagttgtaccaatatggtttctgccctcagataagatattaatgatgcattatttatgaaatcaaagtaaaattacattagtcataaaatacttatagaacaagataagaacctgtactagaataataataacatatcacatcacatacttatataatgtttatggttctaagaattttatgtatattaattcatttaatcctcacaacaaacctctagggtaagttctgtcattatttgcatttcccacgtggagaaactgagacccagaaatgaatgagttctctcagttagtggtagtaaatgagattcaaactccagcagtccatccccagagtctgtgttctcaaactctctgctctaagtagattgaaattgataaggaagaggtagaaggtaagatgagacaggaaagcagggaaagagggtgagactgtgaggtcacaagcctggytggagtgaagtgatcctaaaggggaacaataagagatcactttgaatgggtatagggctaccagtcattggagggttctgaatgccctgtggagagtcttttgatca

SEQ ID NO: 841768 - DNA, 420 bp, Homo sapiens
aattactataataaactgaagccacacatatctgcccacacgtgacccagctgtcttcataaagtactggcagcaatgagatgcttttgatagtrctgaacatgtgggctcatcagaagaaccagctaggagaaattgagcctggaatcccacaggaacaatcttatgggaaggtgaaagtggttccacagacatcaaaattagtccaaaggaattttattatatacatgagctgaagacagagaaatttttaagtgtaaaaaccctcagaaaaaggctttggtgaaaaagatcctcaacaaataaaataatttttcaaaatacaacactttgacttgctatatctctttacgcattatttttaaaaactgagtgatgatgataactgtggctatcaattatttcatacagatgtagaat

SEQ ID NO: 841769 - DNA, 603 bp, Homo sapiens
acaattagggcaaaaataaagtagtattggattataattcaagggatagaataaatatccayaaaaccatattgatatgcatgaatgattcaatgcataataaatgcaggagaacagacaaatctcccacacaaaaagttccaaagggagtagagcagaaccctctactttctacaattcttacaatgtgggctgtgcacagtgacttccttcccaggaggacagtatgaaaaggctgaggaatcaccttacagtggagaaacctggaaaatactgccttagccaggtgatcacttcaacatcagcagtgatgaatcatgcgattagtatgcacctttgatataatgtgatgaaaacagcagcttacctatgttgtcttgctgcccagaacacatgactccactgtaaccatgagaaaaacatcaaatggcgatagaagaacattttacaaaataccagactagcacaagtcaaaactgtcaagatcatcaaaaacaaggaagccctgagaaactgtcacagcccagaggcgtctaagaagagatggtgactaaatgtaatgtgctatcctggatgggattctggacattatgttaagaaaat

SEQ ID NO: 841770 - DNA, 603 bp, Homo sapiens
acaattagggcaaaaataaagtagtattggattataattcaagggatagaataaatatccataaaaccatattgatatgcatgaatgattcaatgcataataaatgcaggagaacagacaaatctcccacacaaaaagttccaaagggagtagagcagaaccctctactttctacaattcttacaatgtgggctgtgcacagtgacttccttcccaggaggacagtatgaaaaggctgaggaatcaccttacagtggagaaacctggaaaatactgccttagccaggtgatcacttcaacatcagcagtgatgaatcatgcgattagtatgcacctttgatataatgtgatgaaaacagcagcttacctatgttgtcttgctgcccagaacacatgactccactgtaaccatgagaaaaacatcaaatggcgatagaagaacattttacaaaataccagactagcacaagtcaaaactgtcaagatcatcaaaaacaaggaagccctgagaaactgtyacagcccagaggcgtctaagaagagatggtgactaaatgtaatgtgctatcctggatgggattctggacattatgttaagaaaat

SEQ ID NO: 841771 - DNA, 571 bp, Homo sapiens
gtgtgtatatttttcatatatacaaatatatatatatgaaatgccatacacatagttctttatgtttccaaattcaattaatgaattaagatctgtatgacttcagagtcatagaattacygattttcaaaattttcaattttgcctaagatgagaactgctgtattttagcacgtttataaagacaacacaaaaacatatcaacactaaattacatttttaaaaacaaaatccaatagctgtcgaaagtttatttaatcatcacacatcgggacaaatttttacatgctgaaaacagttaaaataaaagattgtcacaatataccttttaaaattgtcttttcagttaacattaatttacattctaacaaattgcttagttaagaaagaaagttttccaaacatccaaaaaggttttcaaaagtttagtaagacaaatcttgtataaactcaataaataaatgaaatatgtttttctatagaactctggttagaaaaattactatttattacataaaatattattttacataggcattttttacctaccttgtacctgatcctaaagtta

SEQ ID NO: 841772 - DNA, 598 bp, Homo sapiens
acataacatgaaaataaccattttaaagtgaaaattcacttgcatttagtacacttacaatattttgcaaccrtcaactctatctaattacaaaatattttatcaccctctaaggaagccctgtgtcttacaagcagttattcctttcctcccccaccttcctccagcccctggtgactaccaattttttacttctatggatttacctactctgcatattctatattggtagaatcataaaatatgtcatcttttgcatctttttcaacttaacatgatgctttcaaggttcatgcaggtgttccttgatcagtactttattctttttgatggctgaataatttcccattgtatgtatatggcataatttggttattaattcatccatcaataggcatctcaattgtttccaccttttggctgttgtaaatattgctgctttgaatatgtgtgtacgtgtatttgagtatctattttcaattattttcatatatacctagcagtgcatcataaatattttttggtcaataatgatgatgatcaaaggcacttgagatataagagttaattaaataggctacagcaaaagaaatttatt

SEQ ID NO: 841773 - DNA, 587 bp, Homo sapiens
aaatgatgctacaaatacacaatgaagaaagcctcttcaataaatatttttgaaaaatggatgttcatgtggaaaagaataaatttagacccttttcttaaaccatatataaacgttaamctgaaatggattaaagacttaaatgtcagatcagaaattgtgaaattttcagggaaaatataggaaagaagttctttgccattggtcttggtaataatattttagtatatgacaccaatagcacaggaaacaatagcaaaaataaacaagttagttacttccaagatacaactgggttacaggcattggataaatgcttctattccacctgggagaaattggccaaaacaaaggctctacagggcccatgcaagtccgaaacccagaaggcagtcattaaatcttaaagctcaaaaataatctcctctgattccatgtctcacatccagggcacgttgatgcaagaggtaggctcccaaggcctttggcagctctgcctctgtggctgtacagggtacagcacccacagctgtttcatgggttggtgttgagtgcttgcagcttttccaggtgcatggtgcaagctg

SEQ ID NO: 841774 - DNA, 515 bp, Homo sapiens
tctactaaaaatacaaaacttagccaggcatggtggcacgcacctgtaataccagctacgcaggaggctgaggcaggagaaccacttgaacccaggaggcggaggttgcagtgagctgagatcgcgccattgtactccagcctgggcgacagagcaaagctccgtctcaaaaaaaaaaaaaaaaaaaaaaaaagaggccgggcatggtggttcacacctgtaatcccaacactttgggaggccgaggagagtggatcacctgaggtcaggagttccagaccaacctggccaacatgatgaaaccctgtctctactaaaaatacaaaaattagctggccatggtggtaggcccctgtaatgccacagctacttgggaggctgaggcaggagaatcactygaaccagggaggcagaggttgcagtgagccaagatcacgccactgcactccagcctgggggacagaatgacactccatctcaaaaaaaaaaaaaaaaagagagagagagaaaaagaa

SEQ ID NO: 841775 - DNA, 655 bp, Homo sapiens
tattgatttatgtgtgttgattttgtcctgcaactttactgaatttatttagcagaactaagttttttggtggagtctaggtttttctaaatataagatcatatcatcagcaaagggggacagtttgacttcctcttttctaatttggatgccttttctttttttccctcttgcctgattggtctggttaggacttgcagtactgtgttaaataggagtgattaaagtgggcaccagcaccccactgtgaacacattcttttcatcagcatatagaacattctccaggatagatcaagttaggacacaaaacaagtgtcaacaaatttttaaaaattgaaatcgtatcaagtatctcctcagataagaatggaataaaactagaaatcaagaataataggccaggtgggatagctcgcgcctgtaatcttagcactctgggaggccgaggtgggcagattgcctgagctcaggagctcgagaccagcctgggcagcatgctgaaaccccgtttttactaaaatacaaatcagccaggcatggtggcrtgcacctgtagtcccagctactcaggaggctgaggcacaagaactgcttgaacccaggaggcggaggttgcagtaagctgagatagtgccactgcactccagcctggg

SEQ ID NO: 841776 - DNA, 596 bp, Homo sapiens
atttaaaacaaagtaatatgtttactgcatctgtatgggggaaattgtgtgtgtgtgtgtgtgtgtgtstgtgtgtgtgtgttcctgcacatctctccacattcaatgaaggcatattgatagcttgaaattagacatggtgagatggtgggaatggtaatatcacagaaataagtaaacactacaagtccaaaattttcccctgcagtaacattcctcctggttgctaaatgcttaccagcatatcactagctataacccacctaaataaaagttctttgggttcctcattaatagttaagtgcttgagagctgccaatcaaagataatcatttcagcatttgtcttttatagctggtcccctccctagcctattgagaatgtaataatatgctatttatagatccttcatcaaatcatcctacctgacccttcccagaacctaaagataataataacaatactactactaataaataatttttaacatttgttgtgtgatatgtaccagattctgtgctaagaattttacggtcattattttacttaaaaaaaacaacaaccctttaaaataggaacattgataatttccattt

SEQ ID NO: 841777 - DNA, 581 bp, Homo sapiens
tgcaggagccactaaacactctggagtctaagaatatgaagaacaggaggatatttccttatagtgcccaaataaagccagccagagggtaacacccctatattcacctttgaacttctatctttctcaacagatctggcagttcagcagcctcttctccaaaatcaagagctgggagtttaatgaagtcacctccatgtctgagcacctgaagtcctgtcctttcaacattgtagagcacaaaactgacccgattcttttgactagcatgtgtcagccccgtgagcaggcccgagagagcttagtctccacctttagaatcagaccacgaggaagatacgtctcctaaaaattcagatgccactcgatgcacccttcttggatttcttctcggagttcctgaagtaggacagagtgtgtggttttgaggactcccttctgtaaactgcctatttgcttatcgggstgtattggaacacgcaatgtccttcgaaacctcaacacgaggcctaagaatttcctaagccatgtcttgtaccatagtgccacattgatgacttgtttccttttttcttttcttt

SEQ ID NO: 841778 - DNA, 581 bp, Homo sapiens
tgcaggagccactaaacactctggagtctaagaatatgaagaacaggaggatatttccttatagtgcccaaataaagccagccagagggtaacacccctatattcacctttgaacttctatctttctcaacagatctggcagttcagcagcctcttctccaaaatcaagagctgggagtttaatgaagtcacctccatgtctgagcacctgaagtcctgtcctttcaacattgtagagcacaaaactgacccgattcttttgactagcatgtgtcagccccgtgagcaggcccgagagagcttagtctccacctttagaatcagaccacgaggaagatacgtctcctaaaaattcagatgccactcgatgcacccttcttggatttcttctcggagttcctgaagtaggacagagtgtgtggttttgaggactcccttctgtaaactgcctatttgcttatcggggtgtattggaacacgcaatgtccttygaaacctcaacacgaggcctaagaatttcctaagccatgtcttgtaccatagtgccacattgatgacttgtttccttttttcttttcttt

SEQ ID NO: 841779 - DNA, 536 bp, Homo sapiens
  misc_feature 446: n = A,T,C or G
caaaaagtcaccaacttactttgtaacattttaataatgacttaagggtcaagatttttttcttctgaaaattatgttctgagttaggcagaacatagccatggycctgggccaccctgtgctatctgaaatgacctcaatacactaatgccaacctcagcgtcatgccagaatgcacagggcagcccagggagatcacacctttggcaaagtccagacaaggcccactgcagttcctatggagccagtcaccagctcctagacagcacttgggtaccccattggggtcttggagaggaagacatgtgaacataacggctccctgaaattgctcctacccatccatatttctggtcatgctttcagtctgacaaaaatggatgatactgctgtttttggtaacaaacagtgaatattcataagaacaaaagtaaaggaaaaaaagnccccgtagaaactggcatcccctaaagcagggcttcttagccttggatttattgacatttttaaatggataattctttttttttttttct

SEQ ID NO: 841780 - DNA, 557 bp, Homo sapiens
cactccaactgttgctgatctgttggaatttcctgtttcctcttccatggaaatgttttctcttttctgttgaaataatagattggaaccagtgaggcaggctaggacatgacaaytcgggacaacaaatggcatctgaaacaattgtccatggtatacaatgaatgcagtaaaatccatctatctggactcaatagaaccagagtttttcttagagattcacaataataactagaagttaaaatcataagactttgatcatgatatgaaacaaattaactgatgcccagtttagttttggtgttaaatgacatctttaagacttgtttgactgtgaatgagatgaagggcagccttctgtcaaccaaaataacatttccaaacattctagatcaatagatgggtcttctggggatctttttttcttccccctctttgttcctcctgctctcccatttgctttcctttccttctccgagattgctttcctgtcattgcttcttgcaccccagacactctggagggacaccttgattgtcgctgaaaacccacctaaa

SEQ ID NO: 841781 - DNA, 417 bp, Homo sapiens
tgtccctaagatgacaaatttaagcaattgttttagacacaaaatgcagggtgagatctcccttcatctcctgctggacgattctaacaaccaatggctcttttccatctatgcctgccaaccctgaatcaggccaaggagcaaagctgggaggtcaacccaggcaaagccagcagaaaagggctgtacttcccttctttgcaatcccaagccaagaattgctgaccctgagtgtgcacacaaattgctggtagatgaggcattggggaatgcagcaggggcgggaagaatcacaaaataatasaaagctactatttaaaatgtgcatattcggtacaaggctctaggctaaatgtctttacctgcattgtcccatttgattctcacaataactctttaaggcaagaactattattc

SEQ ID NO: 841782 - DNA, 622 bp, Homo sapiens
ggggttaccctcaaggtcctaatcccatgtataatttcctgattgtttctgcaaaattacacacatttattttgttatggttytgtaaatcgaaatccaaataactctcactaggctaaaatcaagatattggcaggcagggcagcattctttctagatgatctaggaaaaaaaaatgttttttttgtttttgtttttgtttttccagcttctagagtctgtcttcatttcttggttcacagcctcctccttcagtcttcaaagccagtagcttagcatcttcaaatgtttgactgtaattctctctctttttattataaacatttttatgattacatttagttcacccagttactccaggctattctgtctatctcaacatctgtaatttaatcacatctgcaaagtttcttataccatgtaaagtaacattctaggttctggggattacgatgtgtaaataatttgaggaccaccttctgcctactataccacctaatcttcagtacccattcaagttttgccagtggtcccatgcaatatgacacttacagcaaaataataaattttaaatcatgcattgcattcagtcctcgtctaatatatcctcaatatgtgatgt

SEQ ID NO: 841783 - DNA, 631 bp, Homo sapiens
gactttttaaaagttataattaagcaagacaaaacaagagtgtagtttctccaaatgcccttcatgacagttctggcctataatcattatttaagcgaagaaatcttaacttgcaaacgartttttactttaatccttgtcaatttcctgttgtgtagacaacaatagaagcagagaaaaattgctcggctatcttatatacacacttagtatacttggagacgcttgttaaatgatcctcttgccttctttgctataaaatttaaaaagttaattttgctcccgggaattaattgtcatctgttaaagtgagtctgttattattgtttaaaaaaatttttggtgaaccttctaatgtaatgtctccaaagtgtagggagaaagctacctctatcatctagggaagaaatacctagtgttcttaaaaactaagattcgcgggcaccctcatctatccaatcagaatgtctgtggctaaggcccagactctgcattttagcaggaatcctgaaagacccttatgcatatgtttgagcatcagcactctagtttctctttaattaaatcacccagctatcttttctgcaaggcacagaaaatatattatctctagcagtaaacttcaatttca

SEQ ID NO: 841784 - DNA, 540 bp, Homo sapiens
ttccattttccagtatcctttgaatattctgagtctcactttcatgatcaataaaatggagatagtaaaaatttaacccccaaaactatttaaggacaactctaagaaagataattgttatatgtaaataattatacaaatacaaatattactattaatctcaattgacttgaactgtccagcaattcttcacggcaataacatcccatttaatttacttccttaacatgtaaatacttttctttcccttacagatcacaaaaaaaaatgtttgttttcctttaaaaatacaaacaaattttcttactatttttttaacctagtgcataaaaaagttttgtttcatagataatgcttaataaatataatcagatttgctgcgtgggaattctgagtcagtaaacatcgtgtgtttaacttctacaagcaaacttattgaagaatcaccactaataaaacttgatcactaacctcatttgrgtcccattatctgaatcaccccagctttagctgtgatgtgaataaatgtcatttgattgt

SEQ ID NO: 841785 - DNA, 511 bp, Homo sapiens
gagattccatgtatttagcgaggtcaggaccagaccgtggcatccacattcacctctctacactttaraaaaatgtattggtgccacagggcaccagtaaaaccaaatctttgttagacgacagattcatttctgtgtgaaaccattcaccggagagtaacatttcacttttttctccttcagaaatttttttctcaatgcttctgatagaaaatcagctaaatcattatttttaaaattcttactgccccgttccgtgtttcatgctattaaattattgtaattacttcagattacatactgacattgcacacaaaatccatatactgaaggcaaagttgtttaaaacacaaatagataaaagatttaccaggcatctgacttcccacatagtgaatggaaactttgctttgtaattctcggaagcccctatatttttcataaatgacttaacaaatttaattaacttttttccttgttagccatctgtcagaagagaggactttgggga

SEQ ID NO: 841786 - DNA, 612 bp, Homo sapiens
tgctctataagtgattacaaaaacaaaaaatgttaatttagctgaagtggctaataattttaatcttggaacttataattcagtgtgaaattttaaatgaatagttacyataatcacaaataattgagagtcaacttctttttcccaaaacatacatggaaggtctgtgtgtgtaagctctgattttcaggaaccctatttctggaagcagagtaactggaaatactaagtcaagatctgaaaaccatttgaagttaaccaaaaagcacaggtagtaggattccttgtttttcacagtaggaacgtctgtttataatcttttctttcagagtttttatttagaggatggaaatagaaactcactttttgttatattgtgaaagcatgttctttctttagaggatctcagtggaattttatgttttcatttgttaaaataggaaatgattttgtttcattccttcagttacttggacatgctacttgtacatgtccaattagtatgcccagttagtgtgtaacccttcaaaactgggatttctaccttgttgctgcaaagataacttaaatgccctaaaagtagtatagcagcttttgcatagccttagttgg

SEQ ID NO: 841787 - DNA, 602 bp, Homo sapiens
cccctctatttacatatttatttatctatttataatttatttctatcagtagggactcatggattcttattttattctgtagatttataattcattacaggttgagcakcacaaatctgaaatcctgaatgctcagattcaaaactttttgagcattgacacgtcattcaaaggaattgctcattggagcatttcagatttcggttttttggatttgggatgctcaaccagtaagtgttaaaagcgcatattcccaaatctgaaaaaatcctaaatccaagtatcagataagggatctggtctcaagtatcagataagggatactcaaccattttttcatctcctgataggataggctacacatggaacttttacgtaagcctcaatacttaaagaatagtatttctagagattttctagtatttctatctgtttgggtgtacctgactaatccatagctaaaattcctctaccgcagttctagaataaggaaaatatgatggtgtcttagaacctcacagttttttaattaactttagcaatctgcacatcgtgctgccacacgaggcttcattcgttatggctggcgctggggttggaga

SEQ ID NO: 841788 - DNA, 512 bp, Homo sapiens
gagattccatgtatttagcgaggtcaggaccagaccgtggcatccacattcacctctctacactttaraaaaatgtattggtgccacagggcaccagtaaaaccaaatctttgttagacaacagattcatttctgtgtgaaaccattcaccggagagtaacatttcacttttttctccttcagaaatttttttctcaatgcttctgatagaaaatcagctaaatcattatttttaaaattcttactgccccgttccgtgtttcatgctattaaattattgtaattacttcagattacatactgacattgcacacaaaatccatatactgaaggcaaagttgtttaaaacacaaatagataaaagatttaccaggcatctgacttcccacatagtgaatggaaactttgctttgtaattctcggaagcccctatatttttcataaatgacttaacaaatttaattaacttttttccttgttagccatctgtcagaagagaggactttggggat

SEQ ID NO: 841789 - DNA, 500 bp, Homo sapiens
tcactaaaaatatttttaagactactaattttcattgtattaatatagtcttatgattgaggagtataaaagtataattaatagaaggcttcctatgttagaaatatatgatattgaaataaaattrtgtacagtaagtgacaaaatgaatgatgtatattttctgaaacctaaggaagagcttgttcatttctttttttttttttttttgagaaaaagtttcactcttgttgcccagctggagtgcagtggcgtgatctcagctcactgcaaactctgcctcccaggttcaagtgattgtcctgcctcagtctcccaaatagctggaattacaggtgcccgccaccatgtctggctaattttttatgtttttagtagagacagggtttcaccatgttggccaggctggtttcgaaatcctgacctaaggtgatgatgggcatcaaatcacaatagtatttcaattcctttgattattttaaaagattgacgtcaccact

SEQ ID NO: 841790 - DNA, 685 bp, Homo sapiens
atttttttcctggagatatgatcattagcctcaaacagaaatcacttctggtttaaccatttctcatgaaataattatttatctctaaaattttaactaccactttggtttagaagtttacctgttaccatcttggtttgaaaccaagcttagctgtttccgctttccctaactcaaaaaggcaatttcaatttctgtgtgcctctcactagagtttttagtcaactacacttgggtagaaaataaaagtatttaagaatatcttttaaaatttattcagggtgaataggtgaaatgatagtcatctatgctgtgtctgtaaacacatggatgtgtaattagaattaaaatacctatctatagatgtttctgaatgtttctgttttcactatggctaaaaactctcttgtactgccttatttcacacgagtgagataatggttgtgaaaaaaacatgaactgaagattgcatgcctcccccttccactgttctttcaaatccattgttgccattcaggaatacaaaatccaagtgtgacctgatattgggacttatagaaaaaaaaaactagaaatgcggattcatgtataaaatctcctggtttcaatgctgtcaattttttaaatacgcaatgtgcagtcctcttttcctcartgaatcaaagttcactggccatatttggat

SEQ ID NO: 841791 - DNA, 478 bp, Homo sapiens
tggaacttcctagagacttgttgaatggcattgacgaaaatgctgacaatgatatacacaatgacaatgaaatccaggctaaggtggtctcagatggagatgagaaacttattgggagctggartaaaggtgacacatcctacattttagcaaatagactgctggcatttttcccctgccctagaaatttgtaactttgaacttcagaaagatgatttagggtatctgggggaagaaatttctaagcagtaaagcatcaagaagtgacttggatgctgttaaaagcatttagttttaaaagcaaacacagcataaaagtttgaaaaatttgcagcctgatgatgcactagaaaaaagaaaaacacattttctaaggagaaattcaagccagatgcagaaatttgcataagtaatgaggagccaaatgttaatcatcaagacaatgggaaaaatgtctccagagcatgtcagagacttt

SEQ ID NO: 841792 - DNA, 582 bp, Homo sapiens
tctggaagagattagcatttaaattaataaactgattaaagaaaatctgcactcaccagtgtaggtgggtatcatccaatccactgagggctagaatagaayaaaaaggtagatgaaggggcatttctctctctctttcttctttcacatccatcttctcttgcccttggacataggagttcctggttctcaggtcttcaaactccaggacttataccagcaaccatcctcctacgtccccctggttctcagatcttcaaacttaaactgaataacatcaccaaccttcctggttatctcacttccagacagcagaagtgggacatcttagcctccataatcacatgagccaaatcatcccatattaaatctcctcttttatatatctatatatcctattcattctgtttctcttaagaaccatgatataatttgtatatttgttccctccaaatctcatggtgaaatttgatccccagcgatagaggtggggcctggtgagaggtgtttgagacatagaggcagatccttcacgaaaggattggttctgtccttacagaaataaatgacttattgctctat

SEQ ID NO: 841793 - DNA, 592 bp, Homo sapiens
gtctctgtaagttcgactactctagctttctcatgtaattggaatcatacaatatttgtccttttgtgtctggcttatttcaatcagccttrtgtcctcaaggttaatccatgttgtaacatgtatgagaatttcaatcctttttaagactgagtaatattccaccacaatttatttatccattcacctgtccatgaacatttgggttgtttttaccttttggttattgaaggtaatgctgctgttaacattagcatacaaaaatagtcttttaaacacattgttaaccactacatatacaaacattgaaatcgggaacactggtaccaattactgacacttaaattacgaatcagctttacctatactatatggagaagttctgtgctctcaatatttctctcaagacctcaaaagtcatccttgtgcacccaatcagatattttttcaaaatatgatagaaacatgttcaaccaatagccacaaaagtagtagcctcaggagactcattctcgcagtgaattgggcatgcaccaaattccaggcaagatgaggagacattgtggaagatgctctccttcttttaagccaa

SEQ ID NO: 841794 - DNA, 625 bp, Homo sapiens
caaaacttaatcactaatagcctcctgttgactggtagcctgaccaataacatagtcaattmacacatgttttatgttatatgtattatatactcttcttacaagctaaagaaatgaaaatgttattaaggaaatcgtaagaaagaagatatatttgctattcattaggtggaagtgaatcatcgtaaaggtcttcatcctcattgttttcatgttgggtaggcttagtgggagtagtaagaggaagagtaggtcttgctctctcaagggtggcagaggtggaagaaaatctgcgaagaagcaaaactcttcaaacctgtgttgttcaaggctcagctatgctaatgccatagttcctcattcctaggtattttactcaagaaaaatacaagttttgtactcaattttcatagcagctttattcaatagttgaaaattagaaacaacccaaatggctaacagcaggtgagcagataaacaacttgtgatatatgcgtatattaaaatactaagcaatgaaaaggaataactattgctaatgacagtaacatgggtgaacatcagaaacattatgccaagtgaaagccacacataaaagtacttactatatgactacattatagga

SEQ ID NO: 841795 - DNA, 559 bp, Homo sapiens
cacataaaagtacttactatatgactacattataggaaaacctagaaaaagcaaagctttaatgacagaaagcagatcaatggatggcaggggttaggggatgcagatttgtgaaaggggacaaaagagtattttgaggtgatttaaatgttttacatcttgattgtgatggttactagactgtatatacatttatcaaaattcactgaacttaaaatggaattttattgtatatgtgaataatacttcaataaatctaatactaggaaaaatataggcatataggaacaaatgttcagatcaacctcagtttagcttttaaaaaatagaaaatcactacatagtgatgatataatgctaaaatgctagcctatttagttgtgtttaaagctgtggcgggtaaatgaagataaaatttttctgtgcatttgttttcagttcttcaataaccacgtatttctactatggattagactatgtctgaaaagaattgcayaactactggaaaacagattatcctactgttattcaaagtgaatttctctttcaatttcttact

SEQ ID NO: 841796 - DNA, 462 bp, Homo sapiens
atgaaggccaatggatgaagacatttcctggagtataagggcatttatgtgtcttactacacattgacaatttgcctgtgcctctccgycactttctctagttggtgcctctgacaaatttttttttgattatatgctgtatatgaaaatccagagtcatgtttgaatatatttggctactaccttattatgtgctgcatatgaatatcagtttcacccactcaggtcaaagaaatgtaagtacagatagagaaacatatcatgcctttaatctgtcaaagtggtagaaatttaatatcaacttgcagctcccatctttctcctatgctaaattacaaggcattaggggacagagtgggggtttgagagcccctctggtccttgagtcagctttctctgtcggttactgttgagaaatccaccatttgctggtcccaggccacgttaatagttccactcatg

SEQ ID NO: 841797 - DNA, 586 bp, Homo sapiens
caaagattacatgatttgatcaacaaaattaaggaagtaatatttggatatgctcaagttatagaataaatattgtgcatcaatactaatgtcaataaatgattgaataagtaaacaaataggttgaataaacaaatattctgtacaagaatttcaactgatttatgtaaatattttgccttcaaagagttgatgtataaactctccattccttaagtgtgttttgtttgtagtgacttcattccaaaaagtacaagttggaaaggggagaatcagttgagtttatggtagagaaaactggcaaatactgccttagccaggtggtcatagtcaacatcaagagttatgagtcatgacaataatatttaccattgatacaatatgataagaatggcagtttgttcatagtctttatcccctaaacccataactctagtctaactatgagaaaaatatcagagaaattccarttaagtgacattctataaaatgcctgactagtactcctcagaacttgcaaggtgatcaaaaatgaggagtggcagagaaactgtcacagccaagagaggctaaaaagacacatgaa

SEQ ID NO: 841798 - DNA, 595 bp, Homo sapiens
gactttatacttttcacaaaaattaattaaaaatggatcatagacctaaatataaaatacaaaatcataaaacttctaaaaggtaacatagaagaaaatctatataaacttaggtttagtgatgacatcttaggtacaacactaaaagcacaatttatgaaaaaagaaattggtaagttgtagttcattaaaagtaaaaacttctgctctgcaaaaaacactactaagaaaatgaaaagacaaaccacacactgcaagaaaatatttccattatatatatgataaaggattgatattcaacatatagaaactcttaaaactcaacaataagaaagcaaacaacctaactgaaaaatgggcaaaaaacctgagcagacatgtcaccacagaaagccaccacttcttacctattactatggccaaaatccaaaacattgacaacatcgaatactggtgagcatgtagaataacagcaatgctcaatcattgttggttggaatgcaaaatggtatagctactttggaaggccatttgrcataacaaaaactagatattctcttaccataggatccagccatcatgctccctgctattt

SEQ ID NO: 841799 - DNA, 563 bp, Homo sapiens
tagagctacaaagaagagctggtgccatttctactgaaactattccaaaaaattgaaagaagggactcttccctaactcattctatgaggccagcatcaccttgataacaaaacctggcagagatacaacaaaaaaagaaaacttcaggccaatatccttgaagaatatcgaagcaaaaatcctcaacaaaatacacgcaaactgaatcctgcagcacatcaaaaagtgtatccacctcagtcaagttggctttatccttgggatgtaaggttggttcaacaaacacaaatcagtaaatgtgattcgctacataaacagagctaaagacaaaaaccacatgattttctcaatagatgcagaaaatgcctttgatgaaattcaacatcgctccattttaaaacttctcaataagtagctattgaaggaacatacctaaaaataataagagccattggccargtacagcagctcatgcctgtaatcccagcactttgggaggccaaggagggtggatcacctgaggtcaggagtttgagaccagtctggccagcatggtaaaacc

SEQ ID NO: 841800 - DNA, 564 bp, Homo sapiens
aaccaattagcagagattatctcataacttcaatgactgtgtttgattggcatttgtgattattttgatgccaagtgaatattcacagtaataatatttaactattaatgtatcagtaagcaaatatgactgacattagtagggcatattttaatgtcaacttgaccaaagtcgcctcaggcttatgactatattacattaccagtaataatgatgtactttctttgcagtaataaatagcaattgaagatctgtccacagaatgaaactttgtattttaagttctttaataatgtaagacattggtttgacatcataaaaaaaagtaacagaggcaatagaagtaattttattgcagttgtctaatgaaaaaggaataaaagagaatttagtgtgtgatggtctatttgcaacaagtggagtccattgtaatcagtggtgccggggcgtaggatattgcgagcatactggcctcaaaattacatatccattagcaggaagttcatagtcacatcacaactgacacattttgttccaraaaaaatatcacttcttcaaactcct

SEQ ID NO: 841801 - DNA, 641 bp, Homo sapiens
tttaaatactgttgactgaacaattaaacagatgaatgaatgtgcatatttgataatcaatatttaaatattaaatatttaacaaaaattaacatgtacattaggtgctctgagtgatacaaaagattctaagtccagaatggcttgaaaatcaggcttaggaaatataagaatctgtgtgcacctcagcactaagcaagggaaagggcaccctaacacaacactatcctctactacggcccactaaaaccataatgcagactacccacagttttttggcatcagtccccagtgcccttttattttgcacctcttattttgactttgttcattgcctttgttgaaattaatgttaagaaataacgacaaatacaacactattatcttgtaaacttgccatccagaaattggtccacttgaacacaatcaactatgagtgagagatgagtctaacctgtaaagctggctgagacattcaagattaatgttaccatatgagaaccctttttaacacaayctaacctttctgttttattcactctctcatatttcttacctttaaaattccccatataatgttttatataatataaattttatgcaattacacaagtattattctaaaaaagtaaactttggtg

SEQ ID NO: 841802 - DNA, 625 bp, Homo sapiens
ttgtgggatgatcaggtgaacaaaagtcacataataatatgttatcctcttccaaactccaccacaaattyaacatttaaagaatacttaaaagccaacaatctaggcagatttatataacatcactataaatttggaaataaaaaataaacacacaaacaactgtgaaaaagaaaggaatgaggaaagacttctgtatcttgtaatacgcttaatagttctttatagaatcaagatctcgggatactatgtgggctaccctagtagactcttcaccagggaaaactactacattaaatataaccccatttatattgaagtattccaataaatatattcacacaagacactgaaagactgacaaaggaggataaattccaagattagattctacttcctagaataaaagaccccaattacaattttgaataaaacaaacaagatgctgtaaatttactctgttaaaaaagattgtttcattttaatgttttctaatttgacaaacacttatgagtggatttcaagttctgtctctaaatggacaaaactagaatctcattgttttaataatatcaattctatgaaaaataaaatctggacctcataagcagatacactcactctt

SEQ ID NO: 841803 - DNA, 604 bp, Homo sapiens
tttttctctgtttttaagactttcctttccataactggttttaaaaagcattttgattatgatgtgacttgatgtaatttcattcatctttttatttttatttttttgagatgcagtcttgctctgtyggctaggctgaagtgcaatggcactatctcagctcaccacaacctcagcctcctgggttcaagcaattctcctgcctcagccttccaagtagctaggattacaggcgcatggcaccatgcccggctaatttttttatattttgtagagacggggttttaccatgttggcctgacctcaagtgatctacccatctcagcctcccaaacggctgggattacagacgtaagccatcgtacccagcctcattcatctttttttgtgtgtttggggttcactgagcttcttgggtctgttggtttatagtttttatcaaatttggaaaattttcagtcattattcattattctctttttctgctgcttcctttcctttcctttggcaactccatgtatattgtatggttggctacctaaagttgtaccacaactcacaaatgctcttctaagccttctttttctctctagtttcattttgg

SEQ ID NO: 841804 - DNA, 604 bp, Homo sapiens
  misc_feature 487, 570: n = A,T,C or G
aaaaaagtttatcctattagaaacaagacacaccatcacttattgtcttcaaacattattgcacttyaactttcttaatttgatattcatgaaataatctgcagactagttttaacagacaaataacacctgtaagcagacatgactgccctaaatagtttattaggtatgaattttacaaactttacctatattagtgataacagtggagctggagagtattgcgccttctccaagctgcctggctagaaccactaattgtgtggtggaacttatggccctttcaaaggccacggctcttttggcctgcagatgtgagcccacacatttccctgtgcttgtggactggttcggtgatccatgggtgtcaggatttcttatgatagtattatggaatggattaatgaggatagcctcaaaaaatttctatttgggatcttcccaacccagtaagaattcaggactcttagagccccacagtggcgtncagctcactcctctgcaacggactgaagctgtgagcaaactttagctggttaacaccatgatggacaggcttgccatatgtgncacccttaggaactgggcattttcggccaccatg

SEQ ID NO: 841805 - DNA, 571 bp, Homo sapiens
tcttggactgaagcaatcctctcactcagcccccacctagtagttgggattataggcatgagcccctgtgcccacctaaggagcatttttatgtctactgctgaagcwaaaagtggtttaggataaaagtggttgagggggttcttctcagtcagaaaaatttcagtattgatccctaatgtgaaacatcacaactagactttaccactgttaagccatcaaactgctgccatgtgttggaataatcaggatattcagcatctgtatctgtcaaaaaaatcatacaaccaacaacggacaagtccacaagagcaagtgaggttcactgttgacacttctgattaaataccacattttacattcagatgtttttacaaagtttttgctgatgaataatgcagggaataactgtaggctttaaattttcgtagacttacattttcacaagctttgtagatttgtccaactaagcctctttccgctctctgttgttaactaccatgatatataacacatcttagcagattccacatcaggttgtactgaatgagtgttttctcaattttgttga

SEQ ID NO: 841806 - DNA, 644 bp, Homo sapiens
cctcttaagtagctagtactgcaagtgttcaccacgaaacttggctaatttttttattctttattttttcttgarataaagtctcactatgttgaccaggctggcctcaaactcctggtctcaagcaatcctctggctttggccttccaaagcactaggattacaggagtgagccactgtgccaggccctagatcattacaatttttataagggataatgtctttgcattatgaaaacagatttttcttaatagcagagttgttaagttgaaattggatacaacattattttgttaaactgttattgagagtcaacaatcagaaataggaaacttgtcatggcatctcataattgcaatttgatttgatgatggtgaatgttatacatcctatctaagtcttctgtggattaacatattattggaccttctttacctacatcttgatccaaactgcctaacatatagttgactggtataaaacctctttaaatatgtctttgaaaaattagttgtgaacaaatatgtaagtagccactagtgatgttctactactcattcttaaatcacagtgccatccttaaaaggggaatttggatgggattgatttaaatcaccagctaggaaaatttggtttcaggcagt

SEQ ID NO: 841807 - DNA, 644 bp, Homo sapiens
cctcttaagtagctagtactgcaagtgttcaccacgaaacttggctaatttttttattctttattttttcttgagataaagtctcactatgttgaccaggctggcctcaaactcctggtctcaagcaatcctctggctttggccttccaaagcactaggattacaggagtgagccactgtgccaggccctagatcattacaatttttataagggataatgtctttgcattatgaaaacagatttttcttaatagcagagttgttaagttgaaattggatacaacattattttgttaaactgttattgagagtcaacaatcagaaataggaaacttgtcatggcatctcataattgcaatttgatttgatgatggtgaatgttatacatcctatctaagtcttctgtggattaacatattattggaccttctttacctacatcttgatccaaactgcctaacatatagttgactggtataaaacctctttaaatatgtctttgaaaaattagttgtgaacaratatgtaagtagccactagtgatgttctactactcattcttaaatcacagtgccatccttaaaaggggaatttggatgggattgatttaaatcaccagctaggaaaatttggtttcaggcagt

SEQ ID NO: 841808 - DNA, 253 bp, Homo sapiens
gcaggaggacttcaaaaccaatattcttctgaagaatctagtgtccattgccagaaaagccagtctctggcaattcctgagycctaatgagcaaatgtatggaacccatggggagacaaagaagatatttggagaggtggaaaaacagcctgattcatttgctgtgctggaactctcaggagcatggggctcacacacactgtgaggggcagctaaggaacactgggtaagtgatggctctgagagcactttg

SEQ ID NO: 841809 - DNA, 253 bp, Homo sapiens
gcaggaggacttcaaaaccaatattcttctgaagaatctagtgtccattgccagaaaagccagtctctggcaattcctgagtcctaatgarcaaatgtatggaacccatggggagacaaagaagatatttggagaggtggaaaaacagcctgattcatttgctgtgctggaactctcaggagcatggggctcacacacactgtgaggggcagctaaggaacactgggtaagtgatggctctgagagcactttg

SEQ ID NO: 841810 - DNA, 253 bp, Homo sapiens
gcaggaggacttcaaaaccaatattcttctgaagaatctagtgtccattgccagaaaagccagtctctggcaattcctgagtcctaatgagcaaatgtatggaacccatggggagacaaagaagatatttggagaggtggaaaaasagcctgattcatttgctgtgctggaactctcaggagcatggggctcacacacactgtgaggggcagctaaggaacactgggtaagtgatggctctgagagcactttg

SEQ ID NO: 841811 - DNA, 253 bp, Homo sapiens
gcaggaggacttcaaaaccaatattcttctgaagaatctagtgtccattgccagaaaagccagtctctggcaattcctgagtcctaatgagcaaatgtatggaacccatggggagacaaagaagatatttggagaggtggaaaaacagcctgattcatttgctgtgctggaactctcaggagcatggggytcacacacactgtgaggggcagctaaggaacactgggtaagtgatggctctgagagcactttg

SEQ ID NO: 841812 - DNA, 553 bp, Homo sapiens
aagagctggagaaaggagagagccaaagaatgtctgggcaggaactgaggtgaacagcggagaaaggaaggygtcttcctgggctgcttcagccttggagtttgtgccgacagcaggttttctgtcctagagtggatggcgtgcaggaagtgtttgacagatgagatggcccatggagcggtgacctgggatcagagcaggcctgccaaatggggccaggtggctgcccagcttccctggagtgagggtttcagaccctcctccctcagatatgctaatgaggctcagtagagagggtgttgccagtgcctcagatctgcagtcttgggaatcggctttgggctttctggagggaatgcccgctgtgtgactcgggctcagtcctgggacctctgccgggcagtggcgaggcccacttcctggaggtcaccatttagccctgggtcatctttcatttcctccttgtgccaaggatttcaaggccagacataagagtgggaaaacactagtcagtcattcaataataaccttaccatattcagccagaaacatg

SEQ ID NO: 841813 - DNA, 671 bp, Homo sapiens
caaggtcaggagatcgagaccatcctggccaacatggtgaatcctcgtctctactaaaataagaaaaattagccaggcgtggtggtgcgtgcctgtagtcccagctactcaggaggctgaggcaggggaatcrcttgaacccaggaggcagagattgtagtgagccgatatcatatcactgcactccagcctggcaacacagcgagactcagtctcaaaacaaacaaacaacgacaacaattaaaaaaaactagaatccctcttccctaagaagggtcacagaaaccagacctcttttcgccaatgccagccacaaaacctaaaaatactactccaattgtctctctgccacatctgtgtaaaaaccggacataaagaaattatctggccaggcgtggtggctcacacctataatcccagcactttgggatgccaaggcaggcggatcacttgagcacaggaattggagaccggcctcagcaatatgaggaaaccctgtctctataaaaaaaatacaaaaaaattagtcaagcctggtggcacatgcctgtaatcccagctactcagcaggctgaggtaggaggatcacttgagccagtgaggtcaaggctgcaatgagctgtgatcatgccactgcacttcatcctaggcaatagagccagaccctgtct

SEQ ID NO: 841814 - DNA, 623 bp, Homo sapiens
ccaaaggaaaatagatcattatataaaaaagacacctgcatttgtatcgtcattgcagcactattcacaatagccaattcacagaaccaacctaagtgtccatcaacagttgacttgataaagaaaatctgtgtgtatacacatgtatcacatatgtgtgtatgtatagatgtatacatgtgtatacatctatacatatatttatacatctatacatatcatggaatactatataaccataaaatagaatgaaatcatgtcctttgcagcaacaaggatagaactagaggccattaccctaagtgaactaactcaaaaacagaaaattaaatattgcatgctctcatttacaagtggaagccaaataatggctatatatggacataaagatagaaataatagatactgcgcactccaaaagtagagaagggggttgaaaaattatctatcggatacaaagttcactcattaagtaatgggttcactagaagtccaatccctaccagcacacaatataccyaagtaacaaacatgtacatgtacccccgaattcaaaataaaattttaaaaataaaaatgcatgtcatctattttgtcattctttattatgtttatattattag

SEQ ID NO: 841815 - DNA, 598 bp, Homo sapiens
ggtcagagcagactctcagagggaagatggacctgactattccctcccttttcagaatcagagatggagtgaatgaagaaacataaagcaggaataactgtattctaaccttgaacatgawatctgagtgctctgctaatatatttccacagcacaaaagaagggaaaagagaactatagcagaaaacacaaggtacaaacaggcagccaatcttcagtggctgactttgcaacccacccgagctgataaagctgcagccacgtaggaattctcttatctgattgtcagccaagatgagaatgtggcactgggccttgaaaactttagctgtgcaagaacttgaaatgcccttacttgaaatttcatgagaaatgtcttcacttgcctttcttagttattgtacttttgcttggtgttaagaatgcctagataactagtcaacatcctcatccacaaggaactcacaaataacaggaaaaacagatatcatattaatcaaggtaattaatgccatctgcccaacatacccaacattttagtggcttaatacattacaagtttatttcttgcttacatcatgtccaagtgtgggttgag

SEQ ID NO: 841816 - DNA, 598 bp, Homo sapiens
attaaatgacctttttaatacttgatcatttgcaaaggaatttttacatatgttattgtgctccattctcacaaccaacatatagagcataaataaccccaagctggagataagacttaggcacagggaagtaaaagagagcatgcacacgtgtgtacacatgcatatgcacacattcgcagatcctcttttgcttgacaaactgctgttcacccttcaagcactgtgcccacattgcactttgaagctttgcctgaccatcccatttccagccaggtggagttgccttgatctcctttccacccccctgcccttgctgccaaccttaatgaatagatctctcgcaatcttgtctctcccactggactctggactctttttaggtaggtataatgacttgccaactatagtgctgtacatgttggcacgagctccatgcctttttcctctggcatgacatagtcattcagaatccatatttctctgacgttaacaccagttgcaccagctgccaatgaaggatgccctcttctracaaaaactttactgaaaattagcccccagagagtgtctcatgtgtgctgacttattcctcctc

SEQ ID NO: 841817 - DNA, 567 bp, Homo sapiens
aaaaatgttcttcaattctataggttgtctgtttgttgattgtttcttttgctgtgcagaagctgtttagtttagttattttgtatttgtcratttttgcttttgttgcaattgcttttggcgattttgtcctgaaatctttgccagttcctgtgtccaaagtggtatttcctaggttatatttcagtgtttttataattgtgggttttacatttaagtcctttatctatctctagttgatatttaaatatggtgtaaggaagggctccagtttcaatcttctgcatatggctagccagttctcccagcaccgtttattgaacatggaatcctttttccactgcttgtttttgtcagctttgtcaaaggtcagatagtggtaggtgtgtggctttatttctgggctctctatcctgttcccttggtctatgtgtctgtttttgtaccagtaccatgctgttttggttactgcagacatttagtatagtttgaagttgggcaatgtgactcctctagctttgttctatgcttaggatgacttggctatttgggatcttttttggttcc

SEQ ID NO: 841818 - DNA, 617 bp, Homo sapiens
ctatttttccccaagtttttccgtcctcttccattatctccatttttatggattctatccttttttaaactttcaatattttcaacatacttatattaaagtactttttcagctgattttattacttctactttcttgggcatgaacgctctatttgttgcatctgctagacttacctctcatagtggtgtttttcagtgttttgtgatattttctcctcagcttatcttcaattggaattttcttcagtgagccctgggttatgaagccctccttggggggatgtttcctagagactttcagctggggtcatgtgcattcaccggttctggactttctcatttagtcctcagctcaggtttcctttgccacagggcaattctgctcagggcatggcctcactgataaatctgagcccaccctagaaaagaataggcagcaaattttctgccaggactgcacagtccaccattctgaccaatatatttgcatgtgtttaaattttccatcctgccttttatcccttaatgtttgcaacatgagtatttaaatagcggcccttttacctggagcctccggaactttaggrcataaaaataggatcagctaaagtttga

SEQ ID NO: 841819 - DNA, 598 bp, Homo sapiens
attaaatgacctttttaatacttgatcatttgcaaaggaatttttacatatgttattgtgctccattctcacaaccaacatatagagcataaataaccccaagctggagatragacttaggcacagggaagtaaaagagagcatgcacacgtgtgtacacatgcatatgcacacattcgcagatcctcttttgcttgacaaactgctgttcacccttcaagcactgtgcccacattgcactttgaagctttgcctgaccatcccatttccagccaggtggagttgccttgatctcctttccacccccctgcccttgctgccaaccttaatgaatagatctctcgcaatcttgtctctcccactggactctggactctttttaggtaggtataatgacttgccaactatagtgctgtacatgttggcacgagctccatgcctttttcctctggcatgacatagtcattcagaatccatatttctctgacgttaacaccagttgcaccagctgccaatgaaggatgccctcttctaacaaaaactttactgaaaattagcccccagagagtgtctcatgtgtgctgacttattcctcctc

SEQ ID NO: 841820 - DNA, 616 bp, Homo sapiens
tgctcaattactgtgtatctgctttctttagcgttcagaaaaatacaatactcacaaactggaacattccacttcccactgtcacatgacaaaagcagcctcctcctggtgaagtcagatattttcacatctaataaattctaataaaagttcttgaagactgccttccgtactcagacttgctggttcgtttacataacagttcaattttgttttgcttcttaggttggaaagaggataaaaatcacaaaaccatataaattcttgaaacctaacaaccctctacccccattgactattatcatcttcatctcaaaggaagtaagatagcaaaggttacaagctgtgttcactcatccagagctggccctgagcatgtttgtcaaatgggccaagtttctcttgattctcccaccagccttttgcttgctgagtcctcattcctcgggcctcatcaccatcatttttcaccccacccctaccccactatctctctgctgccccacccgcccagacccccggcttgcccctacaagatgaaaggcctgaagtattagccagaacmctcacgcgctttcagaggactcttagaggccggggcaaaattatagttgga

SEQ ID NO: 841821 - DNA, 616 bp, Homo sapiens
tgctcaattactgtgtatctgctttctttagcgttcagaaaaatacaatactcacaaactggaacattccacttcccactgtcacatgacaaaagcagcctcctcctggtgaagtcagatattttcacatctaataaattctaataaaagttcttgaagactgccttccgtactcagacttgctggttcgtttacataacagttcaattttgttttgcttcttaggttggaaagaggataaaaatcacaaaaccatataaattcttgaaacctaacaaccctctacccccattgactattatcatcttcatctcaaaggaagtaagatagcaaaggttacaagctgtgttcactcatccagagctggccctgagcatgtttgtcaaatgggccaagtttctcttgattctcccaccagccttttgcttgctgagtcctcattcctcgggcctcatcaccatcatttttcaccccacccctaccccactatctctctgctgccccacccgcccagacccccggcttgcccctacaagatgaaaggcctgaagtattagccagaaccctcacrcgctttcagaggactcttagaggccggggcaaaattatagttgga

SEQ ID NO: 841822 - DNA, 613 bp, Homo sapiens
tttcagtttcaaatggatttttctatcttgaatgagatgctccaagttttgctaaattagcaatgagtttcctatggagcttgaaagaaataaattgtcatttaattatctacaaaattatataacagttaattaaagtactgctatcaaatgttaaagccaacaatccactacggagcaaaatgtttaccattatagaaccagaggtcttcagaggaaacaccgatcaggcctcaacacttccaaatagtgaatgagaacttacaataccatttggctgtctaagtcaattttccgatgtctgattttagtgacaggggtaaaagccattaattctgaaagtcattattttgcatgtatgtgtccatctcctccttcttcctctcacataccctctactgcaagtccacatggaccactaacttagtatctgacattttctctcctggccctagtcccttcatactttcattctacataatcggagtaatatacaacattcaaagaatttcaacaataagagcatgrcaagttattttgcaatgtaccctggcacgcaaacataagtgattaaaatgttttgctgctgtcagtagcaccctttttataagaa

SEQ ID NO: 841823 - DNA, 571 bp, Homo sapiens
aaacgaagtttctgtttccaggccacaagctctgcacccctctacagcaggcaggccaacgtgaatagttatgcagttatgtgctgcacaaaagtgcccagtaaggcygatatcgaaatcagtactgggctaaagattatctaaccttagagaggtgtctaggtttgactattggcgtggagagaaaatgaggcagctgtggagcaatggttaaaaccatgggttctagaaaaagctgaaatcaaatcattctactagcttatgtgacctagcataagctattcagatttgtttccccagctaatagtaacaattcatgggttgataggagaaataatatactagtgtttagtatggtacctggtaggtgatcaataaaacattagctattactgtatgttagggatgaagagggcttactcattcagttttcctctcggagttttaaccaataagacactgaagtcagacttttaaaaatatatacaacagaggcgctgctgcaccctcactctataggatgtcctggtgccttcctccttatccacgctggagtcctttgtgtagggag

SEQ ID NO: 841824 - DNA, 528 bp, Homo sapiens
taatccagccagggagactcactggtgtgtgaagaatcatactatctgtataatataataagtttgcggttcatggagctttgtgygaagcactgtgagaaaacagggttggggagggaagaatgaataattctgcctagagtgtggaatgaggcttaggggaggcttcaaagaggaaatgacatttcatcaggctcctggggttcaactgatggagaaggaggtaaatcctcagaaaaatggagacatacggctcataagtcagcatggtgtagtgtggctggaagctgggtgtgtctactggtaggggagaagcatgggatgggatcacagagcagccctaagtggcatccttggccaccggatgagccacttaaagcagacattggcaaaccatggcctgtgggccaaacctagcccttcatctgcttttgtaaataaagatttactggaacataaccacacttgtttgtttatattttccatggctacttttgcgctataatggcagagttaagtaatgaagac

SEQ ID NO: 841825 - DNA, 528 bp, Homo sapiens
taatccagccagggagactcactggtgtgtgaagaatcatactatctgtataatataataagtttgcggttcatggagctttgtgtgaagcactgtgagaaaacagggttggggagggaagaatgaataattctgcctagagtgtggaatgaggcttaggggaggcttcaaagaggaaatgacatttcatcaggctcctggggttcaactgatggagaaggaggtaaatcctcagaaaaatggagacatacggctcataagtcagcatggtgtagtgtggctggaagctgggtgtgtctactggtaggggagaagcatgggatgggatcacagagcagccctaagtggcatccttggccaccggatgagccacttaaagcagacattggcaaaccatggcctgtgggccaaacctagcccttcatctgcttttgtaaataaagatttactggaayataaccacacttgtttgtttatattttccatggctacttttgcgctataatggcagagttaagtaatgaagac

SEQ ID NO: 841826 - DNA, 623 bp, Homo sapiens
ttcttagaagagctcactataatatctttggcaaatgtttacaacaattaactataccacatcactaaatagcattacttactctggagtggcttttgatttgcctggtgaaaatgtatattcatctttatctaacccatctgaaggaacaaattcatcttccccatcatttgttatgggagatgctttaactttcaattcctctaaatcattattgtcatcatcatcatcatcagcatcatcatcctcttcttctgagaaatcaaatgtgtatttaggtctttcggctaggaggaaaaataaaaatgaatgttaaactcaaatcctagctttgtatacatgaattattattactgataaagcatttgaagtatattccaaccatctctaaaaataccataagaaataaaagcaagcatttacagaataaaagccaacaactttggccttagttatctggtagtgttaatgtctgtcttacactttccaggaggctaccacataatactgtgcatgttaggagrgcataaactaatgtacttattgatatacttaataattaatcaaaaacactgaggaaagtagtcaatatggccttgtctcatacagccattatacaaatg

SEQ ID NO: 841827 - DNA, 629 bp, Homo sapiens
aatatcaagatttgagtgaaagtcaaatatttgagtagagtttcaattatatgttcgtacatagtccaaaatatgtataaattatgcataaaatatatataatgatttctaatattaaagatttatggtaggccataaatatgccacgtccttgccctaatccacagaaactagtgttaatttatatgggaaaagagactgccagtgtgattaaggaccttgggacagaaaggttatcttggattatgtgggtggttctgatttaatcaaaggagtccttataagagagaagtaattagaaagacagaagagatgttaagagggaggtagtgatttaaagatgttatactgctggctttgaagttggaagaagggtaagcccagaaatgtgagaaaagaaactttagaagctaggaaaggccaataaaaggattttcacctcagagcctctacaaggaataagtcttgccattaactcagtgaaactgatttagaacttctgatttccagaactgtgagagaattcattcgtttatgtcactaaatttgttgtaatttcttacacgagcrgtagagaatttttaaactctctcgtgtgtatgagcttcaaagtttcaccgaaatagtta

SEQ ID NO: 841828 - DNA, 576 bp, Homo sapiens
atgaatcttaaagatcaatctgagggggctaaaaaagaccctaaaccattgttcattaagatgaattcaacttcaatttaatcttgctacattttatcacttagtctttggattacttcacatrccaacagaaaactattattttataacctctcttcagaacctgcctgtattaccactgaaggagagtgttcagatgcaacaacacttccactacttgacatattcattcactcttcagacatttactgggcagcaactataggcagtaggaccacaatcaaacttttccccacccaggtactgtcttcctattactttatcattataagaatctcccccaattttggagaaataagaaacagtggtacttttgacagattgctgaataacaaagttctcagaaaacgaacatatctgcagagcatactgacattaatattttatgctttttctttgtattgctgttttaaatatatgtgtcttacatcctacactaaaagcatctgaaagtaatatttagtttatgtttcaaagaacctcataatgtggcttttccactgaaggcaatcatta

SEQ ID NO: 841829 - DNA, 529 bp, Homo sapiens
cacctagaactgcaagcagtattaccaggttctgttgtggtcttcagcaagttctactaggtatctgcctgagtggtgggggttgaggggaggggctttctctcctggggggaaaaagagctgctgggtaactgtgctcagctgtggctacctgggaagtgggacctgagggctgaaggattgtgatgaactctggcctgcttcctcaggttgttcagattctttctcttgctgaatgacatcattggaaaggaaaaactctgctgtttgactgatttgtatatttacactcttatcttcactcagttcctctacttgcctttttacttttaatatgaagttgaatttgtaattcattttctttcctaaggaaaaaggacatttaagactataagtttaccttaggctatagctttgactgaagccaagtttattgtatttgtaactttatgtatgyatataccttagcaaataacttttaagttgtgctgaagtatgttaatttatgcttacatttcatttaatcaga

SEQ ID NO: 841830 - DNA, 472 bp, Homo sapiens
gtttcactaataaattcatgtataatataagaagatacatttccactactacacaactttttcagaaaactgaagaggagaatatactttctgattcattctatgaagctggagttatgctgataccaaaaccagacgaagacattacaagaatgtaagactacaggctggggcatggtgactcacgcctgtaatcccagcattttgggaagccaaggtgggaaaattgcttgagctcagaagttcgagaccagcctggacaacatagtgagatgctgtctctatcaaaaattttaaaaaagtagttgggtgtggtggcacacacttatggtcccagctacttgggagacggaggtgggaggtcaaagctggagttagctatgatcgcaccactgcactccagccaggaattagaaygagaacctgtctcaggaaaaaaaaagaagaaaaaaaagtgcacaggtctacaacc

SEQ ID NO: 841831 - DNA, 507 bp, Homo sapiens
ggaggggttaattttatttttttttactttagcaaataataaatagttgataaattmtttgagaggtgtgatctgaaaaaaaaattgctggaaaatacacagtgacagaaaaatgatgtttgggaatgctttcccacaacacaggagataccaattttggtctaggcttatttgagtgtttttactttgagttgtatatcatatgagtatgactaataatatctctgtttaaatgaatctttaatacatcagatgacttatcatagaaatcatggaatcactctgttacacatagcatgtggtttctttttatttcttgtacacatgttttgatatcatacactatttttgcagagagctatttccttatttttatttgtggctctataattagactaaaatcatattagaaattgtggaaatgtaactagacatggtatcatgtccatgtagtcccacctattcaagagatcaagccaggagaatttcttgagcccaggagtttaa

SEQ ID NO: 841832 - DNA, 543 bp, Homo sapiens
tgttgtttgggaacgctttcccasaagagaggagatacaaattttgatctaggcttatctcagtaagtgtttttactttgagttgtatatcatatgagtatgactaataatacctctgtttaactgaatgtttgttacatcagatgacttattatgggaatcatgaaatcaccctgttacacacagcatatagtttctttttatttcttgtacacctattttaacatcataccatacttttgcagagagctatttctttatttttattcttggttctatataattagactaaaataatattagaaattgtggaaatttaactagacatggtatcatgtgcctgtagtcccacctattcaagagatcaagccaggagaacttcttgatcccaggagtttaagaccaagcttggcaatatagcaagagcttatctctaattttaaaaaattgtggaatattagaaatttaaattctgttctcacacctgtattagagagggtttaccctgtgttttccaagtcttttttattaagagtatactgt

SEQ ID NO: 841833 - DNA, 555 bp, Homo sapiens
ataccagtttggcaggaagataacaccttctgtatccttaactggattcagtaatacacaggaatgtgtacacatgaggaaaagaaggtgaatcgatctgtgtggtgatatttttyaaagtgtatgctttagagttaaatattattaatggtttaataataaggtgatttgtaaaatcagtaacaaaaataacatcaggtagctgtgagacagcttcaatgaaaacaagatgatgtcttaaacaatcagcaacaaaagctttgctggatgcttcatcgcgtcattgcatctatttagaaaatgagatgcaggattcaaggaagaaattagaccagatgagaagtcaagtatgtatgaaactttgcatgccaacaactgttaatctgtagctagttaactaatataaagtgttttggggtactaattttagtggatggctttcttttgtatttttattataattaattttattaaaattttatagtggatggctttcttttgtattttccttattattaattttattaaaattttattataatgcacctatatctt

SEQ ID NO: 841834 - DNA, 551 bp, Homo sapiens
ggtggttgtagtatttttcaaactacttttgcgtatttgtggtttttctcctttcttacctttaatcttatttgttttttttttaaagcctttttgtcgttgttgttgttgtcattgttaatgtagataatacaaataattattttaattgggaatttgagacctgaatcaaactatcaaactttaaaagtagtcatactatttttcacattggagttcttatgtttgaggctatcagaagtgttttatttgtttagataacaatgacagtgagactgattatgagcagtaaaatatttattggcctgtatgtactacttttatcagagtagactgacagtgggagtttatatttcctaaagcaagaatttatagctaaagaaccaggaatcacatattgctaaggagaatctctttaaccacatatactatgcagaaattgaagtcaagaactataaacttcttaagctgcttcagtccccttacattggttrtttgactgaacccattctttatgattcccttctatagcagatagagtgaattctacc

SEQ ID NO: 841835 - DNA, 579 bp, Homo sapiens
acatgggggtgcagtgtctctctgatataataatttcctttccttggatarattctcagtagtaggattgctggatcatatggtagttctatttgtagctttttgagggacctcatactgttctccatagtggttataactagtttgcattcccaccaaaagtatatgagttcccttttttctgcatcctcgccagcatttttttttttttttttgataatagccagcctccctggggtgagatgatacctcattgtggttttgatttgcatttccttgatgattaatagtgatgagcagtttttcatgtatttgttgaccatgcatatgacttcctttgagaaatgtgatttgggatcatttgcccatttaaaaatcagttttgttttgttttgttttttgctgttgagatatttcagctccttgtatattttagatattaatcttctgttggatggttagtttccagatattttctcccattctgtaagttgtcttttactctgttgattgctttctttgctgtgcagaagtttttagtttgatacaatcccatttgtttatttttgcttttgttgc

SEQ ID NO: 841836 - DNA, 571 bp, Homo sapiens
acttttgaggttctaaataaattttagagagtaggtgaatttgtaaatatsaaatgtataataataatgatcaactgtatataaataagaaattcaaaaattttccatgccttctggaatactttggaatgttataataataagaattctttctttctttccttccttccttcctttctttctttctttctttctttctttctttctttctttctttctttctttttttttttttttttttgagacagagttgcttttgttgcccaggctggagtgcaatggcatgatcttggtggctcactgcaactccacctcctgggtttaagcaattctcctgcctcagcctcccaagtagctgagcttacaggtgcctgccacatacctggctaatttttgtagttttttaaagtagagatgggatttcaccatgttggccaggctggtctcgaactcctgacctcaggtgatccacctgccttggcctcccaaagtgctgggattacaggtgtgagctaccgagcccagcctagaattttggctttcaaatgtttgtttatttcaaaacaattgg

SEQ ID NO: 841837 - DNA, 571 bp, Homo sapiens
acttttgaggttctaaataaattttagagagtaggtgaatttgtaaatatgaaatgtataataataatgatcaactgtatataaataagaaattcaaaaattttccatgccttctggaatactttggaatgtyataataataagaattctttctttctttccttccttccttcctttctttctttctttctttctttctttctttctttctttctttctttctttttttttttttttttttgagacagagttgcttttgttgcccaggctggagtgcaatggcatgatcttggtggctcactgcaactccacctcctgggtttaagcaattctcctgcctcagcctcccaagtagctgagcttacaggtgcctgccacatacctggctaatttttgtagttttttaaagtagagatgggatttcaccatgttggccaggctggtctcgaactcctgacctcaggtgatccacctgccttggcctcccaaagtgctgggattacaggtgtgagctaccgagcccagcctagaattttggctttcaaatgtttgtttatttcaaaacaattgg

SEQ ID NO: 841838 - DNA, 648 bp, Homo sapiens
cctgcagccccagtgcgggatccactaggtgaagccagctgggctcctgagtctggtggggacatggagagtctttatatctagctcagggattgtaaatacaccaatcgggactctatatctagctcaaggtttgtaaatacatcaatcagcaccctgtgtttagctcaaggtttgtgagtgcaccaatcgacactctgtatctagctgctctggtgaggacgtggagaacttttatgtatagctcaaggattgtaaatacaccaatcggcactctgtatctagctcaaggtttgtaaatacaccaatcagcaccctgtgtttagctcaaggtttgtgaatgcaccaatcgacactctgtatctagctgctctggtggggccttggagaacctgtgtgtggaaactctgtatctaactaatctgatggggatgtggagaacctttgtatctagctcagggattgtaaacgcaccaatcagtgccctgacaaaacaggccacagggctctaccaatcagcaggatgtgggtggggcccagataagagaataaaagcaggctggccgagccagcattgsgaacccgctcggtctctcttccacactttggaagctttgttctttcactctttgcaataaatcttgctac

SEQ ID NO: 841839 - DNA, 648 bp, Homo sapiens
cctgcagccccagtgcgggatccactaggtgaagccagctgggctcctgagtctggtggggacatggagagtctttatatctagctcagggattgtaaatacaccaatcgggactctatatctagctcaaggtttgtaaatacatcaatcagcaccctgtgtttagctcaaggtttgtgagtgcaccaatcgacactctgtatctagctgctctggtgaggacgtggagaacttttatgtatagctcaaggattgtaaatacaccaatcggcactctgtatctagctcaaggtttgtaaatacaccaatcagcaccctgtgtttagctcaaggtttgtgaatgcaccaatcgacactctgtatctagctgctctggtggggccttggagaacctgtgtgtggaaactctgtatctaactaatctgatggggatgtggagaacctttgtatctagctcagggattgtaaacgcaccaatcagtgccctgacaaaacaggccacagggctctaccaatcagcaggatgtgggtggggcccagataagagaataaaagcaggctggccgagccagcattgcsaacccgctcggtctctcttccacactttggaagctttgttctttcactctttgcaataaatcttgctac

SEQ ID NO: 841840 - DNA, 495 bp, Homo sapiens
ctggaaaggattggaaggggaaggtcttgaggagaggctcctggtaggttttttctgatcaatagtcccaagggtcaaaaatatcaacagtgacagtcagtgctgggatcattctccctcacagatctgaacccttgagtatgttgattttaatgacagggacgttctttatccagccttatgcctgaccaactctgattcatccttcaagtgaggagatatctcttcaccctcgaagctttccctgatgcacaccccccggccaggcctgccccagagctccccactgccaccatcacttccccagtgcaggcccttacccccgtctggcctgttgggcttattgactgaggcccccaccctccccagccagcagcatgcctgccccacaaagstatccagcaaatacagattgagacacaaatggatgaaagacatggaaggaatgtatggatggaatggagggatggagtggacacatggaatggatggata

SEQ ID NO: 841841 - DNA, 404 bp, Homo sapiens
ttcaccttctcctttccaaatcctcccactatggcccgttaagcacaaccctggagctattgtgactttctaggggctgggagacaactgaaatttctgagagcgctgagctgatagggtcctattagagtgcctggtgcacaaaacctgcacctttggaatattggggtaatcaaagggagacaggcctgctaggtaggaatcccaccaccctgagttgcacttctcttgtgtattcaaaaattcaatatacaaagtgggtttttctctctttttttttttttttttttttttttgctgaataagatattttaatctgttstaattaaaaagtcaaagtagaatgaacaggaggtttaaaaacaggtccccatgccaacctcaagcatgtagttgttgtccaa

SEQ ID NO: 841842 - DNA, 635 bp, Homo sapiens
gattttgtatcctgagactttgctgaagttgcttatcagtttaagaagctttggggctaagatgatggggttttctagatatagaattatctcatctgcaaacaaagataatttgacttcttctcttcctatttgaatacctttcatttctttctcttgactgattgccctggccagaacttccagtactatgttgaataggagtggtgagagagggcatccttgtcttgtgctggttttcaaggggaacgcctccagcttttgccctttcagtatgatattggttgtgggtttgtcatatatggctcttattattttgaggtatgttccttcactgcctagtttattgagtgtttttaacatgaagagatgttgaattttatcgagggtcttttctgcatttattgagatagtcatgtggtttttgtctttagttttgtttatgtgataaatcacatttattgatttgcgtatgttgaaacaggccttgcatcccaggtggataagctttttgatgtgctactgccttctgtttgccagtattttgttgaagatctttgcatttatgttyatcaaggatattggcctaaagttttctttttttttatctgatctctgccaggttttggtatcag

SEQ ID NO: 841843 - DNA, 603 bp, Homo sapiens
aaataacttctcagtaattaacaaatcaagagaaggtatgcaagtttctacttctgattttggtccaatatagtgtttatttaacttataatttgtactctttatagagaacccttaagacattaaattggaagagtattttttaatcaaaaaagcagtaaatctaatttcaagtaatgctttctacgcacttattatgtgccaggtactgggcttggttctttcattcgatagtgtttgtttaatcttcttcgttcttgaagctattgctaagaaaaaaaaaacaacactaccctttttgatatgataaagcaactctaccaaagatactgccttctgtaaaacaaaccagctatcagtccaaggacagaacggcagctttataattagctaatcattaatgaacattagccaggtgacatttgtaatgacttacacagctaggtatgtggctatatgcacacacaagtaaatccttcacccaaagctttatgctagaccggccttccttaatcaagtttccttccctattgtgtgtgtgtgtgtgtgtgtgtgtgtgtgygcgcgtgtgtgtgtgtttagagatagggtctctctctgttg

SEQ ID NO: 841844 - DNA, 593 bp, Homo sapiens
gataaaaaacatatataggctgcaaaaaaagtacacataaaaaagtggtatggctacactgatattggacaaagtaagcttcraggcagagactatgatcagaggtttaaacatggtgtttcatgatgataatcaggaagacatacgaatcataaatatgtgtgcacttaaatacaaagtttgaaaacagatgacacaaaaactagacagaggtaaaagaaaaaattgataaatccacaattgtggttaaagaataaacatgcctgtggataaagaataaacatgcctctctcagaactcacagaaactcttaataaaacaaaatccagtacagatactgtagatgtggacacactactgaataaattaatctaattgatatttttagaacactatatccaaaaattgcacaatgcacattttcaagtacacaagatgtattcatgaacatagaccatatgccataatgataattaaaataagtcctaataaatatctaaattaaattctttttaagtttttttaattgacaaccattttacatattcatggagcacatagtgatgcttcaaaacatgtaatgtatatagtga

SEQ ID NO: 841845 - DNA, 558 bp, Homo sapiens
ttattttcaaaatcccaaataattccttatatattgatataattaagagtaacaaattcttacagcttaaaggaaatgaaaggtctagtctaaacagtwgggaccgagacctagagaggaagtgatatttccagactagagtccaattctcctgaatactcaccctgtgacttttcactcctcctcagaggctaaacatggcgggggatgtcaggggttgacaactctgcttcattcctaaatggtggctccggtgattgttttctctacgcccatgtgtgatttcattctctctctcaataactactggatgttttctctcttttgactcagctctattattgtttaatttttttcttgcatatccaagttcatatcatcctggcaaaccacatataacacttgaagcaagcaggagagttagaagaccacagaacactccagccctgagcagtcagatggcaacagaagaaagggcctatccatcttgggctcctcaactaacatgcaaatccaataaccatctcccttgtgtctcccacgcagtagaaacagctg

SEQ ID NO: 841846 - DNA, 557 bp, Homo sapiens
cccaatgactccttttgtgtaatatagacgttagctctctcatcaggggtttacttatttttcttccatcgggaagtatccatctcatcttcagtttgagtgacccctatcctgtctaattcttctttctyctctctgataaactggggccttaatactaccttagggatgtctgggatcaggctaaatagtctaatttcttcctccagggaggcttgcttagcagcttcagctgcaaacctgtttgctacagcttctgtggtgttccctttctgaaaaccatttacatgaactatggctacctctgctggaagcaagaggctttctaaaacctgtttggccagttccaaatgtaccaattattttctcctgctatttattaggccccactctgtccagatttttccaaaagtgtgtaccactttggattttaagtaggcatacttaaattcagtgtatatagtgcctttttggccttcaaggagctttagggcctggttaagagcataataattcacaggtttgggctaaccagcaattaggtaatcttcctttct

SEQ ID NO: 841847 - DNA, 565 bp, Homo sapiens
aatggaagcaaatagctggaccaatgtccctgagtctgctttaccaagatatctttctcactctctgtccatctcttggcccttaacaagcctgggagaagacagaggttacctagtcccgaggcygaatacttagcatgacattgtctacctggaaccacaatattaaaagcatttagagatttctgagctgtcacaggacagagggaaggagaaaaataatgataagataacccagggataaaattccaaatattctctgaatcctggggcaaaactgtttgtttttaactctgataaaaatcacagtaattggccaggcgtggtggctcatgcctgtaatcccagcactttgggatgccaaggcagaaaaatcacttgagtcaggagttcaagaccagcctggccaacatggtgaaactctgtctctactaaaatacaaaaattagccaggtgtggtggcatgcactgcagcctaggagcaataggctgtaccatatagcgtaggtgtgtagcagctgtatcatctaggtttgtgtaagcacactatatgagtttcacacaa

SEQ ID NO: 841848 - DNA, 612 bp, Homo sapiens
atgaggaatgttctcaatgctttcccatggcaaagccccatgtctaggtcaattccagttcctttcaccttgctcccacccccacatagaattctacccttcccaacctgtaccatgcagaacactcagcacttctttgtgtttggcttttacaccccagctcatctttggaatcaaagtgtcttcccccttccagggacccaaccaacttagaaaatgggtggagaagagagtgatatgtaatcatttgtcttttaaaaatggaagctgcctcacatcatcttgaaatgaagtgggatataaataaatacctcatctacacttcccaggcttactctacagtgttacttgacctcaagctctattgaactgtttcttcacttttatcaggatagtctgagggccatttgaaaatgtttatgagattacatggctattaaaaagaacagtttctcttctttattacctgaagatacctatatatctttaaagattatttcctctgactctaaaagtaatgcatgctcattatagtttatttgaaaaattkgggaaagtatcataaaaaaaaaaaattataattctactgcccagagtgaaattctgttaaaa

SEQ ID NO: 841849 - DNA, 573 bp, Homo sapiens
atacagagggccagctgtaactcatatgttttcaagaggatcttctcaatataacaatgtgtagcttatggccaggcacagtggcacacgcctgtaatcccagcactttgagatgccaaggctggcagatcacttgagctcaggagtttgagaccagcctgcaaaacacagtgaaaccctgcctctataaaaaatacaaaaattaggtgggcatggtagtctgtgaatgtagttccagctacttgggaggttgaggtggaaggatcacttgaccccaggaggtcaaggctgcagtgagtcatgagtgtgccactgcactccagcctgtgcgacagagtgagactccgtctcaagaaaagaaaagaaaaaggaaactgcaacaatgaacagatcagaataggtgacatgcactgaacaaggtaaaaaagatagaaaattatctggagaggtggccggaggacacatcaagaagcgccttgtacattggtaaggattgtggattttatggtgattaaaakttgctgtggggttttttgagtacaggaatgacttaaccggtataatgtttgtaaa

SEQ ID NO: 841850 - DNA, 280 bp, Homo sapiens
tctctatttcccccttttggcttttgcactgctattttagggaaagattcattctttccgctatggcttgtccttgagaattgtatgggataccagtaatgtgtttaatattccatatagagaaaaatgtagctagagcttggctagtataacctgggkcattatctgttttaatagaagctggaatgcccatcacagcaaaacactgcaaaaggtgacatttaacacagcagaagactcttctgattggcatgtagcccagacaaagtgagaaaaggtg

SEQ ID NO: 841851 - DNA, 607 bp, Homo sapiens
ttaagttttatatttagatataaatatatcatattaaaatatatattatatcagatatacttattacataaagataaattmtatttagtataaatatgtgtgaatttgtagtgtatataatgatatgacatataattatgagaatgaattggtgataaacaggtgttggtaaatgtgtgaggttaaccaggaaccagggaatcttgttgtgttattttttagctgaaattgtacactctgtttagagttaggcatagggagagtatgtataaaacattcttattcatttttcttactattgtgtagagttaaacatacatacaaagcatttatgaagcaagacagtatacatacctaattcctggcagagtaactaggtgcttataggagtttaaatttaaaagaggaatcacaattacctgccaacaatttaataaaagcagtgaaacattttaatcttgaagatttcccattattttttaaaagatataatgtttttgttagagaatcagtataaactttttgtagaaatttagaaaatttcaggcaaaaataaacacacatgcaagtctactggataaaagtaatcaatattaacatttttata

SEQ ID NO: 841852 - DNA, 574 bp, Homo sapiens
aactaattttcacccccaccaacactgtataagcattccttttctctagtaccttgccagaatctgttattttttgaccctttttttttttttttttttttgagacggagtctcactctgttgctcaggctggagtgcagtggtgcaatcttggctcactgcaagctctrcctcccggattcacaccattctcctgcctcagcctcccgagtagttgggattacaggtgtgtgccactatgaccagctaatttttatatttttagtagaggcggggtttcaccatgttggccaggctggtctcaaacccctggcctcaagtgatctgcccaccttggcctcccgaagtgctgggattacaggcgtgagccacaggacccagccctctttattgtggtttccatttacatttctctagtgattagtgatagtgagatttttttttaatatgatttttggctgcatatatgtcttctattgagaggtgtctgttcatgtcctttgcccactttttaatggagttacttgtttttttcttgtaaatatgtttaagttccttatagatgctgaatatt

SEQ ID NO: 841853 - DNA, 504 bp, Homo sapiens
atgattatgaaaaagacaacatgaagattttgacatttgatcacaatagcatgattcacacaggacagaaatcgtaccagtgtaatgagtgtaaaaaacccttcagtgatctctccagctttgatcttcatcagcagttacaatcaggagagaagtctcttacatgtgttgagcgtggaaaaggcttctgttacagcccagttcttcctgttcatcagaaagtacatgtgggagaaaaacttaagtgtgatgagtgtggtaaggaattcagtcagggcgctcatctacagacccatcagaaagtccacgtgatagagaaaccatacaaatgtaagcaatgtgggaaaggtttcagtcgtagatcagcacttaatgttcattgcaaggtccacacrgcagagaaaccttataattgtgaggagtgtgggagggccttcagtcaggcctctcatcttcaggaccatcagagactccacactggggagaagccattcaaatgtgatg

SEQ ID NO: 841854 - DNA, 636 bp, Homo sapiens
tttatacgaattattcattaaatgtccaaaataccgttatgtggtaggtaccacttatgttctaacagagagacgaagataatagacctctccacacaatgtagaaaagaaagctgtcttattactgaataaggacaaccactgtatagtattgtaggcaatctaaagaaaaatattattaaaaaattccgccctatgtgtacagtcaagcagttttaaactttttatacaattctacttttgaccactatgtacatcagttctcaagattaatgatttttcaataagaggacttggtctcatcatttactgcaaattcttttataaatttattctaaatttacttgagaatccagtgttagttaactaactttatcgaaagtaataaaacttctcttacctcatctgctagccgatttacagtttaaagagaggcaccttggttaaactcttgcagtgatagggacagtgggttgttattttctcagatgtttatattcaaaagggacaaatctcagaactttcacaaatacttctaggttgtaaacctggctagaggcttacatagcckctaatgaaatttacatgcgtatcaaaaggttagagaaaggattcagaagcactaggtttcttatg

SEQ ID NO: 841855 - DNA, 562 bp, Homo sapiens
atttggaacattccacatttgtaacttatctttagtaatattttgccatttctgttagactttactgcttctggggcctaatacttatgcacgtataagctggaagktactcagttcttcagaaactaaggttcccatttttacctcaaatattggctttggctctcagacctccttggtcaacctagccaatgacttttccctatctaagtgtgcaagaaaaatgaaacaaagtgggtagaacacagaaatttctgctaatttccaagagctaaactttataccgcctgcaatatttccatttactaccagtttttttctgacctagtcagatataagaagcccccttactggatacaagacagttaattatcagatccagtctgatcctagatccagtctgatcctagacccagtccagtttctgttgtgacttccaaacccagtttggatcagaaatttgctcaaagaaactaggagagctcaaaacacaaatatgtggagcttctgaatctgagagagaacttaccatgatccccagttgctgtgagagagcaatgga

SEQ ID NO: 841856 - DNA, 566 bp, Homo sapiens
ggagggcagcagcaacatacagtcttttacatgctcagggtttgttttacctgtagctagtggatgttgggtgcagtttttcagggtatgcaaaacaggctgaaaatayccttatttgggctatgtttaaagcaattgatataaaaatttgaatttggtatccgtgagctttgagttaatggtcagtctgaatgaagaagtaaacaacatggggtcaatatataaaggggtcacctttaacctggttctgtagcattaatgaaagagagtgaaataggtgctgggtggccaaaaaactgtaaatatccaccttgcttttggtttcactttctctcctaggacctccctgtggtactaccttagaactgacaggagaggccagcagtggtgatttgagagtgtgccctcaggtgtgtatatgaattggagaaggcagggcctaagcagttaaaggatatgctctgtcctgggctgaatgcagcctcattctggtacagtgtgtggggataattgcttgaaatgtttgtgtgtattttgaggatttgttgtaattgaatttaattgag

SEQ ID NO: 841857 - DNA, 328 bp, Homo sapiens
tgtcgtcccagctactcaggaggccgaggcaggaggattgcttgaacccgggaggcagaggttgcagtgagctgagattgcgccattgcagcacagccatggttacagagtgagattccgtcccccaccgccaaaaaaaaaaaaaaaaagtacgctacatggacatccattgttccagcatctctgccataatagcggaggaattatagagaatgtctgttaatttctttaactccaaatttgtgttatgtcccttggtytcctgtcataccataaattgtattattcataaaatggacaatttgtctacagttatttcttctcagta

SEQ ID NO: 841858 - DNA, 505 bp, Homo sapiens
attggtgtatctaactctgacatttttcacgaagtgattttttaaaatatggtaaaaaagacaaaatataattcaaacatatgcattatatgtcaaagtatgcttcgctggcatcaagtagactcaccttgagatacaatcttggacaacctccatcttcagaatatctagtttttcaaaccaaaactctccaaccaaaaatcaataacatcaaaagtttgcaactacaagccgacggaaaataaatacatgaattctaccaccgtgaattggactgcactgggaaacacagatgaagaaagccaacaccgctttgtccttcagtacctggctcccttttcagctcgtcttgcgactccaggcattatgctgaaaagtctcctggacgcctgtgaggctctaattccctgggwcccattgtcatgtctctggatttgcgagtttaaccggaccttctgtggtactcccgtgtccctcatcttttgtgacatgtcccctaattctg

SEQ ID NO: 841859 - DNA, 671 bp, Homo sapiens
atataaacatgtaaatggcatgtggatcctagcattcctctgtcatataaccattcacactgtcttagttcatttttggctgctataatagaatattagaytggtgatttataaggaacagacatttatttatctatttatttatttatttatttttatttatttttgagacagagtctcactctgtcacccaggctggagtgcagtggtgtgatctcggctcactgcagcctctgcctcccaggttcaagcgattctcctgcctcagcctcctgagtaggtgggactacaggtgtgcgccaccacacctggctaatttttgtatttttagtagagatgggatttcaccatgttggccaggatggtctcaatcttctgacctcttgatttgcccgccttagcctctcaaagtgctggcattacagacgtgagccaccgtgcctggccaaggaacagaaatttattgactcacagttatggaagctgggaagcccaagattgaggggccagtgtctggcaaaggccttcttgctgcttcaactcatggtagaaggtggaagggcaaagagagggcaagacagagaaagtgaaccaaactcacccttctatagtgaccccacttctgtgatcattaatccacttccatgataataacactaattcattaatga

SEQ ID NO: 841860 - DNA, 463 bp, Homo sapiens
tcttacatttatttcttcattgtaagcaatgtattcagtgaaatattccatagcctctctgtaaagactatgagccatgcmtgttaacaacattcaaagatctttccggccaggcacggtggctcacgcctgtaatcccagcactttgggaggccaagatgggcggatcacgaggtcaggagattgagaccatcctagctaacacagttaaactccgtctctgctaaaactacaaaaaaaaaaaaaattatcctggcatggtggcgggtgcctgtagtcccagctactcgggaggctgaggcaggagaatggcgtgaacccaggaggcggagcttgccgtgagctgagatcctgccactgcactccagcctgggtgacagagcgaaactctgtctcaaaaaaaaaaaaaaaaaaaaaaaaaaaaatctttcccagtttttattacagacaatctccaaatttt

SEQ ID NO: 841861 - DNA, 529 bp, Homo sapiens
ttttgtcctttattctatcaatgtcgtgtatcacttttgcttctctgtatacgtkgaaacatttttgcatccctggggtgatcccacttgatcatgatgaatgatcttttgaatgtgttgttaaactcagtttgctagtattttgttgaagatttttgcatccgtgttcattagtaatttgcctgtagttttattttcttagtctttgtctggttttgaaatcaggggaatgctttccttgatagaacgagtttgaaagtattccctccttgatttattgaaatagtttgaatagaattaatatctattctcactgatatatatatatatatatatttttcagaacgcagcagtgaagccatcaggtcaggtcccagctatcctttgaagggagactattattgcctctatctcattagttgttattggtccattgatgctttaactttcttcatgtttcaatcatcataggttgtatgtgtctaggaatatacttatttattttaaattttccagcttattggcatat

SEQ ID NO: 841862 - DNA, 529 bp, Homo sapiens
ttttgtcctttattctatcaatgtcgtgtatcacttttgcttctctgtatacgtggaaacatytttgcatccctggggtgatcccacttgatcatgatgaatgatcttttgaatgtgttgttaaactcagtttgctagtattttgttgaagatttttgcatccgtgttcattagtaatttgcctgtagttttattttcttagtctttgtctggttttgaaatcaggggaatgctttccttgatagaacgagtttgaaagtattccctccttgatttattgaaatagtttgaatagaattaatatctattctcactgatatatatatatatatatatttttcagaacgcagcagtgaagccatcaggtcaggtcccagctatcctttgaagggagactattattgcctctatctcattagttgttattggtccattgatgctttaactttcttcatgtttcaatcatcataggttgtatgtgtctaggaatatacttatttattttaaattttccagcttattggcatat

SEQ ID NO: 841863 - DNA, 529 bp, Homo sapiens
ttttgtcctttattctatcaatgtcgtgtatcacttttgcttctctgtatacgtggaaacatttttgsatccctggggtgatcccacttgatcatgatgaatgatcttttgaatgtgttgttaaactcagtttgctagtattttgttgaagatttttgcatccgtgttcattagtaatttgcctgtagttttattttcttagtctttgtctggttttgaaatcaggggaatgctttccttgatagaacgagtttgaaagtattccctccttgatttattgaaatagtttgaatagaattaatatctattctcactgatatatatatatatatatatttttcagaacgcagcagtgaagccatcaggtcaggtcccagctatcctttgaagggagactattattgcctctatctcattagttgttattggtccattgatgctttaactttcttcatgtttcaatcatcataggttgtatgtgtctaggaatatacttatttattttaaattttccagcttattggcatat

SEQ ID NO: 841864 - DNA, 487 bp, Homo sapiens
tgttattggtccattgatgctttaactttcttcatgtttcartcatcataggttgtatgtgtctaggaatatacttatttattttaaattttccagcttattggcatatagttgcttataaaggtctttaatgatcatgtgcatttctgtggtatcagtctgccttttcatctctgattttatttatttgagtcttctttttttttgttagcctagctaaaggtttgtcaattttatttttcttttcaaaaagtcaacttttattgtgttttgccttgtattttttaagagaatttcattcatttctgttctgatcgttattagtttttttcttccactaattttgtgtgtggcttgttctttgttcagtctttaagtctttaaggtatagtgttaagttgtttatttaaagccttcccacattttgtgtaggagttttttgttataaacttcccatctttctttgcttttgtatcatagcttacac

SEQ ID NO: 841865 - DNA, 487 bp, Homo sapiens
tgttattggtccattgatgctttaactttcttcatgtttcaatcatcataggttgwatgtgtctaggaatatacttatttattttaaattttccagcttattggcatatagttgcttataaaggtctttaatgatcatgtgcatttctgtggtatcagtctgccttttcatctctgattttatttatttgagtcttctttttttttgttagcctagctaaaggtttgtcaattttatttttcttttcaaaaagtcaacttttattgtgttttgccttgtattttttaagagaatttcattcatttctgttctgatcgttattagtttttttcttccactaattttgtgtgtggcttgttctttgttcagtctttaagtctttaaggtatagtgttaagttgtttatttaaagccttcccacattttgtgtaggagttttttgttataaacttcccatctttctttgcttttgtatcatagcttacac

SEQ ID NO: 841866 - DNA, 691 bp, Homo sapiens
acatctccgtgacacttattcactatcacgagaacagcacagaaaagacccgccccatgattcatttacctcccaccgggtccctcccacaacagcggggaattatgggagctacaattcgagacttgggcrggggcacaggaatgccatatcaatgctatttccagatagcatgttctctttctaaaagacggtgccaatcaagatcctggcaagaaatatatggcacattcaaataggtaatttgaggacagcttaatgaagagattatttacatatatgtggatgggtttaggacaacaacaagacatgagtcaataacctcagcctcataatgcaggaatgagatgtatagtaagaggtaccacatagtagctataggcattaaaagaggaaagcagcaaacccatggtcacttgactgggagacaactgaggaaataaagacccagagcttcatcttctattgtcctcagcacttttgctggtgcctcatatttccaagctggagcatacaacagcccactaatgtagtccaatggtgggcataagatattttggagacaatcgctagacaattttttaattagaaggtagtctgttcttacaacatatgcaaattactagccatactaattttggcttttcagacagggaataaaatgctaattaaatctaaatctcatataaag

SEQ ID NO: 841867 - DNA, 221 bp, Homo sapiens
aaaagattcgacaagaaacaaaaagtagtaggacttttcttgaatactgagaaaaatatctttgaaaatatttttgtcctgaaaaagggtaggtaaaagtttagaaaaaatatatataattgttttaataaaagtgcaaatagctattccttctataaattagcacaagaaagcaggtcgaggtatataataaatgaatraatgtctgtcataaaaagaag

SEQ ID NO: 841868 - DNA, 598 bp, Homo sapiens
atattacttatttttaaattttaccacattatacaagcaattgttcacatataccaaatattaatatttaatgacttattttgaaaacagaatcaagcattatacataccatgtatactttgaaatccttggatattctcaagagattttgggctaaggtagtttagctaagaaagaaaacattaaacggaaaacattgcatctggtgtattatacttgcatcaaccagtttccaatgaagcacatatattacatatttggggagctgtggtaaagtaacaagacaataaataaatgaagcatctgagatgaactcctaaaaagataaaaggactattaaaaaatagttctgttttaagtgaatgaatgattaaatatgtcagaatttaatcattaattaatgattaaatttgtcagaagtgctattaacacagatccttttaactttgtttctcaataaagaatttccctaggagaatgccctacaaggccccmgatagcaactttgcccacagtgttctaattaactataccagagggtctgcttcgctgtctagttaatgctttctatctggtcctttgctggccatcatgtatc

SEQ ID NO: 841869 - DNA, 522 bp, Homo sapiens
ggcacaagacaaaaatgccctctctcaccactcctattcaatatagtattggaagttctggtcagggcaatcaggcaaaataaagaaataaagcatattcagctagaaagagaggaaatcaaactgtctttgtttgcagatgacaggatcctatatctagaaaactccactgtcacagctctaaaacatcttaagctgatgagcaacttcagcaaagtctcaggacacaaaaacaatgtgtgaaaatcacaagcatttctacacaccaacaatagaaaagcagaggaccaaatcatgaatgaactcccacttacgattgctacagagagaataaaatatctaggaagagagcttacaaggaatgtgaacgacatcttcaaggagaacccataatgactwctcaaggaaataagagagaacacaaaaaaataaaaaactattccatgctcatggataggaataatcaatatcgtgaaaatggccacactgcccaaagaaatttaaagattcattgttgttcca

SEQ ID NO: 841870 - DNA, 543 bp, Homo sapiens
ataatcttttgagattggctttttttttttttcactcagcataattgcatggaaattcattcaagttgttgttaggtatcaattgtttgcttttttgttgatgaatagcatctgatgatgtgggttgccacagtttaacaattgacccattgaaggataccagggttctttccaggttttggctattacaaataaagctgttatgaccacttatatacagatttttgagtgagcgtaagttcatatttttctaatataaatatccagcagcacaatttctaggttatatatttgtttcatgtttagtttttttaagaaactgcttaactattttttctgagtatgattaatttaccttatcaccagcattgtatgagttttccagttcccctccagaatttgatattatcaccatttttaaatttttacacattctgatatgycttattgtggctttaatttgcatttcccaaatggctaatgaagtttaatactttacatgtgcttattgtcatctgtataccttcttcagtgaaatctcca

SEQ ID NO: 841871 - DNA, 621 bp, Homo sapiens
cactatggtcaggaacaaggcaaggatgccccgtctcaccaccaattttcaacattgtactggaagtcctagccaatgtaataagwcaagaagagaaaacaaaagatacattgaatgggaagaaaaaaataaaaccctctttgtttgcagtggcaaaattgtctacatagaaaaatacaaaagaattcacgcacaaaaatctggactaatacacaattatagccaggttgcaggatacaaggttgatgtacagaagctgatcattttcctatataccagcaacgagcaagtggaatttgaaattaaaaacacaatgccatttacataagcctaataaaatacgtataaaatctatatttggaaaactacaaaagtctaatgaaagaaattttaaaactaaacagatggagagacgttttgtatttatggataagaagactcagcagtgtcaagatatcagtttttcccaagtttatctacagagtcaatgcaaccccagtcaaaaatcccaacagttatttcataactgttttttaaatcagttatttcaaaactgatttaaaattctgtatacatagacaaaagactcagaatagctaacactacattgaagaagaccaa

SEQ ID NO: 841872 - DNA, 590 bp, Homo sapiens
tcagttttctgccaggtatctytctgccctgcttcctctgggctctccctgaagttgggggacactcaatcatcacaaaccttgagatggaggagggtaaaatgcccaggaaaatcatcaaccaatggaaaagaaaatgcagtgaattaattccctgggctggttgctcctgccttagcctcccaaagtgccagaggaacacttgaggccaaacgttcgagaccagcctggccaacatggtgagaccgcccccctgccgtctctgcaaaaaatgatactaaaaattaagtgccagccacctttgtctagcgagacatgttctgtgtgaatggggtcccggtgaacagagacctagttgtgcacccaggaacgagctcatgaacataccctattctgactttcctcccttctgtcttacttttctagccacttcctttggtaccagtcccaaataaagtatctgctcaggtatctaaggaaagatactcctattaaatagcacaggctcaactttattttgaactctctagaaggatattaccatataggtagtgtggaagattatcaaatgaaaagatcttgtattactg

SEQ ID NO: 841873 - DNA, 537 bp, Homo sapiens
aaaaatgaatgagaaataaattgcagtagtgtttgctgcttggggtataaactggcacaccactttggaaaactgtttgatatttgctcctaaagtcttacatatggctcccccaggacaccgcaatcccctcctagatgtacacccaggagaagtgagtgcatttgtcctccaaaagatgtgtgcaagactgcttacaattgtcaagaacccacatttctatcagaaaccaataaatgtatggtggcatattcatacggcagaatagtccccagcaacaaaaataaaagaacaaaccactggctcaacaacaatgtgggtggacctcacagacataacatcgagcaggagaggccagacacaaaggagtagggactgtgtgactccttccccacacacttcaagartaggcagcactgatccaaggtgacagaccccagatccatcgttccctcctggacagggactgtctgcaaggggcagagggagccatctggtgtgagggagatgccctctgtcttgccctaggtgttagtt

SEQ ID NO: 841874 - DNA, 537 bp, Homo sapiens
aaaaatgaatgagaaataaattgcagtagtgtttgctgcttggggtataaactggcacaccactttggaaaactgtttgatatttgctcctaaagtcttacatatggctcccccaggacaccgcaatcccctcctagatgtacacccaggagaagtgagtgcatttgtcctccaaaagatgtgtgcaagactgcttacaattgtcaagaacccacatttctatcagaaaccaataaatgtatggtggcatattcatacggcagaatagtccccagcaacaaaaataaaagaacaaaccactggctcaacaacaatgtgggtggacctcacagacataacatcgagcaggagaggccagacacaaaggagtagggactgtgtgactccttccccacacacttcaagagtaggcagcactgatccraggtgacagaccccagatccatcgttccctcctggacagggactgtctgcaaggggcagagggagccatctggtgtgagggagatgccctctgtcttgccctaggtgttagtt

SEQ ID NO: 841875 - DNA, 537 bp, Homo sapiens
aaaaatgaatgagaaataaattgcagtagtgtttgctgcttggggtataaactggcacaccactttggaaaactgtttgatatttgctcctaaagtcttacatatggctcccccaggacaccgcaatcccctcctagatgtacacccaggagaagtgagtgcatttgtcctccaaaagatgtgtgcaagactgcttacaattgtcaagaacccacatttctatcagaaaccaataaatgtatggtggcatattcatacggcagaatagtccccagcaacaaaaataaaagaacaaaccactggctcaacaacaatgtgggtggacctcacagacataacatcgagcaggagaggccagacacaaaggagtagggactgtgtgactccttccccacacacttcaagagtaggcagcactgatccaaggtgacagaccccagatccatcgttccctcctggacagggactgtctgcaagggrcagagggagccatctggtgtgagggagatgccctctgtcttgccctaggtgttagtt

SEQ ID NO: 841876 - DNA, 555 bp, Homo sapiens
gaactcagattcaactaaaccacagtttttcttaggtatctagcttgctgcctgcagattgtaagactcctcagcctctgtaatcatataataataagccrattccttataatacatgtatgataatatctgtatcatacatagatacagatggagaggtggtatatgtataactatagatatggatatggataggctagagctagagatataaatagttataaatacagatacatcctattggttctgctcctctggataacccagattaatacagagataacatagcatcagtagattggttttagggaggctataaaactcctcaaaatgaaaaactatttctccatgcaaaaatatgtctgtgtgtgtatattggcatctgtatttttctggttgaacatccttaattttagtaagattctcaaagtgttctctcattgaatactaagaaacaaagttagagattctgttttattttaaatcttgtggaggataagaattttgtattttcaacattttctcctttccctttagtaattcaaggttatcaag

SEQ ID NO: 841877 - DNA, 673 bp, Homo sapiens
aatgcctatgtgtaaatgcttgtaaaattaaaatgttttaaaacaaggtaattggtatttgttacagcctatgsgattttgcaactggatggtagagcttaggttttttaattccaaaaagggtgaatcactagaatattatatattattgtaataaacattcatagtgtcttagtttcgactcatatctctcctggactatttgtgaaagcctcctacatttttttgtcctcctctttttcttcattctagtctattctctatgaagtaatgaaagtcaacattcaaaaataattgtaaattacttttaaatatatatatatttgaaataaattaactttctccattagcaggaggataaaacccacattttattttagagcaagcaaagctgttcactattattccttccaaacttcttttcctacaagtacccaattatagtttagacttcttcagctgatggcagtcccctgcatatgccacagtgggtcatacctccatgcctgagcatttgatgttccctctacttgcaacttgctcccttccttcttctccttcaagtgctaggaaatacatatgtttgcttcaggcctttgttcaagtgtcagctccactatgatgttttcctttactctgcatgctttattcgtgattacatagtggttgcatg

SEQ ID NO: 841878 - DNA, 673 bp, Homo sapiens
aatgcctatgtgtaaatgcttgtaaaattaaaatgttttaaaacaaggtaattggtatttgttacagcctatgcsattttgcaactggatggtagagcttaggttttttaattccaaaaagggtgaatcactagaatattatatattattgtaataaacattcatagtgtcttagtttcgactcatatctctcctggactatttgtgaaagcctcctacatttttttgtcctcctctttttcttcattctagtctattctctatgaagtaatgaaagtcaacattcaaaaataattgtaaattacttttaaatatatatatatttgaaataaattaactttctccattagcaggaggataaaacccacattttattttagagcaagcaaagctgttcactattattccttccaaacttcttttcctacaagtacccaattatagtttagacttcttcagctgatggcagtcccctgcatatgccacagtgggtcatacctccatgcctgagcatttgatgttccctctacttgcaacttgctcccttccttcttctccttcaagtgctaggaaatacatatgtttgcttcaggcctttgttcaagtgtcagctccactatgatgttttcctttactctgcatgctttattcgtgattacatagtggttgcatg

SEQ ID NO: 841879 - DNA, 383 bp, Homo sapiens
atatattgcgtgatgctgaggttggtggtacrgttgagaccatctcccaggtactgagcatagtacctaacagacagtttttcaaccccagcctccctccctgccttcctctccctctagcagtgtccagtttctattgttgccatttttatgtccatgagtaccccgtgtttaactcccatttacacgtgagaacatgtggtatttgattttctgtttctgcattaattcacttaagataatggccgcaagttgcatccatgttgctgcaaatagatggtttttttctttattatggctgtgtagtattccatagtgtatatgtaccatattctctttatccaatccactgctgatgggcacttaggttgattccatatctt

SEQ ID NO: 841880 - DNA, 634 bp, Homo sapiens
ataactacctgcggcttctttgtagaccacgatattatttattctgtctttagatgctgagatctctrcaaaattcagaaaaacattgataagtggaggatattcttaattctaatatttttgcataaggtttttaacatatttcagtcaaatattttatatgcgaagtgttttctcctccttttataatatctttctttaataaaaatattatacaataaaacttgtcaaataagcctctatgcttctcttcaatctatgatcagattgaggtttatgtgaaatcatagactttctcaattttatttctttctgatataagatatgaatttatctatttaaaaataggagctctatcaaaatattcttcccagaagtcaagagattccaacatgtaattatgggtttttaaaattaaattttgtacatatctgagtgtccatcatttaatttgctccgttcctcctttgcttttgtaggaataatcttcaatatattcctgtttgtaaggtttgttttcaataatcgtaattttctaaaagcctcaaaagctgaaggcttttggtgctacattaattgaagagcatttgaaatctctttgaaagagattttttctaagggtcttaaagatact

SEQ ID NO: 841881 - DNA, 584 bp, Homo sapiens
tgaagacctctgacatgccctgaagacattttccccattgtcttggccagtaacatttggcgccttgttacttatgcaaatttctgcagctggcttgaatttctcatcaaaaaatgwttttttgttttctatcgcattgtcaggcaggaaattttctgagcttttatgctctgcttccctcttaaacatgggttccaattccaaatcatatctttggaaatgaataaaatggaatgtttttaagagcaccctagtcatgtcttgaaggctttgctgcttagaaatttatcccaccagatgccctaaatcatctctctcaaactcagagttccacagatatctaggacaggggcaaaatgctaccagtctcttcgataagcataacaagattcaccttttctccagtttccaacaagttcctcatcttcatctgagaccacctcagcctggactttaatgtccatatcaccatcagcattttggtcaaagccattcaatgcatctctaggaagttccaaactttcccacattttcctatcttcttctgagccctccgaactgttccaacctctgccagttaccca

SEQ ID NO: 841882 - DNA, 567 bp, Homo sapiens
tgtttactaagtgaatacacctaccagccactccaaaaaatggcgctttacctagacacttgacttgtgctgccctaggtattaagccctccaaagggcaaatscctattttgacctctcatcatagatcagttttgtttgagttccataaaaatggatacatatacgttcttttgtgcctgcttaacttgcataatagtatgtttaagacaagcatctatgttatttttatttttgtatattcttccatagtatttattcctaaattttctaggtattattccgaaaattatctactctattattgatggatatttgagttgttcccaatgttttaataggaatgtgttaatgagttcttacatctgccttttggagcacatatattcatttatattgggtataaatttagaagtagaattattagatcgtaaaaaatagatgttaagttttggtagacttggcaaaaaagttttccaaagcgaatgttcaaatatacgttcccactagttctcaatttgctctaaatccttagatttgtcattttcttaaattttagcaattcta

SEQ ID NO: 841883 - DNA, 551 bp, Homo sapiens
attgactcacagttcaacatagctggggaggcctcatggaggaaggggaagcaaggcaccttcttcaaagatggcaggaaggagaagagtcaagcaaagggggaagagccctttataaaaccatcagatctcatgagaactcactcactatcatgagaacagcatgggggaatctgcccccatgattcaattacctccaccttgtctctcccttgacatgtggggattacaattcaagatgagattttggtggggatgcaaagcctaaccatatcggggacaaaaggaaaaattataagaaacaaagaagcatgcctacaggatctagaaagtagcctcaaatgggctactctaaaagttattggctttaaagaggtggtagagaaagagataggagtagaaagtttattcaaaggtgtaataacatagaatttcccaaacctatatcattattcaagtacaaggttatagaacaccaatcagatttagcccaaataagactacctcaaggyatttaataaacttccgaaggtcaaaataaagtatcctaa

SEQ ID NO: 841884 - DNA, 663 bp, Homo sapiens
ccattccaccacccacagtttttagcgagtctcacttgcctgctggttatctagcactgaagggcaagacsttaagtaaagatatttgtgaagagaagaaagctaaaacttttttctcagtagcactctgatctagtcaagcgagttaactgggtagacttttaaaaataaaaattttttaaacaagctttttgttattttcagaaataagtaaataatattaaaaaaaatattttgtcagaatctactaaccatgaaccaatttctctgctactggatacaatctcctaaaatttgtggaacaatagcttcaattaatacgatcagctctcacatttccacattttacatttttttgttccagtgatttaaaatccactgcataaagagtacagtctcacactctgtgccgaccttgcactgtgaactgcaggtttagataggaaagagacaagacacctagtaataagttactcacaatacctgtacattttggggaaaatagcctgggggccctagagaacaggggagccctgaattcattttactctgaattgttaaagatttggtccaatctcttgactcaatgattagtctgacattatccaaaagaccaaaagcagctttgattgtgcaaaggtgaaaggattttcttccttgcca

SEQ ID NO: 841885 - DNA, 630 bp, Homo sapiens
ccagctgcagatttttcctagcaggcttgaacccaaaccgggccttgaacattcccaggcactgataaatctgtctaggttgttccctaaaacactaaaagaaactggcactgggccgggcgcagtggctcacgcctgtaatcccaacactttgggaggccgaggcgggtggatcacctgagatcaggcattcaagaccagcctggccaacatggtgaaaccccgtctcaactaaaaaaaaaaaaaaaaatacaaaaaaattagctgggcatggtggcgggtgcctgtaatctcagttagtcgggaagctgaagcaggagaattgcttaagcccaggaggcggaggttgcagtgagccaaaatcatgccattgcactccagcctgggtcacagcaagactctcattgcactccagcctgggtgacagcaagactctgtctcaaaaaaaaaaaaaaaaaaaaagaaaaagaaaaaagaaactggctctggccctgagccaaattcctttaactgtcatagaaactccctcactgctgatatacctgggcagaacaccccttttctctctcaacsattgctgcagcactctgtaaggaagttcctctaataaatgctttggattgatcaccc

SEQ ID NO: 841886 - DNA, 458 bp, Homo sapiens
cacagagggaaccaggtgaacactgtacacatagtggactcacgttgcagctgaaatctaccatttttacagagtggcaagcaagcctgctttytgtctgggagatgttacctcatccctcaaggctactcatggaaacgtaaccctgggaaatggccaactaaagagcggtcaggccatttctttttgcctctttggcatatccaaaaaggatgttcagtgatgatcagggccctggctgattagtatggtagctgtgctcactatggtaatctgggacctagtcctcttctaactagttgtctcaccatccctagggtgtggggtatggcttgaagtccacttggccaaggatgccaccatgtccacagcaggataagaaaggggacaggggagggcatattggagaagtggcatggcccctctttgttttttttttttgttgttgttgttgtttt

SEQ ID NO: 841887 - DNA, 458 bp, Homo sapiens
cacagagggaaccaggtgaacactgtacacatagtggactcacgttgcagctgaaatctaccatttttacagagtggcaagcaagcctgctttctgtctgggagatgttacctcatccctcaaggctactcatggaaacgtaaccctgggaaatggccaactaaagagcggtcaggccatttctttttgcctctttggcatatccaaaaaggatgttcagtgatgatcagggccctggctgattagtatggtagctgtgctcactatggtaatctgggacctagtcctcttctaactagttgtctcaccatccctagggtgtggggtatggcttgaagtccacttggccaaggawgccaccatgtccacagcaggataagaaaggggacaggggagggcatattggagaagtggcatggcccctctttgttttttttttttgttgttgttgttgtttt

SEQ ID NO: 841888 - DNA, 458 bp, Homo sapiens
cacagagggaaccaggtgaacactgtacacatagtggactcacgttgcagctgaaatctaccatttttacagagtggcaagcaagcctgctttctgtctgggagatgttacctcatccctcaaggctactcatggaaacgtaaccctgggaaatggccaactaaagagcggtcaggccatttctttttgcctctttggcatatccaaaaaggatgttcagtgatgatcagggccctggctgattagtatggtagctgtgctcactatggtaatctgggacctagtcctcttctaactagttgtctcaccatccctagggtgtggggtatggcttgaagtccacttggccaaggatgccaccatgtccacarcaggataagaaaggggacaggggagggcatattggagaagtggcatggcccctctttgttttttttttttgttgttgttgttgtttt

SEQ ID NO: 841889 - DNA, 458 bp, Homo sapiens
cacagagggaaccaggtgaacactgtacacatagtggactcacgttgcagctgaaatctaccatttttacagagtggcaagcaagcctgctttctgtctgggagatgttacctcatccctcaaggctactcatggaaacgtaaccctgggaaatggccaactaaagagcggtcaggccatttctttttgcctctttggcatatccaaaaaggatgttcagtgatgatcagggccctggctgattagtatggtagctgtgctcactatggtaatctgggacctagtcctcttctaactagttgtctcaccatccctagggtgtggggtatggcttgaagtccacttggccaaggatgccaccatgtccacagcaggataagaaaggggacaggggagggmatattggagaagtggcatggcccctctttgttttttttttttgttgttgttgttgtttt

SEQ ID NO: 841890 - DNA, 593 bp, Homo sapiens
ggctcaacgggccccgcactccgagcagccggccgsgaccgccagccccaggcagtgaggggcttagcacccgggatagcagctgcggagggtgccctgggtcccccagcagtgctggcctgcccgcacagcgctcgctgggcctcagctgcctcctcgcggggcagggctctggacttgcggcctgccatgcctgagacccccacccctggtggctccagcacggccggagcctccctgattggcgccaccccatgctccgccgcgcccagttccatcgaaccgcccaaggactgaggagtgctggcagcgcagcatgggactgcacaggctcctcctgcggccctggggagggatccactaggtgaagccagctgggctcccgaggcgggtggggacttggagaacttttatgtctagctggaggattgtaaatgcaccaatcagcactttgtgtctagctcaatgtttgtcaacacaccaatcagtgctctgtgtctagctaatctagtggggacttggagaacatttgtgtctagctaaaggattgtaaacagaccaatcagctctctgtaaaatggaccaatcagcag

SEQ ID NO: 841891 - DNA, 593 bp, Homo sapiens
ggctcaacgggccccgcactccgagcagccggccgcsaccgccagccccaggcagtgaggggcttagcacccgggatagcagctgcggagggtgccctgggtcccccagcagtgctggcctgcccgcacagcgctcgctgggcctcagctgcctcctcgcggggcagggctctggacttgcggcctgccatgcctgagacccccacccctggtggctccagcacggccggagcctccctgattggcgccaccccatgctccgccgcgcccagttccatcgaaccgcccaaggactgaggagtgctggcagcgcagcatgggactgcacaggctcctcctgcggccctggggagggatccactaggtgaagccagctgggctcccgaggcgggtggggacttggagaacttttatgtctagctggaggattgtaaatgcaccaatcagcactttgtgtctagctcaatgtttgtcaacacaccaatcagtgctctgtgtctagctaatctagtggggacttggagaacatttgtgtctagctaaaggattgtaaacagaccaatcagctctctgtaaaatggaccaatcagcag

SEQ ID NO: 841892 - DNA, 593 bp, Homo sapiens
ggctcaacgggccccgcactccgagcagccggccgcgaccgccagccccaggcagtgaggggcttagcacccgggatagcagctgcggagggtgccctgggtcccccagcagtgctggcctgcccgcacagcrctcgctgggcctcagctgcctcctcgcggggcagggctctggacttgcggcctgccatgcctgagacccccacccctggtggctccagcacggccggagcctccctgattggcgccaccccatgctccgccgcgcccagttccatcgaaccgcccaaggactgaggagtgctggcagcgcagcatgggactgcacaggctcctcctgcggccctggggagggatccactaggtgaagccagctgggctcccgaggcgggtggggacttggagaacttttatgtctagctggaggattgtaaatgcaccaatcagcactttgtgtctagctcaatgtttgtcaacacaccaatcagtgctctgtgtctagctaatctagtggggacttggagaacatttgtgtctagctaaaggattgtaaacagaccaatcagctctctgtaaaatggaccaatcagcag

SEQ ID NO: 841893 - DNA, 607 bp, Homo sapiens; identical to SEQ ID NO: 817543

SEQ ID NO: 841894 - DNA, 600 bp, Homo sapiens
ttgatgatctagattagaaatttaacaaagaaatagatatcataaaagagagccaaactgaaatcttggagctaagtagttcaatggataaatttaaaaatacaattgagaacttcaacaacaaactatatcaagcaaaagaaagagttcctgaacttgaagacagatcttttgaaatgatccagtcagaaggggtaaaaagaaataagaataaaaaagggaaaaaagaaataagaagtaaaaataataaaaagaataaaaaagagaatatgggatatcattaagcaagcaaatattcacattactgaaatgttagagagagaagagatggagaacttcacagaagaactatttaataaaataatagctgaaaactttccaagtcttggaagaaatatacacatccagattcaggaagctcaaagcttccccattcaaccccaaaatgtctttttgtgtgtgtggcacattacacctaaactgtcaaaacagaatttttaaatgatcaagagaaaaacttcaatttacatataaagaaattccaatagaccaaatagwcctagcagtcatttacagaacactctattttacagctacaga

SEQ ID NO: 841895 - DNA, 544 bp, Homo sapiens
aagccagtggatcttaacttgctgggttccatgggggtgggatctgctgagcattggcttcctggtttcaccccctttycaggggagtgaactgtctgtcttgctggcattccaggtgccactggggtatgaaaaaaaaaagctcctgaagttagttcagtgtctgcccaaatggccacccagttttgtgcttgaaacccagggccctggtggcataggcaccaaagggaatctcctagtctgcaagttacaaagaccgtgggaaaagcgtagtatctgggctgggatgcaccattcctcacggcacagtccctccagggttcccttggctaggggagggagttccccaaccccttgcacttcccgggtgaggcgacgccccaatctgcttcagcttgccctccgtaggctgcaccggctgtctaaccagtcccagtgagatgagccgggtacctcagctggaaatgcaggcatcacccactttctatgttcatctcgctgggaactgcagactggagctgttcctttttggccatcttgccag

SEQ ID NO: 841896 - DNA, 568 bp, Homo sapiens
aatagacatttctcaaaacatgatatataaatggcttagaggtataggaaaaaatgctcaacatcactaatcatcaacgaaatgcaaaccaataccacaatgatataccaccttaatccagttagaatggctattatgaaaaagacaaaagaaaataagtattggtgggattgtagagaagagggaagacttagatactgttggtggtaaggtatattagtacatccatatggcaaactctatggaggttcttcaaaaattaacaacagtactatcatatgatctagtaatcccaatactgggtgtatgtccaaaaaagtaaaatcagtatgtcaaacagatatctgtactcccatgtttattatagcacattcacaatagccaagacatagaatcaacctaagtggtcattagtggatgaatacataaagaaaatattgcacacacacacacacacacacagagagagagagagagagagagagagagasagagagagagaggaatactgttcagccataaaaagaataaattctgtcatttgcaacaacatagatgaaactggagg

SEQ ID NO: 841897 - DNA, 609 bp, Homo sapiens
cctgacatttcccaggagccagctaaccttttctgccacaaatagactgaagcgggtcccttgaggcagtctagcctgaacagagtccatctcaggggaggtsaggacccgggatacagcaacaggagccgggtcattcaaataaccaggaaggagagcagacggtgctgggaccgagagcacagcgaggaccctaaggaagccaccaaaaaacagccttcgcaacagtcaggactgctgtcaggaccaccaggcagagcccagggagcaaacacctgctctccctccctggggtccccgctgtgttcccaggcatgacactcacctcccagagcagcagcctggcctctgctcctctccgggcagaaacgacacagggatgctccccagtcagtgtgctggggtcctaggggcgttggcgacgccggggcaggttccaccatagatcctgctgcctcaatccagagggctttcggaaggcgcccctgctatggcatcgcagagggaggagacccgggatgtggcccagcagggctgtgtatacaccaagatgcctccgtctgcccttccagctgtaaatcaagactcagccgtggagagggaggagaa

SEQ ID NO: 841898 - DNA, 592 bp, Homo sapiens
ttacatgtcagacacagtgataaggcagttatctgcaagtcagaaagagagctgtcaccagaacccaaattggctrtcagcttgatctgggacttcccaacctcaggaactgtgagaaataaatttctgttatttaagctactcagtatggcattttttaaaatggtaatctgaacagactaatacatcaacatagaaaggagttccattggttatttgttccattggttatttattctctatttttggcctgacccagccagttgtgttgtttcatctgcatgaatgtgtttaacccccttatgaaccaaggtgatggttccttatagaatagaaccctctgccaaattacatttggatcttcagcacttcattaaatgttccccaagagatagtttaccacttattattactctttgtttacaaaatgtcagtcatttaatttatatttaacaaataattgtttaacatggaagtttattaatattccaaattctcaactaagttttaaatattgacttaccaatatccattgatttccaattttgtagttaaaataaccaataagaaattattaactttttataactat

SEQ ID NO: 841899 - DNA, 671 bp, Homo sapiens
ctcagaaaaggctttgctttaaagaaagtagtatattagttaagatgtagaagctaaatcataaatgcagtaaatgtagacatgtaatctgtagttgacggcactrctttttaaatacaatcagccaaaaaattggcattttctattttccagagttagaatttcttaataaaattagaaggttttgaactgattagaatttggtcattttgtacatgtatcagtaaaattgtaccatgtactgttgtatttcacggcagataaacaaatcaggtaaatattgctttccaaaatgagtacctatttaaaaaatgtattgggccatttaaatgccctgttgtcaactgtgggatatctataaagtcatcaaaagcatatttattacatagattctgtggcatatttttagtgtgctttagaacaaatataagacaatgcaacagagtttgcccattcctctttagtaaaaaaagctaagactgcagtctcctcttttccctaaatgtcatctacaaaattaacaattgccaaatacaacaaatcaacaattgacaacctgatgatagtgccgcaaatccatttaaagtttaaactgtctctaataactattttcattcaggagtgtggtaggagaagatgaggttagggaggagctcattcttctcccagta

SEQ ID NO: 841900 - DNA, 577 bp, Homo sapiens; identical to SEQ ID NO: 841347

SEQ ID NO: 841901 - DNA, 418 bp, Homo sapiens
tcaaaaaaaaaaaaaaaaaaaaaaaaaaaaggtaagsggggtgagggggtagtaggaccataaatactcaaagaaaagaatgtgactccccaaattcaactgaatgatgaatccattttcatttaatggtacaaaacaaccaatgaacctttcatatgttctttttgggaaacaatctgcaaagctcattatcaacatactaataattaatttttaaccatactactcaattttataaatgcctcaggatctaagagtctaagtaaagctgaacctaaagcagtatgagaaggaaaccatggtatttaaatgttgcaagcaaaaaaacacatcttcttcagtgctgcctcaaagaaagacaataatgacgcttaaatccaagtcattctaacaaaaatgaggtggaagggtagataga

SEQ ID NO: 841902 - DNA, 655 bp, Homo sapiens
tcgatataaataaattgttaaataaattaataattatgggaaaagagataaattacctatgcagaaaattttctaataatcatrtagctatcctaccttaaataagacagagcgttaactccatgggatgggcatagtaacttccttatgaagagtacagaatgaaaagtttgggggaaataactttatagtgcagaaacctgacaaacactgctttagccaggtgatcataatcaagattaacagttataaatcatgttgatagtgtatgcccttgagatggcatgataagaagggcactttacctctgtaatctttctccagaaaggccataaccacagtttaatcatgagaaaaagatcggacacattccaataaattgtcattctacaatatgagtatatctggccagcagtcctcaaaactgtcaaggtctgagaaactgtcacaaccaagggaagcctaaaaatacctaacaacttaatgtaatatagcatcctggatgggatcctgggacagaaaaatcacattaggtgaaaactaaggaaacctgaatacaatatggactttagttaataataatgtagcaatattgattcattgattgtgacaaatacactaaactaatatgctaataatggtagaaactgctggg

SEQ ID NO: 841903 - DNA, 593 bp, Homo sapiens
accgaggctggagtgcagtggcacgatctcggctcactgcaacctccacctcccaagttcaagtgattctcctgcctcagcctgagcctcctgcctcagtccggagtagctgggactacaggcgcatgccaccacacggagctaattttttgtagttttagtagagatggggtttcaccttgttagccagggtgatctcaatatccttacttcgtgatccgcccacctcggtcttccaaagtgctaggattacagtcatgaaccaccatgccctgcctttatttactttttttgagactgagtctcactctgtcaccgaggctgtagtgcagtggcatgatctcagctcactgcaacctctgcctcttgggttcaagtgattctcatgcctcagcctcccaagtagctgggattacaggcatgtgccgccgttcccagataatttttgtattttttgtatagacagggtttcgccatgttagccaggctggactcaaactcctgggctcatatgatttgcccgcttcagcctcccaaagtgctgggattataagcaggagccaccaagycctgccaacatcttgaatttagta

SEQ ID NO: 841904 - DNA, 644 bp, Homo sapiens
ttagatagggtgggcacgtacaagaaagtggagaggaaggctggacgcggtggctcacgcctgtaatcccagcactttgggaggccgaggcgggcagaacacgaggtcaggagattgagaccaycctggctaacacggtgaaacctcgtctctactaaaaatacaaaaaaattagtcgggcgcctgtagtcccagctactagggaggcggaggcaggagaatgacgtgaacccaggaggcggagcttgcagcgagccaagattgcgccactgcactctagcctgggggacagagggagactccgtctaaaaaaaaaaaaaaaaaaaaaaaaaaaaaaaaaaaggaagtggagaggaaggggaagggttgtctgcaatgagctagaaagttagtcttttttttttttttaaataaggaaaggaatgcgaggtggtactgataatgcctggtactgtagcgtgcctgggcattaaaggagaaaaacggaaaaacggaaaaacggcgggggtactatgaattaaagaataaaagattgatcagattatttgaagagaaaccgcatcatatcccacacctgtcactacataatgaggttatgcttcatttttatatgtatataattatgaaaaaagactctgtctgtt

SEQ ID NO: 841905 - DNA, 504 bp, Homo sapiens
  misc_feature 9: n = A,T,C or G
gataatatnggagaattcccatataccccaaagacacccacttttctctattactaatatcctaatatggcacacttctgataattaataaactaatattgagccattattataaactaacgtccatactgtattcagatttccttagtttttaacttaacatcctttttctattccaagatcccacccagtataccatgttacatttagccatcatgtctccttaagctccttttggctgtgactgtttatcagactttccctgttttgttttttttttttcgttttttttttcctttgagatgaagtctcgctctgttgccaggctggagtgcagtgccacgatctgcaagctctgcctcccgggttcacgccattctcctgcctcagcctccggagtagctgagactacaggcgtgcgmcactacgctcagctaatttttgtatttttagtagagacggggtttcaccatattggccaggacggtctcattcttttgacct

SEQ ID NO: 841906 - DNA, 504 bp, Homo sapiens
  misc_feature 9: n = A,T,C or G
gataatatnggagaattcccatataccccaaagacacccacttttctctattactaatatcctaatatggcacacttctgataattaataaactaatattgagccattattataaactaacgtccatactgtattcagatttccttagtttttaacttaacatcctttttctattccaagatcccacccagtataccatgttacatttagccatcatgtctccttaagctccttttggctgtgactgtttatcagactttccctgttttgttttttttttttcgttttttttttcctttgagatgaagtctcgctctgttgccaggctggagtgcagtgccacgatctgcaagctctgcctcccgggttcacgccattctcctgcctcagcctccggagtagctgagactacaggcgtgcgacactacgctcagctaatttttgtatttttagkagagacggggtttcaccatattggccaggacggtctcattcttttgacct

SEQ ID NO: 841907 - DNA, 652 bp, Homo sapiens
aaaggcaggagagaccagggctcgtgttaattaagcacctactaagtactgggggtcggaacacatggttttatgtaatcctcacagcggcccaatgagagaggttctactattgcctcctccttctaccttttttttttttttttggctttcatgttttttcctttgccttttagctattttaaagatagagaaatgaggcactgagagttaaagtgtctggcctgaggtcatcacgtgggtggaagcctgattcaggtgaggtcagtctgacaccaggatccctctaggtgctcagagaaggaatttccccacagtaaggaaggaggcttgacctgctgagatgagcctcagattcctgtctcttggccccgtaactatcagcaaactcaaagctgaatttcaccactggcaacttctggtgttagcaagtctctcaacctctgtgggttgtgctctattcattttaatttttatcttatgattaattatttacagtgtccctttgttgcccaggttggagtgcagtggctcactcacaactcactgcagcctcaaactcctgggctcaagtgattctsccgcctcagcctcccaaagtgctgggatcgcagacgtgagacaaggtggccagcccactttgctcattttt

SEQ ID NO: 841908 - DNA, 573 bp, Homo sapiens
atgtaatcctcacagcggcccaatgagagaggttctactattgcctcctccttctaccttttttttttttttttggctttcatgttttttcctttgccttttagctattttaaagatagagaaatgaggcactgagagttaaagtgtctggcctgaggtcatcacgtgggtggaagcctgattcaggtgaggtcagtctgacaccaggatccctctaggtgctcagagaaggaatttccccacagtaaggaaggaggcttgacctgctgagatgagcctcagattcctgtctcttggccccgtaactatcagcaaactcaaagctgaatttcaccactggcaacttctggtgttagcaagtctctcaacctctgtgggttgtgctctattcattttaatttttatcttatgattaattatttacagtgtccctttgttgcccaggttggagtgcagtggctcactcacaactcactgcagcctcaaactcctgggctcaagtgattctcccgcctcagcctcccaaagtgctgggatcgcaracgtgagacaaggtggccagcccactttgct

SEQ ID NO: 841909 - DNA, 629 bp, Homo sapiens
cacaacaaccaatcctttagctgggaactgggtgggggcagaaacagagagagcctctacttcagaccatgctgcccagctgggtggtcctagagaatctgccagaatttcagctcttttcccatgcaatgccccaggagaaaagacgcaggcctctgaacagagatgagacaatgtgcagggaactcaaagccagagggcgtgggcaggggctaagagggaggggaccttggagggaaggaatatgacatcctcaggacctgtccaaagttcttggagcaaacccagctatgcaagtgaggttcctgcagtagcctccactccagcatctcattctcattagctgcaactgatcttattagctatcctgggtcagtttggattttggcaagcctagatttggcaatggcctcaacacaaagatcgcacggggtaagcagggatgcgctgacacccaggaatggattccacgaggcagcctgctgggggatggcattgagttccagctctgcccsttcctggcttcatgacctttgcagagccttggcgcttcctctgacaagtggggacttgggaccagcagtccccaagtccccattgtaaatgtgaggactggggcttgtgtcagg

SEQ ID NO: 841910 - DNA, 619 bp, Homo sapiens
cctgtactcccagctactggggaggctgaggtgagaagatcacttgagcctgaggggcagaggttgcagtgagctgagactgcgccactgcactgcagcctgggtgacagagcgggaycctgtctcaaaaaacaaaaaaaacattaagtgtgcccaacccttgttgaatctggtagaacctgggcatctgtttgtttatgcttcccaggttattccacagtactacaagttttgagaatcacccaaagccatacaatagatggcaaagcagcttctcagaaaatgggagttgtctttagatttgggtggtagatatattggcagttgcccctttaacaacaattataacatgattgtcttagttcacttgggctgctgtaacaaaaataccgtaggctggatggctcaagcaacattaatttttacagttctggaggctgggaaatccaagattaatgcgtcagcgggttcattgtctaggagggcctgtttcctggttggtagacaggcttattcctgctgtggtctcccatggcaaaagaggtgagggagctctctgaaattttttatagggcactaatcccattcatgagggatccaccctcatgacctaatccac

SEQ ID NO: 841911 - DNA, 621 bp, Homo sapiens
tgggatcctatgtttattatctcacagtttctgcgggttgggactccaggggtgacttagccagatcctctggctcaaggtctgtcatgagggtgtaatggagctgtcagctggggctgtggtctcatatgatggctcaacttggcggttggacgatctactggcagtcccacttacggggttgtggctggattcagttccttggatgctgtcagccagaagccactctcagttccttgatacgtggacctcttcacagagccgcttacaatgtggcaactgctccctcaaagcaagagagggtgccaaaaatggaagcctcagcctgcagccatacccacagcattttcctgcttctccatggtgtctccaccaggtccctgtgaggccattaaagtgacgatagttaacgatctgacatggtgttcccaatggcatcattttatgcctccccaaaattaataatcttatgttggtaaatagaatacagagagtgggagaccacatcaaaattgttatygctgggtagaaaattaaatgtgttttcttttttccatgttgcttattggtatcttcctcaataagcattttatcacaaaataagtggggtggacagttgca

SEQ ID NO: 841912 - DNA, 577 bp, Homo sapiens
gccttgttttgatcctgcgccattcaattgtaaaatcttgcctgattagagtcccatcaggcaaggccagtwccgtctaggtatggccatgttcataccaactctaaggacacaaacattcattttactgattaacagttgaaatacactctcagattcagctgggcttgcacctatggtgtgaagtagatttaatatttaccagtgggaagttaactctcacagaaatataatattgccttttagaactatatatgagacacactcagctattcatggagaagaagcagtaaaggacaccagcatgtattaaatgcctactgtgtgctgggcaattattataggatttcatttaatctgccagcaacactttgagttggagaaccccagagaggtggtagagtgttcgggtgaagcatatggcttctgaagccaaacttcttgcctgcttgaattccagccctgccaattcccagctgtataacctctttctctgcctcggtttcttcctctgtgaagtgaagataataacaccacctacccaggattgtggggaggattacatgacttactacat

SEQ ID NO: 841913 - DNA, 421 bp, Homo sapiens
ttaacagcaataattttttggtttttttttttgagacagagtctcactctgtctgtcacccaggctggagagcaatggcacgattttggttcactgcaacctccgccttccrggttcaagctattctcctgcctcagcctcccgagtagctgagactacaggcgcacaccaccacgcccggctaattttttgtatttttagtagagacggggtttcgccatgtcggccgaaactccaggctggtcttgaactcttgacctcaggtgatccacccacctcagcctcccagagtgctgggattacaggtgtgagccactgcacccggcccttaacagcagtaatttaagtggaaacttttatatcattactgtatctagaaagccagtatcctttcatataaatacaaggtacccgtaaaaac

SEQ ID NO: 841914 - DNA, 616 bp, Homo sapiens
cttcatcatgttggccatgctggtcttgaacacctgacctcaagtgatccgtctgcctcagcctcccaaagtgttgggattacaggagtgagccaccacgcctagcctgatcccaaaatttttgagagttcccgaccagaggtcagccttcttccccagggtccccctgcacagtcaccctggcccttctttaatcctcctgggttcccagtgctgtgctgagtcctggacagaatggagtgcaacagtaggaaccttggattacagaggtaatggggcccaggtgttagggtcatgggctgtgcactcagacctgggtttgagtcccagctctgtcctgtactatggctgcaatcttcaataagttacaaaatcgaaggtggattttggctcaataactaagaaagctccttgccttggagcgggatccactctggaggctggacgccttcttgtctaagatgcaggagagaggctttaagcatcaggcaaagggacttggtttagacccaatcagctcagagatccctcatagtcccaggttctaaggttctgtgcattgtttaattatccactccctcsggtcaactgctctgccccaagaactggcattgag

SEQ ID NO: 841915 - DNA, 609 bp, Homo sapiens
gcatgtaaagctggggaaatctgaataaaatggatggastgggccgggcgcggtggctcacgcctgtaatcctagcactttggaaggccgaggcgggcgggtcagaagatcgagaccattctggctaacacggtgaaaccctgtctctactgaaaaaaaaaaaaaaaaatctgggcattgtggcgggcgcctgtagtcccagctactcgggaagctgaggcaggagaatggcgtgaacctgggaggcagagcttgcagtgagcggagatcgtgccactgtactccagcctgggtgacagtgcgagattctgtctcaaaaaataaacaaataaataaaaataaagaataaaaaaattaaaattaaaatggatggactgtatcaatgtcagtatcttggttgtgatattgtactctatgggttagtaagatggtgccgttggggaaaataggatgaaggacccataggatctctctgtatcatttcttatgactgtgtgtgaatctacactaatctcaaaacaaaaaatttacttaaaagaatgggcaaagtgaaacaaaataaaaccctccaagcaaattcaagacctaaaaacaagctgggcatggtgg

SEQ ID NO: 841916 - DNA, 545 bp, Homo sapiens
cttggttgtgatattgtactctatgggttagtaagatggtgccgttggggaaaataggatgaaggacccataggatctctctgtatcatttcttatgactgtgtgtgaatctacactaatctcaaaacaaaaaatttacttaaaagaatgggcaaagtgaaacaaaataaaaccctccaagcaaattcaagacctaaaaacaagctgggcatggtggcttatactcgtaatcccagcactttgggaagctgaggcaggcagatcacttgaggtcaggagttcaagaccagcctggccaacatggcaaaacccagtctctactaaacataccaaaattagcccagtatcatggcacatgcctataatcccagctactcaggaggccgaggcatgaggatcacgtgaacccgggaggcggaggttgcagtgagctgagatcgygccactgcactccagtctgggtgacagagcgacactcagagtctgtctcaaaaaactaaaaataaaaagacctaaaaagagtattcccttcaataacatggatt

SEQ ID NO: 841917 - DNA, 551 bp, Homo sapiens
ataagagaaccaggaagtcctagccagagcaatcaggcaagagaaagaagtaaaaggcacccaaacaggaaaataagtcaaactgtctctcttcactgataatacaattctatacctagaaaaccctgaagctctgcaaaaggctcctggaattgataaacaactttagtaaagttttagtacaataatcagtagcatatctatacaccaataaagttcaagctgaaatcaagaaggcaatcctatttacaatagacacacacacacacacacacacacacacacacacacacacaaataaaatacccagaaatacatctaactaaggaagtgaaagacctctacaaggagaactaaaaaacactgctgaaagaaattgtagatgacacaaacaaatggaaaagcatcccatcctcatggattggataaatcaatatcattaaaatggctawactgtccaaagcaatttacagattcaacactattcctatcaaactaccaatgtcatttttcacagaattagaaaaaaactattctaaaatacatatgga

SEQ ID NO: 841918 - DNA, 472 bp, Homo sapiens
taaggtgggtcatcaaaaaactaaaaatagaatcaccataggatccatcaagtccacttctgggtatatatccaaaagaattggaggccgggactcgcacaratacgtgtacacccatgttcatagcaacattattcacaatagctgaaaggtagaagcaacccacgtgtcctttgatgaatgaatgaataagcaaagtgtggcagacacatacggccttaaaaaggaaggaaatcctgacacgtgctacaacatggatgatccttgaaaacattctgctaagtgaaataagccagtcattatattgtataattccacctgcatgaggtacctacagtagtaaaattcacggggatggaaagtaaaatgatgtttcccaggagccaggggaaggaagtgatggggagttattgttaaaggggtacagagttttgctttggggagatgaaaatattctggagctggttagagg

SEQ ID NO: 841919 - DNA, 472 bp, Homo sapiens
taaggtgggtcatcaaaaaactaaaaatagaatcaccataggatccatcaagtccacttctgggtatatatccaaaagaattggaggccgggactcgcacagatacgtgtacacccatgttcatagcaacattattcacaatagctgaaaggtagaagcaacccacgtgtcctttgatgaatgaatgaataagcaaagtgtggcagacacatacggccttaaaaaggaaggaaatcctgacacgtgctacaacatggatgatccttgaaaacattctgctaagtgaaataagccagtcattatattgtataattccacctgcatgaggtacctacagtagtaaaattcacggggatggaaagtaaaatgatgtttcccaggagccaggggaaggaagtgatggggagttaytgttaaaggggtacagagttttgctttggggagatgaaaatattctggagctggttagagg

SEQ ID NO: 841920 - DNA, 569 bp, Homo sapiens
agcacattgccagatcctgattaggtaggtatttgtgaagtgccttaactaatttgtaccttaaccaggcttcttgctagaatacatgtttctctaatgtatgcctgggtgctaatagtttggtgctatggaaactacttatatttggttattggggagcagaagtagtatgcatgatgaggctaaggtgatgcctgcctggcttcagctgtgaattttagaaatacactgattaaaggtaaatttttttttctgtccttactgctggatttcttaatctgggaggtacttgatggaatttagcctttttatcccttgaaattataagcagcattttgtgtgcactttttcttatacatgtacctttttctgctgtcaaaagacaacatttcaacacattgagtataaagatctaattggattttattattgattaacaaattaggtagcaccccatctataaaaaaataggtsgccattgggcatggtggaacaatcggtttttataaggttgagcaggaacaggaaaacaacatagtacaaaaatgtgggttaacatcaggttactt

SEQ ID NO: 841921 - DNA, 569 bp, Homo sapiens
agcacattgccagatcctgattaggtaggtatttgtgaagtgccttaactaatttgtaccttaaccaggcttcttgctagaatacatgtttctctaatgtatgcctgggtgctaatagtttggtgctatggaaactacttatatttggttattggggagcagaagtagtatgcatgatgaggctaaggtgatgcctgcctggcttcagctgtgaattttagaaatacactgattaaaggtaaatttttttttctgtccttactgctggatttcttaatctgggaggtacttgatggaatttagcctttttatcccttgaaattataagcagcattttgtgtgcactttttcttatacatgtacctttttctgctgtcaaaagacaacatttcaacacattgagtataaagatctaattggattttattattgattaacaaattaggtagcaccccatctataaaaaaataggtcsccattgggcatggtggaacaatcggtttttataaggttgagcaggaacaggaaaacaacatagtacaaaaatgtgggttaacatcaggttactt

SEQ ID NO: 841922 - DNA, 632 bp, Homo sapiens
aagttgttttcattgaaagaatgtgaagtgcayagctgcgcaggtggaactgatctgtccaacctggagaagggagtgtctggggcatccctggggatccttcctgccctcctctcagtctagagcatcttaagtgtggggctgtgcctcctcccactgtgcctcacccactctcctctgcccctttccccggcagctcaccatcatcttcaagaacttccaggagtgtgtggaccagaaggtgtaccaggctgagatggacgagctcccggccgccttcgtggatggctctaagaacggtggggacaagcacggggccaacagcctgaagatcactgagaaggtgtcaggccagcacgtggagatccaggccaagtacatcggcaccaccatcgtggtgcgccaggtgggccgctacctgacctttgccgtccgcatgccagaggaagtggtcaatgctgtggaggactgggacagccagggtctctacctctgcctgcggggctgccccctcaaccagcagatcgacttccaggccttccacaccaatgctgagggcaccggtgccgcatggctggcagcgccagccctgcacccacagcccccgagaccttcccatacgagacagccgt

SEQ ID NO: 841923 - DNA, 539 bp, Homo sapiens
aatgtgggtaatatgggtacaaaactagatatttatgttttagtctagttcctagaaccattcccaatcaaagttattcctagtaatattctttccttaaggtgggyatttcgtgttaccttttagccagtcttatgaaatttctatttcccagagcactaaaatagtcaactaattaattacttcagtatgtactattttttttccttttttgaaacagagtctccctctgtcacccaggctggagtgcagtggcatgatcctggctcactgcaacctctgccttgcaggatcaagcgattcttgtgccccagcctcccaagtagctggaattacaggcgcatgcaccatgcctggctggtttttgtatttttagtagagaaaaggttcatcatattcgccaggctggtctcaaactcctggcctcaagtgatcctcctgcctcggcctcccaaagtgctaggattacaggcatgagccatcgtgcctggccagtacgtatttttggggttctactgtatttaaggtcagagagattc

SEQ ID NO: 841924 - DNA, 579 bp, Homo sapiens
accagggcctccggtacgcaccttgtgtatttaaggggtaggcagcatcgtgggcttcttggatgcctgggccaatcctaagagaggactgcacacacagaatttagggtccacacaggcaaccgctgagcatggtttctgcacaccatgatttcctgctgctcctctggtaccaggggagtattcatcccttgaaacctacccctggtattagagctcctcacctttgtcctgccacttgaatgtatcccttcccagtgttagttgcaatgcagtatgcagcatctgccgtgaaactaaacaaccgtttaaaaactgttcggcagcaatggaattacaaattgtatatccagtttgggtaattttaaaaaatttaataaattatttcatttttattattgttggacacaaggtctcactctgtcacccaggctggaatgcagtggtgcgatcatggctcactgcagcctcaaaatccctggctcaagtgatcctcttgcctcagcctcccgaatagctggggatrtaggcacacgttgccatgcccggctagataatttacaaaaacactttctaatg

SEQ ID NO: 841925 - DNA, 519 bp, Homo sapiens
acaatgcctgaatgttacatttgcaactgggttatatttaatttttttttttagtctctcctttcacttttgccaaccctttggtaaatttaatccattgagttaagtaagatgttctttgtatcatgtagaatgaaagaaactatgggggagaaaaagaaaataaaagtgtctttcaagtattcagattatagtagacattccagattcagtcaaaggatggttaaaaaaactatgcattcattcatttattcatttgtatttattcattaatttgtccacacagtaagtatttactgtcaggattacaaaagtgagagcaccttttccttgttcacaaggagtgtgttaacaacccagtcctgtaaaagaaatcagggtttcaacccatgtggcaaytgtccttaaagaatctgagtgtcttcaccaagctctcctttcttcttgactctccatctagctttcaaagaaattcatacttgtgcatagtggattttttttctttgtataatcatttgg

SEQ ID NO: 841926 - DNA, 591 bp, Homo sapiens
agtaagcttcaggaatggctggatccagtagctyaacatgtcctcagggttctctaagtctctctctccttcacctgattgtttctacttggcattatctatggctggatcttgtgcctcaaactaaatccctggggctctgtctcatgccatctatcaaacattttctctccacatggcaagaagccttcttggtcaccagtagcactagattcttatcctatcagcttagagaccccaccagaatgaattggtttcctctagaagctcttttgggaaagtcctaggcccaaacttgaatcacagccctgtccctgaaacagtacccattgcccgatcaggcattcctgttggcctggcctgggtcatgagcacactccctggttttgagaagactgcagtcagctctgcctttcacatgaaaaaggttccccacaggaaagaggggttctgttactgcagcaggggtggaagaggtgctgggcagataaaaacagcagacgtccactgcagctgtctataaattcatgagaaatcctggggtgtttccctgtaatgcaagtttgatcacaccaccatcttgcttaatat

SEQ ID NO: 841927 - DNA, 591 bp, Homo sapiens
agtaagcttcaggaatggctggatccagtagcttaacatgtcctcagggttctctaagtctctctctccttcacctgatygtttctacttggcattatctatggctggatcttgtgcctcaaactaaatccctggggctctgtctcatgccatctatcaaacattttctctccacatggcaagaagccttcttggtcaccagtagcactagattcttatcctatcagcttagagaccccaccagaatgaattggtttcctctagaagctcttttgggaaagtcctaggcccaaacttgaatcacagccctgtccctgaaacagtacccattgcccgatcaggcattcctgttggcctggcctgggtcatgagcacactccctggttttgagaagactgcagtcagctctgcctttcacatgaaaaaggttccccacaggaaagaggggttctgttactgcagcaggggtggaagaggtgctgggcagataaaaacagcagacgtccactgcagctgtctataaattcatgagaaatcctggggtgtttccctgtaatgcaagtttgatcacaccaccatcttgcttaatat

SEQ ID NO: 841928 - DNA, 706 bp, Homo sapiens
gatggggaatccagagatctsggatccaaagtccagcttggccatagctggctgagtgaccttgggcttgtccattcccctctctgggcaacagtttccttgttggtcacatgaggggcttgcgtcactgacaggtgatctgtaacattcttcctggcattgggatgctcttatttctgagactctaaattgcctggcctgtgagagggcagctgagggctgtggacagagtctaaggtgaagagtacaaagatcctggttcagacttgggccccacttagtacctctgtgcccctcagagcttcatcgtcctcatctacaggatgaagaaaagtcattcttgcccaaattactttcctaagtgaataaaggaataaaagatgataaagctgcagaaaatgtaagatgtttactcttattaatcatttgtgagcatctgctgaatcggggcattgtggtgagaaccttacacactttatctaagctcattactgagacctggaggtaagaactatccccagggttgtgcagggaaatgcttagcagccagcccgccggggaggaaggtcccgatttgtagtgtttgcccatttctgtggtgtcaatgcttccactttagccctttccaagctaagcggcctcatgttacttaatgcagagctggggagaaatgcatacaattgactttctggagtggaagagtcag

SEQ ID NO: 841929 - DNA, 313 bp, Homo sapiens
ggatccactgcacactcagcaggagatgcaacctagccttcgggctgcagggccagcactgctgtggcgcctgtcagcacagtccatctgggaagttctcacataatactgtccgtgggaggatggagagaatggattgtatgataacacagggtagagctgcctattgaaaaaccacatgcgaagagacctttatggagtcatgtcaacttagagggaggtctctagtgatgtgtcacagggctccatcttttatcactgatttgggttaaggatattccaaagcccargtttcttattttgtgcagtttcc

SEQ ID NO: 841930 - DNA, 600 bp, Homo sapiens
ttcatagagttgcacaaccataactacataccagctataaaacattttcatgcccaactgtagtcagcaccccctaccccacccccaggcactgatctgcaccctgtctctgtggatttacaattttttttttttttttttttttgagactgaatctcactctgttgcctaggctggagtgcagtggtgcgttctcggctcacagcagcctccgcctcctggattcagatgattcttctgcctcagcctcctgagtagctgggattacaggcgcccaccaccatgcctggatagtttttgtatttttagtaaagacagggtttcaccatgttgaccaggctggtctcgaactcctgacctcaggtgatccacacccctcagcctcccaaagtgctgggattacaggcgtgagccactgcgcccagcctgtggatttacatttaatggacatttcacatcaatgggatcctgcatcctgcaatatgcagtcttctgtggctggattctaacacttagtgtcatatttttgaggttcagtcatcttatagactgtgtcagtagttkttggtttttattgctgaatagtattctattgtattg

SEQ ID NO: 841931 - DNA, 550 bp, Homo sapiens
tctcgctctgtcgctcagactggagtgcagtggcgctatcttggctcactgcaaactctgcctcccgggttcaygccattctcctgcctcagcctcccgagcagctgggactacaggcgcccaccaccacgccccgctaagtttttgtatttttagtagagacagggtttcctcgcgttagccaggatggtctcaatctcctgaccttgtgatccgcccgcctcagcctcccaaagtgctgggattacaggcacgagccactgctccaggccacaacttgattttcaaaatgagcaaagacctgaatagacatttttcaaaagaagacatacaaatggccaagaagtatatgaaaagatgcttaacatcactaatcaccagagaaatgcaaattaaaaccacattgagaaaggacctcacacctattaaaatggccattatcaaaaagaaaaaagtaaatgttggtgaggttgtggagaaaagagaacctttgcacaccgttggtgggaatgtaaattagtatagctattatggaaaatggaaaggaggc

SEQ ID NO: 841932 - DNA, 585 bp, Homo sapiens
tcaggcttctaatttcccaaacttggccgggcgcagtggctcatgcctgtgatcccaacactttagraggccgaggcggatggatcacaaggtcaggagatcgagaccatcctggctaacatgatgaaaccccgtctgtactaaaaatacaaaaaattagccaggcgtggtgatgggcgcctgtggtcccagctacttgggaggccgaggcagaatggtgtgaacctgggaggcggagcttgcagtgagccaagatcgtgctactgcactccagcctgggcgaaagaacgagactctgtctcaaaaaaaaaaaaaaaagttccctaacttttatgctctgtttcccattttaataaaagttccagtttaagttatttctttgctcacttatataagcataggttgttagaagcagtcagattacattttgaatgctttgccgcttagaaatttcttctgcaagataccctaaatcatcattctcaagttcaaaattccacagatttctagggcaagggcaaaatgcagccaacttcattctcaagttcaaagttccatagatcttaggacaggggcaaaatatag

SEQ ID NO: 841933 - DNA, 546 bp, Homo sapiens
atgcaagtatgggtttgccccctttctctacttctttgaatacaaatggttacagcaggtgccaccatattagtactaagtaacaacattaccctctactatagttgtttggttaggtccatggattgacagtgacccaaactggaccattcagagttaccctctctctgaggatgaagctgctggaaataatttttgaccttgtgaaataagaaactgggaaaacagtccagagtgagagagatgcatagaaagaaagagacaagagagagccctggcagcatccaagtgtctggttccaattatcctaaggcctggagaaaactaaacttcctttagtttccctggtagagcagatgctacagtatgctgcttcacagatcctccccatcaggaccaaggtatccactgccccagatgccaggagartcggttactgatggctcaaagctgagtcagttcccaggatttgcccttgtactaaggcagttgtttggaccaaggctgcacacctttccaggattatcctacaagtaattattggtt

SEQ ID NO: 841934 - DNA, 553 bp, Homo sapiens
catctcctcagattggtcatatctaacagatatgactaaaacggtcactctacacactctccagcaaaactggtgtaagtctgcttcttcacttagcttgtaccacttctaatataacacataactgacttgttgattgcatttcccaacatcctcccaccatctttagaacgtggcctccacaaaggcagagatttttgcttttggccattgtgttacttcaagtgcttagagcaacctctggcacctagtagcactcaaatgttcactgacaaaacaatgtggcagatgaggtcagagacacaatgggatgggatatggaataaatcatctctgggctttgtgggccgtcttccagttctgagtgaaacaggggagcactccaggattctaggcagacagtgctgtaacctgacaaaagttttaaaagcatcgctctggctgctgtattgaggatgggctgtggtgggcaggggtgaaagtgaaaagacatttatgaagcaagtacagtaactggatgaggaatsataaaggcacagattaggatgaaagt

SEQ ID NO: 841935 - DNA, 649 bp, Homo sapiens
acttgaaattccagatattaaaaaaatgtaaccatacgaacactctttggagaatttttactttttataagtacaagttctggaaaataatcaactatacttttagtggagattttccttgtcagttatctttccaactgtaattcagtggtctcagataaccctcacctccttcagcagacccactatataacctccttaaccttttcttaaaagaaaaattgcaaatgatgtttttcttcttgctattattcattctttggcagaaattattcctaacccatgctttccccatactccaacatagttttgtagcactgacctacttggattcttgcccttggaacaggaatcgatcatattccctggcctgggagtatttaaagtagtgtgtttattagaatgtgcattattctgcaatgcggattcacaggattttccaatgagagtcaatatatcattttgccagcaggcattaaaatagcaacccttcaaagtcttccttacatccatgttttcaagctttatcaaaaggacagytgctcagaaagtaagataaactaacgcttacatgaaactattgggaaaagagagataaggctcctattactaatactcacatcacaggtaactgagatgggaaaagacc

SEQ ID NO: 841936 - DNA, 486 bp, Homo sapiens
gtttactgaatcacccatttggaaatgtccagtttcttctttgagattgtaaataaactcagtaaaagtttaactttcattttttttccacccttgacaatcagaaaattgctaggttcaaaaaagctcccagagattaaacaaaatggtttttttttcttccttcacaatagttttcccttattgctgtactatgtgataaggttaatataacagctgccatacagatcattaatacagggagataagcaaagttgcatgctggaaacatttgcagggtatcatttgccttcttctgctgataaagaagccttaggtaacaaatacagatcacaggcactgaatatttaactttttagacagaaatcccaattgatctttcctaatatgttattattcataaatrctctttaaagttgggtactgactgctctcaaaatatgattttttaaaaaaaatttgtatgttacctaccttttcaagttt

SEQ ID NO: 841937 - DNA, 492 bp, Homo sapiens
tgccttctaagcaaaatctgtcaactgctgttcactcaaccccgcaaagcagcccagaaacagtggctaagactccttagtttcaggaactggacatttcttacccctttgcactagttcacatctcattattggttaggttggggttgtgaagcgaagggatggctcattagctgcttccctctaggttcagatgtgtgagctactattagacagatgccacagtaataattgttgcaggcaaattccaccattgaatgctaaaatcagtggtgaaggtttgaggagaaacaggatatttgcatagcttcaaagtatctttcccaagatatgtattaattacaaaacaaaaacactaccattacaatggtgaaaccaacagatagccccttaaccaagtgatcaaggttaacttcactagtaaccasatggtgtcccccagacccccggccccttccccagacacgatgcactgagaagggcacacgtcat

SEQ ID NO: 841938 - DNA, 405 bp, Homo sapiens
tgcagattgcttgtcacacatttgaaaatgagatagaaattttaaacattttaattaaaaaaaatragtcaagtgccttttctcaatggataatacaaactttgctttgacctccaatatttcccattatatgtgccttatttgcaacaaaaaaaagtaatatttcgctttgagaaaatatgttaccctgcatggagaccctccccttagctcaaaaatagcttggttatcaaatgaggaaacaaaacaccaaatagtaagaattacagagtagtcagagcttcttcaaatttgtacaaggacgtaagtaatcaaacctctgcttacctctccaacttcagttgctttggcctactttctctttttctccaggctccccaatactgcatttattgtagttcctca

SEQ ID NO: 841939 - DNA, 629 bp, Homo sapiens
tttttttcatataaatttgtttatgttccttgtagatttttgacattagacatttgtcagatggataaattgcaaacattttctcccattctgtaggttgtctgtttactctgatggtaatttcttttgctgtggagaagctctttagtttaatcagattccacttgttaatttttggttttgttgcaattgcttttgacattttcatcatgaaatcttcacccgtgcctatgtcctgagtggtattgcccagatattttatagggtttttatacttttgggttttacatttaagtctttattccatcttgagttaatttttatataaggtgtaagaaagtggtccagtttcaattttctgcatatggctagctggttttcccagcaccatttattcataggaaatcctttccccattgcttatttttgtcaggtttgtcaaagatcagatggttgtagatgcatggtcttatttctgagttatctattctgttccattggcctgtgtgtctgtttttgtaccaggctattttggttactgtarccttgtattatagtttgaagtcaggtagggtaatacctcttaaatttgctgaggagtgttatgcttctaattatgtgatcaattt

SEQ ID NO: 841940 - DNA, 517 bp, Homo sapiens
tattttagcattctattttaytatttttatttttctgttcttgtgatagagttatgagtatggtcatatgtcaggaaaagattcaaatctgtgttttgggaaagagcttcttactaataatatccatgccatggtttttattaagttaaatgcaaatcaataattacaaaacaattaaaatgatcccataagccagtgtggtgacacgtgtcagaagtcccacctactcaggaggctaaagtgggaggactgcttgagcccaggagtccaagaccagctggagcaacataggtgacaccttgactttaaaaaaaaaaagaaaagaaaagaaaaacccataatgaagatttatctagaatctccctctgtactgtttccaaactatatttgtgtataatcaaaaactagataccattttatggactcccctaaatggccccaaaacttaccattttctatagttagactcctacaagagtcatggacaagtatttcctaaagtgaattcaacaagtga

SEQ ID NO: 841941 - DNA, 540 bp, Homo sapiens
actgacatttaactttatcgagcttttatccccacctattgatatggctatattgtatgtattgatatggttatgttatgttgacatatgtatatatttcttaatatatacataatgtgtgcatatattatatagtacgtaaacttttaacctattaatatggcaaattacagtaatagatgttttagatatatcaaccttgataataaacaaaatacatttcttatatattgttgtgttggtttatcaagattatgttaatatttttaaatttatatttatgagagtgattgacctataattggcctgttttattcatagtattattttttttgagatggagtctcgctctgttgccaggcttgagtgcagtggcgtgatctcaactcactgcaacctccccctcccgggttcaartgattctcctgcctcagtttcccaagtaactgggactacaggcacacaccactatgcccaactaattttgtgtatttttagtagagatgctgtttcaccatgttggccaggagggtctcaacc

SEQ ID NO: 841942 - DNA, 540 bp, Homo sapiens
actgacatttaactttatcgagcttttatccccacctattgatatggctatattgtatgtattgatatggttatgttatgttgacatatgtatatatttcttaatatatacataatgtgtgcatatattatatagtacgtaaacttttaacctattaatatggcaaattacagtaatagatgttttagatatatcaaccttgataataaacaaaatacatttcttatatattgttgtgttggtttatcaagattatgttaatatttttaaatttatatttatgagagtgattgacctataattggcctgttttattcatagtattattttttttgagatggagtctcgctctgttgccaggcttgagtgcagtggcgtgatctcaactcactgcaacctccccctcccgggttcaagtgattctcctgcctcagtttcccaagtaactgggactacaggcacacaccactatgcccaactaattttgtgtatttttagtagagrtgctgtttcaccatgttggccaggagggtctcaacc

SEQ ID NO: 841943 - DNA, 657 bp, Homo sapiens
attatctttatttaggattttaaaaactgatttcctttggatgtacaatactgtcaagttattaatttctttttcaattattattagggtgtctgacamagttggtaaatttttatattttataacacactaaaactatgatctaccaaaaagtcaaatttttactaaaggtgtaaatatttaaacttttagcaaggagacatggttgtttcaaagctatcaggttaaccatttcagcagattaatattggaaaaagaggtaatttctacatatatatttaacatttatggcatatacaatgcaaaggatacattgattatttttaagtatacaagtgataataaagaatgacatgtcagggttaactaacagaatgtacctcaaactaaaggaggagtcatttagaatttgaacaagttatagacaatcacgaggttcaccttgatcagaagaagaaagcaggtaaatgaagtgggttagagcaatatttaacagtaaatatggggggcagatagtaaagctttgataggcattagtatagttggccaaggtcagttatttttatgaatattaggacttttaccacatgagggcccttttagacagagcttgccaaggctttcatcagtttgggtaagattactatggaaatgaag

SEQ ID NO: 841944 - DNA, 630 bp, Homo sapiens
  misc_feature 242: n = A,T,C or G
tttccttggaaatcgagatacgactggattgtgcttttctcaagaatacactgcatctgatttttctggtgaattgggatcacattctgctgataagagttaagagttaatagtatttagtaatcactcactcatcaggtattatttagagactctgcctcagttctctatttcatcttttagtggcctaaaagagctaattcagtgctttacttaagcaaaaggcatgacttaatcactgngaataaattaacaatagagtaaaaataggatttacctgcatttctgtgtcagtgttgagctcattgaattgtccttggtaaaaataaaaattaatataaaagtgaattataccatgtaaatatctttgtgtgtatatcaaggttttatttttaaagtacttatgattcattgtttttaatggtacataatatatttattactattggtattcattatatcattaagttctaagcaaaagtaagttttgtctaactgtacataattgtgttgtcatttttatgggaaatgctttatcagcctaataacagagtgcttgcaaatccataactaaacactgaaaaacttcacttgctcaccraagcttctgttactatttgaaagtaatat

SEQ ID NO: 841945 - DNA, 571 bp, Homo sapiens
attctagtaaaagtcttaataagttttttaggtaacttgttttcctctgtgrgtttcaacaaaggaaactatttaatttcagtttgaattcaaagctatttctccaaccttcacattttgtgtcctccaagttgttttctgcttctatttcagataccagtaaagatgtcatctggccaatttgtgtgaaaaaagagaataattctcatccaaaccgcctgtctctggaaataagaaaagctctgagggtctccaaagttaccagaggaaggctgaattttatggtgattgataatatttccaagcttatggagaaaaaaatatcattagtcttttccatggtagaaaagagtaaagcctgtaacaaaaaaagtgatacagtggatgggatgatgagacccttgaaataagcaaggatggaccagaaactggtaacactcacccatggaatttcattatgaagtcgtggcaagggccaagccgacctggatttgaaacccatctcttcaacgatgtagattttgacaacatatttgatttctctgggcctcagtttgttatctgcacaaaa

SEQ ID NO: 841946 - DNA, 587 bp, Homo sapiens
ggtgagatgcctttcatattggcataagacactgagcggatgcctcctcttatcttatcaaacagaaacccggygagtgaatctacccagagctgaagcttcctttgcaacttgggaacaccagggccacagtgactttgtggcttggctttagataaatttgaccatggctgtagaacccagcagctcagaatccattaaaaggagagctgggaggaggtgagtgatagagacaaggggattttgatgttacaattgttgaggggactgtggctggcgggcaacttgctgtgggggcagtgattgaaaacatggattattagctggttacaaatcttcatttgtacagatgagctgttgatttcatataagaggtggaagtaaattctgctttatgtgccctgtaaaaagcttctttgaatttaccttcagtgtcatgccttcagaaaaaaattccaagtttctggcataaagctgcacgttttctgcgcactggcatgcaggcaactgtttgtttctaattacggagctgaagcctgctggcaaaggaaaccatatttgtcacaagttgtggcattgtgtttagt

SEQ ID NO: 841947 - DNA, 634 bp, Homo sapiens
attggcacacccaggtaagtaaatgccaactcttcattcctgtgttcctggggcgctgtgattgcaaagtctgttggagctgctgcgtagcaagaccaacttttgagatgcactggttctcgctcacmtttgcacgtttgtcattgctgttgttgttttaaaaagcagcagcaagcaacgtctttaatctgaagggacttccatcccctacctctcgccttctgacatccacccaactcgcccaggtggggtggggcgaatggagttggggagaaagaccgcggaggggaggggacagcatggcacgggtgagggataggtcagggaagtcccgaaggcggaagaaggggtacggttttcaaaatcggggaaggggaggggaagggagttctggctgaagttgcagcttcctctctgacagtgagaaagctgtgggacattgtagtcccttccaatggcttgacctggctgcggttggattcagcctctcaacctcctcccccacacttcttacaatgaggttctaataatattttagttgcctcttctcagtgttaaaaactaatgaataggcttgcaagtgctttgattcaacgtagtccttcagcgcttcttcctctatggaataaagtag

SEQ ID NO: 841948 - DNA, 600 bp, Homo sapiens
cctttataaaacagctcctgcttcatttttctccgcttctatggattccaatcttgctgaggccactgggtcttggctgatttttggttttggtttttgatttttttgagacagggtcttactctgtcacccatgccagggtgcagtggcacaatcaagactcattgcagccttgactgcctgggctaaagcaatcctcccacctcagcctcctaagtagacacatgagcacacaccaccatcctcagctaagttttttattttttatttttggtagaggcaggggtctcactatgttgcccctctcactttgagagactgaggctggaggatcgcttgaggctggtctcaaactccttgaaagaagatgatttcagggagaattaagggactttatatataggccaagaattttggagccccaaatgtaaggagtgggattttctacaagttgggcagagaatcacaatccttatattaaaaaacaacarcaacaacaacaacaaaacacaatcagctgtgtgacagggagagacatgaggaaaggcagaggggtaatattgggaactagaagatattctgccagaggaccttcaaagg

SEQ ID NO: 841949 - DNA, 617 bp, Homo sapiens
gaagatcaagttgcaatacatataattctaaagtaaatctgcctgtgataagtagtgcaaacaatagatatgataggagttcttattagaaaattttcattttccaagcctcccatagaataatagctttatttcccttaagaaaaacacaagaacttgccaattggatacattgtctagtgtttcatagtatctttttttagaatttgagattgaaaaatgtcaccttagtgatgacagaataattgagtttaaagatttgactagtcaataagaatattcggaagacatgtgcaaagagcactgaagatttgcaaaaagacacaaaagaagtaaaataaaaagaaaaatgacaataagctcatgcatttttaccttcaaccttctggtcccccattagctgacagacacgcaacatctgagctgactgaaggctgatgtcagcctctcattcctggctttgaccaggtgtcgtcttgcagtacacaaaaaagygtgagtctacacagcagccctgcaaaggaatctatagcacagttgcagaatgaaaagaagaatgtaattgaccctcttttataaaaggattataagtttatctacaaaattattttacccct

SEQ ID NO: 841950 - DNA, 623 bp, Homo sapiens
acctacttgggaggccaaggcaggagaatcacttgagcctgagaggtggaggctgcagtgagccgagattatgccactgcaytccagcctgggtgacagagctagactccgtctcaaaaaaaaaaaaaaaaaaaaaaaattaaaaaaaaatagaaaaaaaaatccaacagaaccaaagaggggtctggggtaaaagatgcctcatgtgggctagtggctcatgtcagctaagccccaggccctaagtaaaatgactcccataccaccccaaggttttctttctaatcctcctctctccaccaaaagtaagacccagaatgagagactaaagggaccaaggggccagtggctgccttattcttctctgaatccaaaagaccaaagggaccctcctgactcttacgtggcccagcttaactcaacagaacaggagactcaagagagattttggtcagtggttcaccttgtgatagtggctacttgcagggtcttccagacattacgtgtcccctggggactcatcaaggacagtgaaagaacaaaagtcctgtactcttctcatcagaagtatagctaacgatagccacatgacatatcttgtctcccttacagctgctaagtcc

SEQ ID NO: 841951 - DNA, 607 bp, Homo sapiens
aatagttatttaatgtttttgagcaataggatagcttttaattattttagtattatatacttccaaagtcattgtatcatgttaggagaaagtcgtgtggaaaaaawttgacttttgtttaaccaagaatattttaaaatggatcctattatttttgtaaaatatctctgtattcttaaaattaattttatctcttatttttaaagctttttaaacttctgttaaatcacttccaatgaaatatggaacaaaactgtttgatttattctgctgctcaaatatataatttatttatcattgcattctttgcctaacatatttttataataggttacaaagattctctgcatctaattatttcagagtcaaagaagttatactctgatcctggtttatctttaatctgctgcaaagataatttggctcaaattattgcacatctctgggcttaggtttttcttatttattggctcaaattattgcacatctctgggcttaggtttttcttatttataacacagagagttaaataaaataatatcaaaatttccttttgacaacagcattctaggagagcttacagtgaggcttacatttaccagcaggc

SEQ ID NO: 841952 - DNA, 492 bp, Homo sapiens
tggcctgcaatgctatgctattgccataaccaataggttatggtccctattggacatactgcactaacactgtctacttactggcttctctactgtactgtaagccccatcttggctgacaccawatctctctggttcacagttgagtcccctgacactaactcttgatgtggttgttcccttagctggatgtgagtgccctacggtcaggccaccattgttttcgtggcatccaacacaaagtccaatatagcttctaagaaatgtgtccttgatccaggttgctgtggaaggcttttagcagggaatgagctgatcagtctgggttgtagaaagttgcctgtggtggctggctatatagacgggcttggagggaatgagacacggacatcccttatagctgcttatctgctttgcactgttagtgcctctacaacagtatcataggatcattagtttgcagatgaggatcctgaggcttggcaaacagcc

SEQ ID NO: 841953 - DNA, 469 bp, Homo sapiens
ggctttctgggaaagggctctctaacaactccagactctacggagttgggagcattgctttgcctggaaccagcttccacttttcctgtacttctgggctgagccgagggtcaacagagaggaaagacattcagctctggggtcctgacaaaaagttcgttgaccctgtaaccgtgagcggaactctcaaagtcatgtcgcccaagcaagactcacccatctatcctatctaccctgacccttgcctcctgggttctaagcctgtcagacaaacttccccctgcctgtcttctctgaggctactcccgcttctaaaaaccactccctgtctctggtgctttctagtttctcctataaaaatgatttctaatataaattttgggactgttctttaggcacctgggctcaacaatcagaaagacataatttttgcccaaaaccccatcrgtgggggggactatctggaatt

SEQ ID NO: 841954 - DNA, 450 bp, Homo sapiens
gtaaatgagtgcatgcaatatctgtccttctgtggctsgcttgtttcacttaagataatggcctccagttctgtccatgttgctgcaaaagacatgtttccattttttttacatctgagtagtattccattgcaccttatttttcagagctctgtagtaacaaaaaacaactgcattttttcttaatatttaaaatcttccctattaataaataaacatatattaagtcttaggaaaggaagacagaatttttatatagataggtgagtatctgcatgtactttggggtgtgggtaataaaagttatttaatagtggaagttaattttaactaataagaattaatcaaagaacttacttcattctcagtacatatgttgtcaaaaggtaatccttatgtcatagctatatttagtttgttagccttggatcactttgtgatagcatatat

SEQ ID NO: 841955 - DNA, 603 bp, Homo sapiens
tttccccaaaccttaaacttcttggcttaagaytgagctttaggaaagggaacccagaagcctggcatgctggcaaaagggtaaaggttttttgtttgtttgtttgttttgttttgttttctccagtcagacttctggcctctctgtctccgtgcaaaccagtaaaagtaatggtaaagactactgtaaagttttgaaaaaacttgatgatatctccatgttgttttaggttttttggaacttggccttgtaaccacgtggcagtactttcttttggtctttgccattttacaatggtgttctgggttcaaaagtggcttagggaatgagcactttctggttaatatttgtgtaaattttattatttgctgattctcttcctcttcatgaacaacttctagcttcctttcttgaatctttctttctctgagctacctttaaagattctaggttttgtaaaatgtgcttatcacctctttgaaaatacctcatatactcacaattaagttataaccttagttgaggcttattagttttatctgtgaggttacttttggtaaagttcaaaagccaggaattttggccactttgcatggctaaggt

SEQ ID NO: 841956 - DNA, 475 bp, Homo sapiens
caatattcatcagaaatattggtgtatagttttatttttttgatgtgtctttgtctagttttagtatcaagataatactggcctcatagaatgagttwggaagtattccctcctttctttgtgtttttgaatagtttgagtaggattggtatagtttttttttatttatttgtttatttgtttgagacacggtgtcactctgtcacccaggctggagtacagtggtgtgatcttggcttaccatagcctctgcctcgcctcccaggctcaagcgattctctaataatatttgctttatatatctgggtgctccagtgtttggtgcatatatatttatcaaattgttatatcctcttgctgaattgacccctttatcattatatagtgaccttcttgttctcttcttatagtttttgtcttgaaatctatttgtctgatttatccaatttatttatctgactcctgctcttttttt

SEQ ID NO: 841957 - DNA, 526 bp, Homo sapiens
ttgatctatggtatctccttttttcattcctgatatttgtaagctgtatcttctttgctttttataatctttctaactagaggtttatcaattttgttaatttattcagtgatrctgcttttcatatcattgactatctattatttttctgttctttatttcagtgatttccaccctaatttttattatttcattcttctacttttgcttcattttgtgcttctttttataagtctttaaaatggaatcttagataattgatttgggatctttcttcttttctaacaaaaacatttacagatataggtttccttttagatacttccgtagctacattcacaaattttaaaatattgtgctttgtttttttaagagtcaaagtattttctattttaccttgtgatttgtgtttcatggactatttaggaatattatgtttaattttctaaactatgggaatttttcagatatacttttggttaggtttttaatctaattctgatgtgatcagagtatactctatatg

SEQ ID NO: 841958 - DNA, 463 bp, Homo sapiens
tgggctgagaatgtgaagatgactgtcacatttgagaacctattcccagaatacttacaaggaaaactggggcatacacatgcacacacacacacacacgcacgcacgcacacacacatacataccatgtgactgctagcaacttaaaacaaaaaaattttaattgaatttcggggcctggggaagatctgaacctataattatttcttagcaaacttgctgaacacagggttttcctcctctgagacgagatgagacgggtagcataatgaaccctctttaattaaaaaataaaatgttttaggataatcatattcttctaagttacattatttttttaaaggaaaggacagatcgwgagaaaatgtccattttcaagtgccccatgttaggctgcctcaaatggactagtttctcattcaaccctgtagattcaaaattagatccttagggaggcacttga

SEQ ID NO: 841959 - DNA, 710 bp, Homo sapiens
cctcggctctgcaggtcccggcgccctccctctgaggtgccattcctcccctgcctcatttgctgccactgaccttactgagttaaattaaaaagcaatgttctgtgtgcggctccagccctgtggagcttgactctgggaagacgaagacaattactggcccctccatctccctctcatctggctgccttataatttttccccccgctgcctggtatgcaacatttatgtttttaataacaccagaatggttttgaccttgggaattcatagcagaatgggcactgcaagaggccccgacgtgattggcgtttgtctcagtcctttgcagggacaagactctggtgcctcctggattctggggaaggtgtgtaggggctgcaccccatgcggtttaagaagaaatctcaaaaaccagagtggacaaggacatgggaaggggggaaacagagggggagggtgttgtctttttaggtttcccctggaggatgaaagttagaataaggtgtttgagaggttgggatgtttttctcctcttgttttataggaggaatcctagattggggatggcatggaatacgtgtgtgtgggggggcaatggggaaggggtggtgtgtgatgcaagtgtakacacacactcaggccatcagtgcacaagcttgcacatatacccccgacacaattggatccatttctcctcatttactctc

SEQ ID NO: 841960 - DNA, 650 bp, Homo sapiens
atacagccaccaaactagccgagggatttattcgatgacactgttttaatgttaaccttcactcatatcatttattatttggggaactgctgtagaaagtgaatagaataatggtgtttttatggctcctaatgtagattgttattgaaaatctgtcaattttactggcaagcttttggctcaaaaataagatcatcatttataatttgcaggcagtgataactacaaattatgggaagtaactagaaaataaaataactgttatgatgaaaattacataattatctttctcattaaaaacatgaggtattctattatccttgggatgtgcagtagactctttaacagctgctattaccaaactaaaacacatcagaacaggaaagaaaatacaacactcatcacccaaatgatgaaaaagagatactgctaaaaacatgggtggaacagaacggaacacagcaggatgtattgccggcatctgtaaaccacacgggaaccacttacagatgcttcggggatcgagctcagcctttcccctgagatttctttcagggaggttttgtttagtgargctggcacttgctgggctgatagatccttcgctttgattacgggctctggagttttctgacaggacccacaccttc

SEQ ID NO: 841961 - DNA, 573 bp, Homo sapiens
cgataatgatagacacatatttgtttgtttgtttataacagtctgcaattttagaagtatcttgtatctttgacatttcttttttttttttttttttgagacagaatctcactccgtagcccaggctggagtgcagtggcactgtcacctcattgcaaactctgcctcctgggttcaagcaattctcatgcctcagcctttcaagcagctgggattacagatgcctgccaccacacctggctaatttttgtatttttagtggaaatgaggtttcaccatgttggccaggctattatcgaactcctgacctcaagtgatccacctgcctcagcctcctagagtgctgggattacaggcgtgagccactgttatcttgaatatttttttctcctcatttttatgatctttgaattatttattttattcttctttttggagcaaatatgttgaaactctratttaatttttagatgatcccgagtattcaaatggatgtgccctctgacctatgtataagttatattacatggtgactaaaaatagaactaactccaaaagtgacctaagatctta

SEQ ID NO: 841962 - DNA, 584 bp, Homo sapiens
cccaagcaggggcagcctaaactgacagctggtgccttgggctttgccagcctcactgagtggctagccagcttgaaaaggcaacaggaagcagatggccagcccagtcctctctctggctggcctatgacagccatctggagaaaagaaaattgatccgccgcctggagaggaaggtgctggtaataaataactctgattgtcacattttgcacactcagggcccagggaagggctgtggaagctcttcaggtgttgatgggaaagcaatcccaagcatcatagctcataggatacacacaatacccttactggaggcagcgctttctgggatcaggagcccacaggactcaacaaccccactaatacaacaggactcacagtggtgtgaatgccacccacgcaggcatataataatgcagaaagccctttcttctctcaggagtgcaggcagaacaacatgccactttatgagatcctccattcctctgcatttgcctctctrtcccaagttctccagctgtcctttatgcccctgagttaagtatcagttctgtaaggaatcatttgtagcctaagttcag

SEQ ID NO: 841963 - DNA, 584 bp, Homo sapiens
cccaagcaggggcagcctaaactgacagctggtgccttgggctttgccagcctcactgagtggctagccagcttgaaaaggcaacaggaagcagatggccagcccagtcctctctctggctggcctatgacagccatctggagaaaagaaaattgatccgccgcctggagaggaaggtgctggtaataaataactctgattgtcacattttgcacactcagggcccagggaagggctgtggaagctcttcaggtgttgatgggaaagcaatcccaagcatcatagctcataggatacacacaatacccttactggaggcagcgctttctgggatcaggagcccacaggactcaacaaccccactaatacaacaggactcacagtggtgtgaatgccacccacgcaggcatataataatgcagaaagccctttcttctctcaggagtgcaggcagaacaacatgccactttatgagatcctccattcctctgcatttgcctctctatcccaagttctccagctktcctttatgcccctgagttaagtatcagttctgtaaggaatcatttgtagcctaagttcag

SEQ ID NO: 841964 - DNA, 531 bp, Homo sapiens
ctatatttgaggaagagcaatccaagccggtacaaaggcactggggcaggaaattccgcaggccgtttgaaaaacaggaagcaggccaatgagagaagggagtggacaggggagttgagagagttaaagaggtaacaaaataagaagctgagatgtgaagcctaagggatctccatcagattggatgggacaataataaagtcatttctaatgatttgccaagttacaaagcagaagatgaagtcatggaaagctgctgagatatcagggagctaaaatgtcccatgttttaaagaaaaacccattctctaccagacttttttatttctgtactgattttaaatttagctatgagaataaaactaaagaaaactgacttcagggaaggtcaggaactcagctgttaaaaagcctttctaaggaagatatgcaatattttccagctgtgcttagactaaattcattaggtttgtccayggtgaatgatgagctctaacagtcactcacagctctgtgatgctgcaagtcatc

SEQ ID NO: 841965 - DNA, 415 bp, Homo sapiens
tgttttatgagggaaacggtggacaaagtttaccgatgatgcactgggacacttagatcatgagcagagcacttgcacgtattccaccggccccataataaatcataaaaatgtcaaaccagtgctcyctgtgcactaaaggggattttatgaaaacaatgtagccaatatctctgaacaaatacctgtgaatatgtgactactggtttgctccgttcagtgcacactagataacgggtatagagaaaactcagaggaaaaaaaaaacaatagaaggaaaacaatctagattgaagaaagacataagctctcagaagagaaagatccactaaattccaagcagaatgaatgaaagaaaattccagacttagatacaaccttgtgaaattgagactgcaagtaagtgaaagaaata

SEQ ID NO: 841966 - DNA, 602 bp, Homo sapiens; identical to SEQ ID NO: 838629

SEQ ID NO: 841967 - DNA, 663 bp, Homo sapiens; identical to SEQ ID NO: 838630

SEQ ID NO: 841968 - DNA, 642 bp, Homo sapiens; identical to SEQ ID NO: 838631

SEQ ID NO: 841969 - DNA, 540 bp, Homo sapiens
ttagacttttaatgtcattccaccttgccagcctacactgttcaagaaaggctttacatggtcacagggctttatagacatagacaatttttgtcaccactgtcaccgtacttatgagagatttgcaaaccatggcttagttcaaaaaggaaaaggatgtcaacaaacctatgggatcttaggttttgtttctgtttctctgcttatgagtgaattttgcagttgatgaaattattcagacttcttgttttattatttataattataaattatacatgcatatatgcttatgtatatttgtatgtgtgtacacatatgttttcttttttcaacttttagattcaggggtacatgtgcaggtttattacatgggtatattgcatgatgctgaggtttggggtatgaataattccacactcaggtactgaagatagtacctaatatttaktttttcaacccttgcccactcttctattaggccccagtgtctactgtcatctttatctccatgactacccaatgttaagctgcaccttataa

SEQ ID NO: 841970 - DNA, 635 bp, Homo sapiens
ctgaggtccataaaagccccaggctcatccagagtgaggcagagggcagaagactgagagatgatgggatgaccagctgtatagaggagytgctgtctctgctgagagcttcagatacctgcagagacctctgaatgacctacctgcagagagcagccaccctccccaaggcgtcctctctgctgagagctgaacacttgatgggacaacctgcctacagcaaaaagatacccactacaggtatcctccgagctgttctaacactaaataaagctcctcttcatcttcttcacccttcacttgtctgctacttcattcttcctggatgcaggacaagaactcatgcaaaggcaccactggccacagaggtttctgggaagaaaatcgacaccccaaagatcccataacactatgattagatgtttaatcttttccgagagccagtagcaagccagaaagtatttctcaaaaaagagaatgattatctgcagaagagggcatagatgtattttaaaaatctgagatgtctgcattgtgattattctatgggtgcttgccagaggctgtaaacacattattttccacagacacttagaaaatcattggatccactggataataaggtaagtggaaga

SEQ ID NO: 841971 - DNA, 635 bp, Homo sapiens
ctgaggtccataaaagccccaggctcatccagagtgaggcagagggcagaagactgagagatgatgggatgaccagctgtatagaggagctgctstctctgctgagagcttcagatacctgcagagacctctgaatgacctacctgcagagagcagccaccctccccaaggcgtcctctctgctgagagctgaacacttgatgggacaacctgcctacagcaaaaagatacccactacaggtatcctccgagctgttctaacactaaataaagctcctcttcatcttcttcacccttcacttgtctgctacttcattcttcctggatgcaggacaagaactcatgcaaaggcaccactggccacagaggtttctgggaagaaaatcgacaccccaaagatcccataacactatgattagatgtttaatcttttccgagagccagtagcaagccagaaagtatttctcaaaaaagagaatgattatctgcagaagagggcatagatgtattttaaaaatctgagatgtctgcattgtgattattctatgggtgcttgccagaggctgtaaacacattattttccacagacacttagaaaatcattggatccactggataataaggtaagtggaaga

SEQ ID NO: 841972 - DNA, 670 bp, Homo sapiens
ggaattgagaattttctccttttctgtctgcgttctcttgctcagttctttctttatgtgtccagtacagtgctaagtactttacatgattttttaaattttatctatgcaaaaccttatcaggtaaatattacccccattttagaggaaacaaactgaggttctaagaactcaagggccaaacatacaaggtcacacaagtggaagtcatcatttgaaactcagcagtttcactacagggcctatattcttctttttattgtggctttattaacattttattggaaggtgtaaagcaaaaagagtgtctgagacagatcttaatcaatttaaaggtttattttcccaagattgaggacatccctaggaaaaagagacacaagccacagttgcatctgtggtccatgctttttccaaagaggattttgagggcttcaatattaagagggaaaaagtaagcagggaaagaaaggagaaaagaaaaaaaagagggagcatatggtcacattcttatgaagctttgattaatgctcactgaatccacatgttgcacgtgaaaaggaaggggtagaggaacagtccattatgaattatgtatttgtttcatgctcagtaaaccttcagtttacataagctmaagtaaacatagagtagaagaagaagttaaata

SEQ ID NO: 841973 - DNA, 645 bp, Homo sapiens
acagatatgggttggaatccaagctgagccattttctacatgtgtgaccctgagaaagttaytaggttgaaccacatcagataactgccacttttgtacttttctcaatggtcacatacaagtaatttcatatagttcttcatggtttggtttcctcatttgtaaaacaaaggcaccaatgcctacaactcatagaagtgctatgaggtttaaataacaatatactttacaaagcacttataccaataataagagctcagtaagagttgactttctcaaactttcacttttgcctcaaattatctgggggcttatttttatttatctattctcctagaagttgctatctgaggcaaacagcttttcctgcatataggaagcaggttaggactatacccaaggtcttctccagtgatccattcagaatgtatggtttcaacatgacccaggttgttagctaattggctcaaactcagtcaggtatggacccttcatagaagaagcaagtatccccctgcagtcttgaccatacctcagaaatccatcttaaaaaacactactcagggaaaggtattaaaacatatatgatgtttcctaatggatgcaaaagattaatctaggaaaacttcctttctaggcgattca

SEQ ID NO: 841974 - DNA, 576 bp, Homo sapiens
aaaagaatcttgaaggctgtgctcaagtaactgcagtttaagaaacactgccaagtccaggagagcatcaccgcatatcaatagccctggatttactcctgttgtgcaaaggacgtactatatgaccctggacaagttggaacctctctgaacctcagttgactgaagtagaacggtgacattgaaggagattgccaagatcgcctcccatggtagcatgtggtgatgctattgatattacaggttaccttctgtgtctagtgaggtggaaatggggaaatgatgtcaatcgtgatactatgtctggagacatcatgtacataagcatcgagttgactcctcctcaccctgaagcagtgaggtatagagaaaagtctgccacttactgtgttccctgggccttgatcaagtcacttactctctttgaagcccagtttctctrcttgttttttgaattatgtttttaattgacaaataaaaatcatatatatttattgtaaacaacctgttttaaaatgtgtatacattgtggaatggctcagtcaagccataattaacatatgcattacctcatat

SEQ ID NO: 841975 - DNA, 608 bp, Homo sapiens
ttatttattcaatcatttgtttgtatcagtatgaattcatttttattttatcctatggatygtaatccactattatcattattcattttttgttgctcagaggcagaattttccagagacagaagttgaaagaaaacaggataattcaagttttgtggcacatattaagtttatcaaaagctctctgctgctgacaagaggtagttactttcacagccttgagaacaatataagacatttggttatatatgggcatggtgccaaggttaccaaatggcttctgtttaacctgtctttatctcatcaccaattacgtggaacttgccagtcaggattgcacacatctcctgtcacattgactatttcccctacgacccttacctaaagggtttctttccttcacctatttttcttgtccttactttcccatgcccatatgctcgaaacaatcttcctttcgccttccctcccactcatcattctttcattcaaagttcaacataaagtctatccccttcagggagcccaacctagaaaaagatggagtcaagaaaatacgctgactgtcaagtgttgaaagacactcctcttcaaccctggacaattaa

SEQ ID NO: 841976 - DNA, 602 bp, Homo sapiens
attttgcatcacatttgttcatttgccatgaggaaagcagctatggtgcaaaatgtgttattgccaygtaaatgctatgtcccagtgaaaagcaccagggcatgtgctgtgcacatcaaaggaataaaacccataataggaaagtcaagggtctacaagcctccctttactccttcataataaaacaatcgggaaaatcccataatgcgtttagtccattctatttcctactttatactctgatatcaagaagaatggctacacaataatttggtccatttaagaaataaggtggcactatccttaagatgttaaagatgctgtcttgttataaagtatttttaatatctgcacaaattctattactactcatatcaaaatataggtatgtaatattttgccagtttttttttcctgaagaccaaagctgtcatttgagttatgtcttcaaatgtcttgtttcctttaaactatatttataaagtatgccgagaaagaaagatttgaagactttaatgtgtttccatagctaaaggatttagttgagaaggcaggatgaggggccgcaggtgccagacattgtgtagaatttgcacttatgc

SEQ ID NO: 841977 - DNA, 514 bp, Homo sapiens
  misc_feature 126, 127: n = A,T,C or G
aaagaactggtaagcttgacttcattaaattaaaaacttttgctctgtgaaaaagcttttgctctacaaactgggaagaaatatttgcaaacacatctgataaagaaactaccttaaatatacccnnaaaaaagcattaaaattcaatgagaaaatccaattcaaaaatggatagaggtcctgaacagatgtctcaccaaagatacaagatggcatataagcatgtgaaaagatgctcaacgtcataaatcattaagaaattgcacattaaaaatagtaatataccactacacacctattagaatggctaaaatccaaaaatctgacaataccaaatgctagcgaggatgtggagaaacaggaactctcattcagtgctggtgggaatgcaaaatggtrcagcaaccttagaagacagtttggcagcttcttacaaagcaaaacatagtcttttatgatccatgaattgtgcttctaggttctcacccaaataagttgaaattttatgtccata

SEQ ID NO: 841978 - DNA, 569 bp, Homo sapiens
tcaatataatatcattctggcacagaaaatgttgtccaattggaagtacagccaagtgcagtggcttgtgtctgtaatcccaacactttgggaggcaaaggcaggaggattgcttgaagccagaagtttgatactggcctgggaaacattgtaagatcctgtttctataaaaacaataaataaataacagcactatcaaaagagtcttcacatatgttgagatattccaaagcataattagagaattttaaaattaaatcttatacatattttgaactcccattatgtagtatattcaattattcccttgctcctatatgggtacatttcaatgtcttcttgtttgcaagcatggttttcaataattacacttctctaaatcttctaaaactagagtttttggtattccatatttcagatactttgtttaaagattttcaactattttaaacaaaatgcaaccaaagttagagggcttatttacagaaaaatttcagggttgtggtaggacagatggtttgatatagaaaaawgttatttacaggctcaaacccttctaaaattctgtc

SEQ ID NO: 841979 - DNA, 505 bp, Homo sapiens
gcataggacaaccccctccataacacaacgaagaattatcctgtccaaaatgtcaatagtctaaaatctatctggagatagagcaatatccatgggcaaagtcccatgccaggcacaagaatctagagtgaaccagcttcttactacgcagtgtagggaatgaaatgagaatatggcttaaagtaaaaagactgggtttgaatatggtcctgtcccttactgtttgttcatgggcctctcgtctacctccaatccatatactgagtatgtcccagcacagaaagtgtgattccttggaagctgctcacatacttcccatgagcagcccagctcatgggaagggaagatgtctgtctcagtttccccactactggctgggtcacagcacatcgatcccgctgctggcagagggaaaacctggcagccagtgagctgcacacatgcctattcacaggacagrggtcccaggcacctctaaaagtctgcacttaccccataagtattc

SEQ ID NO: 841980 - DNA, 573 bp, Homo sapiens
  misc_feature 382: n = A,T,C or G
catctgaagaaaggaaaagaaaaaggtaactcccactgtgtctgtaaacatttgattcaaatttgagatttggggttcagcaatcagctgaacctctccctctcctttacgtgcacgtgcaaacacacacacacacacacacacacacacacacacacattctgtagcatgtgtgtcctcatccagctgactagcgaaggataggcctagttgttgctggccctgcctgtgctacaattttgatcagacaggtattagaagttaatttcagaaaaaaatcatagcagtttctggcacataagccaacttcaacctaacctttcgatgaggtaagggtaaaggaatctgataacacatttaatttcctgtgaaatgaacaggngtttagaaactaagagggaagtgggatttagacaaatacattttgggttttatctcacaggacacataaaacccttttgttccatttgtcatagttccaggcccaccggrtctctcctacccttgacatgcacctccattacctatctaagcctcaacttcccagggtctccctctgaactttccccttcc

SEQ ID NO: 841981 - DNA, 534 bp, Homo sapiens
agtggtcactttcccaggttcctgtctgactttcacattttgtctaaatgtgatacaattatttctggggcagaaaggagactctaaaaggggccctttggttactctccatgcaccgcccccscagggtcctgagacctgttcacttgatcccagaaggaagaaacgagctcttattccctctcagacctctgctgatacttgtttttcagctaagttcaagacagccaaatgaatttttcagagagaccacagctggcttgtcaggacccaggtaacaagatgaaaataattgagagaggaaaaatcccagagcccctcaggtgtcattttcacaaagttttcttctgggtatccttatgcgttccgagttattcattggttctcttctgttgtcctcactggcaattttcctctgcctcttcttctttctctacagttttccaaaaagcataagctatgtgtccctgatcctgagcaaagttgatgtgaaaccttgtttttttttgttttttggtttttttttagaacatt

SEQ ID NO: 841982 - DNA, 511 bp, Homo sapiens
cagagctgcccatggctgtgggagaccacttcttgaatcagcatgacctggatgtgagacatggagtcaaaggagrtaattttagatctttaagatatagttactgcctcactggatttcagacttgcatgggccctgtagcccctttgttttggccagtttctcccatttggaataggtgtatttacccaatacctgttctcctatcttatctaggaagcaactaacttgcttttgattttacaggctcataagtggaagggacttaaagtttttagcttcagacacttacagacttcagatatcccagagacggctgaaaagtaacctgaagagaatagaacttttatgatatatcataatactaaaatgttcctgcttcaatgtgagaaactcaataggcagaatcaaaaattaattataagattcctgaggggaatttggtttggtaaaatttgttaccacatgatatgatttgtctctgtgtacctacccaaatcttatcatgaat

SEQ ID NO: 841983 - DNA, 601 bp, Homo sapiens
attaattctgctttgcagttgacttttaatttacgtctttctcttcttccttaggaaagaaacctattccctgaatctgaggagctsacttaaatgctcacttttctgaagcacagcaccaattcatgtcttttattatatgttagtcactgtcattgtggttaagtacaatgtagcacggatggagcattttttaaagacacacaaaaacacacacacagacacacgtgtcaatggggatttcattgatgaatatggcaggctgttcatggtttcacagctgtgaaaaacgacagccacttgatgcaacgataaatgccggtcatccctgccaaaataaacacatccgcgccgtcaactaagttaaagctaaaacttcactgaattcttatacctggccatatatttatatttgagcaacaatttaaaaataatttatgtttcaccattctgaaaagtaaagtagaatactgggcacaatgagagatccaactgagagggtattgcaaagtgatatttaaatattatatttggccataaacaaactctaaattaaggtttacctttgaaccaaaaacagaaagttatttaaaagcaaaaa

SEQ ID NO: 841984 - DNA, 524 bp, Homo sapiens
caacacattccaattatattactaaatgcttgcccttccatcaagaatttggggcattttatggcatggccttcacataaaaaccttagaactgagcatcccaaggctcaactcagacttttttcctttgcatctccaatctgtcaaacatgtatatttcactattcttctaggatcaactcttcaaaagctactaggtatgagtaaacactctatacatagccccctgactccacctgttttctggtggtgttaagaaaaatatcattgctagcctatggtcctatcctcagaggaaggcaacaccaggacctatattatgactgtgagtcaggtgagatagtccgaggcaaggaacctttatagagtgtagactggatatgtgcagaggcgctgaagaacragacagccaacatggattcacttccactgaagaaggcccgggggaggaagggtgacctgagttgaaccatgagaggaggtgggggtgggaggaatatgtgaaggaacagaggtgagaggaa

SEQ ID NO: 841985 - DNA, 603 bp, Homo sapiens
tattttctgtgatggcttgacttgctaaaatgacaaggtktattatttttagcttccagttttggcgagttgatcagtcaaaacaaagtattaaaatagcatctacttggtaaattcaatttcagatgactgcatctaaaactcatatccattatagactcatataaaactgacttatatggctaaggaagtctgagaaggaataactaaatatatagctcaaggaggaaagatgaataacttctttggtctcaaatacaagtctattttggcatcaaatccaaaagcaagcctatgataagcaatggattcatttaaatcactttaggacaaatgatttaaagagggttttctaacgctccagtgttccatccaggatgtgtgaaatgcatgagatctcagttaaatgtagcatttttaataaatatagtctaagtcacacgggcctttttgataatgtaatttttttctttgaacgcctcttttacaatatacctaaatgactatgaaaagctatctcgtgataatatatgctagaaaaccccattttatattatttttaaagtaacttattctaatttttaaaagtaataaaagtgtagg

SEQ ID NO: 841986 - DNA, 649 bp, Homo sapiens
cttttttggttccatatgaattttataatagttttttctaattctgtgaataatgtcattggtagttcaatagaaatagcatttaatctgyaaattgcttgggataggatggccaatttaacaatatcgattcttccagtgatagatttttcaagtacaagaatatataaacatttcattagctgcagagtgataacgtcatctcgtggcacatagcctctggaaaatttcactgtacaattgtgaagaatgagaatgaaaaagtcttataacattatagtattattataaagatgtcttgacctcatggacccctgaaagggtctcagagatcctcagaggtccccaaaccactttgagaaccatcccagaccattgacaggagatgtttatactcaagatttgggatgattgtgctgattctttcatttagtcaactgtcagttctttttccaggataaataggcttatacgcagttttgaaaatgaaggctgaatttcacaaatcacttgtggtctggaattggtactactagtggtaaaaaagtaagaaaactcaaaccacaaagaacgaaattcaatagtttctaatctttcagtaactattttgcacagattaggttagacttctgagtcaaatgaatgaaga

SEQ ID NO: 841987 - DNA, 629 bp, Homo sapiens
taaaacacattggtatcaggggacaaagacagcacctgctttcaaggtcttttgtgttttagtcagaaatgtattctaaaactctgggtatatgggctgaatccagagtttagattgtgggattttattgtacatttgcattattttaaatatcaacatccctggagaagctatttttactcctacaaaacctaaacacttccttatttagcaatgctctcatagagaagggattttccaaaagctgtatttcactaagggtcaatatgaaaaaattacaatgtcattaaaatcacagattttttgtagattcacagaagcaggctcagtgttttctttcaataaatatcttttttttagttcaatacattactaattaattttaatttcacaaatagtgaaattatctgagcaagaatcattctcatttaaaattgtcaaataagtcagaaaaagatcaatatctcccctgcttcaaaaatgacactcccaattttcacaggtaaccactgttaacatttagtaaatacctttcagaaccttttacaagcatatataaagtacatcatttttgtrgtataatgtgttttctttaaaaaaataactgggaccatactgtattttctaca

SEQ ID NO: 841988 - DNA, 601 bp, Homo sapiens
tcccctccaattacattagtcttcggggattataaaatatttagtatattctgataatacaaatagttggtaattactttgtttctttgaatagaagatagatatggaaatagataacaaaagaatcacttagtgaataaagaacatactgctggctaaggcagtgaccaaattatttgcacaattacttgggaagcatctgatagctatgataaataccatttaaaatgtgacataattttcaagagattcttaaaacgtaacctaatacttcatgttcacaatatatttgctagatgtagatcaaataaatcaatcacattttctacttacatatgactcattagtggtacattaggaaatctggggatggaatatcactggtggcttctatagagtattgtatttctaaaacactttagaattattaattaattattattattattattattattattgttgagayggagtcttgctctgttgcccaggctaaagtgcagtggtgtgatctcggctcactgccaacttccacctccccggttcaagtgattctcctgcctcagcctcctgagcatgtgggattacaggttcgtgccac

SEQ ID NO: 841989 - DNA, 365 bp, Homo sapiens
gtgtttttttattttggtggagaccaggctggtctttaagtcctgacctcaagcgatcctccygtcttgacctcgcaacatgttgggattacaggcgtgagccactgcaccccgctatcaggtccagtgttttatataagaaagaactaaagaggtgaaatagggcccattcatgccgagggcatgtggtttgtaagtaaagaacaggaaggggaagaggtcagtgtgactcactctcctgtcacccttctcacctgagcagaatcctgaaatgcattcatttgctagtagaccctacggggctggctaaagaactaacctggggacacatatcgggagctaaagtcttcatatctgaacaaagt

SEQ ID NO: 841990 - DNA, 499 bp, Homo sapiens
ggccaggccaggtcttggaggtgccccgtggggctgagattctcctgagtgaaaagaggcagttggagataacccctggatcctgggcagaggagggagcctgaagaggcctctgcttacccaccctcatcttcctgccagttttggaaggcatgagggaaaaagcatgaaatgcctatcctaggacacagtaaaaccttgtgacaacactccccacagcagtgcaaattctaatatattgtggcagtttgctcccagactcctggggtacacagcttggtgactgtgtgtacttaatctagccatttttctaatcttctgataatgtgaccttgcgtttcatactttttggattcacctatagttttttagcagggttttcactgwacacatcaagggctcctatcccaaagtcaggaaacaaaataggatgaaagcaccaaactccaaactgacctctttgtgccttgctccagggcaagagtgcaatgggcacact

SEQ ID NO: 841991 - DNA, 638 bp, Homo sapiens
gccactagcatgttattacagtgttattacagaggaagctagtgagggtgccacagtagtccctaataacaaggaggacagacgaggctttccaaattcactttctggcaggagytgagaaaaagcaaaagctctcccaggcctagtttctctggatttgtgtttgccaattgaatggtctagaaactgaccggcaagaattccacttactccgtgtggccatttgcagctccttgatggtgatttcaacgctttcccttcttcacctgtttggtttgaggaggcaagtatctctgcttcctccctagcagttgcatccaccaaagatatgcgtgcccttcaagtaagcaagcatctcaaaagccgggctgacaggtttacttctcacccaggaatgcagctctgtcttcatgctgagaagcccaggtcaggtcatgatagaaaagccactgcgttcctcaggctcctgaagcagtgtctgggcacctggcggcaggaacagtggttagttaagctttgtccctagtaaatggctctgcctctgagttgaggtttttataaaagagcaattcagagttatgcagtcttttcacttgtctgattgtggtcattatgcatctttaatacatccatcatta

SEQ ID NO: 841992 - DNA, 609 bp, Homo sapiens
gaactcaaatggaatggccaacattaagaaaacctctgatcaatctatagtataatataaaatgatacatgtatactctttaaaaatgttatgttattataattctgaaatgaaataattttaagtcatcatcacaaaaaagggatattgctgttctgtaacggcttatccaggacactccaagtttagaagcatagttacttatataattttaaaaaatgtcaaaataaaagtattggcagaggattgttttgcagtttttgaagttatgtttcattttaattttcactatttgctcattagtgtctctttataattgaaaaatagctatcggaatttgtttagcaaataaaactcacactaaattgttttaaaataattaaaattgtggtatctacatttcatattgtaggagttgaagaagaaagaaaaaaacatgaaaagtggcttaacagtcagagacaggtttattttaaggaataaacctgcgagggacttctggccaagttgagacaggagcactttctgttacaggccgagagtatttatgggttcaaggtgcgagrgcttttcacactttgtcttgcttatctgagagggagagttttt

SEQ ID NO: 841993 - DNA, 547 bp, Homo sapiens
caggctggtttatgttttctgtgcaagtattcacattttgtattctatacttcttttggatgaattacttttgtgttttacttcctgctatgtgttgaaatctctaaaacatcattctgtctgattgatctcctccttaaacacttcacctgtatttctactcttttttttaattattcattaactcgtgacattggaaaactcaatcacatttttctttgtttccaagctcccaacagagggattaccacagagttgccagtcatcatcacgtttcatcaacacgtttgaagaacagttaacattcaagatttaacacatgactattttccagagtgtgaccatggtaattagtgtattttgttatggttgtttttgtgtgtttctgtcttcctaatcaaatggtgatcatcctgagaacagaataagaatgctgtgtraaatgcaaaatatctaggtaaatttgaattttaggtaaacaataaatattttttgtagaaatattccccagatctaaaataaatatttttatccaacattctgttgt

SEQ ID NO: 841994 - DNA, 531 bp, Homo sapiens
tcttcctcttcttcttcttcttccatttcctcctcctgagctggggaagtagctgaaggagccgtagctggagtagcagaggggatggtggggggcgccaytgatgctgtcacctccttggcctgctcctctggctcactgactgggcttaagtccacagctggtggcgagggggctccgttgagcagttcctcaggttgggcagttggagcaatgggcacaggggattcggaggggcaagctgggggaggagcaagctctgggcttgactccacctctggttccagatcttcagatgggaccatgccattaggctcatgaatttccactgtgtgagatgccaaaggggtgggagcctggagaggactggaagaaaactcagattctggaaccggtttgctaagtgtcacttctacttccagtatgggttcggcgagaggagtgggttctggagagaggcgatatggctccccagtttcacgggagatgggggttgattcttctacagacatttgtatagttgtcatagtg

SEQ ID NO: 841995 - DNA, 611 bp, Homo sapiens
actcagagcattttgcccccttcccaagagcattttgccccttccrcttcttgtactccaaaagagaagagaataatgaaaaataaatcaattttatagtcaacagcttgggtgatatctctgtgatagcacttaacagtcacataccctgagcaagatattcagcctctgagccacactccacaagacattgccactatgccaccagtgctaggggctgagagtgcagtccttgtgtgagactcactggacacttaaagaatcatctcccaaaaagatataccgcaggatgcttttccagaacagaggtcagcaaactacagcccatgagtcaaatctggcctacagcctatgtttggaaataaagtgttattggaacatagccacatccacttatttctctattgtctgtggatgtttttgcactacaaagggagggctgattggttacaacaaagaccatatggcccacaaagcctaaaatgtttatcacctggtttttacaggacatgtcagtaggtctagaagatgccaataattacactgtaaagaaaaagagtacctaggttaataagttcaggaaataatgaattaaatagatttttctacag

SEQ ID NO: 841996 - DNA, 601 bp, Homo sapiens
aactttcaggtgaaggaagcacactaagcaggtaattccagcactttgggatgccmaggcaggcggatcacctgaggtcaggagttcgagaccagcttgaccaacatggagaagccctaattatacaggaatccagcgatctattggaaaaataaaggagatgggaccatattttaagacaagttgtggaaaaggttccaggatcaaactgggtagggtataaatattcttcacccatggaactgctgtggtttcttttcttttataacctgattatcagtcaggcgcagtggttcacgcctgtaaccccagcactttgggaggccgaggctggtggatcacctgagatcaggagatcgagaccatcctggctaacacggtgaaaccccgttctactaaaaatacaaaaattagccgggtgtggtggcgggtgcctgtaatcccacctactcgggaggcggaggcaagagaattgcttgaagccgggaggtggcaattgcagtgagccaagatcacgccattgcactccagcctgggcaacaagagcgaaactacgtctcaaaaaaaaaaaaaaaaaaaaaaaagatacttggggctgtga

SEQ ID NO: 841997 - DNA, 637 bp, Homo sapiens
ataaagccattgtttagcttcagacaatacctgtttacagttcaataaacaacttgtcacagttgcttgctcaaagcagacctagatgtcaatgcaaacagttagtacagaggtagtgaaataaattggtctcctgagtaaataaattgagcagcaatgtgaaactgcctcatcagtactgaggaagataatcatttataaaggtttaaaatggtgtttcataagtattgacatttagagaaatgtctttccccatctaaatgacttaccccccaaccttttcctttttctaccagccactaaaagagaagaagaaaataaaaagagaagataaagtatttccagggtcattccatcaaagttttttaatgcttttatataaaatttaataaacatctaaaagatgcctggtcttgaatataaattatgaataagtatagcacctgccttcaaggattttccattctgtcatcatagaatgaaatcagacagaaagataagacaggtggaaaggtcatttggccaaaygcctgggttttgttgttgtttcttattgacgagtgatgaaggagaaaccaatagaagcaagaacagaatggaggtgtgtgcctagaaaccattgtcagggaggtgaagc

SEQ ID NO: 841998 - DNA, 660 bp, Homo sapiens
ccaggctggagtgcagtggggcaatctcggctcactgcaacctctgcctcccgggttcaagcgattctcccacctcagcctccctagtaactgggactacaggtgtgcactaccacacctggctaatttttgtattttttggtagagacagggtttcaccatgctggccaggctgcaaacaaaaaattctaagttacttccagtttcccattgctttttggtccttgaattcctctggtcttctgtctccctcattctgactcctgttatctctattaacctaccagtactaatactgaagtaaggtcagagatgctagaatgattctctaagatgcttactgatgtcactgcattaacaagaagtgggttctgaggaatctgataatgtaggcactgtgtgtctcccctgtataacgaaccatataattagattaatatcaatacatttacagattgtaggggaaaaggtggagggaataaaagcaaagagaaactgattaaattacccctgtcttatttctgtctctcttatgaaagtgaacatgaatagactgttcataatcttctgacacaggaagattataggctttggaattagatctttcctgtcagtsgctatgtctccttgagcatgatgcaatctctctgggcctcagtt

SEQ ID NO: 841999 - DNA, 601 bp, Homo sapiens
gctggtgtttgtttgatggcttgggagtgacttgggaataaatgagtttcctcctccactggtcaaacagtgtccacaagagtaaatttgaatgtaactacagtcaatattaactgggatgaaaatcccaactgttaacatgagcaaatttccattgttacaaccatccctcttggttttctctgagcttgctgtggtgtggtagccgggaagagtgaggaaccatctcacctacatgcaaggctctgtggggaccctctcaaggcatctgagtcataggtgctctgaagccactcatgaagctcctctccactcttcattgtgggggaatacttgtcactcttgtgtctatatagccaagagtgatgaaacaaacaaacaaacaaacagcaaagcaacccaaagtgcaaattatctatcattctctttctttcattctacagactgaaaacatgataaagtgtcacttayagcctgagataaaaaagctgacaaaaataccaactgacaaaaatatagagttagaacaatttcagagcaaagttctctaaagaacaaagtgcgcttgtgatacacagcactagttcttagtcttgctgaa

SEQ ID NO: 842000 - DNA, 660 bp, Homo sapiens
cctgcccatattacactgacatcattaaaactatactgtcaccaagtactctaacagtaacctaagattccatgcaggcctaaaactaatgctaaattctcagaagccataggggtgagctgatrtcagaacagtctacatccatgtgataagtgcagtggacataataagcttcaagtttaattatttaatactaataatattgggtttgactaatccactgttggaccaactttagccatgtgttaagtacaattttgaatacaaaaactacttcagtttcttaagtaaatgcaaaagaaaacagcttttcaaaagaaagcaaagatgaaaatatatattgtatatatacataaatgataatatggcagagttcacagtatagcattgaagaaaaaaataactagggctaagaaagaacagttctcggtatctaattcactagaattaaaaggcagtctcttcaggatgatgggagaaaaattaacccgaaaaacttttcatctttttgtcactcaagggacaagtttaggacatatgaaatctcattggtcaaggttggattctgtgcccacctcttgcacaaggcaaatggcatcttgtttcatagaccaactaagagaactgtcatggttccacaaaagctgagctaatgttaca

SEQ ID NO: 842001 - DNA, 536 bp, Homo sapiens
cacattgagatacatgttgctgctcactcactgatttctcttctaaacatggaaattccaggaatgtgaggggttcttttaatctcatactgcatagtgttgaccagaggtttcaacatgtgtgttttccttgattcaaccaattttaaagaagttaagctaaaatttaaaatcaggagattttacctaaaaatctgtttccatcttcctttgaaaaattgaaagataggggaacaatggattgacctactgctgtgcaataatggtgcacttggctgagaagcagctgttctcattagacaggacgtgagctttctaggacaccacaaattggatcgctcgctttgtctctctaacactgaggctaacagttgccaatcatcatcgcaccagcacaaccagttygttgttttccttttagtattgcaaatatttatctgctgctcatgtctctatcaatcgtggggtaacaaatgtcatgtgatgccaacacagccacatgtttcaagaacaatgaagagcgtatttgttcatgg

SEQ ID NO: 842002 - DNA, 536 bp, Homo sapiens
cacattgagatacatgttgctgctcactcactgatttctcttctaaacatggaaattccaggaatgtgaggggttcttttaatctcatactgcatagtgttgaccagaggtttcaacatgtgtgttttccttgattcaaccaattttaaagaagttaagctaaaatttaaaatcaggagattttacctaaaaatctgtttccatcttcctttgaaaaattgaaagataggggaacaatggattgacctactgctgtgcaataatggtgcacttggctgagaagcagctgttctcattagacaggacgtgagctttctaggacaccacaaattggatcgctcgctttgtctctctaacactgaggctaacagttgccaatcatcatcgcaccagcacaaccagttcgttgttttccttttagtattgcaaatatttatctgctgctcatgtctctatcaatcgtggggtaacaaatgtcatgygatgccaacacagccacatgtttcaagaacaatgaagagcgtatttgttcatgg

SEQ ID NO: 842003 - DNA, 631 bp, Homo sapiens
gaacttccagtttgaacctaactaggttaattgcctgctgaaacagccacaacaatagcagaaaagccaacattctccagygtattgtcataggactcagagtctcatactatcaaaatgtccaggatgtaatcccaaaatactcaccttacaaagaaccaggacaccctgagaaactctcaagtgaaaaaccatcatcagatcaacagatggaatccctgagataaaccagatgtcagtcagagaataactatgtaatagttcagtcattttgagtttattgagacttgttcacagcccagcatatgatctatgggtgactgttccaagtgtactgaagaaaattgttttttgttattgttggtttagggttctaagttcccactgactgccatttttctggattatagatcccactttcttctttctttgcatgtctagtaatattttaatactgaacattgcaaataatatattgtagcaactctggattctcttgtgttcttctgggtatttttctttttaatagttggttaattttttaaattcaaactgtatcctcactctttcctgtggaatgcagcagctggtaactgcttattgctcacagcatccagctgctgtttttctt

SEQ ID NO: 842004 - DNA, 619 bp, Homo sapiens
ctactacaccatcttcagcatgtctgttcctttcttggccaaaatgcccctctctctctacttgcccccaccaccaattcaaatgtgggtatattcttatggtcttttatttttacacaagctccgcctcccaggttcacaccattctcctgcctcagcctcccgagtagctgggactacaggcacccaccaccacacccaactcattttttttttcttttttgtatttttagtagagacggggtttcaccgtgttagccaggatggtctccatctcctgaccttgtgatccacccgcctcagcctcccaaagtgctgggattacaggcgtgagatactgcgcccggcaaaagtagatattttcaattacatcaaatctatagctatttctgtatctacaactatatgcatgtatgatgtggcagtgactcaatttcagtttctatattatttttttattttcactaggaaatcccgatgttgtttgccttctcatttagatactcacatctttaccccaacttaccatcttttccatgggggaaagagaaccctaaaacactgctttcmtgcttcaattcagtcttttgtgtacggaacctttggactaagttttttt

SEQ ID NO: 842005 - DNA, 569 bp, Homo sapiens
atcttgagttgatttttgtataaggtaagakgagaatccagtttcattcttccacatgtggcttgccaattatcccagcaccatttgttgaatagggtgtcctttccccaccttatgtttttgtttgctctgtcaaagatcagttggatgtaaatatttgggtttatttctgggttttctattctgttccattgttctatgtgcctatttttatacccgtatcatgctgttttggtgactatggccttatagtacagtttgaagtagggtaatgtgatgcctccagatttgttctttttgctttggctatgtgggctctttttttgtttcatatgacttttaagttttttttttctagttctgtgaagaataatggtggtatttttgatgggaattgcattgaatttgtaaattgcttttggcagtatggtcattttcaccatattgtttctacccaaccatgagcatggggtgtgttttcatttgtttgtgtcatgtattatttctttcagcagtgttttgtagttttctttgtaaggtctttcacgtccttagttaggtatattctt

SEQ ID NO: 842006 - DNA, 608 bp, Homo sapiens
gcttattgtgaggattaaatgagaatacagtaattaatagtatstaggatttgataccataacatggctcaggcttcattttattctttacatatgtttttatgtatttgatacccacaaaaaccctacaaagtagatacaatttctcagacacaaggaaattacaaaatggagagctgaagtaaattcctaataaataatatctggcttctaacctgacaattttaaccactaaaaaaccccacatatctagaatagtgtacatggcacatgtaccaaaaatgttagtgaatgaatgagtaatctgaaatgttaatgaaaatatacattaaaaacatactagttagatgtcccccaaactattcaaataagggtagcttatttaattcaagacagaatagtcatcatgaatctaagttactgactatatgattaggctcttttctctagctgtgtttctcttctgtaaaatgtgtgtgaactttcaactacaagctcaagagtttgttaaagtggtgattgctttgaactttaaatactgagttccttatgttatagaatgagaaaacatcaatttgtagaataaaatgacagatgtgtgtgtataa

SEQ ID NO: 842007 - DNA, 617 bp, Homo sapiens
  misc_feature 568: n = A,T,C or G
ctctcccacatgacagagaaaagggtggtttttcagccagcacacatccatttgctattcccccagccttggagtgtgtggtctaaatgaaagtgtaggtatgtgccacagatctcctcctcagcttaatgcagagtgagtcagagataaactccagctctcagcttctccctgaagatagaaagtactagcacacacatctaacacctcaacttttccagctgcatcacaaggaactgacttctatcttgcctgtctttgggcattgataatacttgtcacaccctagtctcttgagggggcaataagaataaagacagttatttagacaaacacaaaagtttgagaggcacctagaatctctggccagggtgattggcgatgtctaccttccatacaggaccagtgtgaaaaacctgggggatgaggttttcttttctaatgagtagaagccaacacaaagaactaaggataataaagaaatgaatktttttccaaataaaagagcactataaacctccacaaccaatcctcatgaaatgaagatatctgacttacatgactgaanattaaaaaaaaaaaaaatggccacaaagatgatcactgaaggacaggag

SEQ ID NO: 842008 - DNA, 617 bp, Homo sapiens
gcccatgtacatataattcactattaactcttaatacactatgaatagataaatacagaaattgtttataatacaaaaagtgtrtaaaagtataatttaagttcaaatgaatggtattttaatcttataatccttaagttaacctattctaatgaacttctatttcaaatttttctcttacacatttatcagagaaaaataaaataaaaccccaaaacctttgtagtaatggtaatggttgtagtctcaactgaatatttctttcagatcttgattgaatattgtctgagcaggcttatcataggtaacagttaatttcttcaactacacgggccggaaaacctgagccagtctcacccaaactcagtcgtagttcctaggacttttgcttgtccataaggggaatttagataaatccatgtctgttcctataaagaaaaaaaaatgagattcaattctatatctgcctgggactcacctacatatagtttacaatgtttctcttgctgagaatatgacaggcttctacacttttaaaacagatttgccagctgcctcaatgcttggcatctaaagcattaggatttctttctaataaacaaaacataatattgctt

SEQ ID NO: 842009 - DNA, 459 bp, Homo sapiens
cacctgctgttcgctcccaaagtactttgtacagagctctgtaatagtatttacattgttttgtaaccatttatttgtctttcacacttaactctgagattcttgagaagagcatttgtctggttcatctctgaaaccgtaaagcttggtagagagcctgacacattttagtgacataggaactaaattagtagcaggggtcacaataaaacttcatctttgccctctgaaagttgctgaaagtcaactgacaggtctggttaatagaagaaaaaggcatatacatttttagcatacataatagacttacaaaatataaaatctcaaagaaatggccagatggttgacactttttttttactatcttgaggttacagaaagaatggtggmttggccaaaaaatgatatggtggcaagacaggttatgggaaggagagaagaggagacatggttagcaaa

SEQ ID NO: 842010 - DNA, 618 bp, Homo sapiens
ccgtggatcgttaaagtactcagtgtgctcccatcctcagagctgtgccctgagacagcctaaattggtcaataaacacagtagttctgtcttgttgcttcttcttctgaaattaagaatattttagctgagccagtgtcagagtaaaatgcatagggggccatatttaggtaaaaactggttagacacaggccgggcacggtggcttacacctgtaatcccagcactttggaaagctgaggagggaggatcacgaagtcaggagattgagaccatcctggctaaaacggtgaaaccccgtctctactaaaaatacaaaaaattagccgggcatggtggcgggcgcctgtggtctcagctacttgggaggctgaggtaggagaaaggagtgaacccgggaggcggagcctgcagttagctgagatggcaccactgcactctagcctgggcgatagagcgagaccctgtctcaaaaaaaaaacaaaaaacaaamaaaaaaaactgattggacactgtgtgattgcatgttgagatcatgaaagaaaatgtcaatcatcctccttcctgctctatatttgaaaaagaaactagccaagcagccccgagggcctaccaaga

SEQ ID NO: 842011 - DNA, 453 bp, Homo sapiens
acacattagtgtatcctctcaaacccaaactaaaagtattccctattcacttcctcttagttggaccctaaaaaatcccacagccactccatcacaactctcttgaggtaaaaggtgatgaaaggagtattggagtagagatggataataatattaaaatattgcagatacagtatttcacatttgtctatgttacaatttatgacaatgtaaacatattgctaaggtacttccctggaccttggaaggaactctgcaaatcttgacatttaaatgttttaggttcacagtaaatctgaaagaaggcctggggaaaacctgttggtaggcgttaaaaagagagcaattcctgatatgatgcactgagatggacacgrcatcacttttgtgatatttctgccaaaagtgcattcaaactaaactaaggtattatctacaaacaactggcctgtg

SEQ ID NO: 842012 - DNA, 539 bp, Homo sapiens
cctaaagttcagccaacaaaagcaaaatagacaagtgggattgcatcacactagaaaactattgcacagtaaaggaaacaatcaacacagtgaaaagataatytacataataggaggaaatactttcaaaccatttatctgataaggggttttatgcaaaatatataaagaactgaaacaagtcaatagcaacaaaacaaataacctgatttaaaaatgggcaaaggacctgaatagaagacatacaaatgatcagtagttataagaaaaaatgctcaacatcactaatcctcagggaaatgcaaagcgaaaccacaataagattatctcacagctgataaaatagttattatcaaaaatccaatagataataagtgtcagggaggatgtcaagaaaaggtaacccttgtacactgttggtggaaatgtcaatttggatagccattatggaaaacagtataaaggttcatacaaaaataaaaaatataactactgtatgtccagcaactccactactgtatatatatccaaaaaaaaaa

SEQ ID NO: 842013 - DNA, 514 bp, Homo sapiens
tctgtagattgatttgggcattatggctattacaacaatattgattcttccaatccatgagcatggaatgttttttttcatttgtttgtgtcatctatgaattccttcaaccgtgttttgtagttctccttgtagagatctttcaccttcgatgttagatgtagtcctaggtatttttgtgtgtgttcctattgtaaatgggattgcattcttgatttgctctcagcttcaacattattggtgtatagaaatgctactgatagcatttctatcagtgtaactatacatttattttgtatcctgaaactttactgatgtcatttatcagttctcaaagccttttggtggagtctttcgggttttctaggtgtaaaatcatatcagcaaagagagactttgacttcttccttttctatttgggtgtctttcatttctctcttgcctgattgctcttgctgkgactgccagtattaggttgaatagaagtagtgagagtaagcatccttgtcttctt

SEQ ID NO: 842014 - DNA, 633 bp, Homo sapiens
agccaaactctttaactgcaattaacaaatctataattaattagttaagcaatcttccctttaagttttacattttgtggagcaagctgtttgatttggctggggctcaggcyggcctgtttgtgaatttcacaattcacagatgttagccgctctcgggctaagtaaaggaagagaatgtcaagttttaaatagcttctcccttccatcctggctgaagcaacaaataaaatatttttatgaaacacattttgagttagatttacttacagggaaatgtcaaatttctctgaaagggctttagattgtctcacaactttgacatctactgatgtcacctatttacaggtgtgtcctgtgactagggggtgaagggaagatgtgaactcaccatgttagtgaccgttagatacacagagtggttttttttccccctgttggagtctatcctaactgagcttctgaatcatatttcattcaatttccaaatccacaaaaccaggataagtttacagcccatattcagaaaggaaataaattattttgtgtgtagactttcctgatattacactgatttgggaatatatgaacaattttatggtttcctttcgaagtaggtcaagtcaaagcaaa

SEQ ID NO: 842015 - DNA, 488 bp, Homo sapiens
atagaaccacagatgatgccaaatagccaaagcaaccctgaacaaaaagaacatagctggaggcaccacactacctaagaaaacagcatggtattggcataaaaatagacacacagaccaatggaacagaatagagaacccagagataaatccacatatttatagtcaattgatttttcacaaagtcaccaagaacattctgtgggggaaaggacagtctcttcaataaatggtgctgagaaactggttatccttaaaaaaaaaaagaaagaatgaaagaaaagaaaagaaaaaaggaactagacccccatttctcactataaacaaaaataaaatcaaaatggattaaagactcaattctaagacctgaaactgtsaaactactagaagaaaacattggggaaacattctaagagattcatctgggccaagatttttttgtatgtaagacctgaaaacactgacaacaaaagtaaaagtagacaagt

SEQ ID NO: 842016 - DNA, 658 bp, Homo sapiens
cccactgcgtacctattgattagtctttcctgtatgtagctctgaaggaagcctcacttctttcctggcatagggagttccttaaacaagagtcagggactctggatgcccatttcctcttaacatatctattattctgggatagcaaacagaggaaagatttttaatagaagttgtttactaacttcaggaaattgccccttcaggatttgaacaatctttctaatgttagagaaggcttttcaccctcaaagtaacacgtgaataaaagtaaacacaccacacacacacacacacacacacaaacacatactcaggcagagaaacatatgagaggtggggaagaacttaacggtttgaaacaaaaatctatccattttcctctagcaaatgaagaaaataggctacaggttcaaattagaaaagacagtaaaggaagagtcttgtcttttttctgattttccaacttaaggaagggtagttttaaatacttattcccttttgttgctgttatcatctgtttgtatatgttacacacacatgcacaygcacacacacacaaacatgactacaggagaacaagttacccacattttctcaaactactccctttgtgaaagagatacaaatcacccccaagttttcttatttaaaaagc

SEQ ID NO: 842017 - DNA, 622 bp, Homo sapiens
gccctgtcaacaccttgattttagcctagtaaacaccatttcagactgctgacaaccagaactgtcagataataaatttttatcatttaaagccactacgtgtgtttagtgaaagaaactaaggcctcyacaaatgcagctgaaataaagaattcaactaatattcatcactcgggtatttaaaaattcattccagattcccttcatcttcaactaggactgctgctagtctggatggtttaactggtggcttgacccagccccacatccctgaggagtttgaggcaactgataccatgcacttcttagtctctaattgctttacttgtccacttatcatcaaactttgggcagtactaaatgacttaatgaatctacttggctccaaattatgtatcccacagtatgtaatcacacttctacctccttctgatcagggtcaattgtgctggcagaatgacaattcattttctttcctgctggtctgttgacataagtagtctaaagttatatggtagaagatgagatttccctggtggaatattttttaaattttctctataagaattaaacacttgcaggcccgcagggcctagatttgtgggataagaagcacaatttc

SEQ ID NO: 842018 - DNA, 607 bp, Homo sapiens
ttgtattttttttttaattttattgatctccattaattgtgcatgttctcctacaaagaggtttcattctttctaaaatacagctcaatttggttgtaatggaattgtgaatcctctaacattacawggcaatatttcacttttctagacaaacatgaatatttttctaataccggaaagtaaacaaaggttcaaaatattcattaaagtaagagagctacagggtccagaaaatgccatgagacatctgcccacacaatcacataaggcagtatgtagactattacacaacacaaatagtcatatttcccaccttattttaatcctgaattttactttatttggataacatttaaaaaatagatttgaagcacagacccttaacacatctatgatattctctctaccttgtgaatttcagtgaaagaaagatttaaaaccaggctgcaaaccattgacacttggaattgtatgagaatgaaaacacatacacacacacacacaaacaactctgtataatccattatatgtgagtattttattcatgcatgcctgtttattacaagaacaaaaaacttgctctccaagaccagaaagtaggacaaaa

SEQ ID NO: 842019 - DNA, 498 bp, Homo sapiens
catccattttgttgcaaatgacaggatctcactttttttttatggctgaatcgtgytccattgcatatggaacattttctttatctattcatttgtcaatagacccttgtttccaaatctttgctattgtgaatagttttgcaataaacagaggagtgcaaatgtctcttctatatgctgatttcctttctattggatatacacttagcagcaggattgctatataatatagtagctctatttttcatcttttgagaaatctccaaacttttcttcatagtgattgtaataatttacattcccatgaacagtgtgtgagggttccctttccccaacttcctcaccagcattagttattgcctgtcttttaggtaagagccattttaactggagtgagatgatatctcattgtagatttgatttgcttttctctgatgatcaatgatgtggagcaccttttcatatacctgttttccatttgtatgtctcttttaagaa

SEQ ID NO: 842020 - DNA, 659 bp, Homo sapiens
tctagctatgcatatatatttagaaaataaaataattgctataaataattattttattttttaaaagttagcgatttaaargtgctaattactgaaatgagaattacaggatagtgaagagtgaacaagtccagaaagtgagatactaggatgtgttaaaatacgtagaaaaaaaaagaaatcagccaaaatgtggaaattaggttttgattatataaatacaaattaaacttattatttgcgaaataccaccagtgtgaaataatgacttaaaaagtcatataatttcttgaagttcaaagaatgacacacttttcttcatgtctgtgaatttttaattcccagttattctagctgcctggatgcagggtagaaactcattggactgggagtcatagatgttggagggcaagtccaacttcctcatgagcaatatcatttgttatatatctatacttttatttaataatatgaatatttccatctatacaaaagacatactcacttatatgtgatgggatacaattattgccctaggaatgaagtaatccatacaattttggaaataatagattcacaactaaataattacaatgtagtttgacattttaatagaaaaatgtgcagaatatataaaggaaatactgactgggagtgtg

SEQ ID NO: 842021 - DNA, 310 bp, Homo sapiens
cctccagtggtcttagaaaatgtgacctctctcatcagggtattttttttgcctttttacttaatatatgggagcccatgtggtatagagcagtagctattttaagctcttcctagtttattaatcatacatatgattctcactaacttttgctccttgcccatcaagcagtgaagtaaaggaagtgggtgtgtctatcagtgacattactgagatttatattgctaagtagttctctagttaataagatggcacagcagagctgccagctgraattaaatttaaataacacaatatacccatcatattt

SEQ ID NO: 842022 - DNA, 580 bp, Homo sapiens
tgaatagaaatgagaataatgtatattctattgtttggaggtagagagccctgtagttgtctattagcttcatttggtaaagtgttgagtccaggtcctcaatatctttgttaattttctatctaacactgtcagtggggtgttgaagtctcccactgttattgcgtggaaatttaagtctctgtgtagctctctaacaatttgctttatcagtctaggtgctcctgtgctgggtgcttatacatttagggtagttaggtgttatttttgaagtgaacccatctttgactttttaaaaatctttgttggtttaaagtttgttttgtcaaaaattaggatatcaacccctgcttttttctgttttccatttgcttggtagatttgtctgtattcctttattttgaacccatgggcatcactgcatgtgggatacatctcttgaagacmggataccattgggtcttgctgctttatccagcttgccactctgtgtcttttaattggggcatgtagcctgtttatattcaaggttagtagtgatgtgtgcaaatttgatcctgttatcatgttattagctggt

SEQ ID NO: 842023 - DNA, 629 bp, Homo sapiens
aaataaccatgctgcccacagcattccacagtttcagtgcaatttctatcaaattattaaaatcattttaaacagacttaaaaaaaattctaaaattcatacagaaccaaaaaagagcccaactagccattcaaaggaaaacaaacaaacctgaaggcatcacattctctgacttcgaattatagtacgagtctatactaaccaaagcagcatggtactggtataacagcagacacatagataaatggaacagattagagaatccagaagcaaagccacctacatacaaccaactaatttttgacaaagttgataaaaataaacaatggggaatggacatcatatttaataaatgatgctgggagaaccggatagccatatgcaaaataatgaaattggacccttatctctcactgtattagtcagggttctccagagggacagattatacatatatatatacacacacacacacacacattatatatatacatcatatagatatacacattcaggggagttttaactcackcaatcacaaagtctcacaataggctgtctgcaggctgaggaacaaggaaagccagtctaaagagtccaatgttccagggcaggaagcatccagcacg

SEQ ID NO: 842024 - DNA, 582 bp, Homo sapiens
gatcataaaagtaacaatatttccacaaaacagagttagcctatcccttcctgccttaaatgctagcactcacttctcttccttactaataaggaatgtcctttgtggcatttttttttttttccaaaatagggcattttcaccggcattaaaaacctgttcaggcagatatgctttctcatcaaggattttcttaatggtgcctgggaactcatctgccgcctcttggtcagcagatccttctcctgtttggtacattgacattttcaaagccaaacctctttctaaaagtatcaaatcatcctttgctgccagtaaattctccagctttagatcgttcatcttcctattgctttaatcagtcatataatgactttgctttttctataatcatattagagtctagagatatagctttcttatggtaatcttgcaccaacataaaagatgcatcttcaatgtgagrttaaggactatatcacaaaaagtttttatgcctactggtgtagccacagcagcagtgtcatgaatttcccttttgtttttttttctacaatggtccttacattggattcatttatc

SEQ ID NO: 842025 - DNA, 556 bp, Homo sapiens
ctctcacacacagggctaatcttgcaaatgattatattttttaatactctttctatcacatttctaggatatactggaaatcactttctttggaattagacccgggtttgaagaccaattctgtcatctgtgattatctttatgacttgggaaatttacttaatctctctgagactcagtttactcatctgcaaataagactaacactgaccagcttaggttgttttattaagtgagatgatgcctttaaagtgctgacatgaagtaggtattttccaagtgaactccccaggagtttttcttcattctgcttttgaggcacctcgcccagtttgggcatagtgctgaggttcattatgaaagaaactttgcctcctgtgttcttaaaactaaaagtcattcctcgtatttaccatttggagcatgagattgttcacttttattttaatcaacgggattatractatgcttttttattcagattctgaataaccacttaaataactgccactttatagacacaaaccagactgctgcacattttcttatccattgt

SEQ ID NO: 842026 - DNA, 608 bp, Homo sapiens
agattggcttaggtcaattgtaacaagccatccatcatgttcctaaaactttacagaagaaatgattacagaagctgatttgtagcatttccctatgttttataccttatttcatcagcatattcctcctaatttttaccccaaatcacatgtgttataatttaagcatagttccattgaatacagataaggagagaaatgaactatccccagccaatattatatttttctggtagaattagcttaaaaaatacatccatggccaaagacacttgaatagtagttaagaagatgacattgcttttgcatggctaaatatagctgggaagttgttcagatgtcctaggggacactactgttagcctaaactgcagtcgtcattttggtacacaagaagcttgtactatgtctgtcactgttctgtcaatttactagaagggaaatagcaataataaacttgacattattttataaaaaaatttgtttcatataaataagtacatacttaaaactggatttatatcatattttcaaaaaaaatagactcatactgctttgaaaccagggtccagtactaacaagttgaycttgaaggccttttaagatta

SEQ ID NO: 842027 - DNA, 533 bp, Homo sapiens
gatctgattgccatcaaggccaatagtaatacctttagctaaggcaatccaatctatttagttaactttcccaatttcagttttaagatgccatttttccttttaacctttccagaagaccaagggtaatagggacaatgataatgccattgtgttcataacaccttatttgctttataacttttctagcaaaatgggtacctctattgctggagatttctccaggaatataaaggaaacatgtttctgatcatcttttagctactgttataatattggccttcctgtatagaaagcttctatgtgaccagagaacatagaccattgcaagaatatattcatatcccatggaaggtgacaaatggataaaattcctttataaatgttcaaatggcccatcaggtagcagaaatttaccatctgaatgtttttttgtcttcttgggattatggatttgacagaccaaacattggttataaaccattttagcaatttttgaacagtcrccacaccaataattttccataatttgg

SEQ ID NO: 842028 - DNA, 575 bp, Homo sapiens
actccttgttggatatgaagcatcattacatgatcttgttcacagcctttggtgggtcagattatgaaatcataactcttcaaagaaaatctttgagggcaggatgtaaagtccactggaaatcactaggaaatatgaggagctctgagttctgttcttaatttttccaaagcctcgccctatgactagagcaagagatttcagtgtttgctggtgagcaatctatcagtttggacacttaaaaatttctgtggagtaaaaagaagtggtcacatttacgcacgtcaccaccagtagcaaagtaggtcctgagttctgtggcaacttcttcctgacctaaaccccatttgaggacatctgggaacccaggtaccctaatttctttcattcatttagcagcattactggatttcagtccccatgggagcttcaggaatggctgggaatagccattttctccacttcaagcagtgaagaaaatgtgctccttgctataggcaggaacagcagaagtcttaaacggytttagatctcagttctcagcacatgtttacttcacagagcagtgtttactt

SEQ ID NO: 842029 - DNA, 474 bp, Homo sapiens
cccaaacagtgaatgtgaaaaggtggaatttgtgaacctggwgctgctcttctgcgagttcatccgccatgatgtcttctcccatgacgcatacatgtgtaccctcatatctcgaggagatttgtcagtcactgcctcaactcggccgcggtcaccagtaggggaaaatgcagatgaacactattcaaaggaccatgatgtgaaaatggaggtatggccctggatatgatgccccactcccccagaaactaaactctactgggaaccatgttcaaatgggtcatgtagtggtagaagagtgatggctttttgttgtattcttttgccccagtggttgtttatctctccttctcgagcaggaaagatatttacactgtagcttcttatgtcttccagaatttccctttggatactataaaactgtaatgaaaataatctgacaggccataacatttttcataggattggaattat

SEQ ID NO: 842030 - DNA, 605 bp, Homo sapiens
caaatattcgtgtttttctaacattccttccttaaatgaacaaagaaaaattacattaataatgttaaagaaaaaaaacaaaaaaggcactgtcattcttatgcttaagtctaactgtactactgyttttgttgttgttaaacatagtctcattgctcacagtccaaattctaaacaaaacaaataactaatatgttttgtatagttttttttgttttttagaaatctgctccaaattgagaaaaattcattccaacaatgaaaaaaaaaaatttcagaagctttcacacccccagtgtgtgtcagggtcctggctagatttcgggggagtatgaactcatgctcatagaaggaaacttgggtaacagtgataattataaagaagataagcactgctcatgccatcatcttaacaaaagtgtgaaaatcccatcagacccaatgccccccttaatagcttcttccactatcccaaaattagtttcagatactatcacctatctataaaatacaacctctaaaaatcaatgacctatatacagaaatgaaaggaatttatgataaaataatgtataaacatttcaacacaactacaataaaaaaca

SEQ ID NO: 842031 - DNA, 419 bp, Homo sapiens
tatttcttgaaaactgccaaagcacatatcatcaaaccatttcatgaatatggtttggaagatgtttagtcttgaatataacgcgaaatagaatatttgtaagtctactatatgggttgtctttatttcatataaattaagaaattatttaaaactatgaactagtttcattaattgaatttgctaagtggagttatttctcattgctaaactgttttttttcaaattctagatctctgctaactttagtaaatgaacactaaagtggtgagctttgataatgcattttgtggatacaaaaycatcgcctcatcactttctagaatgaaaggctgggggcattgctcaccttttgcgtgaagaaaagacctgtcccttagagccagtttttgcttaaggggaggacagaccgtcgtcac

SEQ ID NO: 842032 - DNA, 495 bp, Homo sapiens
gaggtcaaggctgcggtgagccataatcaccccactgtactccagcctgggtgacagagtaagactgaataaaaataataatactttttttttatttaagaaaaaaaaactrtgtctatccagctccaaatagtttgtgttttttacttattcttcttaattctgttgcaatgtttcctaaagtgataagtcaaagtttttccatttgttctatttaatccctactctagttataacccttacaccatagataagttcatcagatccttaaaaagactattttttttcttctggttataaggtgatatatactcgcagaaaacttggggaaaacaaaggaataaaaaaatcacatatgttcttagcgacataaaaataacctctgtattagtctgttctcatgctgctaataaagacatacctgagcctgggtaatttataaaggaaagaggtttaattgactcacagttcctcagggctggagaggcctcagga

SEQ ID NO: 842033 - DNA, 601 bp, Homo sapiens
ctcactctgtcgcctaggctggagtgcagtggcatgattatggcccactgcagcctcaacctcccaggctcaagcratcctcccgcttcagcctccctagtagctgggactacaggcacacgccaccacatccaacttttttttttttatgttttgtagagacagaatcttgctatgttgcccaggttggttttgaactcctggcctcaagcaatcctcccaattcagcctcccaaagcactgggattacagatgtgagccaccacatccagctcatctgtagtttttaaatttctactatgacctatgttacttttataatcagaaaagaacactttttaaaagcccttccttctgtggtcatcagcatccctgtggcttcaggccacaggcccccattgtggcctctaggatcccacaaaattccccacaagagttcttcaggtattaagaaacagcagtcaggtcccccttgagtcctctattttccatgctgaataaacgctcaggtctttgttgggttttgtgggggttttttgacttcctaagatggcagcgttttcttgtctcttcacgttgctggttgtactgctgtgaacac

SEQ ID NO: 842034 - DNA, 625 bp, Homo sapiens
gaaataaatctaatatctcaaacacacttgtagtttatgaggttaagaaaaccgtgacaccaaagtcaggcaagaacaatatgagactggaaaattacaggccaagttcactcaagaacataagtataaaagtcctaaacctaatattagcataagaaatgcagcaatgtaagtgtatcatgaccaagctggagttaycccaggaatgtaaggttggtttaataccagaaaatcaatgtggatcatattaacagattaaaagagaaaaaacatatgaacattttaatagctgcaaataaaattcaatatcttttcatgagtaaactcctaactaagaattaaataggacttgcttagctagatgaaaagcatctatgaaaacctacctacattgtacattatgacacaaagctcatagctttccatttgaaatcaggaacaacacaagggtacctgctagtatcactgctaggaaagttagaaagaaaaaaattaaaggtataaggagcaaaaagaaacaaacctgtcactatttggttgtctatgtggaaaatgtgaaataatctacagataagtaaacaataaagaagtttaacatgtttactggatacaaaatcaatatata

SEQ ID NO: 842035 - DNA, 619 bp, Homo sapiens
tcccccccctgctggggctgagtcctggaggggrtggaagagccccccatgtagcagctacaaatttcagttcagaagtccatgagatgtggcttgttgtcttttctcatgatcctgacacatctggatcctatcccagggtgtgtctcactccagggcccattcaccatcttggcatctgtagaagcatcccctgccctcccctcggccacggagtcatgcagggagctgggcttgatctgcctgcaggcctgcttcgagtcagcctcattgggcttcttctatgccataccagttgcaggaaacactgtgtggccacctgcagccacagcccctggatacctcagcatccctttcttcctgggactccagcagggaaagctgctccacgcccctctgctctcagatcctttccttcccaggcataactccaggaggcaggcgggaaggaagcccccaggataggagtccattctgtatttaacaggtattgattgagtgcctcccttggggaaaataaaaccaaaaggtccctgcccttacatagcatagagtctagtgatgggcaggccgattgtaaataccatagaaagtaaaactgcagagtatcttggcagag

SEQ ID NO: 842036 - DNA, 545 bp, Homo sapiens
atgtggaaattaaacaacacatttttaaacaaccatgggtcaaagaatarctaacaagaaaaattagttaatatctccagatgaataaaaatgaaaacacagcataccaaaacttataggaagcaacaaaaacagaactaatagagaagtttatagctgtaaatgcttacattaaaagaagaaagatctcaaatcaacaacccaactttacacctcaaggaaaaaaataagaacaaacaaaacccaaagttagggaaggaaggaaagaataaagattagagcagaaataaatgaaatagagaatagaaaaacaatagaaaaaatcaatgcaactaagagttcattttttgaaaagataaacaaatttgcaagttcttagctggattaactaagaaaaaatataaaaaatcaaataactaacgttagaaatgagaggccattgcaactaatgcaacaggaattcaaaggattataagagaatactatgacaattatatgtcaataaattggataacctaaaagaatggataatccctagaaacatg

SEQ ID NO: 842037 - DNA, 545 bp, Homo sapiens
atgtggaaattaaacaacacatttttaaacaaccatgggtcaaagaatagctaacaagaaaaattagttaatatctccagatgaataaaaatgaaaacacagcataccaaaacttatrggaagcaacaaaaacagaactaatagagaagtttatagctgtaaatgcttacattaaaagaagaaagatctcaaatcaacaacccaactttacacctcaaggaaaaaaataagaacaaacaaaacccaaagttagggaaggaaggaaagaataaagattagagcagaaataaatgaaatagagaatagaaaaacaatagaaaaaatcaatgcaactaagagttcattttttgaaaagataaacaaatttgcaagttcttagctggattaactaagaaaaaatataaaaaatcaaataactaacgttagaaatgagaggccattgcaactaatgcaacaggaattcaaaggattataagagaatactatgacaattatatgtcaataaattggataacctaaaagaatggataatccctagaaacatg

SEQ ID NO: 842038 - DNA, 610 bp, Homo sapiens
ttagatttcagggtccattgtttcagcgatagtactgccaaaatcctaaactccctygcccctttgggcttttgtcagaccccatctggccgaagaccattcccagagcaacccacactgtgtgctgtctctcttctggtatttaagcagctggagaaaaacacaacagagcagattgtaccatcatatattcatgagcatccattgtgaatgggcaccacagtgccagaatccttcagatatctctggtcaatctatagtccagcaatccacaatgaccattccagatcttctctagcttccttaaatgcccaactttcctacccatcaacggatgcctttatttcatatttcacagagataatagacactgtcacataaggccactccccccactccacacccccaaatcctgctaccaaactcactaacataacagcatctgtacccatctggtcctccttcctgcctattccatagaggagctgtttttctttctgaaagagatcaattcctcacatgtgctttagaccccatctcctttctccttcgcaggaatcttataatttaggtggttctgtatctcctgaatatccaatctcttttcaac

SEQ ID NO: 842039 - DNA, 661 bp, Homo sapiens
tagcattacctgagtgtaacaaaggatcctgagagaaacgacagtgctgaagaggcttggcagtgagacgagtttcacttacatccttgggaaggaaggagyttgccctggactctccaaggcccgtgatcctcaggagtgctgacttagattctgctcacctcaaaactcttttgaaccttcctagctgcaccccaaaatcacatgccaaagcctggcaaacacctgtacccaaggaacgatctactggccacccacattggcttgacttatcattttgattgattccaactggctacttggaaagaaggcaggggctgtcccatagctgagttgtgcccactgcccacacctcattcattttagttgccatgaaggaggatttgatactggaggctgacagctgccttcatggtaacagagaatacagattcaaacaccactggaactgatgcattacctgagatggacaattgcatatcaactgcatgactggaacaaagtctcagcctgcactgaatgtgaaagagctgtttcacttctccattgatgcccttgtctaatgcagtagtgagaatgtgttggctgcatctgcctaggtccaaggttaatgtgttatggcccatacatgcctttccacctaccacttccttcactcatg

SEQ ID NO: 842040 - DNA, 610 bp, Homo sapiens
agcaggaagcaacgtggcagatgagagaggtgctatggatgctgcagactgttctacaaatggtgcctggtcctaaggtgcccagggtgtagggaacagcccatcgttcatycccaggacaacatgttactgtggtaggtccttagggagcccctctcctcttagaccagcccttagcaagaagtatttcaggaaatgctgcacctcaaagaaaccaacctaagtcagccaaagcctgcaggagaacacaggatgagaagaaaacaggtacaagagttagggctggggctgggcgtggtggcttatgcctgtaatcccagtattttgggaggctgaggcgggcagatcacctgaggtcaagagttcgagatcagcctggccaacatggtgaaccccacctctactaaaaatacaaaaattagccgagcgtggtggtgggtgcctgtagccccagctacttgagaggctgaggcaggagaatcgtttgaactcaggaggcagaggttgtagtgagccgagatcgcactgctgcactccaacctggagcgacagagtgagacttcgtctccaaaaaaaaaaaaaaaaaaaaaaagtgagggctggaagatgc

SEQ ID NO: 842041 - DNA, 643 bp, Homo sapiens
caaaaatacacactctcctcctctctgcttgtcctcccatatttacttctcagtataaacaattccttcacagagaatgagccaaaagtcaacacagcacatactaccccagggagaggcaggctgtcttctggagatgcaacgaaagttcttgcagtttgttctttccaggcactaagctcagtcttttcacacaatgagggagactgcagaaaagaccttgataaactccccacccagttccccactccccatcctagatagttttcagtaaggcaggaattgccggctgtcactagactgtctacgtatttgagtctggaacatgaaggacactggtgcatccatgagcatgcatgggtaaatatgcataaacgtatgtggatgcatgagcatgtgtgtgtgaatatgcatgaatgcatgtacatatgtgtgtgtgtgtgtgtgtgtgtgtgtggacttgtgtgttgggctagaggaaatagtaggcaaaggacacccaaccattctaggtgtacagctaagctgccctaatctgcaaactaatctatattttcctaatctttaatcctcaacaagaaacaagcaggatggtacttcagaatgtacaytgatacgtattgatactggtatttattgatcc

SEQ ID NO: 842042 - DNA, 628 bp, Homo sapiens
  misc_feature 329, 331: n = A,T,C or G
attgctgaagcccatgacacctggctccaaggaacagtttttctccttgtcttcacatgtgtttctgctagaggatctctcagccaatttccgagcaggagtgcctatgaggctgtctgaagcctgtgccctaagggctttcatgagggctaataaccgtcctgatctcctgaaggccctttctttcctctgcttctgaatctcctgggcttacagtgatgatcattctgccgcagctttacctgcagtggactgtgttcttccccgctggggttctctcctttcaggaggcctagctaaggttttaactgcttaacctccttcttaangngcttcctttctttctcaatcttgtataatgcttgcactcttggaccttctttgctcttagtatctgagcagtgcttcttctaattcttgtctagatttctctattctctagcaacccctctctattcagataaataccaaaatatctttccttttgcaagcctatatttaaaagcagttggatatgagtrtatatatgttctatatatgtagctagtctatcctgtaaggtctgactttttctcagagggaaactctcttcttaagtctgtcttccttaatttttctttcatttgcc

SEQ ID NO: 842043 - DNA, 614 bp, Homo sapiens
ccctgggatccagcaggtctctgtaggattggggatagaggtgcttgctacttattgttttcactttaggggcttcagccaaaatgcagagagagcaggaaaatcccatttgcacctaatgaaaatgtgtaggttgaaagttcatcaggagtgagcttgctgtgttgactgcactttgagacttcctcatgagtcatttagaaaaatatttccagattttactgtctctggaaattagtgtttgccctcaggaggtgtctgtgaatgtgtatatatctgcttcaacgattatttgctagataaacagaaaaataatagccatgtctacactggcggaaaactatatataaaatttatggagcacatctttgctaaggtgtgctctatatgtgtgttaactctttaaagcctcactataatcatcaccatatcacagaaaaggagactgaggtgcaggaagtaacatgaggaggtcacaaagctgggagaagacatcttcaagtcctggttgcttcrtttcagaattccttctttgggccactgcactcctctaccataaggctggactgcactgaggaatagagatgttcccccattgctgacttcctgatgaa

SEQ ID NO: 842044 - DNA, 467 bp, Homo sapiens
caggagagagaaaggagctgaaccactctgcaaatattaacccggctattttggagcaatggctattgcctttgaaatctttcatcatgggtctatacttagaattcagatgagcgcagggggaggggaatagggcaatgttaatccccagttgttttgaagttgtcctgtaagcaggttagtatctaaactgcccaaaatggaagggttcaatgctttgtttaagttatgtgattctctctgtgtaacctggtctgcacatagattgtcacaacactctgggaggtgacacttctcagttttctttcaaactagatgttctagagagcactagctgcaatcacattgggagactgatgctccatgacagctaaaagttggattgagtttcaggagctactatatataaagctgggtcracttatgtcactgcactaattaaatgccatctgggtggttcctctggg

SEQ ID NO: 842045 - DNA, 629 bp, Homo sapiens
acttattatatactgagtgttgtccatctgctgggatttgccaggtaagtaatgtagttcccagcatatgccatgctctattttagsctctcagccttataagtgctatctcttctttctaaaatgtgattaccttctactcattcttcagatctcagcttaaattatttcttccctaagaagctttttctgaccctgcaaggctggattaagagctcttcctatgtactctcataaaagcctgtgcacatctctatcattgtcctggccttcctgtctctttatctagactgtaacatgaaggtggagttttattcagttttatagcctcaatgttttgcacagtgcttggcatagtgcacatactcaatgaatgtgtgttgtatgaatgagtgaatgaatgaatttatgaatagaaggatgaatgaataaaatataatccagagtgcagagacaatgcacagaatgggagaaaatatttgcaaactacctatgtgataagggattaataactggaatatataagaagctcaaacaaccctataggaaaaaagtctaataatccaaaaataaaatgggcaaaagatttgaatagacagttttcaaaagaagacatgcaagtggaaaac

SEQ ID NO: 842046 - DNA, 599 bp, Homo sapiens
gcagaaacggctgtcctgggcctggcaggaacggctgtctaggaggaatgaagggccgtgtggttgccgacccaggctggctaaagtgcagaatccccaccggacctggaggctgcarggctggtcgtacgggccgctctcttgggaacactggctgctgtccttgctgattaaatgctggtcctggctgagtgaatggtagaggactctgagtaggaacaggatggctactgttaagaagggtaggaggcggtggtggtggagggggacttcgctgttccagaaaaagatggctcgggaatcttggttcacctgaaactgaaaggtaacacaacatcattaacttcaggttaaaaagaccatgtgcttctcagaaaagcagtctgaagcactatcctactgtggacagaagtcacaagtgttgacaggttatgaatgttggaaacaattccagattttgcctcttatttctagattgcttcatttgtcattttctatacataaattcccttttatatgagatgttccgatttcagataccaacaatgtccaattttagcacctgaaatgacaggcagaactgctatggtacaaaaacc

SEQ ID NO: 842047 - DNA, 479 bp, Homo sapiens
ggcccccgcatatacacatgttgtacaagggacaactatagttkatcacatactttataaagcagtttttacaaagtagctcaacagctccaacagaagaaacaagaaaccaattttatgtgatttcaaggagtacccctggcctttgactaattagcatggacttgaacccagccctatctctatccaacacatgcaacgcatgctgaccaagcagcaagttaaagggttactgaatttgataaaccaccttctttaatagctgttaccatagtgtttagctgctcgttactgccgcagatgggaattcattgatatgattaaatttgatggtatgataatgtatggtaatcacgattaatcagaaacccactagcaagtggaggatgttgggtattatgtcacgtgcattttaaactgcattctctccttgcaagcctgacaatgtttgacagctggaagggtctcctactatattc

SEQ ID NO: 842048 - DNA, 501 bp, Homo sapiens
ctccaaaaaaataaggagaacaaaacatggtatcattcttcagacaccatccacagatgctctcccttgatggtgagaaaaaattctctccattgtcaattttagagaaaaaacacgactagcrtctgagattgaaaacatccaggctagctttcgaagctgggtgaagagcttaggtgcggttttcattacacctcctcaacagcagctgttgttacttggaatcagagaagtgctcctctccgtctggtctgaagggcatctgcccagtcctctagtcacctgcagtgggtcgggaggtagggctttctttctggaggggtttcctcagtgtccagctctgcagcctggtgcgacgacatgtccagaatgccccactgactttcctgtctggatctacgtcggaccctagagaagagccgcaaggacctctgccctctcgctgcggcctgcaggcaacaccaaaggtcagcaagaaagcttcctttttgagcgtgaagc

SEQ ID NO: 842049 - DNA, 498 bp, Homo sapiens
cagcagagaatagaactttgttgttgttgaaagtatcagaatyggttggaggttgcctgctatttccctacactctatgcaaccatttcctgcttacccaaagtcttaattaaaaagtgaattgttttttattttatgacttcgacaagaaggtcattattctttcattgggtagctctgcagtaagcagctttctcttttaaagctttgactgatttagcttcattttaactctgctccattgctggatagtacctttcttctgtgagtcattgctgatattcccccgtttcacttcccatgtccaattcagtctcattttgtgacacccaactagctcatccacggccacccatctgctcttccatgtcctcatctccacgtcctcaggctgagctgctgtccgatcccatcatgctgcactgatttacccaaatctgctactgtgacctctagtctgttctcatttcggctgcactgaaagaagaaatatcaggc

SEQ ID NO: 842050 - DNA, 498 bp, Homo sapiens
cagcagagaatagaactttgttgttgttgaaagtatcagaattrgttggaggttgcctgctatttccctacactctatgcaaccatttcctgcttacccaaagtcttaattaaaaagtgaattgttttttattttatgacttcgacaagaaggtcattattctttcattgggtagctctgcagtaagcagctttctcttttaaagctttgactgatttagcttcattttaactctgctccattgctggatagtacctttcttctgtgagtcattgctgatattcccccgtttcacttcccatgtccaattcagtctcattttgtgacacccaactagctcatccacggccacccatctgctcttccatgtcctcatctccacgtcctcaggctgagctgctgtccgatcccatcatgctgcactgatttacccaaatctgctactgtgacctctagtctgttctcatttcggctgcactgaaagaagaaatatcaggc

SEQ ID NO: 842051 - DNA, 602 bp, Homo sapiens
cccagttgccaacaaccttgccaacacttgatctttttggtctttttaggcattctggtgcatttgctttaatagctccctctgtttttaatttgcatttacctgccaagcacctttttatgtgagttggttatatggatatcttcttctatgaagcaactgtccaatgttttggcaatttaaaaagtgaattatcttttttgtattcattggtaggtgatatttatgtgttctagatatgtattccttctcaaatataagaattatgacattttctccattgtgttgcctattatttatcctaatggcatcttttgatgaacagaaattcttaattttaatgaagtcttgtcatttttttcctttgatggctaatgcacttttatattcttcaagaacactctattcaccccaagttcatgaagatactctctgaagctttcctctagaagtctgcacatgtcaacttcatatttagataatgattcacctctaattatttttaaaatatgtattgggtaggaatccaggttmactttttattttaaaaagaccattcagtttctagagcgccatttacagaaaaggccagtctctctcca

SEQ ID NO: 842052 - DNA, 643 bp, Homo sapiens
attcccacgtgttgtgggagggaccaggtgggaggtaattgaatcatgggggcaggtcttccccatggtgttcttgtgatagtgagtaagtctcctgagatctgatggttttataaaggggagtttccctgcacaagttctctcttgcctgcaaacaagaaagatgtacctttactttctgccaggatgataaggcctccccagctacttggaactgagaatccattaaagctctttttctttataaattacccagtctggggtgtgtctttatcagcagcatcaaaacagactaatacagtccctagcagaaggcatcagtcagggaaaaggcagaagtatttattaccatctgactggggcccagaaagttttgattcccagagtctctgagaatggtcaaaatgaagcatcagaaaaagtaaaaaacatttgatgacaagaagtcatgaaatagaactgatgatgtgagtttaaatggcaaaagttatagtaagcaaatattttagaatgakttccctctttttttctgatgtttcccgtgttgtttgacattgtgaaagctcctaagagccggtgagaatttcttttgttgtcccgttagtcttatgttgtgctaataaatgatcaaaactaagaaata

SEQ ID NO: 842053 - DNA, 643 bp, Homo sapiens
attcccacgtgttgtgggagggaccaggtgggaggtaattgaatcatgggggcaggtcttccccatggtgttcttgtgatagtgagtaagtctcctgagatctgatggttttataaaggggagtttccctgcacaagttctctcttgcctgcaaacaagaaagatgtacctttactttctgccaggatgataaggcctccccagctacttggaactgagaatccattaaagctctttttctttataaattacccagtctggggtgtgtctttatcagcagcatcaaaacagactaatacagtccctagcagaaggcatcagtcagggaaaaggcagaagtatttattaccatctgactggggcccagaaagttttgattcccagagtctctgagaatggtcaaaatgaagcatcagaaaaagtaaaaaacatttgatgacaagaagtcatgaaatagaactgatgatgtgagtttaaatggcaaaagttatagtaagcaaatattttagaatgagttcmctctttttttctgatgtttcccgtgttgtttgacattgtgaaagctcctaagagccggtgagaatttcttttgttgtcccgttagtcttatgttgtgctaataaatgatcaaaactaagaaata

SEQ ID NO: 842054 - DNA, 362 bp, Homo sapiens
gagactttgtctcaaaaaaaaaaaaaaaraaaagaaaaaaaacaacaacagagaacatacagtttaaagacagggaatatatcttctttttctttttataacccattagtttaggtaagacccttctcttaaaagatgataaagtttgcagagtataaaactgattggcaaacccccttccctcatttcaactctacacttccagtactgcatccctgttcttacacagttctacctgccatggttcactgttctaatatgcgctgaattccagctgggctaacctgaaactttccccttggatttttggttttactactagagagagtttttgttcaatacaaaacctgggacatgtaaac

SEQ ID NO: 842055 - DNA, 545 bp, Homo sapiens
cctgatctgtattaacttacgtgattttattcattttagaaaaacctgcttttaagcttttatcttttcagagggaaaaatcctaatctttaatctgtccttatacataaagtattcctgcctttgatgaatttagtcagaaatattctgcatcctgctggctgccttatggaagtaaataccagaatcctcatgttatttgagatgttaaagatagcaagtgtttacatataccagcagcacactaggaagtgtaattttacttggaaaaaaattgcaaaaggtaaaagtttgaaataaagttaagctttcttcttccgcctcatgatcagatctaataatccttaaagtaaagcatttaactgaaatctatgtaggacagctcattagttttggatcagtttccatgactaaatgagggcatcaagcragagaatcataatacattcccactcaatggcttggtggtttcatggttcagatcatcaagaagcatctaggtagaatttcattcaaatgctcttccataaaattcacacagaagg

SEQ ID NO: 842056 - DNA, 632 bp, Homo sapiens
ctgaacatagtgacagagtccagttgtctgcttttacaagcatcagaaaaycctgccacgaattttcttggggcaaaatatcattatatatctgcttgctaggtctcactccacagggagtcaaaatgttacttgctctttgtccagacacgtcaacgatggggtctttttttttctcaatcagcccaacaggcctgatgcagataaggtatggggcaaagaccacatgaggatttatggccaaggactcagccagcctccctgtgcaccagaccagcttgccacaaaaacaaaagaaccaaaaatgactgcagagaaaggcaatgtcactatttcagcaacaagagcagcaaaatcatctctgggtagtggaattattttcattgctaatcgtaagtctcctggacagatccgtaagtacacttctgcacaaaggagtatcctcaaattgctgtcgttttttagcgacagcaaaaaacccacaaagcagatcagccttttttttccagtctttacattggtaacaaagagataaatttagattttcctaaaatatgctagtggatgttgtgtctcacattgatcttatatctcagggaatttggcacttatctccacttaaagattatgta

SEQ ID NO: 842057 - DNA, 632 bp, Homo sapiens
ctgaacatagtgacagagtccagttgtctgcttttacaagcatcagaaaatcctgccacgaattttcttggggcaaaatatcattatatatctgcttgctaggtctcactccacagggagtcaaaatgttacttgctctttgtccagacacgtcaacgatggggtctttttttttctcaatcagcccaacaggcctgatgcagataaggtatggggcaaagaccacatgaggatttatggccaaggactcagccagcctccctgtgcaccagaccagcttgccacaaaaacaaaagaaccaaaaatgactgcagagaaaggcaatgtcactatttcagcaacaagagcagcaaaatcatctctgggtagtggaattattttcattgctaatcgtaagtctcctggacagatccgtaagtacacttctgcacaaaggagtatcctcaaattgctgtcgttttttagcgacagcaaaaaacccacaaagcagatcagcctttttttyccagtctttacattggtaacaaagagataaatttagattttcctaaaatatgctagtggatgttgtgtctcacattgatcttatatctcagggaatttggcacttatctccacttaaagattatgta

SEQ ID NO: 842058 - DNA, 625 bp, Homo sapiens
tcttatgtcataatttatttttccttagaaaggtttttataattcagtcctgtacagaaagcgtcagggacagaaataaatcagggaacagatgcatgttaggactgcaagccctaaagccctcagttgcagctcattttactcatttaacaatcatagattaggcccctagtgttgccaggctctgtggtagaaaccgggagaaatgaagaggcaatagccactatccctagaccctagaagagccatgcttcatatgagagagagacaaggaagcagttacagcaccacgagtcatgagtcctctgagacacacgcatgcccagagtgccttggagcacgctcgggggacacccaggccagactatcctgataatggagttaagagttcgccatatgaaaaagcaggggaaaaaacttaaccatgaagtcacatgttcaaagaccaggaagtgagagagaataggaattagtaaagggagtgaaaacacttctgtatgtctggagtcttgagtgagaagtgagcttggaacagaaggcccagacatttaaggttcaacaatgtactccctaaagcaagcactcactctaagccccrtctgtcttgggtgctgggctaggcacc

SEQ ID NO: 842059 - DNA, 499 bp, Homo sapiens
agactcagagcaccttgaatgggacaaagaagggattggctttcagtttcatcctcaggcactttaccatttcatttaagcctttcaatacagaatcatggtgtggagaaagaaaaaacaaagtaagtctttcaaatttgctccttatacgcaagatctctcttcttatctcatttaagttattttttgttgcaaagaatataaatctcttcaaggtatttttggttgcaaggaatataaatctcttcacacatgcagatgaaaaaaaaagatgctgagagagaggaaacttattgggaaagatccaaggtcgggaagagcagttgagactcatgatggccttgaaatgaaggctctctgtcaacagacgaagccctgtgayctttgatttggcagtgctcgtgtaacctgttatctagaacttgaaagctcaagttacatgtgtgtatatcatctctccatctagacaagtgttttccaacttctttgaccatgaccc

SEQ ID NO: 842060 - DNA, 659 bp, Homo sapiens; identical to SEQ ID NO: 816900

SEQ ID NO: 842061 - DNA, 462 bp, Homo sapiens
caccctcatggtgggatgcccttattcaaagagggagagaccagggccctcctttctctgtcatgagaggatacagcaaaaaggtggccatctgcaaaccagatagagggtcctcaccagatagtgaatctgttgacaacttcatcttggacctcctcacatctagaactatgagaaataaaagtttgttatttaagctactctgtatatggtattttattgtaacagtctgaactgactgagacaagaacaataattgtgaaaatatattgtgtgcttactatatttgggtatattccaagtgccttatatatgttatttcatataatctccataataactctacaaagtaagtatsatcaagtaagactgtaggcaagagaactgagactttgaaaggttttatctggcttggagtaacagagggagtaagcagttgcactgagattgaaacccaggaag

SEQ ID NO: 842062 - DNA, 597 bp, Homo sapiens
gaagttatagagttatactcctatgcaaacgaagacttggcccaagatcagtctgattggttgtgaggggggaccaatcagaggtactttcartttttcatctaccatgtggaaaagcggggaagggggttgcaaaggcagtagcctctcatccttttgttacttgggtgtggaaagtcaggcttttccttttgatttagttctaggaagtcagggtaaatcagccttaggttccctgcctccagaccctattctccttctcttggagtacctcctatgggagagtctacaatttctgcacctttgatgtcaggcttgggcacgtgagtgactaggccttgtgggtgaccttgactatgcctcatctgtgccaaatctttaagagtgattgtattccaccagctctcttgctgttttctctctgtcataggaatggcataccccaaaatggactgctctttcagcctggatctggaatgaagaagacataaagccagttttgatgcacctgtcttctttattccagatccaggataagtatttgtagttgtaactgagattttggggttgcttgttacagtagcagagctgactaat

SEQ ID NO: 842063 - DNA, 648 bp, Homo sapiens
atttaagggaagtcttaatctgctttatatttaactcttatctccacactgtgaattaaaaatagaatgctggactgtagcctcacctcctggactctctgagggctcaggttactccagcataaggctgggytgcgagctgctccaggtctctggcttggtgcccctcccggactttccaaacagctgcctctttctaaatttttatccaagagccacacattaacctgtctaaagtgagcagtccttattctgtgattcttaaataacatttagcattttcctcaggtaattttcatttttcgtgaaactcagtgagttctgaatccttccagaagctagtttcaaaaactgagtcctgtagtcgagttctcctaagtccatgcgtgaggtggagtgaaagctaaagagcctttcctctttttttctcttcatctggtaaaaatttgctctggagtacgtcccctgatttcccttctcctctctcccactcttctcccttccttttcccatttccgcaccttttcctaatcctctttcccattccctgtgtgtatctcttccttccccaagcctgtgtctgagacagctggaaaggacaggaagagtttgggtgtggggaggagccggagccagggccgctccttc

SEQ ID NO: 842064 - DNA, 594 bp, Homo sapiens
cttggggccaagctcagtggattgactgtagctgctyaatgacagggtctgagaactgacgggaacagattagtcaatcctcactgtcgccatcattcctaggacctgccttgttatagtagatatctataggagaaacttcttatttcttctgcaataagactttattgctttcagcttctgaaacccagaacacctaaaacccaaagcccaaagtggctgtacggcagacggacgatagagaagaaaagtgttgacaagttttattcacatcttactccattcatgtgaatgtaagagaatttgtgaatgcaccagttatagaagataatgctttcagaaggtttaaaaattcgtgaaatttgactttaaaaacattattccaatttatatctattcagaggaaaactttttccacttatgcctcattgccacaaagcatcatagtcagaatgtgtgttattaaaatgtgtcagattattatgtgtgtttgaagtacaacattcttaattaagaaatggctcagcagatatcaagtccctataacataactcattaggtatatgactttggtaaagtatcttaacatttata

SEQ ID NO: 842065 - DNA, 615 bp, Homo sapiens
aggaagaggctccccagtacagagacagagggagggtggttccaaagccgaaagaaggyaccccacacttaggtattatcagccagctatatttgatggctggaggaggcggtgtctgatttgcatagggctcagtggattggtttgaccaggcatgtcattcatgcagcctgcggaaaaaactggccctcccaccctagccttttaatatgcaaatgcagggcgccatgattttccacctgtgaggatatgtgggggtggccatgctgccaggcacatgtagggacaagggcaagaggaaaacggcgggaatcaccacgttgggtggacccagtttctagcggcttgcatttgcatatcaaaggttgcctgcctgggtctaaggagccagggctttcatgctggacaagagctgggaaaaatcttccaaggagccccttttttcctatctgcctaaaataatttgttaataactcctatcacagaaatacctccaaaaggtcaagattatttgagaaaatgaaatgagacactataggtgaagtggccagccaagtgcttaaaacattgtgtatgctcagacttaaaataaaactcactttcatacatttcttt

SEQ ID NO: 842066 - DNA, 626 bp, Homo sapiens
cctgctgaaaccattccaaaaaattgaggagaagggctccaccctatcttgttctatgaggccaacatcattctgataccaaaacacaacaaaatgacacaacaaaagmgaacacttcaggccaatatccttcaggatcatagatacaaaaatcctcaacaaaatactagcaaaccaatctgagccacacatgaagaagctgatccactataatcaagtagggttatccagagggatgcaaggttggtttacatacgcaaattaatgcaagtgagtatcacataaacagaactatccaagctgagtgccaaatcaagaatgctgttctattcactacagttacaaaaaataaataaataaaatacctagcaatacagctaaccagggaggtgaaaggtctctacaatgagaattacaaaacactcttcaaagagattagagatgacacaaacaaatggaaaaacattccatgctcatagactggaagaatcaatattgttaaaatgcccatattgcccaaagcaatctccagatgcaatgttattcctggtccagaagtaaagccacacactaacaatcatttgatatttcgcaaaaacaagcagtaaggaaaggactccctattc

SEQ ID NO: 842067 - DNA, 577 bp, Homo sapiens
tgtggaagacatatcaaaagccaaggtaggccaaaatgtaagcctcttgtgcyaaaacacacacacacacacacacacactcacacacactcacacatggcaactatgtgaaaagatgaatatattaattagcttgaccttagatatctgttcactgtatagatttatatcaaaacttcatgctgtacaccttaaacatataaaattttaattttttgaataagctaatagtgaaataaatcttctcaaaactgtaattatgtaaaccagtgtttgtgtgactctatatttactctcaaaaagagaagtaaagagatcatgtaaaaaataaggtttaacatttagttatgatgattctacatcatttcagcagtagccggaaataagataaaatacttgggttttaaaaaaaataacggaaaatgcctgaaactgctatctagtactgataacaatataacaacttacactacaatcagttaacatgcacttacttgtgccaggtactgtgctaagcaccttattagcattatgttattaaatcctcataggaatcaatgaggcagtgtataaaact

SEQ ID NO: 842068 - DNA, 586 bp, Homo sapiens
ttgtatagacttctctcagctgcagggtctccatctctaaaccaacagagatccaccaatgtcactgagtattaaaaaccaaccacctacatcttggagggatctagcaagaggctagacctttggtaacgtcagcaacattgccctcccttccttgatcaaaagaagtgctggacacacaagcaccatgaaaccccactgcgaaaccattagtgtggcgggcgcgtggctcacacctgtcagcccagcgctttgggaggtcaaaaggcaggaggatcgcttaagtcctggaatccaaaaccaccctaggcaacagtgaaaccccgtttctttttaaaaatatgaaataaaccgctagttaataaagaggaggagaagcttgcttctgctttcctatgaagaccagctacagcagggtacagcctgacttcagcagcgctaactgtagcagggaccttttaatgaatgctaggcactgyttgaaacaatacgtggtcactcatttcaccctgaggtgacacaggcgctaccactgcttaaacctgacaagaataaacagtcaccaaccgggccctgatgtctccca

SEQ ID NO: 842069 - DNA, 586 bp, Homo sapiens
ttgtatagacttctctcagctgcagggtctccatctctaaaccaacagagatccaccaatgtcactgagtattaaaaaccaaccacctacatcttggagggatctagcaagaggctagacctttggtaacgtcagcaacattgccctcccttccttgatcaaaagaagtgctggacacacaagcaccatgaaaccccactgcgaaaccattagtgtggcgggcgcgtggctcacacctgtcagcccagcgctttgggaggtcaaaaggcaggaggatcgcttaagtcctggaatccaaaaccaccctaggcaacagtgaaaccccgtttctttttaaaaatatgaaataaaccgctagttaataaagaggaggagaagcttgcttctgctttcctatgaagaccagctacagcagggtacagcctgacttcagcagcgctaactgtagcagggaccttttaatgaatgctaggcactgtttgaaacaatacgtggtcactcatttcaccctgaggtgacacaggcgctaccactgcttaaacctgacaagaataaacartcaccaaccgggccctgatgtctccca

SEQ ID NO: 842070 - DNA, 614 bp, Homo sapiens
atctgaaggcttgcctgaggaagtctgcatccaagcttactcttcgttggctgttgggcagaggcaccctcagctcccagccatgtaggctttcccatggtgcagcttctatcaacaaagcacgccagacaagaggacaacacacagtcttctaggaagaagaaagccacaatctttttttaaaaagcaaagcaatatttatgtaattgccacttggtttgagaagtagaacactgtgtcaaaaacccctccaaagcccccgccagtaactgccctcctccttctccccagtgcaaccactgccctcacttctgtctttttttcaacttttaaaaattgtggtaaaatgcatataacttaaaattacaaccttaatcattttaagtgtacagtttggtggtggtaaatacactcgtgatgtgcaaccatcaccaccatgcatctgtatagaactctttccatcttgtaaaactgaaactctgtctccattaaacaataattcmtcatttcccttcccctggccctagtacccaccattccactttctgtttctataattttgactactctaactacctcatataagtggaattctgtggtagttgtatttttag

SEQ ID NO: 842071 - DNA, 562 bp, Homo sapiens
gcaaggtacagagctggagcccttgaccctgaccggccagccaggaaggccgtaggaggcatgctccctggcgtgaggtgcgcagggcctctggcattgccctaggtgagggctccaggactcggacactggctctcagtggggcaggtgtggccggcagggggcgctttgtgggtgcacagtggccccagggtggtgcagatggtgggcagacctaccccagggctgtttctgagacagaggtccctggaggagaaccaggtgctgggcctcaggtgtctgtcctgaactggagcagccttggaacaaggaaccacaggaagtccctgtggcatggggtgcagcccctcaggtctggcagggctagcccagggagtgcagggccccaggagccctgccacaggttcctcagctcgggagctcacggcctcctcactgcagggtcctttcaggagggccmgggtggccttcacacatctgcttcctcctcagagacacaggtgtgggcacgtactggccagtatagataagcattgagcagcattgatgggtatcgatgatc

SEQ ID NO: 842072 - DNA, 615 bp, Homo sapiens
ggattataggcatgcgccaccatgcccrgctaatttttgtatttttagtagacatgggatttcaccacgttggccaggatggtcttgatctcctgaccttgtgatccacctgcctcaacctcccaaagtgctgggattacaggcgtgagccaccgtgcccggccgagtaccgacttttgtagagaccaaaagaagcttaagaaatggactcctaaaggacaaaatttaaacctgcttattaaaaggcattgtcaccctaggggcttgcagaaatgttttaacttatgttaacacttctgcctccattagcaaaacttttctgtcttctaaactgagcgctgctttaacctcaccctggctgagtttggcagggtgcacgcagttaccagccaggagtgacacactgccactcagggccgccaaaacaagcacgaagcaaagacgggacgaaaaagtagagcggctagtagctcccctaaagagagtttggaccttggtatggaaaccctaaaaggaaagccagaattggtatgtaacctgcggccccactacacagtgccagccccacactccctcccagagagccggcacacacctcacagtgggaactctgcc

SEQ ID NO: 842073 - DNA, 617 bp, Homo sapiens
aaacctgaaaatacaatgaaaaaaaatgagataaattttgctagcattttgtaggttattcttatttcttaattcctacaagtttaaaaggcttttttttatgtgaaaactactttatcatgtccaagttacgtcaattattctgaattttaaaaatatttttattaattttttttttatttttatagagacagggtctcactatgttgcccaggttggtcttgaactcctgggctgaagcaatactcccacctcagcttcccaaagtgttgggattacaggtgtgagccaccatgcctggcctattctgaaaatttgtttaaacaagtgatacaggaaaaaataaggagaagtaactgattgacatgcaagagtatttaaacatggatggtacaaagatataaaatccttttttaactatttttataagaaatagctactttaataaatgacccaattttatctgaaaatagatcataaataagaagaattagaaggggttttaacaatacctaatcaaatatyctctcaggagatatgattattggcttttaaaagatctttaaaaactacaaattctaaattttatatttatttataaaaatgtagtattgtat

SEQ ID NO: 842074 - DNA, 640 bp, Homo sapiens
cttgaagaaataacagaaattacctaaaatgaaatgagatctttaaaactttaaaaaacaaaactccataattggagtttcataarggaagaacaaaagaaaacatatttgaaaaaatgatagccaatttatataaatgacagacaaaatttgaagacagtaataagcctgcagataatagaaacttaaagatcccaagcagaataagaatgaagaaaaacaaaaaggcatcataatcatattgctgaaaacaactaataacaaagagaaaatgttaaaagctggcagataaaaaaatttattacatgtaaaaattaaaatgataaaatcattaaaaaaattagatgaaactatacaaaccaaaagatgatggagtggcatctttgcagtaagaaataaaaataatgtcaacctaaaattgtatacccagcaaatacatctttcaagcagtggaaaagaatttttgcaaaaaaacaaaagctgaaggaattcatcactcacataaatgggttacaaaaataataagggaaatcttagacagaaaaaaatgattccagatggaaatatggatctccactatataatgaagagcaacaaaaatgttaaatatgaaaattaatattaaagacttttctcattt

SEQ ID NO: 842075 - DNA, 629 bp, Homo sapiens
gcagttaacattccttttaactttagttttgtgggagggggaagggagagagggagagaaggacacaaggaaacttacagcaacatttttgctgtttatagctttcttggggaagaaaacacatgcacaaatcctggtgctaggaatagtttaagcatatatcttcaatattatccatcctggaccgaagtaagtcctgatgcaggaaatgagtaagtttcacagctttctgagcccctactcgacccaggaagcccagccggcccctcctctcacttgcagtggtctgcagtttttctccaggattcactcaatttctttacagtcagagtaataagctaaatggagatgtgatagggaccaccatgcttatatccttcagatctttagggatagaactcttctctgccactttttctgaaatgtgggttttttgtttttttgtttttttgagacagagtctcactctgtcacccaggctggagtgcagtggtgcgatcttggctcactgcaacctccacctctcaggttcaagcaattcttctgcytcagtctcccgcgtagctgggactacaggcacatgccaccatgccgggctaattttttgtattttagtagagacaagtttc

SEQ ID NO: 842076 - DNA, 629 bp, Homo sapiens
gcagttaacattccttttaactttagttttgtgggagggggaagggagagagggagagaaggacacaaggaaacttacagcaacatttttgctgtttatagctttcttggggaagaaaacacatgcacaaatcctggtgctaggaatagtttaagcatatatcttcaatattatccatcctggaccgaagtaagtcctgatgcaggaaatgagtaagtttcacagctttctgagcccctactcgacccaggaagcccagccggcccctcctctcacttgcagtggtctgcagtttttctccaggattcactcaatttctttacagtcagagtaataagctaaatggagatgtgatagggaccaccatgcttatatccttcagatctttagggatagaactcttctctgccactttttctgaaatgtgggttttttgtttttttgtttttttgagacagagtctcactctgtcacccaggctggagtgcagtggtgcgatcttggctcactgcaacctccacctctcaggttcaagcaattcttctgcctcagtctcccrcgtagctgggactacaggcacatgccaccatgccgggctaattttttgtattttagtagagacaagtttc

SEQ ID NO: 842077 - DNA, 641 bp, Homo sapiens
actttgtatgtgaattctgagggtttgcacttttgttggtgggaacatgaaaaattcttgcctcaacataaactttatttttggtttgttttcttgatttattcttcaagaaggatgctttttcttcttggtttgttctttcctcagtctcagatagtttcttcaaacttattccttccttagtacttagctaaagatttgaggaagacccttctgcaaatctctagagctctttttgtgtgtcacattttcttctttgctactcaaccctatgaactctagttgtccctggcctccctagactgttaattctgtctccccattcagtaggcctgctagattttatctgggttccccttccttgtgttggagccttgaaattctctctaggcagtaaactggggctatcataagcctcgccttatatattttctctctttcagggatcattgtcatttcctacctgatatgcagtgtcttaaaatttgttacatacattttgtacagatttttaattgttttatgtggtgaataaatctggcccacattcctcattatgaccrtaagtggagactctcatctaatttgtatctttatgcaagcaaacaaatgataagtaaatatacatatatatcagatca

SEQ ID NO: 842078 - DNA, 606 bp, Homo sapiens
ctgggtgctgatctgcatatggttccgtgaagtgaacgcttcactgtgcaatagacaaatgctttggcctctagaacttctaagttcacctccatcccaatacrtacctaataccctggcacttttgtgaagaaagcaaaacaaactaaagtcacggttcatttttattgtataggcttgtgatttctgtttctggagactattttagtggaaggaatatcaccaatactaaaaccactgtttttttaacccctttgatcctttaatcttattcttttggctacctcatcttctttcttttggtctgcttacacttccttgtcttctgttacttccttcccattctatatcccatgtctgaagcccaatagcctcctggatattaatgggagaaaactgctcctggttctaggcttgtcttacctcctgctcagcacagtgagccccatgtcttcctcctcacccattcctctcacttattttctctctcttttttgactactgtaaggaaaagattaccatgcagaatccgatgaagttattgacattttatagagtccaggggtgggttctatagccctgaagatgatatcataataagatgta

SEQ ID NO: 842079 - DNA, 498 bp, Homo sapiens
aaaagaaaacattaggggaaggccccaaagagaaagaaaatgctctgtgctggggaacgcactgggaggtgatactcacagcgatcggaggctaagcaactgctggaaagtgtcaactttaatttcgtagatttcattatgtcttaggtcactgaaatgacagggttccaaagattgatttcaaagttactggtttcaaagactacagacttcagataacttttatagagggactacctgcccttaatcaaaggaacacatgaagtgtatctatcaagtgactgatttttgtttgtttaaaaaagaacattaccatttacacactcaagtattgtctctttcaaaggagctagtttgcttgggaggacgtaaaaccatattccaaacatgcaatcatcattcaaaacactggaggactcttctagtgctgccttctgagcctyccttggattctttgagggtcttcaggagggtaaattctttaccttttacagatgg

SEQ ID NO: 842080 - DNA, 547 bp, Homo sapiens
ccaggtgtggtggcagacgcctgtaatcccagctactcgagaggctgaagcaggaaaatcgcttgaacccrggaggtggaggttgcagtgagccgagatcgcgccattgcactccagcctgggcgacaagagcgagagacttcgtctcaaaaaaaaaaaaaaaaattacgcagttccttcaaatactgaaatgaaataatcttttcccagagcttactgaacagcttattagactagtatgtttagtatgttcaaaacagtcagggaaagcaaaaacattcctttggcttagggtgggaggaggaaaaggatatctctatgctagtgtcagaaagaaactaaaagatcatcacactgaaactccatacctcaggggaggccacttccatccatgagagaacattacctacaagcctggaagagaattatagcaccatggaattttagagccagaggacctaggaagcaacagtctacacatgaatgagaaggagagatcatctggagaggaaaatgctccagatgtcagggctctcggggaccccag

SEQ ID NO: 842081 - DNA, 572 bp, Homo sapiens
aagccttttactccagtcaaacaaagtgacttcctaggttttcaccagcctatagataaacaagcccacaagggcccctttgtggtatgagataggtctgttgtattttctggagctccttaatgtcatgwcagtatcacttctcctttgttgcacaagcctttacctgaaggaaagaagaaacagctggagaagcaaaacagcctcaagttggggtatctgtgtggcaaaattgaaatggtgataatggcggtagccagtaggaactttaaacagctgcaaggcaggcagtagatagaaggataagagtttgtaaccaaaagccactatcagctgaaagaagatcacaaacagaacacaaacagaagtgaactctttgagaaaaagaaaaccatgaatcttttgttcactggaactggtggtgcctgcctgataaaggtgttcagatttagtttcttacagtctagatattcactgttcaccaggtgtctctacatttggtttctggttttgcaaaaagaataacattttgaaactttataactatgtgttccctgtgaaaaggtcaaggg

SEQ ID NO: 842082 - DNA, 628 bp, Homo sapiens
ttctggatcttaaattacataacttcttaccatacttaattggtcctgtagactgttcctcatcactactgaagctattatctgaaataggttttctccaaaactttggcttccactttcttttatctttgtaggttgtaaatggaggagctaaagtagataggagaagattgttaattgatataactagttttttttttaacattttgaaggatactcaaataatatttgagaagaactacattcactccatcttagaaatgatacgtattttttttttttttttgagatggaagtctcactctgtcacccaggctggagtgcagtgagtgcagtggcgcgatctcagctcactgcaacctccgcctctcgggttcaagtgattttcctgcctcagcctcccaagtagctgaggctgcaggcacacgccaccaccacccggctaatttttctatttttagtagagacggggtttcaccatgttggccaggctggtctcgaactcctaacctcaagtgatcagcccacctcagcctcccaaagtgctgggattacaggcgtgagccascgcacccagcctggaatgatatgtattacattaagaacataataccaacaaaatttctgt

SEQ ID NO: 842083 - DNA, 587 bp, Homo sapiens
tgaaaatacattttgtaaaaaatcactgagattgccttgggataattaagtgctataatattaagtactaaaattaacaacaataacgataaagtaaaagaatgagttactatggtgttartatatgccttactttgtacagtgtgtttaatccacagaatgttaaagaattttccatcttgcctccatttttattgttctatttattctgtttcaagtattctgttaagtgggtattcaagtactaaaaagtcagtctaaaatgtcatcatataagaaaaaaactgtaatctttctactgaactgtgctctctctcattcctctacaaactaagaattctacaacttaccgaaacagatccaagttattatacttctcaaaccccggtttaaagaaggatgcaataaatttccgcaaaaatggaagaagattatcgcctcgattctattttaaaaagagggagggggatatatatcaggcttacaatgtttaattaaaatgtcacgagggagaaaaaaagccttaaaaaagtactcattagattaagtttcttgagtgggtaaggggcggaggggataagtttgag

SEQ ID NO: 842084 - DNA, 603 bp, Homo sapiens
gaaggaaaatgatgcataatttctgaataattcagaaagaacttagcaatctttccaggtagttcttaaataacaatcactgtgtatcaaatttctgaattaacttttctgaattcacgggtttctaaaactggccttaagcaaaagtctgaaacctaggctgggaaccatgtaacccaggccaagaaggtactttaaagtgttttagagttgtttttcaacttagggggaaacaacagattccattaaatcccataaaggatttttttgtgtgtgaaaaagggcctgatgtaatctaggttagactcaggaggctttaacatgttttgtcttacgggtaaatggtggctattttcacagataacatcattactcccatcccttactatggtttatacaaaagaggctggagaataagtacatttttacagccgggtgtggtggctaacgcctgtaatcctacttagcactttgcgaggccaagacaggaggatctcttgagcccaggagttcgagaccagcctgggcaacacagggagaccctgtytctattgttaaatcaagaaaacctaaaaaacattttcatttacatagcaccaaata

SEQ ID NO: 842085 - DNA, 379 bp, Homo sapiens
acgtctgaaggtcagaggactaaaatcctggtgattgaacaagttgctttttatgggttttccctctaaaaaaacaaaacaagccgggcaaaaaaaaaaaaaagaaaaaaacaamcaaaaaacattctgtgctggccccagtaattacttgtacccttgctctttcatttcctcttctaatgataaaggaagctgcagttgctcaacttgtgaactgaaaacatgggacagcaatgacacaggaaaatgggcaagtccaggcaaaagcccgtgcggtggccagagtccgggcctgcctgctttcccatcattttcctttcccatgtttgttcttttcttcttttcgccttgatttcttatcgtgttccttttttttttt

SEQ ID NO: 842086 - DNA, 547 bp, Homo sapiens
gctggtggatggcttgagggtctcacagtgactctagagtatcgctgatctctcgacacaagccctcagtgtggtgtttgatacacccatgacctgagctatcataaaytctggtctgccctagggttctgaccagagacttgaaaccaaaaacttcagtagctcaactcctaacttgaccctgttccctggaaagcactactctaccctgagtcttcctaagtctagtcttgaagccaagaaaactgacattctctttccccaaactttgctttttttggaagaggccctcaaaatctccaggcttgtcactctgtgcaaggcattcattcccaaggttgcattatattccaagatttctgttagagcttcagctactgtctggattctaaccaatgggaagattttaaaaaagggataaatgaggtaccactgctctaaggatagtgcctgggacctgaattcacaagttctacttatgttccatttgctgtctctttagtgagacgaccacacatagctaccagaaaaactgcctattctgggc

SEQ ID NO: 842087 - DNA, 305 bp, Homo sapiens
tatattttaatatatcttaatagatatattttaatctaatatattcttaggactccatttgaaatgttatatagtcacaaatatttcttaaaaactccatattaaaaagaartttattcatttcctctcttctttccttcctgatacttgaaaaacaaaaccaaactcatggcattttgcttattttaagcacatgcaatgataatacagatttcaaaacgtgtgctccatataagcacagtcccctgaaatgttccatgatgtgagaggcccagggttatgtttcacagggttaggatgagggt

SEQ ID NO: 842088 - DNA, 618 bp, Homo sapiens
cccaagatattagaaataatattaccagggttgcatacacatggcrtactctccctgtgacattggcagcaacattcccctagaatattatgaataacatcagagggggtgtacacacataacgtatgcaccttgtaaaactaggagtagcatctccctaggatgttatgaataatatcacagaatgcgtacacacatggcgtataccccatgtgatgttaggagttacatccttctagtacgttaggaataataccacaaaggtgttcccacatggttaacagcatatggaatattaggattaacatccctcgagaatagtacaaataacatcacaagggctgtgcgcacatggtgtacatgccctgtgacattaggagtacatttccctgacagattacgagtaatatcacagagtgtacaccttctgtgacatttggagtaacatcccctaggatagtacgaaaaatatcacagggtgtacctggggagtaacatctttctaggatattgtgaataatatcacaaaacgcacagcccctgtgacacgaggagtaacatccacctaggatattatgaatactatcacagggagtacaccccttgtgacagtagaag

SEQ ID NO: 842089 - DNA, 631 bp, Homo sapiens
aattccctggggtgtgggaagcaggccctcacaggtgggaactcagaggccttggcttgctcattcgttcccttcttcccaggatgcactgcgcaactctggtggcgatgggctggggcagatgtccttggagttctaccagaagaagaagtctcgctggccattctcagacgagtgcatcccatgggaagtgtggacggtcaaggtgcatgtggtagccctggccacggagcaggagcggcagatctgccgggagaaggtgggtgagaaactctgcgagaagatcatcaacatcgtggaggtgatgaatcggcatgagtacttgcccaagatgcccacacagtcggaggtggataacgtgtttgacacaggcttgcgggacgtgcagccctacctgtacaagatctccttccagatcactgatgccctgggcacctcagtcaccaccaccatgcgcaggctcatcaaagacacccttgccctctgagcgtcgctggatctctgggagctccttgatggctcccagaccttggcttttgggaattgcactwttgggcctttgggctctggaacctgctctgggtcattggtgagacttggaaggggcagcccccgctggcttcttggtttt

SEQ ID NO: 842090 - DNA, 653 bp, Homo sapiens
catctggaacacccatgaagtctaagttaatgaatggkgcaaattctgaacccctatttggttctgcaaaaatagcttaagccttttagttacacacagaatactactcaagtggtagcatgttctagtaagaaaaaaagctaggtttatattctgatcatgtgggtctctgcaggcaacttgtaaatctctatctaataatccaatgtacacacagcccctgggccaggtgtctgattcccatccctccattcccctcacctctctagcaaccatatttctagatgactcctctagtgtgatctatcagtttttgctcaaagattgtatgaacatgtctcaacatcagcctggtccaagtagagtttggtgtgcaatttgctaaccacactcctgaagaagcagatggcagtgggttcaggtttgcctgtagtttaaaaagactcatgttgctggtccctcagagaaggaagataattaatcattggttctaaaggattctgggtcataacatgtctgagatggaagagaattctgacctgtgtctctgtccacatgtgtgagccattcccagggtggtgtggtctgcggggacctggactccactgcctcctgtggctcagggggtgtggccatcagcagtggtgcactgt

SEQ ID NO: 842091 - DNA, 569 bp, Homo sapiens
ccatcaaggtgaaatcatggaaaggtaaaagtaaataatatgcctgtttgagtgcttagattatcagcaggaattgggccctcatgaggcatctggttctgagcacagtgggcatgaccctggcactcagagagcatacaatcctccttggcaattaaaaccaatatccaaaacacagagatcttaagccctcagttgtgtttcactgaaagtaaggttcctacaggcttggagaagggaggtaatggagaagtgctccctaaagtgtggtccatggaactgctctgccaaccatttgttgtcagtcagtaatgaggagcacagaaatagaaaggaagcatttagaaactttatagcaatttgccagagtaattttatgtctgttgaatctaaaaattaaaaaattggaacttttgtttttaaaattgtactttgctggtaattcattttcattrtagtttactaaagtactagtctataacagattagaataaaagcagaaaaaaaaatcaaactgagccttcactgcaaatggctcgaggagaagcactggactggaaatttgagac

SEQ ID NO: 842092 - DNA, 586 bp, Homo sapiens
acaatgctagataaagagaataaatgcaagttatgataagtcttaagaacttcttaggacagcccacatgaggagcaaagactgaaactataagaaataatttgttargggaacactaaaaaaatactagaggccgggcacggtggctcatgcctgtaatcccagcacttggtgaggctgaggcgggcagatcacttgaggtcaggagttcaagaccagcctggccaacatggtgaaacctgtctctactaaaaatacaaaattagctgggtgtggtggcaggagactgtaatcccagctactcaagaggctgaggcaggagaattgcttgaacccgggaggcggaggttgcagtgagctgagatcgcaccattgcactccagcctgggtaacaagagcaaaactctgtctcaaaaaaaaaatatatatatatacttcagacagagggaacagcctgtgcaaaggccctgaggagtcaaacagcctggatgctggctgctcctccactgcagccaggggaggaagcagaaatcatgaactttggtaaggaagcaggagaccagcagctacatcttggctagccctc

SEQ ID NO: 842093 - DNA, 582 bp, Homo sapiens
ttaaccatttactgaattactcagttcttcacttctcatttgtaaaatggaaataatatctattctgtctcactggcttgatataattaaatcagctaatgtatttttaaattraggctttatataattattggtttctaatgtggaagtaaatgtgagcgatgtttttaatttttatttaatgtttgcctttagagtagaatttgtagtcacttaagccacagggatctattaaaatcagtgttaactgtaggaataattatttttcccaggtaggttttggatatgaatcagtaccaccatccgtgaggggaaaattatgctgcaaattgtatatttctaactatctttcatctgagaaaattggacagcaccatggtgagcccctggaggaggaaagggcaaacaatcttgccagaacttttccctgagtggcttagcttctccccactcaccaatggctagattttgacccgggcagttctggataatctgggatatggagaggaagcagacaccacatttccagattttaatgacttctctgctacataaaaatgtctctttctggatcactgagct

SEQ ID NO: 842094 - DNA, 261 bp, Homo sapiens
gggggagacacaatccagtccataacacttccttatacttgttagatcagctctgtccaaaagcaaaacagtgyaatttaaatttttctagtgaccacattttttaaaaagtaaaataaataagtgaaattaattgtaatgctatactttatttaattcaacatttcaaaaataccatctcgacatgaaattatcaatatttcacaatctattattcatactaagtctttgaaattggtgtgcattctcactctcagtaca

SEQ ID NO: 842095 - DNA, 593 bp, Homo sapiens
aggggatggtgggaaagctctttttttttcctcattttagaaagaaatatgggaagtcttagaatatgtaggaaattatttatgactgaaataatgatgccctctatatatttgcatatatatgtgtatatgcatatatacatatttttaataggcaatattactatttttactagcagcttagattttaaaaaaaagtttgcccaaaatagccaaataatttaattaagaagatattttaagttttttttttattttgagataggtactcgctctgttgcctagctggagtgcaatggtgcaaacatggctcactgaaacctccacctcctgggctcaagtgatcctcccacctcagcctcccaagtagctgggactaaaggtgtgcaccaccatgcccagctgatttttttaaaattttttatagagtcagggtctcaccatattgcccagcctggtytcaaactcctgggctcaagcaaccctccttaatacacggcctccgaaagtgctgggattacaggtttaagccaccacgctcagcctaatctttaattattttgaaaatcacctgggttcccttcacgatttgc

SEQ ID NO: 842096 - DNA, 668 bp, Homo sapiens
tgagagatatgaaatcaataaagttgagggctaccaaaagctacactattcaaacaaatcttagcgactttctcccacccttgtaggaacgactcacctgggagatattatcccatcaaaccaacatccaatctaggcccagacttggctgattattgttctgtctggctctccatttatgtttttcatatctactgtgccttcccttaaaatgccaaccttataaatttctctgacaggtgccctcatagaacaggcaccatctgcattaactgtctgtccctgaatctaaccatttggcaactatttgaatattttatgcttatgtacctggtcttccccatgcaaatctccctacattatttgtgaccacttggtataaccacaccagtaatcaaaaagctgttccaattgctcttactatggattcttcatctgcacctttcaggagagcctctcaatttgtttctggatctggcttcttgcaggcaaagggattcactcagagatcttatcccttttatttgttttcactgggcccagtcactactcctgcgctaataatagttaaaacwtcttcaccttttctaaattcctcttcatgaacaattaggtgtttacacctcctactgcttttgggtggcatacccatcctgacctccaagagc

SEQ ID NO: 842097 - DNA, 586 bp, Homo sapiens
gataaagcttaatttccatactcatggactccatgcagtgggccccactcaggtcacaaggactccataaycaagtcaaaatctttgaaccttgtctctggtcaaagggactaagtttaggttcctttcaccccaatatttttacaaaataacaatataaattataataatatcaacccctctcatttttatgataccttttaatttgcagagtgctttttcatctgtgccttcagttttgtgcagaacactcctggaagataggcattattcctgttccccttctccagctgaagttcagggtgactgagtgacttggagcattgccccataagtgaagttgggaactaaattcaagggctttgaatcccaattcttcatgccctgcctacttcctgctgcttcagtcacctcagctttgtgtcctacccactctctcctctcctttactctttcatttcctctgctcagtctcctttcttcctggtctagctgcaggcagaaactcttctgaagatgccaggttaaataaaagaacagctttatttattaagttcagcaaagaggagtggaggggagggatgtc

SEQ ID NO: 842098 - DNA, 605 bp, Homo sapiens
tgtcaattgtacccccaggaaagttgtggtaaaaaacttagttgctttctaaatttactccatgaacttagcttgttcattgtgacacaygtggaattcgttccctttcatcttctttttgcctaaatcattgtttcttatgtgggattctgtgatatttccattaagtgtgggtagaaataactatccacatatttttatgtagtacatactaagtattgtttgaggtctttcaggtcaatggataaaaaatatagacagtaaagttctggaaagtcttaatttcccttcataagtcttttcaccatattttcacttgtattgcctagagcttaaccttgattataatatggaatctctgtagacaaatgaatgtgcacacatacacatttctttagtctttaatttctgtgaatattatatctttaatattagccatgtggaaacccagaattcaaagagaattatactgttctgaagagcaaaggataaaatctatttactccccttctttcttactctaccaacgagggatatggctttatttccttaaatgctgtttctcctgctaattgttttagaatgcttctatgatagcctctgtt

SEQ ID NO: 842099 - DNA, 628 bp, Homo sapiens
ccatgggcctaaggcagactggatcccagcaggctgggacacagggtttccaggtcaacttttatcttcccacatggtatttgttcctttgatccttgagcagwtcaaacaaagctcactaatcaatggcttccctccctgcctttcagagcagatcctcaaacacagcctgcatctctccctgctcccctcccaccctccagttttccagccagaggcatttgctctaaggcccaggctgtggcccacctatcaccgctacccaagtagtacaggtatgattgtctgtttactttctttaattcaaatcgcactagagaaatttcaggactcactcactgataaatcatggttacttacctcttgtctaggcccttgggcaagggtgcattgatgcatctactatgattgcctggttatcttggtcttggaagcacctagtaatgaaagaacccagagaaagataaacagagctgagggagtcaaggttaatctttctgagcctatttcttcctttatgtaactgggatattgtttcctgccccaactacttcacaaggctgaaatgaggattaagcaagttaatggctgtcaaggtccaccaggaaggatggagttctagatacat

SEQ ID NO: 842100 - DNA, 595 bp, Homo sapiens
acctttattctgccagcaataagaaaacattgaatattttaagaaagtgattgatttttaaaactatctgggtaggacaagaggaggttaattaaaagagcaaaatgctgcagctgccagataaataaatgctctctaagcctacagaagagaaagcaggttggtaggtcagccgttcccaaaatgttctgaattacctcgacagaagtgggaacagggccactagttatgtacttccccattgtccattcatttatctgaagttagactttagggcttcttgtgtatctgtgttcaccattcagcctggtagtagtactctacatagcaattgctaaataaaacctttgctgatgaattgtcagaattctaatatgcttattagggagaaggtgagaataaattgtaaatggaaattattacaatgtaaaatatgtagcaatgattatatacatatattatgctcctttgaggacataacacaaaactaggaaatcaaatagcacaactaaagcagataycaaatactgaaagagaagttgcaccaccagaagcagtaattctgtttttagtagaagtctcctggctgtactaa

SEQ ID NO: 842101 - DNA, 513 bp, Homo sapiens
aatgacagtaaatttctctactaaaaccaatacatgccagaagataattgtgtaacatctttgaagcacttagagtaaataactgttaacatttatatatgaaaactatttttaaacatactatttcaaataaagatatgtatagtttaccacctagaaagttctaaagaatgatattcaaggaggaaaatgatctcagaaatactgtctaaggagtaagatgaaaattgaacaaattaaatgacaaatattagattaatcaaaataaatattttaagtatctaattatatgattatgtttaatgtgtataaattttaagaggctagaatagaaatattgcatgcaataggtaaataaaattatgtgagttaggaaacataaatgaagatgtttgaaatcctcttatcattagaaaaaagaggataaatatgttgttttactttattttttcaaagataattttgtaggataaaattttaagagtaagaaaayttaatgaagtttataaatta

SEQ ID NO: 842102 - DNA, 549 bp, Homo sapiens
atcactaacaagtaacttttagacaccacataacatgtctatgacctcatttgtgtatttactgaatacttattgtaactaggaagtattgaatgccactgttctgagtgcttggtaactattatctcacttagtctttacaatctcatttcatccatgaggtaggtactatagatgaggaaaatgagatgtcaaaatttcagtaacaaccctgaggtcacacaagcaataaatgatagttttgaatgcataaaccatagtcttaatcattaaattcccatgaggcttctgcaatggatctaacacctgggtgtcagtgctgctggttcatagaccacactttaaaaatcatggcagtagacaatgtgaagtgtccatttacacactattttaccagaagccaaaactacatttcaaggacaagcttgttcatacttagttctgtggtattaataacaactgaaatatctgatatgtcagcccaatagaattgctataagattttctgggtcttgytaataaatttagactgaactaatgttcagaaat

SEQ ID NO: 842103 - DNA, 621 bp, Homo sapiens
aacatttaatgaaagccttttattattgtttctctgggatggaatagtcatcctttgatgatgtctctatgtggacaaagaaatatacaatgtcactgacttttcaatttctgctgtgccaatgaggtagacaagtggatgatttggttttgattctcttgttatagtttaagaaaaagaattgcaatgattctttgaaaaatttagttattttaaacatgtagacatatttttagccaaaactatcttctaatgttacttttgcttgcctttgtgggaaatataaatgaaagtaataagggcgaaagaaaaatcatttgctatatcttattgtgtacgcattttaatgaggttaaatgattaacactgtcagtggacaaacttgtagctcccagagtgtccatacaatcacaggacaactttgcacaactcttactaaaatagaaataagagctatacaacatcactgctataaaatagaaggagccatrtaacagtatactttagaggatagtgtcagaaaatcatttttaggcctggcgtttaactttgaagcatactaaatgttgttttaaagttaattcatgtatacacacattgttataatagcaaccagctatt

SEQ ID NO: 842104 - DNA, 634 bp, Homo sapiens
aaacatgtattattcctcattgacactttataatgatattagggttaatacatcagggtcaatacatacatgattataaacatatatgcatctaacaacagaggcccaaaatacatgaggcaaaaactatcagaaatgaaaggagaaataggcagttcaatagtaatgaagtattccatcttcttatttttattttttaattttaatttttttttatagaaagggtcttgctctgtcacccaggctagaatgcagtagtatgatcatagcttaccacagcctcaaacacctgggctcaagcaattttccaccctagtctcccaagtagctagaactttaggtgtgaaccatcatgcctggctactttttaaattttttagagaccaggtctcaccatgttgcccaggctggtcttgaactcctggcctcaagtgatcctcctgaattggcctcccaaagtgctgggattactggcatgagccaccgcacctggccttgcttcaataatggatagarcaactatctataagatcactaagtaaatagaaaacttggacaacactgaaaaccaatttggcataacagtcatcgacagaacattccacccaacaatttcaaaatacacatttttctc

SEQ ID NO: 842105 - DNA, 583 bp, Homo sapiens
ttatatattatagtattatctatagtttagggtatttttccttttgttwtaaagtctgcatacaatgaaatatgtaaacctttagtgtgcatttgctgaattttaacacacatatacatctgcgtatcaaattcttactaggatatagaatattaacaacagcccagaaatttccttcattggccttcccagtctcttgcccttgatttcctataaacacccactcttctaattttttctattatagatttatttgtgatatagtctgaaagtatcctccaaaatttgtatgttaaaactcaattgtcaatgtgatacaggctgagcatccttaatgtgaaaacttgaaatttgaaattctccaaaatctgaaactttttgagtgctgacacattgccacaagtaaaaaatttgatgcctaacctcaagtgatggatcacagtcaacactgtttcatacacaaaattattaaaagtgttatataaaattactgtcttagtccatttgcatttctataaatgaatagttgagactaaataatttatgaagaaaaagggtttatttagctcccagttctgcaggt

SEQ ID NO: 842106 - DNA, 685 bp, Homo sapiens
gggtagcagaaagctgaagacttatttgaggtaacagcgaatagaagtagagctgccaaagcagtttagaatttagaaggaaagactgataattagggcaactgcagatgggtgtaacccccrcaatctaagtataaacactggccaaatccttcactaaactaagaacgaagcagaatataaactgcttcactctactaaggagacagggagtcagggcaagtttacttcatttaaaaacaaatagtcaaacaggcatggtggttcacaccagtaatctcagcactttgggagcagaggtgggaagatcacttgagcccaggagtcaaagaccagactgggcaacaaaatgagaccccgtctctacaaaaaaattttaaaaattagccaggtagccaggtgtggtggtatgcacctgtgatcctagctacatagaagactgaggcaggagaattgcttcaatccaggaggtcaaagctgcagtgagccatgctcctgccactgcactctagcctgggtgacagagaaagaacttggctcaaagaaacaaacaacaaaaaatgccagtcaaataattatctgaagaaaaaaatagaatccagagtggccacaatatgttacatacaatgtacagttttaaccaaaagctttataagaagataacaaaatctaggcactcaacagt

SEQ ID NO: 842107 - DNA, 658 bp, Homo sapiens
tgagcattccaaatctggaaatctcaaatgctccaaaatctgaaactttttgagtgccaacttgatgctcaaaagagatgctcattggagcattttggattttgggatgctcatcctggtaaatataatgcaagtattctaaaatctgaaaaaaaagctgaaatccaaaacaatttcagatacaggatactcaacctgtatatatatatgatggaatactatttggccttaaaaaggaacaaaggactgataagtgctacaacatggatgaatgatgaaaacattgtgctaagtgaaagaagccaggtacaaaaggcaacatactgtagggttctgtttatatgaaatatccagagtaggcaaatccatagagacagaagacagactagagattgccagagggtgggaggaggaatgagtaactgcttaatggggatggagtttcctctgggatgataaaaatgtcctgttactagatagtggtaatggctgcacaaagttatgaagacacttaacatcactaatgataaatctgacgttatgcatacgtcaccacagtaaacatacccytgcagtggaataggttctgagaccatttagaggtcacacagaaaattagaagatttaaaaagaaaaattgattcccagacaaggtgcc

SEQ ID NO: 842108 - DNA, 509 bp, Homo sapiens
ccattgcactccgtctaaaaaaaaaaaaaaaaaaaaaaaaaaaaagctgaagtggctggtggccatattaayatcatacaaattagagtttggaacaaagaatgttatctcaaataaatagagacatttcacaatgtcaaagtgattaattcatcaagaagacattacaatcctaaatatatatgctctcaataacagaactttaaaatatatgaaacaaattctgacagtatagaaagaagaaaaaatagatgaatttacaattatagtttgagacttcaacattcctctttcagtatttgatataacaagtagacagaatgtagacgtatatagaagaattaaacaatattttcaccaacatgtcttaattgatgtttacaaaacactccatccaacaacagcaaaatacacatttttttcaagagtacagggactattcagtaagataggccttgtggtaggccataaaataaatcccaataaagttaaagggattgaaatatagt

SEQ ID NO: 842109 - DNA, 509 bp, Homo sapiens
ccattgcactccgtctaaaaaaaaaaaaaaaaaaaaaaaaaaaaagctgaagtggctggtggccatattaatatcatacaaattagagtttggaacaaagaatrttatctcaaataaatagagacatttcacaatgtcaaagtgattaattcatcaagaagacattacaatcctaaatatatatgctctcaataacagaactttaaaatatatgaaacaaattctgacagtatagaaagaagaaaaaatagatgaatttacaattatagtttgagacttcaacattcctctttcagtatttgatataacaagtagacagaatgtagacgtatatagaagaattaaacaatattttcaccaacatgtcttaattgatgtttacaaaacactccatccaacaacagcaaaatacacatttttttcaagagtacagggactattcagtaagataggccttgtggtaggccataaaataaatcccaataaagttaaagggattgaaatatagt

SEQ ID NO: 842110 - DNA, 442 bp, Homo sapiens
tcactgttgaaaaaaaaaatgtatgcaggccgggcgcagtggctcatgcctgtaatcccagcactttgggaggccaaggcaggtggctcacttgagggcaggagtcygagaccagcctggtcaacatggtgaaaccccatcttaactaaaaatacaaaaattagctggacatagtggcgcatgcctgtaatcccagctacttgggaggccaaggcaagggaatcgcttgaacccaggaggcagaggttgcagtgagccaagatcacgccactgcactccagcctgggtgacagagggagactctgtcaaataaatgtatgtatgtatgtatgtatgtatgtatgcatgcatgcatgcatgcaatagacaactctagtccttactctatagctacccctcatcccaattattggggtgttcacactctactgtgctgtaatac

SEQ ID NO: 842111 - DNA, 563 bp, Homo sapiens
tgaatacaggccctctggttctaaaacttgtgctcacttcttagaagatccccaccaggctctagaggtaaccagggcaggtatgcaggttgtctgaaatgtgtcagctgaggaatgggtagaggaattagggccctgtagttaggaagacagaactcccagcagggtgtgaaaatcgtcctcagttatttatttatttatttattgagacagagtctcgctctgtcgcccaggctggagtgcagtggcgcaatctcagctcaccgcaagctccgcctcctgggttcacgccattctcctgcctcagcctcccgagtagctgggactacaggcgcccgccaccacgtccggctaatttttttttgtatttttagtagagacggggtttcaccgtgttaaccaggatggcctcaatctcctgacctcgtgatccacccgcctcggcctcccaaagtgctgggattacaggcatgagccactgcgccrtgcctgtcctcagatatttatttcaaggactgtatttgaccccgagcacatcatttttaaaccctcccttcctataa

SEQ ID NO: 842112 - DNA, 654 bp, Homo sapiens
ggctagagtgcagtggcgcaatctcggctcactgcaacctgcacctcctgggttcaagcgattctcccacctcagcctcctgagtagctgggattacgggcgtgtgtcaacatgctcagctaatttttgtatttttagtagagatggggtctcgccatgttggccaggctggtctcaaactcctggcctcaattgatccacctccttggcctctcaaaatgcttggattacaggcatgagccactgcacccggccacaagcttctacttcttgcagaatgcctttgtcccatgaaacctagtccacgagtgctatgacacttcctgaagtcttgggtggggtgaacgcacaaatcctgggggtgtagagaggaggaggatgtttacttaaaatgtcttaaggttcagcattgacagagaggcaatatccaaatcactctaagttttgttttgggtcctctgacaattgagtttccataatctggtcggctcagagacaccatcatgtgtggtatattcacaaatgcagacaaagaaaattctagaaagccaggggtgaaaaagctcycctttctcagacgattctgttaagtctatgtgggctaaggagagaagaacaaaagtttctctgggccttggcctcttggggatccct

SEQ ID NO: 842113 - DNA, 585 bp, Homo sapiens
ctactccagaggctgaggcaggagaatcggttgaacccgggaggcggaggctgtggtgagccatggtcrtggcactgaactccagcctgggcaacaagagcgaaactccatctcagaaaaaaaaagaaacaatgagatatacaatactttgaactattaaaatctttattattcatcagttttctttgctagtgtacttttaagttaaaaaaatagttatatatatatatatatgcacaaaacatctggattgtctccccatctcaactcagtttttcattatagagtcctgaaaccttcatgttatggaagtatgataaacgaaaggccaagttataattattttttgtaaaagggtggaaagagaaattgcctcagtttgttcattcatctgaattacattaaattacttgactgtgtaagtcagaagttctggaatatgaaacaaaacgtattaattggccaagtcccagtctgtgctttatacaattagcccaatgttacaaaaacaagtatcccttgttatccaaatctattcagtttctgagtttggaaagtgaaaggtcaaacacagagtggtaactg

SEQ ID NO: 842114 - DNA, 594 bp, Homo sapiens
ggtagtgaccagcacaacatggaagaagccagggcagcatgcagccagctgctctgcagccccaaatggctcctgggccttgggaagtcactcataaaggggaagctggtcactttgaggtccctgaagggaagggtgaacgtgcatcccaacagccctggcagccagcagcatgccatacatattctcacccaacgtgtgtgacagaggtcccctcctggggcacaagtcccatacataaagcatcctgtcccagtcggacctcatcctgagccctgggaggggagggggaccatgggcccccctgcagcagccaggattaccacccaggggactcggccttctgtggccctggccagacttagaatttggcccaccacacacttactcggagcagcttctcagtacctggggcctgtgcataccaggcaaggccaagctggctcaaagagcaaccagccacctctgcaagggtatgccagtagcaggtggagcagtcaccaacctcacgcactcaaggaaacagggatggccagtttcccacagtctgagtgaccaccacctgayagctgatggagtggaggcctgaggaaa

SEQ ID NO: 842115 - DNA, 635 bp, Homo sapiens
ttatacaaaaattaattcaagaygtattaaagatttaaatgttagacctaaaaccatgaaaaccctagaagaaaacctaggcaataccattcaggacataggcatgggcaaagacttcatgtcttaaacatcaaaagcaatgccaacaaaagccaaaattgacaaatgggatataattaaactaaagagcttctgtgaagcaaaagacataccagtgaacaggcaacctacagaatgggagaaaatttttgcagtcatctgacaaagggataatatccaaaatctacaattaactcaaacaaatgtacaagaaaaaaccccatcaacaagtgggcgaaggatatgaacagacacttctcaaaagaagacatttatgcagccaacagacacatgaaaaatggtcatcgtcactcgccatcagaaaaatgcaaatcaaaatcacaatgagatatcatctcacactagttagaatggcgatcatttaaaagtcaggaaacaacagatgctagagagtatatggagaaacaggaacacttttacactgttagtgggattgtaaagtagttcaacgattgtggaagacagtgtggtgattcctcagggatctagaactagaaataccatttgacccaggc

SEQ ID NO: 842116 - DNA, 635 bp, Homo sapiens
ttatacaaaaattaattcaagacgtattaaagatttaaatgttagacctaaaaccatgaaaaccctagaagaaaacctaggcaataccattcaggacataggcatgggcaaagacttcatgtcttaaacatcaaaagcaatgccaacaaaagccaaaattgacaaatgggatataattaaactaaagagcttctgtgaagcaaaagacataccagtgaacaggcaacctacagaatgggagaaaatttttgcagtcatctgacaaagggataatatccaaaatctacaattaactcaaacaaatgtacaagaaaaaaccccatcaacaagtgggcgaaggatatgaacagacacttctcaaaagaagacatttatgcagccaacagacacatgaaaaatggtcatcgtcactcgccatcagaaaaatgcaaatcaaaatcacaatgagatatcatctcacactagttagaatggcgatcatttaaaagtcaggaaacaacagatgctagagagtatatggaraaacaggaacacttttacactgttagtgggattgtaaagtagttcaacgattgtggaagacagtgtggtgattcctcagggatctagaactagaaataccatttgacccaggc

SEQ ID NO: 842117 - DNA, 633 bp, Homo sapiens
ggcagtttaatgtctgccagaacgtgcttttccctattaagcctggtgagacacagtctggagagaaacctcatgtccttgatataaccaggagatcccacagacgtcatgaacatcttactcagcatcacaagattcaaactctgctgcaggccttttcaatgtaatgaacaagtgaaaaccttcaacatggaggcaatgttctttatacataagagggttcatataggacagacctttggtaaatataatgaatatgagaaagcctgtaataactgagctattattgtccaagggataactcaggtaggacagccaacttgctgtagaaagtctgacttcaccaaacatcagcaaacacacacaggagagaaaccccatgaatgtgttgaatgtgagaaaccctccattagcaaatcagaccttatgatacagcacaagatgcctactgaggaaaaaccttatgcctgtaactggtgtgaaaaattgttcagctgtaagtctggcctcactatccatcagagaattcacacaggggaaaagccctatggatgcaaygaatgtggaaaaaccgtttgccataagtcattcctcactttacatcagagaactcatactgggggaaaaccatat

SEQ ID NO: 842118 - DNA, 487 bp, Homo sapiens
aatcatcgagactccgtgggcataggaccttccgagccaggwgcgggatataatctcgtggtgtgccgtttcctaagcccatcagaaaagctcagtattagggtggcagtggcccgattttccaggtgccatctgtcacccctttccttgaccaggaaagggaactaacttcctgaccccttgcgcttcccgagtgaggcaatgcctcgccctgctttggctagtgcacagtgcacttcacccactgtcctgcacccactgtctggcactccctagtgagatgaacccagtacctcaaatggaaatgcagaaatcacccatcttctgcatcgctcatgctgggagctgtagaccggagctgttcctattcggccatcttggctcctcctcccattattttttaatattttctgaaaatcttctttaaagagagaaagccaaatgtcacccactttttcataaaaccttacaggcaaatctattattc

SEQ ID NO: 842119 - DNA, 541 bp, Homo sapiens
cctctacaaaaaatacaaaaattagccaggcatgatggcctatacctttagttccggttacttgagaggctaacgtgggagaactgcttgagcctgggagattgaggctatgagtgtaccactgcactacagcctgggtgacaaagaaagaccctgtttaaaaaaacatgcactcggccgggcgcggtggctcacgcctgtaaacccagcattttgggaggccgaggtgggcagatcaggaggtcaggagattgagaccatcctggttaacacggtgaaacaccgtctctactgaaaaaaaaaagaatacaaaaaattagctgggcgtggtggcgggcgcctgcagtcccagttactcaggaggctgaggcaggagaatggcgtgaaccaggggggcagagcttgcagtgagccgagatcgtgccactgcactccaggccgggcgacagagcaagactcctgctcaaaacawaaacaaaaacaaaaacaaacaacaaacaaaaaaccaaaaacatgcactcaaaagagttagctcaagcat

SEQ ID NO: 842120 - DNA, 623 bp, Homo sapiens
ttactacctaagtatatgagtggaagtgtatttggtcaaaaatctttatgttaagtaccttgacaggtgaaaaatgggctttaattttcataaaaccagagatcccaaatttctttgtctgactattctctcyaggtttatctttctttatattcctccttcctggttctatgtgacacatgtcttaagaagagaacacagggaccattagctcgatattgctgctgtgtaactagaactattctaccaagatctctcatgagaaaatccagaatggattctcagcttccctgacccatgctaattctgcaaaaatagttccattctcttgtatttcatgttttctcttctatcttctttttctctcttaatcaatcacaatatggaactaaaataaaatattaagttattaatcattctgattttgaatagttttatgttctttgtttttcattataaaggtagatgagtcaaacccattatatttctctaaaaatataattctaaattaattttatcttatttaagaagcttataatgctcctatttatgaataacaggctatgtgggggatatttcccaccacttcacgaattattttttccaggtactttcttgcaaaa

SEQ ID NO: 842121 - DNA, 603 bp, Homo sapiens
tattgtccttaaaccaaatgacttaagaagaattttatacgagctctgatcagattgactcaaggctccagagaaactcaaagctccatgacatgatttctttcttattggtaggcccaggcgggtggawcacctgaggtcgggagttcgagaccagcctgaccaacatggagaaaccctgtctctactaaaaatacaaaattagccgggtgtggtggcgcatgcctgtaatcccagctacttgagaaggctgaggcaggagaatcacgagaatcgcttgaacccaggaggcagaggttgaggtgagccgagatcgcaccatttcactccagcctgggcaataagaatgaaactccgtctaaaaaaaaaaaaaaccaaaaaacaaaaaaacagtgttttcagcagctggcaaacattaagagcctatcaaatgcttatctaatattaaatcaatacagtttagcttcatcaaaccacatattcgggaagcatgtcacatttccaatatggacattattagtgaaatttgcaactatgcaactgtgccaatggccaccaagaattcaatagcaagcctagagatcaagtaatagagcgctctgc

SEQ ID NO: 842122 - DNA, 594 bp, Homo sapiens
acaagagtaattgccttataagagtaattacttacaaatgaaagtaagcttttactatctcctaattggtttttattgttgttgttgtttrtttgagacagggtctcactttgttgcccagggtggagtgcagtggcactcactgcaacctcttcctcccgggctcaagcgatcctcctgcctcagcctcctgagtagctgagactataggggcacaccaccacgcccgactaatttttgtacttttttgtagagatgggctttgctatgttgccagactcatctcaaattcctgagctctagcgatccacccgcctcggcctcccaaagtgccgggatattacaggcatgagccaccgcgcccaacctactatttcctaattttctatttggtatctacaactaaggataattttagctttttcagttgccacatctcacaggatcattggttcatcgatcttacagtcccacagaatcctttaaacatttctatacatgcactgggctatagttattccacttaccaccctttcctctacttccatagttagtgtattataggtgattctccacactcactgaacttgaaat

SEQ ID NO: 842123 - DNA, 502 bp, Homo sapiens
agtgaaataaaaatgttttcaaacaaaagctgaaaaagcttgtactgtgagtgtactaaaggaagttcttcatgttagagaaggcaaccccagatgatagctaacagaaattacaggaagaaatgaaacgcratagaaaaggtaaatataaagttatattcaggccaggtgcagtcactcatgcctgtatttccagtactttggaaggccgaggaaggcagatcacctgaggtccggaattcgagaccagcctggccaacatcctgaaaccccatctctactaaaaatacaaaaactagccaggtgtggtggcacacatctgtaattccagctacttggaaggctaaggcatgagaatcacttgaacccgggaggcagaggttgcagtgagcgagatagtgccactgcactccagcctgggcaacagagtgagactccgtctcaaaaaaaaaaaaaagttatattcactgctttaaatacagtaataatatgttttgtgggc

SEQ ID NO: 842124 - DNA, 669 bp, Homo sapiens
ctacttgtgttcaacagaaaagcatattctaccctctcttgtaaattgatgatattcaggacccacaagcggaaagggttttatcttttcttgatatygatgcagaagtcccaattcctggaatccccagctacggagaccttcagaagacctccaggattccagcagcatcagggttggtaacctctttgaatcactggcgtcttagttttcttttccctctctccctcctctccttctctttctcttctctatctacatactgaagtttctctgcctctgcctgtgtcctttctttttccttcctctatgtttcttttcttcctttcttatttgaatgctttcaatatacatttcacattttttatggatcagttttgctgacatcaggaacagctaataaagttaacgtagtctaattacaataatagatcgagaagctattcaaattgccttttgctgggggctcaaatctttgtgtctcgggttcaagcccagtctctgagactcccttgctctaagttttcagatattcctcacctcacttagactactttctcatctgtataatgggtgtgaaaaatacctctacctcacaaggaggtcaggaagcttctgaatgagataacatatggtttagctgccatcaaatattagaaagacatcatg

SEQ ID NO: 842125 - DNA, 474 bp, Homo sapiens
cattgagcttcagaatagggaagttactctctgagctagactttggatatgtagctctaaacagatgtgttacctgaagacaaccatgaagcaagtcattaaaagtacacaggtataattgaaggaaaatacaggccactgcatgggcatataataggtgggaataattttagttgggaaggctcctctaaggcagtgacatgtcagaaaagattcaagggaaaaaattctcttgtcaggctaatgggacatgtggcagacagactttaggatggtctctgtgatccctgcctcctgatacctcatgttatcctgtctccttgaatgtgggtgggacctgtgacttactctaactaacagaataaggccaaggtgacatggtgtcacttctgtgatgccatttcataagactgcagcttttgtcttgcaagtagactstctctgttgccatcttggtttgcatgcttagatgaa

SEQ ID NO: 842126 - DNA, 622 bp, Homo sapiens
ctattcttctgtaagtcttattgattttctgtacagactgaaaggcarattgaaagaggacacataagggaccaaaatcactgcatcttttaagtaattaatagtggcactaatatacagattcccactggagatatcatgctgctttggtcttactcatcttagggaaggggaattccacagacaccaaattggcctgtggttccatctagtcctcactccgtgattcagagtcaatgtagggattttgctagttgttgagtatacccatttcagtttacactctgatactgagcaacaggagaatgtgtttaccatgagacagacccaggccctcactctgagtggggtttccacagtagcattctaggtctccagggattagcagaaccagagtctgacagtaagtccacgtatttctctctcaatactcaaagaaattagtagatagtcacaagctcctggcaaaggccaggagaaagaattacagaatagtctttgatggtttcttggggttctttctcaaacatatctgattttccattctttcaggaaccatgagtacattaatttattcaggtcttataattgattgaagaaccatgacatggctcaacactca

SEQ ID NO: 842127 - DNA, 537 bp, Homo sapiens
aataaaaatttgagacagaagacaatgaatgctatattcaggcgtcagtctattctctttatgtagatttcatattaatctgtttattataaatatgtttcacatgtcacttttcttctatttccactttattttttctctactcccagatttctcggcaccaaactcttagctactatcttttctggcaaattcaagtcccagaaggtatctcctgccacagtatcataactaattttctcctttcaattaaaggtcatagtttgtttgaaagagcaaaaagaactgcaagaagcatattgacattgtgtaaatgagagctgaacatcaaggagtatacagttaatgaacaaaagatcattgcttagtgtctaactgcagcattaaggcttggtattgaattcactgaaaaggtgatgtgacagaggacaaacaggggacaaacaggtgaggggcttcatgttgttcagtgggggctccaacctyctctctctaatacttcctatgtattgttttgttctcagaacttaaatgtct

SEQ ID NO: 842128 - DNA, 635 bp, Homo sapiens
tctttgtggatatttggtagctatataactcatggtctttctgagtcagcaaattctattgttgaaaattatrattgttaggtagaactttcttaaatttagaggaaattattttcttgacggttaagctctgtcctaataggaaattgttttctgtgtcagccagttctactgctggacagctataataattaggtaggatttatatatatatataatatatattacatatatatttatcaaagtctttttttatttaatttttgcaaggcctacactcaagaaaaggttagattaaatgtattccactgttcacgtgacaattcttgaaatatttgaagacagctgtcatgtcccctgagtctactatctagccctaaatatggtttctcaaccattcattataggaaacctttatgacaccatttgaagaaattgattgctctcctctagataccttaatgtataaatgcctttttaaaggtacaacaagaaggacgtttggcatgccagatggggtacaacggtttctgagtatatgaggattattcttcctgggtgttatacttctgttaccacagcctgggactgcattagtttttttagagattgaatcaagcaactggatcctctaa

SEQ ID NO: 842129 - DNA, 602 bp, Homo sapiens
agtaattaacagagggcctatttttaaaaaggtagtcaaaaaatggctgtatgattccatagacaataagagaaataattattttagctatctgatttatttgcccaatattcatttcccacttgtaggaatggcatttcagtctctttggggaacaaaccctctcccactcatagcccatgtccatgtttctggcttctgtggcttaggcctagatagtcgatattccctcaggctacaataatgtctttgatttaaggatgaacttttaacccaaatatgaaaatgaaatttgattcctaatctttaattgggtctatagggaaaaaaattctcttcccactggcataagctggaaggatgtaattgtggagcatccaagggccatgagatgagaactgattaagaaaggagggagtcagcatagacagaaacagagcccgtggaaggaaagaggtgatgcagatgacatcatttatctatcttgaygcagttgtaaattctctctcatgggatccaataaatgtccctgtccccactctcttttttaaacctaagtaagttaattttgtagatgagttagtagctgatatgtcaaattt

SEQ ID NO: 842130 - DNA, 524 bp, Homo sapiens
aacgccattttcttgtcctgctagaaaacaaaaccacatctttaaatcttctgtggatggttgagagattataataaagattggtgtrctaataatccttcttatatatatataaaagcaaaactgatggattttagtaactataaaatactattgaatatatcaatcgcatacatttttattggctgcattttctagtaattgcatataacacatgaatgtgcttctaattaaattaattcatttagagaaaaaaagaccttataaagcaattgctagtttcatgatcttttttttttttttttttgatatggagtctggctgtcacccaggctggagggtagtggtgcactgcaacctctgcctccctggttcaggtgagtctcctgcctcagcctcccaagtagctaggactacaaacatgcaccaccacgcctaatttttttattttcagtaaagatggggtttcaccgtgttggccaggcttgtctcaaactcctggcctcaattaatcctcccacctg

SEQ ID NO: 842131 - DNA, 553 bp, Homo sapiens
ttgtattcatcccatttattgaatgccaaggatataccagctactgctccagatgttgtattcagggaacagaagaagagtccctgtgcccatggagctaacagcattctaggggaggaaagatgggacagctgactttcacgatctcaggtactgatgaagattgtgaagattattacatcaggtgaatgtaggggtgatttagagaaagctggtagctaggctgttcaaggaagggcctctgtgagaaaggggatggttggctgggtgtggtggttcacgcctataatcccagcactttgggaggttgggagtttgagaccagcctgaccagcatggagaaaccccgtctctactaaaaatacaaaattagcccggcatggtggcacatgtctgtaatccaggctacctgggaggctgaggcgggagaattgcttgaacccgggaggcagaggttgtagtgagccgaaatcatgcyactgcactccagcctgggcaatgagagtgaaacttcctctccaaaaaaaaaaaaaaaaaaaaagagagagaagag

SEQ ID NO: 842132 - DNA, 556 bp, Homo sapiens
gggcagagcagtcacttagcaaggagctcaggaaatgtttgctgaatgaaagagtggagagtgaaaggtcgtgttctcaacctggcagctggcatttctacatcacttttacwcagagatttgcagacaaaactttttgtttaaaacaatgctatgttaattataatctaactgttacacaatttttttttttttaaatcacagtacagggctgggcgcagtggctcatacctgtaatcccagcacttccggaggccgaggcaggaggatcgcttaagctcaggagttcgagaccagcctgagcaacactgtagaaccccgtctctactaaaaatacaaaatattagccaggtgtggtgacacacacctgtagtcccagctacttgggctgaggtgggaggattgcttgagcccaggaggtggttgcagtgagccatgattacgcactgccctccagcctgggcaacagagcaaaaccctgtctcagaaagaaaatcacagtatacatggaatacaaaggttttttgtgtttgtttttaagaactagagccttcga

SEQ ID NO: 842133 - DNA, 636 bp, Homo sapiens
tagtcttatactggatcagtttggatccaccataggcattcaccatttctttcaagtcctgaatatacagtatttgcagcagtgagtaaaccgcactagagttcagtgaataaacccattttctccaagaattcctgaatgttacagtatgaaatccagaaacattatgcaggcttctaaagtaaaaaatatccaatgcctgaaataaacatctttacagttataattctatttcttaaaccttttgggttgtggggtggaggctgtcatgaaggagaggttatagtttatagataagttattaaaacaactctctctggtacatttataaagattttctttttgcagtaaataatttaggtcaaagtgatgacctcccatgctctaattctgattgattaaaccaacctgaagggtaaactggagactctttggcctgttagtcaataacaaaatggtttgtaaagaaaagaaaaaataaataccatatacaaataagtataactagcattcaagtctgttgcacctgtgtgttttagtgaaagggagaatgaaacttgtaygcatttgacgtgagcaggtattcacacagctaggaaacaggaaaagacggtaggatggcaacatcaccttcta

SEQ ID NO: 842134 - DNA, 590 bp, Homo sapiens
tttcaaatttgttcttccagtgacaaactccgttctaacacacatggtgtaactcaggtgcaagatgagctctgtgagcatttcctcttctgcacagcagtaaaggtaataagcagtaaaactgyggcttgccttcccactaaaggaaaccaaagaaatcgatggtgtgtaaagaactctgagaaaaggttcaaaaagagaatctgctcttttcacactcttccatgtcagcggggagaaaaacacaaagattcaatacctagcgatttcaagatgctttgttgattatcttaacatgtcatctttctgaccccaaccgaagactgcattatggtcactgtattaagggttgagacagaatttaacatagaaataaggtcactcttgtcgttgttcagaatgatctatgttgataaggactttaagaggttcatcgtattttttttttgtagttataacacccactagtaagacttaagttggtagacactgaagaatgaggagacaaaaggttcccgtgacaataaaaataaaccgtgtctccccatctgtgaaacgaggaagtagaactagatttccatgcttccttc

SEQ ID NO: 842135 - DNA, 560 bp, Homo sapiens
tctcaacatacgcccagggaaaatcatgtgtgaatttgtgaactgccctgtaaccaccctgcttggccaatgacaagtccygggccaaggcagtgtaccaacaacctgcttctggaaaaccccatccactgcaaaaatgaagctgcctctgtcccagaggagattctgcaaaaccattattaggacagccatgaatctgagagtccaagctgggaacagagtgagcgtcgtgcggcagaagccaaacagcaggaggtaagagccctcttggtgtcgagactgttccagaacccaaagacttcttttccagctgacctgcatagagatcataaccaccaccaccacctgccccagctgtgtctataatgctaagagacacacagaggagaattcagcctcttcattctgccggagtcaggtgggcccatgcttgccatttgaggctttcaccacagtggtcactatgccttcaggaatgtgatttcagccacacagacctaaacccatgtgtgagttacgaacagactctgtaccctatgtttatgtttattcaacaggac

SEQ ID NO: 842136 - DNA, 646 bp, Homo sapiens
aaaggaggtttagaggtcattctggatccactgaggacacatcaatctctggggccaaaggaataaaagaattcagagccctaaaaattaaagacctggggagggagtacacagttttaatggggaaaacaaaatctgggacaggaagatacttgtctggaaccaaagggagagagatagcttggtgataaaggtgtgctgagtatatagggcatggggcatgtgtgtgtgtgtgctagcacatgcctatgaaaacaagacatgcacagtgcaagaagggccctacaaatccagttaactggcagaaccgtgtctaaaaaaaaaaaaaaagggccgattagaaaacgaaataacacatcacagaagaaacttctataaactgaacatttttaattaaaaggcagtgaaagctatgcatagaggcatttgctcaggtgagagcttttgaattcttatgttttaccagtacacttttcaaaataaaattatttatttgtactatatcccaccctctgtagaagagctttcaarataattttagaatattggtcatttatggagaagtctgaagaatccatgtcatacctaatatattttccattccctgagacctactttaatcatcttgttatcatgttcactgtta

SEQ ID NO: 842137 - DNA, 618 bp, Homo sapiens
acaagggaagctctgaaaacagagatgttacccttttgtaagagaatttatacatctgtaaaggaaatcgccatttgtaaggacagcttcctctctgcattctaaaatcacttgaaactaatcaatgaagaaggcattggcataagtctacacaacaaaccttgctcttgtttaccaggattttcctggccattatgtcataattgagtctcctccacaccattgatttaattcagaaaaccatagtatttaagcctgaagtgaaagtcacctcttagagatttacccatttctctggattatctcccatgtatataggagatgtatgtgttaataaacttccgtgtgttttactcttgttaatctgtcttttgttcctggagtctgggaactcccatcaaaagaagcaatcaggaaatgagaggaataaaagtaaagtgtaaagaatcattattcttcaagttttaaagaatgtcacatttcgtgaattgaaatgtgkttattaaatcccaccaacaaattccagaaaaatttaaaaatcttcagttagtagaaatgtgtaagtacaataaaagaaagtatttccagtgtgcagaatatcaaaattggtgatgaatg

SEQ ID NO: 842138 - DNA, 627 bp, Homo sapiens
gtctcctgtgcacagcccagggctagcactactgcrtaaatgaatgaattgcatttcaggaacaggtgatgacatgtgccaaaacataggtgtggaattctgtggcatgtcctagaaatagcaaaaatttgggatggccccactataggatggacaggaggaggtgttctgagatgagcgagaagaagtcggccgttaagggccttatatgtaaccctaagtgctctgaactttactctgtagggaatgggaagccagggaaggtttgatgtgcaggagaataataattaggtttaccactcaggataattactatggaagcaatgtggcagatggactgaaaaaagaagactaatttaaaggagatcagttaggagatgttccagtactgcaagtgagaaatgatgaagacttccatgagagtgatagggctctttacaaaaggcaattccaagatagaatctaccgcacttgccgactatctgtatgcaaggggagtgtgaaaaacaccatagttttgcttgagaggatggcttgtttggggggagaaatttttagaaatatggaacaaaggaaaagaagagcgagttttagggggaaaaaaaatgagctctgagagttccatgc

SEQ ID NO: 842139 - DNA, 627 bp, Homo sapiens
gtctcctgtgcacagcccagggctagcactactgcgtaaatgaatgaattgcatttcaggaacaggtgatgacatgtgccaaaacataggtgtggaattctgtggcatgtcytagaaatagcaaaaatttgggatggccccactataggatggacaggaggaggtgttctgagatgagcgagaagaagtcggccgttaagggccttatatgtaaccctaagtgctctgaactttactctgtagggaatgggaagccagggaaggtttgatgtgcaggagaataataattaggtttaccactcaggataattactatggaagcaatgtggcagatggactgaaaaaagaagactaatttaaaggagatcagttaggagatgttccagtactgcaagtgagaaatgatgaagacttccatgagagtgatagggctctttacaaaaggcaattccaagatagaatctaccgcacttgccgactatctgtatgcaaggggagtgtgaaaaacaccatagttttgcttgagaggatggcttgtttggggggagaaatttttagaaatatggaacaaaggaaaagaagagcgagttttagggggaaaaaaaatgagctctgagagttccatgc

SEQ ID NO: 842140 - DNA, 617 bp, Homo sapiens
gtttgagcaaatttctgatccaaactgggttggaagttgcagcataaattcggctgggcccagaatcagattggctctgttaattaactgaattggatctagttagaggtcttaggtgtctgactggctcagagagaaactaggattaaatggttatactacaggggatgcaaacttcagctttcatacatttacagagatttttgtcaatttttcctgggcatttgggtatggaaaaattattaagttgatcaaggagatctgagagtcaaagccaagattcagagtaaaaatgggatccttaatttcttaagaactgagtaatctaccttccagctatgcctacatttacacatgaaaagtattaggccccagaagcagcaaatggttatagaaatggcaaaatcttactaaagatagtttaaaattagagtggaacattccaagtgaacaacattgcactttaagaagtgcatttgaaagtgagggccccctaattagtctcatccayggaggagtctttttttatttattttttaaacaagaaaagacttttgcttaaggcaaataaaaagctcaagcaactaattgagaagaaaaatggaaactgctaacat

SEQ ID NO: 842141 - DNA, 656 bp, Homo sapiens
ggggaaatgccctttataaaaccgtcagaggcttattcactatcatgagaacagcacaggaaaaccctgcccccatgattcagttacctcccayttggtccctcccatgacacgtgggaattatgggagctacaattcaagatgagatttgggtgggaacacagccaaaccatatcagcagcctttctccccactttagagatatcttatttgtagaggctagcttgaaaatccagagtcttttaagtcagcctacattctcagaaaacatgctattgttactaggcctggacacatcatgaagtatcatgcaagtgactttgcctgacggatacactcattttctcttctatctacaaacaatagtggagtcctatatatgccaggcacttttctaggtgttgagagtacagcaggaaaccaaacagaaggtagactcttcgaagctaacattctaggggagagagacaatcaacaatacaatgaggagaaatagatggtcagacagtgactggcactgtggagaaaaataaggcaagaaaggttgaggatctccaggcacagctttcaatagagtggtcagggatggcctcactgacaaggtgacattggaacaaaagccttaagcttccatgggaacaagctatgtgggtatg

SEQ ID NO: 842142 - DNA, 566 bp, Homo sapiens
gaaaaattcagttaacttgtttatactcctgtaagctctagttagtcacaagacaaagtatatagtaacactttgtaatgaagtaacattttctgcccacattaattttactaaagacctaaattgttaaaattaattgccaatctctggatatattatgcttagtaagtgttttgaaattaaagaccttaaacatttcagcaagtaaattttggattctagctctgttttaaattgaatcctaattttcaaaccactgctaccccagattcatacctgtttttgaaatcttgtttatggaatggaaaattgacagtatggtaatagtttattgactgattggacaaaggatattctggttttaactgacttttccatttaaataaaattcatttgataattttggttgcaaaagtggaacacagtggaagtatttggctacagrctacccaaatctcatcagataaggctgttttcttaaaggaaatgcaaaatgaaatcatatgttttccttttccaatacagtaaattgcttgttttcctatgaatatcagaaaagattttgt

SEQ ID NO: 842143 - DNA, 583 bp, Homo sapiens
aggagttatgtacatttctgctgtcactgagtacccaaaataagctcatggatcttggaaccagagtgagccatatctgggctcacgctgcattcaattctattcctcaaagaaaagggctctggttttaacgttaatagcagaaggaaaggagagcaggaattagagttgcaattgggttaacaaaaattctgcatgtctcatcatcctctatagtaagggtctccctctctctctctctttctctctctctctctctctcacacacacacacacacaaaggtaatactctctcttgataagactgcaggattgtcctatttatgtgccatttttgtaagcccaggtaacatagcaacatagggacagaacttgtgggacagttggtcatcagctataattttatcaaagggtgagatgctatcaagctttgtcccagtacctagtgacccaatgcccarttcaagggtttctattttaacaacgctgaatagagctttcttacttgacacattgcaaacaaacaagttgagaagacaaaaaaaaaaaaaaaaagcactggggagactacaaatagatttca

SEQ ID NO: 842144 - DNA, 643 bp, Homo sapiens
aatcttcctgcctctaatttgccatccatagaaatggaattcattaagatcattaacaggctcactccacctcctaaggtctgagggaggctcaaatgagatcatgttttcctatgaaaatgctctgaaaaccaaagctcttaaagttgccatgcccaatagttctatctacagtttatatagacagaaataaactcaacccaatatgaatgtgacacaactgaattaatgtgttaagaagtgacttaatgaagattaataaagcactcaacttgaacagtaagacaaaatccaaaagaatggaatgtaacagggacacacttgtcttaatatgtaaaacattattaatatgcacaggcctaagcaagtggggaggtgtagacttaactttggagcctttgatgtagaaaaaactttggagatttctttttaccacaagctaactatgagtcaagaatatgacctggatgataaaaagaaatgcaaccataggctacacgaatggaaatatcattccagtaagatagagtgggactggmgctacacttgtactattgcagcctcaatgtactgtttggagagtgctttagatacactggcagtccatgggattttaagggctggcttagaatcctaatgacca

SEQ ID NO: 842145 - DNA, 604 bp, Homo sapiens
caaagtggtatgacagagttaagacaacaaatgagtcaataacacagtaccatagagaygcaattacatacagagtagaaattataataaagacatgttagattacattcagtcaacagacatacatacaaacagcatgtagtactagtatccactgatagtgaattctcctctttctagacacacagtagcattgtacttccccatctatttgaaattcatcatgaccatctgacttactttgaccaatgaaatgagagcaacatgtcacttcagggtagaagcatttaattgggggtgaccaattctccacctctgattatttcttgctttgtgaggttcaacagtgagtcatcatataatgaacaactgccctggagagttatgtgaaccacagtagatttcaaactaatgagaataaatctttgttgtatgaatgcacttaatgcactggggttgtggaattgtttcttaagtcatcagaacctagcctatccttcctgacacaatagtgatcatgtaatagttgcgtttggtggatacagttgaaagacataaggaaacagtaatggcccttgccaaaaagtctctataatttaattga

SEQ ID NO: 842146 - DNA, 517 bp, Homo sapiens
gttagaagcttcggatgatttggatgtacagctagatgtgagaacccttgatgtaattaatacaccatacaacataccttcatatacacacacacacgtaattaaaaaaatacatatagagagctttacagtttacaaagtgctttcacatatattatctcatttaacctgtacaaacaacattaatcattctcattttatagatgataaagcctgaggctcagaaaagggaagcagtatcattagtcagtaaggtacagacctgctgtttgacaccggatctccgggcttccaattctctgtccctgcacgatatatgtcatagctccttcctgagcccttggctccacacaactctcacgggtggtgtcaggcctggaatacagctctcctgcctcgaaggccagtgctgtttatattytgattatgtcaactccttgtttaaaacccttgcatggctctatgatagactcaggataaaatccaaactcctagaatggaattcatgtccctctgt

SEQ ID NO: 842147 - DNA, 453 bp, Homo sapiens
gtatttttaatagagacagggtttctccacgttggtcaggctggtctcaaactcccaaactcaagtgatccacctgcctcagcctcccaaagtgctgggattacaagcatgagccactgcrcccggcatgggaagttttaaagctactgattaaatttctttacttgttataggtgtatttagcttttctatttcttcttgagtcagttttgacagtttttctctagaaatttgctcatttaatctatattttttaattttctgacatacagttgatcatagtattcctttatggttttttaaatttctgtaaggctggtagtaaagcctctgtttcattcctgattttagtaatttgagtctctttttttcttggtttagctaaaagtttatgaattttaatctttttaaaggaccaacttttggtttcattgattttctttactgtcttcc

SEQ ID NO: 842148 - DNA, 634 bp, Homo sapiens
atgtatgtgtgttggaggtagggacagtgtatgtttacttcctattcaatatataagttatttaaaaaattgaactacttgccccacttaaaaagatttcacgttaaaaatgtaggtttcttttaaatttaaaatatctgggaatactgggcctttgttctcgcaggagagagtctgtttaaactaagtactctgtgctccctttaaataaggtctattgtctctaattggtcctagtcataactgttccctgttaatgacacatgtcctgtcttacttgttttctgtgaatctatgactacaggcctaaactaaagcaaaggttttaggatgttgaggaggtgatgggttcaaggaatgttaaacaacagagttgagagggtttgatggccaactggataacggggatagggacaaggtaatttgaatggatcacaatgtcactatctaagacataaaatacaggaagggcaactagtttggaggaaagatgggcaagatcatagctcggaggtagacagcttaagatgtctgtggaacatmtggaaagagatatctagataacagttgaatatatagatcttagggaaatgatcagaactaaagacaaagattttcgagtcaaagatgtagt

SEQ ID NO: 842149 - DNA, 538 bp, Homo sapiens
attacacagttaatgttattgtagagtccaatgtgaaatctgtrcatttaatatggatatggaaagtatagaattccagtggctgattttatccagctgggaatatgttcccttcaagcttgggaggggtcacccatcaaacagaattgaacagaaaaactaagcatccatcttaaaaagaagacaaggactcactagcactgcaactcagcttctgtgagacttcagctttggccttatcatccctcatttcccattaaataatttcctgtatttcatagcaatcccaggctgtctgccttttgaccttggcttcctgaggctgctgaagttgtgtgaagattctgttcattttgggtctctagtgaattaggacgtgattctattcagttcatgcaacaaatgcccattgagtgtttctgactttttgggcactgttgcaggcacagcaggacttatattcataacatttaataagtggtaaggtctgggtaccaaccaccctggtactagaaggttgtcacagagggtttccagt

SEQ ID NO: 842150 - DNA, 594 bp, Homo sapiens
agtaattgaataaacatgagaggagcatttttgggtactgcataccagctgaggattaacacacagtacatgaattaaaaatttcaggaaccttgcaagaggaaagattacagctctttataacaaagaaaattattatttctattattttccctgtagatgcattgacaaacttagacttttggaatacgttgtctttagttgttcaggctttaccatgtatttgtatagagcaatctatttttcttggggaaaaccaaatgcccatgacgtatgtttgctttagaagatggtttctttgacttgttggaataaatcacaatctcctgtttctacttttgtcctttcacaaggatttccacaattacttttaagatttgttttaatatttaaaggggaaatatctattcaaaaggcaattgaaatgctattatgtgcactagccaagggaaatgtaaaggttttacttttggggagcttaaaatataataaagaagcaaggtcaatcaaaattggtacaataaacatcyataccacaacattcttttgtagaccaatttatttttttatctacctggttgtgttattgcaatg

SEQ ID NO: 842151 - DNA, 594 bp, Homo sapiens
agtaattgaataaacatgagaggagcatttttgggtactgcataccagctgaggattaacacacagtacatgaattaaaaatttcaggaaccttgcaagaggaaagattacagctctttataacaaagaaaattattatttctattattttccctgtagatgcattgacaaacttagacttttggaatacgttgtctttagttgttcaggctttaccatgtatttgtatagagcaatctatttttcttggggaaaaccaaatgcccatgacgtatgtttgctttagaagatggtttctttgacttgttggaataaatcacaatctcctgtttctacttttgtcctttcacaaggatttccacaattacttttaagatttgttttaatatttaaaggggaaatatctattcaaaaggcaattgaaatgctattatgtgcactagccaagggaaatgtaaaggttttacttttggggagcttaaaatataataaagaagcaaggtcaatcaaaattggtacaataaacatctataccacaacattctttygtagaccaatttatttttttatctacctggttgtgttattgcaatg

SEQ ID NO: 842152 - DNA, 621 bp, Homo sapiens
aggcattggaaaaagcaggaagattctaaccccatctccccatctctgctagttgtgtgaccttgarccatttacttaacatctgtaggcctcagttcaatagcttgaatagattggcttgatattctccattgtttcttacaatgataacattgaatgatacactgtgttggtattatttatggctcagttatgcactatgatgctacagttctgaaattgggaatttcatatagagtgtatgtttcttgattttgcaagtttaaataatctatgaacttgtacagttagagatcactttttctacctgacacccctcagctccctcattttatagatggagaaacaatgcccatttagttaagtgacttaatggccacatagatattaaagtggggttgtgtctagagcttaagtgttctggttctaagtctatgcttttaccagtactctgcattatctcccctttgttgttaaactctccctggctcttctctgtcacattatatatttctggcctgcctcccataatcatttgtcatatgtttacatggaatgctaattttaatattggcttaaaagatatttgagggagaaaataatgtcatagactgtatctca

SEQ ID NO: 842153 - DNA, 502 bp, Homo sapiens
tattcattgtagaatacattattagacctttaatgtattatttaacctcgtactagtactgtatcatagatttaatgttctgattttaaatgtgggaaaagtcatcttagtgatayacaataatcttctgcaaagtcactctgtgtgtatatggtagagtctgggaagtaaacctaaatgtttgcctccacatgtcttctattattcaaccatactgatccaggagtgctctatcatgatgccgctggaaatataatacaagctacatatataatttaaaaatctgtagtaactacactttgaaacgtgaaaagaaacagatgatattaattttaataatgattttatttaatccaacccatagtcatttcaacatgtattcagtataaacaaataatgagaattttacattctttatcttgtaccaagtattgaaatctggtgtgtattttacacttacagcacttcttgatttggattagccacgtttgaagtgctctgt

SEQ ID NO: 842154 - DNA, 526 bp, Homo sapiens
catctgtagtataggaaaattgaaagcatatggaagaattgtagataacttakcagcaagaatgtaaaatctaattatctgcagagggatataccaatgataaacaaactgattcatcctgcagaatctgagataggcttaggaatcagaaattaggtattatggaagttggagtgtgattgtgagggagagatgatgtgggtggcatacaaacaaaagaattgtttaaaattaattatatttttcagtcatccctactaggcactaacaactgccacttccctgtctctgctgcatatgaaacgtataatctgtgaagaactgaacctgagagactgcaaagtagggaggataggagtgaggggaattaagtgatctgcataatggtgagacttctagctgccttcctgtgctgagttctacaacagtagcagcaaggcttataactgcctttctctcttaacacctcttcagataggtgatccttctctgaagggataacatgcttcagagaaaaactctgtag

SEQ ID NO: 842155 - DNA, 665 bp, Homo sapiens
agcctgcagtgtttattgatttttttcaaatgctgtttcgtcgtggataccaaatgcatggcgcacatgctgcgactccccactycttaattgatcacagttctctttcctatggagcctggaagcagtctcagaattcatcccaacacagtgccccaggaagccactctcaattcataggaattagcatagaagatgaaatctattttccttctttggagccaaagtatcaattgtctttttaatggcattgaaagctgaaaatgtttgcttcttttctgaaagagagtgttcatgacagattataattttgttgagcttagagggggtttttggtcaaaattcacccacgatataaaaaacaatgttttccatgagacttatttattaggtatttgatagcctaacatagttcctacgataccatttattaaagacacagcatttcaatatatatgcataatgaaatctctgtttcagagtgaacccctatggtaatgcatttaattccacagctgacattgaggatgggagagatgtggggattgaaatttccatacaacccaaccttagtaaaacgtggtggataaagtataccctggctcaaaagcaaagtcaactcaaggacttgtcacttccacggttgaacataatttttcttcttc

SEQ ID NO: 842156 - DNA, 512 bp, Homo sapiens
cgtcacaaagttctcgttcttgtgccgtggttttcagctccgtcaggtcatttaaggtcttctctatactgtttattctacttagccattggtctattcttttttcaaggtttttagcttccttgtgatgggttcgaacatcctcctttagcttggtgaagtttgttattaccgaccttctgaagcctacttctgtcaactcgtcaaactcattctccatccagctttgttccattgctggcgaggagctgctatcctttggaggaggagaggtgctctgatttttagaattttcagcttttctgctctagtttctccccatctttgtggttttatctacctttggtctttgatgttggtaacctacagatggggttttttgttgatgttgatgctactcctttctgtttgttagttttccttctaatggtaaggtccctcagctgtaggtctgttggagtttgctggagttccactscagaccctattttcctgggtatcaccagcggagg

SEQ ID NO: 842157 - DNA, 601 bp, Homo sapiens
atatatatatatatatacatcacatatatatctatatatrtgatggaatactactcagccatcaaaaggaatgaattagcagcgtttgcagtgacctggatgagattggagactattattctaagtgaagtaactcaagaagggaaaaccaaacactgcatgttctcactgatatgtgggagctaagctatgaggacacaaaggcagaagaatgatacaatggactttagggacttagagggaaggataatacctattgtgtttgttaataatcataattagtagtagtatcattactattactattattattgaagctattgctccaactattatattaataataaacaacagaatggtatgcacatgaagtaaataccttaaagtaagcttcatagtttttagctatgaaaatttgaagaagctatttagtctctcttcattttatttccctatcattacaaaaatatttacaatgctctccacataggttctgtctcagttcggatttttctagttgtaatatttatttcagtacaaatagttaatttttcggggaaaagtatcagaaacaccacaaaggaagaaaaccatacaagga

SEQ ID NO: 842158 - DNA, 577 bp, Homo sapiens
cagaaaagcatgggctttgaagcccgacaagagccatttggaattgaagttctgccactgtgatcttagagaaaatatggagtccctcactttcctcatagcatattgggaataatagcacccactctgcagggctattttagagtagagataatatagacgactcgtggagcatagtgcctgtcaaaaagtagatattcttattgatgagaaaattgtgtcttttgtttagggaagtagcagggttaaattaagttttcagcaatatcttaggcaagatacaaatacaaaaaaaaaaaaaaaaaaagggaacatacacttgcacacatcctcctgcctccagccctaagaactgttgctctcagaaccagagggggcctcaagaaatctggaaagcttggcaagacgcttggtactgtgctccaatgccactagtggaaatgatacaaygcaagttctttgggggcaataagggaaattggtacatatcttctatcccaaatatttaccctgtgacgagaagtcaaataatgccagatgtatatgaagaaagttgcagccatccaggattgagaac

SEQ ID NO: 842159 - DNA, 667 bp, Homo sapiens
atttggggagtaatcttgagtttttgaattgagacttatttatgtgaacctattaattatacattctgcttatactaaagatgtctccatgtagatatttttrtcagacttttaatggaacattctcagtatgattcagagaaacatggtatatcatttttatggcagttcatctttggtttatatcattttaattttattccagtgccccagcaattttatttttgtaacactgtatagttaaagaaattatatggtgattttatgcaggaatgatataaggattttcccctataaaccaaactagttcattaataattttagctggtaatattatcaggaacagtgtaaattgctgcagctgttatgtgcagaaaaatgttttatttgaataacaagaaaagacactccatattgcaggtttgttagaaaaaatactatatttaaaaataaatcatctaaatgttgagaagtaccttaatatacccgacaaaggataatttcaaaagagaagtaccttaatatgcccaagaaagaataatttcaaaagagaagtaccttaatatacccgagaaagaataatttcaaagaggaatatgttagattctattcttagagaccgttctatttttattattgttgttgttgaaggaaaaaaatacatgat

SEQ ID NO: 842160 - DNA, 675 bp, Homo sapiens
gcatgggttcattgtacctatagaaaattttatgctaatatgtatgtggaatacctaaaggaactagtatagctacaacaagactaagaaagaagagcagatgtggaggactcacaatattcaactctaagatacactacatagctacagtgtcaaggcagtatattcataaaaatataatgtagatcaattatattgatctacataaaaaaatctattaaatattttccatgatcatcataaaaaaaacatagatcaatgaaatagaaagatattctagaaacagacccactccaatattatcatctgatttttgacaaagttgcaatggcaattcaatagagaaagggcagctttttcaacaaatgatgctggaacaactggcatccacttaaaaaattatttatcaacctacaccttgcactatattaaaaaattaactcaaatttaaatttaaaatgatataaatgtaaaacaataaaactgaatataaaacataaaactataaaactcttagatgaaaacaaaagagaaaatctttgtgatgctgagttaggaaagcatttttatatacaataccaaaatcataatcygtaaaagaaaaaaatgataaattagaattcatcaaaatgaaaagtatttttttctctgttatggacacttttaataaaataa

SEQ ID NO: 842161 - DNA, 577 bp, Homo sapiens
aaataaaaataaaaacaaaggggaggatcccaaaagaaaayatttctttgatgctggctttatgtgactaaaagctataatatcctgtcaatttttgtttttaaatttacagtagtaaccattattattaaacaatttatcttggatggctctctctaggtgtataaattatacaagtcacataactttttgaacactgtttccttatttctaaataagagtaacatttttatatgctttccagggcttctgttttgtgatgttatgcaataaagcattaacacagtgcctaccagtagaaaggcagaatatgtcttagctagtagtgctactaatatttcagaaaagtcagaggactgacttgatttagactaacacattcattttacagacaaggaaaatgaggcacagaggttttgtaatttgcttaaggtcacacaatttggcttagtagacctatgaagaaaacctagctttgggagacaaaatatgattcctaacatatgtttcttatttgcatataaactacaaaattcagagatttgacttttgcttctctaacataaaaatattggat

SEQ ID NO: 842162 - DNA, 642 bp, Homo sapiens
gataaatcaaatattaaaagggaaaactaaaaaacatctccaggcttaaaaataaacctctccctggaccagaaatggtacagaaatgcaaagtggtgattgcatgtgaagcaacaggcctgctgggcactggctccagcaacaggcagtggcggctgggaattggccctggcagatccttccaaagccaaaaggacctaagccacgctgactacttaatgccagggattgaggtagggcacacatgctcatgaaaacaggttgaaaatagctagcgctccttgcttcctgggaaagtcagtaagtggcagggtagaaatttgaacccagcagcctggttccagcacctgtgctttcaatcacaatgccaagcatagtgtttacagtctctgacccagaagttctacttcttgatataaccctgggttaactccctacgatgcaacagaaaattgtacaagaatgttcgctatggtattgtttgtacaggtgaaaagagaaaattaagtgcttttaagcaaaggacaaagaaactgagaaatatgtrtataaaggaatattacacagcaatcaaaacaattgatctcaccactagattctaacactgcatacatcacatggacaatctgagaaagacaatgt

SEQ ID NO: 842163 - DNA, 648 bp, Homo sapiens
ctcatcccagaaacctcagaatcattcttgattacattctcttcctcatctcgcataccactctcttcaccgaatttatccctaggcccattgtattcgaccattaaaaaacatttcagatccatctatgtctctatttctatgaaccatttaagccttgataatctcttacctgaatataaaaatatcctcctcactttttttgcccaatccctttcttggtatgctgactgccccaatcccagggtattattacaattagccagagaactgttctgtatgtaaatagagccatgtcatatccagtttaaaaccgtttaatacagcacttggaataatatggaatcttcttagcacagactattgggcaatgcatggttggctgctgctcacctcacctacctcttgttcttactaactctactcatccaccagtttctttcttttcctaaaacatgctcagttcttgtcttaaccctttgtagggctcctccctcttcttggaatctccctgacccccgtctttcttccttcagacctcagcatacctacygtcttctcaagaaggattccctaaacacccgatctagagttgctccaaccacccactcactatgctttctcacagcatcctattttttgcttcct

SEQ ID NO: 842164 - DNA, 650 bp, Homo sapiens
tatccacaattgtccatgtattgaatgtttagcttccaagacattgtagagtcttccagaaaccaggttctaacttcaaagttgaaagatgacaataacaataacaccaaagaaggtggggagtcctccactcagaagggtttgtttgggtgattttgttccaggactccccagagatggtgataaatctgacaggtctcaaaggtagcgtgggcaggtgacaaaggtcagctctaatctccttacggcacacttcaaattctaattaaatcaccttcattttggagatcccagaatgaaagaagaaaggtatttcttagaaatgttcagataatttcatagaaatgttcagataatcctaaattccttgcatgacctggctggttcttcctgtctttggcatgttcttgttcccagtctcctgggaagtccctgctgtttctacacagaatcagaggctgctgcacagatgaacaatgaactcctgcatctctgaaattatcccacagagatatatatatatatagatatctctatatrtctatataaatgtattatctctctctatattatctataatatatatagaaactatatccatagaaacctccaaaaatagtataaacaaggacagtatagggatcccatag

SEQ ID NO: 842165 - DNA, 631 bp, Homo sapiens
agagatgtgcacgttagattaactggtgtgtctaaattgtcccagtctgagtgtttacgtgtgtctctgtgcgtgtgtgtgtatgctttgtaatggaatgacgtcctgtccagggttggttcccaacttgctccctgaactgcagggataggctcagaccatctgcaccttgaactggaataatgggtaaataattatcttacttgtttttattaatctctcttaaatgtccatatagctcacatttatttcaatgtgtaatattagaagtgtttggggtctttatttagaaatttgtttttgtgtgaccagaaatatgccaccaaaacttagctattgtttatatcaattagcctacggtaaaataattttcactctacatcgttttgcttaaagtcgcaatttccaggaacatatcaatgatattaagtgaggacttactgtatatagagaggagagtggagagcatgaagctttggagtaaaggtagggaaattgggctttatcataatggatatttatattgatgcaggatggaatttaggttagagaacargagagggacaaaggagctagtaagaggtaacagccatggaccagggaggtgaggctggatggaaaagcaaatgaa

SEQ ID NO: 842166 - DNA, 437 bp, Homo sapiens
tacacacaaggccatgtagttttcttggctgaggcagcaacaatgtgacactccgtcttcagttcaatctccagcctctcaacatactatttcctattgggttwtacaatagaaaattacagcataaactgtaaagattaagctttctcatgtcaaatgagatctaaattatgccttttaatgggaatttcatctgaatttcatgccaaatccatatgacaagcaatgagcacggaccttgggaaaaattcaataggaaggtgaaatgaaggacaatatcaaagtagaaatgacaatgcagtaagtgtaaggcctttggcaatgtttgggggataaataatagattttagtcgccaagaaataggttatatttgttgggtactaaataggcattgttgtgagatgtggagaacaggaggtgagggaatcatgacaca

SEQ ID NO: 842167 - DNA, 603 bp, Homo sapiens
attaatagggcagggaccatgattgtgtcattcactattgatccccatcacctagtgtagtgtctggcacataatatgtactctataaatatttaatgaataaacagatgttgtctttgtaggatatcaccattctagctggcctgcaggagcagagaacatactttaggaataatggggaattagtttgggtatgtagggcaggacccatgaaaaccagggagaagaaagtcatcattttaaagcaccaacatactagaggtggattattcctttagagggtttgaaaggcatttaaggaacatgcctccatgactcgctcccttccttccttttttgtccactagatctccagtcttcctatgaaactgggttgaaaaatacataaaattaacttgacaatctacttgtgccatctgaatttgccttagtttcatctggaaagaggaggtattgatgggctttcagaatccaggacaagcgatcakcctgagagtcatgtccctcttgtcatggcttctgaaatctacagactgtctgtggctttcttttgcctcccctctcttcgctgagccaagctggacaagaactggcagctttacc

SEQ ID NO: 842168 - DNA, 594 bp, Homo sapiens
ggacagggctttaagagttagtgtgtgttttaccttacaccaccaccatggcagagatygagaccatcctggctaacatggtgaaaccctatctctactaaaaatacaaaaaattagctgggcgtgatggcaggcgcctgtagtcccagttactcgggaggctgaggcaggagaatggcgtgaacccaggaggcagagcttgcagtgagccttgattgcgccactgtactctggcctgggcaacagagtgagactccgtctcaaaaaaaaaaaaaagtcaaaaaacaatagatgttggcatggatgtggtgaaaagggaatgtttatacactgctggtgggaatgtacagtataacctctacggaaaacagtacggagatgtctcaaagaactaaaagaagatctaccatttgaaccagcaatcccactcctgtgtatctatccagaggaaaataagtcattctatcaaaaaaaaaaaaagaattaaaaaacacttgcacacatatgtttactgcagtacaagttacaattgcaaagatatggagccagcctaagttcccaacaaccaatgactacataaagaaaatgtggcat

SEQ ID NO: 842169 - DNA, 553 bp, Homo sapiens
agcctcaccttctgattttacaaataaggaaactgaggcccagaaaggagaagggacttagagccacacagtgagtcaattaaagtcatcaaaggggtatgcttagtaagtaccagggccagggctccttctagctccgctatatctcccaacctaactggcagactgagtcatgtgaagctctaggatggacaaggactaaacaagttcagtgcaaggcagggaaatctgatctcacaagaaggggttggattccttaaaatggggcttaagccaaaatccaaaaagggtctccaagaccattttaggcttggagtatcaactgagttttatgattggctaagtccagatggcacaaacaaccactatttcaaaatgggctgttcgtctactggttctgaccagttttctaaaaagtggatgccccgcaagtgctgcagctccttctgtggggcctgacttctcgctatcttgcaatttccctactctcccrgctcaatgttcaatagaacctcacttccaataagcccaggactatggctcttctgatgtt

SEQ ID NO: 842170 - DNA, 646 bp, Homo sapiens
  misc_feature 18, 34, 88: n = A,T,C or G
atgaataaaataaaaatncaactcactgctttancaatagactaggtcaaggagaagaaagaatttctaaacttgaagacagttcttntgaaataatccagccagacaaaaggagagaaaaataaataaaaatgagtgaagaaagcctatgtgccatattggtaatcataaagtaaccaaatatttaaatttggaaagatctaggagaagagatgggcaaaggcatagaaaatctatttaataagtaatagctgaaaacgtcccatgtcttacaagagatttagacacccagatacaggaagctcaaagattctcaaatagattcaaccccaaaatgtcttctgcaggcatattatagtcaaactgtcaaaagtcaaagacaaacatataattctgaaaatagcaagacaaaagtataaagtcacatataagggaattctcctcagactaatagcagatttctgagcagaaaacttacaggtcagaagagaataggatgatatgctcaaagtgctaaaaaaaacccctttcagacaagaatacgatacccagcaaagctatccttcaaaaatgaaggagaaacaaagtctytcccagacaagcaaaaacagagggaattcatcaccactagactagttctacagaa

SEQ ID NO: 842171 - DNA, 675 bp, Homo sapiens
gagattattcatctctatactaaaagaggaatgatgaagtcacgaaacgcggtgtaactgtgaaagaatggggttgtcaccatgccagtgcgtttgcagggatttccaaggtaacattgtgtgaaaaggacaagacgtagactagagtgatacatatcccatttttgtaaagccacgccaaaatcccctatgcgtgggtgtgtttctgtatatgtgtttaaatatgcaacatttgtatcttggtatgtgattatcagaaaggcacgggcagtgcattcaaggttgttagtgggccggggcgaggagggggccacagaggtgaggcagtggcaggagctggggagagaaaggactgtaaacaccagcctgtgggctctgacccaggtgtgtatttgtgtggaattgtgtgatatgatcaaatgagtaaagtcagcctgctggcagaggtgtttctgaggcctgctacccaggggtggtgtttcatgttcactgcgccttcctgatgtccgggtgctgagacacgcccatgcctgtgtttgctgtatgaatgagggtatggaggagtgagtctgttccacaagrggagaggaacttagggaaagagatgtgttctccttggaggccagaatgccacatgcgtgctggtttagtcggtggatcccagtcatgctggca

SEQ ID NO: 842172 - DNA, 627 bp, Homo sapiens
ttttcctttatacaggttgaggatccctaatctgaaaatctgaaatctgaaatgcttcaaaactccaaatctgctgagcgctgacatgacgctcaaaggaactgctcactggagcactttagattttggattttcagcttaggcatgctcagccgggtacatataatgcagaaatgtcaaaatctgaaaaagtccaaaattggaagcacttctaattctttgctgagactctttttcatttgtttcaagagtgtctgtaactatggaagcatttttatgatggctgttttaaaaatccttgtcagttaatttcactgtctgcatcatttggtgttgatgtctgttgtttttcttttctcattcaagttgagatttttccggttctcggtatgacaaatgattttcagttgcatcctggacactttggttattatgttatgacactctggatcttatttaaatctgttttagcagtccttctctgatacccaccactgggaagggccatgtgccgcagtactgcggcgtgggggtgaaagtccgagtgccygctctgtgtcccttggagtcctggtgagggctgggtgccgcatggctactgggttcccccagggctctgctgatgcc

SEQ ID NO: 842173 - DNA, 567 bp, Homo sapiens
atagactcttttctaagctcacagtggcttcctgttggcacagtcacccaaccgttttctttttcctgttacaacactatttacaaaactctgctcttgctaaactttctttcctyccccaccccttttattctggtaatccagaacaccagaagtctctattgagataaaatatagttggtcagccaacactgacaattgcgcgagctgcttaaatagtttcattagaatggagtttgatttagggagaggtaacattttctattttcttttccttctttggaaggatgtttcatacatatttgtgtggcatatatgatgaaagttttgttctacttcctcttctcaacccaatctccaactgttccctccctttcattaattccagtatcatctctcttaaatccttttctggtaaacttgccttatatttcagcctcttcataataaatttacattgattgatagaaatggtattacagtgatcatatatagatctgagaccagatatttctgaagtgcgtctgtctgtgtctgctgtttctgataattcttatgatattttct

SEQ ID NO: 842174 - DNA, 516 bp, Homo sapiens; identical to SEQ ID NO: 819068

SEQ ID NO: 842175 - DNA, 600 bp, Homo sapiens
gaaaactgtaaaatgaaattataagcaataggcaattttcaggttgtcaaatatccataatcattattatttctgaacttaatacaatgtgttaggattattgttgcttttctgcccgaaaatattatacatttccacttaaacatacattttatagttatgaaaacccactaaaaatgatgtagtcaaatttcaaaattaggggttttttaacttctaatatgtagtttccaatcccttagaaaaagctattataaggctatcataaggattttttttcctattatgaatgctgaaatatttaaacatctgaaagaaatacgcaaatgtttctatgtaaaaagaaacactgttctttggaaaacatgaattatataaactataattagagcttcaaaactgcaagtgtttaaactaagattacaaattgctgtgttaaaaagatactgagacgctcagggggaaagwaattaaatgccgactaactaaattaattctcccacatcccaagctgttctatctcccttatgcctttccctctgccatcactgatgatcacgtacgtatctgttagaacctgcttctataatgaattcaagt

SEQ ID NO: 842176 - DNA, 646 bp, Homo sapiens
gtaaattcgctgtgaagttaggagagaagtggaaggtcttatctgaccttagataagagaagagatgcctcctcttagagtttctgccaaataatttaaatttcaacttcactatggtaacttgccacccatggtttttgttttttgttttgttttgtttttttgttttttgtttttttttttttgagacagagtctcgctctgttgcccaggctggagtgcaatggcaagatctcggctcactgcaaccattgcctcccgggttcaagcaattctcgtgcctcagcctcctgagtagctgggattacaggtgcccacgaccacgcccagctaatttttgtatttttagtatagacggggtttcaccatgttcgccaggctgatctcgaactcctgacctcaggtgatccacctgcctcggcctcccaaagtgctaggattacaagcattagtcacagcacccagcccctatgttaattactttatatgatttcaaattatgttaatacatcrtctccttacttcatacatgatattcacacatatatgaatctatgaatatctatggatatatcttctaatgcaaaagtttgaatatacagttcttgatattctttcacatcaaacacatttgcaaaggttgata

SEQ ID NO: 842177 - DNA, 624 bp, Homo sapiens
ctgtttatgacctaataaggaaatggcagtttgaggttaacmcagtggtttttctaggcaagcacctaattaataattgtacaattccattccagcatgaggaaaccaggccattttggtgatgtggataaagcacttgggtgagattcaagggtcctaattttagtcctgtcatttgtaagctatgggaacaaagtacaagccaaccaaccaatctgccactctcccccctcttcatttgaaagggttgaattagagcagtgcttcactggccagctttaagatatttattatatttaaatatcacctatactatgctttactttgtattttcagagaatcattcacatttttttcttaaatctatttaaagatctttaatgcgattaaagatcacattaatacatcacatcactattgacactggacataattaactgatactagaaatttggcgaatacatttgataaaggcttaacaatattattagactctggctacatttctagcttgaagaagtctttcagaccaaagactttctctatttatattgtaaagagagatgattaagtatcaagctgctgctaaagccatatctctaccaaatggagcctttttcatga

SEQ ID NO: 842178 - DNA, 624 bp, Homo sapiens
ctgtttatgacctaataaggaaatggcagtttgaggttaacccagtggtttttctaggcaagcacctaattaataattgtacaattccattccagcaygaggaaaccaggccattttggtgatgtggataaagcacttgggtgagattcaagggtcctaattttagtcctgtcatttgtaagctatgggaacaaagtacaagccaaccaaccaatctgccactctcccccctcttcatttgaaagggttgaattagagcagtgcttcactggccagctttaagatatttattatatttaaatatcacctatactatgctttactttgtattttcagagaatcattcacatttttttcttaaatctatttaaagatctttaatgcgattaaagatcacattaatacatcacatcactattgacactggacataattaactgatactagaaatttggcgaatacatttgataaaggcttaacaatattattagactctggctacatttctagcttgaagaagtctttcagaccaaagactttctctatttatattgtaaagagagatgattaagtatcaagctgctgctaaagccatatctctaccaaatggagcctttttcatga

SEQ ID NO: 842179 - DNA, 622 bp, Homo sapiens
tggatgtttggggaaaatgaatgcaatgattctgtgttctatcaaattcttgtttagycacctattagttatgtgaagtgatcaaataacttttggagcctcaattccattttagataataaaaatgcctgcatagccatccccacagggctttctggggatcaaataagaaaacgcatatgaaagtacttggcaaactacaaagaaacacacatgtgtaaattatcattatctaagatacaatgtacccaatatccacaaaaagtaatctctactaatttactcacagacaagggctctttttgtaactttacttaagtttcttcaatatgatcttataccttaaactcagtatgtttaatattggatcgtccttactgaatatgagtttacatagcaagtatataaacttaacacattactgtgaaaatttagaaacgtcaccatttactttcaagcacaaatgagcataatgaagacgggcatctgaaatgcagaaagtaacaggactaacaaaaaaaaatttatttcttactttcaacgtttacatattttgaatgaataaattaggtttctaagggcacagtttatattgtcatataaatatttaatgataaaatca

SEQ ID NO: 842180 - DNA, 552 bp, Homo sapiens
tactaatgtatattctcaccaacagcaggcaagggttctcttttctccacatgcccattagcacttgttattatttgtcattttgataattgccattttaacatattgatgagatatcrctcatacctgttcaggttctttgcccattttaaaatcaggttattattattttttgctattgagttgtttgagttccttacatattttggatattattaacttactaaatttatggtgctatggtttaaatgtgttctacaaaagttcatgtattggaaactcaattcctgtgccctcatgaatgggttaatgccctcatgaatgggttaatggattaatgctaatatcacaggagtggggttgttattaaggcagtggctttgttgtaaaatcaagctctctgactcttttgttcttgcccactttccatgtggtgccctctgttcatgttatgaggcaataagaaggtcctcaccagatgtcagtgccgtgctcttgaacttctcagccttcagaagcatgagctaaaaacaaactccatttctctataaa

SEQ ID NO: 842181 - DNA, 553 bp, Homo sapiens
ttttatttctttttcctgcrtaattgctctggctaggactttcagtactgtgttgaacaggtgagagtggggacatctcttggcactgagttgtgctgcctttcaggaggggtgacgtgtataatgtggaactgttctttttacccctatcaatgtatctctttcacttttttcatgctaataatgtaagaatagaattggtgacaataaatgcctttgttctgcttgacaaatgagtgtatatgtggtagttgagattctgaaagcagtgacaatgttcaataaaagctagtagaatttagtagtgatatcacccgactgcctgacagggtgacttgctttgcctttgaaaacatgggagaactggctacagtgtctctgtcaatagatagaattactgaaacctcaagaaaataccagcccctcataccttccaaaagtgtggccagacatacttttcgaagtaatagatgcttttctcctcccatagtttattcttattaatctctagcaaagaatagccaattcttgtaacattttagatggcatggag

SEQ ID NO: 842182 - DNA, 640 bp, Homo sapiens
gctctctgctcaaaagtcttcccagagatgcctttcctgaccacccagctaaagtagtcccgtctatcactttttttagagacagagtcttgctcttcacccaagcaggagtgcagtggcgtgatcgcagctcactgcaaactctgcctcccaggttcaagtgatcctccctcctcagcctcactagtagctgagactacaggtgtgcattaccatgcctcctaatttttttttattttttgtagagacagggtttctccatgttgcccaggctggtctcaaactcctggcctcaagcaatccactcactttggtctcccaaagtgctgggattacaggtgtgagccataacccctggccttactctgtcactcttaatccactttccccattctattttcttcatagcacttactgctacctgaaactatgtttgcttaattttatttgtttctttattttccatctccccagtcaaacataatagaacataatctccaggagagcagggactttgttttgttcactgctatatccacagcttcagcaacagtaactggcatatayagtcagctctccatatccataggttccacatccatggattcaaccaattgcagaccaaaaatatttggaaaaa

SEQ ID NO: 842183 - DNA, 549 bp, Homo sapiens
tatatgttgcatatttgatatgaaatgtttggttttgtgaccatttcacgtttcagtayccaaaagtgttaagtcatttctaaaagcctcataacatttattaatttttcagacagggtctcactctgttgcccaggatggagttcagtggcacgatcatagcttactgcagcctcaacccccagggatcaaatgatcctcctgcctcagcctttcaagtagctgggactacaagaatatgccgccacatctggctaattttaaattttttttgtagaaatgaggtcttgctatgttttccaggctggattatagacgtgagccactgcacccagcctaaaagtcatatacttatttaaataaaagccactttcatacaaaagaagaggaaacatgaattgttagcctttgaaaatttagcataccatgaggtgcttcaaagttttacttcttgtcaacagatgctgtaccttttctgagttagtggctcagttttagctattggctacatataaaacatttcttaagtaagtactggaaattgaataa

SEQ ID NO: 842184 - DNA, 579 bp, Homo sapiens
aagagagcacaaacagcagaggcgatgtcaaccaaaattaaggctttagaggcagaaataatttgataaaggtttacagtaagccaatttgagkatcaacccaggaagatactccaacaaagttgagcaggttctgaagtctgttgcaagttaaaatgcttttataagaaagtttaggagaagggaaggggactcctcatattggagttgtccttttttgttggagagtacaataccgatgttacaatccttggctacagatgacaacatgcaggataaaatgttttacctgcaagacgataagtaaaacttcatgattcagaaacaaatcagcaaaacttcatgattcagaaacaaagcagtgtccttttcagtgtcagtaggttacgtattaatcagtatgacagcggtttgaggaactcaggagaagattagagggattcatggtaagattctttactgaaggacaggatgtaagccatgaatcataagaccttccccaggcagttaatttggaagcccatcaaatgcgatctgtgggttatcactaggaaagacacaaaaacaaatttcacccct

SEQ ID NO: 842185 - DNA, 547 bp, Homo sapiens
gcaaatattttctcccatttcatgggttttctgtttattccaatgattattattttgccatgtacaagctttttggtttaaataaatcccatttatatatttttgtttttgttgcatttgcttttgaggtcttagtcatgaattctttgcctaggccaatgtcttacagagtttttcctaggttatcttatagaatttttatggcttcaggtcttagatttaagactctgatccatcttgacttgatttttatatatagtgagaggtagggacccagttttctctacatgtggcttgccagttttcctagcaccatttattgaatagggtgtcttgtccctagtttatgtttttgtatgctttgtcaaagattatttagttgtaagtaactggctttatttctgggttctctattctgttccattggtctaggtgtctacttttataccagtaccatgttgttttggtagctatagccttgtagaataattttaattcctgtaatgcratacgtccagatttgttcattttgcataggattgctttg

SEQ ID NO: 842186 - DNA, 591 bp, Homo sapiens
tgtaattccttctagctagactgcggagcccttgagggcagggcccatgtcctatttgtcttccaggarcattctgatctgtcttctatttgaattttagaagactcctagtcaatggtgaatcagtgagtaaataatctttctgatttaaaaataagcatcattggcttaattttagccacattgaacaaaattataaattcattcactgactcacaccttcattctagactctaataaaatgcttgctgtctgtcttccaggtcatttattaggctcttttagttcaagataagctaatacagtccctgtttatatgaaaaatgttgtcaaatgaaaaagaaagttatttaaaaaattgtaacttgtaagttccctgagattgatatggacaatgacattagaacacagagaaggaaatagctggcacttcctgtcacagctagggaagactgtacagaagaaatgaatggcatctgtaagttgagggatgagtgagattttgctagagaaatatcaggggtagattccagaaagagggtttggcagacctgaaggcacagaatgtgaatgggcacgtgaactttgaac

SEQ ID NO: 842187 - DNA, 577 bp, Homo sapiens
aagaaacagctcctggattcattgattttttgaagggatttttgtgtctctatctccttcacttctgctctgctattagttgtttcttgtcttctgcaagcttttgaatttgtttgttcttgsttctctacttcttttaattgtgatgttagggtgtcaattttagatctttcccactttctaatgtgggcatttagggaagcactggttttaaatattgtcatagcaaacaacttaagtgtaagtattacagagttcatttaattgtaatatagatttatgcattcataaataaaccatatatattgtatttttttaaaagtctttatatgtttttttggccactatcaaaaagcaaacagtttaattgcaaaatgaataatagaaaaagcatgtctacttatgttaaagtgtctatatacatatacaatttttaatatttgctttctctgagtaagcagaatgtagaagaaatgcctttacttattttctaactcagtgattccaaaaaccagtcctcaaagctccattagttgcattaattaataagaaatgtctatgttgctgaaatgtctat

SEQ ID NO: 842188 - DNA, 582 bp, Homo sapiens
tatgagatttgggtggggacacagaaccaaaccctatcagtacctaactcagttaaggtagcactaattacctcccaaattttatatcttcagtgtggaatgttaaatagacctttcctgaaaagaaaaatattaccttgtctaattggattactgtaactatacattcagccatatacagaaaaatattgaaattctgttaagctttctaaaccttatctatgttaagtgacctcaaacttctacacttcaaagtgctgacttccattctttggaatctgtctcccaggccatcttcaaactttgtacttgaataaactctcttcaaaattcaaaataaactctcttcaagtcaaactagattctgacgcttatttcaagttgacattttggcaaccatgaaaggacctaaagcaagcctctgttgattccccactgcattgcccacagttaggatcctggtaccagcatgaacagttttcattcacytggcttcactggagccagcagagggtctccggtgaagaccctctcaggttttgaatctccctgatttgggttgagaatcagactttactcaag

SEQ ID NO: 842189 - DNA, 566 bp, Homo sapiens
tcccccagcgccaatcccaccagkggatccaagggaatcccttgtctgagcccagcagaagcatcacaagacccccaagcatcgctgatcctgagccctctgacctaccaggtgaccgagtagccaccaaagccctggggatgcagcccagtggctctgtagccagcctgggagagctggacccaggggccttcctggacaaggaggcagaatgtaaggaggagctgctgaaagatgacagttctgaacatggcagcgcaccgcccaacagcaaagagaagatgctcaggagacattgccacttcactggtgacgcgggcattgaagtgcgtatgtcagggccaccatgatcatagccttaaagagttcaacatgctcatcgctgatgcactggatgggcccctggacttctgcgacagctgccatgtgcagcctcctggtgatgaggaggaaggcctcttccagccctccaaggagcaggcttgacagcctgggcacctgcacctgccacagctacctgcatgcctgctgctaaacatcatcaatgagcagtactctcccaactc

SEQ ID NO: 842190 - DNA, 658 bp, Homo sapiens
cagtgtcctaccctaaaggcacaagaagatggaaatgcaacctgtggagctggccttgattctcaagtcgcagtctggcccccgctacaggaggctaccccgctcagggagagatttaataaggaattggttccggggccgggagatgtgattgagactggttttccagctgaatgagatggaaggggttagtggagggtttgatgctacagccagttgagagatttgcaaatgcgaacacattcctgtgtgaggcacattatcctttgtcagttattgtgaatatgtgtattttaagcagtaaggtgctactggtcagacttttctaggcagtcttggtgatgcatttcctgtgctgagattgttcggaagagtgactataaccactgtgaggagcccaaataaaaattgatcccccctccgccccaaaaaaagctgttagcagagctggttcccttcaggagcttctaggggagaatctgtgtcctttcctgctccagtgtctagaggctaaccgcattctttggctcatgttctccttccatcttyaaagccaggaagagatggtcaagtctttctgacatcatataactttgacaataactcttctgtctccctcgtccacaattaaggatccttgtgactacattaggccaag

SEQ ID NO: 842191 - DNA, 516 bp, Homo sapiens
atgattctatcacccagagacccctcaackactcaccagactatattccaattgttatgggacccgattcctgctcacagcctctttcaggaatggagttagaagtgcagtttccagtgaccaggccacagtctcaaattggctccacctctagtgaaacccgaccaagaagatggcttgaaaaagacctaagggtgagaattttagggtctctcagtgggttatctcaggcagccattttcccagcaccaggccagctctgcctgtaccatttttctctgcttagacaggctgacagctctgagagctggacccccaagcctgtgacacgaatgcaaatgtgctagtgtcctgtcaccaggccagagttgtgagctctggcaagcgtcacaatgaatgacagtgttgcctagcaacaagtccctggggcttggtggagaaggaggccaccgtagatgtgtactggaagtacactttcacctgtcttctctgtgggatccacaggatgttctggtt

SEQ ID NO: 842192 - DNA, 524 bp, Homo sapiens
agaatcctaggtaactacaattttcaactcttcctttgaattcataaaaagtataaattttgaattatttggatacaattagggcaacaacatttcaaagaaaccatattataattattaaaaagagatgtgatgagaaagttttaaggaataaaaatttaagtaatactagagaaagttttaaattatgctactgatgcattgcttctttccttacacaaaagggtaaggctataatctagcctttaatagaaaggtcttacatttttacatatggtaacaatataaatattgtaaatacagtataaaacattgacagataaaataaaaactggaaataaattgtactattagtcaaataaaagttgggaaaactggaagaaaatgctaatagtaatattgtgcctagagtcaattaaacatacaagccaaatattttaataattaattatataattgatacataacatatacatttgrgcatgctgttttacaacttctcaaactgaaattacagaaaaatg

SEQ ID NO: 842193 - DNA, 598 bp, Homo sapiens
cttttgacactttgtggagtaaaatttaaatattaaatttgaactcaattgaatctggactcaaacaatggtcaccaagtcctggaacaggttgtgtgagccccttgaggctttcatccagcgctgtttcggataaatctctatttcaatttattcctatatgttagttactgaaaaacaacagacaatcacaaaaaacaagttgacctttttcttttccttgagcccagaaatgaagggccctcctgactggacgtcatgccagataactcattacaaaaagagctagggttccagactgtgccaaaacttcatgagatctcttctcatctgttcacggacaagtggccaactctggagcccagtctgttgcttcgcagtctggtggtgaatcctccatagtctgatgagtgtaaatatatatatctcttttcccttctctccgtcccattgcaacttgcttattatatcatttgcttattatatctgcattgccatttatgtgggatacagtttgtttacccttaaargtattgtgtgtgtgtgtgtgtgtgtgtgtgtgtgtgtgtgtgtgcgtttccttctctccttgagcatt

SEQ ID NO: 842194 - DNA, 594 bp, Homo sapiens
cctgtctggatcctgcctagagagggcatggtggcgtatccctgcaccagccaccagatgatgtaactctrccttctgtctagtccctgcttatagggtgaattgtgacttatcgctaggcgcagcatttagctaatatgactcttcccttttttcaggttctgcccacggggaagattgtgacatatcgatgggtaaaacaccaaaatgattttactcttttgtctttgctctgtccttagaaggcattgggacatattgctgaaccagcaccaaggtaatgtaagggtcctacctgaaccctgcccacagggagcatagtgacatatctctgagcccatgaactatttgatgtggctctattctcttacctggactttgcccatgagaaagactgtgacgtatttcttggtccagtgtttaggtaatgtgattctcctctccagcctgagacatgcccacagaagtaagagtgacatctctgggcctagcccacaggtgatgtgactcttatcccttctttctgccccggggagtcattgtgatgtatctctgagaccattattagaatgatgtgactctcctgttcttact

SEQ ID NO: 842195 - DNA, 670 bp, Homo sapiens
aggcgacatagctctcctgtctggatcctgcctagagagggcatggtggcgtatccctgcaccagccaccagatgatgtaactctaycttctgtctagtccctgcttatagggtgaattgtgacttatcgctaggcgcagcatttagctaatatgactcttcccttttttcaggttctgcccacggggaagattgtgacatatcgatgggtaaaacaccaaaatgattttactcttttgtctttgctctgtccttagaaggcattgggacatattgctgaaccagcaccaaggtaatgtaagggtcctacctgaaccctgcccacagggagcatagtgacatatctctgagcccatgaactatttgatgtggctctattctcttacctggactttgcccatgagaaagactgtgacgtatttcttggtccagtgtttaggtaatgtgattctcctctccagcctgagacatgcccacagaagtaagagtgacatctctgggcctagcccacaggtgatgtgactcttatcccttctttctgccccggggagtcattgtgatgtatctctgagaccattattagaatgatgtgactctcctgttcttactgcgacctgtccacagtggggatgatgatgtatcacttaggccagcacatatgtggtgagat

SEQ ID NO: 842196 - DNA, 670 bp, Homo sapiens
aggcgacatagctctcctgtctggatcctgcctagagagggcatggtggcgtatccctgcaccagccaccagatgatgtaactctaccttctgtctagtccctgcttatagggtgaattktgacttatcgctaggcgcagcatttagctaatatgactcttcccttttttcaggttctgcccacggggaagattgtgacatatcgatgggtaaaacaccaaaatgattttactcttttgtctttgctctgtccttagaaggcattgggacatattgctgaaccagcaccaaggtaatgtaagggtcctacctgaaccctgcccacagggagcatagtgacatatctctgagcccatgaactatttgatgtggctctattctcttacctggactttgcccatgagaaagactgtgacgtatttcttggtccagtgtttaggtaatgtgattctcctctccagcctgagacatgcccacagaagtaagagtgacatctctgggcctagcccacaggtgatgtgactcttatcccttctttctgccccggggagtcattgtgatgtatctctgagaccattattagaatgatgtgactctcctgttcttactgcgacctgtccacagtggggatgatgatgtatcacttaggccagcacatatgtggtgagat

SEQ ID NO: 842197 - DNA, 643 bp, Homo sapiens
cctgtctggatcctgcctagagagggcatggtggcgtatccctgcaccagccaccagatgatgtaactctaccttctgtctagtccctgcttatagggtgaattgtgacttatcgctaggcgcagcatttagctaatatgactcttcccttttttcaggttctgcccacggggaagattgtgacatatcgatgggtaaaacaccaaaatgattttactcttttgtctttgctctgtccttagaaggcattgggacatattgctgaaccagcaccaaggtaatgtaagggtcctacctgaaccctgcccacagggagcatagtgacatatctctgagcccatgaactatttgatgtggctctattctcttacctggactttgcccatgagaaagactgtgacgtatttcttggtccagtgtttaggtaatgtgattctcctctccagcctgagacatgcccacagaagtaagagtgacatctctgggcctagcccacaggtgatgtgactcttatcccttctttctgccccggggagtcattgtgatgtatmtctgagaccattattagaatgatgtgactctcctgttcttactgcgacctgtccacagtggggatgatgatgtatcacttaggccagcacat

SEQ ID NO: 842198 - DNA, 377 bp, Homo sapiens
gactccagataagaggatctttacttggctgtaaactgggttcagaaataagtcactatccccactgtgactggatgttcacawgtgatagttacaattccaactgtgggcggcattcaggtatgaggtttagacctccctaatcacctctgttcctgtgtaggaatgacaattctcatgattggtgggtgtgcacacagagaacacaatctcacctgtgttctgggccctgtgatgacactgtaccatctgagtgctttacaggatatgcaagagtgcttattttctctgaccttcatagtaagagaagacccataattttgcacattttgtaaagcctggatatgagacaaagtatctctcctattggttggttt

SEQ ID NO: 842199 - DNA, 377 bp, Homo sapiens
gactccagataagaggatctttacttggctgtaaactgggttcagaaataagtcactatccccactgtgactggatgttcacatrtgatagttacaattccaactgtgggcggcattcaggtatgaggtttagacctccctaatcacctctgttcctgtgtaggaatgacaattctcatgattggtgggtgtgcacacagagaacacaatctcacctgtgttctgggccctgtgatgacactgtaccatctgagtgctttacaggatatgcaagagtgcttattttctctgaccttcatagtaagagaagacccataattttgcacattttgtaaagcctggatatgagacaaagtatctctcctattggttggttt

SEQ ID NO: 842200 - DNA, 377 bp, Homo sapiens
gactccagataagaggatctttacttggctgtaaactgggttcagaaataagtcactatccccactgtgactggatgttcacatgtgatagttacaattccaactgtggrcggcattcaggtatgaggtttagacctccctaatcacctctgttcctgtgtaggaatgacaattctcatgattggtgggtgtgcacacagagaacacaatctcacctgtgttctgggccctgtgatgacactgtaccatctgagtgctttacaggatatgcaagagtgcttattttctctgaccttcatagtaagagaagacccataattttgcacattttgtaaagcctggatatgagacaaagtatctctcctattggttggttt

SEQ ID NO: 842201 - DNA, 540 bp, Homo sapiens
gtgcctacatagggtaataccctcctcaatgctcagccmagacctgtcctccaggtccacctctgtactcactctctgtggcaaagagtcggcatagcataagaactcagcaatgctttggacactgggaagtccacaccgctctgtccctccctccaggtctatgcaccccggatcccggtatatgctgagattatggttctgaagcccaccgacaaataggctgagagcagttaacggactacagctcccagcatattaggtggggcatgtacaactttgccccttcttccagggctatgccttaccccggagactggcgcatgctgggattgtagtcctgtagccatttgaccaaagggctgggagtgtttatgagaatacaactcccagcaatcctagggaggagcacacagccccgcctcttcccccagtgatacgcattgtccctgagacaggtgcatgctaagattgtagtcctgaagctctgcgaccaaagggctgggagtgtttatgagcatatatctcccagcaagccta

SEQ ID NO: 842202 - DNA, 504 bp, Homo sapiens
actctaaccatatgctaataattcaaaatctgttctttatgggtgtccagttatggttgaatatttcagttatctagaaagagtcttcttcagttgcawgatttgtttattcagtatttcacaggttaatgtttatccaattttgttttgtaatattttatattcctgtattttcctgttaggataggctgtcttacatcatttaagtgtgtttttagtttctgcttctatgttataattttttatgactatatttaactgtgtacactttaaaagagtgtagaaaaaaagtcaaatatgaatcaaccatatgtgtattgccaacataattctctgttcgtttgactgtataaacattactcatgctttatttatgacttctgtatttatttaattagtgggtggtcaattatttttttaatcctctctgggtgagtagttgtggaaattgccctaatttccacatctatgtattaatgaatctatattacgtttgcgtgagga

SEQ ID NO: 842203 - DNA, 504 bp, Homo sapiens
actctaaccatatgctaataattcaaaatctgttctttatgggtgtccagttatggttgaatatttcagttatctagaaagagtcttcttcagttgcaagatttgtttattcagtatttcacaggttaatgtttatccaattttgttttgtaatattttatattcctgtattttcctgttaggataggctgtcttacatcatttaagtgtgtttttagtttctgcttctatgttataattttttatgactatatttaactgtgtacactttaaaagagtgtagaaaaaaagtcaaatatgaatcaaccatatgtgtattgccaacataattctctgttcgtttgactgtataaacattactcatgctttatttatgacttctgtatttatttaattagtkggtggtcaattatttttttaatcctctctgggtgagtagttgtggaaattgccctaatttccacatctatgtattaatgaatctatattacgtttgcgtgagga

SEQ ID NO: 842204 - DNA, 664 bp, Homo sapiens
gaatcaaccatatgtgtattgccaacataattctctgttcgtttgactgtataaacattactcatgctttatttatgacttctgtatttatttaattagtgggtggtcaattatttttttaatcctctctgggtgagtagttgtggaaattgccctaatttccacatctatgtattaatgaatctatattacgtttgcgtgaggaaaacacctctgtgatgcgggggtaatttttttttttttgaccacagaagtttttattgccctcctgctccgcaaagggaccttgcttctgctggtttagcacctcaagacgtctgtgatgttggtctcagacaccactttgccatccactatcctgtgggtgttggtcttttggatgctttacaggtatttgctgctgtccagaataccaccaagattgaagtcctccccatcttctagcaggcggcagtaggtggcaatctctgtgaaatgggacacagagatccaggagccccagaccccacgcctcatagaagctcgccgcgctgctgacctgctgagcactttagctgggcgactggacagatcccagggacaggtagtagttgatggagaaggtgcggagcaagtggtgaagctcgctgtgyacggggaggaaagcgagaggacaggactcagg

SEQ ID NO: 842205 - DNA, 562 bp, Homo sapiens
agaccagttttggtggcatattcttgcaatccatacattttgggagattgaggtaggagaatcacttgaygtcagaagttcaagatgagcctggacaacatagtgtgaccccgtctgtatgaaaaattaaaacattagccaggcatggtggcagcttcttgtagtctcagctaattgggaaactaaggttagaagactgtttgaagttacagtgagctaggattgcaccactgcacaccagtctgggtgttagagcaagatcctgtctctaaaataattaatacataaagataaaataaaatagctagagaaggagcttttgaatattctcaccacaaaaataacaaatgcatgaggcaacaaatatagaagtactgatttttattgttatacaacacatatatataattgtttccccaaaatatgcacaattacatgtgtcaattttaaaaaatgaatgaagactataatgtaaaacctatagctgtaaaattcctagcacaatacagaagggtgaagcttcattacaactggtcgtggcaataatttgggggacgtagca

SEQ ID NO: 842206 - DNA, 457 bp, Homo sapiens
gtgaagcttcattacaactggtcgtggcaataatttgggggacgtarcatcaacggatgagacaacaaaagcaagggaatacacatggtactgaatcagtgtatgaaaaatatcccaaacagacaaagcagaacatggaatagatatatgcacattgtagtattactcacaaacatgttacctggaagcaaatgtacccttaaggatgagtagattcagcaaacagggcacgtacaatcactgggatagcattcagccttaaaaataaggaaatcttgaaaagtactacaataaggacaaatcttcaaaacattctgttaagtaaaataagacagtcaaaaaggaaagctgtataattacactcatgtaaaatatttagtcaaactcaaagaaaccaagtgtcgtagtctcagcagtgcaccaagatgtaacagtctctcgtagtctgagataacat

SEQ ID NO: 842207 - DNA, 655 bp, Homo sapiens
ttgtttgcagatgacctgatcctacatctagaaaacctcattgtctcaggcccaaagcttcttaaggtgataagcaacagtagcaaaatctcaggatataaaatcaatgtgcaaaagtagctagcattcccatrcacaaacaacaggcaagcagggagacaaatcatgaatgaactttcattcacatttgctacaaagagaaaaaaatacctaggaatacagctaagaaagaaagtgaaggacctcttcaaggagaaccacaaacaactgctcagagaaatcagagtggacacaaaacagatggagaaatattccatgctcatggagaggaagaatcagtatcatgaatatgggcatatggccctaagtaattcatagattcaatgctattcccattgaactactgacattcttcagagaattagaaaaataaaaacttttaaagttcatatggaaccaaaaaagagcccaaatagccaagccaaccttaagaaaaaaaaaaaaaagctggaagtgtcactctacctaacttcaaactatactagaagagtacagtaacaaaaacagcatggtactggtatagaaacagacacatagacaaatgaaacaaagtagagaacctagaaataaagccaaaaacctacaacaacctgat

SEQ ID NO: 842208 - DNA, 398 bp, Homo sapiens
tggcccagaaatcatggctgggtgctttccatttcaccaatcactgtttgttcagataaactgatgaaccttttaacatagactcccgttaatttttaacaagagagactggggaccccacgggccgcagctcctcccacgcaaacacccactcgcggtttttccctgatgacccatctggcctccctgaacaatctgggaaatactcatggctgtgggcgcagagcagggcgctgcccagggacaggaccggatggccaggccggatgtgggggycctcgctgctggcccagcggccatcttgcagccacaggggactgaaggccaagctgcgggagactcggagctaaccgtggggaggccggtcctgccggtttcacagtctgctctcccctctc

SEQ ID NO: 842209 - DNA, 499 bp, Homo sapiens
ctgctctcccctctcgggatggcgaaccccgtatactcaccatttcccagcttccaggatgtcctggcaccttaactatgctccccaaggacctacagatcrcagggcaacaggggctgtgacagagtacccagggctctcaaggtgcaggaggcgaaagaggagacagatcccaagctcctggccagcaccagcgagagacacagatcccgccaaatgcaggaagccacgccctcctttcctctcctctgccaccgcgcgcctgattgggcggttcccacatcagtgtcaatgactggataaaactccaggacgcacccacccgagcctgactcctgcccttacccccactccccctcagccttagtacatttttgttagtttgtttttctttaagttctggaatacatgtgcagaaagtgcaggtttgttacatagttttacatgtgccatggtggtttgctgcacctatcaacctgccatctagggtttaagcccc

SEQ ID NO: 842210 - DNA, 615 bp, Homo sapiens
tcatctaaatcccaatggtatttttttttgcagaatttttgtgtataattctaaaagttgtttaggaactgtgactaggcaaacaccctttaaaaaggacaaagagttattacattttctgatttaaaatcatgatacaaagctacaaaaataaaaacaatatggtattgccacaaaaacggatacatagatgatgaaacagaatagacatcctggaaataaaccctcgcatacgtgataaaataatcttccatatgctttccatgaccatgcaatagaaaaataagaatctctttaacaaagaattttcaaaattgaatgtttacagagcaaaaataaagttggatgcttcttttgtattatacataaaaagaaaagttttttaatggatttaatgcttaaacataaaaactaataaaattcttagaagtaaacataggggaaaagtttatgacataagtcttaaaactttgcttaagtatgacatcaaattcataagaaacaaggaaaagaacaaaaaagaaaggaactacattaaccttcaagtattctacacatcaaggaaaacatttagtggcatacaaatgtcwcctaataagtgggtgaaacctgggt

SEQ ID NO: 842211 - DNA, 541 bp, Homo sapiens
gaatctctggaacccgggaggcaagagtttcagtgagcggagatcacaccactgtgcttcagcctggtgacagagaaagactccacctcatataaagaaataaactcaaaataactaatttttgttagttattaaaatggaattttaaactttatttttcagatattttgctatcagcatacagaaagctgctactctgttgattttctgcaatgttacagaatttgtttagtagttctattaggttttggtgtagtgtttagagtttttcacatataagattattttgtccacaatcagagaccatttgacttcgtcctttcctattagtatgagtttatttctacctcttgcataatgtccttggctaggacttccagtactatgttgaataagaggtctgaaagtggggatgattagtcttgttccggatctcagagagaaagctttcagcttttccttattcagtataatgttagcattgctttgtcataaatggcctttattgtgttgaggaacwtaacttctattcctaatttgt

SEQ ID NO: 842212 - DNA, 520 bp, Homo sapiens
acttctaaaccatatacttaaaatgttagaaatgaaaatggcatgtttttaactacaattagaaatttaggactacctaaaaggcacggttacaaaatcttcaaacatccccttcaaataacaaagggttcttctcacataattatttagatttaaactataagttgattgtaaatttaagattatttccctgactactcaccaagatagaataaaataatcactagaaaccaagaaaagagggaaatttatagcactaatgtccacatcaaaaagctagaaagggccggtcatggagctcatgcctgtaattccagcactttgggaggctggggtaggcagatcacttgagaccaggtgttcaggaccagcctggccaacagcaaaaccatatctctacaaaaaaatacaaaaattagctargtgtggtgattcacatctgtaatcccagctactcaggaggctgagacaacagaagtgacttaaaaccgagaagtggaggttgcagtgagccgagatt

SEQ ID NO: 842213 - DNA, 520 bp, Homo sapiens
acttctaaaccatatacttaaaatgttagaaatgaaaatggcatgtttttaactacaattagaaatttaggactacctaaaaggcacggttacaaaatcttcaaacatccccttcaaataacaaagggttcttctcacataattatttagatttaaactataagttgattgtaaatttaagattatttccctgactactcaccaagatagaataaaataatcactagaaaccaagaaaagagggaaatttatagcactaatgtccacatcaaaaagctagaaagggccggtcatggagctcatgcctgtaattccagcactttgggaggctggggtaggcagatcacttgagaccaggtgttcaggaccagcctggccaacagcaaaaccatatctctacaaaaaaatacaaaaattagctaagtgtggtgattcacatctgtaatcccagctactcaggaggctgagacarcagaagtgacttaaaaccgagaagtggaggttgcagtgagccgagatt

SEQ ID NO: 842214 - DNA, 633 bp, Homo sapiens
ctctttgtaataattataatgtgttttctctgaaatgttgttgccctaactgtatccaaataattcaaaattcatacttttcatagattcacaggaagagttaaaaattgtagttacctgggattctttttcatttggacactatgtttattcaggattttatggattaaagtttctcttaattatgttttataattttatgtttctgtattttttagagtaggctgtctcacatcagttaattgtgtttttactttctacctatttattatgattttgaatttcattattcaaataagaatttgggggttaatgtttattttaaatttgttttgcaattttacatttctgtgtttcatgttttagggtagggcaccttatattagtttattgttttaagttttaatttgtgtaatataatattgtataacaatattcaactctgtatgcattaagacagtgtggggcagaagtcaaatatgaaccatccctatgtcttttgttaatataatgatttmactgtttgtttgcctgtataaatattgcccctattttgtttatgacttttatattttcttcttatttgatggccaataatttattctgtctaagtgagtaatcatggaaattgtc

SEQ ID NO: 842215 - DNA, 633 bp, Homo sapiens
ctctttgtaataattataatgtgttttctctgaaatgttgttgccctaactgtatccaaataattcaaaattcatacttttcatagattcacaggaagagttaaaaattgtagttacctgggattctttttcatttggacactatgtttattcaggattttatggattaaagtttctcttaattatgttttataattttatgtttctgtattttttagagtaggctgtctcacatcagttaattgtgtttttactttctacctatttattatgattttgaatttcattattcaaataagaatttgggggttaatgtttattttaaatttgttttgcaattttacatttctgtgtttcatgttttagggtagggcaccttatattagtttattgttttaagttttaatttgtgtaatataatattgtataacaatattcaactctgtatgcattaagacagtgtggggcagaagtcaaatatgaaccatccctatgtcttttgttaatataatgatttaactgtttgtttgcctgtataaatattgcccctattttgtttatgacttktatattttcttcttatttgatggccaataatttattctgtctaagtgagtaatcatggaaattgtc

SEQ ID NO: 842216 - DNA, 535 bp, Homo sapiens
tattattccttttgagtacccctatttatgagagagaaaaygaaggttttctttcccgtagcctcactttatatcacatggggtggttgggggagggcatagctcattttagttccaggtgcccatagaggtgggagtcacaacccctgtcctgtcctcttgaaacagctgggaagatccccaggcctggaagaacccagggaacctggaggatccttcatcgcatgctgtcagctcctggtcatgtagctgggggagtggatgcctctgcctcatggcaaagctgcctcttctatttcttcccgttttgtcacttctctggtttcctcttctctaacctcacctccatgatctccaccttagaagcctgtgtgtgtgtgtgtgtgtggtgtgtttgtgtgttcatggctgcacacctatgtgagaataaggaagggtagaaagcccaggtagaaagtagaccacagggttttccaggacttaggagcactcatttccaaagcaaacctgatgggtggggtgcatgcaaggcctt

SEQ ID NO: 842217 - DNA, 632 bp, Homo sapiens
gaatgagataattacccctagtcaagcagtggaagtatggatggctttgggatgggtgaagacaaaagaatctcagcagagggtgcagataaaaaaaggcagaaacacaggaggcttatgcaggaagaggaatgagtttgctggactggggagagtgacagtaaaaagcagaggataataggcatctctggtcatctagggactatagggtggattagttgggggttacagaatcagtgaggtactttttaacagtaggatgggtaaataagagctataatttggaataattatgtagcaatggtggttaggagcaatagacactcaaagtattacataaatattttttttcttattctcccacacaagcgttttgcctttcctcttaaactgagaacggagtggtttgctatgatgtttttaaattctcacagacaagcattattctttgctgccttttagtaaaggttagttttaaccaaattaaagaagattgaatggattttcttgmtcataatggttgagtgcaatatctcataccttctattagttttcagtataactgaaataacagagtgtcaatactccatggaggggtgctccgcttgctaaggctccctcctctgggctag

SEQ ID NO: 842218 - DNA, 632 bp, Homo sapiens
gaatgagataattacccctagtcaagcagtggaagtatggatggctttgggatgggtgaagacaaaagaatctcagcagagggtgcagataaaaaaaggcagaaacacaggaggcttatgcaggaagaggaatgagtttgctggactggggagagtgacagtaaaaagcagaggataataggcatctctggtcatctagggactatagggtggattagttgggggttacagaatcagtgaggtactttttaacagtaggatgggtaaataagagctataatttggaataattatgtagcaatggtggttaggagcaatagacactcaaagtattacataaatattttttttcttattctcccacacaagcgttttgcctttcctcttaaactgagaacggagtggtttgctatgatgtttttaaattctcacagacaagcattattctttgctgccttttagtaaaggttagttttaaccaaattaaagaagattgaatggattttcttgatcataatggttgagtgcaatatctcataccttctaytagttttcagtataactgaaataacagagtgtcaatactccatggaggggtgctccgcttgctaaggctccctcctctgggctag

SEQ ID NO: 842219 - DNA, 581 bp, Homo sapiens
gtgcaatatctcataccttctattagttttcagtataactgaaataacagagtgtcaatactccatggaggggtgctccgcttgctaaggctccctcctctgggctaggccttctacaccatggctgtcctgctgtggctggagctggaatttggattgacctctgtgtgtcttcctagcacacaataggtgtccaattagcatgggcagaatcaagctcctccctctcaccatttatttctccatttgtcccttgttgggaatggagagtcctgccactgagttcagcccagggttgaagttcaaatctcagctgatacttggtggatgttgacttttttgagaagaacttgggagaataaaacattataaaggcgctggccaggcacggtgtctcatgcctgtattcctggcatattgattggctgaggagatagaattgcttgaggscaggaatttgataccagccttgtcaacatagtgagaccccatttatacaaaaaacttgaagaattgaaaacatttagccaggtgtgatagttccaaactgttgtctcagctatgctggatattgaggcaga

SEQ ID NO: 842220 - DNA, 633 bp, Homo sapiens
caccactggcctggatcccatgcctgccatgcaagccaggcgtggagtggkgaggggtgagagctctctctctctctctctctctctctctcggacatggggcacagacgatgcagggcacatggggacccacggctgccactgctcctcctgcagccgcttctgccaccaccggctacacttccccatttccccactacagctggtgtgttggccactccgcacagcccactgctaccatcaataatgagggtagaggccaagtgtggtggctcatgcctgtaatcccagcactttgggaggctgaggtgggcggactcctgaggtcaggagttcgagaacagcctggcctacatggctaaaccctgtctttactaaaaataaaaaaattagccaggcgtggtggcatgtgcctgtaatgtcagctactcgggaggctgaggcaggagaattgctggaacctaagaggcggaggctgcagtgagccaagactccagtctgggcgacagagcgagactctcaaaataaataaataaataaataaaaataaaataataaaataatgagagtagatagggtcctgaaatatctcaaagattggaatcattgtagtttatcttttcaccaaatgtt

SEQ ID NO: 842221 - DNA, 564 bp, Homo sapiens
tcttttaaaatatttgatcgcttgccactttttttttcttttcttcaatgaaagatagatatatacaacaaattgtgactgttaactttttttccaaataaatcygtgtatatttctcagaaagatacatcccagattattgcaaaaaaattgaattcataatgcaagaattcctatatatttctttcatccaaaaattgtgccggctggctgttattattgctaataaatttactaataaatttgatgcctgcccatcaaatctgccttcacagaggtaatagtgttgtgactgatgttagcatggcctgttttattcctcaggagagtatataaatcatccagagcaactttcctattttgaaaaagagaggcccacttgcaggcaaaagtctctgggtccaagcattgtgtgcatgtgtattatttactcagaatattaaaacagaactaatttcacagatgaggtccaagcttttgaggatgtctctgaatgttttgtaatattctggccgctgtctgtatctcctccccttgaatctgtactaatctttgtgactggtt

SEQ ID NO: 842222 - DNA, 622 bp, Homo sapiens
ggaagacagttttgagggggtcactgtatattcctcaaaatgtcccagtagggatcacacctcagtttgcccgtaaacctttaaaatayactttatattcaatttttctccttttactctcatatgtcctacatacctatttccttgaactactttcaattaaagaaactgaatacatgtctttgttttagcttctcattttggggtaacccaagctaagctactgtggccctgactttgtaggctaactgtaaaacttgcttttagctctgttcatcaggctacacttagtataacattatgaaaaagaattttccatcttattccctccaagcaatctactatcgatttgtaattttttttttttttttggaattcagcctaaggcctgttttactcttattatccattctccaaaagacccaattccttcctctaaacttttaattgaagtcttattggtcactgcctataggtctacagtgcctcctgaatttagcctcatttatatatgtggccagggaatacttcataggcaaccacaaactgcaggttagtcagcaaattttcacagacaagcatccaagtgttagggtgtaacccactcccagccccagttcag

SEQ ID NO: 842223 - DNA, 499 bp, Homo sapiens
aacaacagctcccactttttgggtactcagtatttgggccggatctcattaaaacctcacaggtggcygggtgcagtggctcacgcctgtaatcccagcactttgggaggccgaggcggacagatcacgaggtcaggagatcgagaccatcctggctaacacggtgaaaccccttttctactaaaaatacaaaaaattagctgagcgtggtggcaggcacctgtagtcccagctactcgggaggctgaggcaggagaatggcatgaacccgggaggcagagtttgcagtgagccaaggtcacaccactgcactccagcctgggcgacagagcgagactccctctcaaaaaaagaaaacaacaacaacaacaaacaaacaaacaaaacctcacaggtaaggaagctacaaccaacaaggattaagagactttctcaaaatgagatcaagagtaagggatcaagataggatttggatccagacttgtccaactcctaaacc

SEQ ID NO: 842224 - DNA, 595 bp, Homo sapiens
aaaaattaggttcaaaagactcatcatttgcaataattgtttttgaccaaaaaaaaaaacaacacttacgctcaaggtgatgttttcagtgaaagaactatttgcaatacattcattttcttctcattagttytgcctcccaattaacttgtaattttgtgttctaggaaaggtactgaagttaagtgttttttttttttttaagtatcaggagatgcaaaaccgcaaaagagagacgttatgtgttagttctttttatttcacttccttcttttcacatagcaagcaaatgatccagaaaaaaaaaaataactaaataaacttcatatggaataaaaagcagaattttgtttactagttaaaggagaaataacactctttgttgagacccataaaggtaaattttgtttctgtcagaatcctctgctttctgaatttttccatttgtccaaagtaaaatagcttaaatgtttggagaagcaccctccgtaagaactacactatgatttttaatattaaaaatattcagcttatcgagaattatttgcctagtaatcggctaggaaaaactattttttaataaaattattttaaa

SEQ ID NO: 842225 - DNA, 550 bp, Homo sapiens
gaatcctctgctttctgaatttttccatttgtccaaagtaaaatagcttaaatgtttggagaagcaccctccgtaagaactacactatgatttttaatattaaaaatattcagcttatygagaattatttgcctagtaatcggctaggaaaaactattttttaataaaattattttaaatgtcattatgcattgtttttctggtacataaaacataatataaaattgtgcatttaaggaagtagaatactaagctcttcagaaaaattttatagaaatcatacaaaaataccatgtgcttcccaagaaatgtaaagtgaaatggcattgtctctagttttctgttcttcatgctcctttttttttattcttgtctagattcctttaacctaaacttgttttatccttctcaaaaattcttaacgttttagtcacataattttacttttgaatttgagaataatttgttttttggtaacgcctgctacatttgcagtaaaaaagttactaagtttgttttaatttaaactaccccctaaaactgccaatta

SEQ ID NO: 842226 - DNA, 631 bp, Homo sapiens
gtgtatttgacctattttcttagagagaagagacagtctaagtagtgttgtttttaatcttaggattttcaaagcatagtgtcaaattcatcttttggtaratttctcccattaagtattacatttagaggtattgattgatcttttctaaagcagtatggattagtttactgttcattggtcaagctaaaaacaaactaacactatttttcttttctcattttttctttgtctaccacttttgtcccaaataatactaatctcttctctactctggtaatattactgtacttgtacgtcttacaggattggatcttgggagcatgaatttggttagggaaatgacatttaaaacctggaagcttggaatgtcacctgttattactcaggaactttagaaaattgaaggagtttttatagatataaaattagttgctgtatagtgcaaccctggagaacaattcacataccctctgtgatcccagggagattcctctaattgggactaaatctaattagaatatgagggagatgggatgccttgtcagtattttgtttctaaatttatctctagggagaaagaaggacaaaattaattttattttagatttaatttataagtgggaactca

SEQ ID NO: 842227 - DNA, 611 bp, Homo sapiens
catgcacttctcaaaagaagacatacagtttgtcaacaaacgtgaaaaaatactcatcatcactaaacatcagagaagtgcacaaamaaagccacaataagataccatctcatactagtcagaatggctattactaaaaattcaaaaaaataaaagatgctgacaagcctgtagagagaagagaatacttatatactgttgataggaaggtaaattagttcagcaactgtggaaagaagtttggagatttctcaaacagcttaaaagagagctaggattcatcccaccaatctcattactgagtatatccccaaagaaaacaaattgttctgccaagaagacacatgcactcatatgttcataacaacagtatccacagtggcaaagacatggaagcaacctaggtcctcatcaaaggtggactgcataaagaaaatatgctacaaataccctatggaataccatgctggcataaaaatgaatacaattatgtcttatgcagcaacatgtatacagctgaagatcataactctaaattaatacaggaacagaaaaccaaataccacatattctcacttataagtgggagctaaacattgcgtacacatgaa

SEQ ID NO: 842228 - DNA, 630 bp, Homo sapiens
ttaaagtaataactaactttagaagaaaaaacacactaatacattattgtgtagtgtacaataacttaccctaaacacatgctgtattagtccgtttttaaattgctataaagaaatacctgagactgagtaattcataaagaaaagaggtttaattggttcacaattccacaggctgtacaggaagcgtgatgctcccatctgctcaccttctggggatgcctcaggaaattatcagtcatggtagaaggcaaaggggaagcaggcaggtcacatggctagagcaacaagagacagagggaagaggcgctatacacttttaaacaaccagatctcgtgagaactctatcactatccagtactaaggggggatggtgctaaactattcatgagaaaccacctccatgattcaatcacttcccaccatgccccacttccaacatttgggattataattcaacctgagatttgggtgggaacatggatccaaaccatatgacacactttccccacaatagcaaatattttccaaaaaaytaattactaattcttcagtagtatggtttcaactggagtctaagttttctcataatctttaacatcactttcagtgagcagtgtctgcatgtg

SEQ ID NO: 842229 - DNA, 606 bp, Homo sapiens
aaatgggggcttggctatcttgacagagtctcattccagccctgttcacatgctcggtggttgtggaaatacagactccaagtcattcaacacttttagcaccttcctgagaccatttactctctgtgagtactgtagacatcaatacatatttagcccaatctcctactgtatttacacctactgttatcatcactgacaaatgtaaaatgatgatcatcacaatcatggcctagagaaagtgcaagatcttcaatcagcaaagaaaaattagattatctgcccttgactgttcttcctaacaaaataataaattcatattacagaaaatttttcttaagaaaatttttcttaagcaaaacatgaactcaaatttttttagcgtaatttagatgacaattccctttcaatcacatgggctatttgggccttgcataaattagtcagcagaactcaattattttgctgatttccrcaagaaatcctttcccatctagcatttcaaaattagagttatctttactgaagatacattcacattgtaccagtgtacctccctattttccctaaatcgcacctgacatctctgttttccctcttccagtg

SEQ ID NO: 842230 - DNA, 533 bp, Homo sapiens
attgtccactgttaatttggttggtgaacttttgcagatgtatttttctcctcctacttgcttttaacattttcactttggttctactgttttactatgatgtatttttctgtaaatttttttctatttgccctgagatctattgggattcttgaactgtgaattgattttttataattagtcctggaaagttcttaaccacactttttttcaatagccttctctttcattctctcttatggtcttatgggaattggatcatacttcacctgatcttctgtattttccatttatctgtgtctctgtattttcatcttgatattttcttttcacctctttagttccactaattttttatttaatagcttctaatctattgacgtttttaaggtttaatatttatctatgttccttttaaaaatacactgtgtcagtcaggtgaggtggctcccgcctgtaatccmagcactttgggaggccgaggaaggcggatcacgaggtcaggagtttgagaccagcctgaccaacatggt

SEQ ID NO: 842231 - DNA, 579 bp, Homo sapiens
atgagggaaattaaatcattataatcctatggaagcagaaagtaaagtgacagaattggctraggtgttcctgcaaagaacccatgtttgcatcttctgatgcccaaatatagtcctttcactgacctcaacacctgcctcacactagattttagaacgtccttgatacgggttcagtactaacttcccacttgctgtctggctgtactttttcagctcacaaaatgtaactatttattgctggtaagagattattggtcatactcttaacgttattactgaattatgtggtacaaagtaaatatactactgtatttctttgtttccattttctgcattatgttgaacatgacattattttaccaaaatctgcccactcccagctagctcactgtaatattttttattcatttacaaagaataacttattttagccaaaaaacaggtacagcttgtgactcaagaggataaattattcatagccactgaaccatgtctttgcttggtttcttagagttctttgagagattttgtgggaattatccaaaacttctacctcttcccattcagttaattgtc

SEQ ID NO: 842232 - DNA, 553 bp, Homo sapiens
agcaccccagggacagtttacaaatggaaagctgcaccctgcggcctcaggatctaaagaagagaacatggccataggctagagacaatccaacaatacatttggagtctactaatttagtatttgtgtctggactgaagttacctgttatgtaagaattattttaaaagacctgggtgcagtggctcaggcctgtaatcccagcactttgggaggctgaggtgggaggattgcttgaggccaggagttcaagaccaggctgggcaacatagcaagaccccgtctctccagaacaatgaaaaatttagtggggtgtggtggctcttgcctgtggtctcagctccttgggaggctgaggcaggaggatcccccaagcccagaagttcaaggctgcagtgagtaatgatgataccactgcactccagcctgggcaacagagtgagaccctgtctctaaaaacaaaaatacaaagaattatttaaaagggggtctatgaagttaaccaatagcwactgctgggaagatggcgaggtgccttaccaggagagcttta

SEQ ID NO: 842233 - DNA, 617 bp, Homo sapiens
caggtgcacaccatgcctggcttctcatttctgtgctaattacatttgtcagttggcctgtgagtgtcctgacagtactggctccagcagcagcttctgttcctggcttctcaggtaagttctgattctctgcattcacctgtctctccagttttcaggatagcagtttgccccatgacctcatttctctgatggatctgagaagagttgttgattttccatttgctgagcttttttcttgttgtggggacagcagtgataacttccaagctctttacctgtcaaatcattatcttttgatatttgaatggttttagttttacatgtggatttgtattccatctggaatatttcttttatgcattatataaggtagagaactaacttttcttagtgaaaatctgtcattccccatttatttgggatgacttcattatacacaaataacccacgtaagtgtgtgtgctctgtgcttctcgttctcttccgttggcctatttgcctattcctaaccacttccatactgtagctttttaatacacccttcaatrctgggtagcgcaaaccccctctgattcttcccggcgattctctcgtgttgcctctcctctgtattg

SEQ ID NO: 842234 - DNA, 600 bp, Homo sapiens
tagatagagtcccattctgcagctggatgaccctcctgtgctgacggcacacaggcactgtagcaggaacttgtagatagagtcccatcctgcagctggatgaccctcctgtgctcacggcacacagcccctctaggaggagcatgtagatagagtcccatcctgcagctggatgaccctcctgtgctgacggcacacaggcactgtagcaggaacttgtagatagagtcccatcctgtagctggatgaccctcctgtgctcacggcacacagcccctctaggatgagcatgtagatagagtcccatcctgcagctggatgaccctcctgtgctgacggcacacaggcactgtagcaggaacttgtagatagagtcccatcctgcagctggatgaccctcctgtgctcacggcacacagcccctctaggaggagcatgtagatagagtcccatcctgcagctggatgaccctcctgtgctgacggcacacaggcactgtagcaggaacttgtagatagagtcccatcctgyagctggatgaccctcctgtgctcacggcacacagaccctctaggaggagcatgtagatagggccccatc

SEQ ID NO: 842235 - DNA, 640 bp, Homo sapiens
cttacatagaaaggaagcattctccttaattctaaaattattcagatgctatgatgtattaactgctttttctttgtaccgagaagaaaagtgaaggatacataatatttaaaaccatgcaatttgctaagcaaagagtcttattgacttgccagtaaggctgaagagaaggcctaaaataagagtaaatttgactgtgccttgtctttttatcataagttacagatcttctctaatgtttttctgacaataaatgttaagcgataaggaccgttttgttgtcagattgctttactcaagagctagtcttgacccatgtgaaatgtaaacctttagcctaaggcttatgctacctctaaaagcttgtaaaacatattttaaaggattgcaaacggcataaaatacctttattgtaggtactgtgttaaaaaaaatccttcattttcacataaaatgtaaatggcctcattattgtttaccactcttttttttatgttttttttcccccaacaacatatatactctatccaaagtgttgatggrgtaaagcagttcattctggttttttttcctaatgaagctactggtattagaataaaagtgctccaggtagtttctgatcaaagctttatttctttgt

SEQ ID NO: 842236 - DNA, 585 bp, Homo sapiens
gccttgtctttttatcataagttacagatcttctctaatgtttttctgacaataaatgttaagcgataaggaccgttttgttgtcagattgctttactcaagagctagtcttgacccatgtgaaatgtaaacctttagcctaaggcttatgctacctctaaaagcttgtaaaacatattttaaaggattgcaaacggcataaaatacctttattgtaggtactgtgttaaaaaaaatccttcattttcacataaaatgtaaatggcctcattattgtttaccactcttttttttatgttttttttcccccaacaacatatatactctatccaaagtgttgatggggtaaagcagttcattctggttttttttcctaatgaagctactggtattagaataaaagtgctccaggtagtttctgatcaaagctttatttctttgttgtacattgtcagtactttgccagtagattcattttccacgttatcagaatggaagatatttgtawcctttcttccaaggttttacttccagaaatatgtcgtgttaaaacttttagtcaggtatgtaggatatatgttcaag

SEQ ID NO: 842237 - DNA, 575 bp, Homo sapiens
ttaatggtggaagaaataaagcttttttaaaagttaaaaaataagaataagaataaagcaagtcagaagaatatttatcctataattctatttataaaaagttgcaaaggtaaaaaatatactgtttagggatatgcacatatttggtaaaagtataaagaaaagcaaagaaatgattcacataaaatttaggaaactgtttatctctgagggagagagaagatgggagattcaatcaagtaggacctcacaagaggctttaaaggtactagaaatctcctttttgttaagctgggtagcaagtagaaaagccttcaatttgttattctttaagttgtgggtttatgttaaatatacttttatacatatgacatattttacaatttaaaaaaaggatataaatggggatgacaaattagaatttgggggctgtaacccagactttyccactgactgtgtaaccttaaacaagtcatttaacctctcagagcataatttttcttcttattttattaatgaggaagctaacagctaacatctgtttaggactttggcatttaaagaactgtttaaag

SEQ ID NO: 842238 - DNA, 644 bp, Homo sapiens
aattggtgggattacagatgtaaactatcatgcccagcctggaggaaggatttttgtagatgtagttaaattaaggatcttgaaataaaattatcctagattatctgagtgggccctaaatccagtgacaacggtccttataagagacacacagggaagaggagaaggccgtgtgatggcttaggcagaaagagtagtaggcaaaagccaaggaatgcatggagcccccaggagctgggagaggcaaggaaggattctcccctagtaacttcagagggagggcacccctaacgataccttcattttgtattttgagcctccagatctacaagagaataaatttccattgttgtaagccagttaatttgtagtggctatcaatagtagtaaagaaaaaagagaatgaaaggggaaaataatccaaaactccttaagaagagctcctgtccttctgatattaacacaaaaagcaaactaaccagaacagtatatcctactggaaatcactcaaccaggagtgagagaaatcttattgatyggtaacttatgtgattgttatttttgcaggttagtgctattgaagtatgctaaatatacgacagtgctgcaaaagacaggctaggtggtagaggaaggagctattt

SEQ ID NO: 842239 - DNA, 611 bp, Homo sapiens
  misc_feature 200: n = A,T,C or G
gtgtgcagataacatgatgagagaggaagcaagagaaaagtaatgagtgccaggttcttcttaacaaccagctcttggggaaacttacagagtgagaactcattcactcccctccttcacagggagggcattcatctattcacaagggacccacccccattacccaaacacctctcactaggccccacttgtgacattgnggatcaaattccacatgagctttgggggacattcaaactatagcagtggacttaaggctctttgggacagatggtacgaacttttcatcaaagagttagttaatctccaaaaaggttaaaacaagtgtcttagagaatccttgaataggcagagatagataaatttacattttaaaaactttttattttaaaatgatttcaaacttacagaaaagttgcaatagcaatgcagaaggttgggttcacacatatctttcactcaacttttcctaatatgatcaacmcagagaattataacataatcatcaaaatcaggaggataacattagcatattgcacaatagttacacttcatagtaaactactgatcttatttgcatttcactaactttgtccccagtgttcattttc

SEQ ID NO: 842240 - DNA, 442 bp, Homo sapiens
aatacattcaccagtgacactgctaattattgggatatgaagatgaaaagatatacagggctgactttakgggcatgcaacctgcgtttagaagaggcccatgtaagtagctttgtaagtagctggccctgtccctgtcgttaaactttgagtcccgtcatgcagccagatatgaaaacaaatacattttatatatgtaataatttttatagacaccaagagagggaatgccagtttgccttagaggttcagagagcacttctgaaagaaaagtcattaattcagcaattacttattcagcaactagtatatgtccagcactgtaccgagtggtagggaaatggcagtgaatcaaacaaaacaaaataaaaaaaatttaaaaaaacattgccctcatgaaggttaccttcaagtcagggaaaccaaacaacaaaatataaag

SEQ ID NO: 842241 - DNA, 550 bp, Homo sapiens
atgtcaatacttcgatccagccttttacagtcagtgtgaggagaaaacacatttacttgaagctaaaggaataggaagtgtcagctttttcctgtttgatgtttcttgttgtgttttccatattaatcacttcattttccccttggtcacaggcctgatatttttttccctacacatgtcagctgcctagtgtgtcaggcagtttttcaccgtgatatagagacacaatagagctggagctggcaaggtgactgccagaaatgtgtgtcactcttgatggttatgttcacgagcatccagaaagcccagtgctcctgaactgaattataggctttgaaatgaccatgtggtttgcattcggcaaaaaaatataccccagacatgtgcaagggttgttggtttggggaaaattagatgactccaacatgaaaagacagagcctatctaaagagataggctagtgtgaggtttttttacagcacaaatctgttgaataagtggatttggatgtaaccacrggcttgccatatgaaattctattccatgggaa

SEQ ID NO: 842242 - DNA, 563 bp, Homo sapiens
aggtggaggagacaatgagaaaggccctaattagccttcaggggtccagtccacaaatataagccgtgcaccaggcaattggcaggggtgagacgtattgtatactaacagcaccatcttggctgtttttgttcttcagaaatggcacgacatgccttctctccttctcttgtgaaacacattccaaggtccagccttgtctataccacccacccaccctaaggaaccaccagtgttaaggaggggtgggtggaaaaagtgactgcagtaatgagtatacagtgtatacttgtataatataatacatatgtattattattactaaatctttgtaataaacctataatgtaagcactgttataccctttattcagaagaggaaacaggaacagagaggttaagtcactcattcaagatcacaaggcaaagatgaattaaaccatgcagtctgcctctagagtctgtcatttacccccacatgttattwtctttcaatctaaatgctggcaggtgaaataagaaaacaaagctcatcttagagacatttctgagggagttgtgct

SEQ ID NO: 842243 - DNA, 575 bp, Homo sapiens
tgtgtgctgtttacattacatatacttayagtatataagtgctgaacatgtaatttgttcagaacttatgatgttctaagttctaggcccaatgctaagtacttccaaatattttttcttatttaattctaacaaacaaatgaaatacatgctgtttctagccttattttggagataaagaaactgagtaatggagaggtcatagcccaaagtcacggctactaagtggcagaaccaggatttaaactccagtttaatgatttgtaaccaacaagatatatgctatttctttcactataaacacattggatatgtgcaagtctcttctcttttcttcttaatagagattaactgcctgctcccctccaataactagcttactttctcagcttctctctttttctgcaggccctttcctctattgtgatatagatgagggctgtagaaatctcttgttctttctattagacctgctgttttggcagtaactaagcccagtggaatggctttgctttgaatttagagagacacaaattatgaggctcagtggtgtgtcttattaaccaggattgcat

SEQ ID NO: 842244 - DNA, 602 bp, Homo sapiens
acaactaaaaaataacaatgttggatccattcctcacacacgatattatgataaattccaaacaaatcaaagatgaaatmtaaaaaagataaaaatttagaagaaaatatgtagaatttcaaaataaactgcaacagaaaagattgatgagtttgactaaaattgaaattaaaaaattctccataacaaaaagtcataagaaaactcaaaaggcaaatgataaagtgagaaaaatatttgtagctcacaatattgaccaagggcttatcatcttaagacataaggttttcttgaacattgatatgtcaaaatctaataacccaataaaaaattgggcaaaagtgatagaaaatacaaatggctcttaaatatatggaaaaaacctcaagcttggttatgacagaagaaattcaaatgaaaatacatatagatagatttttttcacccttcaaatgggcaaaaatattaaagttcaataatacaacagaaatattaacatgtggaaattggtattctcacatatttctgttgggagtgcagagtaatttagcaatatcagttacaattcatacgtatatacctgttgaactagcagtcttatt

SEQ ID NO: 842245 - DNA, 602 bp, Homo sapiens
acaactaaaaaataacaatgttggatccattcctcacacacgatattatgataaattccaaacaaatcaaagatgaaatataaaaaagataaaaatttagmagaaaatatgtagaatttcaaaataaactgcaacagaaaagattgatgagtttgactaaaattgaaattaaaaaattctccataacaaaaagtcataagaaaactcaaaaggcaaatgataaagtgagaaaaatatttgtagctcacaatattgaccaagggcttatcatcttaagacataaggttttcttgaacattgatatgtcaaaatctaataacccaataaaaaattgggcaaaagtgatagaaaatacaaatggctcttaaatatatggaaaaaacctcaagcttggttatgacagaagaaattcaaatgaaaatacatatagatagatttttttcacccttcaaatgggcaaaaatattaaagttcaataatacaacagaaatattaacatgtggaaattggtattctcacatatttctgttgggagtgcagagtaatttagcaatatcagttacaattcatacgtatatacctgttgaactagcagtcttatt

SEQ ID NO: 842246 - DNA, 626 bp, Homo sapiens
tgtttccagtgtatattcatatatggaataaaccactatttattttaaattatagcaattttagaaataacctcattattccaatttttcatgttctgcagacatctcacaactgaacttcccaggctacaactttaatgtggcaaacacataaccaaaccaaagtagaactgaccggactgtggcagagcacatggtcatttgttcaatcacttggtcattcaacaaacgtcttctaatcagctagaatatgtgccaaggtctggccttaacataagagatacaaagaggaataaactgtaaatagtcattgctctctagggcaaatctagggaggaattcagacaaaaataaatcctcatataataatagtagaaaactcaaaagggacattaagacggatctatcgactgccttaagccatgatgttggactagggagattatacactaggttcgtctgggaaaggtctggtgtacagctttgtcccgtgacctttcctacactttttattctcaaaataaatacattagcratgatcttgtaaggtgaaacaaaagtccatcaggaaaacaggagttggcgggtgggaaatggtaccttatgaagagaacaaaggaaacaat

SEQ ID NO: 842247 - DNA, 650 bp, Homo sapiens
gattgcaccactgcgctccagcctgggcaacagagcaagactccgaaaggcagaaagaaaaagaaagaaaagaaagaamaagaaaaagaaaaaaaagaaagagggagggaggggaaaaaaaaagaaaaaaatgtcctagatattctgaaccaaagtggtcatcctgtcacaatctgtaattttaccccattttaaagtctctttatgtatattttctagttattttgttttctgtctcctgtgagagaatgtaatatccatgtcgatacaaatcatatcttgattgttaattgctgaaatcccagtgcgcccaaaattgcacgtcctgtaataggtgtttgataaacttttgttgaattctgaatgttaaaccctttgacaagtgacctgacatgatgaataaaaacttatagggtttaaggattaaaaaatttccataaagaattgtttacttaattcacaatggctaggacttgccaatgggtatagaggccaccagaaactggtgaactattttttaaaatctcataatataagaggaatcatattattaactggccactattctgagttttgaaaaacattttacaactttaaaaaatgattcaaataaagcaaggagacgagtaatgcaagtaatgccaagtatg

SEQ ID NO: 842248 - DNA, 665 bp, Homo sapiens
  misc_feature 431: n = A,T,C or G
aagtaatttgtgtacattttactcatatatctatatgtacacatacatacatacacagacacacacacatatatatatatatatatatggagagagagagagagagagagagagagaggacaacgaagaggaaactaaagagaataaagggtattaacagcaggtctgtgacttattccctgggggatgtgaagggaataaatgaccttaatagaccacttcataaacatgttaatgacctccgagaccttcttgtttatcttgttaatagtggttaactagaggaaagatacctgcaaatccctatctataaaatgattttagtaggtatacctggcctgcctagatagcttattgtaaataaacctggaatgtttggattaatgagtcgtggctgcctggagaatagggcctacgctacatgaacgttnttctattttggtaattgacagattataaaatggaaaacttttgagactgaaatgatttcctttcaatgtctctgtgtaaatttttaaaaacgtatctgttaatatgaaaccaaagcacatcataatgggaaataacatggatgttttggaaacrcatgtgtgattatttcaggttccccagggaaataatgttctatctgtgcccagcacttccctataattctttcagtcatt

SEQ ID NO: 842249 - DNA, 634 bp, Homo sapiens
tgtcctatccattttggttaaggcactttgcctccctttattctaccctcatggaagagctcaagtatgaaatgaattcctgaacacatcatcatatcaggcaatagagctgtaagtgtatgkaatcaaggagtcacaggtcttttctattctgtgaggtaagatttgagaggaccaagtatataaccagtttaggtcccagggaaaagtaaggagagaggatggagctgactcctactgggcctttacagagaaagagaaatgaggaagggggaccaagtatttgtggccttcataaaaccctctattgtctagccagacacagcaggaaaaaccaatgagcagctggctaggaacccctgtcctagccattcattaccactgtaaaatgccctactcttgttttgacctttgatcatttatgcctcatcagctccacctttcttagaacctagtcctaggcagagaacattgctaagaatgagaacagaacatgtggaccatttcctcaacaaattcatccaacttttgcctaaggcttccttcttacttggtaatgtttcaaaattgtcttcactttccttaatcctcattcattttaagattacctagtctttcatttcattgaaacaga

SEQ ID NO: 842250 - DNA, 315 bp, Homo sapiens
tttgtttcttcttacattaaaaaagaaaaagatgcagttaccagtagctaagcttgcattagaaaatgtgccagaaattcatatttcttaatatactacagtaagataattacgacacactatagcaaataactagggaaatggaattcttccctgagagagaaaggtcttatttatgaaaccaatgtcatctaggtcaagtgtaatcataatcaaaytgaaatgagttataaagacgtttaaattgtcaagaggaaacaaaacgatgactactcaatttaataagcagatccaaagatttccatgtgaaacttc

SEQ ID NO: 842251 - DNA, 591 bp, Homo sapiens
tggcattcactggactgagataatctttgtaagtaccattatttgttgagatacatataagtctcagatataatcccctctcagtatcaagggtgaccttgtcctcatctctaaacaccagtttcaagccatgcaagcaaaatctcttggaaaggtcatttagccctgggttttgttttgtttgttggctttgttttgcttttgctgttgttttggcaataactccattttccccttctatgtcatgcacacacagaaagcaaagctatcacagctccttccattatgatggtcacagtttggaattatgttgggtttctcctctttttctgttggtcctcacctgccagcaactatccataacagaaaagctaggggaaggaatcagttgtcattactattgctctgttacagcacactggagggtggcttcatacaaatatcacctttatacaaatataacaaggtacacagacaaagaattctcaatatctggaatttctagcaaacmgatttacctatcaatataataagtttaaaagggcattacatggcaagtttggaggtaggagagttgctggggttccgaag

SEQ ID NO: 842252 - DNA, 522 bp, Homo sapiens
aagacatcaacttccctgggccatctccactaatatgcagccaggactaagaaaggtgtgtttgttggatgttctctgctagcagctcccggaggtccacatgccccccagggtggcagcaggaatccacggaggccccacagccttgctgtgcactcttctccatgtccgtgctttctctagacttgggggtaatttttatctcttcaggtttttgctcaaagaatttcattgtcatcccaaatgttcccctatacagggatgacacttttgggagtataagtccgaaagtccaacagactgtgtgtgttttctttcagtgcatgtgggagaaggggagtggagtccagggagcatttcaaaattcttctgtcagttttgaatggaaaaaaaaaaaacacataatattgaatagttgggtttgggataggatttgcatagtctaaatagtatgtggcaatgtgggaaattccccaaaaytctgcttcattaatgataataaaattgtattaaaccatttag

SEQ ID NO: 842253 - DNA, 488 bp, Homo sapiens
atccaattatataatgaaattgtgaatttggaaatgttcccaggttacagccttttctattcagaaatcaactccccaaccaytgggcttgagtccacactgaggacctgcagttatgtattgccaaaggggtaagaaaagggggatgcaggactgagctgaaaccccatcaccaattgcgtggaaataaataggcatgagatggactagaacagctaatctgtcccagttatcagcaattctttctctccggctattttagcagttaatttcccagctcagctgcagcagcttctcttctctaggaaaacagatgacatttcactttgaagaaagaacccattgttccctgaaatgtgatgaactgaaagccaacatttccttttatatatataaacaaatctttccaacaaaacaatgtcattagtccaagttccagatgactttaccaccttaggaactatatcttcctttatatattttccttt

SEQ ID NO: 842254 - DNA, 621 bp, Homo sapiens
attttatatttttatactacaggattttcctggggctccagagtgacctgggagcagctcagccrgagctggccctggagctaagagtcaaagaaacaaagcagcatcgatcaccatgaattaattaccaagggctggggagatcacgtttatctcagaaggcgcaacagaaacaggtgcaaccagaggaccagaggcccttcttcctggaccttggaactgatatggcctcgaaaaatggcagagaaatcgctgaactgcctgagacgagatgacctagaatcagatgaaaccaagttcctaccactcagcacaatggggatttgaagtagaaatacattcacttaggaaagtagaaacgtgcatttctggcacctgattgtgtggcctgagattcctgtctgctacagtgacatcgctggtgacattattagtgccccactttgtcagcagcatgcagtagctggcctaagatgtccaggtcactaacagtattctgatgggttcagccagcacaaaggtcaaacacctcatacacagccctgcctggggagcagtatctggttcctccaccctcctatcatcgcggttaagaacagttgattcatagtccaggaccct

SEQ ID NO: 842255 - DNA, 643 bp, Homo sapiens
tctgatacaggcatttaaacttccccctcccaaattctgggtcattgacatcctgcagattttgatattgtgttaagattttcattcatttcaaaattcttcctgattttccttttaatgtcttctttgacccatagaaatctaaaactgcatatttaatttctgaaaaatttgaaaattttacggaaatctctctattattgattacaatttttaattcctgtgtggtcacaacatatattttgtattactgaaatgcttttatattgactgaaacttgtttttttttccccaaggtcacagattatatatatatatataatatactatattatatatatatatatatatatatatataaaatactatattatatatatataatactatattatatatatatataaaatagtatattttatatatatatatatatattacttgaagttctaggttgcacaggatgtggtttaacttgatgattattcaatgtgcagttgaaaaaactgtstattctgctcttctttggtggactattctatgaagctcaattaggtcaggttcattgttagtgttgttcaagtatattatgttctcacagatttttccattaggcctatcaattttggggaggaatactgaa

SEQ ID NO: 842256 - DNA, 643 bp, Homo sapiens
tctgatacaggcatttaaacttccccctcccaaattctgggtcattgacatcctgcagattttgatattgtgttaagattttcattcatttcaaaattcttcctgattttccttttaatgtcttctttgacccatagaaatctaaaactgcatatttaatttctgaaaaatttgaaaattttacggaaatctctctattattgattacaatttttaattcctgtgtggtcacaacatatattttgtattactgaaatgcttttatattgactgaaacttgtttttttttccccaaggtcacagattatatatatatatataatatactatattatatatatatatatatatatatatataaaatactatattatatatatataatactatattatatatatatataaaatagtatattttatatatatatatatatattacttgaagttctaggttgcacaggatgtggtttaacttgatgattattcaatgtgcagttgaaaaaactgtctattctgctcttctttggtggactattctatgaagctcaattaggtcaggttcattgttagtgttgttcaagtatattaygttctcacagatttttccattaggcctatcaattttggggaggaatactgaa

SEQ ID NO: 842257 - DNA, 643 bp, Homo sapiens
tctgatacaggcatttaaacttccccctcccaaattctgggtcattgacatcctgcagattttgatattgtgttaagattttcattcatttcaaaattcttcctgattttccttttaatgtcttctttgacccatagaaatctaaaactgcatatttaatttctgaaaaatttgaaaattttacggaaatctctctattattgattacaatttttaattcctgtgtggtcacaacatatattttgtattactgaaatgcttttatattgactgaaacttgtttttttttccccaaggtcacagattatatatatatatataatatactatattatatatatatatatatatatatatataaaatactatattatatatatataatactatattatatatatatataaaatagtatattttatatatatatatatatattacttgaagttctaggttgcacaggatgtggtttaacttgatgattattcaatgtgcagttgaaaaaactgtctattctgctcttctttggtggactattctatgaagctcaattaggtcaggttcattgttagtgttgttcaagtatattatrttctcacagatttttccattaggcctatcaattttggggaggaatactgaa

SEQ ID NO: 842258 - DNA, 546 bp, Homo sapiens
actagagtattatagctccccaaggccatgtgtgggaaaacaggcatgccctttaccttcctgtgtgcgtctacaagagcactcccaacatagaaccatgaaggtgggggaagtagcacattaattttctgcctcggtagccctttttccttctcccacacctcgactgtgctagtgggcaggatgggctttcccccttcacctaggcaggggctttccctgagttatatcctgagttggcccctatgcacaggtaggcagtccaaattaggagtcctcgtgttaccacactacctgatgtggaggccggaggctgagagaccacaccaaagctttgggcaggaatggtgtcccctagttggcacaaggaaatggaccccaagtctaagtcttgataactcgacatttaatagcttggyagaggaggatgagcctctcaagatcctgctggggtatagctggacagcctcatttctcaattcacttatcaatgtctctacgaaaatgcctgccataaacaacctgtgaacatgggtctactttgct

SEQ ID NO: 842259 - DNA, 546 bp, Homo sapiens
actagagtattatagctccccaaggccatgtgtgggaaaacaggcatgccctttaccttcctgtgtgcgtctacaagagcactcccaacatagaaccatgaaggtgggggaagtagcacattaattttctgcctcggtagccctttttccttctcccacacctcgactgtgctagtgggcaggatgggctttcccccttcacctaggcaggggctttccctgagttatatcctgagttggcccctatgcacaggtaggcagtccaaattaggagtcctcgtgttaccacactacctgatgtggaggccggaggctgagagaccacaccaaagctttgggcaggaatggtgtcccctagttggcacaaggaaatggaccccaagtctaagtcttgataactcgacatttaatagcttggcagaggaggatgagcctctcaagatcctgctggggtayagctggacagcctcatttctcaattcacttatcaatgtctctacgaaaatgcctgccataaacaacctgtgaacatgggtctactttgct

SEQ ID NO: 842260 - DNA, 581 bp, Homo sapiens
cacagcatctgtatcctaccaatgttgtctttagctcggggcagtggttatgtgatggaaacaagaaggagcttgaaccaaggtcaacatccaattgatgctaatgaggaacattaggttctcaaacatcatgtgacctaaccatcccagtcatattacttttcctacaatgaacagaacgtgacttcaggtcacctcttctctctcctgcagctctcccttaaacacagccatgcatttgtgatcctggtcaaaggaaaaagaactaacaaaatggcaattgaccaggaaaagggttaaaaaataatcctggacacaggtgagaagctaattacatccagccaagtgagggctgtaaacaaggtcaaaagtataagaaggccctgaaaccaagacatccagctggatcagaagagaacagagatgaacgcaggtttagagacatccagagaagagcagggaaattaaaaggaaaacagcaaaatgggggkaaacagattgttctttcaaaggatggagggaagggcagcacaaccaatcttgctttggaaacaaaagtttactaattatatttatgtctc

SEQ ID NO: 842261 - DNA, 342 bp, Homo sapiens
atggcatgtgtgtttctattgcaatgccctgttcacaaataaacatcttttcttttggagagactctctgttatttaggttgacaaagtaaaatgtagttttcactattttgacttcatggcatttcctttaagtctcaggctcaccagtgcatgtttatatggaacgaaaaaaaaaaaaaactattatttgaacagacagtgccgccataagaatgtgggatttataagtaccacgcgctaaccgattgcrccactggagagtaaactatcgcaagaacaaagaaccaaacaccgcatattctcactcatagatgggaactgaacaatgagaacacatgga

SEQ ID NO: 842262 - DNA, 607 bp, Homo sapiens
ggcagaaggtgaaaggcatgtcttacatggtggcaggcaagagagagcatgtgccggggaactcccctttataaaaccatcagctcttgtgagacttaktcactatcatgagaacagaatgcgaaaaacccgcctccatgattcaattacattccactgggtccctcccattacatgtgggaactgtgggagttacaattcaagataagatttggatggggacacagccaaaccgtatcagatgccaagaaagcgaaagcacagggtgggcggccaacagagctgaaagagaatgaagaggaaatggcaggaacaggctgctagatctgagcatggagcttatcctcagccctggggaactggtgccagtgggtaagagatggagccatgctgcaggcgtctgaagagggaggtgtgggagggaaggagaggtaacaggctcaggacaagaaaacagaaaacgtgcagcccagctgggagaagtggtaaggcggcagttctttttgttttgcttttcccttaaggcaaaggtgatctgaacacacctgaagacagacaaaaagacctgcacagagaaactgaatagacatttagagaaatgtacaat

SEQ ID NO: 842263 - DNA, 564 bp, Homo sapiens
taaaatctggaactcgaaatgaatgagttggtatgcaaaatgcacacacttgacactcgggggatactgtgtagagcggcacaccaggagaggaatcaggaaggaatcatgctaaataatgaacagtatgaagggatggatgtctggagagtggaggcacttgaaggtgaccatgcacatctggtgtgtacttaagagctgatgaaatactttcatacatacttcatttgaccttgttctgaaggtctccatcttaaagatgaagaaaccaaggctccaagaagttgagactcgccaagggtcccagagcccaccaacaacagggttaggtggatgtgtaccacccctccatgactcttttcaattccctaaattatctgcatttgcaggaactgatctcagcttggtgttgatctgctggcgacccacagacataaagggtcatccttgggggtaacatttttctgggtgtggcacctggaaataaatctctcagacgggaaataaagayatgattttggaggggggcctcctggggctctggttaactctataaaggggtct

SEQ ID NO: 842264 - DNA, 529 bp, Homo sapiens
tggctggtctctacttcacaaaatctacagccttgatgcagagtctcaaaggctaggggtgactgggagtgactcagtggctgaagctggcatgatctaaatcatctaacagttcattcactcacatggctggtgactggcatgaaaggactcaaacactaggatttctgacctgaaatctgatacctgagacttgggacctttctacaaggcttagcttcctgacacagcaacctccaggtactcggatttctcagggctccaagcaggctggtattccaacaatcagagcggaagcagcattgccttttatgacctaagctaggaaagtcacatggcatcccttctgctgcattctaatggttacataagtgtgctcagattcaataggagaattagaccccaactcttaatgagtggtaggaagttctaaaaaaatatgtggggcaagagacattgytgtgattatcttctaaaaatataatcagctaccataacttaatattcaccacatggtttggttaaaata

SEQ ID NO: 842265 - DNA, 616 bp, Homo sapiens
tgggacacacctgtagtcccagatactcaggaggctgaggcaggagaatcgcttgaacscaggaggcggaggttgcagtgagcggagatcatgtcactgcattccagcctggcaacagagtgagactccgtctcaaaaaaaagagaaagaaaaaagaagggaaggaaggacggaaggaaggaaggaaggaacttttcaactataaaatattttaaaacatatttagttatttgtcagctttagagtttgatgaaagctggtattcagtttctaaattcaataccatgaagaagatgaaactcaactttgatcgatttttcaaatcaaattcttcccccccacaaccttgattcaggatcaaattcctgttgtattgcatatatttttgtgattataaaaacaatgcatgattattaaagaaactgtggaaaatgtaaaaaggttaagaaaaacgttaaaattgcctataatcccaccacccagagagatataattgcccttagtattttagtgtccttcattcctctcttttttcagtgtccattgtctatatgtatttcttcgtaaaactggaaatcagtatttggatagatacagacatagatatgttttcacc

SEQ ID NO: 842266 - DNA, 493 bp, Homo sapiens
catatattagctctggactggtgtggtggctcatacctctaatcctagcactttgggaggctgaggcgggaggatagcttgagtccagkagttcaagaccagcctgggctacgtggagagaccccatctctactaaaaatagaaaagttagctgggcacggtggtgcacacctgtggtcccagctacttgctacttgggagactgaggcacaagaatctcttgagcacggtgagtggtggttgcagtgagccaagatcgtgccactgcactccagcctgggtgacagagcaaggccgtctcaaatacgtatatatatatatacacttttaggatgatagaaatcagatcagaggttgcctggacagaggagaggaggacagactgggaagggccatcatgagggtcgatatgtcgttactttacattttattgggatgtgatttacctgtgcatcaaaattgacccaactggaaatctgtgcattttattgta

SEQ ID NO: 842267 - DNA, 595 bp, Homo sapiens
gggaaaaggacttggagtggaaaagtattgagtattcagtcagagtgaaaaaaagtatctttagtgtttccttcctcctytccccaataaggaatctctgcagaggtacccaaagaaggcctctgctatggctccaaataaagagacctctgaatgggggcctagtccaggaatgctgacatatgtaagagcatgacaggtcagcgaggtcttagttcttgactgtaactctcatcagagatggcaatgcaccaactgtgcacaaaatctggggaggcaagggggcagctttctccctttaggcctgccagtaaaagcctttccctgtggtgtctgccttcaaaaatgatacaaaggtttttggctattaccccgacttctcactttcaaagaactaactcgttttctcgatcttctctattatctttctattctttatttcattcatttctgctcttatctttttctgcttgctttgagtttactttgtttttctttttccattttcttaaggtggaaggttatgttgttttttttttacatgtgcatgtttattacattgatctattgcttaatgctggaatttgagtttcta

SEQ ID NO: 842268 - DNA, 608 bp, Homo sapiens
agagttctgaaaatgtgagcgccagcagctgctgcttttgcattgtggtgggcttggcagaggagcagagactggaggcagtgggccaaagtggattcttgaatgggagggtcacaggaggaatgcaggatttaraaacattatcctggcagcaagagatgagggaaggaaaaaccattttgcattgggggtgaattttcaggaaaacttctctcttcatggttcctaataattttggtgggtactcaattataaataacaacaatatttgtagcctgagggcttttgtatctataaggtgaatttcaagctcttcagaatgcccagcaacaatgcctactgtgtgctaagtgctagggaacaaggaaaaataggatttggcctccactttcaaggtgctctgaacaagagagaagacagacggtaaagacatagcacacgtggagtgtgcctgggacagtggaagatgcctgggcatgtaccagcacataggtttcaggatgtgtggagcgtgaggggaagtgaggtggagaaggaaggaaacttgtgtgagtttgcagggatcagctcaggaagcttcttccatgcttaggtggtttgcatgtttg

SEQ ID NO: 842269 - DNA, 517 bp, Homo sapiens
tctagcaacttggaatcagaagagatatttttctctgtagagaaatccctggaagggtggttgtctgacygccctctccttaatcacttctaagaacgaaagctcattcttggtgagcagcctttccgtagtgactaattctaattgctaggtcttgttatacgttaagcagaggtctacccttcagcagcttctacctgttgtcgttctgtgtgctagagagagcagttctcttttctgcataattcttgtgagtcttaaaatatgagattttcttaaagcattcccttctcctgggttaaattctcattcccatttcttgtatgacatggggtatagacaagtgctgtccaatggcactttctgcagtgatggaaatgttctgtatctgtgctgtacccggtggtagccactagacacatgaatattgaacacttaaaatgtggctagtgtgacccaggaattgaattttcagtgtaaatttaaatagccactcataactaatggctgttatact

SEQ ID NO: 842270 - DNA, 537 bp, Homo sapiens
agtatcttttgttggaaagactattctttacccaatgcattgtcttggcactcttgttaaaaataggttgactataaatgagggtttatttctagactctcagtctattcacattgatctatatgcctggtgtttttgtttgttttttgacacagagtctcactttcacccaggctggagtgcagtggtgcgatcttggctcactgcagcctccgcttcccaggctcaagcaatcctccaccctcagccttccaagtaattgggatcacaggtggaagccaccacgcctagctgatttttaaattttttgtggagatggggtttttccacattgcccaaactggtatcaaactcctgagctcaaagtgatctgcctgcctcagcctcccaaagtgctgagattgcaggcgtgagccaccatgccaagcctacatgtctgtctttawgccagtactacactgtcttgatttctgtagcttcatagtaagctttgaaatcaagaagagtgagtcttccaactttgttctttttcaatat

SEQ ID NO: 842271 - DNA, 512 bp, Homo sapiens
gcaaaattcaaaattgagaaattttcttcatttgattttttttctgtcagtgaaaattagtttattttagtgatagactgtatattccatgaaagagtggtataagagtgctataaaaagcctgggataaagcaacagtgagcaagaaaacaaactgttaatgagttttaatgataaagagtttttgctggcctgaaagtgtctgcaaggcagtcatcgattccctataagcgaggtggaccctccacttggaagaaggcatttcactgtaccttacttagatgaggatgcggggacaaaagtttacacctctcttaatgagtacagccttatggacacaagacagtctggatcataacaggccactaagtaggctgtacagtcagatgcagcaggttctcaggagccagtcagccttgctgagcactggtagtggtatctactgcagtggtactstgaaacagcagtaccagaaggtactagagggagaaagcagaggcagagagtgtgca

SEQ ID NO: 842272 - DNA, 629 bp, Homo sapiens
tttggctgtggaagtgcctttctagatcaattttgcattagtttctgctagacacctgaggtataccatagaacttggatcaatttttaatataatattcaaaacttgaggcttccctgaataaatgagtagtataaatttaaatcccagtcttcatgaatccaaagtctgtggcttcaacttctcaggagagatatttttcctttcttccagagctcatacataatcaaacatgtttttatattatcatctgcctttgctgttaggtgtctttaaaactctactccatcattaccttgagaatcccaattttctgtcaaaaagtttgttccagtcttctactttataagaagctgaggtcttgacacctattgcaatggcagattataaaagtcttgccactactatgttacatcttttatccaaactctatttcaatcccacccctggggaaagtaactattcatgtattcacccctgtgaaaggtctcatttctttgcaatttcatctttggagtatctgaaatcttcccttctctcctggacactcggctattcctttttttktgtaatgcagaatttcagattttgtaaaaaagattttaaaattgcttacttcaaatgttaga

SEQ ID NO: 842273 - DNA, 557 bp, Homo sapiens
cttttttaattaagctaatttgagttgagtatttgtcacttgaaactaagtatcttagctaatagaagaagtaaatacagtttaattgagtctgggatgccatataagaaaagtccaagtgttttgcatactctgcttgcaaagaaaacaacctcccaggttggtggcctgagggtttgtgcaacaccaaagaacaccaagctcagccagcccaattgccctcccatcccttttctttttttttcatttctttccagctgcacggtcttttatggagcccatctttctaagacattcaaaatgacatgctattggaagacatttctgtccatgctaatacctgtgtttaaatttttttgttgttgtttaaaaaaaaagatcatgatatgatagcaaatgaatgttggcaaattgccaactgacaggygtaaaattttatgaacatgcacattccaaaggaatgtggaaataagccatccactgtagtccagtttggcagaaatattacaaaaatataagtttggcatatattgtaattcatttaaagatgcttaaaa

SEQ ID NO: 842274 - DNA, 504 bp, Homo sapiens
ggctcccccttaggtcccagaaaagccacagctttgatgaaaggccttaggttgtcaaatcacgccattggtgctcgctggggtttagaccccgtagcctacatgacaagagccctggtggtagggttgactttccattgtaaataaaagccattggctttccattgcaaataaatgctaggaatggtcattcccattcttggctcttatctggcttgtgcatctgactatctctgactatctctggtagggaaagttcatgggaaggtttaacaattcatcaagagcagctttcacaatctttatgttgtcttctccaacataaaaattggccattcctaagcacatactatacacagaatccaaaaattgtgaggctaagtgtctacacaaaatggattgtctagaaagccaggcraggactgtcatgagactccagatagtaatccaagcaggaatgttttgccctggttagttttacaaacgttgaatatagacaggtca

SEQ ID NO: 842275 - DNA, 587 bp, Homo sapiens
cagatgcctgctgtctgctggtgatcacatacctcttcctaactctactaaccactatttgctgggcaggtacttcatgccaggtaagggcttcatatgcattctctcttttgctcctgtcaaccacccaaaraagtgcacgttggccgggtgaggtggctcatgcctgtaatcccagcactttgggaggccgaggcaggtggatcataaggtcatgagttcgagaccaacctggccaacatagtgaaaccccatctctcttaaaaatataaaaaaagtagctgggcgtgatggcaggtgcctgtaatctcctgaggcaggagaatcgtttgaacccgggaggcagaggtcgaagtgagccaagatcacgccattgccctccagcccgggcgacaatgcaagactctgtctcaaaaaaaaaaaaaaaaaaaaaaaccaatacatgttattgttctgttttgagaaatgtagaaactgaggcacagacagttgagcgcactgactgtgtactgaaaagtatcagaattggtgtctgagttcatggcttagattattcttaaccatctatatagtatctttcagaagtc

SEQ ID NO: 842276 - DNA, 515 bp, Homo sapiens
gtgtgctctacgtatgatgtctgtaaaaagagctccctggccagcatggtgaaaccccgtctctactaaaaatacaaaaaattagctgggcatggtggcgtgcacctgtaatcccatctactctggaggctgaggcaggagaattgcttgaacccgggaggcagaggttgcagtgagctgagatcacgccactgcacttcagcctcagcaacagagaaagactgtctcaaaaaaaaaaaaaaaagaagagctctaattactttggcgtaaagaaagacaagtgcctggatctaataattttaagaaataaaagctatggtaccttccagttctgtgactgtaatctttgagaaataaaaacagccccaaggactattggtaaaatgcaggycggatgcaaggtttgctaagtgttttgaggttacgaactgctttttgggttttgagaactgtctgtcttgcctgcttcacaattggtaaggcctggggatatatggaactaaccatgcccttaa

SEQ ID NO: 842277 - DNA, 610 bp, Homo sapiens
ctcctgctgcgtcaataaagtaaattctgacaatatgtattttatattttgggctgtggagtgaggtttaattaaaagcatggactttggatctaaaaagcctttataaaccctaagacgagttgatttgatgaatccattctcttgcagcaatttaagaatccaggttcttcagaactgagattaaagttacggtcattttcttaagatgaaataaatgaatgggaaaaaataacatccagatgttctaatattgggttaaactttttaataaattggacccctttacctggaaaagatgggaacctgaacgcaagcaagattcagtgcacaaatgagtgcatatgcaaatcaagttatgcttcccaccgtgtatttttgtaccacataccagctacctccatgaaatgattctgttttcatcctagctaccctggatgtcccacagataaacactaccttcagtcacattctcacaccacrgtattcacctggttgaacctaaacaaagatagagtttcatgtagccatttctattcttaaattttaaagactcactgaaattaaacatatgatgatttgcatggcactaaaggcagacagaaattct

SEQ ID NO: 842278 - DNA, 500 bp, Homo sapiens
tcacagaagagacgtgagagtgacagctttaaacacagatagtctaattcctgaacccatgcccttaagcactacccaagctttgaatcctgggcaaaatgaaaaattaaaatatctcatctcttaattccattatcttaaatatccatgtgcaaagttgtaaataacagacacaataaaatatagacttcagagacaagaggaaacaaatttgaaacaggttacttaaggatcttcctaacagtaaataattgggatggattttgatggtatgtttaattttgacttggaaagatggtgggagcaatatttgagttaacaaatgagatgtaatgggggaagaaataatctcttttgggaaacccagctggaatagcttaactggagtcagtagagaaaactgtagtggaaaaawaatggttaaaagatgaagcagagtttttcatagaagacattgcatagaaagcatttaaagatttccctgtgagagtacaatgctg

SEQ ID NO: 842279 - DNA, 630 bp, Homo sapiens
caggtggatttataaaaaggatttgtctttatagctgtccttgacagattttacaactaccacatatgcctcaatatcaggtatgttttgaaatattacataaatttttagttgctcaaaacagaactctgataacttcctatgctttttttctccaaaacctgcacaagcgatcatttctcactgacttaattgtaaagtgcattacccagccagaaataaacacctgccctcaattttgtcccaaatctttagagtctttgccagtcttgacatttccttacacctctcaaatcttccaatagaggttttggggtcagacggatcccaaattcttaactctaccccatactagccattagaaactgggcaaattatttaacacagaaggagacaaacaggagcagtaaaaactacacgaagtaatacaaataaagcacttaataataggtaatgccagcaatgtgtagctatcagttatcgtagcagcaggaatctcgttcctgaascccatgccatacacaaagcgtggtacttcatgttttcttaatgtatcctgtaatctctctgcagtgtctttacccataccattcctccctctggcaggcctctcttaccttttgttttaga

SEQ ID NO: 842280 - DNA, 625 bp, Homo sapiens
tccataacttttaattcatttttwcagatttgtaatcacaaattaatatagaattacaggcttaggctctctaaagctttataaaataattgtttcatttatatattcatttgtttactttttctctccaaggtagaatgaactactaccaatgtaatgtattattatcatttccataaacataaactatcttaatttattaaaactgtacttaataaaattagagagggtggtatatatactagtatgtcaaatgcaatggacttgacagtcaggaattcagtttctagcaagagctgcattaactcaaatgaacaggatcagtagatatctaattacttacctgttaatgtggtcctatacaatgcactcaaagcaaaagttttcctaagtgcttctaacttcaaggacatctaggagacaaagtagaattttccataaattatgtaggttacatagcatggccctatcaacttgtaaaatgtttagaattcatgaaatatataaatgctactatattagacaggtcatggccatgagtgctcaccacagcctcagatttattctggtaaaagcaatagcagatcattctttacatacagatactatcattatgatatccact

SEQ ID NO: 842281 - DNA, 628 bp, Homo sapiens
tgtgaattccaattttcatctactaatactgacattgttatgctaattgtccaatttcatagggatttcttccagtccaacttctctttggacatggatctttgctgaggtaggaattcctctgcatgaacacatgagctaggattctctagagaaagaaaaactgtcgagtatatttagaaagagatttatttaaaaattcattaaaaagagattcagaaagagatttattacaaaggattggcccacatgaggttgaaaagtcccatgatcttctgtctgcaagctggaggtccaggaaaaccagtaacatagttcaatctaagcctgaaagtccaagaaccaggagcaccatgtccaagggcagaagatggatgtctcagctcaagtagacagcatactagcccttcttcctctgcctttttgttctatttgagtcttcaactgtgtaggtgatgcgaccaaaattgatgagggcaatcttcatgactcactttatcaatgcaaatgctagtcttcctgatattccttcacaaacacactcagaaataatgtgtaaccagctctctgtgcatctcaaaacaatcaagttggtayataaaattaaccatcacaatgaggtacctgt

SEQ ID NO: 842282 - DNA, 632 bp, Homo sapiens
agtttgtccaggatgcaggaaataaagtcaataaaaattattgtagagatttaaatttaatgttattcaccttgttgggttttgaacttactygagaatagttacatctttcttctggcctatttctccattttagaatgggaatgtctatattatgcctatcccatcaccgaattttgaaagtagataacttattaatttcacaggttcataggttgagaataatttgctttcagatgaattgtgccttgaatctccttccccatatctgattcagaagagactctggactttggatttttgtgttagtgctacagaaagttgagactttggaggaaggaggcaagacagctgactagaggcagccaggaggaatatttgccactgagggaccaggacattgggaagactggcacacttctagcagttcttcagagggaagatattgagagaagatagaagagagaagacatacatgttgggctgaagggataggaagctgggaaccctgcatggggctaccacacactgggacccattcctggcccgcagtggctcctggggaaaggatgagatgaacagtcaaggatcaacccactctcaccatcggcctctggaatcctggcaagagg

SEQ ID NO: 842283 - DNA, 601 bp, Homo sapiens
tgaaaggcaaggtgggtgtagctactgtaatggacagcagaggcaaagtggcaatcaggatagtctgactcatgtagagctctggcattggctaattaatcatggtsttcctagaaatgaaattgataggaagcctactgcattcctacttaatttatataagcagaaaactcctaggtccaatggacaagagactaatttgaattataaaaacagagaactatggcccctcaatcaatttccagacttgagccagtgtacagacccagaatgccttgagtgaaggggagactgggtccccttgaagaaggaccccactaaactactgacaatttatgctgttaatctttttcccttccttccccaaggaaacctccagccttttttaccagggtaactgaacaatggggaaaggaaaatgatcagacattttggggactactggatgctggctctgagctgatgttgattccagggtacctaaaatgtcattgtggccctccagttaaagtaggtgcttatggaggttaggtaattaatagagttttagctcaggtccgacttacagtgggtccagggggtccccagactcattctgtgg

SEQ ID NO: 842284 - DNA, 426 bp, Homo sapiens
gcctttcagttttctcatgtgtaaaatgggaataataatatttatccatagtatttaaatacatcaggttaataataaatgtaaaagaatacatatacatacttgttgtgtcttgcctctccttttgtctctagttgcagattctaatgcaaattaggctttttcctgaaaatattatagaccatgacatcttctcagatgaatgtctgatcccgtttttctaccccctggcagcaaggatatgcctgctgcttgctcacaaatacaactttctgaccgacacttaacccatcttcaaatctcttcatttcaattctgattcttacatgtgtcttcttccgataaattawttttttaaaattccaaggtcttcatatttgactcaagtctttcatctaccatcatatagataacaacaaccacagt

SEQ ID NO: 842285 - DNA, 645 bp, Homo sapiens
aggcccaccaatgagggactgccaggtattccgttccgctgcaacaaattcccccctattttttcagaaattaaaaccctccgagaccctcaagctgtacacaatgcacaaagacctccttttttgttcattctgtttttccccaaggactgcattagaaactctacacaaaaatgtactagcttagttgctatggatagattatcatttgtggtaaaaacacttccaagtatcatgtaacaatattgttctcacagctctggtatccttcattttaactgtgtaaacactggagaaatgccacatatttaactgtttggggtcaccctgaggaactcccaactccactgaaaaatgaagtagtatgctatggtaagtccgggaactctgacttaaggagttaaggccacaggtaagtggaggtggttggcccccagggacttcactcaatgctgtccactgtgttagcggtggaacgttccccagaatgagacttcgcctctgagatcttaatgtgcaaatccagtgacactgaatgccttttgctttgttttatccayactggaaacatcacagttgccattcaaatgaaaccagagagaaagagtaacagcaggaaggatccaaaaaagtaaaggcttcagc

SEQ ID NO: 842286 - DNA, 562 bp, Homo sapiens
ctgtctcaaaaacaaacaaaaacaaaaacaaaaacaaaaaaamcccccaaaaacaagaagttaatacatgatggcaaaaaaaaaaaaaaaaatacatggaaagatgctcaacatcactatttattaggaaaatgcaaattaaaaccataatgagataacactgtacacttattaggatgactaaagcaaaacaaagcaaaacaaaacagaatgaaacaaactgataattccaagagcttatggggatgatgtggagtaactggaactcatattgctgataaaaagatcaaatgatacagtcatattgtattcttagaaaacgttggcagtttcttagttaaacatacacttacagtatcactcagcaatcacacccgtaggtgtttatccaatacaaatgaaaatttatgttcacacagaaacctacaagtgaatatttataaaagctttactcataaatgccccaaactggcaacaacccgaacgtcttacaactggcgaatgtataaacagattgtgtatccattcagtggaacactattcagcaataaagaatgaacta

SEQ ID NO: 842287 - DNA, 614 bp, Homo sapiens
ccctgggatccagcaggtctctgtaggattggggatagaggtgcttgctacttattgttttcactttaggggcttcagcccaaaatgcagagagagcaggaaaatcccatttgcacctaatgaaaatgtgtaggttgaaagttcatcaggagtgagcttgctgtgttgactgcactttgagacttcctcatgagtcatttagaaaaatatttccagattttactgtctctggaaattagtgtttgccctcaggaggtgtctgtgaatgtgtatatatctgcttcaacgattatttgctagataaacagaaaaataatagccatgtctacactggcggaaaactatatataaaatttatggagcacatctttgctaaggtgtgctctatatgtgtgttaactctttaaagcctcactataatcatcaccatatcacagaaaaggagactgaggtgcaggaagtaacatgaggaggtcacaaagctgggagaagacatcttcaagtcctggttgcttcrtttcagaattccttctttgggccactgcactcctctaccataaggctggactgcactgaggaatagagatgttcccccattgctgacttcctgatga

SEQ ID NO: 842288 - DNA, 558 bp, Homo sapiens
gtcagcaaactttttctgtaaagggccagacagtaaatatattaggttttataggtctaaagaattttaggctttgcagtctctgtcaccaggaccagttatataatttgtaaggcccagtgyaaaataaaaatgcagagtcccctttttaaaaattattaatatctgcaagatagttgcagctgagcgttaaaccaagcaggagatcattctaaaggctggggctttctatgaccatacaggtctcacgcctgtgaagccagccctgtctattacaactgttcgcccctgccattgtagtgtagaagaatccatagacaagtaaatgaatgggcaggggacatcatgatttggctcagggctgttgtctgccaacccctgaagtagaccatcttttagcatgtcagcatgctcataatattcacaaagtttatgaaatgctaacataaaaaatagaaaataagccaggcatggcggctcatgcctgtaatcccaggactttgggaggcaggtagatcacttgaggtcaggagtttaagaccagcctggccaacatgg

SEQ ID NO: 842289 - DNA, 604 bp, Homo sapiens
ccctctccccttcctttgtcctttcattaacagtttataatattaataactaacatttgcatagaattgtgtaattaataaaatatttttatcccttttttttttatatggagtcttgctttgtcacccaggctggagtgcagtggcatgatcttggctcactgcaacctccacctcccaggttcaagcaattcttctgcctcaggcccccgagtagctgggactacaggtgtgcaccaccacacccaggtaatttttgtattttttttagtagagacggagtttcaccatgttggccaggctggtctccaactcctgacctcgtgatccacccacctcggcctcccaaagtgctgggattacaggcatgagccaccgcgcctggccaagtatttttattcttaatcctacacacaatactgagagggggatgtttctcatctttcatagctgaagaaccaggagattgggatttgtccaaagacgcrgccagtaaagagaaactttcggcagcaccacattgctctctatataaataaagcactgcaataaatgcttgggtttgggaatagaagtgataatgagatgagtaaaatagattttg

SEQ ID NO: 842290 - DNA, 468 bp, Homo sapiens
gatttcactgagcacttagaacttctgttttgaccatcttgctgttctgcgttgatttgccaatacagataatatgcacagggtgcaaatgtgcaatcttttcttctttttcttttggtctttttatctttttttgtcggggggagggtctatttctcaatcctgaagttcccctcacagcattctcttcagtttattgaaagaatgtgacatgaaggagaaggtactttgtatgtttcctatcatgtgaaaaaagctcacttccatttgcacataggtcagcaaggaggtttcatctcctttaccagctttcatctctgtaacagctacttgtgagttttgttgtgargtctcatccaggctctgagagaaagtgtgctgtgatcaagggaagatgcctacctctgagtgcagaagtgaaaagtttccattctagatagaggggcaaagttctgcaaatgaccagct

SEQ ID NO: 842291 - DNA, 601 bp, Homo sapiens
aatattcatattaattaaagattaaatatgggcctatgtaagaatatggccatttagaacatttagaaaaagtgaaataggttgaaggtcaggtcactggcctgttcacgggtaaaaggggtgagggggacttttattttttcctaaaaataaaagctgtttacattataaattatgaaatccatttcagttgatttaaaaatatcctagttatattagctgcatgtagacaaaatctcaatataccctggtagcttgttatatatttttctttcatattattatgaaaacgtagatgtcataaattatattttattaagccatgttttcattgcaactcactacataaggattaaattttaaacacctcacaaattcaccaaactaactcttaagattatctgaggattttcttcttctaacatagaagtagctttttgtgattttactaatttaaaaagtaacacatgttaattgttaaaataaaccaaagcaaacaaacaaacartaagaaaaattcagaatctacaagaagttctaaaaaagaacaaaaagaaaatcctccataagatgattacccagacataattgctgttttggc

SEQ ID NO: 842292 - DNA, 592 bp, Homo sapiens
  misc_feature 1, 2, 3, 4, 5, 6, 7, 8, 9, 10, 11, 12, 13: n = A,T,C or G
nnnnnnnnnnnnntggtccaatgtgatgttatgtgggatcctgtgttggtaatcaaactctgtgcactctcagctaatgatggtgggtgaggtcctgcaagcaagaaatgcaagtccatacttagaatgcatgtataagatgagttgctgcccccttcgaggaagaaggggtccaatattgtcaacttgccactaaaatggatgtccttgagatacaatactataaagagcacacaagttggactctattcctcacaagctggacatttgacagtggaaatagctagataagcttcagtgagggagagctcaggcttttggtcccatgcagattgtccattccttcatcaggctacaccattcatgcatctattgtgcaagtactggggctgctgatgagcagtctggctaacatcagctgactaggtcattcattcttttttcttcttctactcttccagctttatcaagstacaactaacaagtaaaattgtatatatatgaagtacacaatgtgatgatttgatatgtgtgtatattatgaaatgattaccacaatcaagttaattaacacatccagcatctcacatag

SEQ ID NO: 842293 - DNA, 539 bp, Homo sapiens
gttgctgcctgatccctttggtctctgcatgtcaggacmccaagagcaaagaaagaaattactatgctagcagggataattaaccttgatcatcccgagtagagagagttgctgtcatacactggggtcaggaaggaatatgttcagtactcatgtgatccacctgggtgtctcttgatactcccttgccaattttgatggtaaatgaagaaatgaagtgaccacagactaacaaaggtatggtgacaatgagatcagacctcttggcaatgagattctggatcatcgccataagataagtcatctaaaccttcatgtgccaaccaagggaatttaaaatgacagagatgggagagaatgagtatcagttgcagactcaagaccaactacagtagcagtgtctgatgtttataccactaacactcttcttttaagtttcctcagcaaaagacatccaacagaactgtgaaggagttgctcctaggaagtggatccaagaaatgccaagaatggtctcttctttttttcttttttttttt

SEQ ID NO: 842294 - DNA, 631 bp, Homo sapiens
gaaaaaggtatgacaaaggtggctagaggaaggggctcattgctaccraaattcttcttcattccacctcgggttgttagggaaagaaacgataatgtgctacaggaaatggccaagtataaaagcaataaaataaattgaaaatgactttgtttttttgagcggcagtaattgctatatgttgtgatgtttgcataaggaattagttaatgtgtagcagaatggcatgtgatactttttatttgcttgatgactatagtctctgagtgaatgacttattaaggttaataaagaaaaatttgcttgtgacttgtaatgatccaattgctagaatttagcatccccttatgcattgttgcctaaaggggagaaggaaaaaaacctacacacattaatggccgactggctatgattttttatagtggtgtgagaacaaaacaatgtcttctaaattgttggtctgtctatctttctgcctgcctgggcaggaacgttatggctttcttaattctcctgtgtgatttatcatcctaaattcattgttttgcataactctgctcaaaatgaagaaatgtcattattttgcagcgaaaaagttgtcatttgcataatgcctgccattaattattgt

SEQ ID NO: 842295 - DNA, 644 bp, Homo sapiens
aagatggtgatattaacaaaggtcacacaacatatcttcagatatcagcatagcaaaacattaattttgttaggaattcaagtttatagaaaatattcaagattttgttccactctccaggataatagtatyttgggggaaattttaggtaagggtgaccctcttattatccttattatcatttattatggtaatgaattgcttagtgatgttggaagcaaagcaaaatgtcaatttttgcttctacaatatccataaaatatgtaagtatttttacattaatgtcatgttctagatacaattttttcatcttttcttcactgaacgatacagtccttgtagagttttgcatgccaggccattaggatccactttctttttttaactgtctcatagtattccataacatgaatatgtcattattagtcgtcctctgttggtaggaacttaagttgttgccatatttttacttataaattggttgtccttttagacgcagccagttagatgcagccatgtactcatgtgcaaaggtttctctagggaagacaccaaaaaatagaattgcacatgaaattttgttctttcctgacaaatcaccctccataaaggctatatcattttatattcccacccctctgcct

SEQ ID NO: 842296 - DNA, 555 bp, Homo sapiens
cctatatggtctgaaagggggaggatcccttagttctaggaattgcccccccgctttcctagaaaactcatgaayagtccaccccttatttagcatataatcaagaaataaccataaaatagccaacgagtagcccatgcgtgctgctctgcctatggagtagccgttctttattcctttactttttttttttttttttttttgagatggagtcttgctctgtcgccaggctggagtgcagtggcatgatctcagctcactgcaacctccacctcccaggttcaagtgattctcctgcctcagcctccccagtagctgggactacaggcacgcaccaccactcctggctaattttttgtattttagtagagatggggtttcaccatgttggccaggatggtctcaatctgctgaccttgtgatccacccgcctcggcctcccaaagtgctgggattacgggcataatctgtgagccacccagcccggcctattcctttgctttcttaataaacttgcttttgttgcaggacttttccttagttcagctaaagaca

SEQ ID NO: 842297 - DNA, 540 bp, Homo sapiens
gtaaatttacatcccattgtatgggaaagccccatggtcatgaccttgatggtttacttatatgatttgcgtcctctttcttggtgcacaggggatacactccatccatacctgtcaatatgatactgctaaacatagaatgctgtttcagagctgagtaagtggtaaggctgacataattttggtggagttgcaatggaacagtgtaggcatatgtctagtagagtgttcagtgaggtttaattcttatgacattcctcatggtacaatatgaggtcagacatcaaaacgatggatttccatggtgttttcccccagtgttcagctactatttgaaaccacttttattttatgttgccagggatttctggaagatgggattttctttttctaggtcaatgtaacaaatcaatatgaatttagtgycataaaacaacatccatttatgagctcacaatttctgtggattggacctcctagcatagtatggctcagctggttctctcctttgagtcacaagaagaaaataaaattggaggc

SEQ ID NO: 842298 - DNA, 406 bp, Homo sapiens
aaaactcgattcagggtttctaaagtaagggaatcaaatctttttagagccaactaaactcacttaraaaaagaaaaatatttcagccaagtctttttctgcacatggctctttcataaatactcttcttaagtagaaacaagtctgtagctgtttttcaatcagttcttaaagttaagacccctgtgactttcttatacatattcagacaaaaaatacgtgttactgaaattttattcacttcctcccacaaacgttaggagaagcatacattaaatataaacatgttcccatttctactcagatacaatcccttctttcttatagtgaaactactgattcagtgtagcagtcaaagacaaatctaagtaaatacatttgactcaaaacctatgtatcaagaata

SEQ ID NO: 842299 - DNA, 586 bp, Homo sapiens
gacaaaatgttgattggaggcaggggtgaggagggcttagaatgaccatctgattttcagtcatggcccatgaaggcttctgctgagtcatccyctatctctaacaacatctccactgggacaaggacatagtttgctactttcaactgtaaaatgcaccattgagccaatcagctttgggggcttgccagcagaacatccaggaagttatcccaagatccttaggttcaccttcttgttccatttctcaggggaaattaatttctagtctgggagagaagaaaacctctcttccctctgctttttcaaaactctgaaaatggctgaaaacacacaaaaactactttttaccttctttgataacccacgaggatatcctcagaatatcatggagaccctacaaacttagtcttttggataaagtcagaaaagggattacttctgtttttcagccctttccatatatatcatcccccaaaaagaacacactgctgtctgattgaataagcagaatagaagggaacttaaaaagagaacttttataagttaatatgtagaaatgttatctctccaaaattgtgtggct

SEQ ID NO: 842300 - DNA, 606 bp, Homo sapiens
atacattgtatattgttccaaatgatttggaaaacaacataacattatatcataaagktgaacatgtttaaactctgtgtaacagcaattcaacaccaaggtatttacccaaaggaaactcttgcacatggttattcaaaaatatatacaaaaatctttgtaccagcacctttcaaaatagcaaaaatttttgaaacaacccaaatgcccattgacaggagaatgagtaaactaattatgatacattcacacaatggaatattaaacagcagtgaaaatgattgaatcacaactacttgcaacaatatgttgagtgaagaccaagtacaatattctttcacaaagttcagtgcaagtcaaaacatgtatttatattaaagcgaatgacgtgtcaaaacaaaacaaaaagacaacgggacaataaacacaaaattagtatagtggctatctctgagggagagggaggatgggagaggggcagaactcagagttaaagtaagtttttgttatgtttaaattcctgcgttaagtagcaggttcatggatggtcatggaataatcaataacatgtattattaacattataaatgcaggtgaggtggatcc

SEQ ID NO: 842301 - DNA, 433 bp, Homo sapiens
aggagaatgagtaaactaattatgatacattcacacaatggaatattaaacagcagtgaaaatgattgaatcacaactacttgcaacaatatgttgagtgaagaccaagtacaatattctttcacaaagttcagtgcaagtcaaaacatgtatttatattaaagcgaatgacgtgtcaaaacaaaacaaaaagacaacgggacaataaacacaaaattagtatagtggctatctctgagggagagggaggatgggagaggggcagarctcagagttaaagtaagtttttgttatgtttaaattcctgcgttaagtagcaggttcatggatggtcatggaataatcaataacatgtattattaacattataaatgcaggtgaggtggatccaggttttgtagaggcttcttttggaaaaataatatgaagttat

SEQ ID NO: 842302 - DNA, 619 bp, Homo sapiens
tctatctttcaaattgcttakttattttagcacttcagttgtgaatcattgtactaagtaattgcaagctttaacttctgtttgcatatgctaaggtgtgattagatataatcaaacaatgcaaactgataaatacaatgcaaagtttaatggcttaatgtgcccccatcatatcaccagatgcatcacaaaagtcttttaaattagtgatcaaatattatttgttttgccaaaccatacaattttatttgcaaacaaatttagaaagttatatttaaaagtaatcatgccaatatgaaacacaaaacctgttctggtgaaatagtcacacttagacatttgtgccagtaagaattattttacattgtgttttgaaattcagaacttgaaaataaattttgtggtttattgaacaccttcctgagtaatatgctaacccatgaggcaaaaagtcctggcccctgctggcctgaccttcttcatttacctgggggtggggagggcccctacaaggataattcaggagctggaagagcaaggcacagaggcaataaagaagggtaagtgggaggagaaatacagaggagaatggaggaagcaacagagggtgcaagaagct

SEQ ID NO: 842303 - DNA, 612 bp, Homo sapiens
tggatcccttcctcaaaccttatataaaaattaattcaagatggattaawgacttaaatgttagacctaaaaccataaaacccctagaagaaaacctaggcaataccattcgggacataggcatgggcaaggacttcatgacttcatgactgaaacaccaaaagcaatggcaaaaaaagccaaaattgacaaattggatctaattaaactaaagagcttctgcacagcaaaagaaactaccatcagggtgaacaggcaacctacagaatgggagaaaatttttgcaatctacccatctgacaaagggctaatatccagaatctacaaagaactcaaacaaatttacaagaaaaatcaaacaaccccatcaaaaagtaggcaaaggatatggacacttctcaaaagaagacatttatgcagccaacagacatgaaaaaatgctcatcatcactggtcatcagagaaatgcaaatcaaaaccacaatgagataccatctcacagcagttagaaaggcgatcattaaaaagtcaggaaacaacagatgcttgaaagggtgtggagaaataggaacgcttttacactgttggtgggagtgtaaattagttcaacca

SEQ ID NO: 842304 - DNA, 619 bp, Homo sapiens
tgagttctctgcagcatcggctgggatcctatccacagcccaagggcacatggcgctgctgggagaggccagtggccagtgctcytgtgtccaacaggctctacacgctggggaaggcccagagagaaaggagtgtgcctgcaagtacaggatctgtgaccacgaccctgtcaacacacagggttttcccacaggacacgtgttctggaggcagaggttcaggaggtgctgcaggagcttgagtcaggcctggcatttctgtgattctcttggcctttccttgctcattgcctcatagttatgaaatagctgctgtagctccaggcattacatccacctgccaaggagagagatcagtaaaggggagatggtgagtgcaaccttgtctggaaagacagggcctcccagggttccccctcatcatcagagggtgtttattaaggtgtcattgattgacactggagggcatgcacccctcgtcatcagggcagtgtaggtggtccgcacctggcctgctggttaagggcccaggttcttggtaggagctggactaacccaggggcctttgggaaacctgaaggtcattttacatgtggcatccgcacacctgagaccttca

SEQ ID NO: 842305 - DNA, 527 bp, Homo sapiens
agatgctgctcagcatccctggaggctgccggcctggaaatgcaaatcctagcgaatttcagctcccagggaaagtgcagaaggcaccggaacttcgcggaaacacagaaacccagggaaagcctctgagaagagaggaccccaggggctgggggaagagcccagggatgctgtgcccgaggccctggatggcagcgcctcctgaaccccgaggccacaaccggccctgaaggctggtacacaggcacgagtgcctgcggggagaaaggtggggccgcctgcaggccccaagcccacacccatcctgaccctcagatggggccctcccaggttatccaggtggacctaaatccgaggactggcgtcattttgaggagaagagacacaaagacacacacasaggaggggccatgtgaggacggacaggggcagagataggagcaatgcaaccaccagccagggatgccggagtcagcaggagtgggaagaggcaggaaggatcctcctctggggcctctggagggagc

SEQ ID NO: 842306 - DNA, 531 bp, Homo sapiens
ctcttatgaggtcagaactctttgaaacaaagcatgacctacctgccagatggtacttaaggttaaatggaagaaagataaggaatgaaaaggttaaaatcctttaattcmatttaaaatggtatgtgggtcaatgccacacagtccaaacaaaacccttcggatgggccatgtgcagcctgtggccacctctttgtgactgaggtcagtgaagacatggcattagatgaatgacactcagcaggtggtatcaaaggctttaccaggtgatgtccttccagctcctctagtctgatgggtcaagtgctcctattgctcctccccagcctttgctacaattgtggttagctagcattttgtgtagctggtctgtgaagtcgatctgctccactagagtatccagttgactagggaaggaagggatgtgtctcctttacctggctgggccctgatggagcaatgcacttggaacattgatactcaatacatgaagagattaaaaaaaacacaaaaaacgcttacagtggatta

SEQ ID NO: 842307 - DNA, 649 bp, Homo sapiens
ttggctgagtcagggtgaaaatatgtaagggggccctctggacctcatgacacttgagatgaaaaatgttatgctgcctccatactataacaatctgagwctataaacaatgatttaattaatgaccatagaagaatacttgctcaccgatgttacatggtccaaaaccccttaactgacgcaacgtgaagccaatgtttatatgggcacagatgactggaatatcacattttgatggcattgctactttgaagagtggcaaacagtgacattcccaaggctctttacatagaagcagaatgaggaagatgaaacgatcaagaagggctgactctggtaggaagggaaataactggatgtagacaggaagggaaggagaattattatggaatccacagcctgtccagccaagcagctactattacctccctggattttctgcactgctgtactcagaacttataaatcctaaaggctatattctatagccaggccctaaaatactctgagttgactaaactgtcttcaaaaggatgcctcaaagattcttataaacaatgactaaaactaaattatggtgtaatattagttgattaagacaagacttcaatttcagtaattttcatcagctggacacagacagtggtaa

SEQ ID NO: 842308 - DNA, 616 bp, Homo sapiens
atgttacagcaaaggagggccaaacatagacctcaggcatcagttgcctgctcacccttcagtgcagagctacacacctgccatgttctgggaaaacactcaggtgtcacactctccaggagctgtcacgaaccatggatattcagggaactaaccagtaaacaaaagataataatatcctgaaaatacagatggcttctttggaaaagcctctttaccatagtgaatggtgttacctacattcagaagcaccaagcaggttcattgtttttgcattctttacagatcacagtagggcagagctttgtttagaaccatcttctctgattgctgctgggctcatgtgaaaagtcctacatgcttgccaggaaacaaacttatgtttgtactgactatccatcagagtaaagggtaaaaacttcagaactctaaaatggtgatctggtttttgaaaagtcttctggaatctgtcctctttaaatttttttttaaarcaaaatctggttacttttgagacaacttaattaagtcccatctgtctcaatgtgactgccctctgttttgaagtggaaaaaaagagagagaatccaaactggcaataatgtccttttaattg

SEQ ID NO: 842309 - DNA, 547 bp, Homo sapiens
atgctatatataggtcacatatacccttacccccattgtsttatactcagtcttctctgcacacttacttcaccagcttggctcatgggaaccttttccttttcacatggatgctaaacagtatgtacgtgttagactgttgctttgcaatagcagcaggcaaccctactttggctgccacagcaccagcagatgagaggggagaaggcaggtccctaggagaggacaccgcaccagttaccctgacaacaagcaagccaggcagtatctatcattatcccccttttatatgtgataaaaagcacagaagggttatgcaagctgtctcagatggcacagctgctaagtggcaaagcaagcatttgaaaccgggtcctctggctccagggcctgtgttcctaactaccctagtacactccagccaggaaagtgtaatccaggaatcactccataagtgacataaatacctaagtaggaaggaaagtgaaatcattcctcattatacaagatgtttatttgactctttctcgaatagctccatattgca

SEQ ID NO: 842310 - DNA, 589 bp, Homo sapiens
tacgaaaagttgggaagtgtttccctttcctttattttctggaatatttgtgtaaaattgctattaattatcctttaaatgtggtggaatttagtgttgaaactagataagactagasatttttattgattatgaaagaggaatgtagatgtttccaaatggaattgtggatctgtctacttcttctttcagttctattactctttctccaggtaaatgtttcatacattttgatgctttgctgttaggtgcatatatacttaggattgttgtgtcttaattgtgaacccttttgttattctgtaatgtacctctttcttcctgataattttttgtactctaaagtttgctttttctgacattcacatatgacattcaactttcttttgattcatgtttacctagtatatatatttttatatatttttaatcctttacctttaacttacctcattatatttgaagtagatttctttttaataacatatagtgggattatatttttcaaattccttctgatgagttcagtcttttaattgttatgattagaccacttgtatttaaggcaattattgactcgtttggattt

SEQ ID NO: 842311 - DNA, 544 bp, Homo sapiens
ctccttttcttcagttggtcacatattggtagatttgttgtctgctttccagacaaatagtgctgtagtgagagccagggccatacaagcctggagctgaagcattttaactaaaaaaaaaawtgtcgaaaggatcttaatcagatgagaaaaaaatggtgagcattatcccctaagctttcagaaagataaatacttagtgttggaaatatataaacaggttggggatcatcactggctctggagacaacgaagaccatgatcattaatgtttaaagggcagttctattttcttagtaatatggtggtttgaatggggaacacaattattcagtccaggggttctcaaactataaaagtgcatgtccatgaacatgtcataccttccaaccagttttggatatgtactcagatttggacataaacttcatacatactgcttcaaaatcctgccacaccacacctctcaagaatcattaatatacacttttgttcacttttcaaatacaagtcacaattaaacatgtttgtccaaaccacaagt

SEQ ID NO: 842312 - DNA, 672 bp, Homo sapiens
cagtttgcaaagtacttctacataacttaccaagaaaaaaaaaaaaccaatgctatgattagagattttccttgtttagttattgctagttttatgagtctcttttcctctgtaaagtgaarctaatctcaggatctagatttcataattgttgtgaaagtcaaatgaaataaagaatgtgaaaaaatttcatgaactccattgtattgcacagtaatagaattttgtaaaatcttatcaaattcaattattatttagatcaataataatatgttaaggactttttatgtgccagagaatatgctatgtgccagaaatataaatataaataacacatagtccctactctcaaagagctaaaagtttcatgtgcaagacaaaaatggggaaaatgatttcaataaaatatagtaaatacgtgataaaggcatacttaaaatctgagggtgcatagattagtccaatcatgaggtatacaaaaatatcctggagaaaatgatgtcttaaagaatgagaaacaatcttgaagaatgtagagttgaaaatccctagtttttaatttaccactttatagagaaattaagtatcagtttgttctattaatgtataagctatttgtaccttgctagctcccctattacagtgaaaacatctttaggaagggaccatgtc

SEQ ID NO: 842313 - DNA, 361 bp, Homo sapiens
tctataggtggcagagggagggtaaagtcaaagaattcttcccaaagaaactattacaactgaatcttgagagatatgttaactgggtgggaaaaaataggaaaatttttccagggagacagagtaatgttcaaaggcagagacctgtgtcaaaacatgcattttggtggaacattaagtggtttgtaaggcatacatttataattctatgtacaaatatttatttgaaaattagtttttcttactatcaaccctaatacgtagtctttagctgctatatatacttagactccctctccacatgtatttataatttataaatacacacacacacacacacacasagagagagagagagaga

SEQ ID NO: 842314 - DNA, 573 bp, Homo sapiens
agaaaagaaaacaaaaatgttttcttaccttctcttgattgaacctgattttcaaggaggaattttcaggagtttctctttggcatccttcttttctacccagtccactcctttctcttccttggtgccttttgttcttgcctcaataatgaacatggaaaagaggtaaactggcttttttttttttttttttttaagatctgttatatgcaaggcacttgtgtcattctatcttacataacaaccttgtggggaaatattatcttatttgatagtagagctaattgagatgtgaagaggttaagttacttgcccaaggtcacaggaaaggtgatagaaccagattaaaatccaggagtgttcaggagcccatgttcttcctgctacagtgtgctaccatggtatcaccaggtttccacgttagccacttactcccaagtattacataygtaaccagtgcttgcttcagtgatcctttaatctgcatttccagttccagtagtgctgttgatctcagctaatctatgaggaaagtagtcctattaaattaatttacagagtccaaatagtaaa

SEQ ID NO: 842315 - DNA, 610 bp, Homo sapiens
agcccggacttgtgactaatgtgtgtaggggggcagtcttgggaacagagccctcaccctgtgagttctgatgatctctatctttgggtagatggtgttggaaccgaattggaggacacctggatggtgtccactgcttggtgtttgggggaaaaccccccacacatttggtcacagaagtcttctgtgttgatgattttttgtggtgtgacagcagagggaagacacagtttgaggtgagtttttgcctatacgccattcatatgaggtatctaaaacagtcaaacttagagaagcaggaaacagaatggtcgttgctaggaaaggcgaggagagggaaaagggagatgttgatcgacagttcagttattggagatgagtaagttctagagatctgttgtacgtcacagtgcctagagttaacaataaggttttatgcactcttgagcaactccgaagaagtgactgatcatgcttttgaccttgcaaggaaaaattgtggtagaaagcaaaaatcccttgagatgcttttcaacaactcaagatgctatttaaaagctttgaayattaatagatagttgtaaagccttaaccttttacgagagtggtt

SEQ ID NO: 842316 - DNA, 554 bp, Homo sapiens
gttccatggaagcaggaggcttaagctctagacccatggctgttgtaattacacataactcagrcattgccataagggacccttaggatggcagtacgacacttgttcctcagaataccctacatgcaaatttgccctcccaagagccatattttacaaagtgataatcttgggaacatggtccacccaaatgcctctgcctgcagtggatttctgcagacttcagacaatctgggcaccatcaaagccaagcactccctggtgtagtatctaatagggaccatgtaattagggcatgttttatgtgagattctgctcaagagatgtaagtacaagaaaaagacagcttttcacggcagagataagataattgagctgtctggcatagtgactcaaagccattgaaggttctagtcaaatgattcctctggttttgactttttaaatggctctttcactgttgttgcctctggcaactaccattataattggaggaaattttgttccgctaagaggctactccatttacggactcaagccagaccaaaataatg

SEQ ID NO: 842317 - DNA, 633 bp, Homo sapiens
aatatgtattataagaatgttgtaacactatatcccaatacttctcctacacaacatctgtagtattttgtcacatattttatttttacatgtaagataaataaatatcgcattgctattactttttaataagtggtcagttatcttctagagcaactaaaaatatgagaaacatgttttatttttaccttcattcattttattttcagcgcccttcacttctttctgtatagctatactagtctgttttcacactgctgtaaagaactaactgagactgggtaatttatgaagaaaagagggttaattgacacacagttccacaggcttgacaggaagcatgactaggaggcctcaggaaacttataatcatggcagaaggtgaaggggaaacaaggtacatctttccacagaagagcaggagagagggcaagtgaaggtgggagtgctacaaattttaaaagccagatgtcatgagaactcactcacyatcatgagaacagcaagggggaaatctgcacccatgatccaataactgccaaccaggtccctcccctgacatgtggcaattacaatttgatgtgagatttcggtggggacacagaaccaaaccatatcaataaccaagtttaa

SEQ ID NO: 842318 - DNA, 638 bp, Homo sapiens
aagaacctcctttaatatttcttatatagaagctctgctgacaataaattctccccayttttatatgtcaaacaacatcttcatttctccttcatcatgataactttcagtggttataaaattcggagttgagagttgttttctttcatcactttcaagatgtcacccttttgtcttctgacttgccttgtttctgataacaagtccactgtacataatatgtctttttcttgggatgtcttccaaattttctttttaacttcggtgtttagcaatttgaatatgggttcctttttatacatgtgtttatgtgtgtatcgttctctgagcttcttcaatttgttttggtgtctctcattgatttttttctcattaaatcctccttaatttctttgtcattaatttcagagaattatttgccattatttccttaaatatttctttggtcctgttctctgtttctccatctgggattacaagtacacatatttaagactacttcccagaagattgcaaatacactattctacctcagctctcaatttacccgttttcaagtataataattctgtcctcaggtgtaccaaccatattgatgagcctatcaaatgcattcttcacttttgttgctatgtttt

SEQ ID NO: 842319 - DNA, 494 bp, Homo sapiens
cagaagattacccactgcctataaaggaaggacccagtcctggtaggatccatcacttgctgaccaaagaaccgtgggaccctgaaaatcaccagtggtagccacgtaatacacccagtgggccttgggtaagactgagacatgctggcttcagatgtgatccagcaattcccagcagtggtgactatgaggaaagattccttctgcttgagaaatgcagagtgaagagtaaaggggactttgttttgcatcttaggtacccgctcagctgcactggggtgaaacaccaatcaggatcttgtagtcctcaattctaggctttggctcttggatggcatttctggaygtgccttgagccacaggggagcccactgccatgaagggtgagtcctaagcctggcattcaacacaagctgactgaagatcccttgggctttcagtgaacattgctggtagcctggcacaactctttgtgggtctgtggcagtggggac

SEQ ID NO: 842320 - DNA, 494 bp, Homo sapiens
cagaagattacccactgcctataaaggaaggacccagtcctggtaggatccatcacttgctgaccaaagaaccgtgggaccctgaaaatcaccagtggtagccacgtaatacacccagtgggccttgggtaagactgagacatgctggcttcagatgtgatccagcaattcccagcagtggtgactatgaggaaagattccttctgcttgagaaatgcagagtgaagagtaaaggggactttgttttgcatcttaggtacccgctcagctgcactggggtgaaacaccaatcaggatcttgtagtcctcaattctaggctttggctcttggatggcatttctggatgtgccttgagccacaggggagcccactgccmtgaagggtgagtcctaagcctggcattcaacacaagctgactgaagatcccttgggctttcagtgaacattgctggtagcctggcacaactctttgtgggtctgtggcagtggggac

SEQ ID NO: 842321 - DNA, 522 bp, Homo sapiens
tagcattactgggtttggggtccccctaatgcagatatggctgcagtgaccaaaacttagatcataacacacaagtccattcaaaatcataggaagtcttccctaaaaggrcaggtatgaacaagcccagactgtgaaggctacaattaattctgaattctgtaatgcccagacactgacaaatatccacaagaatcaagaccatccaggaaaacattaccttctcaaatgaactaagtaagtcaccagtgaccaatcccagagagatagaaatatgtgatttttcagacagagaatttaaaagagcttttttgaggaaacacaattcaagataacaaagagaaagaatttaaaatcctatgagataaatttaacaaggagattgaaataattaaaaagaatcaagtataaaatctggagttgaataatgtaattgacatgctgaagaattcatcagcgtctcttaatagaattgatcaaacagcagaaacaattagcttgaaggcaggctatttgaaaata

SEQ ID NO: 842322 - DNA, 596 bp, Homo sapiens
cacagaattgaacctttcttttgattgagcagtttggaaaaactatttttgtagaatatgaaagtggatatttgaaaggctttgaggactatggtgcaaaaggaaatatcttcacattaaaactagacagaarcattctcagaaactttgtgatgcatgcattgaaatcagagagttgaacctttcttttgattgaacagttacaaaacggtgtttttatagtatcttcaagtggatatttcgtgccatttgtggcccatagttgaaaaggaaatatcttcacctataaactagacagaagcattctgtgaaacttctttctgatgtgtgcattcatctcacagagttgaacctttcttttgattgagcagtttggaaaaaccctttttgcagaatctgcaagtggatatttgaaaggcttgaggcctatggtgcaaaaggaaatatcttcacattaaaactagacagaagcattctcagaaacttctctgtgatgcatgctttgaaatcaggcagttgaacgtttcttttgattgaacagttacacaacggtgtttttgtagtatctgcaagtggatatttggtgccatttgtgg

SEQ ID NO: 842323 - DNA, 479 bp, Homo sapiens
tcttcacaaaaaaaattacacagargaattctgagaaacgactttgcgatgtgtgctttcatcttacagagttgaacctatgtttttatagagcagttttgaaatgctcttgtttagagtctgcaagtggatatttaaagcactttgaggcctattgtggaaaaggaactatgttcacataaaaactacacagaagcattctgagaaacttctttgtgatgtgtgcattcatctcacagagttgaacctttcttttgtttgagcaatttggaaacactcttttggtagaatctgcaagtggatatttggagtgctttgaggcctatggtggaaaaggaaatatctccacatagtagccagacagaagcattctcagaaacttctttttgacgtgtgcattcaactcacagagttgaaactttcttatgatagagcagttttgaaacactactttgtagaatctgcaagtggatatttgg

SEQ ID NO: 842324 - DNA, 556 bp, Homo sapiens
atatgcaaaagtgtctcgcttgtgggacaaaaggtattgtaactcatcctggaaacacactacccttaagaaacccctcagaagcacaggggcagtcatttggggtctctggggtttcatgaaatacagcatcacattttgcagctcaaagcctcctatttattggggactcagtgaagaaagccagaagtgtgatgttgcctgggtaggagagcccggcctgcagccttctgctagcagcagcaggaaactgcagccctgaatcagggcctttgttctcctgaagcctgcagggagtaggcccttctgctcacactgcccttgggcagcaagcgtgtgtccctgggagcccatggtggcggccccctaggtgcagcaggagttgggcctggaggcctggctgggggcagctggggacagcactcattgtttctgcccctgctcctctcgcrgcagtgaggactgggctcccatccagcaaaaagggctggaagctttctgcaagaagcacccaggcttggttggttggttggtttgaaatgtatccattatttaa

SEQ ID NO: 842325 - DNA, 584 bp, Homo sapiens
aggaacgaggaatttggattattttgttataataaggtagtcacatgccccatgaagtggaatactgttatttgaaagtggacttggattcagcctaagtgtatattgtaaagtctagggcaaccactaaaagaagtaaaaaaagaagtatagatgatatgctaagaaaggagagtaaatacagtcatataaaatgttcaactaaaactacaaaaggcaggaaaagagtgaacaaaaaaaataggaacaaagaacaagggcaacaaatattaacagaaaacagtaaccaatatggtagacattaatccaactctataaaaatatcactttaaacatcaatgatccaaatccaccaaataaaagacagacacagagtggtgttagtaaacaagaccatctctatattgtccacaagaaacccactttaaagataaagacatatataaattaaaattaagtgaatggagaaaagtgtatcatrctaacaaatcaaaagaaagccgggtagctatatcaaagacaaagaaggcattgtatagggtcaattttaaaagaatacataacaatcttaagcatacatacat

SEQ ID NO: 842326 - DNA, 513 bp, Homo sapiens
ttgtattctcaaggtttctgttactgatgactaggcttctggtttcaatttaattttttttagcttttaattttgaacatattttaggtgtactgaaaatttgcaaaagtaatgcagagtctcaataaaccttttacccacctaaccccaatgttaacatcgtacataaccgtagtaccaaaaactaagaaattaacattggtacaatactattaactaaaccacagactttatttgaattcgctgatgttttccttactgcctgtttctgttctagcaccctctccaggaccccacattacatttagttgccatttctccctagttgcctctggcttcttggtctacccttgttttttatgaccttgacaatcttaaggaatatttgccagcctgggttttkctggcatttccccttgattatgtgggagttaggaatttttggaaagaacatcacagaacaaagtgcccctcccacctcactataagaagaggaatgtgacatctacatga

SEQ ID NO: 842327 - DNA, 642 bp, Homo sapiens
cagctcatttccagtcccagtttcccaaccagcaagcccatacacatctccctgcttcagcaagccaagatccgctccccttaaaaatcagtacrgggccataaatcacatgattttttccctcttagagggatgattagacagataattcatgtaactgaatcacataataatcactgaatgaaaggcagccattgttttcattaatggagagagcataccttccctgctctcttctcttctacaccactatgagttgatgtcatggcagattctatggcagaaaagctcttcgtctggggctaccaccgcagagtgggggcattttatcacctttgggaagaagcacagccatcactaggcacagaaatctatatgttgtgaacctgtgggccagaaactaggcagtctccccaaatggaaataccatcaacaactggaaagtttgtgatgagatcttgttctggagtattgagaaacaggagtcccacttacaccaagcgtgttctttattctaccccaaaggtagagggaaacagcagtgtggcatatgagaagagagcctggccattagaggacctggccagatctgctatgaaccatcaccccacataacgtcttggcctgctaggtgcaccgggt

SEQ ID NO: 842328 - DNA, 638 bp, Homo sapiens
ccaagctggaaaacatatttcagtatatcatccaggaaaacttccccaacctagcaagtcaggccagcattcaaattcaggaaatccagggaaccccagtaagatactccatgagaagatcaaccaaccctaagacacataatcatcagattcttcaaggtcaaaatgaaggaaaaagtgttaagggcagctagagagaaagtccaggtcacctacaaagggaagcccatcagattaacagcagacctctcagcagaaatcctacaagccagaagagactgggagccaatatttaacattcttaaagaaaagaatttcaaacccagaatttcatatctggccaaaccaagcttcataagtgaagaagaaataaaattctgtttggacaaacaaatgctgagggaattcatcaccaccaggtctgtgttgcaagagctcctgaaggaagcacaaatatggaaaggaaaaaccattaccagccactacaaaaacagactgaagtacaaagaccaatgacactatgaagcaactacatcaacaagtctgcaaaataaccagctagcatcatgataacaggatcaaattcacacataacaatattaaccttaamtgtaaatgggataaacgtcccaattaaa

SEQ ID NO: 842329 - DNA, 488 bp, Homo sapiens
atccccttgtcagtgaggaactgagagcaggagagctaaatgattggctcagtgtctcgcacccagtaaaggctagatctgggctgccaacgccarcaataattatgcagaaatgtttctttcgctaattaaaagccagaaaagcaatgtactaattgacagtgggtgaggttctggttggagagctgagtgagggcactcatctttgtgagacttgccttcttacttagtcactccattgaagacaccaagtgacagctaagattttccttggatatcctggaatttgaccagaggttattggctgtcttcaagggatgtttcaacctagcaggactgatgatctagaagcagagctctgggcagcggtggagacaccctgagagcctcactgcttggctctcagtttccagactcctgcggacccccaccctctgctatgacaacacaacattagctcagattcattgcagttcaactgagtaggt

SEQ ID NO: 842330 - DNA, 623 bp, Homo sapiens
tatgcagaaatgtttctttcgctaattaaaagccagaaaagcaatgtactaattgacagtgggtgaggttctggttggagagctgagtgagggcactcatctttgtgagacttgccttcttacttagtcactccattgaagacaccaagtgacagctaagattttccttggatatcctggaatttgaccagaggttattggctgtcttcaagggatgtttcaacctagcaggactgatgatctagaagcagagctctgggcagcggtggagacaccctgagagcctcactgcttggctctcagtttccagactcctgcggacccccaccctctgctatgacaacacaacattagctcagattcattgcagttcaactgagtaggttaccataaaccacattccaatgtgttttcctggggagacaccctggggtcaccctgactggacttgggggagactctcgtgtccttaagtgaatttgtaaggcatcctgttctccttgacagaaaatggggagaatcctcaytcacatcaacagcacatttacaaccatctcctgagtggtttatttctgcagatggagaatctcagtcattttatgttcttattgttttcaatttac

SEQ ID NO: 842331 - DNA, 608 bp, Homo sapiens
tttatgatgcaggaaaccatgttgagggcaagagacaggcaggctggttatgaagtttaccaagagccctcaagaatacttctaaaaagaaagcctaagtctagtaatgaaactgaatcaaaaaccaaaaatacagacagatgtcagactcaggaacacattctgctagttcctttagatgtttaataaacaaagggtgctgtaatcaaaaacatttgggtagttgttgggctaaacagattttttgttttgttgtttaaccacatcttactcttttaatattctggtgtccatcatgaatctccaagaggcctgggtagtaaatggtgttaccaaattcattccacagggtgccattgttcactaaagcatctattgggccttgtggtataagaaagagcttttgggaatcctaagcctagtcaaaacgtctgattttaaaaataagaacactgagtcccaggaagttaacagatttagccagtgtggcatgaccacatagacagagctggaacaagaacaccaactccctggcacgcctactatgtggttcaacacaacataccaygtgcccacatttttcttttctccttgctgaagtcagcctt

SEQ ID NO: 842332 - DNA, 509 bp, Homo sapiens
tgaattttaatcaaatgcttctactgttccaccctcaagtatgacatttgctatgtctttttaatcaagttaacacattttgtttactaatatagtgagttgcagtaacaaaaggtctaaatttgaacctttgttgtactcctagaataaaccctagttgacaatttcaagaatggtttattagtaaataaaggcctgactttaaaataataataaatgcaggaaaaagaatttcaaatgttttcaataaacacaggagggagcaaaggaaaactggaattgaagcatgataagcattttgtcttgtttcaagaagagcttattaatacaaatgtttttcaacatttaattaaaatattttaagcacatgtatttagcataaattcaatcttgagaaaagtggraatagaacatgtgatttccaaaccactagcacaaaaaaggaaacagaaaatttctttaatcagtaaaaataagagaagaaaaaagaaacatgcaaagattttaaa

SEQ ID NO: 842333 - DNA, 694 bp, Homo sapiens
ttataatagctctgttggaattcattaatagtcccatgagtctcataagaaaaaggaaacaagaaatagtgccactatgtgctttgttttgaacatattaactaaacattacaagagcagattagaaaagcaatcactttatttagttgagtaattaccaacttgaatccctaaagatcagttattgtaacatgttctataagatttccattaggagtcttcaatgagtcaataaaaggtcatgtttatatacattgaaaacacttgaaagaataatattaacatagactcttatgccatgcccatactttcccagtgaaaggtatttctctaggaaatatgttgcttttgacatcagtattcttaaaaatgtgcaacagatataaacgtcgaaaatcgctttcattttgttttgatttactagcattaaagagaagccaatgttaagttcattggtgtggaaggaggtcttatttaatggcatactattgatattgactattccattcatagatgcagaaagccatcacagtccataagtatggtgatactccagcacawtttttttttaaatctggcaaggtagacagatacagtttaccctccatatctgtgggtttcatgttcatgcgttcaacccaactgcagatagaaaatattaaaaaaaaaattatactaagttccagaaaacaat

SEQ ID NO: 842334 - DNA, 618 bp, Homo sapiens
ttctcaatactaaaagaagtgtgtctaatgtttgacattattatgactttactgtggatttatggatactctttatgagaaaaaawttcctctatttccgtaatttcctaagtttttttctttttgtttatttatatgtattggtgttgaattctatttaatgcttttaaagcaactattgagatgataatgtggattttctcctttaatctgtttatgtgatgaattgcattaacagagttttataactaaagccaactctgtattcccaagataaatccaacatagagatgacacatgttgattttcaaattaatttctagattcagtagcttatattttattgagtaattttgcattaatattcattagtgatattggcctataaaattcctttttagtgctgttcttgtatgttttagtatcaatgtcatattggccttgaaataattaggaagttctacctctttctattttcagtgtccaatataaccctactgatacccacagtttgactagagtttaaataggtttatttatgacaataggtcccctgacctcccttttcttagagcagttgctttagaaaatttgcaattagaaattctttccttatcc

SEQ ID NO: 842335 - DNA, 595 bp, Homo sapiens
ctgacatattggtgctgaagccctctgtgcttcccctaacaccaatagcagggtctccattgcctgctgggtaataagttacctgrctttaaaatcttatcttattcctttctcagaacactcctggtaacaagttcacatataggattctctagaaacagttctgaagtggagcttggtgtttaaggtatttattgagttccacccggtggaaaggagggagatgaagcaggattaagcagaggaaaagtcaaactgccactcaagcccaataaaaccttattcaaccccatggagagctttggaattacatgcagccagtcaaagctatcttacctttggccagaatggttaggcatttacactagcacttcaataagccgttggatgtggagccactcccctcctgaccactggaaggggcagacgcttgggtaaggctctctgtagctgaggcaaaccctaaaagagctgatagttggagcaagaaatccttccttacagggatatctggatagcacatttctgtgtccactataattgttctacaggatgttaacagaagtgctggaaaacagtgcaatactctcaaacc

SEQ ID NO: 842336 - DNA, 630 bp, Homo sapiens
tgtagcccaaaatacacttgatatgatttcaattttcttaaagttgttaagacttatcttgtagctgaacgtatccttcctggaaaatgttctatgtgtacttgagaaggatgtgtattctgctgctgttggatagaatgttctgtatatgtctgttaggtccatttggtcaaaagcgtaattcaaggccaatttttgaagtttattttctgtttaaatgagctgtccatagttgaaattaaggtattgagtttcttactattattgtattgcagtctatctctttcttcatttaataaatgcgttatatatttaagcgctctaatgttgggtgcctatgtatctacaattgttatatcctcttagtgaatggactctttatcattatacaatgatctttcttgtttctttttatagtttttttactgaaagtctattttgtctgatataagtagagctatccctgctctctcttggttttggtttgtatggaatatctttgtccrttttttcccttctagtctatatgtgtccttattagtaaatctcttgaaggcagcatatagctgaatttttaaatgtcttttgattggagacatattgtaaatggtttgattaatccatttacat

SEQ ID NO: 842337 - DNA, 560 bp, Homo sapiens
actagctgaatgcagaaaattgcacccagctgaactgagccaccacataggaataataasacacacacgcagacacacacacacacccctcaaatatctaccacctgccttagttcaccacatgtgttgtaaaccccatggattcatacattgtgttaaaactttcaatccaatttcatatagaattccttctacctcttcacggtaactttaaagccggaacccttctgacttaagcacagttccaggaagacctctattgacacgtgcctttgtcttatcccctgttcttgggtgagagagacttgtaacttacatctaaacataaaacatggagagtcgatgggctgcctctcccatgatcataatacattgtatggcaaatgtaagaaaaaaaggtaaagatgtaattgagttcctttaccagctggctttttgttaataggcagattattctgagtgggctttacccaaccaggtgagccctttaaaagagggtaaaagagatggaagaataagttagagatgctttcctactcttcatgaagaagcaaatgctg

SEQ ID NO: 842338 - DNA, 567 bp, Homo sapiens
tgggctgcctctcccatgatcataatacattgtatggcaaatgtaagaaaaaaaggtaaagatgtaattgagttcctttaccagctggctttttgttaataggcagattattctgagtgggctttacccaaccaggtgagccctttaaaagagggtaaaagagatggaagaataagttagagatgctttcctactcttcatgaagaagcaaatgctgtattgtgaactgcccagggagcgggttggcttccagcagatgacagcctcaatccttcaaccttcaaagtctgttctggcaacaacctgaatgagcctgaaagaggaccaagcctttaacaaaaatcacagcctcagctgaccccttgatttcagcctctgaggctcttagccgaggatccatttaagctctgtctggctttctgacctatagaacttcaagatraaaaatgagtgttgatgtagcccattaagcttatggttgtttgttaagcagtatcagaaaactaatagacgttctgatgcccttatccacaaacaagcttcaggccattttcaaggtaaatttcc

SEQ ID NO: 842339 - DNA, 576 bp, Homo sapiens
cttccattaactgtgaattttgggtgtcattatacaatttttttgtaattttttctagtgcatgtagttagtgtccattattaatgaggaagaatgcattgctctggaagaaaattattaagttggtgcaaaagtagtggcagaaatcacaattacttttacaccaacctaatattacgtagtgtaaaatcacactgtaaagtacctgggtatatctttggatgaaataatgtactatatagagataatttttagaatattttctctctaaatatgagtatgcctaatccaggtatatatctattttcttgacattatgtttttaagatggtttatttagtactgtcccttacacagtactgtagtttataatggttggatgtactttaaaggaaccctgccagtttggatatacaagagctatattattaaggtcttaccccttgaaatatagcttaytggactcgctggatttttaatcatttgttatttagagtggataaaagtcaacttttgacttttaccctcaggctaagttaaatgtgaccattctttaaaataagaaaatggctttat

SEQ ID NO: 842340 - DNA, 576 bp, Homo sapiens
cttccattaactgtgaattttgggtgtcattatacaatttttttgtaattttttctagtgcatgtagttagtgtccattattaatgaggaagaatgcattgctctggaagaaaattattaagttggtgcaaaagtagtggcagaaatcacaattacttttacaccaacctaatattacgtagtgtaaaatcacactgtaaagtacctgggtatatctttggatgaaataatgtactatatagagataatttttagaatattttctctctaaatatgagtatgcctaatccaggtatatatctattttcttgacattatgtttttaagatggtttatttagtactgtcccttacacagtactgtagtttataatggttggatgtactttaaaggaaccctgccagtttggatatacaagagctatattattaaggtcttaccccttgaaatatagcttactggactcgctggattkttaatcatttgttatttagagtggataaaagtcaacttttgacttttaccctcaggctaagttaaatgtgaccattctttaaaataagaaaatggctttat

SEQ ID NO: 842341 - DNA, 637 bp, Homo sapiens
ttctgcacacaatatacaatatcagcagtcaacacctctgcaagtggaatayagaaactgccacttctgcttaactagttggagtgatgtgacaaggattagttatgcgtgagagggtatcagtagacccatgtggtctcaaaataatgactttccttcttaccctgaaatcaaatcatcttagctgggaatgattaaaaatatttaattattgctttgaaatcaagtatgttatttggttctacttttttcactattgtgtcatatttttaactataattttaagaacctcacaaaaaatattggtataattccatatatactgtaaacagatttatttctgagaccagaagctctcttttttatgggtaagtaaatatttgcaagcatggttccattccggtagaatcattttgcagtcatttgttttgtttgttgttcattatttttgttttatacatttgtaaacaggtaagaacagatttttttcatagcaattatgaaattaatacttagacattttaacatgggagtgccagtttagctgcctgagaaccaataaagaatttaatttcctattctcattttcacatttcatggatcgtagtttcaaaggagttctaattataagagtacc

SEQ ID NO: 842342 - DNA, 637 bp, Homo sapiens
ttctgcacacaatatacaatatcagcagtcaacacctctgcaagtggaatacagaaactgccacttctgcttaactagttggagtgatgtgacaaggattagttatgcgtgagagggtatcagtagacccatgtggtctcaaaataatgactttccttcttaccctgaaatcaaatcatcttagctgggaatgattaaaaatatttaattattgctttgaaatcaagtatgttatttggttctacttttttcactattgtgtcatatttttaactataattttaagaacctcacaaaaaatattggtataattccatatatactgtaaacagatttatttctgagaccagaagctctcttttttatgggtaagtaaatatttgcaagcatggttccattccggtagaatcattttgcagtcatttgttttgtttgttgttcattatttttgttttatacatttgtaaacaggtaagaacagatttttttcatagcaattatgaaattaatacttagacattttaacatgggagtrccagtttagctgcctgagaaccaataaagaatttaatttcctattctcattttcacatttcatggatcgtagtttcaaaggagttctaattataagagtacc

SEQ ID NO: 842343 - DNA, 650 bp, Homo sapiens
catagtatccttatgcctttgtgtcctcatagcttagctcccacttatgagtgagaacatatgatrtttggttttccactcctgagttatttcacttagaataatggtccctaattccatccagattgctgcaaatgccattatttcattccttttaatggctaagtagtattccatttatatatatatataatgtgatatatatgatacatatatatatcacattttatatatctatgcatgtgccagtgtctttttttttttttttttttttgcataaccactacttttcctctgggtaaaataccaaggagtgggattgctggatcaaatggtagatctacttttagttctttaagaaacctccacactgttttccatagtggttgcactagtttacattcccaccaacagtgtaaaaatgctcccttttcaccacaaccatgccaacatctattttcttttgattttttgaatatggccattcttgcaggagtaaggtggtattgaattgaggttttgatttgcatttcccggataattagtgatgttgagcattttttatatgttcgttggccatttgtatatattctttggagaactgtctgttcatatccttaacatactttttgatgagattgtttgctttt

SEQ ID NO: 842344 - DNA, 671 bp, Homo sapiens
gcattccgttaggatggctgtttactttgtttttcccacttaagacactagaacttttacattggtatttacataaaactaaacctgagtagtgggaatttcaagtagaggarcatcagaaatgttaaatttagaaggtcaaacccacatcatggaataagaaacatatctgtatatttatatcatttaccgttatggatattgacacatatacacatccacatacatgtgctaatatatatcctaacataatcataaagcataaagctaacttaggcctacattatttttaaaatatgaatatcacatattaagttctgctgtcaacattctatctatctcatttagacactggtctgatccttccacatggaacattaaaaaaccttcaaaaccataatttagagtagaaacatcatatctcaccttacagttataccttaatttatttgataatgtttaacatcactaaaaatacaagcaaatttaaaataattaaataatattttcatcgattaaattaatttttaaaaatcataatacctaattttgtatgtgtatgttgtaaaatagcattcacttaacttttatggaggacaacttgaaaatatataccaagattcttaaaaaggttcatagcctttgttctaataatttattctaaagtaata

SEQ ID NO: 842345 - DNA, 499 bp, Homo sapiens
ttgaaagaaacaataagcctgggtccgtgattagatcatgaaactgtttcaacagccctgagcagcctctcccagacttctacttacatgagaaaaagaaaatgtttcaccattttaaagtcactatttttctgattccagtaaccaggagctaaatacagtttctaagtgatgtatattggaatataatttataattccaaaggaaggagatatactttgaaaccctaattccatttacagtcttaattcccctgtgctctgtaacactgcatattggtatattctgcgaattcacaagtggccttctgtttttttgtggaaggcattgttttgccattcacactatgctcattctttaaagttacagatacagatctactaccagtttgattaaaatgataaatgttgtgagtgagctgcttccgaagatggsaatttccctatcactgtaggtgttggatcatagactcagttaggaagaatgttcaagaaagctg

SEQ ID NO: 842346 - DNA, 521 bp, Homo sapiens
ttcagtttccatatgtttatgaagtaattttctcaagttctcttagtactcaaacattggggaacaactacatgaacgcagtctcagaaataaagtgcgaaatctacacatcaataaagttcttttaacagaattgttcacttttcagaaaattgtctttatcataaagaagctactctacttaatttatagaaccagtttttacccagaaatgtaaattaattaacttcatttgaaatgaagtaaggtctttctgttctggagtaataaattctactatgcaataattattctgaaaatgtgttagcatgtcacaaaaagttaaaatatatactgattttttaatgcccaactaatagtatattcataaagactggatttcttccagatcccttataactacctgaattattagaagtggccatcacattttaattttttccctaagtgtgaagttgaycgtcttattaaaaggtctagatgagtcacaatatgtttaaagttaaaaatgttaataaata

SEQ ID NO: 842347 - DNA, 612 bp, Homo sapiens
gtctcgagatcgtcgaagccgcaattaggactttgttttccgtcactggtaagagcaggggtcatttggtctagggaatctcctcatcatacccagaacctttaattcattttctgagccctgtgaaatagatgttcccactggcagagataatagggcaacaatttcctgatggccactagactattttatcgtaacatccattgtgtacagagctttataatactaacggttgacagctctcacatcatgggacactgtgaaaaactcaaatcaacaaggacacaggtatggaaagttgtaggagcaaaacacccactgtatgaaaaagatatgacacaaataaaaagagaaaaaaacaaaatagattaggctcacgtaccttagttgtgacaaagtagaaaaatcaccttttttcctcaattgtctctccctccagatccttacagtagttaacacccaacccactggcttatcttcatcctcaagtctcaagcgcttatagagagtttatgtagattcgtaaattagccagtgggagagaaaaagcagcagagggctgttgaagaggrattttccttcactctgccccattccaacaagatccaccca

SEQ ID NO: 842348 - DNA, 622 bp, Homo sapiens
atctggtgcttccctgaataatctcttgagatttgtacatgtctcccagcatcacatctgcccttttaacaagcacactccttccactgctcacggccacctcgggttcactgcagtcagggaatctgtgtcttgcagcagtcaagtctatatcaaacttgaatttatttattttcttttgtttctgagaactgtaattccactccaaggcctagactgtacccaacagagctgcatgtatgtttaatgaaaacatgtcctagaatattcacaatacttctactacttatgccctcaaactggaaactacccaaatgctggagagtagaatggatgaatgaattgtagtaatatttattgaatacaatacaatacaataatgataatgaattaacttgaactatatccaagaaggatgaatctcacagacattatgttggctgaaatgagccaatcacagaagtgtacatattctataactctgctacagaaagttcaaagaacagacaaaaccagtgcacaatattagaagctgggattgcatttatcctggggtaggggatggartattggctggaagtaggggtgagtaggctctctgctgcttttgttgtgttctctg

SEQ ID NO: 842349 - DNA, 577 bp, Homo sapiens
ctccacattgacctgtttcagccatggctggaggggccgggatgcaaggcaccgagtccctaggctgcacacagcacagagaccctgggccagcccacaaaaccactttttcttcctaggcttcagggcctgtgatggagaggctgctgtgaagacctctgaaataccctggagaaattttccccattgtcttggggattaacattcagctccctgttacttatgcaaatttctgcagctagcttgaatttctcctcagaaaatgggattttcttttctatcacactgtcaggctgcaaattttttgaacttttaggctctgtttcccctttaaaactgaatgcctttaacagcacctaagttgcctcttgaatgctttgctgcttagaaatttcttccaccagataccctaaatcatctctctcaagttcaaatttccacaaatctctagagcagggacaaaatgctgccagtctctttgcttaaacacaacaagagtcaactttgctccagttcccaacaagttcctcatttccatctgagacyacctcaacctggactttattgtctatatcgc

SEQ ID NO: 842350 - DNA, 638 bp, Homo sapiens
cccaaccaatcagattgaacagtgctacagatgcgcaacagctgaatgtctacgctgcctgtctgtttgctgtcttactaggcagggataatgatactttgtccatctgaacaatttctggtttgcaaatggtgatcacacacctcccaacaatcaacagtgttgtgaggtatgcagatggcatcaatatgcacatttgccagattgagagaccaaggctctgaaatgttgagtgatctaacaagagcagacagccaggggtaacagccctggaaggaaaaccaagatttcccaactcctggaccagagttttgcctgcatcctagagggcttctaaccaactcgactgcaagttcactgaggtcagggactgtaacgtacatttatttgactcctccctgatactcagtatcttattttacatttcagatgttcaatcaatactgattgctgcattcaggtatgctgtagggtggggcgatatccagcagaaaccaatgaggattaaagctgacctaaatccaaacaccatacaacagtatcaacaatcacaacacttaggtactgcttcctwtgcagcaggcatagtgcttaggatcctttcatttcatcccaataatcaatccatgagaaaggga

SEQ ID NO: 842351 - DNA, 611 bp, Homo sapiens
  misc_feature 334, 335: n = A,T,C or G
ttaaggataaatgcgcccccgaccctcgcgccaacgtgttaccccacgggcgcccctcctcggaataagggacggcggaggccggggaggcgggggagttggggggctcagaaggtcctggtccctccccggcccaagtttccctgccctccctgccaccctggtccccaggcactgtcgcggaccccagactccgccttccctaggccaaacctaggcgacctccctggactaggaggcctggctgcctgccacccgcgcaccggaagaagggactcgcgcactcggagaaggggccccgacgcgctttatatgcaaatggcgaggcgaagtnnccctgagaaattagctacttgctgaagcatatttactagattgaaatgagttaaagagaaacattttaagtcgtgcaaagagataattgggccgcattaaagctggggatgtttgctcctttcaaaaaaaaaaaaaaaaaaaaaaaaccgccggagaggtaggagagcagtaaaagcacgcgtagaaatgaagccccagctggtcagagacggraaatccggtagttgcacgggacgggttccctcggggatctcggaggggagacccccacccgg

SEQ ID NO: 842352 - DNA, 603 bp, Homo sapiens
taaaatctttgttttaataataatctgataccagtttcctttttctattgtagattgaatgctattttctgtgtcttccttaatgtttttttcattcaacatctttttgtaaagaggaaaattgttttgtaatatagtcaccctcttttttttttttcttaataatatactgggccaggtgcggtagctcatgcctgcaatcctagccttttgggcggctgaggcgagtggatcacttgaggtcaggagctcaagaccagcctggccaatatggtgaaaccccatctttactaaaaatacaatacttagccaggtgtggtggtgtgcgccagtaatcccagctacttgggaggctgaggcacaagaatcacttgaacccaggaggcagaggttgcagtgagccaagatggtgccactgcactctagcctgggcaacagagtgagattctgtctcaaaaacacaacaaawaaagaatatactggtttctgaactttaaggcaaaccaatttgtgatcatttgatttactctatatattttattcactttactagaatatagtaaattaaattctagagccttcttgaaaacagaggttatgctt

SEQ ID NO: 842353 - DNA, 606 bp, Homo sapiens
aacttacagactctctgctcttcccatttgacagacagacacatcttctcatacagggacagcggaagcatygttgagacacatgctgaagtgatggcaatgtggatgtcgttgccatcactgacccctttgttaacatcaagtacattgtctatgtgttctagtatgattccaccaaataacaagttcaacggcatagccaagactgagaaccaaaaggttgttataaatgaaaaacccatttccatcttctaaaagtgagatcctgacatgaaatggggtaattcttgtaatgaatttgttgtggaatctactgtgtcttcattttcttgtaaaagtctgacttcatatgaagggtggagccaatagggtcatcatctttgtcccgtctgctgatgtccccatatttatgagcatgaatgatgagaagtgtgacaactccctcaagattgtcagcaattcctcctgcactaccaagtgcttagccctcctggccaatgtcatcaataacaattttggcatcacggagagactcaagatcacaatccatgccatcactgccaccaagaagactgggaaggcctctctgggaaactgtgttgtgac

SEQ ID NO: 842354 - DNA, 607 bp, Homo sapiens
tttcttggttgggagatttttaatgaatgagtcaatcttgttacttattattggtctgtttgggatttttatttcttcttggttcartattggcaggttgtatatgttcagaaatttatttttttctctaggttttaaaatttattggcatatagttgctcatagtagtctctaatgatcctctatttctgtggtatctgttgtggcatctctttttttgtttttgattttatttatttgggtcttctttctctttttttagttaatctagttcacagcctgtcaattttgtatatcttaaaaaacaactttttgtttacttgatcttttgtattgtttttctagtctcaattgtgtatattcctgctctaatctttattattattatttttgtgctcattttgggtttgtttttggtcttgcttttctagttcctcaagatgcaccattaggttgtttatttcaatttttctaattatttatttatttttataatttcaacttttactttagattcaaggggtacatgtgcaggtttgtgacctgaataaactgtgtgatggtttggggtatgactgatgttgtcacccaggtactggatatagta

SEQ ID NO: 842355 - DNA, 486 bp, Homo sapiens
tattggtatatattaatgctaccgatttttgcacatggattttgtatcctgaaaccttactgaagttgtttttcagttccaggagccttttggcagagtctttatagttacctaggtatasaatcatattgtccatgaagagacagagtttggctttttttcctatttggatgcttttatttctttggcttgcctgactgctccatcaaggacttccagccctacattgaataggagtgtgagagcgagtaatcactgtctcccttccaagtactaaccaggcccgaccctgcttagcttccgagatcagacgagatcgggcgcgttcagggtggtatggccgtagacagcaatcactgtctaattccatttctcaaggagagtgcttccaatttttgcctgtttggtataatgttggcagtgggtttgtaatagatggctcttttgttttttaggtatgttccttcaatgcctagtttgttaaac

SEQ ID NO: 842356 - DNA, 578 bp, Homo sapiens
gaaaaaacaattccatctgtcaaactgatgatggatgctgtccaaacctgtgaacaaaacctgaagtgctaattctatgcgctgctgatgcctttaattatgcgactttgacagatggaaagatcattatgcagtttttatttaagaagctcatgcaactgtagtttttgtgccaagggtaaccagtcacattaaggaatttgccagaaagtgtaactctaccttatttatagcttactaggtcctaattatgcttcctaaatggacagtccaataataaggcaaacacaaaatatacgtactgcaaattactacacagtagtgacatgtcagaacaggcagccattttcaaatcacaaaattatttctcatcaggcaatacacagcaaacacactgcagataatgccatgttgagttagaatttcaaaggtctgaaaagggtttctttcttagtcgtgatttcagcaaggcctccagaaagttacagaacaatcactgtttgatcccctttatgtagctcatacctattctgattctgaggmttttcaccagctcttccttctagttacctgaagta

SEQ ID NO: 842357 - DNA, 457 bp, Homo sapiens
acatttactgagtgtatactatgtacaggtactttacatgttttaattcatttaatcctccagtctttatcatgtgggcaccattattttgctcttattactttacttattacagaggaggaaacaaactcagaaaggctgagaaaactgtcctagggcatagagatagtgaatgccagagcctggactggaatccagtcagtctagtgctgaagcctatgctctgaagtgttttctagcctgctcacatttctgctctctgtagggctgacttcttctactttagatctcagcatcgatatcagttctacaaaaagacaatctctggatwcccaaccaaaactggtcacccagcctcttgctatcacatcaccctatttcagtcataaaacagtgctggtcatagagaaggcactcaataaatatctgctgaatgtatgaggattatgaaaagctt

SEQ ID NO: 842358 - DNA, 457 bp, Homo sapiens
acatttactgagtgtatactatgtacaggtactttacatgttttaattcatttaatcctccagtctttatcatgtgggcaccattattttgctcttattactttacttattacagaggaggaaacaaactcagaaaggctgagaaaactgtcctagggcatagagatagtgaatgccagagcctggactggaatccagtcagtctagtgctgaagcctatgctctgaagtgttttctagcctgctcacatttctgctctctgtagggctgacttcttctactttagatctcagcatcgatatcagttctacaaaaagacaatctctggattcccaaccaaaactggtcacccagcctcttgctatcacatcaccctatttcagtcayaaaacagtgctggtcatagagaaggcactcaataaatatctgctgaatgtatgaggattatgaaaagctt

SEQ ID NO: 842359 - DNA, 429 bp, Homo sapiens
atatttcatcttccttgtttacatctgagaaaacctggatgaaaagacataaaacttaaatgagtaacttccaaaatctacctcagcccccagatwttcctctaatataatataattacggttgcccatctttagattcttatggatggctcctggaaaatagtagaggagatgaggctatacaagcaccaaatcattaaaggctttgaatgccatggaaaagaaaatatcactaaataaaggtcttggaaacaagagagagatgatctgagagagagagatatatatatatatgatacataataatcagatatatatcagatatatagatacactatatatatttgatagatgatatatttgatatatctatataatacatatctgatatatctatattttagccttaataaatttcaaaaattgagt

SEQ ID NO: 842360 - DNA, 549 bp, Homo sapiens
actactggcctaaagcaatcctcctaccttggcatcgcaaaatgctggaattatatagtcataagctaccacacctggccagggtctgctggttttttcttttcttttttgtaagatggagtctyattttgttgcccaggctggagtgcagtggtgcaatctcagctcattgcaatctccacctctcggattcaaataactcccgtgcttcagccttctgagtagctgggattacaggcgtgcaccaccaggcctggctaatttttgtatttttagtagagatggggtcttgccatgtcagccaggctggtctcaaactcctggcatcaagtgatccacccacctcagcctcccagagtgctgggattacaggcgtgagccaccgaatccagcccatcttgtgttatcaacttagccaacgatgagaaagttcaagcacagtttcaattaatttgggcaaggattttgaaatcttcctcttaactccaagttgaattcatttcttttttcccttttccttctcctttctaatcataaggcaggtaagca

SEQ ID NO: 842361 - DNA, 639 bp, Homo sapiens
acatatatgtataaatagaatgggtacactctaaaataataaaatgtatagtatagtaagttttcacttaatgttgttgataatttcttggaaactgcaactttaagtamaatgatgtatcaggaaataaattttatcacaggcagattaatacaaacaaaagttaagtatcggggtaacccgcccccgataattcaacatgagtccttttctatttttcctaagtgtcagccagtctgagaaataaagggaaagagtacaaagagagaaattttaaagctgggtgtccgggggagacatcacatgtcagcaggttccgtgatgcccccgcaagccgcaaaaccagcaaatttttattagtgattttcaaaagggggagggagtgtacaaatagggtgtgggtcacagagatcacgtgcttcaccaggtaataaaatattacaaggcaaatggaggcagggtaagatcacaggaccggggcgaaattaaaattgctaatgaagtttcaggcacacattgtcgttggtaacatcttatcaggagacagggtttgagagcagacaaccagtctgaccaaaatttcctcgtcctaataggcctgggagcgctacaggagaccagggcttatttcatccctta

SEQ ID NO: 842362 - DNA, 596 bp, Homo sapiens
atgactttaatatgtgaggataattaagcccagacagagaattgaatttcagagtatggaattcctgatagtaagttcctctcataattagctgacacatattcattttcctttactttcagtttataaggaaatcgtttctcttatttttcattgttttatttttatggcttcattttttataaattaagctttatcataaggaaattgtttttctatgcctttttctgcccagacgaacagcagagaaatcatgattgcaacagcctggaggaaaacagtaccactaatatggaagaaagtaaatactcagctgtgagaagcggtaagcttgtctggctgtgttgaagagtaaaatgaaggtaaactcattagtatttttttaatgaaaattcctagggtctgcacacttccatataataatcattttggacatgaaaatcattctattctaacagactcatctgttgggagaattattttttgtctgtttatttttactttaatcaatttttggaggaaaataaattgattaatagtttaaaagacatccatttcccccattatgrgtctctggcacagaagattgagttaat

SEQ ID NO: 842363 - DNA, 543 bp, Homo sapiens
agaacgttctgaaagggcaacatgcacgccccgcctagtggcctgacccagggaagggaccccgtggctgtggggcccatctgggctcaagtctctttgacgcggccgcccagggtgagcttgtcgaacaggtactcagccaggccggcttccggggaacaaatcttgcgcaggttgctcacgtagccacccagctctttgatggtcttgacttgctcgtgcaggtagtggctctccaggaagtggcacagctgggggtcgcccttctccacggccagctggtacagatccagcaggctctggttgacgttcttctccaggtggaaggcggactccatggccacgagcccgctctcccagccttggcactctggcttcctgatatcgtgaaggcagatgtggccaccgcgcaggttctgcagcctcatcagcttctgggcatgctccattttgtcgtccgacaggcgcaggaagtagcggaagaagttctccagggcyacgtcgtcccggttgaagtagaaggccatagacaggtacaggtag

SEQ ID NO: 842364 - DNA, 582 bp, Homo sapiens
cccagcaactctcctacctccaaacttgccatgtaatgcccttttaaacttattatattgataggtaaatckgtttgctagaaattccagatattgagaattctttgtctgtgtaccttgttatatttgtataaaggtgatatttgtatgaagccaccctccagtgtgctgtaacagagcaatagtaatgacaactgattccttcccctagcttttctgttatggatagttgctggcaggtgaggaccaacagaaaaagaggagaaacccaacataattccaaactgtgaccatcataatggaaggagctgtgatagctttgctttctgtgtgtgcatgacatagaaggggaaaatggagttattgccaaaacaacagcaaaagcaaaacaaagccaacaaacaaaacaaaacccagggctaaatgacctttccaagagattttgcttgcatggcttgaaactggtgtttagagatgaggacaaggtcacccttgatactgagaggggattatatctgagacttatatgtatctcaacaaataatggtacttacaaagattatctcagtccagtgaatgcca

SEQ ID NO: 842365 - DNA, 628 bp, Homo sapiens
ttctgtttcaatgaaatgaaagactaggtaatcttaaaatgaatgaggattaaggaaagtgaagacaattttgaaacattaccaagtaagaaggaagccttaggcaaaagttggatgaatttgttgaggaaatggtccacatgttctgttctcattcttagcaatgttctctgcctaggactaggttctaagaaaggtggagctgatgaggcataaatgatcaaaggtcaaaacaagagtagggcattttacagtggtaatgaatggctaggacaggggttcctagccagctgctcattggtttttcctgctgtgtctggctagacaatagagggttttatgaaggccacaaatacttggtcccccttcctcatttctctttctctgtaaaggcccagtaggagtcagctccatcctctctccttacttttccctgggacctaaactggttatatacttggtcctctcaaatcttacctcacagaatagaaaagacctgtgactccttgattmcatacacttacagctctattgcctgatatgatgatgtgttcaggaattcatttcatacttgagctcttccatgagggtagaataaagggaggcaaagtgccttaaccaaaatgga

SEQ ID NO: 842366 - DNA, 549 bp, Homo sapiens
ctgcagagatgggtaggaggctcatcattttttacagcagtgtgaacttctgtcagcaggaattattttaaattctgccgtccatcctatagaccagtaggtggcacttgtaagagctagcygaatgctgcacagatgtgtcagcataagctgtaatcatttttgcagactggcatcaaagtcagtaggttgtacttgcaagaaagaggcagcttcagtggtggcagtgagatttttacttggccatttaaaaccaggagaagtgccagggtatctcagtgatgggcagggctgtggagctcctggggatccctgtccagttctttgctaccaaggtgactagagtgggcaatgctggtcatggctgggttggtatgtcagtgagcaggctcttgaaggcaggcataagtaccaacgtttgcagcagtctaggcacagctcccaggctgctggagcaactcttaagggaggaatagaggtgtctgtccaccacagagcctactgaggtgaagaagggcatggcccagagtgttcagcatagtaggtggc

SEQ ID NO: 842367 - DNA, 611 bp, Homo sapiens
caaatctaacagatttcttattgtacacacttacataagatgtagaagctttcaaaaacaatgcacaccacctgatttgactgattaaatttacagtactgttaacacattgagtggtgaatccgcagcccatgctgctaaaatattgctgcattctatacctctccatattgccaagtttagaagttaataatttaatcttttttttttttttttaaagagatggggtcttgctatgttgcctgtgctggtgtgcaatggcatgattatagcacactgcagccttgaactgggctcaaacaatcctcccacctcaggcacctgaccagctgggactacaggcacacaccactgtccccagcttaatcattctttttaaattacatttttattaactttctttcctgaatacagtgaaaggaaaaagtgaatcaggaataaatatttgtaatagttagtacatagttggatattttcagagaaattttrtattgtaagattacagttaattttatgtattttttgaaaagctaaacatgtaatttagaaatatcaactttaatcagagataagttgccagggcttacatgtgagcacaaggtaggcgttcg

SEQ ID NO: 842368 - DNA, 551 bp, Homo sapiens
gtaaggtggtaatttcagcaaattcatatgggtagataatcctatctatacatattttgctagatctttattaagattcatcccatctagactaagcttctaggaaaagcaaaacaaaatyttaacagatacaatgttttaggacaagaacacagccaagatgaaggccctccatgccctttttgactgttcaatatctgaaaagagagaaatgtgaaatatctagaaaggttattggattttttttttttttgagacggtgtcttgctgtgtcacccaggctggagagctgtggcacgatctttgctcagtgcaacctctgcctcctgggttcaagcgattctcctgccacagcctcccaagtagctgggattacaggtgcatgccaccatgtctggctaattttcgtatttttagtagagatggggttttgccattttggccaggctggtcttgaactcctgacctcaggtgatctacccacctcagcctcccaaagtgctgggattacaggagtgagccaccatgcccagcttggaaaaaaagttttt

SEQ ID NO: 842369 - DNA, 551 bp, Homo sapiens
gtaaggtggtaatttcagcaaattcatatgggtagataatcctatctatacatattttgctagatctttattaagattcatcccatctagactaagcttctaggaaaagcaaaacaaaatcttaacagatasaatgttttaggacaagaacacagccaagatgaaggccctccatgccctttttgactgttcaatatctgaaaagagagaaatgtgaaatatctagaaaggttattggattttttttttttttgagacggtgtcttgctgtgtcacccaggctggagagctgtggcacgatctttgctcagtgcaacctctgcctcctgggttcaagcgattctcctgccacagcctcccaagtagctgggattacaggtgcatgccaccatgtctggctaattttcgtatttttagtagagatggggttttgccattttggccaggctggtcttgaactcctgacctcaggtgatctacccacctcagcctcccaaagtgctgggattacaggagtgagccaccatgcccagcttggaaaaaaagttttt

SEQ ID NO: 842370 - DNA, 651 bp, Homo sapiens; identical to SEQ ID NO: 838249

SEQ ID NO: 842371 - DNA, 624 bp, Homo sapiens
agtatgccattgtgtggatgcagcatagtttatggratcaattcactgttaatggactactgggcggcttcctcttttgctagaaggcaataaatagtgttccaatgaatacttttatacatataatttttttcatatgtcttctgtgggttagatgcctagacttaggatttctttgtcaaaagtaaaagtacttgcccttttgataatgtgtaatagattatttgccaatatgactgcaactattcttctcactatatttatatgtccttgctttgtaactttccaactcctcccatcaacaaatacagtccatttccccacttgttgaattagccctggccttgtgacttgttttggttaatagaatatggcgaaagtgatcatgtacaattctgataccaggccaattggaggtcattgggaggtcattgaatcatgggtgccagtgtttctcatgctatttttatgatgatgagtaaatctcatgagatctgatggttttaaaaatgggagtttccctgcacaagctctctcctcttgtctgccaccatgtgagatgcttttaccttctgccatgattgtgaggcctccccagccacgtggaactgtaagtccattaaa

SEQ ID NO: 842372 - DNA, 291 bp, Homo sapiens
tatcttaggctttcctttagtggctatattctctcttcctgtagaatagttctttagaatttccttactcatctgttcatagtaagttctcmtagtaagttggttttattttccccaaagttactttgcttccaaataaagatatttttttctttattttttttctttcttctaaaagatttgtattggttgtacatttctaagctgacagttaaccttctgttggtatactgatgatattattccattgtcttctgagtttcactattgttttcaagaagtcagccatga

SEQ ID NO: 842373 - DNA, 551 bp, Homo sapiens
tgattcttccttttgtagcttttatgtttggtagatgctcgtgcccatccactgagatagaaaacacatgaggrggggcaaaggtaagctcagttttagacacattgagctcttttgtttgtttgttttatggaaaatgagggcaactgatggatggagcatgctttgggtgacattccttccatcctgtagtggaagacactgggttcctgaagggagggagatgggattggatgccagggaacaggagatgggactttaagaagacagcagaggcaggctagatgttcttctgcaattgtatagatgaggtcacagcagcaaaacttcccatcccaccccgcatcaatacctttgctgtgtttgctgcactgaccataactgctcattccctgttgtgtaactgaaatgaatagatcgttcaagaatgccctatctgtacaaatttggtctattttaagaacaaaggagagagtttatttttttttatgtttcagtggaattaaaagtgtgatttttataatccaagtcacacccttacaatttttttt

SEQ ID NO: 842374 - DNA, 601 bp, Homo sapiens
tactttcaagtgttattatttaagaaatacatttcatraggctataggtataattcctctgatgtacctgagcaaagtaaattgaaaactttctggaaaggattaaccattctaggtgccattaagaagatttgtgattcatggcaaggagtcaaatatcaccattaataggattttggaagaagttagttccaacactcattgaaaacttcaggagtttcaagacttcaatggaggaagtaactgcagatgtggtgggaatagcaaaagaactagaattagaagtggagcctgaagttgtaactgaatttctgtaatcttatggttaaactcgaactgatgaggagttgcttcttatggatgagcaaataaaatacgtttttcctcttaaaaatttttttgggtacatagtagctatatatatttatggggtacatgagatatttgatacagacatacaatgtataataattacatcagggtaaatggggtattcatcacctcaagcatttattctttctttgtgttagaaacaatccagtcatctttttgttatttaaaaatatacaataaattattgttgcctgtaatcacctattat

SEQ ID NO: 842375 - DNA, 531 bp, Homo sapiens
ataaataaataaataactaaaaatgtagaataccataaagcagtgcttaaagggaaatgtatagcataagtaaatgtattaaaagagagattcaaaatgaataacctagacttccaccttaggaaaacagaagagcaatttaagccaaaagtaatcaggaaaagagaaatttaaaaattgggcaacttggatgcaactggaggccattatcataggtgaataaatacaggaacagaaaacccaatacctcatgttctcacttttaagtaggagctaaacattgaggacacaaggacatacagatgggaacaatagacactggggactactagagactactagagaaggggggaagggggtggggaggaggctgtgggctgaaaaactacctatcaggtactgtgctcactgagtggatgacaagatcatttgtacctcaaacctcagcatcacacratatactcaggtaaaaaacatgcccatgtaccccctgaatctaaaataaaagttgaattttttttaaaattggag

SEQ ID NO: 842376 - DNA, 589 bp, Homo sapiens
acatgctttcacatagataataatatgcaggcaaaatcatttgattgaaagcataatgattactaagagtaaaaccctgaaatagcatagattgcctwaaaggtgggtgctagactttccacccagcattagaccatatgattcttcctgtcttagtaaaagccttcttttcactaagtagtttttgatacctaatgaacatgtatgactcctatttcctctactaaattaccatgacttctagtatactaggctttggcatcctacctaactgtgatggattccaaactctgttgttagtactcaagtgctatatgccttcatggtatatggctttatgtaatttcatcaacttcagtttttttaaacgaactcctctgaaggcacagctcagaagaggatcctgtgtttgggttttaatgtcttacagttgctgtcttgaaattcattataaacttatctttggatttgtgacttaagtgaagtctgataagacaatggcatgtgcaccaaagacttggagcctcagtgcaggtatagtcctacctcccacaatctccacacatccctagaactgattctcagctgc

SEQ ID NO: 842377 - DNA, 589 bp, Homo sapiens
acatgctttcacatagataataatatgcaggcaaaatcatttgattgaaagcataatgattactaagagtaaaaccctgaaatagcatagattgcctaaaaggtgggtgctagactttccacccagcatyagaccatatgattcttcctgtcttagtaaaagccttcttttcactaagtagtttttgatacctaatgaacatgtatgactcctatttcctctactaaattaccatgacttctagtatactaggctttggcatcctacctaactgtgatggattccaaactctgttgttagtactcaagtgctatatgccttcatggtatatggctttatgtaatttcatcaacttcagtttttttaaacgaactcctctgaaggcacagctcagaagaggatcctgtgtttgggttttaatgtcttacagttgctgtcttgaaattcattataaacttatctttggatttgtgacttaagtgaagtctgataagacaatggcatgtgcaccaaagacttggagcctcagtgcaggtatagtcctacctcccacaatctccacacatccctagaactgattctcagctgc

SEQ ID NO: 842378 - DNA, 611 bp, Homo sapiens
aaatggccaacaattataagaaaaaaggccagcatcagtaatcatcaggtaaattcagattaaaaccacattgagatatygtctcattttgttagaacggctattatcaaaaaggtaaatgataagtgttggcaagaatgtgaagaaaagggaacccttgtacactgctgatgggaatgtaaattagcacagccattgtggaaaacaggttggaagttcttcaaaacattaaaactagaactacacaacccaccaatcccattactggatatatatccaaaggatctgaaatcagtatgtccaagacatatctgcattctcatgcttattacagcattattcaacacagccaagatacggaatcaacctaagtgtccatcaacagatgaataaagaaaatgtggtatatatacagagtggaatagtatccagccttaaaaaatgaaattctgtcatttggagttcacgtggatgaacttggaagacattatgttaagcaaaataagccaggcacagaaagacagatatcgcatcattttacttatttgtggaatctaggaaagtcaacttatagaaacagagagtaaaataaaatgataattaccagaggc

SEQ ID NO: 842379 - DNA, 604 bp, Homo sapiens
tgggcaattttcaagaattttcatcagattggagaggcagtttattatgctgtgtaggagtctgactctggaattagactgcctgggtttgacttctggctcctttacctattagtagtgtaaccttgggcaagtgtcttaacttcttcatgtctacatttccttatctgtgaaatggagataataatagtacttatttcatgagaatattatgaggattgaatgagttaacatatgtaagcacttacagccctggtgcccagcatattgtaaacactgtatgtgtgttagttaaataaaatagagtaatttaaaaaacttatgtaaatggttagcttataaattttgcttctgttttgtaacaaaataacttctgagaatcatattgttacaatgacaaatgggaaaaattttctgatatttaaaatagactttcaaaaacatataaacattattattttaactaaactktaataattccattttgaagataggggaggggaatggtggaagtaagactgctaattcttcgtatgccaaagaaggaagtaattggtaatacacatatagttttaaactgcttattttgctctaagagcatttt

SEQ ID NO: 842380 - DNA, 526 bp, Homo sapiens
cctgactgtgggctcagcccctggcaggagagggtgtctgagctggtgagtgcagagttgtgtggtatccagctggttgctccaagtgccggcacaggagctggctccgtgcaccgcttgcggctggaccaggcatgtcacaagtgactcccacagtgggctctggagtccagactaggggaaggtggtggtaaccaaatgggtcaggcaacccagaagccccagaggtgggtgttacagcatgctaacagctcttttagatctgccctctgcagcctgacgaacaggggcatgttaacagccctatcagtcctgttaccccactcccgcccatggccctggggctggcctggccccccgccctgcttcttgttgcatagggtggctaccaggcgctgctggtggggcagagagctaccrtgttactctcttcttcctacccatgtttggtggcatcctgagctcttgtcctgtgtccaagaatgagattacactaacaatcggagggtgaggaggacagagaaga

SEQ ID NO: 842381 - DNA, 532 bp, Homo sapiens
gccaaactttcttctttgatttataagccatgcgtcactagatgactgagataggttctgagaaatgcattgctaggcagtttcatcattgtgtgaacatcataacaygtacttccacaaacctcgatggtttagcctgctacacacctaggctatatggcctagcctatggtacctatgctgttaacccatagagcacgttactatagtgaatactataggcaatttcaacctaatggtaagtatctgtgtttctaaacaaatctaaacatagaaaagatatagtaaacatagactgttataagctcatgggactaatatgcagtctgcagttgactgaaatgttactacatcgtacatgattatatatatacatacacacacacatacacactactataattgtatactctgctttttttaactggcattttaccattaacattttttatttcatgaagcattctgaagatttctattagttgcataatagtgtattatatagattagattaatattatataatttcact

SEQ ID NO: 842382 - DNA, 618 bp, Homo sapiens
tgccccatctgtaagaagagtctaaaaataacttcrtcacctttttttgcagggcttcctgaatgaaataatgtactgtaagtcctttaaaaaatactagcagttaatgaagtgctaaatacacaacaggtttatttgctctcaatttcagcatttgctgtagtgagattactgccggtcgttcaccgttgaaaatttcaaatggtatgatcattttaaaaagcaatcccacaatgtgtatttggagtcctgaaaatgtcacttaactttgacccagcaataccaacttcaaggatcaattctaatgaaaatatactagaaacatatccatgccaaagttgtatttacatgaaaataattttaaagacagacaaatgctcaaaaatagcagtttgattaagtaaattaagacatgatagagtagaatatgacagtcattaacaatatttacaaagatgttacaaatccttctctatattaagaaaatcaaaataaagcataactgatctatgcagtatatgtgcacagttgtgcaaaatatatacacattaaatatgtaagcatttgtccttaagtgatgggatttttctagtttgaattttccatattatctatgat

SEQ ID NO: 842383 - DNA, 573 bp, Homo sapiens
gttcagaagtaccacagaatctatgtgatctgcagagaatcgcttgaacctgggaggcagaggttgcaggaggtggaggtkgcagtcagcctagatcgagatggcagcgctgcactccagcctaggtgatagaatgagactgtccccgaaaaaaaaaaaaaaaaaaaaaaaaagatctgacctacaaagcctaaattagttactatctgactccccagaaaaggtttgttgacctctgatagagtctagtaagtgtatcctactagaataggatacaacgtatagaaggactatacattagggggcatgatggttcattcatccattcaggattattattattttttatttttatcaagaccttttgatgtgccagatactgtgggataagactaacaacactatctctgaaatcttagaaaatacaggctgtatatgtagatttagtgatgcctattacagggggttgaaaccatttctgctcaccaagttgcatttgagacttcaaattattacccatctcacttcccttaaaaatatagaataaatatcatgcagtgcttatcacttctc

SEQ ID NO: 842384 - DNA, 641 bp, Homo sapiens
tctttctttatcatgtggcacttcatcaataacaatggattgcaggacgaacttaaaggggccaagtgctctctggagctgttcctatttctctaaaatgtattcattgtttaaaagacaatgtaggtaaatattaaaatgtgattcctgggcaagagtggcctctcagtaagaattttagaaaattaactttaggaccaacttcacatgataaacgatatatgacagatcatgtctttactttaaaaaaacagttttaaatagtatacaataacataattcacattagagagttagtagagctcaaatacattaataatctaaagctcatcacaaaatgtaatagagagctgtgctttaaatatgcccacccctacagacacacacacacacacacacacacacacacacacacacacacacgacacctcagagaatgaagaccaactctgagaatggcatacttcttgtgcagtatttcagagggtgttagacatccaacatgaaactcaagttactttgtcawcttaaggttgatggaatggtacagaatgagaatgaatctgagagaagatacctaaattcaattccaaaaatgtttcatcaaccctctttatttctgaatatttcctctcactaac

SEQ ID NO: 842385 - DNA, 641 bp, Homo sapiens
tctttctttatcatgtggcacttcatcaataacaatggattgcaggacgaacttaaaggggccaagtgctctctggagctgttcctatttctctaaaatgtattcattgtttaaaagacaatgtaggtaaatattaaaatgtgattcctgggcaagagtggcctctcagtaagaattttagaaaattaactttaggaccaacttcacatgataaacgatatatgacagatcatgtctttactttaaaaaaacagttttaaatagtatacaataacataattcacattagagagttagtagagctcaaatacattaataatctaaagctcatcacaaaatgtaatagagagctgtgctttaaatatgcccacccctacagacacacacacacacacacacacacacacacacacacacacacacgacacctcagagaatgaagaccaactctgagaatggcatacttcttgtgcagtatttcagagggtgttagacatccaacatgaaactcaagttactttgtcaacttaaggttgatggaatggtacagaatgagaatgaatctgagagaagatacctaaatycaattccaaaaatgtttcatcaaccctctttatttctgaatatttcctctcactaac

SEQ ID NO: 842386 - DNA, 634 bp, Homo sapiens
actcattaccatttatttatgttcttatttgcttatttgtctcctactctaagtggtaagattgtcatttttcttggggagggagatacatttttattgaattataatgttcatacaggaaagtacacatatcactagtgtagaactcagtgaatttttacaaattgaacacatctgtataattggagtctacattaagaaatagaaaacaaacagcaccccagaagtctcctggtgctatctcataagttgctatattccaaaaataagcattatctgatttttaacagctaaaactattttcacctgttcttagaattaatataaatgaaaccatacagtacgtactattttgtgtctggcttcttttgttcaacataatgtttaggagactcatattattggggtagtcatagatcattcattcgtaatgctctgtgatattactgtgtataaatatacccccagttacttatccattctattgctgatgtgcatttgggtaatttccagtgagaattattccaaataattctataaatatatgttcattaaaaggatwtgtttttggtgaacatatgtatacatctctgtggtgtgtatcagcagtggaattgttgagtcatagagtatg

SEQ ID NO: 842387 - DNA, 509 bp, Homo sapiens
ggagagggtatgttccttcattgggtactccccctcagacttcgggtatctctgagttctgtcttattccttcttagtaataaaactaccatagttaacacyttatatgaaatctttcctgttgagattattgtggcgtttatgactcttgactgaatgctgaatgatagcttttctcctgaggtcatttcccagttcctgtagtgacaaggcagacagctactatctttttgtcctgtgaagtaggagcttgcagctgccaaggtagcggggaattgagggggatatcctagaatagtggagccacagaggagggcggctgcacacatctataaaatcacctaaagctgaccagggatggtggctcatgcctgtaataccagcactttgggaggccaagaagggcagatcacttgagggtcaggagtttgagaccagattggccaacatggtaaaatcctgtatccactaaaactacaaaaattagccaggcatggtggtatgcacct

SEQ ID NO: 842388 - DNA, 548 bp, Homo sapiens
ccactgccttctgacctccatgacttctgatgagaagtaagctgttaatcttaytggtgaatgttgtgcatgatgagtagctcttactactttcaagattccctttttgattcctttggcttttgatggtttgatttttatgcatttatatgcggacctgattgtatttatcctgcttgtagtttgagcttcttggatatgtagattaacactttttcatcaaaattgggcagtttttagttattactaccaaaaattatttctgctcctttctctgtcctgtccttctgggtggttctcccattatgattattttggcatgcttcattattatccactgataatctgagatcttttttttttgtccttctattcctcagtttgtataatctcagttaacatatcttcaggtgtgccaattctttcttttgactgagcaagcgtgctgttgtgcccatctagtggactagtcatttgcattgtactttgactccagaacttatacctttttcttctttttcaaataatttatacctttttattaacat

SEQ ID NO: 842389 - DNA, 548 bp, Homo sapiens
ccactgccttctgacctccatgacttctgatgagaagtaagctgttaatcttattggtgaatgttgtgcatgatgagtagctcttactactttcaagattccctttttgattcctttggcttttgatggtttgatttttatgcatttatatgcggacctgattgtatttatcctgcttgtagtttgagcttcttggatatgtagattaacactttttcatcaaaattgggcagtttttagttattactaccaaaaattatttctgctcctttctctgtcctgtccttctgggtggttctcccattatgattattttggcatgcttcattattatccactgataatctgagatcttttttttttgtccttctattcctcagtttgtataatctcagttaacatatcttcaggtgtgccaattctttcttttgactgagcaagcrtgctgttgtgcccatctagtggactagtcatttgcattgtactttgactccagaacttatacctttttcttctttttcaaataatttatacctttttattaacat

SEQ ID NO: 842390 - DNA, 556 bp, Homo sapiens
ttttactatgatgtgtctagatgtggatttttttctgatttttctacttggacttcattgagcttcttgaagactaatttttcctttattttgtgaggttaccagtcatttccttgaatttttttyttctgcttctttctcatctttccttttggtactcccaatacaaaattgttgtgtacttaatggtgtcctttattctgcggctctgttcatttatcttcatcctttttttctcatttgtttggattgtattacgtctatttatctaagtgtaagttcattgattcctctctagttcaagcctgtcactgagctcctttataaatgttcattatagttatacttttcaattctagaatttctgtatttttaaactgcttaacattagtgatattgtcataccttgccttactgctttaagtgtaatttcctctagttctttgaatgtatttataatagctgattctgatttgaggtctttatctgctaagtttgatatatgggtggggccttctcataggcagttcctcttgcctgcccttcccctcccacc

SEQ ID NO: 842391 - DNA, 568 bp, Homo sapiens
agtatctttttcgtacaatgacttcttttcctcagactggatacccagtagtgggattgctggatcaaatggtagttctacttttagatttttaaggaatcttstcaccacactgttttctgtagtggttgtactattatatattctcaccagcagtgtagaagtgttccgtttttagcatatccacaccaacatctactgttttttttaggttttggttttgaccattcttgcaggagtaaggtgttaccatattgtggttttgatttgcatttctctgatcagttggcagatttttgaactctgtatttggaaatgtgatattaagtaggattcaccatggctaataatcacttgtacttgtccattgtaatcaatatacttcaggtcaggctttattcatgtgtgggggtaagataataatttttcctggcttctgcatggggataagataatgtttttttcctggcttattggataccatagtattgtcttctagagaaactttgatacttgtttaaatcctggatctaaagaaattttacttgtgagaatgcagtgagttctg

SEQ ID NO: 842392 - DNA, 611 bp, Homo sapiens
aaatatgaatgctttagcctaacaaagtatccttagaactccccattttccctttttgcagggggatacatgttttgtgaggtctgaggtttatgaaattttgggggctcycaagaatgcaaaagtaattatgaatacaaatttagatactaatgtgaatgtttattaatgagaaaaaaattacaacatattactggaaccctggaagctgaggtccctttcctttgagaaatgtttacataaatgtttcctgattgcaacccggctcctcctcttcatctggaacagcctgtctacattttccggcaacaatcagaactcacagggtctgatctgagcgcaggtccccagtacttaagtttaattagcttctttgtaaatatgcctttacactgcaaagtagatttcctttcttaattagctaaacagctaactcatcaacttatattacttagtcctggaaagacagatgattattactttcaccctcaagattgcacagcagggagggcaattctacaggaaggctgtgatacagtgtctgtctccaggatgactgccatcaattccttccctccctgtacaagcatgttattcttcacatcaagagg

SEQ ID NO: 842393 - DNA, 601 bp, Homo sapiens
gcatagttgaaatgtattagcctttactgttattcctgtgaaggcttatagtgttggcatccattccctctggatttcgagtctgtgttcacagytgataatctcacattgagccatgatactctttgtatcattatcattacctgatataaagaaaccagacagaccattacctgatacaaagaaacttcacagtgaattcatagaaaagacagaaaaaagttttgctgaatatgtcgtatatacatatatataatattttattttaaaatgtcattgaacatatacatttctttagctttttccaggggacattgcacctaagtttcaaaacacacaaaatagatcccctttactaaacagttttcattttggggttacaaaaaagtcaatgtttcacaatcacaaagcataaaggtacatggttctgaaacaatttccaggcagatttctctcattcactgtactagggtagttttggaaacccagaccatgatccattccttacaaatgatctccaccatgggcctccctgggtctccagaaaaaaaacaaagaaaactgggggcaaaacaggagtaaaataataacctcaggactc

SEQ ID NO: 842394 - DNA, 601 bp, Homo sapiens
gcatagttgaaatgtattagcctttactgttattcctgtgaaggcttatagtgttggcatccattccctctggatttcgagtctgtgttcacagttgataatctcacattgagccatgataytctttgtatcattatcattacctgatataaagaaaccagacagaccattacctgatacaaagaaacttcacagtgaattcatagaaaagacagaaaaaagttttgctgaatatgtcgtatatacatatatataatattttattttaaaatgtcattgaacatatacatttctttagctttttccaggggacattgcacctaagtttcaaaacacacaaaatagatcccctttactaaacagttttcattttggggttacaaaaaagtcaatgtttcacaatcacaaagcataaaggtacatggttctgaaacaatttccaggcagatttctctcattcactgtactagggtagttttggaaacccagaccatgatccattccttacaaatgatctccaccatgggcctccctgggtctccagaaaaaaaacaaagaaaactgggggcaaaacaggagtaaaataataacctcaggactc

SEQ ID NO: 842395 - DNA, 499 bp, Homo sapiens
catggaactgataaatactgataaaactaaacataagtggtcacctgggacttttgatataactcttcagaaaaagaagctcttcttctgttaagaatgtacatcctagaattgctgatagacacagaagggggacagagagaaagagagagagaacatgtcagtgattgagggagggcattactgtcttgatgacactgttgagttcctagatgcagtatccaggttatgggactataaatcctcttttttacataagttactttgagtttctatgactttccgtcaaaggagtcttgagaagtatagttctatgcaactatttaatcatactgaaatcataattgtagaagaaggcatatgcttatttattaaaggtaaagagtgcttccatcccctctrcctcccctgggcaactctaagagcaggacactctagtgcttaaaagatcagattcaggcttctgagacactcctctcatgttgctttaaggcaaggc

SEQ ID NO: 842396 - DNA, 656 bp, Homo sapiens
gaaaaggaaaataaaattacactacattttttcttttaatatattttataatgagatataatttacctacaaagaattgcacacatattaagtgttacaatcccargatatttgtcaaatgcatatacacatgcaacccaatattcctatcaagatatagaacataacggtcacctcagaaaatgtccccttccagtcaattctttgttgctctgatttctttcgacatagatttgcttgttctagaacttcatataaatggtacccaatatttcctttttttttttttttttttttaagacagagtctcaccctgtcccctaggctggagtgcagtggcacagtctcagttcactgcaacctctgcttcccaggttaaagtgattctcgtgcctcagcctcctgagtagctgggattataggcaagtgccaccacacccagctaatttttgtatttttagtagagatggggtttcaccatattggccaactggcctcgaactcctgaactcaagtgatctgcctgccttggccttctgaagtgatgggattacaggcatgagaatatgaactctttttgtacagactttttttttggcttctttcagcatgaggttttgagattaatccagtgttgtatgtatcagtagtttatt

SEQ ID NO: 842397 - DNA, 251 bp, Homo sapiens
taccagcaaccaagaacctagattggtataatgttgatctagctgtatagtcatatatatgtgtgtatatttcatttatttactcaaatatcataaattattaacctacagacctagtaacatttattttaatatatctatttctcctactcttttgaaaccccaccttcatagtaaattatttcttttatacactaaggtatacttgtaaatattcttcctgtcccrtttaatctgtttattcttacact

SEQ ID NO: 842398 - DNA, 458 bp, Homo sapiens
caatagacagagctgtgttataattctcattatcaagattttcatttttgaatctaagccattttttagactctgaccccctccaatttaagttacatgctcccatagagcctgtgaatatttctatactggttagacctattttctatctctctctcactaagctataaacttcttaaggaaaagggcaatatattaggtatgtttacttcagagtgtttggcactcagtaggtcctcaatgattgcctgctgaatttaaggatgaatgagtgtgagcctctgttgcttgctattatggttcttcatatgtccgcaggttgtygttaaataattcctctgacctgatatttcatgggttttaaaatcccactcactttatttgaagtgtaaaggcgtgcttctggatccagtacaggatggagaataactggtaagaggaaagttttgatactaaca

SEQ ID NO: 842399 - DNA, 570 bp, Homo sapiens
tagagcaaattaaaaatgaaacaacaaaccagccaaaacaaatctatctgtaggtgatatctagcccttgggccacagcaagctcgtgacctgtcgtacaggctgtagttacwctgagtacgatactggctgttgattccagatagatttgtttttcatatgaaggaaatatattttaatttattctttaccaagaaattgtatcagaaacagatgctttcctgatttccaggaatagatgctacgttagcattgagatgatttacatgacttttcatactcccagaaagttgtgcttttattaaaattttaaaatttattagcatggggttatctatattattattttcttgatatgctccgtattgaaagttaatcatattttctcattaatattgtattagtctgctagagctgccataacaaaataccacacactgggtggcttaaacagcagaaatgaatttgctcacagtttcagagggtagaagttcaagatcaaggtgttggcagctttggtttctcctgaggcctctctccttgggtcgtatatgggctcttgttggatcc

SEQ ID NO: 842400 - DNA, 574 bp, Homo sapiens
cttaactgatttcttacgttaaaatactgccctattacaattggttgtgaaaattactgatgcttccacagctaggaatagagttttatttcattctactattgtcaaaatctacgcttcttcattgcaggctaccacatagacttaacctgatttgcagaagtgtgattagtttatcaatatgtcttcaagtgtagccaaggcacaattattttagaattacctaagacagttgttgtgaaagcatgatcctcaaccagcatcatcaacatcagcagagttcttgttaggtaaattctcaggccctactccagacctactgtaacagaaactctgggagtgggatccagcaatctgtgttttaacaagtcctcagggtaattctgatgcacaccagtggataagacccactgacccargatatttattagaagtataaatttctgatcctcacccatatcatatcagaatctctggggcctaggaaactattttttacaaatatcaagatgattcttaggcacatagaagtttgagaaccacactggtccatgtggtatgatttgaggagaca

SEQ ID NO: 842401 - DNA, 434 bp, Homo sapiens
gtgtatgtatatatgtgtgtatctaaaataataaatttttaaaaaataaatatattactgttacaccagctttataagattgtgatgatttattaagactaatagggatatggtaaatagaraaattgtagtagttttttttttttttttgagatggtgtctggctctgtcccccaggctggagtgcagtggcatgatctcggcttactgcaagctctgccccccgggttcacgccattcccctgcctcagcgagtagctgggactacaggcacccgccagcacgcctggctaattttttgtatttttagtagagatggggtttcactgtgttagccaggatggtctcgatctcctgacctcgtgatctgcccgcctcggcctcccaaagtgctgggattacaggcttgagccactgcacccggcagtagtttt

SEQ ID NO: 842402 - DNA, 494 bp, Homo sapiens
ccacgacacctggctaatttttgtatttttaggagagatggggtttcagcatgttggccaggctggtctcgaacttcctgacctcaagtgatccgcmtgctttggcctcccaaagtgctgggattacaggcatgagccaccatgcctggccttagttgggatttaaatgaaagacatcctcttcatgacatgcaaaagttaagaaccactgtgggtcatcactctcattagtctctgagaaaaaaagggtattgatatatgcacaggctacaaaaataggaagtatgctttattttgatcaaacctcagtagctaaaaccaaagtaatcaattgtttgggactgtcacatgataactaatttcactgcaatgtcttcatcctgggtacacagggaaatgacatttccaattccaatcccaatttcactggcatttatacaagtcaggcccatgtgactgatttctgctcaatgggatgtcagcagtagcaaggg

SEQ ID NO: 842403 - DNA, 612 bp, Homo sapiens
caccacgctcagctaatttttgtatttttagtagagatggggtttcaccgtgttggccaggctggtctccatctcttgacctcgtgatctgccgggcttggcctcccaaagtgctgggattataggcgtgagccaccgcacccagccggaacatcctttaaatccaagaaagcagtttgcttctaatttagggaatcttcatgcctgattttgaaacttttagtggatgtcatttctgtctcactcttccagtgacatctaaaatctactgtttattttgcttttttaaaaaggtccaacataaagtcactttaaggtgactgttacctacactatcttaacacaggggcttgactgtattgatgagaaaaagcttcagctttttttttttttttttggttgttgcaagtattccttggatttttgttcggaatggcatgggattctagtaagctgtctatgtgggcgcatgggcccttggaaaggtggcatgacttaggggaaagaaccaggcatgrggtgagtgagtggaagctgagcctgccagcactcatctcttaaccctttggcaaattaaggcaactacccttaccatcagtaatccatccctgg

SEQ ID NO: 842404 - DNA, 609 bp, Homo sapiens
aaatgctctactattctgagcactgagtgatttccttgaaaggtctggtcgtggatggtggctacaaaatgagaagagggcagtgcaaaggccattgtgaggctagatatatacaacttamtgataattcaaattgtctgctcatgctcttctcagactggaatggcttcacccaatcctctcacatgtctactgaagaagtcctactcctcccaggagccttcactgcagggtagcctccctcaggagtcttccactaattttcccaagtagaaatgaaggagccctcccttccaattccttgggtcagaatatttcacatcaaaaaggacttccatactagcaccagtgccttgtctaccatgctgtgagtttcctgagatctgcagacatgtcttattcatcttagtgttcccaggcctattggagctcagggattatccattttaactatgttgcacacaggaaaccgaagatacggatcaattgaaatggcaaccctcagattggccaccttaactaagtgacattaagaagaaatatggtccttagaagcacatgacccaaggctacccctgaagagtcaggacaagagtgctcagaccttct

SEQ ID NO: 842405 - DNA, 544 bp, Homo sapiens
catattatactcatatacacataattaaacagcaccaaagaggtaagcaagaataaattccacagcccctggcaactaccagtttcccttcccaaaggcatccattgttgccagtttcttgtctctctattccaaaaatattctgtacacaatacaatcacataagtattttgtatgtatatttctttttctcccacttcatccaaatactattctatttacccacttggtcacttaatatatattggagatatttctgtaccagtacctacaggtgtacgttcttttttaacagctctgtagtgatgtccctgggtgtccctcatcctggggatggaccataatttagcaattccctcctgacagacatttatggaatttatttgctattgcccccacagataatgttacaagttataaccatgaacacaggccttttatcacctgggtgggtataagtccctagaagtaacagtcgcttttccytactgcatttgtgatctaacagagtcaacaaccctaagagctggaagaattaatcccc

SEQ ID NO: 842406 - DNA, 600 bp, Homo sapiens
gcataaaagcaaagaaagaaaccataaaggaaaacattgacatttgactacacaaaattttaaaacttctgtacctcaaaaaaaaaaaaaacaccatgaaataagaaaaaaggcaaaaaatagkggaattttttgcaaagtttacctacaaatgatagatctcggtatatagacagagcttataaatcaaaaagaagaaggtgaaaagcttagtagaaaaatgaacatatggcctgtatagacaagtcacaagagaaatttgtaaatgagctagaaaaactgttcagcatcactagtagtcgaacaaatgcaaatggctgaaataagatacattttatatatcagattgctaaagttttaaaaatttgttacagctagtgagggctcaggaaaagggctaccttcatgttactgctggtaagaggataaaacagcaatgcctttctgatggggaatttggcaatagatgcaaaaacttctattttctgaggagataatcagagatgtaagtaaatctttattgtgtatgatggacattcaatgcaatgtataacacacaacactgcaaattctctaactaggttagaaaaacctgtacaa

SEQ ID NO: 842407 - DNA, 654 bp, Homo sapiens
gaagggggcagcttatgaagatgggagaaagtgggactgaagttgtaggggagcaggagggtagtgattttccgcttttctttctttctttcttttwctttctttctctttctttctctctctctctctttctttttctttcttctttctctttttctttcctctttttctttctttctttttctttctctttcttccttctttctttcattcttctttgttctttcttctttctttctttttttttttttttgagatggagttttgctcttgttgctcaggctggagtgcaatggcacaatctcggctcactgcagcctccacctcccaggttcaaggggttcttctgcctcagcctcccaagtagctgggattacaggtgcctgccacgacacccagctaatttttgtatgtttagtagagacggggtttcaccatgttggccaggctggtctcaaattcctgacctcaggtgattctcccgcctcggcctcccaaagtgctgggattatgagcacgagccacggcgtccagccgattttccgctccctttcaagtgttaactcaccccctgacaggtgaagagggaagggttccttttacgcacaaccaaggttagcaaatgcccatgcaggatatggggtccctgcctct

SEQ ID NO: 842408 - DNA, 628 bp, Homo sapiens
aacaattcaattagaaagcgacatgaagttctctgtgagggaacgctggggaattaccacacaatgaaccctaagcattttggccttggggtggagaggkgtgagaaaggccccagcaggggacccccagcggttcctggatacagggcatgcctccctagtgggaagagtcaccccttccagcacccaggggagggaggagggaagaggttggcagaaatatgcaaatgcggagtgggtgtgagcaggaatgggccagggcaggcagggaagcccggggactggggcgggcgattgaggaacctgtgttttgcttctgaggtgggttggcttgggatgtgggttgcttggtagggttggagaatagatgttgaaatgtttccccacacaattaaaattcagacatgggtggtggcgggagaaagtgggaaggaggccacaggatgtggtggaaaaaaaccaggcttcgaaagcccaccccggtggctttgaatcagttttcccctcttgctttctgtgtttgagcttaagttcccttagcctcaattttcttgaccataaaacagagctcagtttgccagttagcagagcgacggtgagcactgcatcacgtagcgtaatattgggc

SEQ ID NO: 842409 - DNA, 623 bp, Homo sapiens
tttaagtgatgagcccttgatacataagaaggtgtagagccagctggatttctccgggaccrtgaggggatccatctgattagggcttctgaagccgaaggaaactacagagagatgtaacttggctgactctcagttcattattttctcttggtaagagcacttctcatattggacaatcttttcttcactgatttagatattattttagatgcaccttttctttttgttatggaagctttattttaaaataaagttaacctaaaatgggcgtattactctccccccgccccaccgctaatgatttagaacatgaaaataatccacaagaccatgggtgctgtcttcagctacaattactactttcttaattgtcatggaaacatgatttattattggatggttttttactgtcttatgcaaagatttcatatgagccgcaatacacactgtttcatatgggtaagtctcaatattatctgacaaagagagcttctctgcccaagtttatgaaaagtacatttttttttaagtcactgtcttgcccaggctgcagtgcagtggtaccatcatagctcactgcagcctcaacctcctgggctcaagcagtccgctcacctcag

SEQ ID NO: 842410 - DNA, 599 bp, Homo sapiens
tacatacatacatagatacatagagatgatagatataaattagatagataagaaatcaacagattagatagagagagaggggtagatagattaaatagatacttcacatgtagasacactacttatcaggaaggcatagtgagacatttagtcaattgtatgagtacatgatcatcagaaaaatgactcaattaacaagattcagggttctgaggaaggtgattagggaagctgtgaattctctgttttgggaaattactaagtttgaaaacacaacagcactccttgaaagtatgcaatgctcagcccgtgggtgtgcaggtggtatcctgtggttgctttctactgctcattttctgacataagcatatatttggaaaagagtagatactaattgagatgaggtttaatatttacttacactggtggcactcataaagtgcttatcagtggaaacagaaggagaacaaaattagttcacaaatctcatgtgatcgcccactctcccagcctagacaaactcactcatgtgccttttgtctttttctccctggagttcctctccattccaattgttcctcccctccattttctggaag

SEQ ID NO: 842411 - DNA, 508 bp, Homo sapiens
gtgcacacgtgcttcagctaaagattcctcagctaaagattctccctctccatcagggtttctctctttagctcacctgcccttctctacatggttttaaagtgagatgattgtaaatgtgtttttcacaatggaaattctcccagcgggcggggaggaaaaaagacatcttgaaatattttctgagaactatgaggaccggcagagtttgacatgtttttgaggcgataaagtcatgtgtccatctgtgaaagacaggcattggctttatccacatccacacagccttccccgctgtgtggcttcattattgatttgctgtcatgtagagtcgataatgagaaaacctaggtagccttgaacccaactttgcaagaaccttttaggactctgggacttctaaccctctakgaaggtggagttaaggggatataggcacagaatggggcagaagggaaagacattaagagacagcctttagcagaccagagaatacatgccgtttatc

SEQ ID NO: 842412 - DNA, 587 bp, Homo sapiens
tagacataactaaatgtttcaaaatagggtgaaagggatgagatggaaatcacagttgcatgtctttctgcaatgtctaggagtgcagaatatgaatgagccaaatattactacataacaacatctgcgaaattttactgaatcctcctaaataagtcagtgaatctcaaatcgtacctgtgcagatgtggacaccatcatttggatattctaccatcattacatagagctttcctgctgggtagagttacagtaggacacctgataactgttttcctcgctacagttcaacacctatgaaacctgatgtcaacgcattggtacttaatacatcagtattttatttcagaatgttatcaaatttgattttaaaacattaatagtcactagttcgatgttgaaaggaaatacacagtatctctaaagcacacgcaccttatggtattatgaattagaccataactttgtggtacatgatgagcattcaaagcattgcaaagaatagtaatagaatacgtatgtgcaattgggtgcacctgagtgttgcacttgtgcrtgaggcatgtgtgtgtgatttgcataagtgt

SEQ ID NO: 842413 - DNA, 579 bp, Homo sapiens
ggccaaagataagtaatgtcaaggccgccttcaacactttctaaatacctgttttaaagtgctttatatgcttaatttattcctttccttttcttttttttttttttttttttacaagatcttgctctgtcacmcacgctggagtgcaatggtgcaatcctagctcattataaccttgaatacccaggctcaagcaatcctcctgtctcagcttcccaagtagctgggatcacaggcatgtgccatcatacctgcctaatttttattattattattattattctttggacagacagggtctccctatgttgcccaggctggtctcgaactcctgggatcaagcagtcctcctgcctcagcctcccaaagtgcttggattacaggcatgagccacagtgcctgaccttaacttatttattttgcaaacatccctcgaggtaggtactcttctcacagccctcaacagctgaggaaactgagacacaagacgtcaactactgaaattcacactcaagaaagtatcaggtctcctggcctctgtaatggaaattgatgactaccacagaggaatacaaacaa

SEQ ID NO: 842414 - DNA, 635 bp, Homo sapiens
cacctcataataaaaccaacatattcagttttctatattatcttatcgtccttgtccatrtacatattcaatggttatatatttgcagtaatatttatattccaccttttcactttttgtgaaacttgatacattatttgttcctctttcattctcctttgaaaatccaaggtaacaaatactgataacctagtatatatctctccattcctccttcatggttatgtaatcccataagattaattttatcttttttattttaaaaatggaatatgttaattgaaacttgttttgatttttgaaagatatcatcaccattctttcaggacagtagacacagctctaactagactaaataataattcattctgggatgcccaaataattccataacatattcaataatttccacactgaagggtatttgcttgatttctactttttgaccatcatagacaatgccaaaatacacatcctctacatacagcctttcatactggtacttttatttctgtagtattgattctcagaaatggagtgactgatcaaaaggtaagtgcatttaaaatttttgtagatcataccacatttctttcctcaaagaccacagcaatttgcgtttcatctgcaatatc

SEQ ID NO: 842415 - DNA, 635 bp, Homo sapiens
acatttctctcggaatctatgtgtgtgtacgttgaatccctaaattttaattgtgccaggtctagtctagaatgagtcaagaatacttaatttccatatctgtgcattcaacatgctctaaatgtatcatatagttttaaattttccggaaccatatgggtttaagtggcttatatgataagtaaaatgtaaaaataagaatcataaagaaaaaaaagatatgttcagaaaaaaaaccaaaggtcttgaattagatttttttttaaattcctttgtccaagttatcaaactacaggccctggagaaaatttggctgaattttacaagtaacaatgaccagatattagaaactgtaataatgctttgcaaacagaatctactgtattggttaagtacttttttacataacaaagttttataatcagctattccagctttatggtgcacaaaaatagctgagaatttgatggagtaaggaataatgtgatttcaaaaggttttcattctattcataagagcactgtgtaccattctcagtatgtaaataagggcagcrtgaaacagtgttctcatagtccatggaccagcagcaccagcaacgtctgagaagttattagaaatgcaaattcccaggc

SEQ ID NO: 842416 - DNA, 493 bp, Homo sapiens
cccctggagacagagccaaactcatgatgcaaaaagatcataaaacacattctgtgaaatcwacatgaacctctttacagtttcctctgcttaactattcgttccagccagaggggaaaaaaacaattagattccaaagagttttcatgactttatatattaaacgttggccatgtgtaattgcaaaatggatgcaaaagctatggttcataaataacactaaaaagaggcactgtattctcctgatggttcaggaaattggaaacgacaggttgcaatactgagtattactcactgtttaatctcagtctagtttccaacaattgcaacacactctacaccagaaatttggaaaataaaggaataatgtttatactgtagtgttgacaaatgtttggatgggtctggagtactttatatgctaactattgctcattacatggtccctggaagatctcatgtaattttttaaagaaataaaatagatcttaat

SEQ ID NO: 842417 - DNA, 493 bp, Homo sapiens
cccctggagacagagccaaactcatgatgcaaaaagatcataaaacacattctgtgaaatctacatgaacctcttwacagtttcctctgcttaactattcgttccagccagaggggaaaaaaacaattagattccaaagagttttcatgactttatatattaaacgttggccatgtgtaattgcaaaatggatgcaaaagctatggttcataaataacactaaaaagaggcactgtattctcctgatggttcaggaaattggaaacgacaggttgcaatactgagtattactcactgtttaatctcagtctagtttccaacaattgcaacacactctacaccagaaatttggaaaataaaggaataatgtttatactgtagtgttgacaaatgtttggatgggtctggagtactttatatgctaactattgctcattacatggtccctggaagatctcatgtaattttttaaagaaataaaatagatcttaat

SEQ ID NO: 842418 - DNA, 532 bp, Homo sapiens
taaagcccaggtgcttgctcctttggtgccagtgggagcttgaaatcaggtaaggccgggtgtggtggctcatgcctgtaatcccagcactttggaaggctgaggtgggcagttcacttcaggtcaggagttcgagaccagcctggccaacatggtgaaaccccgtctctactaaaaatacaaaaattagccaggcgtggtggcatgtgcctgtaatcccagctacttgagaggctgaggcaggagaatcacttgaacctgggaggtggaggctgcagtgagccgagatctcaccactgcactccaccctgggtgacagagtaagactccatctcaaaaaataaaaaattacaaaaattgaaaccaggcaagctgctgtactgcatttgggaatctcaccctaccctgctccttacccacaataaaaattcaatctagagttttttctttaccatcttggtctattctggatcagcttggaagatctttcctgctctcccrcaaaagctgtattatgtaagaaatgataact

SEQ ID NO: 842419 - DNA, 399 bp, Homo sapiens
caggctggtcttgaactcctgggctcaagcgatctgcctgccttggcttcccaaagtgctgggattacaggcatgagccactgcgcctgacccrtttgggtctttggagaagcacacaccaagaaggaacatgatgggccagagatttactaggggaactgtgtgtgaagggtcaaacaggcgctggcagaagagtggaggaaggcttgcaggtgatggtgtaggtgcctcacacctgtgaagaaagagacggcgaggaattgggtagaaggagcgtccagccagttctctggtcatgccgagtcattggctgtgaaaacccaaaaccctgaggaagcccgatcttgcgaaacatgttccccatctgcagaggcaccgggtggctggtgtcaggcgatt

SEQ ID NO: 842420 - DNA, 647 bp, Homo sapiens
atgaattgctaagggatttttttttccagtaaaataagaagctwtgggaagctgcagtgtgttgtgtttttaaaccaagttaaatgcgatgcattttgttcttttctttctccttccctgacatcctctcaaaaaaattatcattttatttgtattattgcttaagtatcacagcaaatccagtcaccagtgcaaataaaactgtcattaccctgtcaggtaatggtgtctcttaaaatctaagctataaagtctgtacattttagaggacattaagatcaagaatttttaaattgcctaagtctaagcaagtggagtacacccttgtggaaaatggaaggcagatgaaaacatgatgccaggcagtgaattcattttagtttgatcttttctacaaaaatacatatatccgtgcagcaagagtcttgcctgtgttagtacatgtgtctgtgtgtcattcaaagcagcaataacaaaaaattaagaccatttctcactttgtttattgttcaagaactcccacctatagccttgacctgtgtttgagcttaaaaaaaaaaaaagtcttataactgcccagtggtttggagattttacacaatagaaataataagccatcttttgcctcacatgaattctactaaaat

SEQ ID NO: 842421 - DNA, 629 bp, Homo sapiens
ttcattttagtttgatcttttctacaaaaatacatatatccgtgcagcaagagtcttgcctgtgttagtacatgtgtctgtgtgtcattcaaagcagcaataacaaaaaattaagaccatttctcactttgtttattgttcaagaactcccacctatagccttgacctgtgtttgagcttaaaaaaaaaaaaagtcttataactgcccagtggtttggagattttacacaatagaaataataagccatcttttgcctcacatgaattctactaaaatcaaaactccataggatactttccaaagtaactggtgaaaggaaaagtgtggtagtataggtatgcatattatccccatcactttatttctgagctcttctattttttaaaaattttaatttgtatcttaaaagggcaaaacataagaagaggtaggagtattctaaatttcagtgacaacaaattcatttattttacaatttaaccattgcccgtcaacatttacttaaaatttcagcatgggagrttttaaacacttctagagtcccatcttaccccatttccacgatgcttttcttctccatgtgttgctgcagtttaatattgtctgcgtgttttaatatgttaaacga

SEQ ID NO: 842422 - DNA, 618 bp, Homo sapiens
atggggaaataagatctagatatgtgaaaatgagtagtgtccggtgaaaggctcgtttctgggtggctagttcagagaaatccctggaggacgctgagcttgagctggatctgcaatcacatctggattgagggaatccttccagcactcagcaaatagcaggaaaaactgtccagacacagcaggtatcaagatttggagactttcctcatcaggagggaagcatttgttttgtttgtttggacatacaaggagacagaaagaatattgataatggatgtatttgaacccgatcttggtgacaatgttgagccaaagttgtaaacatgatgattaagaactcaggtaaagaagatggactgcctggtgtgactacctcgtttctcaactgagagccactgggcaaagcacttaactcgctaagtttctgcttttgtatctaaaaatgatactactcatcagaggtacctcagaaagtagttgttagaattaagggagataacgtatgtcaagtccttagcacagtgactggcagagtctcatctggcatatattagctctgagcttaatgrgggtgctggtggtgataatgacgttgtctctccaaaggttgcaaac

SEQ ID NO: 842423 - DNA, 553 bp, Homo sapiens
tttgtctgactattaagctaggttacagttcatccacaaggactcaaatatagaagtacagagtccttctcaggccattatttagttttgctttaacagtrtgagatcctgtgttagagcctggatgagttggaagtaagattaacatcttaatatctagtgggaagaatgaatatatagatactggaatacaaatacaaaggtaggaaaatatttatataataaggttctatttaaagttctctgataaggcagataaggctgtccttaaatgcacctgcagcaaccaagtaggatttccccaaatagttcatatatgagttggccctctaagaattctccaaatattgtagggtgatataatcttttccttttttacttttatcttaggttcagtggtacatgtgcaggttgcaagtttgtaataaggtaaacacatgtcacaggggtctgttatacagattatttcattacccaggtattaaaccagtacccattagttatttttcctgatcctctccatcctcccaatccccacgctccaatagtctgt

SEQ ID NO: 842424 - DNA, 553 bp, Homo sapiens
tttgtctgactattaagctaggttacagttcatccacaaggactcaaatatagaagtacagagtccttctcaggccattatttagttttgctttaacagtgtgagatcctgtgttagagcctggaygagttggaagtaagattaacatcttaatatctagtgggaagaatgaatatatagatactggaatacaaatacaaaggtaggaaaatatttatataataaggttctatttaaagttctctgataaggcagataaggctgtccttaaatgcacctgcagcaaccaagtaggatttccccaaatagttcatatatgagttggccctctaagaattctccaaatattgtagggtgatataatcttttccttttttacttttatcttaggttcagtggtacatgtgcaggttgcaagtttgtaataaggtaaacacatgtcacaggggtctgttatacagattatttcattacccaggtattaaaccagtacccattagttatttttcctgatcctctccatcctcccaatccccacgctccaatagtctgt

SEQ ID NO: 842425 - DNA, 561 bp, Homo sapiens
gtcctaccaggttaatattcagacaacaggagctgactacctgatgcttagaaagagacagtttgacagaaaaaaagaaagagaaagaaactgggtggggcgcaaggccatgagaagggagggaggagagcctacccctccctctacaaggactacacctggcctccaccctcaagggactcctccttaacagctggtgttttccatccccgccccagccctggcccctggccacagacatgcttccagtgatgcctattctggaaggatctttgcagatgctattttgataaaactctaatcccttttctaccccttcccccggttaacctctccacctctacaccaaagcctctgtgtttgtgtgctggggaagagtaggggatggaagacagtgtagcttcataaccagccaacacaggctccagtttcatggggtggattaacgcagggaaatggctgcctagtctcagctgctrgagacatatagaggctgtggagagagatttccttatctggccttagtgccctcaaaacataacatgaaacataacacgagaa

SEQ ID NO: 842426 - DNA, 537 bp, Homo sapiens
tttattctggagtcctgggtcctgycctaggctcagcagggcctgctgtagagttctctctctgggacttccttctcccgtcttcctctctttcccttcaccactctcttgtattgggtcccacatttcttagatatagatttatcagttgactccctaatttttgtgatcatgtattcagtaacagcttttttttttttttttttttttttgaggcagagtctcgctctgtcgccccagctggagtgcagtggtgcaatctcagcttactgcaacctccgcctcctgggtccaagtgattcacctgcctcagcctcccaaatagctgggattacaggtgcccaccaccactgcccagctaacttttgtatttttagtagagaaggggtttcaccaggttggccaggctggcctcgaactcttgacctcaggtgatccacctgcctcagcctcccaaagtgctgggattacaggcgtgagccacgtgcccggccagtaacatcttaagaaagaataaatagagggtaaaatttgaaa

SEQ ID NO: 842427 - DNA, 635 bp, Homo sapiens
actatcttaattacttaaataaatttattaagccccaaaataagccccactgacattaaaatctgagagcagtagwataaagaactgaccttctagaaatgtgatataagccacatatgtaatttgaaactttttagtaatcacattaacaaaactttaaaaagcagatgaacttaaattttaatgatatgttttatttaacttactataacaagaatattatgctatttatatagaattattaatgagagattttacattattttaggacaaactttttgaaatctagtatatattttacactgatagcacatttcattccagcccctctgtcatgctggtcacatttcaagggctcgatgaccacatgtggctagcagccactgtactgggtagtgcacatttagagggtataaaggttaagagtgtctgttctccggccaggatcactgcgttctaggtgtgtaaccttggcaaaattacttaaccttgctgtgcctcggtttcttcatctgtaaaatgagaaaaataacaacacctacctcaaaaaaatgatacaaggattaaatgaatggataaatgtctcttacggtgttctccacatgtaccaagaactcttctaaatgccttacatg

SEQ ID NO: 842428 - DNA, 599 bp, Homo sapiens
ggaaagcaagataaccctgacctctaataaagggggtcctgaggaaggaaagaaccaagagcaaagtcaaaggtgcctcaaagaacctcaggaaaaaccagtttcrccactctccaaggccactggaaaggtggaggagataagctgaatctccccaggcagcttgggaaaaaaaggagcccagaaatagggctgagtctatttgtaaagtggaggtggagccaagttaacactgcaggtctcctgccccgaagagaggtctagtgacaggtcactttcctcagggactattcccatgggctgtatttattactgtcccaaggaatccaatggaagtcagcaatacaaaaactaatctcatccccaattacatatctgtgttttagatgcactgtaatgtgacaaatctgttagggtttgtgaatgcggttttttttccttgcacattggtgcattgttgcaggggtggtttgtgcaagccgtgggactggtgcccagaagaggatcaaatggaggagagatgaggatctcgtaggagaatgaatttgatttcgggaggtagggctaaagagacaaaggtgattgtagaagccatggga

SEQ ID NO: 842429 - DNA, 512 bp, Homo sapiens
tcatatgaaaaatatattttacctctggggaccacattttaagagagacacattcagacactaaaaaactggttagaagaggagccaaaagagtartctaacctgttatcagggatgtgggaagaaacccttagctggtgaaccagtcccttccttctcaaagcctatgtatttgtctgttttttttttaatgtatgtatgatttatttatttattgttttgattatactagtggcagatgctgccaaatgttctgttggaaatactgagaaatgttctttagattttgaaactaagaggtcacaggtgaacttagaacttttggtagaaaggacataaagggggtagagagagcagaagccatattgaggagtatatcagaagcgtagaagtagttcaagtaacctctataatcatttctaaatctgtaactttatcctctcttctcacaataatttatatcccccttaagtccacctgttgaggatcttcagaatttgcatttgccaaag

SEQ ID NO: 842430 - DNA, 631 bp, Homo sapiens
cccctttggcctgtttgaacagcagcaataacaacagtagagaagacagggtgtgcatgtgaactgggtaaaaggtccccacttcccagccgaggtcagcatctggagagacttagatttcagagagggattcagactgagtcatcgacaggtataaggactgtcagcaacttttccatgttccctcttcataagccccaagtctcagcctgctgggaagatccggccctgtgaaggcatccactggactccccgggaaaattaatggagtgagtttgaattggagaagtgacatggaatctaactagagatctgacttccaaaacagtgacaccctaaggctacccctcctagcctaggaaagggaccagtgagagcactgcctccaagccctttcctgcactgtaaccctagctacccgtctaggagatacagacaccatcctgtccatttacctttctccaggcaagaactcactgagccccaagaaaagaaaaggctgatagtgtctcttctcaaaaggccaggaatttagctctctctctttctgtgccaaaaatgtwcagaacatagtcgtttcctttcattaagggaaaaaaaagctgagtcccaccagggaagctaaggtgta

SEQ ID NO: 842431 - DNA, 659 bp, Homo sapiens
gttttctcaaggcctttgagcaattttagtggaacccaagaatcttgaacatactccatcacttccaaataatgttctatgaaggcacttatacccacyagaaggaatctccagcaaagtctatttactttgccactctgcccaatatctttcttctatttttgttaaaaatgattaatatttctttctttatctgataccatgttaaagcaggagatctgtgccaacaacatcattgtatctttgcagcattatttctgtgtagtctttggacataaactgtaatactttgtgttgagcatagtgtatatacaaagaactattttagggggaacttgggggatcatttatgcatgaactacctaactttgagcacctagaaggcaggggctgtgtcttatttatcttagtagtatgagtgctttatattaattatggtcccaaaaatgtctattaaataaatgaattaatgaatgaattattccaagatgtagctcatttaactcagttgttttaattattccaggacttttcaacttcaatatataccaccctagcccaattcttatgttcatagatttagtcaaataaacccttttgtctattttcgttttgaggcactatgcattcttttcctatggctctttagtacatcactg

SEQ ID NO: 842432 - DNA, 625 bp, Homo sapiens
cttaatctttgctctttctcgcacacgccagctatctcctctgtggtcattcattggtctgcgcagtttataggaaattccccagtcagaagtgatgcctacgccaagcctaggtcttggtacccactgtgaatatgatctccatactcttgctctgaggggctggatgatcctgatcccaaatgggctctccatcttcactgaggcgtttttgcctagaactgccatcaatcaaaaacaccttacttgaccgaaatttgtgacattccattaaacaaactaaaggtctgacaaagaaacagaccaaaaaaattttaaaaagaatgtgagttacttccaggtagaaactactaacttattagttctatcacccacagtactttgaacataagtgcccagtggatgtttgttgagttgaataaaatatactagtcatttcttgctgatgtaaaagtcttattttaaagggtgtcctttcactgactgtttggmattgatagttagccaagtaatcttgtgtacgtacatgttcaataagtggattttaaaatttttcctaacagcagatagcaagtaagtaacttaggtaagagaagggatgggatgggatggaaagagagtatga

SEQ ID NO: 842433 - DNA, 635 bp, Homo sapiens
agggatccccaactccgggctgtggacgggtaccsgtccatagcctgttaggaaccagctgcacagcaggaggtgagcagtgggcaagcaagcattactgcctgagcaactcctcccgtcaggtcagaggcggcgtttgattttcataggggcataaaccctactgtgaactgtgcacgtgagggatctagggtgcacactccttatgagaatctaactaatgcctgatgatctgaacagtttcatccccaaatcatcacctccctgcccactgggctgtggaaaaactatcttccatgaaaccagtcctgatgccaaaaaggttgagtcaagggatacttaaaaagccaggaaacatgcagtccaaggcttggcccaaaccaactggacactggtggtgacacagagaagtaggagccagttgtttctgtccccacctctctcaaatgatggagctggtgtgtgtgatttagaattataaagaaaacagactggtaagagaaaataatggtcctaaggccaaagtgagagaaaaacactctgaacttctgggagacagaggaaaaggagatggtggtttatcaaacacaagctgcaccaagtggacacattaaccataaaataaacaacgtacc

SEQ ID NO: 842434 - DNA, 626 bp, Homo sapiens
tccttgatataatggtccccaacttttatgttcatagagaacctggcattataaagaattaagtcaacagacatgcaataaaasatttttatccctaagaaaaggcaatgtcctctttcctgaaggttttctgaaattccttttttaccgacttgagagagcaattaatgctcacagtagatttgacagacggttctagtcatctgtgcttcactaaatatggattgcacattttctgcccctgatttaataaggaaaagtaggaatgaatgacgaatgcataatccccaaagcattgtttattttagagaaaatcacataaacgggaatcccagaggaggagtcttgggaacatttcaacattaattcttaggtctttggattggctttcataactattaatgaagataaagtttaaatgtagtcattcatggtatggcatcaataaaaagttatcgaagattaacatctaattgataccaggagagcttatattcattcaccagatttatattcccaaaaccagtgctacagattccatagaccctcccacacagggacctgtttattgcccttctcaagttaatatgaattttgaaataaataatacacagattaaataactt

SEQ ID NO: 842435 - DNA, 609 bp, Homo sapiens
acagaaagaaggcagccacctacaaaagccaagaagggagccctcaccagaaactcagctggtggcactttgaactcwgatttcccagccttaaaccacccagtctagggtatttggttatggcagtcaggtggcagatgtcaacttcaacgtaagaatctgtcttgtaagaggcaaaggaggcattctttaggctgcacaggaatgggaggctgtgatgattccagcaactggaagtggggcagaaagggtaactccagacatgactacccgtacttcacagctaccaagaggctcccacacaacagctcacactcactttctacaactcagagaaaatgcctttcgtgtaatttgtaaaattggtacttctcttcttaattctgtaattctaacatggtcatatcagtcaagtttctgtcacctttcatcatctgtctccttatttctgcctttgagtagttggtttgtttcgtaactttaaatgaaatgttttccttctaaatttcaagaagccaggcagtacagtattccatcagctactttatacactactttagctgcataaaatgtatgcgtggaggggaatgatgcggactgggattacag

SEQ ID NO: 842436 - DNA, 608 bp, Homo sapiens
cagaaagaaggcagccacctacaaaagccaagaagggagccctcaccagaaactcagctggtggcactttgaactctgatttcccagccttaaaccacccagtctagggtatttggttatggcagtcaggtggcagatgtcaacttcaacgtaagaatctgtcttgtaagaggcaaaggaggcattctttaggctgcacaggaatgggaggctgtgatgattccagcaactggaagtggggcagaaagggtaactccagacatgactacccgtacttcacagctaccaagaggctcccacacaacagctcacactcactttctacaactcagagaaaatgcctttcgtgtaatttgtaaaattggtacttctcttcttaattctgtaattctaacatggtcatatcagtcaagtttctgtcacctttcatcatctgtctccttatttctgcctttgagtagttggtttgtttcgtaactttaaatgaaatgttttccttctaaatttcaagaagccaggcagtacagtattccatcagctactttatacactactttagctgcataaaatgtatgcstggaggggaatgatgcggactgggattacag

SEQ ID NO: 842437 - DNA, 642 bp, Homo sapiens
gcactgaccagagccaagggcatagtggggaggccaggagtttttcccgcattcatatacttcagcaacaagcatgctagccccgttggttaccttaaacctacgttctgccatcagttaacaacagtaggaatagcaacttcacaccacagggtcaaatgaggtatgtgagccgggcacgcgtggctcatgcctgtaatcccagcactttgggaagctgaggcgggcgaatcatgaggtcaggagttcgaaaccagcctggccaacatggtgaaaccctgtctctactaaaaatacaaaaaattagctgggcatggtggcaggcgcctgcaatcccagctgctcgggaggctgagacaggagaattgcttgaatctaggaggtggaggttgcagtgagccgagattgtgccactgcactctagcccaggtgacagagtgaggctccatctcaaaaaaaaaaagaaaaaaaaaatcaggtatatgtctagtctgatcaggaaggatagctgcagaggcaaagtctatcctcagctacaaattcttcaacacmcaacctatctgcagaaccgaagtgaaaacagtagcttcacaaagaatgatatgtaaaatacagccctgcctttagtaagcattcagtaaa

SEQ ID NO: 842438 - DNA, 610 bp, Homo sapiens
atagatctgaccttagctcatgtgaaaagagttggagattttgacattatcagtgtatataggtggtattttagtcatgggagtatatgaaattgcatagatggaataattgcatgaagagagaagagggatgaagatggagacatctaagatgtaggcaaaggatcacaagaagacactgagaaggaatggcaggagacataggaagaaaataggaagagaggagttttgcggaagccaaaggaggagaaagtttcataaaggaaacgatagtcattgcagtcagatggcacagagatttcacatcagctcatcctcaaacctgtctcctgggtttggcaataaagaggtcatcagtggctcaggcaagagaatgggaggcaaagtgagaggagtttataggttggctgctaagtggatgatacagtagctgggagatgatgtagggctgagcgagggtgtgggtatgtaagatgaacaagacgtgagcaatgtcctaaatctagggatgggggagagggtgaaaatataggagaaaggggyaattgttgtgaagttccaagagacaagcccggagttccaggaaaaatagggaccgctttcccactga

SEQ ID NO: 842439 - DNA, 611 bp, Homo sapiens
cattaataacaaatcaaaacctttactaataaaatgtcacattgagaggacttaattttgtgyacactttcatactaatataaggcactcttgctaatagtgaaagatggaaatatttgccaaccagctatgttatagaagaacttcctacaatattgtcctatgtacggtgacatttagaattcaaggaaatatacatagtcattgactttgtgtggaatttccctcccctcctccaccaccctgttagaaatccccgctgttgactgtttccagaagtcttgcagggtgttgtgataagagtccaattcctcttcccattcctgcctaggtcatctctttcttccctccctccttttgttctgtgattctttgttttatttttcaccacagaacatacttcattatgctgcccctgttaaaatcagttaccctattccacctgattcatccttgagaaaactactcatggccattgtgggttttaatgccactgccatccccgtcttgccattgcctcctcagctctgtcctgctaccacgatagagtggaccctgtgtcacagcaccattggtacccatcctgccactggtgtctagaactttgagca

SEQ ID NO: 842440 - DNA, 509 bp, Homo sapiens
taaatattgtagagatttgatgtaaagcctgatgcaaagttagaggttaattaaaattaggaagaaccaagtggtttcttatttgcataggcaactrcagtccacataaccttatcaagtaactcacttagcaatgcgttgtttctctgttcataaggaactcattacatctatgataagaaaatccactcaaagacttaacccatttgaacactgattcaggatgaaaatgttcacctccagtattgatatgcgtgaacaattcatcatgggccatctgtatagttttttgtcatgaatgtcatggatgtattgtatcatttcagggccagctggcattcctggattcctaggtctcaaaggtcccaaaggcagagagggacatgctgggtttccaggtgtcccaggtccacctggccattcctgtgaaagaggtgctccagggataccagggcaaccgggactccctgggtatccaggtagcccaggtaagtgtcaagaactgtgaa

SEQ ID NO: 842441 - DNA, 575 bp, Homo sapiens
aaccaccttgcgggttgagggaggtagtctttcaagacaggtaactttgaactgctctggaatcagcaaaactcagccaagcaaggtcagaggcagtgagaagtgggcatgtcaggccaaaaaacyatgtggaaaagcacaggaatatgaaagcaagcagagggtctcagcgggcaggaatcgcacctgcagccccatggggccatatggcctctctgctggggatataggggacacagaatacagagagcctcccacaccatgcccaggagttcagactcagcactgatggccaggtctaaatacttttaatcaaccaagtgacatcatctaattcggggaatttatttaggattgatcattaatctcaactatcctatatttttacaaataacttctgttttatttcataaatatcaaagagattggtataaaagttctggggatgaatcttagttcctttttaatacttgatatgctaaggaagttctcagagtgtggtctggggaacccctgaaactaagcccctgcaagctgcttgttttaagtaccgattctaggcctcagacctgctc

SEQ ID NO: 842442 - DNA, 371 bp, Homo sapiens
gttattgataaatatagaactacagacctggaaggatgtttgaggttaagcataagctgcaacacttgttattgaactactatatttgatatatactattttatttaacacaaaaatatgatattgattttatagcttttttatatgtatttctaaaacatccaccaagcaaacactaaggtccaattctcaaaccacatatatgttattttcagctgtggttagagattcaaatatgaaaatggggcagtaagacccacagtagatrtagtaaagaaatctaatagaattagccttagctattctgtcttttgtaataacttgggatggcaattatgtttgccttacatcaagttgctacaattcaagta

SEQ ID NO: 842443 - DNA, 642 bp, Homo sapiens
aataaataatataaagtcaagtacaatataaggagagatattttgggaggtatttataaaaattagttmtgtaaacactaagtcagaaaagaataatattctgataagccagttttattgctggtgattatggggtcatatgaagattgaaattgaagatagttttgtgataagaaaagcaacaatgtagaatgaatctctcctggagttttgggatctggtttactttttgggacttaaccactctttatgatctttgttagctgtaacatgagaaaaaaatatcctagtgtatgtgaaacatttttacactttcactaagatctcaagctcacatcatacgagggagtgggtctatagagtcatgtggcatatgtgttcaataaatggcagtgattcaagcccttattaattttttgtcatagagcaagaataacatgaacaagcttgtgttcaataaagcttttgctattaatgtttattactaaattaatttctactctaactcccattcatgtactcctcctcattccccaatctcaagcaaatttaaaaaaggaatttctttatttgggatgaaattgattattcatacatgtataaattatacatcagataatatatatagccatagtcttactt

SEQ ID NO: 842444 - DNA, 566 bp, Homo sapiens
  misc_feature 530, 532: n = A,T,C or G
cagattagttacagagtagggacacaaaggttctccaaggccccaccagagtagctagatacagagtgtagattggtgcattcacaaaccctgagctagataccgagtgctgattgrtgtatttacaatccctgggctagacataaaggttctccacgtccccaccagactcaggagcccagctggcttcacccagtggatcccgcactggggctgcaggtggagctgcctgccagtcccgcgccctgcgcccacactcctcagcccttgggtggtcaatgggactgggcgccctggagcagggggtggcaccagggaggctcggaccccacgggagcccatggagggggtgggaggctcaggcatggcgggctgcaggtcccgagccctgccccgcaggaaggcagctaaggcccggtgagaaatcgagcgcactcacggtgggctggcactgctgggggactaagtacaccctccgcagccgctggccagactgctaagcccctcattccccgggccggcggggccgnangccgagagctgctccgagtgaggggcccgcaagc

SEQ ID NO: 842445 - DNA, 583 bp, Homo sapiens
ttgttaaggaagagaaagaaaagaaacgtaatttaaactgcttatttcttctttctgacactgttctttcaagcagtggagaaaaaaaaagacaagtaaaaaaacaactccatggttttgtgaattcgtatgttttgtttgtgctgtttgcagcttggttgtctttcatttttgggaatgttcattttgcatttcagagaacagcgtgccattttgtggatgttatcattatggccttttagcccagaattaccactgctgtcacagccactagaaggaaatgctctcccactcatttctctgataagaagctgcctcatatcctcatacttcctggggttcactagctggatggagacatttgcagttaggattttcaaagggaagccaatactgtgcacagctttcaggattgttagtttgccccaaaactcacttaagtcgtgaaaacccttacaaaaaatgattagagaagttgcaaaagttcaaggacccaaggcaaaactgaaagyggttcttttcatcattttggtgaagagtaaaagggatgggctgcagctcttctttcctgtctcacagcaaa

SEQ ID NO: 842446 - DNA, 612 bp, Homo sapiens
ataaggatttgagaggaaaacttcatactgcaatgtgcargaaatcttcctatctttctggaacctcatagggttggagcttgatcaatggaagagcaagcttgcttgagggcatttccattggccttgccattaggtaacagtccagaggataagagcattcttagatcctctgggttgcattacccctccattcgtcttaagcattcagaaaagtccaccttgttaaagaggacctcttcctttcttgggaccgagtagcaaaggggagagcagtatgtcctcccttaaacccaaacaggcagcatagctcagcatctccaagaagagaggtatctttggaatgttcctagcagcagaaacagcagggagaggggagagggtgaagaagtgcaagagatgtaccaggtcattcatctattcttgatgttcatgcaacaatcccaagagcacttatgctgttgtaatcccaactggtatgctgcaattcaattctggcaccagctaactggagttagtgcagatcccacaagtcatgggctcatccttcacaagagtgcagatggcagtgcaagataggtgttcccatgactccctcaagtttgacaattc

SEQ ID NO: 842447 - DNA, 564 bp, Homo sapiens
gtaattacagttactaatctgctgaccttaagataggaatattttccaatgtaggcccaatttaatcacatgagcccctaaaagcaaagaactttctttggctggagacaaaagatatggcagaacagaaagtcagagactcaaaacatttatgactcacctttgctgtcttgggatggaaaggacagcatgacaaggaacacaggtggctttaaggagctgagagatgctggtagagcatagctagccaggaaatagggactgcagcctcccagccactagatattgggttctacttataagcagatttctctacctcctccccaacagcctccagataaaagaccaggctggctgacaccttatcttccacctggtgagatcggaaacaaaagaatcagtggagcccattcaggcttctgagctacaagaactgtgaaaaattcaatctgttgtgttaagcttcaaagtttgcagtaatttgttatgtcactgataggaaagtaataatacacatgtaataaatyatttctccagaaaacacacacatgtgcatgcacacac

SEQ ID NO: 842448 - DNA, 483 bp, Homo sapiens
aggggacaggagcagatctgagtttttgatgcatcactgacctctgtgcagggacagctctgaggatggccagggtggagactgggatcagtgaagagggtactgccagttctgggtgtactagatgagtcctgaccatgagcagtgaaaataggaaagagatgagagaacagagccgccagggagtatttaggaggtaaaacccagcaggagacgggaatggaagggagtgggaggggagtggagtagtgagtgataatttgacttctagttttctgactcagctaatcagtagagcaacggtcctgctaaggcaagattacaggggatcagaacacagggaggtgtcagcctctagcaggggaacagctaccttccattattttatgtatgtgtgtrtatatatatacacatatatgtgtatatacacacacacatatacacacatatgtgcatacatacatgtatgcatatatgcacaca

SEQ ID NO: 842449 - DNA, 647 bp, Homo sapiens
aagatgaatacacagttctactttccttaattgtgctcagtctgtcatggggagatggscccataaacaaatggatcagtatagaagcacgtacaaggcacagaggccaagggagaggtggtatccctccaatcttgcaaaattacttttaggatcattttattttcatcttttcactgtaagatgtctgtgcctacatgtgtttgctctaagtatgaatgattgcaaggtaattaactggcccaatagttttcagaaatttagagttctaatgtattaaaacatttctatcaatatatggcctgaatacccctaaaatatcagagttttagaatttggaggaacttggcagccaatatggccaaataggaacagctccggtctacagctcccagcatgagcgacgcagaagacaggtgatttctgcatttccatctgaggtaccgggttcatctcactagggagtgccagacagtgggcgcaggacagtgggtgcagcacaccatgtgccagccgaagcagggtgaggcattgctcatctgggaagcgcaaggggtcggggagttccctttcctagtcaaagaaaggggtgacagacggcacctggaaaatcgggtcactcccaccccagtactgcgcttttccta

SEQ ID NO: 842450 - DNA, 470 bp, Homo sapiens
gacttccctaattgctcctatacatcacatcactatcgtagaacctaagattggtcttttgaggttttttttttcagatttttgcatttctgacaaccagctgacttcactcagacctatgacccaaccagtcctgtggcccctgccgagtggctgactcagtgcacgaggaccattttctataccctatgatttcatttccaaccaatcaacattctccattccctagccccctgcccatcaaactacccttgaaaaaccctcacctctgatctttcagagagactgatttgggtaataacttcgtctcttgtatggtcagccttgcatcaattaaagcctttctttactgaaataccattgtctcagtgagctaattttgtctgtgcagtgggsagaaagagcctattgggcaattacacaatcagtgcaagtacctccgctactcaacctcacaaacctatgtatta

SEQ ID NO: 842451 - DNA, 588 bp, Homo sapiens
aaaaaaaagagtcgattggaaatttgtctaggaaaaataggaagctaaaaatatgaaaatatattcctttcttctagtcaacaaaacatgctatcattgtaattrtgtgctaatttttaaagtaataaatgaacgaagtgttgactagccatgtcataatcttctggataaagttgtaaggtagcattatatagtatcccatacttcacatttgaatttcctgacatcatctaaagagaatcttttttttaacatacaacaagaaaatcaagagtagcatcaattttaccaagaggttctctaaaacttcttaaatcaatctcttctgagtgcatattttataactatcttttaaatgtcttctctcctcgttgttcataagtcaaactctgccatatcttcatttgtgagctgtgtccatttgcttagaacgtggagagttctacgtccctttcactgacttggaatctgacatgttgtgtcacgctctcaggtctccttggaactgactcctgttgcctttgccctgtgttcttgggtgtttgcaacctcagaccatcactgactcactggccaggggagaatttg

SEQ ID NO: 842452 - DNA, 580 bp, Homo sapiens
attcacattaagtggaataaataaagactaaaaatagttccgtgtcagttcagaagaggattcaccgaatgagtgagaatgttcagtgcttagggtgtcgaggttgggcttcggggttcgaggctgtgaactggactgcatgttgcatttgaggacctcgagtttagaggatcctgtggtctgttcctatttatgcagctcgtggtggacttgtgttcaacccaggtcttctgtctctgactccggcgtgttctctgccacacccagctcttggggtcgtattgactaaggtgggtccgtaactgtcactgcagtgggcactcaggggaaccctggaaagccacagagaaaatccactagcacaactgcaccttggggaaagcgcttcgtgtgtttgcttcagctattcaaggagtcctgagctcctgtacgatgaaaatgtttcttcatctctgacacttctgtggggcttcgcatacaatgctgagttacrtcgcgagttatcaacaaacatttctggaatgaatgatccactgagttgggagagaaaagccaaggggggattttaacacagggggct

SEQ ID NO: 842453 - DNA, 641 bp, Homo sapiens
gaaggaaggtctactttctacttaaagatttcttcaactgtcatagactacaaggatatccgtttttaaaattcctacatcaatttaagagggagctcctaagattggctgctgaataccaactcaagttaacaagaagaggtctcaagcctggtgggaagaattttcacttctagctatggtggaataactggttttaggctatcctcccactaagacaactatacaatatgtacatacaaaacatctgtgggcaggcatcaggaaatagttaagataggcaagctaaacagccaacatccttaaagaatccacataaaattgaggtgaggctctgctggtctgagtgcagtggtgtttacacctaattgatcacaaccagttacagatttctttgttccttctccactcccacagcttcacttgactagccttaaaaagataaactaaaattgagcaagcccaacatttcccagcactatttctcctcagaaaatttgacaattattaatacaaaacattgtatccgttagggttagggtgagggttagggttaagcaaacaaaattgggagtgcaygcaattgttttgaggatgattcccatgaaatacaaaagacagaggaagcagaataggaccag

SEQ ID NO: 842454 - DNA, 597 bp, Homo sapiens
cagtcgatagagcagagatcatgtccatcagcatcaaggcagcatgcaattcctccctcggctcagactgcttgaaaatgtggaggcaccatagaaatcatcaataattccatatgtctatgtacacaaaatgcaaaacaacttttggaaatggaaaaattgggtcataccaatcacaacatctaatttaaacagcaccatcagaaaatgaagttaacagtagaagcgaatgatcccagtaactaaaatgtactcaatttacaaacggggtgcagtaggaggggtgcactggttggacagatgactgtcagatgcactcaggtgatgtcctccgaggcttctggaaaggctctggaacttggtgtactgtttgtgcaccaccttgcccagatgaatttcttatcactctagagcagtaacaagtaagagtgtgaatttccatttggctaaatggaagctatccccgtgataaactgtacwcctcccttaactgaaggggccactgccgtcaacaatactctcaggggctcccttcctccctcctccatcagcacattcagggaccctcacccacaggcagccaggatggacatagga

SEQ ID NO: 842455 - DNA, 597 bp, Homo sapiens
cagtcgatagagcagagatcatgtccatcagcatcaaggcagcatgcaattcctccctcggctcagactgcttgaaaatgtggaggcaccatagaaatcatcaataattccatatgtctatgtacacaaaatgcaaaacaacttttggaaatggaaaaattgggtcataccaatcacaacatctaatttaaacagcaccatcagaaaatgaagttaacagtagaagcgaatgatcccagtaactaaaatgtactcaatttacaaacggggtgcagtaggaggggtgcactggttggacagatgactgtcagatgcactcaggtgatgtcctccgaggcttctggaaaggctctggaacttggtgtactgtttgtgcaccaccttgcccagatgaatttcttatcactctagagcagtaacaagtaagagtgtgaatttccatttggctaaatggaagctatccccgtgataaactgtactcctcccttaactgaaggggccactgccktcaacaatactctcaggggctcccttcctccctcctccatcagcacattcagggaccctcacccacaggcagccaggatggacatagga

SEQ ID NO: 842456 - DNA, 643 bp, Homo sapiens
atcatccttcatccactcacataagtctatgtgacaaaatttctttgtcattaatttgtttaagtttttaatttcactagctttaaagacataagaggttattggttacatggatgaattttataggggtgaagtctgggattttagtgcacccaagtagcatacgttgtacctaataggtagtttttcattcctactaccctccccacttcccccattctgagtctccaatgtccattataccattatgtatgctgttgcaaatccatagcttagctcccacttataactaagaacatgcagtacttggttttcaattccttagttactttacttagggtaatgtcccccagtcccatccaaattcctgcaaaagacattattcattctttttttatagctgagtagtatttcatgtgtatgtgtatatatatatatacacacacacatatatatacacacacacacatatgtgtatatatatatatataaagtgtatatatatatatatatacatatacatatatatatatatatatatatatatatatatayacacactttctttatccagtcatgggttgatgggcacttaggttacttctgcatcttcgcaattgtgaattgtgctgcaataaacata

SEQ ID NO: 842457 - DNA, 595 bp, Homo sapiens
aaaaaataaggtactatatgtaaatcttgaaaaagatatgtaagagcattatgtagaaaattagaaaatattattgaaagacattaaagacttaagcaaattcagaagtacagcatgtacatagatagaatcaattttgtaaaaataggaatttttccaaattggtctgtagattgaaggcaatttcaaccaaataatagacttttttttctaatggaggttaattaactaattctattatatatatggaagattaaagagaaagagtatccaatatactactaagaagtgcaagatagaggactttgctattaaatatcaaggttaagaataaagttaacatgtttaaatcagtgttatattgatgcatgaatagggaggtcaatgcaatactggaagtaagcaccaaaagagcctcgtgagtacatggagacttaagcaatgagagaccaggatattcagataggttggaataaatagaccrtcccatgattggtatagttataattggtatctacacagaaataaataaaaacaaaaaaatgctactttaaacctacacaaaaaatcaattacagaggaattaggaacatac

SEQ ID NO: 842458 - DNA, 627 bp, Homo sapiens
atgtcttcagacacaatacagggctcaaaatatgcttgtatggtggagcttatgctcttgctcttttactatcaacatgagaagaatatgtcctcgggtaggccactagccccaggaagaaaatgagargcacctggaacagtgccacccagctgacccagaaacatgactgaaaaataaatgcttattgttgtatgacactgacagtgattttatatacataccattattaaggtaatatgtgattatataagtagcaaaatgatacagctgaagaatgagttaataaactggaaaaccagatttaggaaatcttgcaaaaggaagaagtaaagtataaaaagttcaaagaaaataaaaaagacatgaaagttcaaataaaaaagaaatgaaaagtaaaaataatatctaaattataggaatccaagaaagagacaaaagtatacatgaaggtgagaagaaacttgaagaaatattgaagataaattccccaattgggggaagggggacaataaaagacctcagattgaaagggcaccgagaatgctaaggagaagggatttttttttaagttgaaactatagacattataaaagaaaaacaaactctaaaatccacagaaaagaa

SEQ ID NO: 842459 - DNA, 609 bp, Homo sapiens
aataaagccacaaataagggagaatctaacatatgtaaaaaggagatttagagctgccccagaacatgtaaccactaaaaatcccctcccatttcaccctgcacatccttagtacacccaaccatggaatcagctgcaccaagggctacgtgccatgctattcaggaccctaaatgccaactcctgcagcagctccggggtgccttgtcgatgatggaaggcagtgcgctctaccgttgatgcaactcaatgtgcagttggttgggtttttccaagatgtattcaacctgatgagactccccaggttcatcatctatggagaccacagagaccccaggtataacctgcttactacaccacactcttcgaaggagcccagcaagaggtttcttgtgatgagacaccattctttccttatggacttcagaattttcttcactgagagtacttgattagtaaccactgtgaaatttttctggaaaatgtctctatttgccctcattttgaatcatagttgctctggaaatatatatatatatatatayacacacacacacacacacacacacacacacatatacactcacatatatatacacacatatatac

SEQ ID NO: 842460 - DNA, 638 bp, Homo sapiens
ctggcagggatggatcttttttactcagtccgctgattctaatgctaatcttgtccagaaacttcctcacatatacacctggaaatcatgttttaccagctatctgggtaccccttagctcagttaaatracacataaaattaaccattgtgggtgttttatcaaaaccccctcatctcatgcattccttttaaagttcttattttattcctaactttaatttttctgttcttgagttctcagttttgattctttcttggttggagttgatttttcacgattttgtgaaaggaatgatcattaaatacagtgcatgttgtccataagacaatagtctgatagtatttagtatagaagaaaagatacaaataggaaaacatttttttttctctttaggtaacctcttgtttattttttgcctatgctgtggatttttaaactatccttgccattaaaattattgtggttcatttgttttgtttgaattgtcttggcctggagtgtggtgaccctttttgaatattctagttcttagaaggctctgggtcataggaccttcccatcttctccctgtctattaacttatttcttcatcacagagatcttatgcctcccttccccaagtataatcatggctg

SEQ ID NO: 842461 - DNA, 642 bp, Homo sapiens
atcttggggattgcaggtggtgctcaattcttcttctttaaaaatttgaatcactttctagggagaattaaaggatggcagaatgaaagaatcgtgcccattgttgtccattcgaaaccatgcaaagtggaacataagtccctttaatctcagatgccaatggagaaatgtacctgcagcaggcttagtgctaacttttccaagcactaaagggtctccttcttttgaggactcacaggtgtatggaaaagtaagaagcctagcactaaggaaagaaccaataaaacaaaacctaaatgttaagtgaaaaatggggaacacccacagcaagtactattggagtttagaaaagggagagagaccttgatagctggataatcaggagagacctcttagaagaagtaggttttgttggttcaaattcatcccagagagtgggaactgtgtgcaaagttttggagctggaaatgccataccactcttactccttatgaacatgtgaagaatcaacccttgtttgaaggtgacatgtcttttgctatccatttatyccccatccttcaatttttattacaagagagaaaatgagggcaggtatcaaccataccaaattattctatgggatatcctgttttccatttt

SEQ ID NO: 842462 - DNA, 581 bp, Homo sapiens
tgttctcaatagcaaagacatggaatcaaaccaggygcttatcagtggtggattggataaagaaaatgtggttcttacaccccatggaatactatgcaatcataaaaaagaacaaaactatgtcctttgcagcaacatggatgcagctgaaggtcattatcttaagcaaattaacataggaacagaaaaccaaataccacacgttctcacttacaagtggaaactaaacgttgggtactcatggacataaagatggcaacaatagacactggagaccaccagagggaggaggaggaaagggaaaagaggggcaggggttgaaaaactaactgctgggtactatgctcactcctgagtgatgggatcacttgcacccatacctcagcatcatgcaatatacccatgtaacaaacctgcacatgtacccctgaatttaaaaataaaagttaaaatttttaaaaaaagaaaactaaaatgagcaataggccaaagagaggactgcatgattccagtagtttttgtcacggagctttaaggcaactaaagctgtgagttaggtagagcaattgaacatctttagt

SEQ ID NO: 842463 - DNA, 618 bp, Homo sapiens
atgcattacacaggcacatcaaagcggtagttacaataatgtgttataaaacagtgattatgaacacaacacggaagtttaatagcttggcttaaaaattcagcttcaccacattttatccatgtggctttgttgaaagttttctgagcttcagttttcctacctttataatggagataatcatagcactgattcattatctattaatataattactaacttagcatcttgaaaatgatattgaaactgactctctcactcctgctaaataattcaaatacagatttattttgaattttcagagttatgtctagtgggaaaattcagtagagaaaagtacaaaatcagatataaataaaatattaactcacatattttccctctggagttgtacttttccagatatatgtcatattttttttttctcaatcctgtgtgcctaatgaatttctggctgtattttgctcttgcttggtacctacatrtttcaagtttttgtctccttacttatttgacttgacagaaagctacagtgtatcccctgcatagtacccgtgggtgcagcctctcccttaacacttcccttgatgcccttctttagctagggcaagactaaag

SEQ ID NO: 842464 - DNA, 618 bp, Homo sapiens
atgcattacacaggcacatcaaagcggtagttacaataatgtgttataaaacagtgattatgaacacaacacggaagtttaatagcttggcttaaaaattcagcttcaccacattttatccatgtggctttgttgaaagttttctgagcttcagttttcctacctttataatggagataatcatagcactgattcattatctattaatataattactaacttagcatcttgaaaatgatattgaaactgactctctcactcctgctaaataattcaaatacagatttattttgaattttcagagttatgtctagtgggaaaattcagtagagaaaagtacaaaatcagatataaataaaatattaactcacatattttccctctggagttgtacttttccagatatatgtcatattttttttttctcaatcctgtgtgcctaatgaatttctggctgtattttgctcttgcttggtacctacatgtttcaagtttttgtctccttacttatttgacttgacagaaagctacagtgtatcccctgcatagtacccrtgggtgcagcctctcccttaacacttcccttgatgcccttctttagctagggcaagactaaag

SEQ ID NO: 842465 - DNA, 618 bp, Homo sapiens
atgcattacacaggcacatcaaagcggtagttacaataatgtgttataaaacagtgattatgaacacaacacggaagtttaatagcttggcttaaaaattcagcttcaccacattttatccatgtggctttgttgaaagttttctgagcttcagttttcctacctttataatggagataatcatagcactgattcattatctattaatataattactaacttagcatcttgaaaatgatattgaaactgactctctcactcctgctaaataattcaaatacagatttattttgaattttcagagttatgtctagtgggaaaattcagtagagaaaagtacaaaatcagatataaataaaatattaactcacatattttccctctggagttgtacttttccagatatatgtcatattttttttttctcaatcctgtgtgcctaatgaatttctggctgtattttgctcttgcttggtacctacatgtttcaagtttttgtctccttacttatttgacttgacagaaagctacagtgtatcccctgcatagtacccgtgggtgcagcctctcccttaacacttcccttgatgccctyctttagctagggcaagactaaag

SEQ ID NO: 842466 - DNA, 627 bp, Homo sapiens
tatcaatataatgcttacattttgagggtaaaaatcagcagtaaaattgctaggttaacaaagaagcaatgcaaaacttatgcagttaatactaggttgttgctgaaaaatttttagaaagtagattttataagattttactaatgcccaaaatcttcactgtaacaaccatattgttggactctttttgtgtaatgtatttatcattatcctttagcatctcatcaaagccctaggatagttcatacatatttgcaagaggtgaacctgaattttaatcatcatcagattatgagtagtaaattgtgtttctctcttctaaaatatatttcctataattcctacctatgcaaataatatttcttcttcaagttttatctcaagtgaataatgttctgatgcttgcttgatttacaaacttgatatagataaactttgactctttttgaagctatatagttttgggtctaggctactcatatgttaggtttaattataattttctacatactgtttagtttatcttcactgtttttcaagtaccctaaccataggattgtgtctatattgcctcyagcatttgaaatataatattgaagacaagaggagttcaataatgttcaagat

SEQ ID NO: 842467 - DNA, 616 bp, Homo sapiens
cctcattctaataagcctgggagcgctatgggagactagggcttatttcatccctacagcttcgaccataaaagayggccacctgctgaagcggccattttagaggcctaccctcagggacacattctctttctcagggatgttccttgctgagaaaaagaattcagcgatatttctcccatttgcttttgaaagaagagaaatatggctctgttccgcctggctcactggtggtcagagtttaaggttatctctcttgttccctgaacattgctgttatcttgttcttttttcaaggtgcccagatttcatattgtttaaacacacatgctctacaaacaatttgtgcaggtaacacaatcatcacagggtcctgaggcgacatacgtcctcctcagcttatgaaaatgacgggattaagagactaaagtaaagacaggcataggaaatcacaagggtattgattggggaagtgataagtgtccatgaaatcttcacaatttatgttcagagattgcagtaaagacaggcgtaagaaattataaaagtattaatttggggaatctgataaatgtccatgaaatcttcacaatttatgttcttccaccatggcttc

SEQ ID NO: 842468 - DNA, 607 bp, Homo sapiens
agatgctgataattttaacataattcctaatgctttgcctgcttctcagaarctatgattaagacaaattctgagaaactcatgaatactcccaaattgaaagagaaattttaataaagacacaccaagcagattttctttttcttattgagaaaacttgagggagatggaggagaatgtaaaagtggcaagtgtggagaaactagtgaaaaagagaaatcatacaatccaaagcaagttttgatgagtgatatgttacagcgtttataaatgatttagtaaattacgccaattccttagttagaatgaagtgactttgaactaaatgaccagacaaaaagcacaggactctgttcataacccaataagtgtcaagtctacacaaaagtgacaaaacaaacaaacaaaaaaacccaccatcaaaccataggtatcccatatggtggaaaaggagtaatggaacattcatccatagcattttagaacaaatggctgtaaacagaattacccaaatttaacataaccaagaaaaaatatattaaattataaaaatatattaaatactcctaataagatctcatggcaataataatagaaataatgttct

SEQ ID NO: 842469 - DNA, 586 bp, Homo sapiens
catgaactattttcccatttatatgtcctgcatggtattgccaaggttgtcttctaggcttttttatagttttgggttctatatttaagtttttaatccatcttgatttgttatttgtatggtgtaaggaaggagtccaggtttattcttctgcatatggctagccatttatcacagcatcatttattaaataaaaaatcctttccttgttacttgcttttgttgactttgctgaagagtagattgtagtaggtgtgtggccacatttctgggttctcgattctgttccattggtttatgtatctgtttctgtaccatcaccatgctgttttggttactgtagccttgttgtatatattaaagttaggtagtataatgcctccaaatttttctttttgcttagcatttccttggctattcaggcgtttttttttgttttcacattaattttaaartagttcattatagttctttgaggaatgtcattggtatttccataggaatagcattgcatttacaaattgctttggcagtgtgaccatcttaaccatattgattcttctatccattagcatgcgatgttttt

SEQ ID NO: 842470 - DNA, 586 bp, Homo sapiens
catgaactattttcccatttatatgtcctgcatggtattgccaaggttgtcttctaggcttttttatagttttgggttctatatttaagtttttaatccatcttgatttgttatttgtatggtgtaaggaaggagtccaggtttattcttctgcatatggctagccatttatcacagcatcatttattaaataaaaaatcctttccttgttacttgcttttgttgactttgctgaagagtagattgtagtaggtgtgtggccacatttctgggttctcgattctgttccattggtttatgtatctgtttctgtaccatcaccatgctgttttggttactgtagccttgttgtatatattaaagttaggtagtataatgcctccaaatttttctttttgcttagcatttccttggctattcaggcgtttttttttgttttcacattaattttaaaatagttcattatagttctttgaggaatgtcattggtakttccataggaatagcattgcatttacaaattgctttggcagtgtgaccatcttaaccatattgattcttctatccattagcatgcgatgttttt

SEQ ID NO: 842471 - DNA, 496 bp, Homo sapiens
gggattacaagcctgtgccaccatgcccagctaatttttgcatttttagtagagaaggggtttcaccatgttgatcaggcaggtctcaaacccctgacygcagatgatccacccgcctcggcctcctaaagtgctgggattacagatgtgagccctgcgtccagcccatgtttttaaagtctacactagtgtgcactagtgttctaggccttcacattcactcatcactcactcactcacccactcacccagagcaactttcattcctgcaaggttcatttatggttaagtgctctataaaggtgtaccatttttatcatttatatttttactgtatcttttctatgttttgatatgtttagaaacacaaataacattgtattacaattgtctacagtattcagtatagtaacatgctgtataggtttatagactatgagcaataaattataccatatagcctatgtgtgtagacaacatcatctaggtttgtgta

SEQ ID NO: 842472 - DNA, 619 bp, Homo sapiens
tgagactccatctcaaaaaaaaaaaaattattatggacactttctatcctaatatgtacagttttaatgtatcttttttaatttttaatttttgtgggtacatttttaaattttgtgggtaattttctggrtacatatatacagtaggtgtatatatcgggtacatgagatattttgatacaggtatataatgtgtaataatcacattagggtaagtggggtatccatcacctcaagcatttattctttgtgttacaaataacccagatacactcttttagttattttattttattttttttgagacaggatctttctctgtcacccaggctagagggcagcgatgtgatcacagatctctgcagccttgaccttgctcaagcaatcctcttacctcagcctccagagtatctaggaccacaggcgcctgtcaccatgtctggctaatttttgtattttttgtacagttgaggtttcaccatgacgcccaggctggtcttgaactcccacgttcaagcaatcctcctgccttggcctcccaaagtgctgggattacaggcgtgagccaccatgcccagccttctttaattattttaaaatgtacagttaaattattatt

SEQ ID NO: 842473 - DNA, 472 bp, Homo sapiens
gaccatggaataagtattagcattaggggattcagctccaaatctgtggtttatagtagactcatctggtgcccaaattgcatccttttatctcccttttgagttcagccattgccagatggatagtgcaatgctggctttggttctttttgtgctgatggtgtctggcctcaagcatgcttcccttgatttggctttctgctttagggctctttcaatagtggagtagtagaagcatgcacagccaatgtgtgcagaagtacaggcagttaaaacctcccaggacaatcctgcgggacagcacctcatggacaaatgctcctgtttctcctcctttggcagataaccctgggggtcattctgtgcactgctgagggggccttttggartatgagctttggttgcccatagcagtgaccttggtgatggcccctactgctggcttttcattcctgcctcactctccctagct

SEQ ID NO: 842474 - DNA, 553 bp, Homo sapiens
gtgggagccacataaataacccagtttcaatcatctctatatagtcyatccatgctataaattaattgtaagtattttacgttatttcaaagagaccaaatttaagttgccacattttttacagagaataaaaaaggttgcacagtaattttaatgatttagcagtaataaacagcccatcattgtgtttttctgcttccatgaaaatatattattctttgatatggtttggccatatccccaccaaatctcaacttgaattgtatctcccagcattcccacatgttgtgggaattacccagggggaggtaattgaatcatgggggctggtcttccctgtgctattctcctgatagtgaataagtcttacaagatctaatagatttatcaggggttttggcttttgcttccttctcattttctcttgccatcgccatgtaagaagtgcctttcacctcccaccatgtttctgaggcctcccccgtcatgtagcactgtaccttcaattaaacttctttttcttcctggtctcggctatgtctttatcagcagc

SEQ ID NO: 842475 - DNA, 615 bp, Homo sapiens
agtagtattctgttgtgtgtatatatatatatatatatatatatatatatatatatatatatacacactacacttttttaatccattcctytgctaatgaacgtttcggttgcttctatatcttggtaattgtgaatagtgctgcagtgaacatgggagtgcagatatctctttgatacattgattttaaaacttttgagtaaataccgagaaatggaattcctggatcatatggcaattttatttttagtttattgaggagcctctatgttgtttttcataatggatatactaatttactttcctacccacagtatatgagttaccctttctctacatccttgacaccacttgttatctatctatctatcttttagataataaccattcaaacaggtgtgaaagggctatctatctcctttggatactaaattgtatttctgtaataattagtgatattgaacttcttttcttgtatcttttggccaattttatttttttttttgagaaatttctattcagaacttctacccatttttaaatttttttgggccttatgttttttgcttgctttacattggatattaaccccttatcagatatatggtttgcaaa

SEQ ID NO: 842476 - DNA, 607 bp, Homo sapiens
ttagatttttttacccttttgattattatggaatgttacattctctaaaatatgggagctctacagaagcatggtcaagataggaacttacttgcactaggatcccagaaaatagacactttttcaagacgacaaaatgggtttgatagaaggacataggaggaaaatagtcaaattccaacaatagtctattataattctctataagctctgtttttgcaacctatgcacattcaagttgactctgtttatatatcctaatacattcatgataacctcttgagtgttaccctaataattctcagttactcatgttaaaagaaaaacttcagcagaattaaatttaaaggagtttaattgaggaatgaaaaaattctcaaatcaggcatcccccaggatcacagcagattcagagagactccagggatgccttgtggtcagaacaaatttatagacaaaaaaagggaagtggtgtacagaaatcggaagtgaggtacagaaataratggattggttacaagttggtgtttgccttatttgaacacagtttgaacatttacttacgagtctattagtggtgaagtatggctgttgggattgtccaaaa

SEQ ID NO: 842477 - DNA, 587 bp, Homo sapiens
cagtgatgttgagcaccttttcatatatctctttgccatgtctttttttgaggaatctttattcagatcttttgyacatttttaattgttttattagatttttttctatacagctgtttgagctccttatatattctgcttattcatctcttgtcaggtgaatagtttgcaaatactactattctataggttttctcttaactttgttgattttttttgctgtgcttcaaagttttcacttgttatgatctcatatgtccattttttctttggttgcctttgctttaaggtattactcaagaaatctttgcctagaccaatgttctggagtgtttcccccaaagtattactgtagtagtttcatagtttgaagtcttaaatttaattctttaatccattttgatttgacttttgtatatgatgagagacaaggttctagtttctttcttctgcgtgtctatatccagtttacccagcaccatttattgaagaaattgtcttttccccagtgtatattcttggcacacagaattttgtataatctcattcatacagaataaatcttaatttctggctgttttatctta

SEQ ID NO: 842478 - DNA, 509 bp, Homo sapiens
ggcaatgatgaactgatattaccgaagtagcaatttgtatccatttcagaaacatcttaataggaaaaaaaactctaggccttttattactgataaaaagtactactgatrtagcaattcatatattactaatgtagcaattcatatatattttatattggattaggataactaggatgttaaatagtgtttcattttattttgttcgtgtccgcattaggacaccaatgaaaatgataccaaattatttatttttatcttcccccaactaaaaaaagcaaaagcaggaagaaaaatgaaataaaatagaaaaacaaatcatataaagggatattaagctactactaggtatatgaatcaaacagaatgatttcacgatccttcactgctagattccacagaaaggaggtggcaagagcttatctgagatgtataaccatacattgcacataaacataaggacagtcgcttaagtgaacagaatctgaaagtgatcaaattacataatt

SEQ ID NO: 842479 - DNA, 537 bp, Homo sapiens
aatgaattataaccacacatgttgaaaatggccttaaaacccccaccatgtaagtgtatagaaatagcctagggttgstgttcacatactggcatatatacttccatgtataatctacaaaaagggctacacagcctcttgaagagtaatgggatgaggtgtttctaggcaacatactgctgtaagagatagcatactgttttagaatagcaaataaatccctatggatagagaagaggggcagggtatgccaagaggtagtagaacctgactttgtatgacagttaggtaatttggactctaaatttagactatggagaatggttgaacatttttagctgccaaatcacatgatcagaaggaccaagacgaaaatattttcaaaagtaaaaagaacatacacatataagttattaacgtcttaggcacaaaatttagagatgttgatgagcatccatcaaaatagcctgacccaaaaagaattttaaaaatccacaatgtaagtagcaacgttttaatagttatatttaaacacaa

SEQ ID NO: 842480 - DNA, 609 bp, Homo sapiens
cttccctgtaatcagttcacacacacattgcagttggcatgtttccaaatgcttcaaatgcttcttgttattaaaatgaaaacaaaattgtctaacatactctataagcctctgcatagtttggcctcattttcctcaccacacacaatctcacaccatttgagcttcactgttcatctttcagtcacttgaatctacccttctttctcccaccctagtctttaaatatatttcttctacctggaatgctctttcctctgtcttaatacttactaatttttcattcttcaaatttagttcctttattcagggaaaactttcttaacctccttgataaaaccaaatctatgtgtaagaaattctaaataccacgaacctctatgtcagtatgattaaaactcctttatgtttacattgctttgccccatcatctgaatgatgtccattttctttaaaaacctctgagggctctgaggtcaaggatcatgtgagtkgttgctctgtcactggcacagcacctgacacagcacacatcatcaactcacatgaaggaatgaataatatcattgaggagaaagtgcccattgtttcttctatgctgctcatccc

SEQ ID NO: 842481 - DNA, 672 bp, Homo sapiens
atgtcctaaaggcaacgtgcaggatccttttatcttaatgcatctgtttttttcttttttatayaaaattaaggccagaaatctgtttcaaaatatactggaattctttttaaaaaatcacctaagaattacttgattagttagaaatattttgaaaattaaaaaacatgaatcaaacaatgagtatttcataagcaccaatgtcctcctaattctctgtttgcaaatccacatggaaaacaaaatatatgcatacaaaattattattaacagggtaattaagtatgacacacaattaggcaataaggcaacacaaaatgcagtaagtgtgttgtacacataagaaaattcagagaagaaaatgatcagtctaagccggaatcatcagagaagatccctgtgctgtggtgtgactaggctgagcctggaaaggtgaatgtgagtatgtaaagagaaagggatgtaaaggcaaagggaggagcaaagatattcaaccatacaatcaataacttaatgtacaggggttttttttttgctgatgtaacaaattaccagaaacatcatggttaaaacaacaaaagttttattatctcacagttctgaatgtcaggagtccatcatgagtattactaagctaaaatcaaggtgtggacagggctacattctttcctg

SEQ ID NO: 842482 - DNA, 503 bp, Homo sapiens
ccccagaacttattcatctaataattgacagtttgtacccctgaccaactttccccatttcttccaacccccagccactgggaaccacaattctacgctctgcttctgtaagttagactttyttagattctacacgtaagtgagatcacacaggatttgtttttctgtctctggctatttcacttagcataataccctccaggtttatccatgttgtcacaaatggcaggatttccctttttgctttaatgactaaaagacattttccatctatatatctctatctatctatctctatcacattttctatccattcatctgtcagctgacacttaagttgtttccatattgtgcctatgtgaataatattgcagtcaacctgatgatgaagatatatctttgaaatattaatttaatttcctttggacatataaccagaagtagaatttctggatcctatggtaattctatttttcatctttgaagaaactgcattgttttcc

SEQ ID NO: 842483 - DNA, 572 bp, Homo sapiens
atgacatgcaatgtcaagtttctagccagtctataaaacctcatttagttgactctctctcagcaccagctgtaacccaattaaattcaacagtgcacaggtgttcacaggaatgactaacacgaaagcatacttccctttagggctcttaaaaaattagagttctttaatttccatacaccttcaaaatcaaaccaaacaataaaatattgaaaaaaagaaattagatacagcaggagaaaaacacaatcaggatgagctataacccaattaagctgaatagcactcaggtgtttacaagagcacactcactcaaaattttaccaacacaaattaactttaatatatcttaagattgacaacgaatatccatttgtcttcaggttactttgaaatgagagttttctgaattcagtttcataaaagtggatttcattgcaaaatataatackacaaaaaatatagattttcatctaaatatcccatcaagggcacttactttaaaatatccattttagttcagcagaggcactcaatatagatttcaatttttacttacattccttgaattt

SEQ ID NO: 842484 - DNA, 473 bp, Homo sapiens
cacctcccaccaggcccctcctccaatgctggggattaaaattcgatgtgagatttgggtgggggtmcaaatccaaaccatatcaatctctaaggcttagaatagtgtctgacacatggtagtttctcagtaaatgtttattgaattaatgaatttctatcattatttggtagttggattggctatagaaaattcatatttagggatccatgaataattgaaattgattttaaaaaatcacataaaataattgccatataaaatgaaaaagaacagagtggaaaatacaaacaattttatttgataataggcaaatgtccatttaactcttaatttttggataaccgcttatgcgaacaaataaatagaaaatattgattgaacaccctgcgtttttttccttttgaagtatactattaaaatcataagaagcacatattgagatagtaagcatgtgaaaaatttagttattt

SEQ ID NO: 842485 - DNA, 610 bp, Homo sapiens
aaacaaaccagaaactcaccaccatgtgtcattcctcagatcccaggatccttagctagtctgtcttattctctccacatttccattgtcttatgtttgttttatttataatgttcagtgtttttaattgtacttagtaggacaaataggaaaaagtatgtctactccattttcccagaagttgctgcctaattttttaaatccacatttctctaatagggtacagaggcaaaggatgaatattctaaaatcaaattagccaatctttgcgtttgttcatcaatagaagaagggctgcaaagtattagataacaagatttatctaagtcatctgctcattttcctccttctcactctcttaccctctcagtaacatcctgtctatttcatctacttacacaaatctgtgtatttttctagataagacatgaaggtgggtggacattgtctcagtccggcctcatgcttactccacagtaaaacatgaaatcagatgccaataattatagacctcgccatagcaggacaataggcaatgttaaaaaatgagaggatgtgctcttcatttktgtagccataatttatatactaactacactaattgcattaa

SEQ ID NO: 842486 - DNA, 366 bp, Homo sapiens
ggcagcattggagtctcataagggcacaaaccctattgtgaactgcacacgcgagggacctaggttgcgcattcctcatcagaatccagtatctgaaaccatccccctaccccaacccatcacccrctgtgtggaagaattgtcttccatgaaaccagtccctggtggcaaaaaggttggggaccgctgttgacaaatcatatttactagacctggtgtactttccacgtgacgaaaaagtagtttaaaatgtgctgtaagatatttccgagctgcactttacatttatcagaatgcagaacccctgctgtacttcagacctccctcatgataggtggggaagggtgaaggggtgccggatgttgg

SEQ ID NO: 842487 - DNA, 642 bp, Homo sapiens
cttcaagtctgcacttcacatgcttgcttgcctgtgcatggttacgcacgctcagcaacttagttccacgttttgggatgagttgagttccctgacgtagaattgctgggttgagggttttttataataaaaatattggttttattttgggggctgaaggttttaaaagcttaatacatacttctagattgcttttcaaaacgacagaaaccagcacatgataagtagctcttacttgaaataaggacttgtctgatctcaagtggcaacttttaactggtctttaaatattataaattttgaaattattttaatgtttcttagcactgtttctgttacaaatgagacttcatttttagggtaatttgtgattttaatatttgaaattatacgagttaaaattcagtgaatacctgaattgtgaaaaattatatttaagctacaaaatgtcagtagagaaataaacaagataaagatttttttcatacaagaaaatggaacggaaaagcattggccttctcataacatagtactcagccagcttttgaggtagcttctgtagakgatgatataattatgaatgtcattgtcttaatttagcttagaatgcaaaccagttaaaatcacttggttagtactgtt

SEQ ID NO: 842488 - DNA, 528 bp, Homo sapiens
ggtgagactctggcaaaaaaaaaaaaaaaaaaaggcagccaaatgaaagattttttttttttttwaattttgagatggaatctcaccctgtcacccaggcgggagtgcagtggccaatctcggctcactgcaacctccgcctcctgggttcaagtgattctcctgccttagcctcctgagtagctgggattacaggcgtgctccactgcatctggctaatttctgcatttttagtagagatggggtctcaccacattggctaggctgttctcgaactcctggcctcaggtgatctgcccgcctcggtctcccaaagtgctgggattacaggcgtgacgactgtgcccagccacaattgaaagtttttgtttttgtttttgtttttgtttttttgagatggagtttcactctcgtcacccaggctggagtgcaatggcgcgatcttggctcaccacaatctctgcctccctggttcaagagattctccttcctcagcctcccaagtagctgggattacaggcatgcacc

SEQ ID NO: 842489 - DNA, 686 bp, Homo sapiens
gctgaagaggagaccgaatgccctttggaagggaggtcgttaaatctgcctttattatggtagaactgttgctagacgaactgaggctgaaatcccagttttgccactgactagctgggtgatctgggagaaactgcttaacttactgagccttgaatactacctcattatggcagataaaataatatatgtgaactcaccggcacagtgcacaacatgtacaagatactcaaatttttcttgaatctaaattgagcctttccaccttcccccagggaagaccatgtatcccagcaagtgaggagtatcccttgttcttaaagcctcttctcctatgcctcccttatctgtgaagaagagtactttttatggtctagttttcattcctccttattgccagctaatgtcccctccttgttcagatctcagtggatgggaaagtcaaacacccagcaatgtgtgctgagcctttagtggggctgttgaatccggaggcccacaggggagacgctaggcagtcatatccagtgttccctccctttctctgtgtccccagagctccagatgatggttgaacatcacctggggcaacagcagcaaggagaggaacctgagggggccgctgagagcacagraacccaggagtcccgcccacctgggatcccagacacagaagtggagtcaag

SEQ ID NO: 842490 - DNA, 682 bp, Homo sapiens
ttactttgcagccaactgttcttagaggatccctggtgtttagtattttatgagaaatgaacatgtagcaaaagtaaattcaagtttagaractagaaaatgtctaatcaaacaatgtgaaaaatagaagagggcattaatagatgtaaaagcagaaattaactaaattaaattatgcaatcccaataggaaaacatggttctccctgagtctcttctgaagtgcagtccactcattcccacagccatgcttcttaggttgggcagtggaattcacagacatgtggatcatcctagactccactgcagagtccattgagtcatatcactaatacctcctcctcggaggagtcttgggtcatctgtctacccctcctcattgtttcacctgctgggctcccagcgactcctttccttcatggaagacttactcctgagtggtggtcttcttttttgttttaagctgctggacaacttcatggatcatgaccatgacttacccagaagtctgggttctagggaacatggaagttcgggtgaagtagaattgacttatcataactttcaccccaactcccatggtcaatctgtggccgtggtcatttcttagagttactccaattctgaaaacacccacatcctcaccacatatcacctatccttccaactctttcattctgata

SEQ ID NO: 842491 - DNA, 448 bp, Homo sapiens
aaaaattttaaaaactagtttctgaccccctcagccagatcaagaatataaaagagggtcatagtatggaggrgagggaggattctgcgaggaagaaatgtatggagaaaactgctgttagccccatcccctccctcccaaggaaggagagaggcgcctactcccttacagcaaacccagtgagatgcctgcacgggttacccgaagagctgagaatgtggcccccagcattgggaacagagtgttctggagtctgggtacttcccagaagtttagaaggagagagaggactggggacatgtgagcattccagcagagctgctactgagacaccctgcaccacagggtttgcctaatcagggcagaaccagctacgggcccctgagaaggagacaggtgcattcccctgggtccatcttggatcctgtgcaatagggctacctcaatg

SEQ ID NO: 842492 - DNA, 560 bp, Homo sapiens
ccgggtgtggtggcgggtgcctgtagtcccagctactcgggaggctgaggcaggagaatggcgtgaacccgggaggcggagcttgcagtgagctgagattgcgccactgcactccatccagcctgggrgacagagcaagactccgtctcaaaaaaaaaaaaaaaaaaattgtcatcatcattcccaaactccttcatcatccaaagcatcagatctgcatggttttactgtctagttcaattaaccgtctaagaatgagagtatacttctggtatttaaatgatttcagaacattgaaaagatgaaaaattccaaatttcttttttgtgaagctaatgtaactattgtactgaaacttaagtaaaaatacaaacattaagatcaatcctacttatgaagaacaatacaaaattctaattaccatacacggtaatgtcaaatctaatttagaaacaaattatgaggacaacacatgatttatgaccaccaaggatgcttcccccatccagcttcactgaggtataattgacaaataaaaatgtatatatttaaggtataca

SEQ ID NO: 842493 - DNA, 538 bp, Homo sapiens
tccttcctggttcctccacccccttctccttcaccaatcccttgcccctctgtcttttcctctcgckgaaccctctctgtctacctctttgctcttatttatgtctccaacctcacccatttccccctccttctccctcctttttctccccagcatagcccacagagctttatacatagtaagcactcaaaaatatatactacttagatcaatggcacttattagttaatgtcccttgcacaattctaggaatcttagagcagacagatctttagtagttaaaatgttggagccatgaaaggttttgatctgagaagtaacatcatcagagccttggggttaggagattaatttgcctgctaagagtagggtggattcagggggaaatgagacccttttttcattttctctctttctttcttcaactgtttctttctctctgacttcttcaccatctgacaggcttccccacctggccataacttcttctctcccttccatgagtcttccctctttccttgagttttccttcccttta

SEQ ID NO: 842494 - DNA, 565 bp, Homo sapiens
aaattaccttaaacttggtggcttgagacaacatagatttattatctcagtgtgctgaaattcggaaatccaaaaatcgatctcactgggttaaacaaaatcgacagtcaaggttttggcagtgctgtttctttctggaagctttaggggaaaatccattttttcttgccttttctagctcttacaggtagcctgcattctttggctcatggtctctttgcatcaatctgacctctcttcccatcctcacgtcttctctgacacaggccttcctgcctttctcttataacgacccttgtgactacattgggattacctggataattcagggtaacatccccatctcgtgatccttaatcatgtctgtaaagtcccttttgccatgtgagtaacatattcaaagattcctgagattaggatgtgggcagcattgagagcccttattcagcctgcaagggcactccaccacaacttcctggctagcttgccttcccttctcttacttagcttggacttcccaccmccagggtttctctcatgagctagatcagagtagtgcaggtgt

SEQ ID NO: 842495 - DNA, 293 bp, Homo sapiens
gggccacatctccaatgaatgctttcatatcgtggagtaggaaatacaaagcccaggataaaaaagaaaagccttgtrggtttgactacggaaaaatgtaaagcttttctgtggaaaaaataccgtaagcaaagtcaagacttatgacaagcttggagaaatacctgcaacactggcagaccaagggctaatttctttgatttgcaaagagctcttaaacatcaatgagaaagatggagacctcactaaaaatgaaatccagatacaaaaggacaattcacagaaaaacaaac

SEQ ID NO: 842496 - DNA, 585 bp, Homo sapiens
ggaaatgacggcagtgcgcttccccatccaggaagctgtcttgccacgtcttcagagcctatctctataggatttggaatgaaaagccttttttgagtattaactttctgaacaagtagagtgaacagtaaattaatttacctagtggatttgccataggaaaaactgtacgtgtggcttaacctttgagccctgatcaaggtaacctattcagcaggactttgaccctcgaggtacccatttgcattgcttctgctggcgttctgtggggagaaaaactagcagagctgtgcaaagtcacctgggtggggctggccctctggcagccgtgaccaggccctgaagtgatagtcagttggagccccattttctgcagctgtgggcagcatctccaaggagggaagaagaccaatgtcctggccttgccgcctttggttgagcaaatactgtaagattgcrgatggctctcagcaacgcttaggaacaaaattggatttgcctcaggacggactgctgcagtacaaagagcacacaatttgtagcgtatgcccttttgacacagaaagtgcaagcgttttgccaaac

SEQ ID NO: 842497 - DNA, 603 bp, Homo sapiens
ttctgtgtggcatttggtttgaagagcagagctagctgcaggtcagacatagattgaacatggggaagggggcaatagccacatagcaagttggggtgaggtcacacaagcattcctgaggcttggaagacccagctgagggtatcactgtgaagaccttggtggtctatgattctgttagcatgtgaaggtagagatttggattgggataggggatgatttcctttagaaggaaggcccgtttgtcctttgacgattctcatttggcaaaaactcagttttgcagaaacttagctatctgccttccccatgcagcccctgaggaactgagccctgggccaaatccatgcccaccctcgatgctgctggcagtctccctacgtttcttgggtcatgccactctcccaccctccagacaaccatctcacaccacctctgttctcctcaaacctccaggctccccattgccctctccttctcagcagatggccttgcttcctgcttcccagcagccagggactgtcagtttctacttaaacacacacaccacttcctaccttcgcctgttcatagaggcccrtccttctcctctccagagctcat

SEQ ID NO: 842498 - DNA, 615 bp, Homo sapiens
ggtgtgtccacagagctttagctttcagtgcatctgattctgtgaaagaaataagaacggagtagtggaaatgaactattgcggtaggttggcaagtaagtctggtgacgttagggagtaaactgggaggaagttccctaggctctgatctctgtaggatcacgggtgggagggcaggtttgatctctgcccttgtgaggaggttggatggagccctttgattccatccctacctccgctagctcagcatttacagcaaacagcacctgctgttcaggacacttcattatgccttcggagtccttcaggatcttgaggatcagagggtatctaagtttttctgccttataaaaaagtggaggagcttttcagagcattctagaataagagataagactagagtctgggaacggagtagaaagatgctcaaggaaggactcctcttccttgtttccacagctgggccacaagcccaggtctcttttgcctttgactgtacaacctgctgcctgggagttcctgggagggacaggtttcagagtgtgtccttgatggacacayagtagagccctgggatccaggaagtaacaagagggcacttcccagtccctgaaa

SEQ ID NO: 842499 - DNA, 634 bp, Homo sapiens
cagtggattgtgaagaacaatcctttttattatataacatttactttcctctaggacatctgttagttcagctgttttcaatggtgcatcagcaacatacagaggggatatgcattagaaatgagggtgagactgtaatttgataaaacatatcaattcactttgctggttttttccatacaaaaatacagacagcaaagcaggacaagtcttcttgcctggcagggacgtgaaaatgatggactgggaaagtatcttcgggatgagggctcgtaaaggctgagaaatgatgccttggagctcatgagaaatagtatttgctcaaaccctttcaagacaaactatgaccacttaatttactttaagtctggtgtttatgtcatagactcagtatttaagtctaatgaggccaacctcttcttcatatagaactgcccatgagtcgatgcccatcattgcttggtaaagacttcctactcaaatgtgtggtcataggaccagcagtatcagcaccacagttgttagatgttagcagtgcagaatctcaggcctcacttgtccatatgatgtacttgtgtaaattttgcaygcctttgcttcattgttcttccacgtcatccacagcagcccatgg

SEQ ID NO: 842500 - DNA, 536 bp, Homo sapiens
tttagccatggtataaaaggggttgttcttggctctcttaagtgacagctcaccatagaatcaaaatgaaaatcaaatcagcattgaaaattccatacccgctatcccaaaaagggggattttcttcttagtgaccaattaccatcagtgtattccttcttttagcaaatagttactgagtgaccattatgtaccaggctctattggagatgttgggatattgtgctaaacaagacatggccccttccctgaaggagtcaatgtatcagaatgagtaatattagagatgtacacacacaaagtaccacagggatgacaggaaggacatctatcccctcattctgaccaagaggggatggatggtaacacaagaggtaatacatgaactagacttcgacccaaggtcacatccaagttgaagaaagacatgagcgtcatctaaacacagatgataccscaggccccaagagaggatgagctcaccagggatagcgtgtagggtaagaagagaaggggctatcattgaatgtcccact

SEQ ID NO: 842501 - DNA, 776 bp, Homo sapiens
aggttcagggggaccagctataagaaagactgtcacaccacataaataatcacaagagataattacctctgctgctgccacatttctcatatatgatcataaccacaagaagcaatcatatcatcattgccaagttaaggataaagctgatggttggataatccaggcttatggaaaatggtcaagatttcctttattcaggggaccagaatgagacagagtgaccctgttatttctgacacatctcaaggttaaaaaggtttattttgctttgtttttcccagttattggatatgatgcacacccttgcttcaacagcaacagggaaaatgtaaactctgctttacaaaagcaaacatctattgagcatttcctttttgttttttgtagtcactgatacgtgctttacaattcttatttaatccacacgacaaccctggcagagaaggaagaaggttacgatacttactttacagaggaagcacctgaagcccagagagggtgagaaacttgccagggtcatgaagctttaaataaatgacatgaaccagctttaaacccaaacagtctgaccccagagctgagttgatcagatgggtaagccaaggggtaggcattacaggcagaaggaacagcagtacaaaggtgtcatggacgggggtaatagaacagtatayggagggaactacaagaagtcagaggagaaaagaattcctaatctgggtgtctcaaggtcgaggagaccagtgaggatcctctgtcctaagactggtaag

SEQ ID NO: 842502 - DNA, 494 bp, Homo sapiens
ctcagactcccagggcagccatctagcccagcacgggctgcccacctgctgccactgaggtgasatcgaagaaacaggactcagcagtgccagagtcaggagtctggcatctggttttcttaacacacatgccactgcgcctgagtccaccccggtgagaagccagtgagctaattacattaacacagctcgaccaagctgggcaaggcagggctgcttcagccatgagcagtcggggagaaatgggacttttctgccgctgcaaaactatgggaggcactgaagtgggcccagaggagcccttcctcccagccaccaactctccccacagcaaggcgctgatgactgccctgggggtgtggggtacacccaggtaagacctagagagtgagaatgattatcttgatggagaaaactcaatggaatgttctctgcagagccagaaagaaaagctaacattgactgggtgcgtccaacttttgaggcattttaca

SEQ ID NO: 842503 - DNA, 631 bp, Homo sapiens
tactcgggaggccaaggcgggaggatcctaggaattcaagactagcctgggcaacatagcaagatccccatytatgcaaaaaattttaaaaaattagccgagcctggtggcatacacctgtagtcctggctactcgggaggctgaggcgggaggatggctggagcccaggagtttgaggctgcagtgagctatggttgaatcactgcactccagcctgggcaacagagagagaccctgtctgttaaaaaaaaaaaaaaaagaaagaaagaaagaaagaaagaaagaaagaaagaaagaaagacctgaaaagaactaattaacgctcatacatagaatttttgatgagaaccttctggctctaaagaaagtattggtcaactatactgtctaggctaatttcttagaaaataatgagcatagttaaggataactgagaaaatgtaaactatggagactgtatcccatgtcaaaattaaaaaattggtggattgatagggagagaggaggataagggagaaaatgtattttgccattgtagaaatcagaaatttgggccgggcacggtggcttacacctgtaatcccagcactttggcggggggatcacctgaggccaggagttcgagaccag

SEQ ID NO: 842504 - DNA, 456 bp, Homo sapiens
ttttcattgccttccaaaataaaaaggggtgatcaggcaccacagaaagggtggtttgggggtttccgtggggtgaggggtgagggaatccatccttcagcagaggtatctgctgtcagtatttgtctggttgaaagatcattttgttcatagctttatcagcacagtcatttcaaaacaggaagtcaaaggctcataagcaaaggcaccaccctttcccttcttaaacccaccaaaaggacctctctttagtctggaggtcaagtgaaaaaggctctcatgaaagtcattgccagcaggcctcttctaagttcagactctgaggaaaaccagaagtcattctgctgattcatttttttttctttttagtttttcttttgaatttttgggacaccacctttataacaaataaaaggggaggcagttcttcctatraacaatctgatctgtcagtta

SEQ ID NO: 842505 - DNA, 620 bp, Homo sapiens
atcagagatgaagagattttgcatacagtgccatgatctgaggatgatgatgaactcagccttctgcacagatgtctagttctttaaaaaggcagtaggcagagatgggttcaggcacagcttcactcaggcctcaggcaatgccaccagactccgtctctctgctctgtgtcatctggaattggttctaccctcagtttggcttggacagaagtggaatttgattaactacaattttcaaggcaaatatttgctctgcttaattgagtaatcctacttactaggccatacctagacttgtggttgaagatgcaacatttattagtggtctttcctgccttagtaattttagccaatttgcatgtgacttactaaggtgtctggcatgtccttttgaatagttgtggtcgtcttctcaaaactaacagtacaaacattaaactgtgggtaaaaacatctatgctgataagagatctcccttgcacgtggttatgttctaattaaggacttgagataagctcatwtacctattttccaacaagtgaggagagaggtacgagtgaatgttcattccatagggactctagcttagtcaaaattaaagctttcatgaaagcttt

SEQ ID NO: 842506 - DNA, 539 bp, Homo sapiens
caaagtgaaaattagctcaagacaagaactcaccctacaatggaccttagtggctgctggagttagtaatttggatatggtgyttaaaattagttttagaaaaactttgtttttgtttgtttttggtgttcatttaaagcatttcactcaagccctccctattttctattatttcatatttatgaaatctcttctctcagataaaccatttgatttaacacccactctctagcaatttttattattttgcctccattgtgctttgtgtgcatgttgtttctgctaatattttgctctttctttaagatccagctcaaactcagccatgtccatgatgcttctgtccctggagccttgctctcatatttccaaccactgataccttttattctcagatatgggaataaatctctcacagttgtatggtgtctcaccaactatatccctgagttcttattaaaaccatacattaaaataatgtttctaccaaaatcttgttacctcaagtagatggtgatctctttaaagggtgaatgatg

SEQ ID NO: 842507 - DNA, 539 bp, Homo sapiens
caaagtgaaaattagctcaagacaagaactcaccctacaatggaccttagtggctgctggagttagtaatttggatatggtgtttaaaattagttttagaaaaactttgtttttgtttgtttttkgtgttcatttaaagcatttcactcaagccctccctattttctattatttcatatttatgaaatctcttctctcagataaaccatttgatttaacacccactctctagcaatttttattattttgcctccattgtgctttgtgtgcatgttgtttctgctaatattttgctctttctttaagatccagctcaaactcagccatgtccatgatgcttctgtccctggagccttgctctcatatttccaaccactgataccttttattctcagatatgggaataaatctctcacagttgtatggtgtctcaccaactatatccctgagttcttattaaaaccatacattaaaataatgtttctaccaaaatcttgttacctcaagtagatggtgatctctttaaagggtgaatgatg

SEQ ID NO: 842508 - DNA, 544 bp, Homo sapiens
tatcataaaggttcttgaaaatatctatgacttttgttactcagtttaataatatttgaaccaccctccccaccccccccccmaaaaaatatgcactctgcaaagtaacataccaacattgctcttaagggaaaggtactctcaccaatgttcttgatgcaacactttctggtttgagactatcgagggggcacattagaatatgtaccatatttggatgaactcaaagcattttgttttgtgaatgggatgaaaggcagcaactttcccacctcttcattctcttgtattcattggactattttcatatgtcctgaaacactcatttttaacctttattttctctgaagatgtttttctgtactattacctcatttttaaatgagtcacaaagaggttgcctgctaaaagtagatcatctatttacaccttccaaggaatgaccttcctcatccctaccaccaatgcacctactatcacacctctcttcccactttgttgagtacaaaaaaaccttccttatgctgaattgtatgtctgaaag

SEQ ID NO: 842509 - DNA, 560 bp, Homo sapiens
tatatatatacacatatatgtatatatatgtacatatatgtgtatgtgtgggtgtgggtatatatatatagtcattgtcaaatatatatgtatagccatttaaaaatcaaatgttccttggctaggtgcagtggcttaggcctgtaatcccagcactttttttactactaccattatttaaatatttaatttataggcatacatttaatagctgtacaaaaaaattaaacactttgggaaaaatgagttctgtaaatcagttggtaagattgcctctttgaaaaaaatgtaaagataaaaggagcccaagtcacagtccacattatttctgctcattacacattcctaaaaaaagaatgagagagaatgctgttgtaatctacattatcttgatttcgctagttcattttacaggattattttcttggytatcattctaataagtgatgtatgccatcagcaagggacaattttaaaagaaaagtagaaacagtataaaaactagaatacaatttttatgattattcattgcatgttattttctaagcattgctattcta

SEQ ID NO: 842510 - DNA, 548 bp, Homo sapiens
aaaaagtataaaagaaaattcyagctgattcttacaacagtcgtggaaggaagtcgctatcctcctcatttcccagatgaggagacatgggcacagagaggttgagtgacaatgctgtcctcacccagctcctaagtggacaagataggatctgagcctgaaaacctgaccttaaagtgtagggcaggagtcaccctaccatccagctcgttagtgggaatgggcaggaggggaggaatccacagagcttggcaactcattgggtgttggcatgagggaggataagggaaggcataaaatgaccccagattttgagcctgaacaacgtgaagatacaggagtcccactaacaaaggtaagaaaaaacagaaccacggaggttggagagtttaaacatgctttctgacatcagccagtgtatctgcagtcccttacacagctggaaacgcagagctttcatgggggaagacagtatacagctcaatatatggaacctgtttgcacctgctcaggaatgacagttgatgccataaaggggaaagagattt

SEQ ID NO: 842511 - DNA, 596 bp, Homo sapiens
gtagcaattatccaggtattacattgaatgccttgggtgagcatctgaaacttgctggctttaggtgagactgagcacattaytagctgcagtgattatagggcaaaactccttttgcttgagaaaagcagaaggaaaagtttgtcttgcacttcaggtactagcatagccacaggggagggtaggtcatgaagcaggctcttgaggtccctgattctgggacttgaatcttggatggcacttctgcacatgccctgggccagaagggagcccagtgccctgaagagtgagtcccaggaaggcagcatttgccacaagctgacttaagagctcttggaccttaagggaaaatctgcggtagtctggcagtactccttgtggccggctgtggcactggctatggatgctgaggctcctctgcctttggaaaggggagggaagagtgggaaggactacgtcttgtggtttgactgccagctcagctgcagtacaaaaaaacacttggtagacttctaaggtttgtttactctaatccctcactcctagatggcacctctggatccacccagggcctgagagacgctccagtgcaatca

SEQ ID NO: 842512 - DNA, 611 bp, Homo sapiens
cttctcctggtattcctctcatcaatccaccaccaactttctcatcactttgtaaaactttatcttttatttttagtttacacatarttgtcatatttatgagatacaagtgatatttaacacgtatctaatatgtaataatcaaatcagggtaattaacatatccatcacctcaagcatttatcatttctttgcactgtgaatattcaaaaccctctcttctagctttttgaaaatatacactaaattattgttaaccactttcattctaaagtgctatggaacaatagaaatgtatgactgctatcagcagttactttgtgtacaccaccttctccctgtctcccccccactcagccattcccagtctctaatgactacaattctactctccacttctaggagctcaatattttttaattctcatatatgaatattaacatgacgtatttgtctttctgtgcctgacttctttcacttaacataatattctccatattctccatcctttctaaagctcgtttttgttgccttgaatcacaggattccgttcttttttacatgcaggatgtagctggtatctcaaattaggcagttaatgaataacagag

SEQ ID NO: 842513 - DNA, 611 bp, Homo sapiens
cttctcctggtattcctctcatcaatccaccaccaactttctcatcactttgtaaaactttatcttttatttttagtttacacataattgtcatatttatgagatacaagtgatatttaacacrtatctaatatgtaataatcaaatcagggtaattaacatatccatcacctcaagcatttatcatttctttgcactgtgaatattcaaaaccctctcttctagctttttgaaaatatacactaaattattgttaaccactttcattctaaagtgctatggaacaatagaaatgtatgactgctatcagcagttactttgtgtacaccaccttctccctgtctcccccccactcagccattcccagtctctaatgactacaattctactctccacttctaggagctcaatattttttaattctcatatatgaatattaacatgacgtatttgtctttctgtgcctgacttctttcacttaacataatattctccatattctccatcctttctaaagctcgtttttgttgccttgaatcacaggattccgttcttttttacatgcaggatgtagctggtatctcaaattaggcagttaatgaataacagag

SEQ ID NO: 842514 - DNA, 607 bp, Homo sapiens
ttattcaaaacacttagagaggtttgaaaaatgaccattgtgccctcgaaaaattgaaacagaatttctgrcaatggggctcaggcattggtatttttataaagtgtccatactgattctaacaacattgaatatactgtcagggttgagaaccgatgtgttaaagcaagcctgtgagatagagctagttgtttatgctaaacttaaataagcaatatatcaagaatcgaggaggaaatggatttgccttgggaaatagagtgctttctcactagaagggattaaatgtgctgggtgagtggtttatagagtaaaggatttttttctttacagagaaatctacacatcatataggagatcaaataagctgaccaggttttttttcctctggctatttacagacttagtttgtgactactcatactcatgaaaagctagccagaagagacaaggtaaagatgagctccttccctacttcatattttttttccatctattctgggtttgcatgatgaaatacttaaccccttcctctatctgtgagcctatgtgaacactggactgtttcctactattctaatctcaagtatttaactgacctacttgt

SEQ ID NO: 842515 - DNA, 625 bp, Homo sapiens
ccatgattctctctttcctttataagcactttgcttagaattatagcttcagtaacaaagagaytgtgttctaatttaaaataaagtgcttctttttgtacaattaatatttcttcagtaatcatatcaataattcccacagattatttgttttctatataaatttctattcccaaatataatcaatttttgattatccaaaccaatggagtagagctttggaagggatcatcccaaacacaaatcacgccaggccattttatctttgctttcagaattcatttccatattttcttagttacagtttatcagcagtgaaaatgcatgttatcaaaaccaaataacaaagctttctcatgcaatagtccttgacataaaataatctcagattaattattaaagattaaatacgacaaaagaagaggtcttgcaaatgtagttttgaactagttatacacaatgccttgtgcaaagtgagcagtgtgtgtgtgtgtgactataaaattcagattcaatccacagaatttacattacaaacatagtaattttgtaaccattaccacagtgaatagctgctgccctgtatattcaaagaaatactgcatcttattatcgggaggaaatc

SEQ ID NO: 842516 - DNA, 474 bp, Homo sapiens
agggtaaattttgagtctcaggagtttaagaaggagtaaaaaagataaaagggtagaaagcttatttaaagacatactawcatgaaccacataatgatgttttggtcaacaatgcatcatatgtatgatggtggccccataagattattagagttgaaaaattcctataagttagtgacatcacagttgttgtaacatcatactgcagtacattacacatgtttgtggtgctattggtgtttacaaacccactgcactgccagtcatataaaaatatagtacatataattatgtacattatatatttgataatgataataaatgactatgatattggtttatgtatttaccatacttttgattgttattttagagtgtactctttctacttattaaaaaaagtttactgtacaacaggatgcagtgttatgccagcagcagccacatacatctcatgattactatgtctcattg

SEQ ID NO: 842517 - DNA, 657 bp, Homo sapiens
agatttctctgtagcatgtcatgctctttgatagcatttaaacaaatttatgggcacatagaaggtatttagtatttrtgaggtacaggagacattttgatacaggcatgcagtgtgtgtttggtagccctttatccacagaaccttcaaaactgaagtgaactatgtcaaaccctgccactgctttatcaaatacgtttatgtaatattcgaaatcctttgtcatcatttcaacaatgttcatagcattttcaccagcagtagttcccatctcagtatatcactttctttgctcttccataagaagcaacttctcattcattgaagttttattatgagattgcagcaattcagtcacatcttcagactctacttctaattctagttctcctgctatttttattacatcttcagtgatttccttcacttaagttttgagcccctcaaagtcatccatgagggtttgtattagtccatttgcattgatataaaggaaccccagaggctgggtaatttataaagaaaagaagtttactgtggctcatggttctgcaggctgtacaagaagcatggtactggcatctgcttctggtgagggcctcaacaaccttacaattatggcagaaagcaaagggggagctgatgcatcacatgaat

SEQ ID NO: 842518 - DNA, 657 bp, Homo sapiens
agatttctctgtagcatgtcatgctctttgatagcatttaaacaaatttatgggcacatagaaggtatttagtatttatgaggtacaggagacattttgatacaggcatgcagtgtgtgtttggtagccctttatccacagaaccttcaaaactgaagtgaactatgtcaaaccctgccactgctttatcaaatacgtttatgtaatattcgaaatcctttgtcatcatttcaacaatgttcatagcattttcaccagcagtagttcccatctcagtatatcactttctttgctcttccataagaagcaacttctcattcattgaagttttattatgagattgcagcaattcagtcacatcttcagactctacttctaattctagttctcctgctatttttattacatcttcagtgatttccttcacttaagttttgagcccctcaaagtcatccatgagggtttgtattagtccatttgcattgatataaaggaaccccagaggctgggtaatttataaagaaaagaagtttactgtggctcatggttctgcaggctgtacaagaagcatggtactggcatctgcttctggtgagggcctcarcaaccttacaattatggcagaaagcaaagggggagctgatgcatcacatgaat

SEQ ID NO: 842519 - DNA, 630 bp, Homo sapiens
ataataatattctttttatggctgaaaatattccatcatgtacatacaccacattatcttcmtacatccattgatggacacttaggtcgattccgtatcttggttataaatagtgctgcaataaacatgggagtgaagatatctctttgatatactgatttcctttctttgggatacatacccagctgggggattcatgaattatatggtagttctaattatagttttttgaggaatgtccatattattttccataatggctgtactaatttatattctcaccaacagtgtacaagtgttccccactttctccacactgttgccagcagttgttatgttttgtatttttgttaatagcattctaactaggatgagatgatatttgatttgcattttcctgataattaggtatgaatgatgttgagcatttttccatatacccagccatggtgtcgattttaagaaatgtctatccaggccttttttatttttaaattagattttgttttgttttgttttgtttgtttgctacccaatggtttgacttccttatatttgctggcaattaactctttgttgggtggatagtttacaaatgttttctcccaagaagttgtctcttcactttct

SEQ ID NO: 842520 - DNA, 486 bp, Homo sapiens
gctgctgcagctgtcattacaccagcttgtacgtgaagcccagagtctcccagaccagcacattactgtagcttgccaaagsgccatggctgctattgtgtgactgccaccaatgtttattcaacgcagaggccattttaaccagcacctagtggtgagtcctgctagacttggtccatcctaccagggaagtagatttctttctggctcacaatgggtctagaagcaatgacctagtaataatgacctggaactaggggctttgggattctccatggtgctttattttaacgtggttgggctgatattcagttggaggacaaagtcctctgtattcttcactctttcatccaaattgaaggagtctctgtctacagtgcactgtctggcattgggggaggggtggcataggctctcccatggccactgcagctagtgtcatgctgggttgtaccctgagcccacagcctctgagagcagtgtggc

SEQ ID NO: 842521 - DNA, 486 bp, Homo sapiens
gctgctgcagctgtcattacaccagcttgtacgtgaagcccagagtctcccagaccagcacattactgtagcttgccaaagcsccatggctgctattgtgtgactgccaccaatgtttattcaacgcagaggccattttaaccagcacctagtggtgagtcctgctagacttggtccatcctaccagggaagtagatttctttctggctcacaatgggtctagaagcaatgacctagtaataatgacctggaactaggggctttgggattctccatggtgctttattttaacgtggttgggctgatattcagttggaggacaaagtcctctgtattcttcactctttcatccaaattgaaggagtctctgtctacagtgcactgtctggcattgggggaggggtggcataggctctcccatggccactgcagctagtgtcatgctgggttgtaccctgagcccacagcctctgagagcagtgtggc

SEQ ID NO: 842522 - DNA, 588 bp, Homo sapiens
gcattttcttataaaactaaacatgcagtcaccatacgactcagcaattgctcttttagatatctagctctaaaaaatgaacttatatttgcrcacatatctccacaagaatgttaatagaaaaaaataaaatatccaaagtttacatattgtagaattcctttaatatagcattctcaaaatgtcaaaactacagagaaacagaatatattagtggttgctggggcatggatgaaaatgcggggagatatgtataaatacaaggaggttatgagaaggagttctttcatgataatgaaaatattctgtgtcttgattctggtagcagttatataaatctctacactggataaaattgcacagaacctacacacaaacacacacacacaaatgaattcaggttttaaacatggaaattgaataaggtttgtagactagttaataattatacactgatgtcagtcttctggttttagcattgtactacagttatataacttgccactactggagtatgttgagcaaaaggtacatgagactctgtacacttttttgtatataattatttcaaaaaatgattttaaaaaa

SEQ ID NO: 842523 - DNA, 588 bp, Homo sapiens
gcattttcttataaaactaaacatgcagtcaccatacgactcagcaattgctcttttagatatctagctctaaaaaatgaacttatatttgcgcacatatctccacaagaatgttaatagaaaaaaataaaatatccaaagtttacatattgtagaattcctttaatatagcattctcaaaatgtcaaaactacagagaaacagaatatattagtggttgctggggcatggatgaaaatgcggggagatatgtataaatacaaggaggttatgagaaggagttctttcatgataatgaaaatattctgtgtcttgattctggtagcagttatataaatctctacactggataaaattgcacagaacctacacacaaacacacacacacaaatgaattcaggttttaaacatggaaattgaataaggtttgtagactagttaataattatacactgatgtcagtcttctggttttagcattgtactrcagttatataacttgccactactggagtatgttgagcaaaaggtacatgagactctgtacacttttttgtatataattatttcaaaaaatgattttaaaaaa

SEQ ID NO: 842524 - DNA, 626 bp, Homo sapiens
ataaattcagtaaagttgcaggatccaaaatcaacacatgaaaagcaataacatttatatactccaacagtgaacaatctgaaaaagaaaccaaaaacgcaatcccatttacaatagctacaaaaattataaaatatctaaaaagaaatgtagttgaagaaatagatctatacaaggaatactataaaatcctgctaaaaggaattgaagaagacacatggaaaatgaaaagacatttcatgatattgtattggaagaattaatattgctaaaatgataacaacataaaatacactacaaattcagtgcaatccctatcaatagcaatgacaatcttcacagaaatagaaaaatatcctaaaatttatgtgcaatcacgaaagacagtgaatagccaaagcgcttttgagcaaaagcaacaaagttggattggggcagagcaagatgacagaatcattccccctacaagaacaccagtttaacaactgtctatacaaaataaacactttcataagaaccaaaaatcaggtgagtactctcactcacagcmcctgagtgtaacttcatattgctgaaagagaccctgaagaggtaagaaaatcagtcttaaattgctgtcagcaccc

SEQ ID NO: 842525 - DNA, 629 bp, Homo sapiens
  misc_feature 23: n = A,T,C or G
atatcacgaatataaatttgctngtgttttcacacttaaccttagatgcttagtttatacatayatttatatcacattctaacttgtacatttaatacaaagttataaatttaaaataagtcactttttaagtttctacaaaactgataaaacctgattaaaaaatcagtactagtatttaaatataatttattaaagtcttctcattagctaactatggaagtacaactttaccctccctttaaaaactagataaatatttggtatgtgtttgtaaaagacacgtgaaaaacaacaagagaggagttagattattcagatttgaactcatttagcttgacacatatgattaactataactgaataaatatgagaaaaattaatagtcctgaactggcttcctttgtagcaaaatacgtggaagcttccaaaacgttattagtcatgaatgccaacagtggagccaggaaattaagagtttctttaaagaaatgttttaaaatgaaaacaattaataaaagcaaagaaataaccatttatgaagagaacaggaagaaaatgttgattgatgatacaaagatatattattaaaaagaagaccaagtgtttctttgtgtcacaaccatgtt

SEQ ID NO: 842526 - DNA, 543 bp, Homo sapiens
attgcaaagtggaagtgatatatatttccatctttgtgcttcttgtattgtttgaattattttttaygaacatagatacattttacaaaaacaagaataattattttgtccatattaaaaaaaaatctaaataagtggaagtatatatatccagatgtgaacagtggtaattaagttgttctttgtattttcttattttcaaaatttttaagtttttaaattacaaatgaataatagtactaaaattgtacttgaactataatcttaaggactttcatgttatagggaaactgaagcagaaagtatgcctaagagtaacctagtttgtaaataaaacattttatcatacttgttaagaaaactgatttttagcagggtatggtagttccagctacttagggggctgaagtaggaggatcacttgaccctaggagtttgaggctgcagtgagctatgattgcaccactgcactccagcctgggtgacagagtgagaccccatctcttaagaaaagaaaattgatttaatttatagaagcaaaaa

SEQ ID NO: 842527 - DNA, 575 bp, Homo sapiens
aaccccgtctttactaaaaatacaaaaattagctgggcatggtggtgggtgcctgtaatcccagctactcgggaggctgaggcagagaattgcttgaacccgggaggtggaggttgcagtgagccaagatcacagcactgcaccccaacctgggtgacacagtgagactccatctcaaaaaacaaaaacaaaaacaaaagatacactgaaggataaactactaccttgttcatctttgaaattgggaaatcccaggacttttagggactctttatcttttctactctttgttagtttgaatttttcagttctcaccatttctttctttaccacacagttttctttaaaagcaaaaaaacaaacaagaaaaacaaaacactggacgctggccatccgtttcttgtgtaacagtcttccctccctggccatttttaatactgcgtagcctgtggtttagctaacwcactgcctgtgtttctgtgcttttcttctttgtcctaccctattgccttagaattaaaacagagatattttcctttagatttttagactttcatcagacttttcacctcata

SEQ ID NO: 842528 - DNA, 579 bp, Homo sapiens
tctgttgttttcctgactttttaatgatcgccattataactggcgtgagatggtatctcattgtggttttgatttgcatttctctgatgaccagtgatgatgagcattttttcatgtgtctattggctgcatagatgtctgcttttgaaaagtgtctgttcatatgctttgcccactttttgatggggttgtttgtttttttcttgtaaatttatttgagttctttgtagattcttgatattagccctttgtcagatgggtagattgcaaaaattttctcccattctgtaggttgcctgttcactctaatggtagtttcttttgctgtgcagaagctctttagtttaattagatcccatttgtcaattttggcttttgttgccattgcttttggtgttttagacatgaagtccttgcctatgcctatgtcctgaatggtattgcctaggttttcttctaggggttttatggttttaggcctaacatttaaatctttgatccatcttgaattaacttttgtataaggtgtaaggaagggatccagtttcagytttctacctatggctagccagttttccc

SEQ ID NO: 842529 - DNA, 623 bp, Homo sapiens
gatgctaaggtttggggtatggatcccatcacccatgtagtgaacctaatacctgataggtagtttttcaaccaatgacctgtcctttcctctcccatctagtagtccacagtgtctstcgttcccatattaatgtccatgtatgctcaatgtttagctctcatttataaatgagaatatgtggcacttggtttttgttcctgttaattcacttaggattatggccttcagctgcatccacactgctacaaagaacatgatttctttatttacagatgcatagtattccatggtatacaggtaccacattttctttatcaaattcaccattgataggcacatgagtggattccatgtcattgctgttgtgaatagtgcggtgatgaacacaggagtgcatgtgtctttttggtagaatgatttatattcctttgggtatatacccgtaatgggattgctggattaaagggtgactctattttcagttctttgagaagtctccagactgctttccacagtggctggactaatttacactcccaacaacagtatataagcataaccttttctctgcagcctcaccagcatctgttgttttctgactttttaataccagccattct

SEQ ID NO: 842530 - DNA, 471 bp, Homo sapiens
attcacaccatagtagcatgtgataaatgaagtcttggactgtgtcttaaatgtttgatttctttagaaaatgcatgactyaggctgggcacagtggctcatgcctgtaatcccagcactttgggaggccaaggcaggcagatcacttgagttcaggaatttgagaccagcctggccaacatggtgaaaccctgtctgtagtaaaaatacaaaaataagctgagcatggtggcgtacacctgtaatcccagctacttgggaggctgaggcaggagaattgcttgaacctaggaggtggaggttgcagtgagctgagatggtgccattgcactccatcctgggcaacagagtgagactctgtctcagaaaaagaaagaaagaaagaaagaaatgcatgactcaaatatggcaaaatgttaaaattttacaaaactaagtggcaatgagtatacagtatttttcctatactgt

SEQ ID NO: 842531 - DNA, 598 bp, Homo sapiens
cgtgtacttcgtgagtcctttggaagcaggctgagttgccatttctgtgagtcttgagggaggtggacaggaaagtgggccttagggatgacaacacttttccttctataatactgtgccaaaattgctggacaaaaaaagtgtaatacaaaagcattgtggatactaaatatacaagcaattattgtaaaattccccactttgaattctgcgttcttagatgctccatattttctttttgagacagagtctcactctatcacccaggctggagtgcagtggcgtgatctgggctcactgcaagctccacctcccgggttcatgccattctcctgcctcagcctcccgagtagctgggactacaggtgcccaccaccacacccggctaattttttgtatttttagtagagatggggtttcaccgtgttagccaggctggtctcgatctcctgacctcgtgatctgcccgccttggcctcccaaagtgctgggattacaggcgtgagtcactttcttatctcatttccttagcagctatcacctttgaacatgctacayactctgcttgtgtattaggtctgttgtctgttacctgtac

SEQ ID NO: 842532 - DNA, 445 bp, Homo sapiens
agcctacagcaacagttctcaaactttttgttctcaggaatcttacacttaaatttatttagaaycccataaagcttttgttaggttggttacatctattgatgtttacagtattaaacactgaaaactgagaaatgtcttaaatattaattcattttaaaataccaacaaacctgttatatgttaacaaatatatatttttattaaaaatatttttcaaaacaaaattaatgaaagagtgggactgttacacatttttgcaaatctctttaatgtctggcttaataaaaacagctaaacagctggattttcacatctgcttccacatttaatttgttttatcacaagtcatgttagtttctagaaacgtccattgaacactcatgaaagaatgacagtgaaaaagacaaataatgtcctagtatgaacatgaaataaaagaatc

SEQ ID NO: 842533 - DNA, 445 bp, Homo sapiens
agcctacagcaacagttctcaaactttttgttctcaggaatcttacacttaaatttatttagaatcccataaagcttttgttaggytggttacatctattgatgtttacagtattaaacactgaaaactgagaaatgtcttaaatattaattcattttaaaataccaacaaacctgttatatgttaacaaatatatatttttattaaaaatatttttcaaaacaaaattaatgaaagagtgggactgttacacatttttgcaaatctctttaatgtctggcttaataaaaacagctaaacagctggattttcacatctgcttccacatttaatttgttttatcacaagtcatgttagtttctagaaacgtccattgaacactcatgaaagaatgacagtgaaaaagacaaataatgtcctagtatgaacatgaaataaaagaatc

SEQ ID NO: 842534 - DNA, 601 bp, Homo sapiens
caggctggccacaaattcctgggctcaagtgatcctcccacctcagcctcttaaagtgctrggattacagatgtgagccactgtatctggccagttcatttcctattactggttcattgtaaaggatacatctcagaaacagccaatgaaagagacgtactttccggatgcggtggctcatgtctgtaattccagcactttgggaggctgaggtgggaggattacttaaactcaggagtttgagatcagcctgggcaacatggtgaaaacccatctctacaaaaaattagaaaaataaaaataaataaccgggtgcagtgttgtgcatctattattccagctactagggaaggtgagccgagaggatgccttgagctggggactggggaggcttaggttgctgtgagctgagattgtgccactgcactccagcctggacaaaagagccagaccctgtctcaaaagaaaagaaagatgcccagggcaaggtaagttaggaggggcacagagctcccatgtcctctgttgaacatgccaccttgccaacatctcctgtgttcagcaaccccagaagctctgcaaaccccattcagggtgttta

SEQ ID NO: 842535 - DNA, 601 bp, Homo sapiens
caggctggccacaaattcctgggctcaagtgatcctcccacctcagcctcttaaagtgctaggattacagatgtgagccacygtatctggccagttcatttcctattactggttcattgtaaaggatacatctcagaaacagccaatgaaagagacgtactttccggatgcggtggctcatgtctgtaattccagcactttgggaggctgaggtgggaggattacttaaactcaggagtttgagatcagcctgggcaacatggtgaaaacccatctctacaaaaaattagaaaaataaaaataaataaccgggtgcagtgttgtgcatctattattccagctactagggaaggtgagccgagaggatgccttgagctggggactggggaggcttaggttgctgtgagctgagattgtgccactgcactccagcctggacaaaagagccagaccctgtctcaaaagaaaagaaagatgcccagggcaaggtaagttaggaggggcacagagctcccatgtcctctgttgaacatgccaccttgccaacatctcctgtgttcagcaaccccagaagctctgcaaaccccattcagggtgttta

SEQ ID NO: 842536 - DNA, 519 bp, Homo sapiens
tggttacatgattttatgttcccaccagtaatgtatgtggggttccaattcctccacatcttcactgacattttttttttctagacaggggcttgctctgtctctcaggctgcagcacagtaatgccatcasagttcactatagccttgacctcccaggcacaagtgattccctcatgtcagcctcctgagtagctgggaattataggtgcatgccaccatgcctggctaatttttatatttttttgtagtaatggggtttgactatgttgattaggctggtctcgtactcctggcctcaagtgatctgcccacctcagcctcccaaagttctggaattacaggctgagccactgtgcccggccttcaccaacatttgttattatctttttttttctttataccttaaagcagtgtaagaacaagtatcttcaattattctaaacaaaaattataatcccagggcattgggagggtgagataggaagatctcttgatgccggggttttgtttttgtttt

SEQ ID NO: 842537 - DNA, 632 bp, Homo sapiens
gatatgagtcttgactcactggaaatatacatgctccagtgataaacgaatgcctgcgtatgagctggcttagtgagaactcagccctgaaatccagtctgatcatctccaggcaaaatgctgtattacagtttctgggtatacaaaccagaagcccacatgtgtctttgattgtatgaataaacactgatggatgtgcacacgtccttaacagtttttaccagtttatgacaaaatgagttcaataaagaccatgtgctgtcataaaactaaattattgaatttatatgaccttcctgtgttctgatattatcttcttcccattttaaaaaattcaagctggtatccctttgtgaatactttcaactcccactctgaattttttcctcactggcccattaaatccagaagtctgggatttgttgcctgggattatacaggaactatcaaaattgcatggcttttttttttttttcctgaaggatggtcaagcttagtatttgatctagtacttacatttgcaacatgttgctacaagtaatggaatgttgcattataaccatctgtttaaaaactttaaagaaattaccratgatttatcttactaactgaaacaaaattatagataaata

SEQ ID NO: 842538 - DNA, 615 bp, Homo sapiens
atctcagagttgaggatgaaaagtgaggataataacacctgcctgtaccctggtacagatcataagatgtttatttatttgtggagacagggtctcactctgttgcccaggctggagtgcagtggyacaatcatggctcactgcagccttgaactcccggcctcaagcaatcctcccgccttgatctacagggatttacaggcatgagttactgtgcctggccagatctcatgaagtttaaatatgacgtagcatctggcaggtagacttgctcagtggaggcctcttttttgcctggtgggtcagcaggtcctgtctgtacaaatgatgtttactggtccactcctccaggtttataaaaatgagcattttctctgtactgacaataatgaaataaggaaactgaggcttggagaggcaatatagccccgcccgaaatcacatgggtaataagtcagagaactagaattcaaactccaagtctacctcctggacccaagctcttaacttctgtgctatgaactaataccacatggagaattttgattattttcttagcatttaccaccatataacttaatatgtattatacttatttatcttgggatgtcactt

SEQ ID NO: 842539 - DNA, 608 bp, Homo sapiens
gaggcctcttttttgcctggtgggtcagcaggtcctgtctgtacaaatgatgtttactggtccactcctccaggtttataaaaatgagcattttctctgtactgacaataatgaaataaggaaactgaggcttggagaggcaatatagccccgcccgaaatcacatgggtaataagtcagagaactagaattcaaactccaagtctacctcctggacccaagctcttaacttctgtgctatgaactaataccacatggagaattttgattattttcttagcatttaccaccatataacttaatatgtattatacttatttatcttgggatgtcacttctgggattaggtttcaaaaaggactgtgaaactgtctctcattttctttttctgtctcttcctctttcccctccctagccctggagtaagccagctgcttcttatgaagaggtgcaagtggacaagaactgatgtctccagcccacagccagagaggacctgaggcctgccagcagccgtcgaagtgagtttcaaagaggattctgaagccttgagagagctgcagccctggctgacascctgattgtatcctcgtgagagcctgagccag

SEQ ID NO: 842540 - DNA, 608 bp, Homo sapiens
cagcagtatgtcacaatacgatataccttggagagcagttaactgaygaggaagttgataaaaatgatcagagaagcaaaatactgatagcgatagtcaagtaaaccacgaagaatttccataactgatgtcagcaaggtgggaatattgtacagtgtgtgttgaagttcttatacaacagtttatttgccttttgtttttttgtaaggaacatatatactaaaagttctccttgctgtcaaaagaatatgtgtgagtaagttatttgaacttttctgtttttctacttttcctgccatcatcccacagcctttagacattttttatttttttagaaaattgaacaagtgcttgttgtcgtggctcatacctctaggatgggaggcaggggtagaagggtcacctgaggccaggagtttgacaacagcctggccaataaagtgagaccccatgtctacaaaacaatttaaaaattagccaggtgtcatcatgtatacctacagtcccagctactcaggaggctgaggcaggaggatccttagcccaggagttcaaagctgcagcaagctgtgatggcaccactgtactccagcctgggtgacagggtg

SEQ ID NO: 842541 - DNA, 635 bp, Homo sapiens
gggccacggggatccagggcactcatggaggggtgccaggcagagggaggagttgtgaggccagaggggctggcacacagagggtgcaagtggaaggggagaggcgggtgggcggggcctaggagaaggaaggagtttgccttagtcccatgggccctggagcacctccaaagggtttaattagggatgtgacggagctgtatttccgcaagttcattcattttttgttttttgcttgggttttttttttagggggggacaaagccttgctctgtcacataggctgaagtgcagtggcacagtctcagctcactgcaacctctgcctcctgggttcaaatgattctcctgcctcagcctcctgagtagctgggattacaggtgcccaccaccatgcctggctaattttttgtatttttagtagagatggggttttgccatgttggccaggttggtctcgaactcctgacctcaagtaattcgcctgccttggtctcccaaastgctgggattataagcataagccacatcgcatggcctcattcattctttttttaatccagtaaatatctgttgagtacatgctgtgtaccgggcactgttctgggtctatagcagtgaacaaaaccaaatcct

SEQ ID NO: 842542 - DNA, 454 bp, Homo sapiens
tccactcctgttctcataacagcgtctcccttctccatcctttccctgctcygttcatgtcgtttgggtggggcatgtgagccaggactgggcagtgagaatccctgtgattggttcagggctgggcacctggccagaactggccatatggatttgctctggatcttctgcttgagaaaagaggctcactctgagctctgagtatgctgcactgatccagtggtgctgcgggggccaaccctgagtcagctgaaggaaaacatgcttgtatataaagccagaacagagaaaccagagctgagagaagataggctgattcctgatgtctgagcaacttgttccaggcagaaacaagctcctggatgagtcaaacctttttcccttttgcttaagctagtttgagttgggtttctggcatttacaaccactggtgctgacaaacacaaagaaagaa

SEQ ID NO: 842543 - DNA, 576 bp, Homo sapiens
tccactaaacttggagttcctagcagrcagacagcactcattatttttctaaacccagagactgggacttagcaggtatttaatattttgagaatggtctattcttgatgcctactctggcaggaccttatgcttatataactcgctaccacacgctatgaagctcaatggttctatttacagaacacttggagaaagccagcttagcctgtggtgtccatctagtggttgatagaggctgtggtctcaattccttttcactgtgagtcattgtgttggtttaaagctcctggctggtgatatttagggctaaggatgttggcttttgagaatgaggctgatcaatagcctagtgtagagagaaaacaggatgtaagcatttggtcttccacagtggctttttaggggctgctgtcttccctccttggtggcaggaattactccatcaacaaatatgggcacagatgcctgcggggagactccgttcttcagaaattgaggaactcattcatgctgaattaattaaagtcatccctcagtatccatgagggattggtttcaggacccccagaaaat

SEQ ID NO: 842544 - DNA, 576 bp, Homo sapiens
tccactaaacttggagttcctagcaggcagacagcactcattatttttctaaacccagagactgggacttagcaggtatttaatattttgagaatggtctattcttgatgcctactctggcaggaccttatgcttatataactcgctaccacacgctatgaagctcaatggttctatttacagaacacttggagaaagccagcttagcctgtggtgtccatctagtggttgatagaggctgtggtctcaattccttttcactgtgagtcattgtgttggtttaaagctcctggctggtgatatttagggctaaggatgttggcttttgagaatgaggctgatcaatagcctagtgtagagagaaaacaggatgtaagcatttggtcttccacagtggctttttaggggctgctgtcttccctccttggtggcaggaattactycatcaacaaatatgggcacagatgcctgcggggagactccgttcttcagaaattgaggaactcattcatgctgaattaattaaagtcatccctcagtatccatgagggattggtttcaggacccccagaaaat

SEQ ID NO: 842545 - DNA, 576 bp, Homo sapiens
tccactaaacttggagttcctagcaggcagacagcactcattatttttctaaacccagagactgggacttagcaggtatttaatattttgagaatggtctattcttgatgcctactctggcaggaccttatgcttatataactcgctaccacacgctatgaagctcaatggttctatttacagaacacttggagaaagccagcttagcctgtggtgtccatctagtggttgatagaggctgtggtctcaattccttttcactgtgagtcattgtgttggtttaaagctcctggctggtgatatttagggctaaggatgttggcttttgagaatgaggctgatcaatagcctagtgtagagagaaaacaggatgtaagcatttggtcttccacagtggctttttaggggctgctgtcttccctccttggtggcaggaattactccatcaacaaatatgggcacagatgcctgckgggagactccgttcttcagaaattgaggaactcattcatgctgaattaattaaagtcatccctcagtatccatgagggattggtttcaggacccccagaaaat

SEQ ID NO: 842546 - DNA, 574 bp, Homo sapiens
aatgtctcctcctcctggtgctggagagttaccagtgaggatgaggaagaggttaasggaggaaggagggagtgaacgggtgggccaagaaaagctcagtataccctcctcccaccccaccacagtgttacttccagtgccctgagagctcccacacccaccctggacctcaaaagctctctgtttagttaagctcatccaaaaggcagatatgccaaagcctctggaaagacttcaaggaagccagcctctaccttagccgtttgatgatttctgaagcgttacatctgagaaggtgatctgaggggctccttaatgagactgaacagttctgatcagtttccggccagcagtggccattccggttgccaagatcataagtgctaatgctgactaacacctcaaggccagagccagggcatcttggcatgctcagactgaagggaacacagaaagctccctgctcctttcctgggggctgcctgggagttcagctacaatgtctttcctctaatctgtccaaagacactgtagtcaccagcccccagcaatggggcagcaagttgcaaattgt

SEQ ID NO: 842547 - DNA, 617 bp, Homo sapiens
ttggaagcagaaccaagaggtactaagatcccactgctggacctccttggccagatgtgctagccacatctggtccccaaacacaggcactggcactgctagtattttgtactccgttctgtgcctgtctttgtggagtgaatgtcctctccaaaggagatgaggtaaattaaccaaggtacaaatcctcgcagcacagtgggaagtaattctcactgcaacttgttgggggaagagctaacccccttccttctctcccagctcccagtcagggaattgggccagcttctttttaactatataatttttacagtcccctcacaccagctcatgttctctgtttactctacaaccatctttcttgcccagccaacaagaaaagtttaaagtgattgcctgcttatatctaaaatgcttccagactgtagacttctttggtgcttacagatttgcatggaaagagaaggctgaaagttttatgacttgaaaattcagacttrtcactagatctaatgctagtcagctgaggttccagtggcttttaaacacagctaagtggatttcaagctgaaagatataactaaacatttcatcatttattcatctttcaactttaa

SEQ ID NO: 842548 - DNA, 420 bp, Homo sapiens
tactgactaagttttaaatgaatcagtgctacatttaatttgaagaagtaacaaagagttagaagaaaaaacaaagataaytggggaattgggtgcaagtccaccataatctgttgacactctataaaaattccatgtgagtaatattttaaccagaaaaataggaataatgactgttctctagagcaaccataaccagtacctagaaaatatgtaataaacaaggaaatggactagaacactaatgtggttttctggcaaagaactatccttacttaaaaataatgagaagaatattcaaatacttactttcctttaaataatgaaaactttaattcatgactcccatagctgttgttaggatttatgagtgaagtcactaaactaacattcattgagcacatgctaggtactatagca

SEQ ID NO: 842549 - DNA, 627 bp, Homo sapiens
gaacataaatgagatcatacgagctttgaaaatgtttatgtaacaaggattcaggttatttatatataatatgaattttttaattgtataatataatcaattactwtaaaaaatttagattccattgaatgagcttcaatattatattctaactaggtagaaatttaaaatgtaggaatcatttaaaatacatttttggtacgaaaagcctttaagattaaaaataactgattaatgaccactacattttttcagtaaatcaataattagtctttttaacagttagaaactctcttttaattttttggggttgggggagggctggatctttcatcttcaaacatcacctctctcatccattcattaccatctatactcaatgccctctcttccacagattcaggtttgtgattaatcagtaaggaacttatggaaggagtgcttaataggtcacagagctacccaaaacctgagaaacctggcttggaaaatagaaacaaggatgaaacgcttaggagtaacctggatcacactaaacattaacctttcattccagcacccatcaagtgaggacacttgtcacagaacactaaatgtcactgattttccaacttccactgcacccta

SEQ ID NO: 842550 - DNA, 610 bp, Homo sapiens
aaaatgaaatctgccccatccttcttacatacacagtgatagcattttgaattgttcttctacatttgaaatcttagctgaaagatyatcagccaccgaccttttgtgaagctagttctctagaacatacaatgttttttaaaaaattaaaaacacagaaggaaaaaagcaagaaccaacgataaatggagcttgtgcagaatctggcagtgctgtggacctgcccatctgttctcagtgataatcacctccctccaccacagtctagcagagtgattatgctaaatatcctggttaaccaataacatacagtttcatttcagggaagcatgcacagtgtattcagaggacctcttctgactaacctgaagcatgtttcatatactgtttaaagctctacttagtaacaaattgctgttttatcactcttatttctgtatctttctaaatcttttagtcactcccagacttttcaacaagatgtgattttttttttacaaagcctttttttttttaaagggagttcttttataatttatagatcaaagtatattacagctgttacagctggcccggatattgagaggcaattgcatacaattcagtaaga

SEQ ID NO: 842551 - DNA, 643 bp, Homo sapiens
atattacagctgttacagctggcccggatattgagaggcaattgcatacaattcagtaagactgtatatactaggagtactrtcaaataaaatgtaccaaatattttccacttttctgaactgctatagaatgtcatgaatacgaatgaaattattattatctcatttccccatcttagctaaaaaatcattatgtttgacaatcagtgcttcaaaaagtaccacatatttgttttaaataatcacaaccttatttcatatacatatatacacacaagaattaataaaaatatttaatacacatgaagattttcaactcaaaaatccaaaaatattgaatgcaaacatgtaggttttgttgcaaaatatgttctttttgtatatctttaacaaattcttcaatttgtacaaaagatcatattcagatgacttgacaacttttagaggtaaaaataaatgttccatttacacatcgttcaaatgtggagacttcagtaggataggaaacagaataagccaaaagtggtgtctttgtgaatgtatctaagatgacatagtcatacataataaaaaccacctactttaaacctgaaggctgtaaaggatgatgatttacacatacaacctaaattattattcatta

SEQ ID NO: 842552 - DNA, 639 bp, Homo sapiens
ggggatgaaggaccccacaatatgatgagtcgtctcagctgaaccattttagaacagccaggttccttgatctgacaactgaccacagtcatataaacaagcccagccaagttcacctgagccttgcccacatcagcagaactgccctgtagagccaacctcaaattcccaccccatagaatcataggtgaaatgaatatttactattttaaaacactaagtgtctaaggagaactaagtgtcagggtgtcttattatgcatcaaagtgtagcttatccattcaggaaaactctgctctagtcaaactgaacttcttactattctcccacttttgtacttgcatactatattttaacactttcatattcttgcattcatgtgttactgattaaattcattgaatattttatcctatcatatgacacaattctagttatccaaggcttgcagtatcaaataatggagatgatttcaatgatttatatcattgttatatatatgtagatatatacatgtatagataggtgayagataaatgtattgatatttcaactatatgatttcaattatatatattttatctcaaagactctgttataataagacttatacacatatatacacacaaaagcttacat

SEQ ID NO: 842553 - DNA, 620 bp, Homo sapiens
gtgggactgggtgggtaaaagggaagggagaaagagcagccctctctaagacgcacaggccttgggaaagaggattattagggagcaaactctgtatttctactttttattcatcttcttgacgctcagccacatgaaccaccaattgcatccttctgggaactttcagcaattcaaaaaggagcacacacaatggactaagatggaggctaaaggctagattgtggagtactcttggtcaataaagttgcttccagtattagtctcccaaaattttatttcttatcaatttcaaggaaaagaacaaagccctaatgtaaaaattccttcaaaaaatgtgtggaacactagtctataaatcttcagaagttctgtctcatgtagatttcattgtttaaaatgggattcattaactatcttcctctgaagctaaaaaacacctctcattaccattctaacctgatttaagtactggtttcttactattatatttcttgccattgttacaaagacagataatacataaataataattacctaccatttcaaacactggaattagagaaatasccaggcttcaccttcaagggctcatgaatcccaagagggcagtttgtaat

SEQ ID NO: 842554 - DNA, 667 bp, Homo sapiens
aatcactctagatttttttttccattcctattctcaaaatgattatgacttataaattattgtcaagttcatggaggaacataaaagaataaactagattccagttaagctggwcacaaagacatttctggatcattaagaatttttcattaagacagctctgatattttgcatgatgaattacatcttaaccatgactaattaattcccaggaaggaatttatttacctaaagggctaaaaggaccacggtacacatgtaaagctactgttaacaacatctagtaggaacaaatatgttattaagttctagtggattcacaaccatgagctccaagtgagtcccataaacaagcattaaaacccagggtaaataactggagatctaaaactgaatttgtctgtttcccattttcatactagcctctgtatttcagtgtagacgatcaaatgttttgaaaggaaaataatcagtcaccatcactggttccttctgtggagcaattttgctttcactttggtcttaatagagtaatggagtccggacaggagaaaatacataaaagtcagtattgttcttaaagacaaaagaaagatcaaataaaggaaaaagcacacctgtgaaaataaggtcagtcaccaaaagtgattcatcactcaagtggaat

SEQ ID NO: 842555 - DNA, 541 bp, Homo sapiens
tttgcttctataaattaaatcaattttcttttcttaagagatggggtctcactctgtcacccaggctggagtgcagtggtgcaatcatagctcactgcagcctcaaactcctagggtcaagtgatcctcctacttcagccccctaagtagctggaactaccataccctgctaaaaatcagttttcttaacaagtatgataaaatgttttatttacaaactaggttactcttaggcatactttctgcttcagtttccctataacatgaaagtccttaagattatagttcaagtacaattttagtactattattcatttgtaatttaaaaacttaaaaattttgaaaataagaaaatacaaagaacaacttaattaccactgttcacatctggatatatatacttccacttatttagatttttttttaatatggacaaaataattattcttgtttttgtaaaatgtatctatgttcrtaaaaaataattcaaacaatacaagaagcacaaagatggaaatatatatcacttccactttgcaat

SEQ ID NO: 842556 - DNA, 613 bp, Homo sapiens
taaaaagtcagaaaacaacagatgctggtgaggctgcagagaaaaggttatgcttatatactgttgttgggagtgtaaattagtccagccactgtggaaagcagtctggagacttctcaaagaactgaaaatagagtcaccctttaatccagcaatcccattactgggtatatacccaaaggaatataaatcattctaccaaaaagacacatgcactcctgtgttcatcaccgcactattcacaacagcaatgacatggaatccactcatgtgcctatcaatggtgaatttgataaagaaaatgtggtacctgtataccatggaatactatgcatctgtaaataaagaaatcatgttctttgtagcagtgtggatgcagctgaaggccataatcctaagtgaattaacaggaacaaaaaccaagtgccacatattctcatttataaatgagagctaaacattgagcatacatggacattaatatgggaacgasagacactgtggactactagatgggagaggaaaggacaggtcattggttgaaaaactacctatcaggtattaggttcactacatgggtgatgggatccataccccaaaccttagcatcaca

SEQ ID NO: 842557 - DNA, 614 bp, Homo sapiens
aatcagggatttcttcttggtttggatccattgctggcgacctagtgtgatcttttgggggtactaaagagccttgttgtgtcctgttaccagagttggttttctggtttcttctcatttgggtagkctccgtcagacggaaggtctagggttgaaggctgttgttcagattcttttgtccctctgcgtgttctcttgatgtagtactctccccgctcttcctatggatgtggcttcctgtgagccaaactgcagtgattgttgtctctgcttctgggtctagccacccgaggaagtctacctggctctggtctggtactgggggttgtctgcacagagtcctgtgatgtgaaccatgctgtgggtctctcagccgtggataccagtgcctgtcctggtggaggtggtgggggatgcagtggactttgtgagggttcttagctttggtggtttaatgctttattttagtggtcgttggcctcctgccgggaggtggcgctttccagagagcatcagctgtggtattatggagagggacctgtggtgagcagggccctagaactcccaagattatatgccctttgtcttccactaccagggtgggtagggaagga

SEQ ID NO: 842558 - DNA, 506 bp, Homo sapiens
agcaccatttattaaataggggatcctctccccattgcttgtttttgtgtcaggtttgttgaagatcagatagttgtagatgtgtggtgttatttctgaggtgtctyttctttctcttccattggtctatatatcagttttggtaccagtaccatgctgctatggttactgtagcctttagtatagtttgaagtcaggtagtgtgatgcctccagcgtgttcttttggcttaggattgtcttggctatatgggctcctttttggttccatatgaaatttaaagtaattttttctaagtctgtgaagaatgtcaatggtagttttatgggaatagcattgaatctgtaaattacttctgctttgcctactttttaacgggtttgtatttctcttgtaaatttgtttaagttccttatagatgctggatattagacctttgtcagatatacagtttacaaatattttctcccattctgtaggttgtctgtttactctattcatagttt

SEQ ID NO: 842559 - DNA, 633 bp, Homo sapiens
caacatggttgtgacacaaagaaacacttggtcttctttttaataatatatctttgtatcatcaatcaacattttcttcctgttctcttcataaatggttatttctttgcttttattaattgttttcattttaaaacatttctttaaagaaactcttaatttcctggctccactgttggcattcatgactaataacgttttggaagcttccacgtattttgctacaaaggaagccagttcaggactattaatttttctcatatttattcagttatagttaatcatatgtgtcaagctaaatgagttcaaatctgaataatctaactcctctcttgttgtttttcacgtgtcttttacaaacacataccaaatatttatctagtttttaaagggagggtaaagttgtacttccatagttagctaatgagaagactttaataaattatatttaaatactagtactgattttttaatcaggttttatcagttttgtagaaacttaaaaagtgacttattttaaatttataactttgtattaaatgtacaagttagaatgtgatataaatrtatgtataaactaagcatctaaggttaagtgtgaaaacacagcaaatttatattcgtgatatttga

SEQ ID NO: 842560 - DNA, 571 bp, Homo sapiens
aaatttcaaaaaagatgtacgctaatggatgtttytgaaacattccatgaaaacccagtcagtgccaaaaaagatatctttcctcaaatggaaagatagaattaggttaattttgaagattaattttaaaagaagacaactaaagagaaaagatgaaagaataaaggagtaatataatcataggtagatgtttgttataatacattgggtctctttctgtatatctaggggttacctgtgcctccctgtttatagctcaaagtgtccagatagccctagaactctctcctggatgctgattggattccaccaggccccttgggtctcttttgtccagctgggtgattggcacgttctggagggggatggagggagggagtacattcaccatgcccctctgttatggacattgggctgaaaccatatgagtttcttagcccccctgcatttctaatccacacatactggactgctgctataaaaatgcatttgtgtaagataagttatatttagcaacaagtgacaaaaaagccaagtaaattgtctcatttactttaaaagctgaaggcaa

SEQ ID NO: 842561 - DNA, 542 bp, Homo sapiens
gctgcttgaataaccgtgctaatctgcgcgcatcccaatgggagcccgtcagttccatctctaatcaggtcgctactctcatttagagggtttaatgtaccatccttcatagtgggacacgccactccracccatgggctgctaagaggagctgcttttccctcccctccgctctttttcctctgcatccacccgctcaagagtctcacctggacatttggagggcggtgctgacctcctccgagacgtcgtcacctacagcgccaccgcgctggtcctaaggtacaggtctgccctgccccaaacccttcaagtcttcaggccggccccaagctacagctcaaggctcactttgaccttgcgtggccctgtctccatagctcatttccggcatcgtcctttctggcgtcccataaggtgcccagcataggacgtttgacggatctccagcactgcagcttctcagcctcggcactgctgacgtttggggctggctcattctttgcagtggggagggtgccctgtgcattgcagcgtgtcga

SEQ ID NO: 842562 - DNA, 645 bp, Homo sapiens
atctcattctctcttgccaccaccatgtaagaagtacctttcgcctcccaccataattttgaggcctccccagccatgtggaattttaagtccaattaaactgctttttcttcccagtctcgggtatgtctttattagccgtgtgaaaatggactagtatgttaagttggtaccagtagagtggggtgttgctgaaaagatacccgaaaatatggaagcaactttggaactaggtatcaggcagaggttggaacagtttggagggctcagaagacaggacaatgtgggaaagtttggaacctcctagagacttgttgaatggctttgacaaaaatgctgatagtgataagaacaataaggtccaggatgaggtggtctcagatggagatgaggaaacttgttgcaagtggagcaaaggtgactcttgtcatgttttagcaaagggactggtggcattttgcccctgccctagagatctgtggaactttgaacttgagagagatgatttaggatatctggcagragaaatttctaagcagcaacacattcaagaggtgacttgggtgctgttaaaagcattccactttaaaagggaaacacagcataaaaattcagaaactttgcagcttgacaatgcagtagaaa

SEQ ID NO: 842563 - DNA, 536 bp, Homo sapiens
ggaagattccgggcttcagctagggaaaaacgacaaagtgtaaggaatcctgatttcagttttctgggaagccctagcctccttcccttccctcccactttcaatgccaattcaggtcttgaccctgaccctatgcatccagggatctaagtgggatatcccaggaatttcttctgagtccctccagaaattgcccttctcccatctccattactccagagcaccaacccctctggttacctaagtagtcagcgtatgtcccataagcaaacactgtgagcagccggaaggtagaggcaaagtcactctcagccagctgcgagaatgaggaaaaaggaggtgacgggaagtcttccctctccaccctcccagccttaccctgtttggaactccactttttggccccatctttcccggccaatgttaactctcctggctcaccaaaaggagttctctgcctctctgatcactcttcacataggaagggctcatttmcaccttcaggcttttgtttacactattctcccaaaccacaa

SEQ ID NO: 842564 - DNA, 547 bp, Homo sapiens
acttttttttttttttttttttgagacagagtctccctctgttacccaggctggagtgcagtggcgcgatcttggctcactgcaacctccgcctcccaggttcaggcaattctcctgcctcagcctcccaagcaggtgggattacaggcgtgcaccaccacaccaggctaatttttgtatttttagtagaaacagggtttcgccacattggccaggctggtctcgaactcctgacctcaggtgatccacctgccttggcctcccaaagtgctgggattataggcgtgagccactgtgctcagcttcattctggcacttaatcaatcaatccttgcagaaggttgctacctaagaatatctttcaacaagattatagacccagtctcaggtatcccacagagctatgcagtaattgcctcgcaagaaatacttgctaaataaataaataattcagatttctatccattcatcttmtctcttcaactggaatgcaagcttcagaagggtaagctccatgcctggtgcttttcttgtattcccagaccat

SEQ ID NO: 842565 - DNA, 596 bp, Homo sapiens
atgcaatccccatgacagaatgtgtatgtagaagtcctcataaaccaggatttcactggagacatcatgaaactgtacccttccatgactggagaattgcacaaatggggcatcatcacacaagcacttgttcatcacacacacactctggtataaatcctcagtactgttcttggacatctccccaaataccttttccgcatgctcgctcacatcagtagctccactgcctctgatccttttacatgaatttatttctatacaatgttctaaaaacaccccttggtttgtacataagtttttttctttttttcttcatttttaaattactttataacaactggtttcctgattttttttttaatttcctttcctctgaaatctgccatgatttaaaaaaaaaaaaaaaagacaaaaagaaaaatgctgtggctagaggacaggggtggagagagggaaaaaaaggacaaaaataaacaaaacatcaaatatgaaaattctcagagataatgcatttataaacacagaaatggttacaacaaagatggccgtgatgagtgrgtataatatatttatatatatatatttatatataa

SEQ ID NO: 842566 - DNA, 517 bp, Homo sapiens
aatcaggtgtggacccccagctctatgtcacaattaccatctccatcatcattgttctcgtggccactggcatcatcttcaagttctggtaagctgggaggaggaaggtgctggtggatggggacggaatgtttggcagtcgaggctctaaccacgaggggcagtggcagcaattttgctggggggtgggtgggaaatgctggatgaaggcaagaccttgggaaaagataattaaggatttggctgggggaagacggtgagaaatcagggcagattctgtctcccagggaaatacaaggataagggagggcaggggaattattcctgtgcattcctggtgagcctcccctgcccctacttcctccaagacagagaaagctgacccagtctgcagagcccttcttagggttgcctggggggagcragaaaacctggagctttctttgcacacatttaataatggatcactcagtccttcacactttactgagagaatcattagactcaggtgtccaag

SEQ ID NO: 842567 - DNA, 584 bp, Homo sapiens
aagaggacagaggactggctctattgcacatactgctaacatcttaaatatctagtagagtttgtccccaatcagtattttttttcatgacaagatacatctaagttttattctaagagttttacaggcacttttaggtcttacatttaggtctttgatccattgtgagttaatttttgtatatggtgtgaaacccttaagtctttaaatcatcttgaaatgttttttgtgtatctactcctaggtgatcatctatctgcaggggacacccaaatctttgggtgtaagatagaaattcaatttcattttttcctcatggttaacccatcattccagtaccataaatgggagttcctcttttcccacaaatcagtcacagaaaatctgtttctgggctctgggtagtctatttgtctgtcaccatcccaatttcacattatcctagttacttgagctttatagaaagtctggatttatataggacaagtatgctctacctcattcatttttatgttattcttgtcytcccaatcagtatttgttgaacaaacagatgaatggatggtatctgagctctcgaaaaa

SEQ ID NO: 842568 - DNA, 573 bp, Homo sapiens
atgagagatgcccaacacatccctgaagagcaaagttacagcagaatgtgagggaagagccagcgagagaggtgctcatgttctcacgccccagcctagcccagccaagtgctcacggcctgcacctgscagtgctgatggtctgtccgtaccaaggagatgtgggcttgaactctgaggtacgaagactacaggtggagacgaggaaaagtgagaaggtaacttcagaggagacagcagggttgaattgaacaggaaaagatcaaaagtacagccagaatcccacttggtcttttttccattctcctttattccataaacacctagttacaagttgcacaaatcaaaaaataaaggcagagaagggtgtagggaagattcttttgatgtgtgtgggcaggaggagggagagagttaggaaccagtctgctccttccacagccctagatagggctacggcccctcagtgggggctctgaggaagaggtgggcaaagatccagggtagctgagggatggagggggcccctaaacccagagctcaccccaaaatgcattgacccttcaatgcatg

SEQ ID NO: 842569 - DNA, 646 bp, Homo sapiens
cctggaagcaaactatgttggtactatggttcctaaatctcatctctacaaaaacttttcagggttgtatcttttttcttttttctcggtaaagaaggttgttttctttaattaccttgaatttaataagtacagtcttatgattgctgacaaaaaaaaaaaaaaggaaaagaaaaagaaaacttgaggattggggaaattaaggacacatttttttttcctgggatggttttgatgtaacaccagtttgtaatcttcttactgtgaattaatcttcactgtatctgataataaaagagtttataataagttagaaagcatatcccatcaatcacatgtaaggttttgactaaactaacggataaagatttgtaaggaagttaggtgattttatcttactgtccattgtatttttttaatttggtttttgatgttactgtttaaattataccaggttaacgaagggtttgatttttgtttcaaaaatatatattaaatagaaaaactgagtacacatcctaatacttactttgacttggggacagcaaagcmcaattataggatcacactttgagaagtaaataaactgtttgaaaattgagtctgcaaagctagacatagtaacaacaggaaacatcccacctac

SEQ ID NO: 842570 - DNA, 706 bp, Homo sapiens
acaaacacaatttaatctttatcatatatgtgtatccattaatttatttttggccccatccttaacagttaaacatattatggcagtagtttttgtttttgcgtgcgtttttctcctaggtctggaataactattcttggccctgtgggtgcacattaaaatcatgtaggaccaggccctaaattttaaatcaaaatctttgagggtggaggccctggtattttttaaagcccctcacgtgatggctttacaaaataagccacaaaagcactggtagatgttatctaccagtgatatgcttttgtggagttttgtttgtttgtttgtttttgagtcaagatctagctctgtcacccaggctggagtgcagcagatcgatcatgggtcactatagcctcaacctccgggcttaagtgatcctctaacctcagcctcctgggactaaaggctgatgccaccatgcccagcttatttattgaagtccagccagtatcgagaattactgtgctagggctatgatcccctgtgttaacattttcttaccttgctcttgaaggatcgttaaacaccagttcagcgggagttggagggctgacgacrctacagaatctggactctatgacttgttttgggagtaacaggagggtgtgatgaggaatttctgtgaaggtgacttctggatcctcagcttcaattactgaaacta

SEQ ID NO: 842571 - DNA, 336 bp, Homo sapiens
tgaagaggcagacattggataaataacacaaaataatacatggctcagagttttgaggagtgctaaaacagatgcagttatattgagaataaatcaggggccagaatttagtttagcatatatggagctcctttttgaagaaatgacatgtgtaactaaactctgaagggtgagttgaagttcgccaggtgaagaatggatggttagccttctagagaaagtacatgcaaatatytggagaaaggaaagaacttaatacagctgaggaactgaaagaaagccacaggggctaaaacgcactggggaaatagcataagataaaggtgcaagagtagg

SEQ ID NO: 842572 - DNA, 582 bp, Homo sapiens
ttaagacacctctaacccaggactcatatccagaatacataaagaactcctgcaaataaacaatagaaagataacccaacaaataagggagggcaaacacatctactttaggacccagcagctcctcttctagttacttacacaagagaaattttgaatgtacataacaaaaaggtatacagcagccttattcataaaaaccaaaaactggaaaagcacccaaatgtccatcaaaaggtgaatagataaataaattgtggtatatttgtaccatggaatactgctcggccataaaaaatgaataaattactgatatacagcacataatgatgactcaatctcaaaaacactatattaagtgaatgaaggcagagccaaagagtaaatactgtatttttccatatatataaagttcaagaacaggaaaaactgatgcacaatgatataagtccaaaagcagtcatctcagggatagagggttgactgaaaaggagcactgtctataataacggaaatagtctatgttttgtgtggcagttacacagatgtaaasaattatcaaaccgatcaaatgaacactta

SEQ ID NO: 842573 - DNA, 552 bp, Homo sapiens
aagagctggagaaaggagagagccaaagaatgtctgggcaggaactgaggtgaacagcggagaaaggaaggcgtcttcctgggctgcttcagccttggagtttgtgccgacagcaggttttctgtcctagagtggatggcgtgcaggaagtgtttgacagatgagatggcccatggagcggtgacctgggatcagagcaggcctgccaaatggggccaggtggctgcccagcttccctggagtgagggtttcagaccctcctccctcagatatgctaatgaggctcagtagagagggtgttgccagtgcctcagatctgcagtcttgggaatcggctttgggctttctggagggaatgcccgctgtgtgactcggtctcagtcctgggacctctgccgggcagtggcgaggcccacttcctggaggtcaccatttagccctgggtcatctttcatttcctccttgtgccaaggayttcaaggccagacataagagtgggaaaacactagtcagtcattcaataataaccttaccatattcagccagaaacat

SEQ ID NO: 842574 - DNA, 582 bp, Homo sapiens
aggtaacttaaaaaaaaaagtataagctgaaggtgtacactttaaamtaaaaataaaaattatagtatagtatatttatacataaaccagtagcacagtcatttattatcatgacgaagtattttgtaatgtacataactgaaagtcctatacttttatatgactggcggcacagtagatttgtttacatcaatatcacaacaaacacatgttgcgctacaatgtcatgatggctatgacatcactaggaaatagaaatttttcagctccattataatcttacgggaccatcattatatatgtagtctgttcactgaaatgtcattatgcagtatgtggctatattttcttgaggatttttgcatctatatttatcagggatttgaccagtagttttcttctgttatgatatttttggctttcagggttcccagcttcctcctcttcagcatgtatgtcgtccctccatctgctctcaatgccttccctctgaagattggctaggaatgcaccagtcttgcaatcctcttggtccctcagtgggagatattcctcctggcttcatctagtcatccatcttgg

SEQ ID NO: 842575 - DNA, 661 bp, Homo sapiens
atccattgaaaggaatatagcaggatccagagtctccacaacatatacttaatagtgtccaggaattgatcaaaaatcactagacaggtgatgaaatgaaaaaatataatcygaactcaaggaaaaaattcatttaaaaaaaatcaacccaaggatgatccagatgttgaaatgagtagataagaactataaggcagctattatacatacgtccaagaattttaaatgaaaaatatatacacaatgaatgaacagatggggaatctaacccccaaatcagaaactgtgaaaaaagaatcatctagaagtaaaatatacactaactggaatgagattaacagcatatcaaagatagcagaagcatctgggaacttcaagacagatcaacagaaaccatccaatctgaaaagcagtgacgaaaataagacttaaaaaatagaacagagcctcccagacctgtgggacaatatcagtccattcaatacacttatatttagagtctcagaggaaaggagagagagaataaggcagaaaagacgtgaagaaataggcctatgacttacagatttagtgaaagacaaaaatatagattcaagaaaatcaccaaaacccaagcagggataaatagaaagaaaactacctctaggaaaactgctaaaat

SEQ ID NO: 842576 - DNA, 654 bp, Homo sapiens
ccaggatgaaatgaatcagaagcagaatgactctgccaggggctgagacgctaaagaaatttcccttactttgtcayaaaggattccctaaatcatatcactatgtgttcaatggcatcgtctttgtaaatgtaacttcacattccgtgtgcctatttgcatctgtttgcaaatagaagaacacgtagcactgtctgagatcatgaggacatttagtattaggtttgtgcaaaagtaattgttttttgcatttaaagtaatggcaaaaactgcagttacttttgcaccagcctaatatttacctaaggattctagtggcctggggtcccagatgccttcaagcagttcagcagtgcaacatatatgtttccctttccttcatggctaatccaaacattgtatcctaaccccagcatctcaagcagggtggatagaaaagggcagtccttttaataagcaaagatgaatccttccagaatcttttcagaagactttcctttctattggccctaccagagtcacccaggtacacctagtaacaaaagggctagagaagtggctctgtccttcattctgggctggatggaatgccacgcgatgttctgctggtgtagaagagaatgggagaagtggaggaagggatctcaggaagac

SEQ ID NO: 842577 - DNA, 588 bp, Homo sapiens
tcaaaaaatcatttttagtaatttctacaaaaccaagaaaggacaagaagaagaaaaaaaaagaaatacagaccaaaagaacaccacagagaaaataagcctacttatatacaaaaagcataaaatgtaayatatttagcacctccaaataagagaaagagaagggttatttataagattattttgaaaaagctcttctctaaaaagagggacagatctttggaacaaaagatgcaaacttgaaccatattccaaaataaactctagaaggaagggtgaaatataaaagagtcatagaaaagcaacacaaaacagaatagaatatttataagtattctgagggataatatctttttacactttaaagcagggaagaaatgaaaatggaaagactgacagcttgggattcatacaagtttaaaatatctgtccagtggaagaaaaaaaatagtcacggaattaaaacaaaatggaaaacagcattttggaattcatttgcctgaaatgtgacaaacaaatggttaatctcactgctacctaaacattcattcatatttataagaaaaacaattttctcaagtgtaatat

SEQ ID NO: 842578 - DNA, 543 bp, Homo sapiens
gtggagtctatgagttattgagctgacaagcctggggcagtgtcaggggtaagagccaatccctaccttgtggcttttgtcccatgttcacaggactagggtgaggtgttggagggagagaggatggcgagggagctgggcagtccctggatgagcgcatcctccatcagcatcgtgtcttctgttctgaaggctcccaagacagtacctctgtgagggactcatatcagctgaaagttaccttcaacagaagtagaccttagaaggccaatgaattaaattgcaaagagagatagaactgctccagagcctagcatattctcattggcatgatctgtgcaagagttccctgttggccatatgggaagccaggatgatcagaaggttgctctgggagcctatattcaggacaaggggagccggatgaatccagcctgtgatggcargagtctgggatggtgggtgcatctctactgcctgatggtaggggtggccttgcctttggggctctcattctctggttctgtgctgacccacagccct

SEQ ID NO: 842579 - DNA, 633 bp, Homo sapiens
gccactgacgagtccaccagctcctttcaaatttaatttcaggggtcaaatgcccccttctatttggggctcttcctatcagaccaaatgccttgtttgtagttctgatgatttaggctggaaaacaccgttttctgccaacgatgcagtcagctgcatagaacaagctgccattgttaattaggtaagttatgtggtcaaggaagtaccttttactggtggtctttattcagaataaggaagaggggacttgtgatggagccacacagagaactagcaggtcaccagccagagcactggaccctaggagaggacttgggctctctgagccagttttgactgcccacggaagatgtctccacacattccccattgcttgggccaaaaggcagtggcagaatctctggggccgtgggaggagccgaagaacagacgtggggagggggaggattgtgatctggggaagagatcggcacacacgcatctttgttggacctgaagggatgctatgttgttctttgattaacacacatgctctgtgtawtgtcacttctctggtctaaaacccttgacactgggacttcccatgactggaggatcaagtctgaattttataaggtggcttcagaacac

SEQ ID NO: 842580 - DNA, 636 bp, Homo sapiens
aaataagtgacttacagtcacgtatggactgacctggtagcaagttgggacgtgcctttttaaacattttctcacactgagcacatcttcctctatctgttattgttttcctaataygtggcttggaagggagttagacagctctccaacaccgacggaagtgcggaaacccagcatccaaaaaatgactggcagtggtaaaatggtctactggctgaaacataccacttttcatcacagcaaatgtttggccaagaaataatcatcagtctttctccaggaacacctgtaacctcggggtttttttcttttctttttttaatgagagtgttattatactgcagaaacacgtcttattttatgatcagccttgcagcttcacgagaaaagttcatggaaactcccaatacattaaaaacatgcacttgacattctctccacaatttttacttgtacatgaagcaggtgctcacattcctgctgctgtttttctaggactgtgctgtccaatatagactccaccaaacatacatggctatttaaatgtaagtgaattataaataagtaaaactaaacattcagttcttcaggttcagtaaccacatgtggcttgtggctaccacgttggacaatgca

SEQ ID NO: 842581 - DNA, 636 bp, Homo sapiens
aaataagtgacttacagtcacgtatggactgacctggtagcaagttgggacgtgcctttttaaacattttctcacactgagcacatcttcctctatctgttattgttttcctaatatgtggcttggaagggagttagacagctctccaacaccgacggaagtgcggaaacccagcatccaaaaaatgactggcagtggtaaaatggtctactggctgaaacataccacttttcatcacagcaaatgtttggccaagaaataatcatcagtctttctccaggaacacctgtaacctcggggtttttttcttttctttttttaatgagagtgttattatactgcagaaacacgtcttattttatgatcagccttgcagcttcacgagaaaagttcatggaaactcccaatacattaaaaacatgcacttgacattctctccacaatttttacttgtacatgaagcaggtgctcacattcctgctgctgtttttctaggactgtgctgtccaatatagactccaccaaacatacatggctatttaaatktaagtgaattataaataagtaaaactaaacattcagttcttcaggttcagtaaccacatgtggcttgtggctaccacgttggacaatgca

SEQ ID NO: 842582 - DNA, 587 bp, Homo sapiens
cccagtggtagaattaattatgccttaaaagaggggctcagatgtacctttgaggaaacttttgatcttgcaaacagtggttggctgaataatggtcccccaaagatgttgaggatgtaacctccagaacctgggaatgttactttatgtggcaaaaaaactttgcaggtatgattaaattaagaatcttgagatgtgaggattatcctgcattgccaaggtgagccttaaatgttttcacagtgttcttgtaagggataggtagatttacctccagatgaaggcaatatgaagactgaggcaagatgcaatgctgctggttttgaagatgaggaaaggtccacaacaggaggaatggaagaaacactctagaggctggaaaatgcaaggaaatggwttctgccctggagaattggaggtcacatggccttcctgacaccttgatgtaggtccaatgaaactgattctagacttctgacctccagaactctaacggagtaaaggtgtgttgtttaaagccagcaagtttgttaccgcagccataggaaatgaatacacagactcatacccattcacgaagaacagct

SEQ ID NO: 842583 - DNA, 611 bp, Homo sapiens
tcaataacaaagattttcctcattctcgtccttatagggatataacatttcattgtgtgtacrtatcatcatttgtataattagtcccactgatgactagacgggtttccagtccttctttattacatgcaatgctgcagtgagaaatcgtgtgtgtactcccattgacaagtgtatctactgcgtaaaattcatgagacaggattgtggaatcaaaggtatatgtatttgtaattttgatacctaatgccaaactgcttttcttacagtaccaatttacactttcttcagcggggaaggattgacaacccattgtgtttttaactttttaaaatttttgctaatctgataggtgaaaaatcatgtatagagtaaaccatatattccccatggatttgaaatgccccttcattcataaacaaaatttatgaatacaaaatttatgaatacataaatgtattttagttttttatagttagcccttccaccattattcattccagagagaaattctctggctatttttacttacatacttttccatgtaaacgttagaaaaaaaattcctacataggaaaacaaaacaactggtattttcattgggacaatgt

SEQ ID NO: 842584 - DNA, 608 bp, Homo sapiens
atatctccctgcatcattgatacttgccttttatcatggcaagacttctgggcttatagtccmctaacagctgcagtcatctcaactcattcctggcttggaagcgaaatatctgacatttcattctgatttacatatcatcatattagaattcctatttttttattgcgcattttctcagggcagattttcatgtggtgaatatccaggttttagttacttagtcattctgagtttttttttaatttccttgtttaaaaattttaaaactatctttagatgaataaatgtctgctattcttgcatactgttaactactcctgtctatttcatattccaaaagccacgcccaccattatttttaacacatgcctctatctctggacttcactcttggcagtggagtctgaggctgctgtgggaccacagacatccataagctttctaagatacctttcgtctgactgaaagggtattctagttgccattttattccttccacaggtttttaaaagttgttaacagcccaacttttgctttggtctttaagccttggagcaaagtttagagtgagagcccatgtcttgctggggtaccggaacttgacc

SEQ ID NO: 842585 - DNA, 536 bp, Homo sapiens
aacttttattttagatacagggggtacatgtgcaggtttgttacatgggaatattatgtgatgctgaggtttgggtatggatcccaccacccaagtagtgagcatagtacccagtagggagttacccacccacaccccccttttttcctcctccctccagtagtccacgtgtctattcttcctatatttatgtccatgtgtgctaaatatttagctcccacttacaagtgagaacatagggtatttggttttctgttcctgtgttaattcacttaagattatggcctccagctgtatccatgttgctataaaggacatgatttctttcctttttatggttgtttagtattccgtcatgtatatgtgccacattttctttatacaatctaccgctgatgggcacstgggttgattccatgtctttactattgtgaatagtggagcgatgaacatataagtgtatgtgtcttttaggtagaatgatttagtttcctttgagtatatgcccaataatgagattgctgggtcaaatggta

SEQ ID NO: 842586 - DNA, 620 bp, Homo sapiens
aggatccgtttccaaaaagtcaccaagagagtagttcctgtacactaaccctgcccccagaatgctgagttgttttctattgaacttagaacacgaacccagcctttttctcaacgacatccttctcccaagamacaatgtggcccctcatgccaacgtgtgtgaactctactccccaccccttaatcttcctaacatgcagagatcccttagatttaaagtgcaacccctgctatgaatcaataactttagaaggacttaccacagaaagagattagcatgagaaagctaagcagatatcatcgcaacagttcactttaaaaataccaccactccttctatctgtgactacagatgcctcctcacagaagtggggcagagatcatctagccagaaccaactagcaggtcatctgcgcctcccccgtccacgccaattccattccccgctctctcctcatgtgctaagttctcccacgttcttacggtgtcagcgaagaatttatacatgcctctaaagtgactcactgcatgagtattactgtttatttttagcaccttgttgttttgcctataaatccctctaaatgtcatttctcactgcctggcccctttcaggac

SEQ ID NO: 842587 - DNA, 576 bp, Homo sapiens
tgttacttttgagttgagatcattcatcttccaaattgctgatttaattaaattgcttgatgtccccagttgagtatagtgtagtatgttctgagtatctcaagtatggtttcatctgaggagattagagaaaataatggctcaaccatgtgaatttattttggttgcctgttatctgggtacctgatctatttatctctgggctatgctgtgacttctaatttaagcttagctccagtctataatctgtttaaaataaagaatgccctaacactatggtgttaagatgaatgaatgaacagaaactcaaaagatcggcaaggcgcagtgctcacgcctgtaatcccagcactttgggaggctgaggcaggtgatcacctgaggtcaggagttcgagatcagcctggccaacatagtgaaaccccatctctactaaaaatacaaaattagcctggcatggtggcggacacctgtaatcccagctacccaggaggctgaggcaggagaatcacttgaacaacccgggaggcggaggttgcagtgaccygagattattccactgcactccagcctggg

SEQ ID NO: 842588 - DNA, 501 bp, Homo sapiens
ttttagtagagatggggtttcaccgcattagccaggatggtcttgatctcctgacctcgtgatccacccacctgggactccmaaagtgctgggattacaggcatgagccacggcacctggccaagaaaattttaataataaaagtaaatatttagaaattataaactcaatattcttttagctaaactgctagatacaactagaatagttcactgctctttctagacacaaactgcacagccagtttctaatttgttgcgtagttacccataaactgaactgattaatttctctataaaagagtgtcatccctccagaacagactctgagccaaggagtatcctatgtgtgtatttctggcattttttttttttttttgagacagagtctcactctctcgcccaggctggagtgtagtggcgcaatctcggctcactgcaacctccacctcccaggttcaggcaattctctgcctcagcctcctgagtagctgggattaca

SEQ ID NO: 842589 - DNA, 629 bp, Homo sapiens
attattctacagttttgatttctgagaatgctatgccatcaatatccataaaactcaactcatccactgattcttaatgttaaataaacmcctacacttatccttggcccccatctgagttcaccagaagctacagtagactacttaaatgctgaaatctcccatctcaggtgcctctctgcttccctatctgaaggattctctgacatcaggagagctgtacctgaaggaccagtattgctgaatctgagcgcaaacctaaaccaatgttccagcttcccaagagatgttaatcccatgttaatatcccaagagattaatctaaagcatatgtcacctggtttctggcattcacctgaacatccatgcactttgtaatggctttcccccttccttccctttcgttcgacccttccaccttccacaccaccactcctccccaacgcacactctctcacatgttcttcctggaattaccttctgaataaacaacttgctcccaatgtccttgactctggtatgctttggagtgacccaaaactagggtttgtttgtttgtttatttgttgtggattaaggggaacttagcacattttgcaaaagtttagcctcttatgtttttgtttcta

SEQ ID NO: 842590 - DNA, 636 bp, Homo sapiens
ttattattaaggtacataatgtgatgactctagtgaaaacctaaaaacaaaaaaatcctctatattccattttagaaatgtgacatattagacaggcatggtggcaaatgcctgcctgtgctggggcaggagaattgcttgaaccctggaagcccaagttgcagtgagctgattgagccactgcactccagcctgggtgatggagacagaccctgtcttaaaaaaaaaaaaaaaaaaagaaatgggactttctcatttgggaaccaatacaacactagtccattgtttttcttcaagggaaacggaaggttaacatttttttttacaggaacaagagaaaaatttcatagactagccatccgattctccatgactattggtgatacattctatttaaaggcattatttacctaatatgtccaaacatttttaatgaaagagtttacttccctttagatagaatcacaataatttaacttatgtttatacttatatagatataaccataaaatatggttcacttcatagttgtgaaaaacawtgtgcacagaaactaatatttttctaatgcagtgaaataacggacgtgaaagatactatatctgcacacatattaagaataaagatggcttttga

SEQ ID NO: 842591 - DNA, 569 bp, Homo sapiens
cttttaagacatttatccactggattcaatcatcatttgactaattaatattgagtcttttaaaaaaaattatgacacatgaaaggaaaaagagtttatgtgtttctttatgtacaaattacaacatatgtagaaataaatacaactgaagccttcccagtaaaattaaatcagtctgactaaaagtgcattactctttcccctgtggtataatgagaatggcactagaagaagaatcagaagaactgagttagcaattgtagatatgtggcaattccagagagcagttttgcttagttgcatgaatttggacaaaagaggagaaaatacttggtgaactctataaagttttatccacatttaaggtgttaacagttcaaaatctgagaattacaaggaatatgaagaacagaagatggcagagaaattgacctaacaattgtataatagggcactctctctctctmtatatatatatctctatagatacatagatatatatatggatatatatatgtcagattatatatatatacatatatatacagatatataattgtcagattata

SEQ ID NO: 842592 - DNA, 644 bp, Homo sapiens
tttttttttttttttttttttttggaatactttggcattttcctagaacagactctgaagaagggatgaaagatatattattataaatgtttatttactctgattttttttctctggagttaccctttgatgacaatactgctgtttaagattgagctgtagactgacctaagaaacagaaaataaaagttttattacataatgattatctttaatcttgctgtgaaaacaaagatcattttgagatattgatttaaaagctatgaacattctctccaggaaaaaagaaatgtatgttagttatcgagttttgtatgtgacttcagaggtttaatgaatctcttaaatccattagaaattaagagttttgattatgtgaaatcccagattataacataatcattaagaacaaagaataaggggtaggatgcagtggctcatacctctaataccagcactttgggaggctaggcaaggaggatcacttgagcctaaaagttcaagaccagtctgggaagcacagcgaaaccctgtctccaccaaaaagaataataaaattagctggatgtgatgatgcaygcctgtaacccagctacttgggaggctgagctgggaggatcacttgagccccagaatttgaggct

SEQ ID NO: 842593 - DNA, 601 bp, Homo sapiens
tatttactctgattttttttctctggagttaccctttgatgacaatactgctgtttaagattgagctgtagactgacctaagaaacagaaaataaaagttttattacataatgattatctttaatcttgctgtgaaaacaaagatcattttgagatattgatttaaaagctatgaacattctctccaggaaaaaagaaatgtatgttagttatcgagttttgtatgtgacttcagaggtttaatgaatctcttaaatccattagaaattaagagttttgattatgtgaaatcccagattataacataatcattaagaacaaagaataaggggtaggatgcagtggctcatacctctaataccagcactttgggaggctaggcaaggaggatcacttgagcctaaaagttcaagaccagtctgggaagcacagcgaaaccctgtctccaccaaaaagaataataaaattagctggatgtgatgatgcacgcctgtaacccagctacttgggaggctgagstgggaggatcacttgagccccagaatttgaggctatagtgagctattatcatgccactgcattacagcctgggtgacagagt

SEQ ID NO: 842594 - DNA, 595 bp, Homo sapiens
atgggggtgggggatttgagtggatgggtccttccagcgggcatttgggtcatttggcccgtcgccctgcctgcaggctggcctgcacgcagcacctggcctaggcaccctggaatctctcccttcctgtggcagacacaggaaactcctacctcatcacggcagctgcatgtgtgggtaagcccacggtgatgatgacttctgtactggctgtttttactccttgctttaatgatattagctcacgtggttatcctttcccttctagcaggatttttccacagccagacaattctttgcggtgaggaggccaccctgtgctctgtaggatgtttagcagtatctctggcctcaatccacaggataccagtagcacccacccaccaggttgtgatgacccgactttctcctgatactgcctgatatcctctgtgggtgaattttcctggttaagaatcactatcttacaggaaggtggcaaagatgagagtatcagactgtaagttccgcgagascaggcattgtgtctggtttggtcgtggttgtgtgccaacagatagtagattttcaatacatatttgttgaatgaatgaat

SEQ ID NO: 842595 - DNA, 572 bp, Homo sapiens
cgttctcatctgtaaaatgaaacatcccaattagataagttataaatgacctttcatttttagaattctgcatcctggaattaaagtgcattggaatgagccaataattccatattttcttatattacctaaaatccacatactcttcaataaatttaccaccatagggttttcaaaccccatcaaaaaaaccacttctttcatgtaaatgcccagcagtttatctctttttactcctcagtaccctacacatcttcctaataaagtatataataaaagtaaatcttcccactagtgtgtttatagtgtgaaatacattgttattcccaccatggcagtggtggataaaatatacatatttctctgtctcccacaaccaccctttgatccccagccttttatcagcaaatccaaagtgctaccttctgcaaattagcactacctcctgagaaattgtgccaagttccattaaatgtaattagcattcctgttgtttccttcacmttggagaaaaaaaaaagaaaactctctcttacttactgggaacacacatcatgccaagttgtagcaac

SEQ ID NO: 842596 - DNA, 588 bp, Homo sapiens
cccattataattttcggtggcagtgcatatggcgggtgataaactaataaagctgcagtaggaagaatagttctgcttttatttttatggctatttctttaatctgatrcataattaatgtacaaagttcaacttcgttttggtcagatcccagattactcgaggcatccggaggggttaatattttttggtgcatttgggggtaggaggttgggataaaacaacaaatttttatctatatggaaggatgcttaaccgggattttttttttttttccaaaaagaaaatacttaagttatccttgctttcagagttcatgtccattggaagtgtcaagagattctgtgttcaaacattctcaaagcaccgctttccccttaccccttacctaagagaacataattctaaaaatccctttggggaataattttctctgccttccatctctctcaatgatgtgtccaatctccacaatttgtctggcctcctcttgaactgatttacggttcaccaaaatctgtgagaggatttgccaggctgcagaccaattaattatgtttgctgttagacctgttaggtgttggcatt

SEQ ID NO: 842597 - DNA, 588 bp, Homo sapiens
cccattataattttcggtggcagtgcatatggcgggtgataaactaataaagctgcagtaggaagaatagttctgcttttatttttatggctatttctttaatctgatgcataattaatgtacaaagttsaacttcgttttggtcagatcccagattactcgaggcatccggaggggttaatattttttggtgcatttgggggtaggaggttgggataaaacaacaaatttttatctatatggaaggatgcttaaccgggattttttttttttttccaaaaagaaaatacttaagttatccttgctttcagagttcatgtccattggaagtgtcaagagattctgtgttcaaacattctcaaagcaccgctttccccttaccccttacctaagagaacataattctaaaaatccctttggggaataattttctctgccttccatctctctcaatgatgtgtccaatctccacaatttgtctggcctcctcttgaactgatttacggttcaccaaaatctgtgagaggatttgccaggctgcagaccaattaattatgtttgctgttagacctgttaggtgttggcatt

SEQ ID NO: 842598 - DNA, 604 bp, Homo sapiens
agccccactttgccaataaggaaattgatccttagattaaataacatacttgaaattgtgcagtaagtacatggaggaatgtccatacaatatatctatttaaaccacctaacagtggggtattatggaagagcatatgggagcactttgcaaagtgtcaaccgcagaataagtgcttgataaatttcacattatacctctctctctctctctgcagatttcagtcacttatgaccacagaattaattctaaagaaagcaaattgaaggaggtgtttgcacgtatttttttttccctaatgattctactgtaccctggagcattttcacggtttgtgtttaatcacagaatctcagccatgatgtttctgacaggcaatttccttaatgcatttgacagagatggattacatggagggccattggacgccatggttttgtctgcaaatggtaagactagattagagctatctgggtctagtgcctccagtgatattgcatcctaataattcttakgataacatggatcacctttgtggacacacacattcttggccagatgggatacagtggttttcaagaaaccctgccacttttattacact

SEQ ID NO: 842599 - DNA, 535 bp, Homo sapiens
aactcatcgtgatgaaaacaccataggccctttcatgctttctcygcgctgttgtatgacattatgtgactttgaggcaacttcgttggtggaatctatgttctaaggataatggaataaaaaagtgaatgaggcaagaaggtttaagatggaatatgtagccctgaacttcttgtatgggagagaaaaattaatctatattttgtttaagccaccattatttggggactctctaaatagcaaccaaattgaattttatgagatcagtgtgggaatcacaaatataaatttatttctgaatgtaaaaattgctctgcaggcaacaaagctggaagatatgagagagaggaattggggcaagggttggagagaaagacctctctgaggttaaaacaaagtctggtatatgcacctctcagggagaaacatcccaaaccaaaggaatgccagataccaaagtgagcaacacagcatagcagagaaacaacggagagccaggtagtagaagaggtgaagtcaccagctgaggtgaagg

SEQ ID NO: 842600 - DNA, 655 bp, Homo sapiens
agctagattagttttaaaaggtgatcctgaagtcctgacaagcacagagtgaggatttacgaagtgacaaacagatgccgacgacatttactgtgagatttctcatagctgaattcccagtcctggccaaggagaaatatgcaacaggggagagtgaaaggggcattttaagttgggatttataaacaatcaattctcttcttatcagaaaaaaaaaatggagaggctggagaaaccgtcttaacttgaaacagtagtttattgcttcttacagcatggtctgtttctgttctgtgtggtagtcccacttacagtgcacagagcttcatggccttttgcagccaatttagccccttgcagctcagtgcaatgccatgcttcatcctggcaacttcaagggctttatggaaataccctacagatgtgtaggtgcttttgtacagttggtaactgaggcttcaaatcaccccatccatcttcatggcatttcttagctgatcagcaagaggtgtacgctgtattttcttttatagcatcttcattacctttgtgtcttccgtagctgctcatttttatgtatatggcatcattggccgggcgttatgggggttcctctggtcacrttccggcccttcattctgctagcttcaggttg

SEQ ID NO: 842601 - DNA, 632 bp, Homo sapiens
aatttaatttttgttctctatgtttgtgatatgaaagcatgaccttccaccaaaggatttcccattgtttytgagagtgagtgtatttatataaagaagttttctaaccaaagagaaatctgttggatcaaaaaatagaatgatcagtagggtttagtagctatttaggaaattttctgaattcaaaccaattgaatctgagttcagttggtttttgttaatgtggtgtatcttgttcgattaagccttcattttaaaattaaaggtgtcttaaatggagttgcattgtttgaccttagagagatcaattgtgtgtatcagaccaaacaaaattcaccatattcaacaattgtcctagcacccatctcccctccccactcccgacaaccatcatgacaaaagtgcaggaggaaaattcttgacattagcagacagcatgctctgaagcaagtaagagaaggataattcaatatagtactcgtcagtgggcgtctggtcctgcccatttttcctggctctgacatttcatcatgctgagtgagattccatttctaaacttggtgtcattcatgcaacatggccccaagtataggacaactacttaatctgttgttgctcaaagaaggtgcaat

SEQ ID NO: 842602 - DNA, 584 bp, Homo sapiens
attattctctttggacaaaggtgaggtgatcctggggatcccttggacattgtgcagatactgtgcatgtctttcttaaccaacaggttggggatgacctactgttaatagtcttagggtytatggagggagaagaaggactctattctggaaggcagaacacccagatctaagtgaagctggggaagtgacctaagccctctgaaacacaagcttgctcattttgcaatgaaggcaaggctgaatggatgaggaaaacagctgaatttagtcaaggtgtacatcgtgttttcctttgcgtttgcaaagaaccaagactctgtggtcaacgaagtcaaactcagccaggattcagaagctggctctctttccatagcaggcacaatctgttttgaatacagatccaatcgcagcgggaaccaaacaccttcagagcaggtgatgtggcgctggccatggagtcagcaaatgcaacatctgctgatatggccaacttggctgccctattgttaccaggcccactggtttctcaaaggtcatacctgatcaggaccataatgagccaatgatcaatttccctttca

SEQ ID NO: 842603 - DNA, 623 bp, Homo sapiens
aatctcatacctataatcctgggagagagtgtgtccagaactccaattatgttccccgaaacagataagctcatcatttrcacagatttcaatccaacctaccatctaaattagcaggctttccagaacaggtaatctttcactaaagaagtccagcaattagcagcaagagcaaaaataccaaattctatatagttatggaagcacatatatgcaggcatgtcaaaaatttatatataagaaaatccacaccctacttacttatgttaatgtctggagaatcatcattgctgataaatatttgataaatgaatgaatgatgaagtatcagaagcaacacacatgtctaaaacagggaaatggttaagcagagggtaacctattaacacatttgaatattatataacgattagaaatcaagttttcatggaatatctaatgacatacatgggaaatagcaatggcacaatgctatttttgaatgagttagtagtgtagcatgtgatgtcgattgtctgttttctcccttcctctctccctctatcccttctttctctctttccctccctctatccctctcagatataagcaaaagctcagagacagatggacaagaaggatcc

SEQ ID NO: 842604 - DNA, 428 bp, Homo sapiens
ggcgtgtggatcacgagagcaccagcctagcccacggcaggcagccaaactcaggcctcacctaaggaggcagaccagcatgtccgattcttcaggagaaccagaaatcagtgtccttttgtgacaattcttctgatttataaatgtttgcttaaaggaaaaaaataaaaagaaaagaaaaactcaaaactactgcaggccaaacaaaatacatctccctggcccaaatccaggctgcagatggccagtttgagacctctgctacgtgactgcaggccagccaatcactctgattcttatacttcccaccattactgtgaaacagagccactaccaggcttgytgaggtggagattatgagtggggttctgttttagctcccagctctgctgcttactggctctgagatggtggccaagtagtcagtt

SEQ ID NO: 842605 - DNA, 690 bp, Homo sapiens
ccagatactcttccccaggaagtatcagaaaccacctaggaactcagatcatcctgtaggtactcaggaagacacaacagggaagtgtgcctgakttgttggtcagtgttgtgaaggcgtggtgagctcttacaggctgacgacacatagctgacgtggctgaggatgtagaagctgagtatgatacaagactgtccatgaagggccattttcctgttcagatgatccctttttattctacctcactgaagtgaaactgagttattctagaacacagtggaccaagagaaaactgtcagcaggactcaggcaaacaaactcctggcatcctcctcaataagtcagatacacattctctttttccagagcccatatgaaaggtctgagactctgagggtggcacctattaattatctggtagcagaaaaaacagttggactgaagcttgcaagagtgggtattaatcccattctctcaataactatctctacgaccttgaaccagtcacatctcttctctcagcttcagttagctcatctgtaattgaaggagttgaactgtgcctttgtcctatgggtcatctgagcatttaagcaggaaaagcagctaaacatttttaggagggtgacagggataaaaattagatttcaaccacactgtagttaatattaaatggctacctaatcagac

SEQ ID NO: 842606 - DNA, 648 bp, Homo sapiens
caggctaaattaatccatgatggacaaaaaaatcattggaaaagtacttgctcctgtggtttggagacaggaattgaccaagaagaggcatgaggaaacttgatgggcagatggtaattatctcttgataaggggtgtgcactacaaaggtatatggatttttcaaaactcatggagtgacaggtttaagatttatgcatgttatggatataaatttttatcttaaaaaaaagctgtaaacaaacactaaaccctaatgaataatacgcaggctgatatgtttagggttaaagtcaactaatgtctgcaacttattttgaaatgtacacacacataaatacaatgaaataatggatgatggaggatggatgtgtgataaagcaagtacatattctccttgacttacagtggttccacttgtgatttttcaactctttgatggcatgaaagtgatctgcattcagtggaaagcgtaacttcatattgtaagttgagagctttatgtcagttttgacttcttttttgaygtatgatgggtttatccagatgtagcgccatcataagtcaaggagcatctgtacaacaaaatattaacttcagaatctaggtgctaggttaagtagacattctcatataattccttcaact

SEQ ID NO: 842607 - DNA, 597 bp, Homo sapiens
ttatgcaacaatctttgttttaggtgtagagtatttgggtgcttaggagmaaagtccctgctgtcatgaaacttacattctatcaggggtgtggaaaggacagacatgaataagtgaacaaacagggtcatttgaaatggcaatacaagtgctaatgaatgaaataagacagggtggtgggatatgactgggagctaccttcgtaggagtggtcagggaggcctctctgagaaggagaaattggagccaaaacataaacagtgacaagaagctagttaactcagaggtgtacagggaggtggtaaggaagagagggccaaataacctggagttattacacactgagtcagttattcccattttcagttatttttgtagtctgtttaacaaagggaaaacatctcaacgtggtgtttgtaggtcttttgattagcaagatctttctaacggctgtctctttaacatagacagagcagacctcaagcctagaaccatcagcaagcaccaatagctggctagcattcataatgttattttatttgttctttattttcatactttcttttttattttccacttgccattgtgatatcaaaa

SEQ ID NO: 842608 - DNA, 632 bp, Homo sapiens
catgtcaggttcccacccttctgaagtgacaagcgtgaggctcggccacacccttcagaccacgtgggcctttaaggataaaatgcactggtgcctttggtgcctcgagtaacgtcactcaaggtttccctgcccagggctgccataacgaactagcacagaccacggggcgtgaagaaacaccagtttatcctctcagttctggaggcccgaagtccaaagccaaggtgtgagcagggctggctcctgcctaaggctctcggagaggatgcatctttgcctctgctggcttctgggagccccaggagttccctggctctggtcagtctctgccctgtcttcctatggtcttccccctgtgtgtctctcccgtcttccagggacacctgtcactggatttagggcccaaaccagcatgatatcaccttgagatccttaatgaactacatccgcaaagaccctttttccaaataaggccacatccacagctgctgggtggacatatcttttgagaggccactcttcagccactgcaccatacataggatataaacaatcaacaatgccctaacaaacatgagaggggaacaaaaagacrgatacacgtgagaaagagtgcacaggcacatgaa

SEQ ID NO: 842609 - DNA, 558 bp, Homo sapiens
aaataggggattataaactggagtttacaatgcccctaaaactgtgtgaagtagtttgtgtatgtgcctatgtgtgtgccttatggatgagagtgcaagcttccctgatgggctttgtattataattccacaaaatagagaattagtataaaaacctcccttttttcactcatatctccacttcttgatttcttcctgattttaagtggtcctgggttgatacctaacatcagtcaggggactctgttgctacgcgtggatggaaaaatgaaaaatcctgatccaggtcgtcgtcgcggcactagtggaagcaaggcctggggctcggtggaaggcgcaggagttgtgggttgggtgggatccacagaactgacaagggcatttcagctcctctccctcatgcctgggaaccttggagccaagccctctcagccactgtcatcatgaccaaaggctgttagcaagrgcgggagcctctgacaggcaggagacaatgaactggacctgagcctggacaacctgaatgaaggcccttaaggagctggctgcccttccaaa

SEQ ID NO: 842610 - DNA, 588 bp, Homo sapiens
gcatggtgctgcatgcctgtagtctcagctacttgggaggctgaggcaggaggatcacttgagcccaggagtttgaggttgcagtgaacagtcatcatggcatggcagtccagcctgaatgacagagcarggccctgtgtagaaaaaaaaaaaaaagaaaagagcctgggttctggaattaaccagccctgaaaccactctaagtcaggagttctgattataagaaatacttttgtcttaactgtataagccacttatagttgcagcttgctaaccagcatctccgagcagaacatgccaggtgatagagtatctgcatcatttcaaacttctcttcagaaagctgtcattcactcagcaaatattcactaagcacctattatttgccaggcaatttactaggtactggggattacagtgatgactaagacatggtccctgtctaaagtcactaacattctgttgggtgaaacagacattaaatgactaacacacttaaaatattttttttcaactaaaataaagataaatgctataaggagacatatagggtaataaataaaccatagcaaaggttctggagggcct

SEQ ID NO: 842611 - DNA, 562 bp, Homo sapiens
tctgtcgtagataatgccgtactgaatattmctcccacatatttgcaagtctatttgtaggataaatttctggttgtggctgggtcaaagagcatgtccacttcaaatttgatagctatgtcccaactgcccccaaatatgttaagccatttcctatcccccatccctcattaatctatgaagttgcctggttgccccacatctttaccgacaggactgccgctcaatgtagttacccttgtagaatctgtctgcatgtgcctgtctaggaccatgttaattgtaatctttgggcatttttctcactcattcctaaccaggactgtcactggcaggttaaatgagaacttattcacccagcacagtggcagcactagtagccagcctggggtcagtcttgcctctcgagagatctcatgcagtcaactgggatttattgtacagctttacaaaacattacggcctcagccttgtactgcccaaagcatgcagatgccgcctggtgtattttaaagatattccacatgaactgacccgtttcccacttcttgagttggtatgt

SEQ ID NO: 842612 - DNA, 528 bp, Homo sapiens
acatctgcattttcttctatgcacttatcagaaagatcaaagactttaagactttcactgtttcttctacygctatcttctaagaacttcaaagaggaaccaggagtacaggaggaacatgaaagtggacagggagcatgaccactgaagcacagcaccacagggaggggtttaggcctccagatgactgcgggcaggcctggataatatccaacctcccacaagaaggtggtggagcagagtgttccctgagtcctccaagtaaagcgagactccctttcatggtctgctaagtcacgggtgctttcccaggcactggcattaccgcttgaccaaggagccctcaagcggcccttatgcaggcgtgacagagggctcacctcttgccttcttggtcacttctcacaatgtctcttcagcacctgaccctatccccgctggttattcctttgttatatcagtaattaaacaaacagtaatattaaaggctaatgattaataatggttatactaatgattgataatgtc

SEQ ID NO: 842613 - DNA, 548 bp, Homo sapiens
taatttgtatgttttaaatttgtttacatttatttagacttgtttcttttacatgttttacatttgtttacatttatttaracttgtttctatggcttctattagtggctttgcatgtattctttgctctgttacctactttgtctgatactaatgtaatcatttctgttttgtgtttatattaacatggtatatctttttctgcccttgtacttttaacctatttatgtattaattaattaatttttaagacagagcctcactctgtcacccaggctggagtgcagtggcgcgatcatggctctgtgcagcttcaatgtcctgggctcaagcagttctcccacctcagcctcccaagtagttgggaccacaggcacgtgccaccatgcccagaaatttcattttattttttctagagatgcagtcttactttgttgcccgggcttgttttgaactcctttgcatacctgataatgtttgaataaatgccagatgtgaatttcaccttcttgagtaatgggaaattttgtattcctctaaatattctt

SEQ ID NO: 842614 - DNA, 522 bp, Homo sapiens
tttcataatatggaattgtcataattgtttattcttctttgacagtatgataagcatctttatagatacattgttgtgtataaccatgattagattcctggaaaataaggcaaatatacattttcaaagctttgatatgaactgacaagttttcctttgaagatttatacaaagctgtaactgcttttgagcaattatactcaagttcatggctttacatatattttctcatttaatcttcacaatatctctgagttagatcttatcatctactgtttttacagataaggacatgaagcataggatggttaaatggcttgctcagagtcatacagatagtggcaaagcaaggattcaaagataggaggcaggactctggggcccatactacygtctgtcgccttagaatatggggatattgaagctggaaggaacctacaaccatgtatcagtttctcctgctgttgtaataagttatcacaaacttaggtgtcttagaacaacacatatttattatcttac

SEQ ID NO: 842615 - DNA, 445 bp, Homo sapiens
tacctggtcagttaccccattcccagccaccctgaccaataactttggcagttaaaacaatagcaacctatttattgaaattagaactgtttkggggtagttactttcctttataattagctgtgtgactagttagattaactcactaaagtgactagctgaaaatcactatgagcaaatcattttaacttcaggaactaagttctgatatttgtaaaataaaagccttggactcagtaacaattaataaactataaacttctattaagatttatggtaagaaacataaactttaaacaatttaggatattaaccattaggggaaaagtctaggtcttattcatctaaaactccctatttcttaaatgtttctactaagtcaatcttggagttataaagatgcctaactgatagagcaacttttttggatttccttaataatagg

SEQ ID NO: 842616 - DNA, 622 bp, Homo sapiens
tataagcagaataaaaatgcatgcttgcattatacaataatatgggtgtacatttccagagttctcgtattcatacactgtataagaagatgacaaacaattttgcaatgaaaaatcttgtccatacgtttttggcatgcatcagaatatatctgtattcctgagtcaaagggtttgtgcatttgtgattttgattgataatgccaaattgcctcacagcagtgactttaatatacactctcatcctcagtgtatagaaatgctttcttcctcacacagctctaacaagcacgtcataaaactttttttttatttttttatattttgagatggagtttcactcttgttgcccaggctggagtgcaatggtgcaatctcagctcacctcaacctccgcctcccggattcaagtgattctcctgtctcagtctcccaagtagctgggattagaggcacgtgccaccacgcctggctaattttgtattttaagtagaaatgrggtttctccatgttggtcaggctggtctcaaactcccaaactcagatgatccacctgccttggcctcccaaagtgctgggattacaggtgtgagccaccacatccagccataaaactcttaaa

SEQ ID NO: 842617 - DNA, 528 bp, Homo sapiens
cgccttgttaatttgttgtgaaaattaaatcagataatacacaaaagcatttaattcattgcatgaacccagtaaatggcacctattactatcataaatatggataatattactgataaccattggattatctgccttggaccacattgtcccttcctatacttgattagaccaggcatggagacacgggaccgaaatttgaactatagagaagtgaagttggagctgaggctactagtgctgttcctgggcctctttcctcctctgttaagtgagaataaagtgaaactaaattcaccttcttgctgtgagggtgaatgagaaattgtgtacattgtttcagagaaggtgtttataaaactctgcaagatagaacctcacctccgagttctggctttccagggctccrgtggacacaccatggccccagttcccccttgaaaactggcaacttttggctatgtgtgcaaagtggaggaagctgttttataaagaaattaaacttgacgtgcagcgaaatggaagcaa

SEQ ID NO: 842618 - DNA, 648 bp, Homo sapiens
ttatcttcctgccactcaaaatcctcaattcttatagcacctatttcaaacatcactagttttcacataattctgagaaagaatgagcaattctaaagttcagtcaagactgattatgtcttttgagtwtatttataaatatgaatttacattttggaaataaggatccattaatttattcaacaaatactgagtaccttcagagtgatagacatcatattaaaagatgggaataagctgacaaagtgtagtttctactctcaagtaacttgaagtctggatgtaaaaatagaatgttatgtaataaagtgacatcttttctgagtgatatgcttatattatcgtgacaaggtatacaaagaaatgtaaatcagcctgaaggaaagagaaatgaaaaagaaaagaatagaggagtcatactagaaagacaggtaagtaaggtggtttgggggaattacttttcagtgttggctaagtttgaggtgactattgaacatccagtgggcaactggaatgtgtttccatagttcatgagagcattttgagctaaagggtatagattttggtgtcataattatgtaaattaaaactgaaaataaataatgtgtatgtgaataatatgcataagaataaatggaagaaccatgg

SEQ ID NO: 842619 - DNA, 596 bp, Homo sapiens
caaacagtcacccatcttttcattctctaagtttttkaaatttttttgttgctagttaagtgatgaagtctgtttcctttcaggcagatcacagtttatgtggcttctgcagtgtgacctcctgcatgaagttcattaaagcctaaacctaggtttatctgtttgacagatctagtgtatgcaagtgaataccatcttcacagctagtttacttttctggagtcctgcattcatgaaggtttttgtttgtttgtttttgagatggagtctcactctgtcgcccaggctggggtatagtggtgcgatctcggatcactgcaacctccacctcccaggttcaagtgattctcctccttcagcctcccaagtagctgggattacaggcacgtgccaccacaccctgccaatttttttgtatttttagtagagatggggtttcaccatgttagccaggacagtctcattctcctgaccttgtgatccacccgcctcagcctcccaaagtgctgggattacaggcatgagccaccgtgcctggcctcatgaagtttttagacttcaggtttgcccttactttccaaccaattaatacattc

SEQ ID NO: 842620 - DNA, 623 bp, Homo sapiens
ataaagcacaataaggtaaagtatgtctgtactttgtatgtcattttattctccttcttcctctgccccactaggatgaaaattccatgagagttttgtttgtttcatcctctacttatcascattacctacaactatggttggctaggactgtgtgtgtgtgtgtagggacttaaaaatatgtgttgaatgagtgaatattcaaatgagaacaccctccaaatatcccaagggttagagaatgttgctgataagactagggttatcggttttatgcttcagactaggagagacaaatagatttcatcatggcttttttagtggctgcctggagccctgcgtgaaaggagtgatatgatcataaaaatgagtgacatgatcgattagcaatgtctgcccttgggcatcagaaacgcccactgggataatggcattatgccaactattcgtcactcctgcccctaaattgttacataattaccccctaacttttcactggtgtctacctttatacacacacacacacacacacacacacacaccactaaacaaaagtctagcatggttcactctgttttaacagatagtggacatttttgagatatcagctaaaatatttctac

SEQ ID NO: 842621 - DNA, 623 bp, Homo sapiens
ataaagcacaataaggtaaagtatgtctgtactttgtatgtcattttattctccttcttcctctgccccactaggatgaaaattccatgagagttttgtttgtttcatcctctacttatcaccattacctacaactatggttggctaggactgtgtgtgtgtgtgtagggacttaaaaatatgtgttgaatgagtgaatattcaaatgagaacaccctccaaatatcccaagggttagagaatgttgctgataagactagggttatcggttttatgcttcagactaggagagacaaatagatttcatcatggcttttttagtggctgcctggagccctgcgtgaaaggagtgatatgatcataaaaatgagtgacatgatcgattagcaatgtctgcccttgggcatcagaaacgcccactgggataatggcattatgccaactattcgtcactcctgcccctaaattgttacataattaccccctaacttttcactggtgtctacctttatacacacacacacacacacacacacacacmccactaaacaaaagtctagcatggttcactctgttttaacagatagtggacatttttgagatatcagctaaaatatttctac

SEQ ID NO: 842622 - DNA, 667 bp, Homo sapiens; identical to SEQ ID NO: 838205

SEQ ID NO: 842623 - DNA, 571 bp, Homo sapiens
ggggctgaaaacagtggctgtacttccttttcctagcatggaataaggagatatgtctaaagttggtaatcagtgttgggcatagtggttcatgcctgtaatcccagcacttttaaaggccaaggcaggaggatcacttgaagccaggagttcgaaactagcccgggcaacaaagtgagacattgatcttcacacaaaaaattgaaaaaattagccaggcatggtggtgcacactgtagtctcagctacttggaaggctaaggcaggaaggtcacttgagtccaggagttggaggctgcagcgagctatgattgtactactgcactccagcctgggtaacacagcgagaccttgtctctggggaaaaaaaaaaaagctggtcatcaggatacagaagtattagcatatttttccgtgttacggaagaaatgatcaggagaactagaagcacaaatggtaccaagactttgcctctggggactgggcatgggtgtggagagggaggtagggtaggagggttgtgtttkgtcacaaactcttctgtacaattttatttggtggtttcccatat

SEQ ID NO: 842624 - DNA, 580 bp, Homo sapiens
agttaaaaataacactagtaatagaaatatttttctaaataaggacatttttagacaaaaaaaaagagatgagaatatttattgccagcagaaccatactacaagaaatgtttaatgaatttctttagactgaaggccaatgatctcagatggaagcatgaaattgcagaaagaaacagaattgaaaagagtaaatatggaggtaaatataaaataaaaatttttactttgtaaaaaagactaaagcaaattatgggatttatagcatatataaagtaaaatatatatgaacaatagcaaaaaaaagaccaggaggaattgaaagcatctgaaattatttgtaaagtggtaaaattctaattcaaggtagtctgcattaagttaaggatgcatactttaacatatagcataagcactgaaaggaaatacaaaactgtattaataaaaagctaataaaatacataaaatagaatgagaaacatgcttgaataatytaaaagaaggcacgaaagaaacaacaaaggaaccaaacaaaatgggcatcagagaaagcaaaatgatagacttaaacccaaccatg

SEQ ID NO: 842625 - DNA, 508 bp, Homo sapiens
actgtgctgggatggtgtatatataagctttgtcaaaacttaaaagcaaaggaaggtcttgtttctttcttatcttttaacactactttacaaccatgtcagctctcagctctcccctagactcttgccctaagcaatattatcattgcccacaaagtggcatcttctttttttccagcctttttcataacaacagaataacagtcctctcttcctctatcctttctgtagtcagtatgggggttgatacaagggctgatcaaaaagagaatgaagccatatcagaaaagctattctgcttgcctagtagcttaagctatggtggctgctcggagagctcacttctttgtccaaagtatggatgaagttgctaccatcttaaattacagattttgaagtttgatttttagtaataggggcatattgtaaattctaggaatggctgaaacatttcctaaatttgcmatgccaaatacagtgtttaaaaattttgtatttttaaaattat

SEQ ID NO: 842626 - DNA, 630 bp, Homo sapiens
aaagctatttctaggatattattttattgtgtaatcgtcagtaatatcatttttacagttttctcctatactatactgaccacaggaaaatctaggttagtaagcatgacatcatatatractcctggacaaattatatcagtaacacctgcagatcatatataaaaactccaggacagaagccagaaaggggccttggagcagagccaaactccagtctcggaggccacatttagcgcaagtgaagcagcaccgagctgagtttgtgtgtgatgaattggccccagaaggcactgccataccatcagtcaccatcactgttatgtggcggtgactcctggcatgacaatgggggttgggagaaagggataagttcccaagtcactgggaagttattagtagctctgcttattaaactagtttcctttcttctctcttaatgctatatcatacacctcaaatatcatagctgcttctataaaaatgagaaaagcttgtctcaaatagagggaaaaaacatatagaagccctttatgcaaaggcaaaatgcaaatagacagttaagatgaagaaaccaaaccatgcaggcaggagaaaaagcagtgctcagaaagagatgtctttactgga

SEQ ID NO: 842627 - DNA, 559 bp, Homo sapiens
accttacaactccaggacatgaacagtttggaaaccactgttaaagactgctggttcaggaaaaatctttagatttcatctaamctaagctcctcattttacagaggaggctttatgatatgcctaagatcatccagatagttaatggcaaagctggcttaaaaccaatgaatatagcattgagaattactcatccatagcttctgtcttccagaacattacttacgccaacttgttctattagcaatgctttaaaatcaaccaaagcatagcctacattgctgtggaggggtgtgtgtgtgtgtgtgtgtgtgcgcgtgtgtgtgtgtgtgttaatacatatatatctatactatatatagtacatataataataaatatataatataatgcatattcacccatatctatctccttaaaaaatacggccactgtataaagttagaagcaattgagccactttaacctcaataagaatagcaagcattcattacagagtgtgtgaaaaccagctgtgtttcttctccattcggtcaagcaaagatgaaatgggttgaac

SEQ ID NO: 842628 - DNA, 647 bp, Homo sapiens
tcagtggcagaaatattacaaatatttctagcatcatacagtttttcatatgcccttaagtagtttctaacattttaacatttttattcatatctcttaaaaaagaaaattttgaagagttccttttcatttatttacaatgaaatttggaaacaaaaacttactacattacaaaatctaaaataaagttaccttttttaaaaaaatggatcataaacattttgtaaaaagagttgaaaataatcattgttcttaagtcttactgctagaggaagttgtacacattaaggatgtatgtagcactgtttccaaaataaatgtatatttatgctacataagaccaagattagaccattgaagttgtaatgatcattctagttctcaaatttaaatgcaatttttttcaatacaaaaaagagactgtacaatgaaggaaaactcataatgcttttgactttaccagatgctagaggctactcaaaataaaggccagaatgtctccatatttagcgtagttcttctctatactcaamatacttgtagctgagttcatggtgtacatttttcgtgaatggttgtttataggatgtttatatattatcttggcaagataactttgaaagcccactgttttcctagcatttttc

SEQ ID NO: 842629 - DNA, 647 bp, Homo sapiens
tcagtggcagaaatattacaaatatttctagcatcatacagtttttcatatgcccttaagtagtttctaacattttaacatttttattcatatctcttaaaaaagaaaattttgaagagttccttttcatttatttacaatgaaatttggaaacaaaaacttactacattacaaaatctaaaataaagttaccttttttaaaaaaatggatcataaacattttgtaaaaagagttgaaaataatcattgttcttaagtcttactgctagaggaagttgtacacattaaggatgtatgtagcactgtttccaaaataaatgtatatttatgctacataagaccaagattagaccattgaagttgtaatgatcattctagttctcaaatttaaatgcaatttttttcaatacaaaaaagagactgtacaatgaaggaaaactcataatgcttttgactttaccagatgctagaggctactcaaaataaaggccagaatgtctccatatttagcgtagttcttctctatactcaacatacttgtagctgagttcatggtgtacatttttcgtgaatggttgtttataggatgtttatatattatcttggcaagawaactttgaaagcccactgttttcctagcatttttc

SEQ ID NO: 842630 - DNA, 343 bp, Homo sapiens
gttcacattccaaatgggagaaattggccaaaacaaaggggccacaggccctatgcaagtccaaaacctggccaggcagtcattaaatcttaaaactccaaaatctcctttgactccatgtctcacatccagggcgcactgatccaaggggtgggcccccatggccttgggtggctctgcctctgtggttctcaggttacaacccctgtagctkctttcacaggctgatgttgcctgcagctttttcaggtgcagggtgcaagctgtcatgtggatctaccattctggagtctggagggcagtagcccccttctcacaactccactaggcagtgccctagtgg

SEQ ID NO: 842631 - DNA, 620 bp, Homo sapiens
gatttggaaaattgctagaaccatgaattattaggtatgatgttttattttattaggttggaatgaaatacagaaacctaatcctgaaacctgggggatctctggacggcatggacatgctccacaatttcttgaaacgtgagccaaaccaaaaagcgttcctaatgagtagaggcctgcatgctccgtgaactggggatctttggtagccgtccatgtctggaggacaagtcgacatcaccatgtgttactggcctggaaactgaagggagttttgcaagtgaaaatttagatttctattgacatccttttgttttctaattttaaaaattataaagatgtaaatggaattataaatactgtgacctaagaaaagacccactagaaagtaattgtactataaaatttcataaaactggatttgatttctttttatgaaagtttcatatgaatgtaacttgattttttactattataatctagataatatgatataagagggctaagaatttttaaattgaatcatatatatgatataatttgatccttcttgtatcttgaagttttgtacttgggatttctggactgataaatgawtcatcacattcttctggtaaata

SEQ ID NO: 842632 - DNA, 620 bp, Homo sapiens
gatttggaaaattgctagaaccatgaattattaggtatgatgttttattttattaggttggaatgaaatacagaaacctaatcctgaaacctgggggatctctggacggcatggacatgctccacaatttcttgaaacgtgagccaaaccaaaaagcgttcctaatgagtagaggcctgcatgctccgtgaactggggatctttggtagccgtccatgtctggaggacaagtcgacatcaccatgtgttactggcctggaaactgaagggagttttgcaagtgaaaatttagatttctattgacatccttttgttttctaattttaaaaattataaagatgtaaatggaattataaatactgtgacctaagaaaagacccactagaaagtaattgtactataaaatttcataaaactggatttgatttctttttatgaaagtttcatatgaatgtaacttgattttttactattataatctagataatatgatataagagggctaagaatttttaaattgaatcatatatatgatataatttgatccttcttgtatcttgaagttttgtacttgggatttctggactgataaatgaaycatcacattcttctggtaaata

SEQ ID NO: 842633 - DNA, 670 bp, Homo sapiens
taattaccatcaggatggtaggtacatagaggtttattgtaatattcttggtatgcctgcatgtgtttggaattgtttacaataaagaatcaggcataggagggagaagagaaggcaaaaaagcaagatcatatactaatatgataggacattaagcaatctgcaacccaagaaccaaagcttaaacaactataactttttacaggagcctacagatttcaaatatcctattatgaagaaaaagcattcaataggaaaatgatacaatgaagtgtatgtgtgtgtgtgtctctgtgtgtatttttttcccttttttttttttgagacagagtctcaccccgtcactcaggctggagtgcagtggtgtaatcacagctcactgcaacctccacctcctgagcttaagtgatcctctcacctcagcctcccaagtagctggaactgtaggagaatgccatcatgcctggctaaattttgtattttctgtagatatggggtcttgctatgttgcccaggctggtctcgaattcctggcctcaagcaatcctcctgcctccacatgaaatgtgtttggtaaaatytggcctcccaaagtgctgggattacaggtatgagccactgtgcccagcctgtttctaattcctgggttttcttttttgagacagggtct

SEQ ID NO: 842634 - DNA, 663 bp, Homo sapiens
ctgttcttcgtgtatactctcagtacatttattctttcttcaaatcaaagatacgcctacttttttttctaagtattttaaagaaatagcagtggaaatcagaaaagagcactcacatgagaaactcttagcaaattcaaaaatagtcataaactcaaattgctgtcctgtgttttatagttcacaatatttccctatatctttgaagaattgaaaaagatatccaacagaatgaaccctaaccatattttattaatacgattttggcatgatgcttctgtagatcagtattttttccagtatataattgtggaatggaaaataacaagaaaaattacagagttgaagtggtctctagttggaacattttggaagaatgctttgtgatcaaaagcagaattttaagtaagctatgtgtctgaagttcacatgtattgtttttaaatgggctaatttagaaagcaatagaagcatagcttgcaggaagaatagacagcattagtgagagtacttcaagagggacaaataacatatgrggtgtcgggaaagtgggacagacagaacgagacacattcaaaggtctctgctccagttgactggacgagagatgtgctgaacaaacaccactcgcccatacgccttctcacgccgcagttcgtcctg

SEQ ID NO: 842635 - DNA, 592 bp, Homo sapiens
tcggattcagattttaaataagaagtgggactttgtatagcataattaatgatgacaagtgtcagaaaaacatcattgaatgtactgtaaaatggcttccaccataaaattcattctcaaatcagattatggcagaagaatataattttccttgacaatttcatgaattctttttccaggacttatcagggaagccaatcagacctatcagtagatagtgcagtgtaaatatgaaaagatgcaatagattggaaagttcaaacaaaatgaggatttatcttttgtcttgaatatagacacaaagcaaatgtagtatgtgagtggcttggagaaaaggcactatataagagcaaagaattatgacaaatgacattgcaacagacatgctgccatcccagagcttgagccatttgagaagctattttgaattaataacgcatgccatcgtgattacatttgcttagcagaaacattttaagaaataacagtctgcaaaaggaaactgaaacaatggttctctatcctgatataacawacaattgccatgcttcttcagagagaaaaggttcaaaattcttagtaaccaaagccc

SEQ ID NO: 842636 - DNA, 524 bp, Homo sapiens
tctagggaagaattcagctacctctgggaggagcaggctgaatagaaatgagaatctggggccaatgatggattgaggtaacttggaccttagtgaaatcagggatggagtctaatggaactaattctgactgtctcttgagaggaagaaaagaaggattcgactgcagtccacattcttagcaggactatttctcacttttgcctttctcctcaaacccccactttctcctcattctcaatggatgcctcttcatactttactaagaaaacaaatactttcccttcagccatttatatctctaatcccatataacacttccccctcttcccagcttctaataaagttgctttgacacaataaaagatatccttctttttctcagagttaattcttggagttaaacactgaacaaaatataaagattaaaatggggagatttttcagaaaatcagacaaaattctttaagagtgcttgtttgtcaagaaagcatacrtgtatttagtcccagcattttacctgt

SEQ ID NO: 842637 - DNA, 611 bp, Homo sapiens
tgaaaaagctatgcctaagtggaaatatttagttatccatagaaatgatatttcctggtataaaggattttacctttatacctttattttgcctaaggtttttaatagacttctgactagttagcctaaacctgtgtatctgtaggtcttacatgtgatgatgtttacaaccttgatagctgcttcatggtagccaaggttgttggagtaggtcatgaatgctgccagctggcttcttctacaaattcatgccatccgaactcagctatggaccctccttgctatggaacagccttttagtctctgtttttttccctactgtatttcccacagctgctattccaaaccttttccattgttctcaaattcagaaaactattcctgtacattttgtatcagcagaggacctcaaaacatacttctcagtgattgaagttatccagtccaaactctagcttcttaatcctcacttggcttttgggatgctgttctcttgtgggtatctttctacctttccattkcttgctcctatttctcttcccacctctcaattagggactttcctacagttctctttggtcatcataaccatcctcctaataatatgccag

SEQ ID NO: 842638 - DNA, 600 bp, Homo sapiens
atacaaaatgtcaattgtaactaatcaactgcaactcaactgttatcattttatataaattctactcaatatgcaatgtgagtatattttaayaggtttgatctgatgtgcttagaacccacaagaatcttgttagatgggaaagagctagttgtgtgaaaatcttggggaggactattacaagcagagaatgcctcgaaacagaaaaatgaattccatgtgactgaggaagaaaaagaaagatgcggccagtgaataaggagagagcgagggagactggtaggaaatgaggttgaaatcaggcagtgactgggttgtgcaaagttttacacagtgtaaggaaaatggacaaagatacttctcaacacacccttctttttctggttcaggggtgtgggtgtgagtacgtgtgtgcacactgcattatatttttcaaatgtgcttgcctttgaggagttgtttaacccagggataaaggctgttagttatttttctatatgctctggctattcctatacacggattattgcctcaatgcctccactcatattcttagacccaaatacttcacagtatgtctatgtatttgccattcatgga

SEQ ID NO: 842639 - DNA, 661 bp, Homo sapiens
cttgattttcacacttaaatccaattatatttggcgtgttttggtttatctcactcaacatgacttcaggcagtttcaaagccaaggaggaacrcataagtattcgggcagccattgaaggcaagagcctatcacctcttcttaccttatcatgggaccaatggttattccagagcttatgctcagcccagttgctccaagggccgtatcattcatactcgtttcatgatactgtccagttaccactgaatatgaaaatatcttaaaataattgctttatcaggtatggctcaaaaccttcttttgtgtcagttggtggaggaggcagagggcagtttagtgcttcgccttccaaaacacagaatatctttgctgctttattttttccttcaattgtcattgaaaataactagtcataatgcctttgtaagccttgcccggtctcagctatgcgtaaatcatgctcccagacagggccccttggtttagaggtcccattgtggaagtgatttaggtagaggcaggatcatgaataaagaacactcaccctcttcttcagaggcaggggtgggagagcccttcccaaacatctcttttcagtaccagtatttggctaagagctttaatttcattagacaaatgggggctgggtttttccatg

SEQ ID NO: 842640 - DNA, 595 bp, Homo sapiens
atctcactcaacatgacttcaggcagtttcaaagccaaggaggaacgcataagtattcgggcagccattgaaggcaagagcctatcacctcttcttaccttatcatgggaccaatggttattccagagcttatgctcagcccagttgctccaagggccgtatcattcatactcgtttcatgatactgtccagttaccactgaatatgaaaatatcttaaaataattgctttatcaggtatggctcaaaaccttcttttgtgtcagttggtggaggaggcagagggcagtttagtgcttcgccttccaaaacacagaatatctttgctgctttattttttccttcaattgtcattgaaaataactagtcataatgcctttgtaagccttgcccggtctcagctatgcgtaaatcatgctcccagacagggccccttggtttagaggtcccattgtggaagtgatttaggtagaggcaggatcatgaataaagaacactcaccctcttcttcagaggcaggggygggagagcccttcccaaacatctcttttcagtaccagtatttggctaagagctttaatttcattagacaaatg

SEQ ID NO: 842641 - DNA, 687 bp, Homo sapiens
ctgtagagggaaaatgttatacagtacaacgttgtggggatttggaaaagccctaagacctttcttttcttattccttttcagtttagaaggctttattctctcttttaggacaattgagtgaaaaaaacttacggatgattttaacaggtcacaaatatgtttcctggttttgaacaagggcgtctatattatctcaaaattgtgttaaagatggagcatttagcaaccaggaagacaatgagtgtaaaacacaaaattaactcatcaagttactgtaattttctctcttcttgtctccagctgattagtgcaaattaaccgcctgagcagttagcctgcaatatggaaatcttagctatctgctgagaaggcagacttttttctttgttttaactatatctatgtagaattccagaattcttgaatgacattgctgtatttcttaacgctgctttgaacttaaaggacatgtttgtatgtctgttttgagctttgagaatttattaaccttaatattattatgattataatctttataaattcctwtataggaattcaaaagaaaaaaagggaaataaaatgcttagatacctcatctcttaattgaagataataactatctcactagattattgtgacagttaaaaactaaataatgtgtggaataaatgtttagaatacagtg

SEQ ID NO: 842642 - DNA, 597 bp, Homo sapiens
aaaataacaatacttttatacggttggtgtgaggattaaacaagtaaatagataagcagttcttagtagagtacctggcatttgaataaaaatsttagcattgaaaaaatgtttttattattattaaaagctggaaaattaaatagatctgttcatggatacctgattcataaatatcacaagaaaaattggtgtctaactttaaaaacatgtttttatggaaaatgattgtaccttttgatacagaattggttagagggtacagaagtttcacccagtgtgcgcattcccattatcttatgaggagtctagatatgccaaatgaatttcagaacaagcaaaaatgttaaggaacattatttaaaagcatttttattgcactgacaatgtatgttaaattgaaagtgtaagtaataaaccatagagaaatggcaaacttctaccaattatattttgttgttgcatgttatagtacaatttatactttgttgtggtctcagattcagaaggagagtacataaaaagattccttttgtgggggtaaaatgtacctatctttatttcatcgtttatcattttgtgtgagtcttgtccata

SEQ ID NO: 842643 - DNA, 604 bp, Homo sapiens
gaaaatacatggtaatctctaaagtcccatagagctacagtagccccctttatcggaggtaaataagttcaaaaaccctcagtggatacctgaaaccatggatagtgttgaactctatatatacaccatgttttttcttatgcacacatacctgtgataaaatttaatttataaatgggcatagtaagagactcacaacaataatgataataaaatagaacaattataacaacatgctataataaatgttatgtgcatgtagtctctgtctctcaaaataccttactgtactgtactcactcttcttgtggtctgtcaatcttacaacctgggtggccagtaagtgaataacagataggtaacatagagtgtggatatgcaggatgaaggaatgattcccgtgctaagcaggactgagtgaaatgacagtgcaaggtttcaaaatgttactcagaacagcagacaatttaaaacttatgagttgtttacttctggaattttccatttagtattttcagactgtggctgacaaagagtaactgaaaccayggaaggtgaaaccatggttaagactgttgtattattatatatataattgttacat

SEQ ID NO: 842644 - DNA, 609 bp, Homo sapiens
caggactggagcccagagcaggcacctgactgatagttgttgaatgagtacagtaatgaatgacaatgaaagcactgtgtagaaacactggctgaatagtacctagaaagaraatgtctcaaatacctacattagcaatgaaaaaaacactgctaattaatgaactaagcatctaattcaagaaacaaagcaacacatctaacttatagaaaaagtgaaaaaaataaaaaacataagatcaaaaactgatggaatgagagcatcaagaaaaacaagttccttctttgaaaagcgctgttcaataataccttctgcaacgtgaggacattctgtgctaactcagcagccactagtcacgtgtgtattcagtactttaaatgcagctaatcctctcactgaggatctaaatttttaattgtatttaagtttaattttaatccatttaaatagccatataaggctagtgatactgcatttgacagcacagttctagaatatttcaatacagtgttcccaagttgacatgtataataattattgtgggaacataatgggggataactagatacaccctaaatgactaccagcagtaaaaggcattaataaatt

SEQ ID NO: 842645 - DNA, 567 bp, Homo sapiens
atggttttaacatggatccacaaattatttcctgtgccttcctccaagaggtagagcttaatcccactggccttgagtgtagccttggtcttaatgacttatttctaataagtagagtatggaaaggaaaaaaagtataacttcacagtggaagaaactgacagagaacaccttaaccacgtggtcaaggttagcgtcaccagtaacgagccttgctgatatcatgtgcccctgctgtgacaggatgtgatgggcacttcacctctgtagtattcttccccaaattctataacccccatctatgcatgagaaaatatcaggcaaacacaaattgcagtacatactgcaaaatacctgctattttaaatgtgtcacaatcaccaagaaacaaggaacgactgagaccttgtcacagatgggaggagactaaggaggcatggtgatgaaatgcaatgtcatcctggattagatctttgaatggaaaaaakgaccctagtgggacaaatgacaaacgtgaaaaactctatagttaatagtattgcatcaatgttagttgttttttttagt

SEQ ID NO: 842646 - DNA, 612 bp, Homo sapiens
tgaggtgttggattcggcagccccttgggtgacgggtgatagcacaccgaggccctgccagcctccctgtccctggaggggaggaggcagcagctgtggccccagcacagagcctggccctggggttgtggggagcaatcattgctgagaattgctgtgttctcctaggctccagcatccctggcacccacccttccttgagaactgcccccagtgcccgggcgtgggtgtgtgtggggtcactgtgtccctttctgctcacatctttcacaccctttgttccacctgccttttagggggaacctcttcacccggacactgagtgatattgtgagcaaagaggacttcgtgctggattctgaatatctcgtcacacttctggtcatcgtccccaagtgagtgctgggcgatcacgaaggaaaccggccctgcccagtggagaggaaggtggacccgttggtgacttgggcagtgtggacgaggakgctccctgcccagccccagttctcgggaagcagtcattccttcatggggccctgcctgcggctgtcagtagggacagtggttgggtgatggtggttgtggccacgatagaagcagccatttattgag

SEQ ID NO: 842647 - DNA, 472 bp, Homo sapiens
aacatttagtcttgggagggtgaaacctgaattctatctttagttgcctcagtggctcacagcagacactaacaatttacttatctacaaaacagaatttgtggtatccatttattattgacagtttaggasactaagactctcaaattacagagtctccttttccatagtgttatgttagacccttttcctacagtaaagggaagagagattagagcaagaaaatacatgtagatctttattaaatacaagtgactgtaatgagaaagacaacagggtagcacagaacactattttctatcattgctaatgtagcatagacctaagcaagcgttaagtgatgagacaaacctgtgtgacacatagttcatcttcagaatgactcggagggtacaggaatcactgtgtaccatttatagataattcaggtacaatgaggttgagaaccttgcaggtagagcaggttctcaag

SEQ ID NO: 842648 - DNA, 472 bp, Homo sapiens
aacatttagtcttgggagggtgaaacctgaattctatctttagttgcctcagtggctcacagcagacactaacaatttacttatctacaaaacagaatttgtggtatccatttattattgacagtttaggacactaagactctcaaattacagagtctccttttccatagtgttatgttagacccttttcctacagtaaagggaagagagattagagcaagaaaatacatgtagatctttattaaatacaagtgactgtaatgagaaagacaacagggtagcacagaacactattttctatcattgctaatgtagcatagacctaagcaagcgttaagtgatgagacaaacctgtgtgacacatakttcatcttcagaatgactcggagggtacaggaatcactgtgtaccatttatagataattcaggtacaatgaggttgagaaccttgcaggtagagcaggttctcaag

SEQ ID NO: 842649 - DNA, 472 bp, Homo sapiens
aacatttagtcttgggagggtgaaacctgaattctatctttagttgcctcagtggctcacagcagacactaacaatttacttatctacaaaacagaatttgtggtatccatttattattgacagtttaggacactaagactctcaaattacagagtctccttttccatagtgttatgttagacccttttcctacagtaaagggaagagagattagagcaagaaaatacatgtagatctttattaaatacaagtgactgtaatgagaaagacaacagggtagcacagaacactattttctatcattgctaatgtagcatagacctaagcaagcgttaagtgatgagacaaacctgtgtgacacatagttcatcttcagaatgactcggagggtayaggaatcactgtgtaccatttatagataattcaggtacaatgaggttgagaaccttgcaggtagagcaggttctcaag

SEQ ID NO: 842650 - DNA, 487 bp, Homo sapiens
gagcagttttagccccagttttcctctcatttgctgtgtgactttaggtaaatcgcccgtcctctctgagcttcttttctctaatctttaaaatgtgaatgttaacagtacttacttcacagcgcwctttcaaggatcagagacaactctggaaggaccacgtacatgtattgtcacacagtttgcaggtgacagaggaagtgcccattagcactgtgtggtgcatgtttggggccatctgagatgccctgtttccatctgcactgactctccaaggccgaggatcgtactgattccaagggaaatctgggagcaaggctgtgtgcacaattttatattctgtgcccagaacaaaggctcctggcagaggagctgagtgggagctgaaacccagcccgcgtgccccttgccaagccatgctccctggagcagagctgcatctgtctacgggagggggcaccattttgcttacccaaaagggccatct

SEQ ID NO: 842651 - DNA, 561 bp, Homo sapiens
acataagccaaataaattcttgagtttttattacaaagaggaagtaggtgttatttccattttatagatgaagaatctgaagatcggagagatgaagtggtttgctttactcgaactgaattatamaccaaagtttgtctgatcccagagttagtttcctaacacttgtctttaaattaacagaaaggccaggcatggtggctcacacctgtaatcccagcactttgggaggccgagacaggcagatcacctgaagtcaggagttcaaaaccagcctggctaacatggtgaaaccctgtctccactaaaaatgcaaaattagctgggcatggtggcacgtgcctgtaatcccagctacttgggagggtgaggcaggagaatcacttgaacccagcaggctgaggttgcagtgagccaagattgtgccactgcactccagcctggacaatagagccaaactccatctcaaaataaataaataaaggccaggcgtggtggctcacgcctgtaatcccagcactttgggaggctgaggtgggtggaccacctaaggtcgggagt

SEQ ID NO: 842652 - DNA, 561 bp, Homo sapiens
acataagccaaataaattcttgagtttttattacaaagaggaagtaggtgttatttccattttatagatgaagaatctgaagatcggagagatgaagtggtttgctttactcgaactgaattatacaccaaagtttgtctgatcccagagttagtttcctaacacttgtctttaaattaacagaaaggccaggcatggtggctcacacctgtaatcccagcactttgggaggccgagacaggcagatcacctgaagtcaggagttcaaaaccagcctggctaacatggtgaaaccctgtctccactaaaaatgcaaaattagctgggcatggtggcacgtgcctgtaatcccagctacttgggagggtgaggcaggagaatcacttgaacccagcaggctgaggttgcagtgagccaagattgtgccactgcactccagcctggacaatagagccaaactccatctcaaaataaataaataaaggccrggcgtggtggctcacgcctgtaatcccagcactttgggaggctgaggtgggtggaccacctaaggtcgggagt

SEQ ID NO: 842653 - DNA, 607 bp, Homo sapiens
tcagggaattctggcagaggctggtgcaataatcccagtaagggatggagaggtctgtgattaaacactgtcatgtggctacagagtgagagygagagcaaaagcgagagagacagcaagagagagcgagtgagaaagagagacagcaagagagcgagagagacagcaagagagagagagcgagagagagtgagcgagagagagagagcacaagagcgcagcttgtcaggaaaattgtgaaccaaatttcatgatggagtggaactgaaagtcaagggggtggttatagagggctgcctggactctggggagactgtcggtttcacctgctgagatgagacacccagaggatcgggggaggcttgcagagggtgagtgactggggacacccagtgggagatacttgggtatatggacctccacttgcctcctctcacctggaaagtctcccctaaaacacccacttactgccagctcccatctcctaccttaggtctcatctgcttctcctcacctcttggtgggtggtgggcagcaggggagccaagcccagatgccaggcctgagcccaaccctggccccagaggcagccccagaggcctcgcac

SEQ ID NO: 842654 - DNA, 558 bp, Homo sapiens
agttgaaatgagggtggtattattcactcascactcccaggagtcaaggcagaatgtaattgcttccagacatattcaggggatattccacccaattatctaattttattcttcaaaggcagctgtatttggaaactcccattggtccagagagacagaacaatgagaagaaatcccctgtccagttgcctgcaggagtattccaacacttcatgggctagaggattccattgagatggggtttacgtcttgattttgaacacctgtcagcactgttctctgtttgcatggcaattctgacccttttatggcaacaacacccctgggacaacccagatttgtagattgagatccaaaggtagaatttccagacagtccaaccaaggtatcaagtgatgtttccagagtggaaggctctcaccgtgtcccaggatttctggggtttgtaagcagtactggccatttgtgaccctgttttttacctaatcattctgtctttttaggacatggttttacccgatccctggcaaaggatccagaattccaatagctgaaaac

SEQ ID NO: 842655 - DNA, 604 bp, Homo sapiens
tccatatttaagggggccagcacctccacaccggtgggtatttctcgtcaggcaggacgagaaactgagaaaagaaataagacacagagacaaagtattgagaaagaaaaatgggcccaggggacyggcgctcagcatgcgaaggacccacactggcaccagcctctgagttctctcagtatttgttgattactattttcactatctcagcaaggggaatgcagcgggagaacagggtgacagtggggagaaggtcagcaagaaaacatatgagcaaaggaatgtgtgtctcaagttcaagggaaggtactatgcctggatgtgcacgtaggccagattcacgcttttctccacccaaacatctcagtggagtaaagagtaacagagcagcattgccaccagcatgtcttgcctcctgccacagggcggtttttctcctatctcagaatagaacaaatgtacaatcgggttttataccgagacatttcattcccaggggcaggcaggagacagaagccttcctcttatctcaactgcaagaggccttcctcttttactaatcctcctcagcacagatccttcaggggtgttgggcttggggatg

SEQ ID NO: 842656 - DNA, 634 bp, Homo sapiens
tcgatcacactaattcattcattattcctttattcattccttcagtgtataccgatgcctatcatgtgccagtcattcctccaggcactagaagtaaagaaggaaacaaacacaaaacccttgctcttatcaagcttaaattctaatggagggaggcaaaataacaaacatggaataggttggtttttgagaagaacgaaatagcagggttagaagacagaatgagaggtgctactgttctagaaatcttggtccagagtgccttccccgatgatggtatttgaacatactcttagatcccgacactgagcctacgaacagtccggggaatgggaatattggggcaagaaggggagtgcccagagtatcccacagttccagtggttttggagagaaagaaagggttagagagtagaagggaatgagccaagattcagatcatattggtcccatgatccaactgcttctcactctgagtgagatgagaagccattggagggcattgatcagaaargcgatttgatttgacttgctaataaaaacaatcatgcttgttacgtatagcatacgtatatatatgtatgttaacatatgtaaaatacaaaatatatattttatatatatatatatagca

SEQ ID NO: 842657 - DNA, 634 bp, Homo sapiens
tcgatcacactaattcattcattattcctttattcattccttcagtgtataccgatgcctatcatgtgccagtcattcctccaggcactagaagtaaagaaggaaacaaacacaaaacccttgctcttatcaagcttaaattctaatggagggaggcaaaataacaaacatggaataggttggtttttgagaagaacgaaatagcagggttagaagacagaatgagaggtgctactgttctagaaatcttggtccagagtgccttccccgatgatggtatttgaacatactcttagatcccgacactgagcctacgaacagtccggggaatgggaatattggggcaagaaggggagtgcccagagtatcccacagttccagtggttttggagagaaagaaagggttagagagtagaagggaatgagccaagattcagatcatattggtcccatgatccaactgcttctcactctgagtgagatgagaagccattggagggcattgatcagaaaggcgatttgatttgacttgctaataaaaacaatcatgcttgtwacgtatagcatacgtatatatatgtatgttaacatatgtaaaatacaaaatatatattttatatatatatatatagca

SEQ ID NO: 842658 - DNA, 579 bp, Homo sapiens
aaaggttgcatttcatgaactgttttctttctcttgcaccctcttttcctatgatctgtttggaatccaaggttggttttcagctgaattttgcacactaatggaatttttaagtaactcatkgcttaaactatatttcatatgtcaaagggatatgttcgaagctagagtcaaattcttttctcattgaataaagaatgtgtattgatttatattaataaaaaaatgttgtagaacaaatatttgcaaatacatttgttcatattgttcaaataagttataaaaagtaaacagaaatatagttttttccaacttcctttttctggttataatattccgatttctcttcctcatcaaaggcttagaagatatttactttctttgtaaaggttagcattggtttctgtgttaaactatctatagttaaactttgattatccaaatggaatgagaggatttaattattgctaagcagagaggtttaaaatggacgggaaaagaattgggggagtttaatctgtttagaatgattgagcattatctcttcatcttccacgccatttctccaaagttctccag

SEQ ID NO: 842659 - DNA, 574 bp, Homo sapiens
gcagtttaacggactgtactatactgacagtaaaacgaactaatctggcatccatacactgtgtctgtcaaactcagtgatgcacacaggtttaaacattgttttttatgtgttttaatttttcatagccttctaacgtgacctgtgagacgtctctgcagagttgatgccatgaggtagtgagctcacctaagaatgtcatcgtcatatagtcagcaagaataagatatagaagacgatgccttcgtggctttacacacctcaaaatgtggagctgtatcatttatgtgattcttttaagacataatcactcaattgaaagcttggagcagataatgcatcttagtagccagagcttcgcggctgccattgtatttccgctccttcgtgaaggggagcgaggcgtgctctgcagagcagcaggtgtgtgccatgtgagggctggagggcacagcacgagagctgcttcgtgggkctctcaccagttctgtggctccatgtccagaccagttctgtggctccgtgtccgtagcaaagctggatctggccacagctgtcgggaatgtctgaggga

SEQ ID NO: 842660 - DNA, 609 bp, Homo sapiens
ctcctgggactctgttctgtacctgagactctcacagggcccggtaccagtgggacccagcctcccctgtgcaagggcctcccctgggtgggaggacatgggctgttaattagacccgggttcattagacaggtgtgttaggctgttgtcacactgctatacagaaatacctgaggctgggtaattcataaagaaaagaggttgaattggctcagggttctgtaggctgtacaggaagcatggtggcctctgctcctggggaggcctcaggaagtatccagtcatggcggaaggcaaaggggagccaagacctcacatggcaggtgcaggagggagagaacagatggggagtgccgcacacttttaacaacaccatctcaggaaagcctgctcactatcctgaggacagcgccaaggggatggtctaaaccacccatgagaaaccaccctgtgacccagccacttcccaccaggccccacctccagccctgggsgtacatttcaacatgagactggccaggacacagatccaaaccacatcacaaggccatgcggaggcagccgcctactgtgtgcctggcaaacagttggcattcagtcagtgatcag

SEQ ID NO: 842661 - DNA, 609 bp, Homo sapiens
ctcctgggactctgttctgtacctgagactctcacagggcccggtaccagtgggacccagcctcccctgtgcaagggcctcccctgggtgggaggacatgggctgttaattagacccgggttcattagacaggtgtgttaggctgttgtcacactgctatacagaaatacctgaggctgggtaattcataaagaaaagaggttgaattggctcagggttctgtaggctgtacaggaagcatggtggcctctgctcctggggaggcctcaggaagtatccagtcatggcggaaggcaaaggggagccaagacctcacatggcaggtgcaggagggagagaacagatggggagtgccgcacacttttaacaacaccatctcaggaaagcctgctcactatcctgaggacagcgccaaggggatggtctaaaccacccatgagaaaccaccctgtgacccagccacttcccaccaggccccacctccagccctgggcstacatttcaacatgagactggccaggacacagatccaaaccacatcacaaggccatgcggaggcagccgcctactgtgtgcctggcaaacagttggcattcagtcagtgatcag

SEQ ID NO: 842662 - DNA, 572 bp, Homo sapiens
gttcagttcccggcattctagggggatgtggtccacgttgatttggaaggcactggggtgagattcactcagttcctggcattctggagggatgtggtcacattgatctggaaggcactggcgtcagattcacccagttcccagcattctggaaggatgtggtccgcctttatccagaaggcacctgggtcagattcactcaattcccagcattctgggggatgtgatccgcattgatctggaaggcacctggatcagattcattcaattcccagcattctgggggatatggtccgcgtttatccggaaggcacctgggtcagattcactgaattcccagcattctgggggatgtgatccgcgtttatccagaaggcacctgggtcagattcactcaattcccagcattctgggggatgtgatccgcatttatctggaaggcwctgaggtcagattcactcaattcccagcattctgggggatgtgatccgcattgatccggaaggcacctgggtcagattcactcaattcccagcattctgggggatgtgatccgcgttgatctggaaggc

SEQ ID NO: 842663 - DNA, 574 bp, Homo sapiens
atgtttgctgaaatagcttttttaattccaatctctttggcattttctaaatgtttctgatacctaccagaaaaatgagagggaaaacattataattaagaataacaatccatagtccgagtcacactcggctcctatatagttggaggtttaagtaacaaagtcagtcaaggtaatgaacccatggtgagacccagatctttgggaattgaactaattcaggatcagccaggcctagaacagatccaagccttctctttactggcccggttccatttcccttcatccattccaagccaaccaacattcctgtggttattccagaattgagggctcaccctgggatatggaagagcttctccatcaccttcasggcaatatcacaagtcagggttaagagggaatgagagaaaccaagccaaaccagaattgattgtaaatgtcactggaactcataaacagttagattcttaactctggtcaatgtctcttctctggagaaaagaaaatcgtccctctattgtccactgggtgagggatgaaaattttacatgttgttgtacataaacatagg

SEQ ID NO: 842664 - DNA, 562 bp, Homo sapiens
cctttaaggcttatatcatgtgtctctacttattttttgctgagacctcaaactttccctgctatccttatatcctgttccccgcatgccccccttcaccttccagttctcagtaagggaccttctcttgaaatcattagatctcagggagagggaaaacaagaaggtcaaagaagatgtaatgaggaaagagaatgaattctgggtgctcctccattcttcttatctcctggcatctccttttcatgtgtttcttgcttttacctaattgtaagccagtggtttggtcaggtgctggtagagatctctgagtctacctgaaaagatgataaagatcccagagcattgttcctggattctgaccattatttatacactacactatctatacacttaagactccaaaatatgcatctctcatctagccttttgttctgcccatatttgcttccagaattcaattctccaactrcctacttaacatttccattagatatctcacattttttagctcaaatttatgtttattccctcataaacctggtcctcctccagcctaatt

SEQ ID NO: 842665 - DNA, 589 bp, Homo sapiens
tcaatgccattagcctgttgccctataagtataaagtctggcctggtgagcaggaacagtcatctcccgctccatycaggtttacagaaaatattcagaaggagctattgacaagcaatttttccttgtaatgaaagggagacaaagagtacattactagtttcagattaaaataatggagcataaaatgcttcaccttaaaaaattatttcatcttatgaaataatttcatgctatgtgatttttctgccgatgcaagtgtttggctggtacaacagcgtactaacaggtatattctaacttgaacaatctgaccatttttaaaaaacatgagtgagaaagaaattcattcagctgacataactggaattctaatttcagatcttcatggcctcactaaatatttctcataacatttatggtttagtttttacatcatcagcaataatgtgaaaggtatcaatctcttctacaaggttgccacaagaaattaactgataattgtaataaagcaagaatttaaatatagaagtctaaattattgataaataatactgcatttatttgtgttttagaaccaatgtgtcct

SEQ ID NO: 842666 - DNA, 498 bp, Homo sapiens
taagagaagttcctaggagctagaaatgaagtggtaactgaataccagagcagtgaacagcaggcwggtcctgcagctcatctgggattatttactgattgtggaaaccagtgagaaggtggtttttgtttgtttgttttcattatttctagaataggaaacaacgctttgggccaatggaagagcaggaattaaatgcctaaataaggcagggaaattcttacctgccttgaaaggacaacataagtttgtccacaagtataagaaggcagcgtgaatatttgcctatctcagaatgggatctggatggggagtgaacaaagtatctgctgggaatttgttgctcctgtcctttctttaccaagctttgggttttgaatttacctacatgaccctggaattccgaagccaataaattaaataaaatttagtctactaaaaacttttgctgaagaagttactggagatgttcttcaagagaacacaaatctagaagga

SEQ ID NO: 842667 - DNA, 594 bp, Homo sapiens
gtttggaatagattgatttaaacattgattaaaagatgaacaatacgaaggctaagggattgtagaacagtgacccttcaacaggaacagtgtcctaaatgagtgycctttttgctaaatgagcagcagcattctttttgtttgtttgtttgtttgttttgagatggaatttcactcttgttgcccaggctggagtgcaatggtgcaatctcggctcaccgcaacctttgcctcccaggttccagcaattctcctgcctcagcctcccgagtagctgggattacaggcatgtgccaccactcctggctaattttgtatttttagtagagacagggtttctccatgctggttaggctggtctcgaactactgacctcaggtgaaccacctgccttggcctcccaaagtatcattctgtttttgtaactgtaactgagcactttggcctcagtaaaaaagaatgactggaaacaacttggctatccaagtaacaacaattgtgtcaataaacttagtttagagatatttaccactaaataaaatctttacccttcatgagtaccagtttttttttaacttttttttactctctaca

SEQ ID NO: 842668 - DNA, 583 bp, Homo sapiens
agtaactatttctgaggtacggttctgtagtattaagtatattcactttgttgcacaactaatctccagaacattttcatctttcagaactgaaactctatacctcttaaacaactccccaagaggaaagatttattgacatatgtaacaatacagatgaatttctaaattatactgagagaagctaaacaaaaaagtacatactatatgacttcatttatataagattctaaaaatgcaaacttatccatagtgacagaaagcagatcagctgttgcctgggaaccagaaaggtgggggtggaagaattggtgtgaggaattgcaaaggatcacaaaatttttgtgkgtaacagacgtgttcattattttgattgtcatgatggtttcagtagtatatacacgtgtctacacttatcaaatctcacactttaaatatgtgtagcctaatttatgccaattatactgcaaatatgacatttataataagttcacacataaaacctctaaaaattagaaagaaaataatccaatatgtaaaggcaaaaatatttgttcaaaatcttcacaaaataagatatcca

SEQ ID NO: 842669 - DNA, 569 bp, Homo sapiens
tggtctcgatggcttcaggagtgaagctgmagaccttcatggtgagtcttacagctcataaaggcagtgtggacccaaagagtgaacagtatcaagatttatcgcaaacagctaaataacaaagcttcctggggcggcctgcttttgttcccttatctggctccacccacatcctgctgatgggtccactttacagagagctgattggtccgctttgacagggtgctgattggtgcatttacaaaccttgagctacacacaaaagttctccaagtccccactagattcgctagacacagagcactgattggtgcatttacaaaccctgagctagacacagagtgctgattggtgcattcacaatcccttaactagacataaaggttctccaagtccccaccagatcagctagacacagagcgcagattggtgcatttataaaccttgaactagacacagggtgctgattgatgtatttacaatcccttagctaaacataaaggttctccaagtcccccagatcagctagacacagagcgctgattggtgtatccataaaccctgagcta

SEQ ID NO: 842670 - DNA, 569 bp, Homo sapiens
tggtctcgatggcttcaggagtgaagctgaagaccttcatggtgagtcttacagctcataaaggcagtgtggacccaaagagtgaacagtatcaagatttatcgcaaacagctaaakaacaaagcttcctggggcggcctgcttttgttcccttatctggctccacccacatcctgctgatgggtccactttacagagagctgattggtccgctttgacagggtgctgattggtgcatttacaaaccttgagctacacacaaaagttctccaagtccccactagattcgctagacacagagcactgattggtgcatttacaaaccctgagctagacacagagtgctgattggtgcattcacaatcccttaactagacataaaggttctccaagtccccaccagatcagctagacacagagcgcagattggtgcatttataaaccttgaactagacacagggtgctgattgatgtatttacaatcccttagctaaacataaaggttctccaagtcccccagatcagctagacacagagcgctgattggtgtatccataaaccctgagcta

SEQ ID NO: 842671 - DNA, 527 bp, Homo sapiens
agcatcaacttaatccaaagattctgctttaatcaagacagttctgtaaggatgacgcartatttgtcaaggcttttctctggaacaatatttactcccaccaggggattttaaacttaaacagcagccattcatcttgctgtctggtggagcctggttcagtttgcctccaatgtggtcctagccttggtggctaggcttggcctgggacaggaatctgtcattgtagcccagctggagcctgaagaaagcaaaatacagcacctgctggtaccagagggtttctaaatgccatcaactggcgagtcaggaaacacagaaggagatattttaccagctcttccagaaatgtttatacaaaggatttagaggttaacaatgcatgtgctctacatattaaaaccgaaaggtgctacaaataaatggatgttacccacagttaagggtttgcacacttgctgatgaacttgaaaatctccaagtttaataagtcatggctaatgtagtatgattcattcttataaata

SEQ ID NO: 842672 - DNA, 538 bp, Homo sapiens
agtgcattataattagcatgtaatgagcagtgagggcgactagaggtcactgtcatctccatcttggttttggtgggttttggctggcttctttaatgcaacctgttttatcagcaaggcctttgtgacctttatctcctgccgacctcctatctcatcctgtgactaagaatgcctgtctcagggaaatgcagcccagtgggtctcagcctcattttacccagccactattcaagatggagttgctctggttcgaatgcctctgacagtaatatgagcctcagagccttattaaatactgacaagatttcagctcctgccaccttcacccttttggggagtatcagagttactcaaaatcaaatatgttctccagctcagaagcctcattccttcctttgatcagttagtcattygttattaaatacttttttttcctagtatctactagatcccagacactttaatggacgctggggacacggcaatgaataagacatagaccttactcttaaggctttcagtggatgaaggaaaa

SEQ ID NO: 842673 - DNA, 398 bp, Homo sapiens
gcaatttttctaaataagtaactaagtgtgatttgaattttacttctgccaaagttttaccaaatacattttacaatccccagataactttctaataactggggcagttgaacaaaggaacagagtgctttgtaaaataataagctctctattcatagaagtgtttaggcatgcatagtcaccccaccatccctccaaataatcgtatacaaacaaacaaggatattgtgtaatggattgttatggtttattggaatttggagaagtcagttattctgattttatgagtgacaaattttcaattagaaatgatgtaaattgtaattttactaawtttggcttaatgtcagttttttttttgggcagcttagtacttaaatttaattgaaatctctgtg

SEQ ID NO: 842674 - DNA, 654 bp, Homo sapiens
ctgttggaattagttttcatactttacgyttgaagaaatggaggtaaggtgatttacttaggatcggtatgtatgggagtctggtttctcttactactgcatcatagtgacccctaacaattccaaagttgtaatgagactattcagtgttttctcgtgtttgtttctaaagtttggggttttatagctttcttagttttcacagaattgatttttattttattcagcttttgaatgtcatgctgctttttgtggtcctcatatttattacatttttattttatttcagtagcttttggggttcaagtagcttttggttacatggatgagttgaatagtggtgaaagtttgagattttagtgcaccgtctcagttgttaccacttttatgaaaatcctatgtgagttttctattcattggaccagtttgtatttgaaacctcatgaaaatgattttttttctaaaaacttgtagcataataaagcttcaatggcagttttttctaatattgttaccaattgtgtttgtctttatacttttgtgtgtataacattttttctttaaattctcttcaaacaaacaacaagcatacttgtgatccttaagagtctcatgacactaattcttatatagagttcagttatgtaatgcaga

SEQ ID NO: 842675 - DNA, 556 bp, Homo sapiens
atcggtattttagagtgtggggtttccaagatggaacagttttgagtgaagttcagtgtgtgacaatgagaatagagagctagtgtaagttactggagttgagagcaatgaaactattaggatagactttagatttgtgatttagatcagaagctctcaatccttgttgtacgttaaaatttcctagagagctctttagtaacactgtatggccccgtcttagataattaaattattgtctctttgggtgtgatgtggacctcagtattgtttaaaagttcaagtgattcttacatgcagaatttaaaaaatacagatgtatttgaattgaagtcatagtgacaggagttgaggtaaaaatgacaggtgatggaagtctttaatgaatcagcatattgcggaaaaatctaaacaaaaccattttcatttaataytatctgtgtttgtgtaaatatgaaacagaggcttcttatccctcataaaataattttatcagaagcaagcaggtagggagatattgtccttaaaatcagactagatgtattcagctgtctct

SEQ ID NO: 842676 - DNA, 629 bp, Homo sapiens
cactgcagcctccgccccatcgggttcaagaaactcttgtgcctcagcctccaggatagatgggattacaggtgcccaccaccacgccyggctaatttttgtatttttagtagagatgggatttcatcatgttggtcaggctggtctcgaactcctgacctcaggtgatccaccccccgttggctgttcaaagtgctggattattggattacaggcgtgagccaccgcaccctgccaaaatggcaatttaaatgttgaaatactgtaggcaaaacttaaacatttcattttactaagtgagagcatgtcctaaagtgagaagaagatgggaaatgtaacttgctctttcactcaacaatctcttcaggactttcatggtgtgaacatctcacgacactgaatggaatgtcagccagtgtttcaacagatgtatttctggtaccccatgaattcaaaatggaagccattttttttcatctggtagtcaactgaaggaacagccttctccacaaaggtgggagaaaagcctgcctgggatgaatttattgagagatggcacatggtaccaacatggagccttcatgaaaaattttcaagggcaatgaaacttttttttttttttttttgag

SEQ ID NO: 842677 - DNA, 601 bp, Homo sapiens
aatatggaagacagaggagtaccttacccgcaagtctttggaaatattgccttcagaggtcattcttgatgtgagggggacactgcaggctgtcaggcctggtaccattaggcagtctatcgtacacaaaactctttgatcagttctaagcccaacattagcgactttctgatattttcactctccatgtgattttcctatgtgaagggaatatacatgatcattatatttttatttaaaaacaaatgatatttctggtttttttccacctatttcttatgagtttagaaatgcatggttttcctttctaagaacagtacagtactgcatctgtaaacttgagttgaaggctaatagccagtctcttgaaagtggagctcactaaggtcatccattcggcactgtccctgtcacctggccagacttctctcctgaccctcgagaatatggccaccatccttctacctgctttagaatgtcagtggattcataagcaagacagccttcttaagttgattcatgagggacagcagtatttttgaaacagcctgwctcaatggagccccgcagagatctgagaggaaacccaaaagatctaaga

SEQ ID NO: 842678 - DNA, 512 bp, Homo sapiens
atacaagtttgcagacaagggcttgtggggtggtgtsacaatgatataatggagaagtaatgatctcaacacaaaggagcgcatttcttttcagcttttattctctgtgtgtgtgtgtgtctgtgtgtgtgtgtgtgttttgtaatagtagtcaacctctctaccaagcttctcctccttgtaggtcacatgatatgtaggattcacctcctcctcctgttccactaaaggcttatcctttgtaagtaagagactggtagctgactaaagcgactcacctacatttaagacctatgattacaaaattgggaagggttatgtttcaaaaagtgaatagtttactttttcaaatacaggattaacacatttagtgttctggtcacaacaagcaacctggcttcacagccatcctcagaaaagtcgggagttccactgagaataatatttccaaactagaagtgcttgagctctagggcctaaattgtaacttaaaaaagtgctaataaattgag

SEQ ID NO: 842679 - DNA, 620 bp, Homo sapiens
ttatttggtggtagatttctttaggagcaggatcttaggagccatcaaaatagttaacttatctcattttcactcrgttcaaatctctcatttagttatagcagaacttaaaattcttatttgcaaatccatgttgcaaactggatggaagtttatttttcattgcagggagtgagaattttattataagtcattcatttttgtcatttaaactttgattaattctaagaatagttgaagttactgtgagaaatatttgagaatctaaagaattaatttaggagagtctcaatgacctagaaggcatataagattaaattcaatgtgatgtaatgaaaacattgtaatatattttgacacaacccattcatttgatatattgtttatcatatctatgtatttcaggaggtcatagtcataaactgtgaatgtccttttttaaaatctctaataattgaagtgaaattaattgtgatatgaaataataaaattataaaaaaaattagtgtagcttgcagattattaattgttatggaactttttgatgcgttactaaaagttgatatgtcaccacccgtctccatggacacagtaatgtgtgttttagagaaatcatccag

SEQ ID NO: 842680 - DNA, 619 bp, Homo sapiens
agaccttgagctcaggccatgccatgcctgaccttgaaccttgctgatcaaggcttcgccacaggcgaggggtrttccagggaagcaggaagtgtgcagcaggcactgaccaaagatgtgccgcctctgcagagggacgaggggccaggctgggccttaaggaagccctgacgtatgcctatcctggtgaccttgctccggtggccacctgtcagggcccctgcagccagatggagcccagcagtgcagagcgtcttttcagaggcaggtgtgtctaaggctagcatttggttaaagaggatgaaggctctgctgtacaggccttttaaaccctaggtggatgtatattagtctgttttcacactactaatgaaaacatacccaagactgggtaatttataaaggaaagaggtttaatgggctcacattaccacatggctggggaggcctctcaatcatggcagaaagtgaatgaggagcagagtcacgtcttacatggtggcaggcaagagcgtttgtggaggggaactcccctttataaaaccatcagatctcaagaaactaactcacgaccatgagaacagtatgggggaaaatgcccccatgattcaattatctc

SEQ ID NO: 842681 - DNA, 598 bp, Homo sapiens
gtagatggatgcagcaggccgccatggcacgtgtatacctatgtaacaaacctgcactatctgcacatgtttcccagaacttaargtatgatataataaaaaaagtaagtgaatagtaaagccttgctttgtgtcatatttgctaatattcatttggtgaagcagcttataagaccaagccaaaccaaaatcaacaatgtaggtaaatattttttacctataatgggaggtactgtagtcacatggcaaagtatacttatgtataattccttagaagggaggaacaatgagtatacaaagtatacttgtgtatatttccttagaaaggaggaacaatgacaaaaaattgtgaaaaattcttccaagtaagtattattacatgagtcaatattccgaaaatacataaagaaaactaatgttaaaatggatagaaaatgaaatcaacagttgctagataagttcactccaaataaaataaaaatgattaaataatctgaaaaaaattgattgtataataaatatatttataactcttaaaaagataagtaaaagccatatgcagagaataaaagtttcaagaacaagtagaattaacacc

SEQ ID NO: 842682 - DNA, 565 bp, Homo sapiens
gaaataaaagtgagtcacttggaagtgaaggactggcccgactgggaggagttaattacacatkacacaagggaaacgcaaacccaaacttcatattggtctgagtgagaggagttagttaattatagttgaaacaggggaaactcatacccaaactttatactgagagctttgagcgcccttgtcattaataactaggctaacaaatatatgaacatatctacaggctcctagctttttgtctttgagcccagagttgaaaataaatccttggcagtgatccatttgcttccatctctgtgtaccaacttcatttgtcagagttcccaagccaaagtgatctccaaatcaaaaggcaataccccaggtcaaaaagctgcaatcacaaaaagctacttttagctccagaattttctcctctttccccgtttccccagatccctccagtttttctttttgtctctgtccatttctctttttttttttcacatttctccactctctgtttcctaacacatggttttaaattgagattaaagagaacaaaaaggaaggctgcaatgtt

SEQ ID NO: 842683 - DNA, 618 bp, Homo sapiens
atctactagattacaagtcttatgaggacatgagcaatgtctgtcttattcaccatyccagccccaggtgcctaacatacagaagatactcagtgaatatacagtgagttaataaattcaggcattgcctaccacataaatcctgaaaaagatagattttaacttttaaaaccagtttctgtgttgccttatgagattcctagacattagctgagttccttgactaataggacctacatctcttcagttatattctggttctctatagtaagtttgtctaacaaacactcatgaaatagattgtgtcttttgatatcttaagaactccgctgccatattccaataattcgtcgtgggtgtccttgaagatagctgtagcataatgaatacacgttgtggaatttgaatgtctgaatttgaatcctatctctgttccttgctagttgtgcaaaatgctcaaattctctgcaactcactttgcttacctataaaatatgaataaagtcatacccatcccagaggatttcatgagaaaaatatgagttaattaacacacaagaacttctcagtagtaaatctaacacatattaagtgatgaataaatatgccctatgactg

SEQ ID NO: 842684 - DNA, 599 bp, Homo sapiens
gctgtccagttttctttgtggcatggttctctaatattaggttttgtaataatgggttttgtcacattggtctgtccagctacaattcttgcatgttgtaagagaacattactaattgctttaaaataytaaattatttaagcgtgttccaaggctgactaaaataattattcttaagcactgtggtccacatttttgaaataaagaaaactcttaaatgtgcatgttgctttaaatgttgatatgtttcctaaaggaaacgtaattatcaaaaaaggaaagtaatttatttttgtgaacaaactatttttggtttttctcctgttgatttttgtaaccgtaattcagagtctatattagaaattgttgtttaaatattttgaatatcagtagacagttctacaaatcacagtaaaagcagactgctaaggaagaccaataaatggttggtaaattgcacttctgtgtaaatgaaaacttgaaggactacctgtggacataacttatgtgctgtcttctcccaaagggtaatattttcacaggttcagacagattatagtcttctggacaagaggcaatttgaagatatcagaagtaaa

SEQ ID NO: 842685 - DNA, 621 bp, Homo sapiens
aatgttaagagaaaaaaagacaactaaataaaacactgcatgtgagtaacatgaggcttctttccaattttgacacttccttgcttacaattttttgcttataaaacaatcctacaatatccagaccatgggaacactggaaataagaatatatctgcatttcttattgaaagttacaataacattttggcagcaccatatgtgatttttctgttttgtactacaacagtttgaacctagcaccatagtaacaaattgtagatgctcaacaaaatattttaaaatgggtgaatgcattagtcaattaattactcaagtaatcttgcaaccaccaatgattcaataaatcaagtagtcaattgctattatcacaagtaatgttgccttcagtaccttcaatactttattttatttctaaaatattattccccaattaaaagattaaaaggttatgtcagttaagaaatttaaagtttcaagtaacagaaatcttaattcaaactgaatgaaaataaaatgaaaaaaagttttagctcgtgtaaattaaaattgcatagtcagatacagcttgatycagtaattcaatgtatcactgatatccactttcctctgatccatttc

SEQ ID NO: 842686 - DNA, 575 bp, Homo sapiens
atgcaatttttttagagacagggtcttgctacattgcccaggctgttcttgaactcctggactcaagcgatcttctcaccttggcctcccaaagtactgggattacyggcgtgacccaccatgccctgccagccaatgttttaaatgtgtcatatgaattagctattttaaagagagtaatcttcccttcttccagtttaataatagttattgaagactggcagtatatgcagtttttccttagtaagagatacagtaaacttactacttataaaaccagtatatgtattacccttaataattccataaaaattacaaacctgattctgtaaaccatgaagaggtagaatttggattgaccgtctcaaatcgaaccacttggttgaagtctctacctctactgacaccaacacaaactaaagggtactcctgttcaggaactaccagcatttcaaacattctaagtggacatggtataggaaaatctatgtgctagagaaagaaacaaaaatacattaaaccaaggaaaataaaaaccgaataattctatgagaatactataaaacagctttcta

SEQ ID NO: 842687 - DNA, 323 bp, Homo sapiens
aatgtatgtgatggatgcctcaggtcgtcctaaaatgtataaaactaggctgtaccctgaccaccttgggcatatgttctcaggtctcctgaggactctttcatgggccattggtcactcatatttggctcagaataaatctcttcaaatattttacagagtttgactcctttcacgaacaactgaagtactgttaatttcatttattgtttctaccatatgaaatggagtttagaaattatgtattttgaatgacaccacacatgaaattaaaagttaatwtgaaattgactttaaaacacttttacatgtaacgtagatgt

SEQ ID NO: 842688 - DNA, 626 bp, Homo sapiens
taggttctccaggaaagagtggaatgtttaactcttgccaatacacgttgaatttccctaattcaaaaatctgatatacacaatgctccaaaatccacaactttttgagcactgatgtgatgcaaatgaactaaattctgcaatcaaaaaacagagtggctgaatggataagaaaataaggcccaatgatctgttgcctacaagaaacacatttcacctatgaagatacacagactaaaataaagggatggaaaaagatattccacgccaatggaaacaagaaaagaacaggagtagctatatcagaaaaaaaagatttcaaaatagaaactgttaagaagagctaagaaggtcactacatatatatcctctctctctctatatatatatgtatatatatacgtatacatacacacacatctatctatatacatcctcttgctgaattgatccctttatacatataatatatatgacatatatttatatattaaatttttgtagagcattcagacaagagcaagaaataaacgagcatccaaattgsaaaggaagcagtcaaattatccttgtttgcagattatatgatcttatatttggaaaaatctaaagactccaccaaaaaa

SEQ ID NO: 842689 - DNA, 607 bp, Homo sapiens
tatataagatttctgctgctgagctaggttacatcacattgtatcagaccaacacttctgctgagaaaatatttaaaaatgaataaaatattttaaaaaataaatttaaaaacatcagaaaaccctccagtcagccaaaattttagaggtcaacatcttagagagacaagagacaaaaagatgaaaactcgagattggaagttgcactgagcttggagctatttacctactctaattagatcatgatgacctgtgcttagcataactagtagaagaaaggctgagaagctgatcaaaatgttttatttgacagtctcatgaagatgcacaaacatgggatgtggggatgggagggtggtgggccctggaatagagcctgggatttcagttgacatccccaaagagatgcatccaagaaaatggccaaagagaatatagaatcacacttatgaagactgaaatctaccctgaaacaatctaatttctgataggattaaagcaatctgctcgttatgtaactgctggttggtagaaaagaaagtaaaaatagcatttctggatccacwaataacctatatgaatgttcacgaacaacgtctaacattta

SEQ ID NO: 842690 - DNA, 613 bp, Homo sapiens
tacaagtgcatgtgtctttttggtagaatgatctattttttttgagtatatagtcagtaatgggattgctgggtcatatggtagctctgttttaagttctttaagaaatctccaaattgctttcacaagtggctgaactaatttacattccaaccaacagtgtataagcattcccttttctccacagcttcaccaacaaactgttattttttttactttttaataatagctattctgactggtgtgagatgttttctcactgtagttctgatttgcatctctcttatgattagtgatgttgagtgatttttcatctgtaacaaacagatgaaacaggctacttgggtgtcttctcttgagaagtgtctgttcatgtcctttgcccatttttttaatggagtgagttggttttcttttgttgatttgtttaaatttcttacagattcttgacattagacctttgtaatattattagatggacagtttgcaagtatattctcccattctttaggttgtctttttactcrattgatggtttttaatgtgcagaagctctttggtttaattaggtcccactcatcagtttttgtttttgttgccattgcttttggga

SEQ ID NO: 842691 - DNA, 613 bp, Homo sapiens
tacaagtgcatgtgtctttttggtagaatgatctattttttttgagtatatagtcagtaatgggattgctgggtcatatggtagctctgttttaagttctttaagaaatctccaaattgctttcacaagtggctgaactaatttacattccaaccaacagtgtataagcattcccttttctccacagcttcaccaacaaactgttattttttttactttttaataatagctattctgactggtgtgagatgttttctcactgtagttctgatttgcatctctcttatgattagtgatgttgagtgatttttcatctgtaacaaacagatgaaacaggctacttgggtgtcttctcttgagaagtgtctgttcatgtcctttgcccatttttttaatggagtgagttggttttcttttgttgatttgtttaaatttcttacagattcttgacattagacctttgtaatattattagatggacagtttgcaagtatattctcccattctttaggttgtctttttactcaattgatggtttttaatgtgcagaagctctttggtttaattaggtcccactcrtcagtttttgtttttgttgccattgcttttggga

SEQ ID NO: 842692 - DNA, 503 bp, Homo sapiens
tcaaaccacaaagtcttaaatagatgaaaataaatgcatgtgctactgacataatagagataggaaaaccaagaacaggtagggaaatctgaataaaataaaatatttaagccagatttttttattgatataattattgaacttcatttttgttatgagctttcatgctccagttaaattgggagacacagtcaattattaagtttacttttttttttttttttagacaaagtctcactctgtcatccaggctaaagtgcaatggtctgatctcggctcactgcaacctccatctcctgggttcaagcgattctcctgcctcagcctcctgagtagctggatttacaggcatgcaccaccacacccagctaattttgtatttttagtagagawggggtttctccatgttggtcaggctggtctggaactcccgacctcagatgatctgcctgcctcggcctcccaaagtgctggaattacaggcattagccaccacacttggc

SEQ ID NO: 842693 - DNA, 603 bp, Homo sapiens
atacactctcccaagactaaaccagggagaagttgaatctctgaatagaccaataacaggatctgaaattgtggcaatattcaatagcttaccaaccaaaaaagagtccaggaccagatggattcacatccgaattctaccagaggtacaaggaggaactggtaccattccttctgaaactattccaatcaatagaaaaagagggaatcctccctaactcattttatgaggccagcatcatcctgataccaaagccgggcagagacacaaccaaaaaagagaattttagaccaatatccttgataaacattgatgcaaaaatcctcaataaaatactggcaaaccgaatccagcagcacatcaaaaagcttatccaccatgatcaactgggcttcatccctgggatgcaaggctggttcaatatacttatttttagagagtgaaaaaaggaaaggaaaggaaataaagaaaagaataactcaaaacttatccctctacttgtttgccttgattatcagtgtttattccacwaaaagtatttctttaggtatcattcagaatagctaaaataaaaaatgatgacaacactaaatgctattgagg

SEQ ID NO: 842694 - DNA, 614 bp, Homo sapiens
ggaaaatgatatgcatagcaatctttacaaactaccatcttaataaggctattgtctcttaggtttattatatgttaccatttcctgaattttctgcactcctttaatatgtaaatactttcagatatcctttttgagttcttttcatatgacttagagtgtagagtggtactcaggtttagtccttagatctcttctcttttcctattttttcattcccaaactatacgcttttttgtttcatagctttaaaagcaatctatatggtagctcacaaatttgtatttccttcttattttcttctcttaactctgtattcaagtatctaatagtttatcagataatttcttcaataactaaaagcatctcaaattcaacatctttaaaattgcaattcttatttccacactatcatcaaacatttttccccagccttctactcttcgacaaatggaaacaatctttctggttcataatgcaaaacaaaccttggagccataytccaattggtatgtttgtttctcttttttttttctgacagtctacatccaattcaaatttcaactttaaaaatagattcagaatcttacaactgctaatgctactactgtagt

SEQ ID NO: 842695 - DNA, 499 bp, Homo sapiens
tggtggccacccagattgagggcgggtctgtctctcccagtccacttctcaaatgttaatctcctttggcaacaccctcacagacacacccaagaacaatactttgcatccttcaatcaaattgacactcagtwttaaccatcacaaagcacaaattgaaagactgtgttaacaagtcagtggaaaacattaccaaatctctaggccaattgtgatatgggaaaatatgtacattttctagaaatttttattattttcccaaacctttcattataaaaaatgtcaaaaatacagaaaagtttaaatgtttgcacacagagctcacatatacctgtgatctaacttctagaataaaaattgttgctctatttgcttccttatatattcagacatctgtttatcttttttatcagtccattaattcatcttatttatttggtggatttcagtgcatattgtagacatcagtacactttatccctaacatcttagccacaaa

SEQ ID NO: 842696 - DNA, 474 bp, Homo sapiens
caatggaacacacaaataaaacttagcacaactgrtgcttcctatgaaactaagaaaacgcaaagtgagcaagacacgtagcaacggaataatgcttacttcatcaaatttgagaggcaaagagtacactatacatgaccattcatcttgaaaacaatgtaacaatgtaagattggggaaaactcattacgccagaacttagaagacagcacaggcttgctttgccacatactacgtgaccttgggaatattccctaaatctctacgtttctcaggtgcaaaatgagactagctattccctaaggcagtgttttccaaactgtaaattgagatacattggtagatagtaatttcaatttggggaaccaggagcagcattaaaaaaaataagtatatttttaaaatgcaaagactaggaaataaagtgcattcgattctgtacaaagtgtaaataagtattatttcaggaagctt

SEQ ID NO: 842697 - DNA, 603 bp, Homo sapiens
ggctggcatatctgtgtgttggtttagcaaatacatatcaaaaattcttacatgaaaagctcctttataacaagatgtgctcactctgtttagatgacaaaatcccatgaataaatccaaaaagagtctattttatataaaatcccaccctgttggaagtattgcaagtttccactgaaatttttaatctgacttctagatatatttttggagtgttgtctattttgtcagcctgccagattatgtcaaaatgttgatatgtaataacagtttatctcgtgttcctttatccaccctatttacccacctcagctgtgttaactgtccttgactgattccactgcatcattaatactgccatagggaaccgtgccctgatcattcatactgccactaataggatgccaagtggatgtttcaaagttggatgctgatgattatcattgcgatgtatatgacatcgctaagacarcattttcagtcaaaaatatggctgccgtttaaggtgtgagctttttgctttttactagaaaaacaatgatatgtaaatttcttattataatttgtattactctactcttatttgctatttgtcaactctgc

SEQ ID NO: 842698 - DNA, 597 bp, Homo sapiens
tcattctttctatttttttctactcattaaccatgcccycctccccctagaatgaaattttaagttcaccattgaggatacttagaatttaaaataattctaatgtgttctgaataagccatgaccaaatctgcatatacatggctttgaaaagaattaatttttaaggtatttttttctcctctttctagattgtgaggtaaattttaaaaaaattctgtacagaaatggaatttaacttggttattggtaattaggccaatagagaccatgtttcctttggaagcctaaattatctacagggattatgaagatcaaatgaatccaagtttatttttaaggtaaataaatcatttaaaaaaaatgaaagccaggcatccattttgcattgtgaggagttcttggggctcagaaaatactcctccaaaaatatggctctttggcatgctttgaattaaaggaaattaaaggcatcagaaataagcctcagaaccaaggtctctccagtgttccctcccaagccccactctgatctcttttctttcctgaagcattgggagctactcttgctggaattttattttttgtttttttaga

SEQ ID NO: 842699 - DNA, 514 bp, Homo sapiens
ttttatgcgtattcaattgttgattatctgcatgagggtattccttgttatggataattcacaaaacatgttttatgttttttttttttwataaatcctggaccagcttcctgctataagcaatacactttgtagccatgtcttctactgctctgttggtaagtgcttagcaacagaacctcatttaaacactatcctagataaaatataattaggtaaatagatctgtcaaaaacaatattaaaattccaagccaaatagaaatgtctttgggattatttgtgctaaggcttccttcaattgtcattaataattaaaggtgccactgtgtttattctccctttcattttaaaatgaggccaattagagcgggtctcctgtgtttttgttatagtacataagccactcttgagaggtatgcacactgtagacagtcaatggataatggatttgctaacaaaatacctttaaacaaattattggacatagatataggactccacataaagctttt

SEQ ID NO: 842700 - DNA, 581 bp, Homo sapiens
ttttgacaaaccatgctatttaagaaaaaatttagggagtggagagtccgattattgtttttcatgagkgttgaagtctatggaaacaatgaaggaatgtacagaaagtaaattagataaagatttgatttataaaaattgtccaggtttagaaatttttatatatccaaacagaagtcatgaatcaggtttccccaggctgtgaactagactaaggtggcatgtaccctcacattccaaagctgagtgccctctctgtccgtgtcacccagttaccctccttgggtgacataagagaagcccaacaattcctgggggtgtctcagagtccagcaggaaagatttatttgcagagttgagatgtcagcatattccgtctgcccacaaccatcatcaccatcatgggagtggactatcgctgtttagtttcaagggaaagaaacatggatgtgtggaatgaagccagccgtgagcaacctttaaaggcacccacccagggccatcaaggcacgagtgaggaggagtgtgaactgtgcagaagcagaggggagttgtcagtggctgggtgcacatggcattcc

SEQ ID NO: 842701 - DNA, 625 bp, Homo sapiens
caggcctctgatccatctccagctgtgcgagtcaagctgtctatccaccagatcatctgctgaactctctttgtcagtgtcttgctggctttagatttttccacatatttttctttgctggtctttgaaacttccttcttgatctcttgcaagtcatcactatcgtcctggacagcctccttcagcagctccagctcctccttctccttggttagggacttattttgctccttcagtttagaacacgcatcgctaagtacacccatttcttctttagttattttctcctccttcaagatctccagcacaggggcagtgtccttcagggcctctgagggcaggataacatcaggcacttctggctgctggtcagccactggcctctcaggggtggcttcttccacttcgtttcttgggatagcttctgcagctcattctccctgtgctccagctggatggccgtctcctcctgtaatgtggcctccaattttactttgttgtccacctgctcacccttaaccttgtccactttyacctgggctcccttcaccactgtctctggaagagtctgcaaggtggatttgagctggtcagtaggagagagggtgtctgggaggtacatagc

SEQ ID NO: 842702 - DNA, 588 bp, Homo sapiens
atatttatcattttcttatgatgagaacacttaaaatctactttcttaatgattttccagtatataatatattgttattaaccataatcactatgttttacaataatctcttgaacttatttctcctrtctgactgaacttttgtatcttttggccaacatctccccagtcccctatccccaggcccagcctctggcaaccaccattctgctctctgcttctacgagtttgacatttttagattacacatataaatgagattgtacagggcttgtctttctgtgcctggcttatttaacttaacgtaatgttctccagatttatccatgttgtcgcaaatgacaggacatacttctatttaaaggctgaatagcctttgtgtatttgtaccacattttctttatccattcatctgtgtatggacacttaggttgattccatatcttcgctactgtgacagatatttaaaaaataagagaatttcatgtgtgataagtgatccaaagaaaaatgaaaataataaggttctaatgtggttgagtcaggggaccaacagtagatggggtttgagaggcatttcaggaaatt

SEQ ID NO: 842703 - DNA, 629 bp, Homo sapiens
gtcaccaggtagaaaatggtggaggcattatttcctctttctgaggctataaaaaaatggcttcaatggtgagaaggcaaaccatttaaacaatgaagattagattataccccaatttaattctattcccttcttgtttgttatttctcatagatgaaaatttagaatgtaataattattggaaaggaataagaagtgaattacctcttaggagataccctgatcagtgcctgctttaatcagacaaaacactaagttttaaaaattacaaccacaatattatgcctaactaaaattgccaatatgaatacttttttacagaatacattacatgtataccagaagagaaatacttgtttcctatcctctgaccttcagtagaaaaaaaatgttatcactaacaaggatcagaaaaataattttcaaggcagagcattaactcaatggggatcaaaatcttttctgaatacttaaaatagactgagtcagtcaacgagaaattgctaaatttcttctatgagagtacttttcaaaaaggaagacaatttattggaagaatttgtagctggaaacaytgttcattaagaaaacattaagttaccctgagaaagactcttaatattaccagt

SEQ ID NO: 842704 - DNA, 551 bp, Homo sapiens
aggtcagaaatttggcatggcttgaccgagttcactgtttagggtctcaaaaggtggaaataaaggtgttggacttgcggggctcattcaggttgttgatagactttaattacttgccgttgtgggactgaggccaccgtttccttgctggctgttggcagggagtctctcttagcttttagaggttgctctttgttccttgcatgtgacccttctgtcttcaaagtcaacaattgtgcatcaaattattttcaggcttcaagtctctctgatttcatcctctctaccagccagagaaaatgttgcttttaaagggctcatgtgattctctgtagcttagggtcaaccaatttggaacttcatatcttcaaaatctctttatagcagcacctggatagtatttgattgaataaccagaggacaggaawcttggacgtctatcttagaattctgcctaaaacgaagacattatttaaaacgagaagataattattataatttgtgaatatatatccttatagtatattattccattttaatcatctgatcat

SEQ ID NO: 842705 - DNA, 567 bp, Homo sapiens
ggagggaggcagggggagatgcctttctggagttcatctgattttagaatggaagtttcccattatttccstattttacagatgagagcagtgaggcacagagaaggtgaccgcctgaggtatctcggttggtaagcagcagcgctgggcttggaatccggtttgaacctgcagcatgtgacccgctgttctctgaatgctgctgctacacgaggttattctgctgctatggagcaggctgcttgtagctgggcctgaagctggcatttccaggacttggtgcttctgctgaggttttctcctcctctgaatacaccctgccggggttcagcaccagctttgccctaagcacgtccacttcctagaaagggagggcagcccccgacagggagaggtgttttggtatcttggcaaggcagtcagggcagagggagaaacatgggcaacaaaaggcttgcagattctttcatctttgtactttgtcccggggagataagcgagtccaaaatacaaaacacccttggatatgtggatccgtgccacaagtcaggctcgtagattctccat

SEQ ID NO: 842706 - DNA, 630 bp, Homo sapiens
tcccttctcagcagtgcccaggtgaggctaaggggcttctgaggcgggcatggggtgagggtgccacaggtggaggcaaggtctgacttgtggggccacgtgttkcagggagtcgagggttttaataagatcccaggaaaagggggtgtgtgttctcagacttccccactcctacgtctgctggtctgggggctggagtctaagccaggctcggaggatatgcaagcccacatgggggtcccaggcacagagtccctctctctgcccctcaatcggatctgggtggggttgggagtcccagacgaggttcccggcgcgatggggccgggatgggggtcctgggcacagtcagagtccccaccccctcccccgggaactgcatcggccagacgttcgccatggctgagatgaaggtggtcctggcgctcactctgctgcgcttccgcgtcctgccggaccacgcggagccccgcaggaagttggagctgatcgtgcgcgcggaggatggactttggctacgggtggagcccctgagcgcggatctgcagtgacccaccactgtcaggtctcagagccacccgcgccctcctcaggcacctttgcagattccggggaatcaacctgtgcctg

SEQ ID NO: 842707 - DNA, 309 bp, Homo sapiens
tgtttatttgcctttttcaccctggttctctcatgagtatacaatggagtttccaggaggctctgcgacacctgwtggcatcatcaccagatggctaatggattgtgtgctggtgtatctcacgcttttaaatgtcccagtttctagcccggtgcagttgcaccagccctgctactcgggaggctgaggcaggaggataatttaagactgggagttccagaagaagacctggtgtcaaaaaaaaaaaaaatggggcaacgaaaatgagagcaatacagctttcaagaatgggaggggccaggggtggtg

SEQ ID NO: 842708 - DNA, 613 bp, Homo sapiens
gtgggcagatcatgaggtcaggagtttgagaccagcctggccaatatggtgaaaccacgtctctattaaaaatagaaaaattagccaggcgtggtggtgtgtgcctgtattcacagctgcttggatggctgaggcaggagaatcgcttgaacccaggagtcagaggtttcagtgagccgagattgtgccactgcactccagcctgggtgaaagagctagattctctctctcaaaaaaaaaaaaaaaaaaaaggaaagaaagaaagaaaagaaaagaaaatcctttttgctttaacttgccttgcaggtttgtagaaaactcaattgttgaaatttgggtggatatatttctggattttctattctattccatgttggaccaataccacactgccctagtcactgttgcattatagtatatctttaaaggagtaatgggaatccttcaactacattttttccccaataatttttggctattctgcttcytttgtgtttctatgtaaattttatcatcagtgtgtctatttctacaaatagtcctgatagggtttgaattgggatttctgtgaatctatagatcaatctgaggagacttaataatgatattgatt

SEQ ID NO: 842709 - DNA, 612 bp, Homo sapiens
acggggaccaacttttgtggccaggggaagattctgcccttgcccacagcctttggctgccgtactaggggatgggctcttgttaagtgttggtgacaagtggagacaccaccgtcgcttgtgacgcctgccttccatttcaacatcctgaagccctatataaagattttcagcaagagtgcaaacatcatgcatgtgagtgccttgaactcagcatcccagctgcagccttggggtggagggatcacatacaattgggtctggaatgttggctctcctgggtgggtttggggccattgctcttcctctctgtgccttgatttccccatgaggctaataatcctcactaaaaggtggtaggagcatgtaatggactcatgtctctgacacttagtaggtggtcagaaggagtcaatttccacatttttctcacagaagccctgtaaactcaagaaaggaatgatgacacgtgcatagtagtcattgctgagtacagatcacttcaaaactaattggtttagagcaataagggtttatatttgctracaaatctgtgggactgttggccagcccttctgcatgtggataggatccctcatggtataagagcag

SEQ ID NO: 842710 - DNA, 474 bp, Homo sapiens
agagatggggttttgccatgttgcccaggctgggttccaactcctgagctcaagtaatctgcccgcsttggcctcccaaagtgtgagaccctgtacatggactgctgatttataaatctgtgagctaataaattggatattgtttcttttttctttttttgagacggagtttggctcttgttgcctaggctggagtgcaatggtgcgatctcagctcactgcaacctccgcctcccgggttcaagcgattctcctgcttcagcctcccaggcgtgcgccatcatgtctgggtaattttgtatttttggtaaagatgcagtttctccatgttggttaggctggtctcgaactcccgacctcaggtgatccacccgccttggcctcccaaagtgctgggattacaggcgtgagccactgcgcccggctggatgttgtttaaggcgctaaatttctgctgctaacacattgcctatt

SEQ ID NO: 842711 - DNA, 626 bp, Homo sapiens
tagcgatacatgagatgtatgaaaaggttaagaaggttaagaaatctcatcatctccatagtatttgagagttgtgaactatgttaaaacatataggctatcactgtatatatttttcataattggacatagcaaagagagagccacaaattcagttactttaatttgttttgcttcttctaaggaattagattttataatggagtctggagcagtaaatgcattataaaccttgtgttatttcttttcagttttgaagataagacattaaaaacaaaattaattcagaattaggtatgagactgtccaaaatatctgttctgggatggacacttcttgagttacagaaatgcaatcataagattcattgattgagaagtgtaatggagttaaacgctatgaggagaaattaataatattgtatagttagtccaccaactggtaaaaaaatggttgtttttacagagtagatcatttgtgctgtatgtggcatcataagayttaatggtgatttcagtgaaagatctggagatgcttcaacaaatttagacatagctgaaatcattttaagacaaggaggataggttgtaatcattataataagaaataggctataataggcaatg

SEQ ID NO: 842712 - DNA, 626 bp, Homo sapiens
tagcgatacatgagatgtatgaaaaggttaagaaggttaagaaatctcatcatctccatagtatttgagagttgtgaactatgttaaaacatataggctatcactgtatatatttttcataattggacatagcaaagagagagccacaaattcagttactttaatttgttttgcttcttctaaggaattagattttataatggagtctggagcagtaaatgcattataaaccttgtgttatttcttttcagttttgaagataagacattaaaaacaaaattaattcagaattaggtatgagactgtccaaaatatctgttctgggatggacacttcttgagttacagaaatgcaatcataagattcattgattgagaagtgtaatggagttaaacgctatgaggagaaattaataatattgtatagttagtccaccaactggtaaaaaaatggttgtttttacagagtagatcatttgtgctgtatgtggcatcataagacttaatggtgatttcagtgaaagatctggagatgcttcaacaaatttagacatagctgaaatcattttaagacaaggaggataggttgtaatcattatawtaagaaataggctataataggcaatg

SEQ ID NO: 842713 - DNA, 624 bp, Homo sapiens
tctctgtcttctatcaagccaaaaaaatctttaaccataatttgacctaagagcattatgctcaaggctaaacagatctctctctctctctctctctytttttttttttccctaggaagaacccgtggaaattcagtgacccagatggaagggccagtgactctctcagaagaggccttcctgactataaactgcacgtacacagccacaggatacccttcccttttctggtatgtccaatatcctggagaaggtctacagctcctcctgaaagccacgaaggctgatgacaagggaagcaacaaaggttttgaagccacataccgtaaagaaaccacttctttccacttggagaaaggctcagttcaagtgtcagactcagcggtgtacttctgtgctctgagtgacacagtgacagggactgcagggggagctgagcacaaactctgagcagcacggggggcccggctgctgagtgtcagccactgtgatccactctggttctagcacagtctgtggttgtttgtgcctcagtttctctgattgatgcagtaatcatacacatggccagaggagaaaaacaagaaatgaacatccccaaacccagctcttggttagtgaaat

SEQ ID NO: 842714 - DNA, 624 bp, Homo sapiens
tctctgtcttctatcaagccaaaaaaatctttaaccataatttgacctaagagcattatgctcaaggctaaacagatctctctctctctctctctctctttttttttttccctaggaagaacccgtggarattcagtgacccagatggaagggccagtgactctctcagaagaggccttcctgactataaactgcacgtacacagccacaggatacccttcccttttctggtatgtccaatatcctggagaaggtctacagctcctcctgaaagccacgaaggctgatgacaagggaagcaacaaaggttttgaagccacataccgtaaagaaaccacttctttccacttggagaaaggctcagttcaagtgtcagactcagcggtgtacttctgtgctctgagtgacacagtgacagggactgcagggggagctgagcacaaactctgagcagcacggggggcccggctgctgagtgtcagccactgtgatccactctggttctagcacagtctgtggttgtttgtgcctcagtttctctgattgatgcagtaatcatacacatggccagaggagaaaaacaagaaatgaacatccccaaacccagctcttggttagtgaaat

SEQ ID NO: 842715 - DNA, 657 bp, Homo sapiens
gatgaaaaaagtagaatcaacagggacagcatcacttactcaaagcatgaattacagcaaaatggaagctaggaatggaacacagacattgtggccccttgtcacttgctttttccatgaaggatgtaaagtaggattcagtgtttgaaaaaaggagtggtatgttgtaattttaaactaaattatacttttattacttaattatatgttcattagaataaattaggagatataaacacccagaaaacatagaacactcctataatttcataacctagaaatgatagctattcgcatgcaataaaatttttggtgcacatgtaaagctatatttttgtataaatgtggtttataatacatcaagtatttattagcacacttttctttcaactttatatttaggtattttcaactcaggaagcaaatattgaagaataattttaaattattgcctagtttccattacataaatatgcttttttaaaaactcttttttttggtattgtttctacttatacagtattacagataatgtttttattaacatcattaaagktgtagttttaatggaagtgaagttgctggaataaagaaaaacacatgatactgaatcccttatttccatggagctatttctcaccaaactgtaatttcaac

SEQ ID NO: 842716 - DNA, 569 bp, Homo sapiens
tacaaatctttacaactcctttagtgaggatttgtcaggtcttggattttgtcccttcttacaagctaataagcttgtttcattgaggctgtcaataaaaacacagggctccttagtaagagacaaaggatttttattacttatggcacaacaaacagcatgaacattgatatatttccatcagtttctcctgcctttaagtcctcaaaagatgatgtaatgggtagtaagggatgctacccatgaagtggtattatgtcacaggtgaggaactctgagcttaggaagttcattgcttttataacaagcactcagccagcttgctctttgtctcagagggagacattacctcatctcccaaggttgcttgctggcataactctgagaagtgatccaggtagaatgctcatgtcattacactgttggcacactcatcaagtcacgtttgagtacaagagactcatggtggactgcctttcaataatatccactccatggtcttacactgggttagttgctagaaatttattttatgagtatgccastttgtcagtcattctgatttgtgt

SEQ ID NO: 842717 - DNA, 628 bp, Homo sapiens
atttcatatgaattttaagaaacagatatttaaaaaatttgttattttctacctctacttttgacagctatgaagcactttagaacatcaagaaaggcaagataggscaggcgtggtggctcacgcctgtaatcccagcacaccactgcactccagtctaggtgacagagagagactccttctaaacaaacaaacaaacaactacaaaaaaaccaaaacaattagccgggcatggtggtgggtgcctgtaatcccagctgcttgggaagctcaggcaggagaatcgcttgaacccaggaggtggtggttgcagtgagctgaaatcattccattgcactctagcctgggctacaagagcgagactctgtctcaaaacaaaaacaaacaaacaacccccccaaaaaaaacacaccaaaaaacaaaaaaaactagatctatacagagcagaggcctcagaaataacgccacacatctacaaccatctgatctttgacaaacctgagaaaaacaagaaatggggaaaggattcctgatttaataaatggtgttgggaaaactggctggccacatgcagaaaactgaaactgaaccccttccttacaccttatacaaaaattaactcaagatg

SEQ ID NO: 842718 - DNA, 369 bp, Homo sapiens
gcaaataggaggaaaaaagcttgatcaaaagttctaagcaattgtagctctgaccccaagagggcagtatttgcattcgycccgcctgcaggtctgaatgtgtagtatgtgtaacatagcgaagctggtctctgattggctagggataccctctgagaaaccctttggttagtgttaaaaaaaaagagaagatgttgaatacacaagtcaacttctgggagcagatctctgcagaataaaaatgaaaaagcatctgacgaccttcttggtgattttgtggctttatttttatagtaagttagtggagagttttagcaaagttaacatagtaagtcaagggaatattttcttaggatttggggtgaagat

SEQ ID NO: 842719 - DNA, 613 bp, Homo sapiens
ttttcttaattttattgatatttttagactacgttgtgtgtttgcaagtttttttcaactttttgcaaatctcmaaaaatttttccaatatatttattgaaaaaaagttcacatataggtggacccatacaggtcaaacttgttcaagggtcaactgtagtctccactgtaatttatttttcttcctttatggttagggttttttgtgcacttttaaagatattgctgtccacttctaatataatacagttgttctcctgtgtcttcttttaaaactttatagcttcacccttcacatttagatgtctgacccatctggaatgtgtgtgtgtgtgtgtgtgtgtctgtgtctgtgtgtgtgtgtgtctgtgtgtgtctgtgtgtgtgtgtatatatatgattaaacaattactttggcatctatattgaaaagaccatttcttccccactgaattgcattggcacctttggagaaaatcaagtgattacatatgtgttcatctatttctgggcatgattctgttaaatcatctttttaacaattctcataccaatagaccattttctcttaattattgaagtttcacataagtcttgaaatctggaaatgcaa

SEQ ID NO: 842720 - DNA, 549 bp, Homo sapiens
tagactacgttgtgtgtttgcaagtttttttcaactttttgcaaatctcaaaaaatttttccaatatatttattgaaaaaaagttcrcatataggtggacccatacaggtcaaacttgttcaagggtcaactgtagtctccactgtaatttatttttcttcctttatggttagggttttttgtgcacttttaaagatattgctgtccacttctaatataatacagttgttctcctgtgtcttcttttaaaactttatagcttcacccttcacatttagatgtctgacccatctggaatgtgtgtgtgtgtgtgtgtgtgtctgtgtctgtgtgtgtgtgtgtctgtgtgtgtctgtgtgtgtgtgtatatatatgattaaacaattactttggcatctatattgaaaagaccatttcttccccactgaattgcattggcacctttggagaaaatcaagtgattacatatgtgttcatctatttctgggcatgattctgttaaatcatctttttaacaattctcataccaatagaccattttctcttaat

SEQ ID NO: 842721 - DNA, 482 bp, Homo sapiens
acttttgaacttcacttccrttttctagaatgtagatgggaatttccaactccttacaacacagagctcactataggcttctgggatttaatgacactttccacaagctccatggagcagaggaaactttatttggtacattgaggaagaaatgatggaagaaaaggtctggatagatacatccttatgatcagttttcctcattctgtgccagcctcttagactttaaacctcataaatgatttcagtagacaccccctgagttgaggatgtctggttgatatcctcaccgtcttctcaggaacatgactaaacctggggaggaagacatagaaaagcaactgctctatcattggctgacaagatcctgacaacaacacaatgagagctgcactccttgcaagtctttactagtagctgttgcttctgttctctggaaattctttaaacctagaatcagacacaaaaactgaactctgggt

SEQ ID NO: 842722 - DNA, 504 bp, Homo sapiens
atttgttcctattgcctcactgtcataaagaacattgtgttctacatctttacagattcaccttagtttgtgtgtatgtggaagtgtttattttaatgagatttctgaaactgaaattactatgtcaaagggaaggtgcatttaaaatttttggagaaagtggcaatttgccctccaaatgatgtaactacactccatataatacatatatatgtattattatacacataatgtatccattataactattatataattaataaatataatacatataatgtgttaaatagcttccaaccaacagtaggtgaaagaactcattttacatttttataaaaattgaattgagaattactaacggcttttatttttattttacttaattattctatttatttattttgagtctgggtctcactcttgtcacccaggctggagtgyagtggccggatctcggttcactgcaaccttcacctccaaaactcaagcaatcctcccacctca

SEQ ID NO: 842723 - DNA, 574 bp, Homo sapiens
aaagaatggaaaaagagatccatgaaaacactaatcaaaagaaatctggaagggctatattaacatcagacaaatgggacttcagaaaaagaaatattaaagaaataaagtgaaatattacataattataaaagggttgcttcactaaaaaaatgtttaaagtgcttgtacctaccaacaaagcttcaaaatatttgaagctaaaatggttagaactaaaagaaaaatagacaaaaccgctattacacttggagacttaaaccctttgtgttcagtaaataatagaacaagtgttatagttagagaatcagcaaagatgcagcagacctgctcaacactattatattgacatttatggaacactccagtaaacaacagaaagaacataaagccatgcttagaagaaaatttataacagtaaacatttacattagaaaaagaaaaaaggctcaaatcaataattttatttcttccttctgtgtrtccccagtgatgaatgtcctgcacagaaaaaagtaatcctagcaatccaagaaactctgtttttgagttcaggcaaagaagagtattttct

SEQ ID NO: 842724 - DNA, 506 bp, Homo sapiens
tattttcttaaccttactctacccagtaayccattttaaaagcctcctctaaaaactttatcacattaaactccttcattctgaaaattttaaaggcaaatacaaataaaaataagaaaacaattttaattatctctgatgcaaaaagagaaagacactctcccctccctttcgttagagcacctactttagaaaacttgtaattgtgagttttctatccctttgaaatgtaggtaaatctttttaaaagctaaataaatcccttgccagttttacaatccaggactgtctttctcaagaacctgagagcatttttttcaaaatgtaatcacgaagggaggtagtgccctaatctagttttagtggagaataggtgcctaacttcagctggtactttgctcccagttgcaaaccaacctcctgtcgtaaagatatgagaaatgtttcctttgcatgaaggcaattacgaaacaggtggctacctcaattaccaggtaaattgagga

SEQ ID NO: 842725 - DNA, 523 bp, Homo sapiens
aactatagtgaatactatgctgattcatgagtaccctgaagaaccacaaatgagtacataagagatgcaagaaaatagatcctcagcaccctcgggaaacagtatttctttttgtaagaatctattgcctccgtgctgagaggaaagatggggctagctaattaattttttccttcccttccttgaaacccctccacccttggccccaattccaaatcagagtcatatgaagtcaattaagaagtatggaaccaaaaaatataaaaacaaaaagtgttaatgctggcaaggacatggacaaaagggaacccttgtacactgttggtaggagtgtaaattagtatagccactatgaagaacagtatggaggttcttccaaaacctaaaacctgagctactataagatcatatttacttatttytctacaccattcctcacagtgccaatagtaactatttggaacgttcttgagcagttaatccaatgttgtgcctgcagaactttaatttctacttcagtgaa

SEQ ID NO: 842726 - DNA, 585 bp, Homo sapiens
aacactgaaaccatcaaattttgtgagaatatggagcaacaggaacccttattcattgctrgtaggaatgccactttggaagatagtttggcagttactcataaaactaaacattctcttaccatatgattcagcaatcatgctccttagttttaactcaagtgagttgaaaacttctgtccccataaaaatctgcatgaaaatgtttgaagtacctttatttataattgctaaatcttgaaatcaaccaagatgtccttcaacaggtgaatctatcgacaaagtatggtacatccatacaatgaaatattattcaatgataaaaagacatgaccaggccgggcgcagtggctcatgtctgtaatcccagcacttcaggaggccgaggcaggcagatcacctgcagtcaggagttcgagatcaccctgggcaatacggtgaaactctgtctctaccaaaaatacaaaattagctgggtgtggtggcacatgcctgtaatcctagctactcaggaggctgaggcaggagaatcgcttgaacgaggatgtggtgagccgagatcatgccattgcactccagcctggg

SEQ ID NO: 842727 - DNA, 617 bp, Homo sapiens
tgttgttgagcaaatcatagtgtttcttctggttctgcaaggcaactgacctttggatctgggacacaattgactgttttacctggtaggctgcctcaattaaatactatttgcactgatttactaatctacaaatgtattctgtacatgtaacttaatgggcctgaggttgaagatggggagagacagcaacaatgcatactagaaagggtaatgtgagcagagaattatttatcagagaccaagaagagaaagagaagctttttgctaaggcttttagtaataggagttaatgaaaatgaatagaaaaaaatttcattttaacttagaagaattgctgaataatgggaacagattccataaggggaacctctgcttctgaaaatatttgcactaggaccagcctacgtgctacaaaaactgtctcacaccaagtctagttggtcacttacatttttagcctattctagtagctatttctaaataagtcttyaaacatagaggtgcctatatttaagatatttaaatgaggctctatttctatagctctctggtgcccttccagcaaagcattgctgtaacacattgcttatcatttctacaagtgagaacaagta

SEQ ID NO: 842728 - DNA, 638 bp, Homo sapiens
atgggaaatgtctgttacagtgccaaaatgaagataatcagtataaatattagatttgtcttaatattaagtttatgaaatgtaagtctttcagaagaactatctcaggatatatttattaggtcaatgaaatattttatccatgtgactggtatacacacttcaaaggagaacccaaaatggcaggcaggggagggtggctaatgaaaggtatggcatagtagttaagaatatgaattttggaataaaactgtttgggtaaatcctaattcagaaggttacttaatctctttatgcctcttttttctcatctgtaaaatggggatggtaatagtacctagctcactgagatgttacgagatttaaagagctaatacctataatggactttgcataatggcagcccgattaaaagttttcagttaatatgtttttattgctactatgtcaggttgctggagggaaggaagaaaaatggaaatgatccccatttatagtttttgtaaagtacagcattagagtgtggctctrgcaacacaggcaaactaatctttgggcaagggacaactttaccaagtaaaaccaggtaggtctggatgtttccaagtgaagtgcagttatccactctgttcattttt

SEQ ID NO: 842729 - DNA, 638 bp, Homo sapiens
atgggaaatgtctgttacagtgccaaaatgaagataatcagtataaatattagatttgtcttaatattaagtttatgaaatgtaagtctttcagaagaactatctcaggatatatttattaggtcaatgaaatattttatccatgtgactggtatacacacttcaaaggagaacccaaaatggcaggcaggggagggtggctaatgaaaggtatggcatagtagttaagaatatgaattttggaataaaactgtttgggtaaatcctaattcagaaggttacttaatctctttatgcctcttttttctcatctgtaaaatggggatggtaatagtacctagctcactgagatgttacgagatttaaagagctaatacctataatggactttgcataatggcagcccgattaaaagttttcagttaatatgtttttattgctactatgtcaggttgctggagggaaggaagaaaaatggaaatgatccccatttatagtttttgtaaagtacagcattagagtgtggctctggcaacacaggcaaactaatctttgggcaagggacaactttaccaagtaaaaccaggtaggtctggatgtttcyaagtgaagtgcagttatccactctgttcattttt

SEQ ID NO: 842730 - DNA, 538 bp, Homo sapiens
cacctctaggaatctcaatgagaagctaagaagcaggctacagtctcagaggtttatgacacctttttttttttttttggagacggagtctcactctgttgcccaggctggagtacagtagcgcratcttggctcactgcaccctccacctcccgggtccaagcaactctcctgcctcaacatctggagtagctggaattataggcacgcaccactgcacccagctaattttttgtatttttagtagagatggggtttcaccatgttggccaggctggtcttgaactcctgacctcaggtaatccacccgcctcggccttccaaagtcttaggattaccggcctgagccaccgcgcccagcctattccagtttttaaaaaggcatgtgactgttaagttctctgttcttagacatgatttcagtacaccacaaagcactgggagattttgttctggaagacgattccacctggttgggagttggggggaagagcctctgagagaagctccatcccacatttacggagacttgggacat

SEQ ID NO: 842731 - DNA, 550 bp, Homo sapiens
cttatggcctgggagtggtggcattcttttgtcatttctggaattacatttaactataccagaaagtgcaaaccaatggttcctgagcccacaggagagatcggccactacaaccttcaaaatttttagaaattggttcctaaagtttaaatatgggtaggccgggcactgtggcctataatcccaaccctatgggaggccaaggcacatggatcacttgaagtcaggagtttgagaccagcctggccaacatggtgaaactccgtctctactaaaaatagaaaaattagccgggtgtggtggcacacgcctgtaatcccagctactctggaggctgaggcaggagaattcccctgaacctgggaagcgcagaggttgcagtgagccgagattgcaccaatgcactccaacctgggtgacagcaagactcagtcwcacacacacacacacacacacacacacacacacacacacacacaccaaaaaacatgggtacacttcacataaaaactctgggtttccattatctagaaaaatcagaagttccagc

SEQ ID NO: 842732 - DNA, 450 bp, Homo sapiens
gatccccatcagccagccttctccagtcatctcatctcttctcctactcagcctagggttccccagctttctccatctactgaaagtctacctcattccacaaactgcaagatgtcagttactttaaaatcaaagtattagcctattcttgcattgctataaggaaatgcctgggcctaggtaatttataaagaaaagaggtttcactggctcatagttctacgggctgtacaggaagtatagtagcttctgcttttggggagccttcaggaagcttccaatcatggcagaaggaaaaggcatctcacatggcagaagcaagagcaagagagcaagsggggaggtgctagaaaccagatctaatgagagctcactatcatgaggacagtaccaaggggaatggtgctaaaccattcatgagaaattcgcccccacgatccagtcacctcc

SEQ ID NO: 842733 - DNA, 630 bp, Homo sapiens
ctttctccacccctttcagaagctgctagtcatccttcagawcctacctcaagagccacaccctctctggagtcttccccagcttctcttgaaggaatcattccttctttgtgtccctgcagccttttcttcatgcctctgtgttattaacacattgctatgaaaccttccctggccctttagctaaacttttaatatgtcttttctgtgtttaatttttctcttgagtgcttgtcactgtgtcctatgttatatatttcactgattcatcttgtttgttgtctctctaaggacaaggatgcttgtctgtctattcactgatgttctttcagttcttgggaaggagtctggcacattgaagatgctaagtcagtgtgtgttgaatgaatggattctgtcatatttatttgctgctatgtctgtggtcttatcaaatgctgagtccatttggtccttcatgcctagctagtacagtgtcctggtagacagtaatacacagtaaaagtgtattgagtgaacttgggaggaaatgggctcctaagttgttagtgctgctcagagggcaaaggcctagtcactgtggtttgaccacagtatggctcctgctacattgtggcatcttgaatacta

SEQ ID NO: 842734 - DNA, 550 bp, Homo sapiens
gtcatgttgtttcccaaaatgtcctgtctgtggctgttgtccaggggaggcaaggttgactctctcgttcagctcccgatcttcgatgtagagaggggacggggtgcagtgtgggttcccacctgcagcagctctgaagtatgtgactgagctcctgacctcagggacagtgacccctgcccccaacaggtggtgttataaccccacccctcagtgcccctgtgatcctgcccagccctagccaaggaaggcgtgtccccctacaaggagtgggtggtgggggctgctcagatggaaagcaggaaagatgttccccagaacctatggaggtggagggcatacacagcccatgagcggtagctacccggctcaaccatggtgcagaccccatcagagctacgttcctgctatgagaggagaacatcccactctgtgggtgaacmgagcctcgtgtacctccaagtccactgatggacattgagctgcttccagtccattgctgctgtggatatgtgtgcacaagtacatctgccccaacacccatttccca

SEQ ID NO: 842735 - DNA, 533 bp, Homo sapiens
gagggcagggcttttcttcacaagccactgtgccacatggcaaacccactytcatggacgggagggaaagccccagcttcccgagggtccccaaaggcatcggttgggcttaggaccatagaaacagggagcatggcctcctggcttggctcacttggagccagcactctgaaacatgttgctctttttagagcactgagatgtgggaggaagagggagaaaaagaaatgacttgctcttcactagggggtgcgacttggggatcacattttcatcgaggcttctgttatgaattttgcccttgcaaaattcataagttgaagtcctaacttccagtatctcagaatgttgactgtatttggagataggcctttacagaggtaattaaattcaaagagggtcatatgggtgggccctaatccaaaaggactggtatccttataagaagagattaggacatagacacacatagagatgaccatatgaggacacagggagaagactccatcttataagccaaggagagatgcttc

SEQ ID NO: 842736 - DNA, 431 bp, Homo sapiens
aagccagatagggactgagattctattactgaatgaaactcttataagggcttgggagtgcagatagggggagttctcaagaaattttacaagaaagtgttatgtattatgaagcatgggttattgtttgtttgtaagtaaaaaaaaataagagagagagagagattaagcaaaataaacattaagcaaggagaagctgctctaaccatttaaatgatacttttaaaatgaagattaacagcctttggcagactagaagaaaaaaaataaaagaaaaatgtcaagcagaaaacagttaccacagatttgatcagtatttactatcaactgtaagaccgttctaggcaggtggggtctatgggaaayacaaagataaatgagagagaatcccctaaaaccaataatattgctttatgtttaatttatcattt

SEQ ID NO: 842737 - DNA, 645 bp, Homo sapiens
aacactatataaatattaaattgacttccaaatgttgtttatgagaactagaataccgttcttgttatttgatatgtatttatggagtgtgtgtgttctgacttgagtctagctaatgtcccagwagggtaggatgttttggacgttgatgagtttttcttctgattctatttctaacagttaagcacattgtttaggtaactggttgttccttgattatagagtgttcatggccactaataaatgtcccccatatttaaatatacaagttatacctttgggatggcagggagctaagggccatcagctcttttatatgctaatacctgagatcaaggcacacgatattattcaatcaagctaatatttagctttggaaattaaagcataaattcatgaatgtgaatagtgttcttctttctgcattgatatttaaccataatgtatgtatgcacacaatgttccaagatttctctttgtttttatttttttgatgatgtatgtttcacttgctgcaatatttgttgatttcatgaatactactgatatttagggaaaggatccaagaagtgttgaactcctagtgtgtctttctttaagcttgtctccttgttaaggtgaaccttaacattcaaggttatggtg

SEQ ID NO: 842738 - DNA, 471 bp, Homo sapiens
gcaacaccgtgaagcaaaaagcaagtatttgccagacttatgggtgaaaaagtcttgttattttattctcttkccttgctagtgagactgaagtttttgtgatttattattcatttctattacttcttgtgtgattattctattccaaccttttattcactttcctcttgggaggtctgtgctgtccttattaacttgtgatactgttttatcttaaggatattattccttggtctgtaatgttggctgcaagtgcttactgccaattatatctctcaggttaggttcattactgggtattttatattgtgatgtgaaggggagcttttattttccattttgtgttcaaactaattattgccaaattatattatcagcaagctttggatttttgtgtattttagtctgtgcccagtcactttacagagctcttgcattgatgccaataattcttcaatgggctcttttaat

SEQ ID NO: 842739 - DNA, 642 bp, Homo sapiens
atccttgaatgactccaagtaccagtgtttgttaataattgtcaacaatgtttggctttgttttttcaatatttttartttttatcttagaaccagaaatatctttttctcttcacttctgggtcatgactgtgcaaaatactggggaaaatattcataaaataggtaataaaattttcctaatgggaagaaatgtacttggagtctacagtgctgacttaagaaacatgttgttgaagaatagggcaaaattctggccgggcgcggtggctcacacctgtaatcccagcactttaggaggccgaggcgggtggatcacttaaggtcaggagtttgagaccagcctggccaacatggtgaaacaccatctctatgaaaaatacaaaaattacccaggtgtagtggcacatgtctggaaatcccagctactcaggaggctgaggcatgagaattgcttgaacccaggaggtggatgttgcagtgagctgagatcacgccactgcactccagcctgggcaacagagcaagactccatctcaaaaaataaaataaataaaataaaataaaataaaataaaatataaaaaaaatcttatggattgaattgtgacccctactccttaaattcatgttgaagtcctaa

SEQ ID NO: 842740 - DNA, 525 bp, Homo sapiens
aaacctcactaaccctggataatggcattgtgataaattttccactggtcaaaaaatatatattgccttaaactcaaaactcgtccatcaacagtgaggttggctgtctttccgtgtgtttgttagccagtggtatctcctgtgtaaattaccttttgacatcctttgtttattttggttggtcttttacctcgtcgtcatcttactcacttttaaagagcatgaattaaggccgggcacagctgctcacgcctgtaaccccagcactttgggaggccaaggtgggtggatcacctgaggtcaggagttccagaccagcctggccaacatggtgaaaccccgtctctactaaaattagccaggcgttgtgatggatgcctgtaatcccagctacttgggaggctgaggcagggagaatcacttgaacctgggaggtgaagattgcagtgagccgagatcacaccastgcactccaacctgggcacagagagagaccccatctctaaaacaaacaaaaaaccacag

SEQ ID NO: 842741 - DNA, 602 bp, Homo sapiens
tatatatatatatggaatatcaagaagctaaagaacagggtttttttaaatgtagcttcaatcagttaaatattgattataaaaattaaagtaaaactctgaagagttttctgtgtataaacctgtcctcaaggatataaaaaaaccgtcagtgcagacactcagagagtttaacaaagttaattgctaattccttcattaacactttctcttctagactgtatgacaccattgtcctctgaaactgactggcgtcccttctcagtctcctttgccagccctgccttttttaccagacctttaaatgttggagtgttccagggctctccctttggccctgctcttttcattctatagtgtctcttgaggtgatttcaaactccaagtaccatctatatctggccacaactggctagagttcaccaaacacatttccctattgttctgggaatacagctaggccgcatgtctcagtctcccttaaaggtaggggtgtcctcattattgtgtaagaactaataacatatgagaggaagtgatgtatgtcccttccaagcttatccccctccaaaarcctcctatacaattttcccctctctttg

SEQ ID NO: 842742 - DNA, 678 bp, Homo sapiens
taagacctcaaaccaagaagctcccacaagaaaacattggggaaaatctctaggacattggtctgggcaaaaaatagttgaataataccccacaagcacagacaaccaaaccaaaaatggataaatgtggtcataacaagttaaaaagactctgcacagcaaaagaaacaatcaacaaagtgaagaagcaaaccacagaatggaacaaaatatttgcaaagtacccatctgacaagagattaataactagaatatttatggagctaaaacaactatataggaaaaaaaacctactaatccaatcaaaaatgggcagaagatttgaatagacatttctcaaaagaagacgtacaaatggcatatgacctaaaaccataaaactccaaaaagaaaataaaggggaaaatattgagattggccttggcaatgatttcttgagtatcacaacttaagctcaggctacaaaagaaaaaataaataaatgagaccacatcaaactaaaaagcttcttcacagcaaagaaaacaattaccaaaataaaaaggcaacctacagactgggaaaaatattcacaaaccatrtatcaggtaagaggttaatatccaagctatataaggaagtcatacaactcaataagaagaaaatatattacctgatttaaaaatgggcaaatggctg

SEQ ID NO: 842743 - DNA, 556 bp, Homo sapiens
ctcgggtgggaattgcgtgcgcccagsttcataactgcagtcttccgaaaagccaggatgaacaacctacgccttctaacaggctcaatctagaaccgcaacagttcaccaccacatagccagtcaccaaaaaaaccaagatctagagaaatttttcacaaatgcagatgtacaaaaaggacatctcttcatttattgaggaaatatcccatttttacctacacacacagacaacattgtggtaatgcacttctgtggagtcagttttgcaaaaaatgcctaaaacaaattagaacactgtataagtgttctaatttatatcttcagtattgaaatgatgcaaggataaaatgagagcatagtgaactgtaaaaaaataatgctgacaatttatgatgatgaaaaaagctaaaaaaactatacagaaaattcaacttgaaaaagccatatatgtcgaattttctgtgtaagtcatattacagtagattatgggcaactatgcagagatattctgtaagagctggcaaacttccacgaccccattaactatattctg

SEQ ID NO: 842744 - DNA, 603 bp, Homo sapiens
cccctcctgattctgtgagtttccttctactaaaccccacactttgctgaaattgaccaaagtcaattcctggtgaaaaaagctgtaagtttcatgtcataggagtctcactgaacgctggccataatagattgacaactgctggaagataggaaagatgagtgttccattgcccagtctggtttgtcctgtaggaaggacctagcaaagcatgagttcagaagagctctctgcacaggccaggcaaatcatgaataaatatttctgccttgcagtggctcacacctgtaatcccagcactttgggaggctgagtcgggcggattgcctgagctcaggagtttgctaccagcctgggcaactcaatgaaaccctgtctttactaaaatacaaaaaattagccgggcgtggcaccgtgcgcctgtagtcccagctacagctactcgggaggctgaggcaggagaattgcttgaacccaggaggtggaggttgcagtgagccaagatcgcaccactgcactccagcctgggtgacagagtgagactctgtctcaaaaaaaaraaaaaaaaaaaaaaggaaaaaaattctccctttatttagttca

SEQ ID NO: 842745 - DNA, 567 bp, Homo sapiens
acaccaaaaagacctgacgtacttgatattcttgctactgggcacagaagcagtctgcctgttttttgcacctttgggtcacctgacatggacactttgtggacatttggagttggccaccttcctcaggcacctgagcagctccctgtgcttatcttgcatttatttcatcctggaaaggaattctggctttttgttttacccttctcatcaccacacatccgtgggcatagtagcaggcagtaacacagagctacttacctcggtttaccctgcccccggtccaggtcctagtgagcactgaaacgtggtcactgagaaggtaaaaatggtcaagaagggccaacaaaggagaaaatcaatctcagaatcattaatgtgaaggattcacctctaaaaccagagcctacagacccatgtgtctcatatactcacattttaaaaactagagttggaatcctgtagaagtctctggagacaaggaggatttgtctatggccagatgtctattcagggttgtgcttggatgtccccagaggccctytgcagtgggatccatgccagtgg

SEQ ID NO: 842746 - DNA, 648 bp, Homo sapiens
tgtacattttataatggtgaatttattacatatgacttatatctcaatttttaaaagcctttaaaaaaaaamaaaaaaaaaacctttctagaagcagttgattttttttcccctgggaaaatatttataagcacttgtgctcaccctttttcttttgctttttctgctagagaaaggaaggagcagcaggaagcccccacctgacctcctgacagtctcagtcaattccggccctttgccatgtcatattgcaggaggacagagcatccctttggcccccaggctgaagtttaacccctatgatcccacccagttggacacctctatggtacactgcacattttatccatttgactatcaggaagcttgaccgcattattcccttgatcaggactgtcgatttcatgctgtcatcaacggtagggcagcaaagaggacagctgtaacaatcaccaggacctaatccctcccacgagccgctgagcaccagaggcacacgttaatattcagtagaagagtcatggaggcttggctttttattcacaaggaaaaaaacaatccctattggcagctgaagagacagcccctctggggaccaattattctattttgtgctgtacatactgcagcaggctgctgccagccccc

SEQ ID NO: 842747 - DNA, 579 bp, Homo sapiens
tcactgtgtatgcaacctccacttgggcttctcctcctcacctctgcaagggttgaggggtaagggaaaccaaagtaaatgcaaacttcatgccgcctgctgtgctgtgagtaatgaagttctttgtctctgacccaggagtctcctgtcttctaccagcatccatgaaattgtggcagactaacttgttagcttgcaaataggttataatttcagacccttcatagtttttgacaatgcttaatatataatcattttttatcattaaataacaagtgttttgaaggcagggaccatgctgctcattgtagtatctgcaagccttgtatagaatggactcacagtgcatgcttattgaatgaattaaattggactggctagttttaaactcagttttttttttctcagttaactcaaactcaacaacacctgcattagggccagacagtgaagaggaagaatagagggaggaaggctgacggggaggaagaggaaaaatccaaacaccttgatttmttttgtcttgttgcactcatgatcccctttacagatatttattttcaggaataacatatctct

SEQ ID NO: 842748 - DNA, 638 bp, Homo sapiens
tagattcactccatcccttctcctccacctaccagctatgcaatctttggcragttactaagctctctggcctaagtttcctcacctgtacaacaaagctaataatggtactgcctccatgggtggtccagagggataattgagttaagatgtataaagctctttacaatagtgcctggtgcacagttacactgacttaagtgtttgttaactaaagataaaaggaaaatgggaatagcctttgtggtacgctttgacaaatgacaaagattctctccttgtttttttttttttttttttttttgagatggagtcttgctctgtcgcccaggttagagtgcagtggtgtgacctcggctcactgcaacctctgccccccaggttcaagtgattctcctgcctcagcctcccgagtaactgggattacaggcacccgacactgcacctggctaatttttgtatttttagtggagatggggcttcaccatcttggccaggctggtctctaactcctgaccccgtgatccacccaccttggcctccacaagtgctgggattacaggtatgagctactgcacccagccaagattctctccttctaaagtctctccctgattaggtcttgatgtttggattct

SEQ ID NO: 842749 - DNA, 611 bp, Homo sapiens
gcactgccctttcaaatcagtcttcatcacattccaaagaatacaaaatacgcaagttaattttaatttccaatgaattcttcaggagaaatttttcttcctccttcctaaaaaaaagaataaaaaatgcagaatagagattcaaaatgaggggtggcagcaaaaattctgactcgcagaaggttgagagggtgcctttttcaaatgtatttattttacagttccaagaaggtaagactaccttctgttttgattcatgcttcaccattccccacttaaatttttaaaaattacatccttgcctatgtctgtcttgctatttgactggtcactcccaaacataaactgccctagtttgaagcttcccaaagccaagcaaaggtgacagactagtacaaagaaggccgctagtgagtttttactgagtgaatctacattgttccatggccttggtctggatatagattctaaagcttcttacrctgacaaaaatggagtttctagctctccaggtaattttcggtgaaagaaaattatagaagaaggcataaaccttggctcacaaaataaatacgcactcagacccatgtacttcatgaaacatacaagcc

SEQ ID NO: 842750 - DNA, 587 bp, Homo sapiens
agaactgtcccacaaaaaatgctaaaggaaattcttcaaactgaaagaaaaggactctaacgtaattattatagtaatattgtaattgtgataaaccacttatatctttggccaaaagactgaaagtcaaaactattaaaataattttgaaaataatttgttaagagacaggcaataaaaaagggtaattggtgacatcaaaaactgtaaatgtggaggaagaagggagttaacctgtttgggttgtttctttgctttttttatgatcaaaattaagttggcatcagttttaaatacctgttataactgtaggatttgttttgtaagcttaacggtaactacaaagctaaaacctataacagatagactaaaaataaaaagtaacaaaacatactaccagagaaaaatcacttaaccacaaagaaagacaaagaaaggaagagaggagttacctacagctagtaaacaagtaacartatggcagtaaggccttatctatcaatagtaacattgaatgtaaatggactgaattctccaattaaaaaaacaaagagtagctgcatggattaaaaaacaagacccaacaa

SEQ ID NO: 842751 - DNA, 664 bp, Homo sapiens
cctctcttggctccctccctgccgccggcctyctccctctctctcccttccaggtcacttctcgtgatgagattggacttgtttcctggggctctggtaacaagttagcttaaaacagagaaatggaccctttcacagttctggaggccagaagtctgaaatcaaggtgttggaagggccactctccctctgaagccccagtagaggatccttcgtggcctcttccagctccggggtccctgacaccccccggcttatgcccgcttctctcccctcactgcctccgtcctcacacggccatcttctcatctccttgtatctcttctctgtgtgtctcttataaggacacttgtcatttgactcaggacccagcaggataacccaggataatctcgtcttgagatccatcacttactacaactgcaaagtcctttttttagatggaatttcgtgcttgtcacccaggctggagtgcaatggcacgatctaggctcgctgcaacctctgcatctgggttcaagtgattctcctgcctcagcctcctgagtagcagggattaaaggcacctgtcaccatacccgtctaatttttgtatgtttagtagagacggggtttcaccatgttggccagtctggtctcaaactcctgagctcagatgatctac

SEQ ID NO: 842752 - DNA, 567 bp, Homo sapiens
agccattccaaaatgtacacaaatatcaaaacatcatgttgtacaccataaatatttacaatttttacttttcaatttgaaaaaaaaagaaaaatgaagaaagaaaacttcttgttggattgagttctctatcatcaacagggatggagaggttttagggaaagagaaaatatcacctctctcactgtaagaaacagattttattattactaacctagaacactgcattttctctttgttgttgggaaatttctgatgacacctttaaaaaaacctgagatttgtctctgggtaagttaaatgttcattaagtgatcacagaaagtaaaagtttgggaaactttaccaggagcgtttgggggaagcaaaccctgcgcagatttcctttgttcttgcaatagcagttccctcttgagtgtgacttggggcccctcagttggccctgggacatctgctcgctttgggactctttgtgaacattacttggggaaggaagcactgggggaaggaagcactgggcttgggacagggytgggcgctgcctcttcactggaccatgacaaggtt

SEQ ID NO: 842753 - DNA, 618 bp, Homo sapiens
agagtaatacagtttaagcctggtttgcctggggcattccagtatatacaggtatcccagtgtgattgttattagtgcctccyttcactcacaaaagtgcccagaagacaaaggaggaagtggtttcccgctgcggagtaatagcatgtaccagacactgctctaagtgctttgtgggcactcactcaactcttcacagccatgctctatatgcaacacgggtattgttcgcatgttgtggagggcaggattccagcctggaaatctagctgtcgaatatgtacctttagccaccaggagcacctttctttggttgaaaggaaaacagcccaccttgagctggtttgagataaaaaataagaattggggaatttcacagaactcaggaaaaagaagcagaggaggggaccccactggtcttagaaagtcaaggatagggaacagaaaaagccccggagacgggcggtttcctcgctctgttcctctctcctctttcttctctctgcagtcaagtttcttgtgtttccaggcacaggcagaacatgactgccctcaggactacagtccacaggttctactccagccagggaaagtatggattcccagcacaactgggca

SEQ ID NO: 842754 - DNA, 725 bp, Homo sapiens
cgagggccagtttgaccacttcctggtccagtacaggaatggggatgggcagcccaaggcggtgcgggtgccggggcacgaggacggggtcaccatctcaggcctggagccagaccataaatacaagatgaacctgtacggcttccacggtggccagcgcgtgggccccatctctgtcattggggtgacgggtgagtggatgatggcagccccagggtgggagccgtgggagggtcaccctcttgctctttggtgatgactggtggggaatgggccaggggtccggtcagcaccacagacctgcttgtggctggggctccccttgggccttcctctgaggctgacccctggctcctcctgagcagggaggggccatcaggagttctgctgtgctggtgactgtcccaggtcccccacagctgaccctggaacttgtcatgtgtgttagctgtcagttgagcaggaccacccagccccaagaatgggcttttctgaaatgacctcacatacccagtagtggccatggtttctccctccttcccttgaagacctgagcacatcccccaggcacctggcatcctctctatatctccttttctcagctgcagaggaagagacccccagccccacggaactcagcactgaggcccsggagccccctgaggagccgctcctgggggagctgacagtgacaggatcctcccctgactcgctgagcctctcct

SEQ ID NO: 842755 - DNA, 254 bp, Homo sapiens
ttaaatggtcctttttgccacataataccataaaagcacttacagtrtacttaaatcagatggcaattctaattggacaggctcatatatgaattattaaactttgtggcactgagcccaataaaaattatagttccaataaataaaaatcaggttaaacaggcatttattaactcagttacatgacagattaatttaacaaaatttgttggatgtattaataatcattatcctaaaaacttttcaattcttaa

SEQ ID NO: 842756 - DNA, 619 bp, Homo sapiens
gtccattaataattttttaatacaatcaaatatattaaatactcagtgcattcacattctctggcatctcactgtggggaaattaaaatttattctctttttgaacacaaatgatctgtgtaaatagactaacaagacatatgatctggattgacaaaatcttttaaaagcattccaaaatacttagatttgaattaaagaaaaaggaattaatagaggcatctcaaaagaaaatatactgacagattaagtagtcaaggcagcaggattacactttttctctctttcctcttgagacattattattaaaaagaaatacaggaaagcttctggaaatgaaagagcaaatgcatatgaatccatctctacttagacaacaattgcaatagagtaattattttggaactctggggtctattgaaggcttgcatctcacaggggatgtctcgaatgataaattatggttacatttggtcaattttacctcttggcrtagtaacagttgcctgctctccacccccagccctctatcaggcagctgggcagttgttcctttcgcaagctgcaggtagcttaatgggcaaagagaataccgtcctccaatgacaagggatctgtg

SEQ ID NO: 842757 - DNA, 619 bp, Homo sapiens
gtccattaataattttttaatacaatcaaatatattaaatactcagtgcattcacattctctggcatctcactgtggggaaattaaaatttattctctttttgaacacaaatgatctgtgtaaatagactaacaagacatatgatctggattgacaaaatcttttaaaagcattccaaaatacttagatttgaattaaagaaaaaggaattaatagaggcatctcaaaagaaaatatactgacagattaagtagtcaaggcagcaggattacactttttctctctttcctcttgagacattattattaaaaagaaatacaggaaagcttctggaaatgaaagagcaaatgcatatgaatccatctctacttagacaacaattgcaatagagtaattattttggaactctggggtctattgaaggcttgcatctcacaggggatgtctcgaatgataaattatggttacatttggtcaattttacctcttggcatagtaacagttgcctgctctccacccccagccctctatcaggcagctgggcagttgttcctttcgcaasctgcaggtagcttaatgggcaaagagaataccgtcctccaatgacaagggatctgtg

SEQ ID NO: 842758 - DNA, 619 bp, Homo sapiens
gtccattaataattttttaatacaatcaaatatattaaatactcagtgcattcacattctctggcatctcactgtggggaaattaaaatttattctctttttgaacacaaatgatctgtgtaaatagactaacaagacatatgatctggattgacaaaatcttttaaaagcattccaaaatacttagatttgaattaaagaaaaaggaattaatagaggcatctcaaaagaaaatatactgacagattaagtagtcaaggcagcaggattacactttttctctctttcctcttgagacattattattaaaaagaaatacaggaaagcttctggaaatgaaagagcaaatgcatatgaatccatctctacttagacaacaattgcaatagagtaattattttggaactctggggtctattgaaggcttgcatctcacaggggatgtctcgaatgataaattatggttacatttggtcaattttacctcttggcatagtaacagttgcctgctctccacccccagccctctatcaggcagctgggcagttgttcctttcgcaagctgcaggtagcttaatgggcaaagagaatacygtcctccaatgacaagggatctgtg

SEQ ID NO: 842759 - DNA, 602 bp, Homo sapiens
agattaaaaggaattcattctacattttatgatttgttttccgagttcattggtaatacattgcattagtttccaagggctgccctaaccaaatacacaaactgggtggcttaagacaacaraagtggattgtcttgcattctggatgctagaaccctaaaatcaatgtgtctgcagggctgtgctccctctgaaacctgcaggagaaccctttcttgtcctttccagcatctggtgttgctgggaatccccagggacccttggtgtatagatgcgtcactccagtctctgtgtccaccgtcacgaggctttctccctgtgagtccgtatctgtgtctcttctaaggatgccaatcatgtcattgagttttcatgactgaaaactcttggaacattattcttttttcaaaaggaaataggtcaaaattgtaactggatataaaatacataatggggtgatgatattggagatagactagatttttgctctacctttcttcagcacatttatgtttgatatttaagtagaactgtcttgcacttcaatgtttaatgatggccggtgtctggtattctatctggcacatggcaaacactaaata

SEQ ID NO: 842760 - DNA, 344 bp, Homo sapiens
cagattttgagtttgtgcataaatgagattaaatgtgtgtgcctttcagagtaaatggtgaaaaggmatagagaaaatatatatttctttgtaatgttctctaatacaagtcagaaatcagacctgaaggccaaaaagtgacattatttcttcccctgctgctccccccttagcaccatgattaaagctctaaatttgaaaatgttaccaggggacagtgatattccccagcctcaaaactcaagactcatcatggtggcttagtctggcaattatgtgtattatgcatagatcaccactgtaaggttagatggggaacacagatccatataactcaacaaaga

SEQ ID NO: 842761 - DNA, 601 bp, Homo sapiens
tgtgaaattagtgggcaaaaaactgattcactcacctgagaacaagccattctgtaaaataggctgagaaaccatttctcaccaacatttttcagggatgacttgaagtaatatgatccaagggagccagatttcaatatacgtttaatgttttttgataactcgttgtaggtagccactatttatcttatttgagttacaaagatacataaacacaaaatttaaacagtaatttgagtcacagactcccagagttgcaatactatcccctgtaatactcagttctatagatattttttcttttaaaagatccaaactaacccacatttacgccagctcttccaattatgactaaccgatgcatattatttctccaaatcttgacggtctaagctaatgcctctcacagttgactcacagatggaagtcacaattatttgggagtggctggctttttgttttgagttccayttcctggctcctacgctcaacttttgaattcagaatccttagagtgagaaatcatggcagagtccggaatctccattttaacaaacaccctaggtgatgctcggtcctttagaaatctgttattttagat

SEQ ID NO: 842762 - DNA, 595 bp, Homo sapiens
tatagcagggtaagaaatggaagcggagagcacatcatggagacatggagaacagaggaggtgaaagaagccctgtaatgtgaagcasgggatggaggaccctggcagcagcctggggcctgcagaggaaaaagctccaagaggagctccatataagagggtggccaagttcgtggcatcagactttccactggaaatggattcctgctttgtcctataattaccctcttatctctatacctccaggaaaagaatgttctaacaatgttggtgttagaaacaccaaccttgggttagtagagcactggggcttgtagggatatgtaagaaacatctgctggtcaccaaggggaagagctgagcagaggtgctggcatgcacacagaagcaggaatccagagcaagagatggcagaagagcacaacagaaactcacacgtgtctgaaagtgctggggtagacagttggtctccccatggtaagcaggatcacaccatttgcacttagatcattagagaagctgaaaagactgaggaacttagggagtacgaaatctctctaagtgaaatctcagtgcgaaatctctcagtgagagg

SEQ ID NO: 842763 - DNA, 600 bp, Homo sapiens
aaagttaatcaaaattcatactacaaatgctgttactaatcgycacagcagcaaactagaacccctccttgcccaccacttttacactccacccccagagaataacagacaacatgctgtttcttccagtaattcttaggatgttattgatgtattgtttatttttcatagagtccatgcacttaggaggaaacagggcataatatatatgcactttcagaaaactgttttaatgttataaataatatccaaaaccattaatgagttttagaggtggctgccttgcagcagggaattacttaagcactggaaagccaatcaacaaatatttattttgcaacttctgtgtgcatgcctaaaaaatcttattccattagtaaaataagtccatctagaaaaatacattaattcaacgcatatttactccacactcacatgttgcaccacagctccaagtgtgaatgaggcagagaccctgcactcgagttaggaagacacagccaactgaactgatgacttaaacgcaaagggacagagcacaggctatggcaggattacagaaaaagggctcctcatcaagccttgagggaatcagggaag

SEQ ID NO: 842764 - DNA, 600 bp, Homo sapiens
aaagttaatcaaaattcatactacaaatgctgttactaatcgccacagcagcaaactagaacccctccttgccyaccacttttacactccacccccagagaataacagacaacatgctgtttcttccagtaattcttaggatgttattgatgtattgtttatttttcatagagtccatgcacttaggaggaaacagggcataatatatatgcactttcagaaaactgttttaatgttataaataatatccaaaaccattaatgagttttagaggtggctgccttgcagcagggaattacttaagcactggaaagccaatcaacaaatatttattttgcaacttctgtgtgcatgcctaaaaaatcttattccattagtaaaataagtccatctagaaaaatacattaattcaacgcatatttactccacactcacatgttgcaccacagctccaagtgtgaatgaggcagagaccctgcactcgagttaggaagacacagccaactgaactgatgacttaaacgcaaagggacagagcacaggctatggcaggattacagaaaaagggctcctcatcaagccttgagggaatcagggaag

SEQ ID NO: 842765 - DNA, 659 bp, Homo sapiens
ggtatcaagtttggcacacatcctaaccaattaattggttttcataattatcaagtgttaagatggagtcaaaaaaaatcacacaaaaaaacttaggtctaaaagcaaacaaaaaataattttagctatgtgtrcagtatcaagtggtatcaactgatgtccaaaaaataaaaagaagagcattttctgtatgtggtaggcactgtgccaaggatattacataaaatctgctcatcttcacagtaactctgagttaaatactgtcataatcctcattcttacggataaggaaaatgaagcagagagtgggtaagtaatttagtcaaggtagtaagcagagagagacaacctgaactagctctctggatgcaacattgaaagctcttaaccgcattgctttactggcctcctggacagcattgatcattttccctgcactttaagaatgtaactacggattatggacacgtgcctttcctagctattcttaaattctgagcttaatataaaattaatgacatcctgggagccatgattcttccctactacatctcactaagaacatggtttatgaaatctttatagctagttgaaatgtgtttactaagtcttgccaggaagctcattttatagggatatcacacacaggcaatataaat

SEQ ID NO: 842766 - DNA, 530 bp, Homo sapiens
tgctgtatttttttttttttttttgagacgaagtcttgctttgttgcccaggctggagtgcagtggcgtgatctcggctcactgcaagctccacttcccaggttcacgccattctcctgcctcagcctaccgagtagctgggactacaggcacctgccacctcgccgggctaatttttttgtgtttgtagtagagacagggtttcatcatgttagccaggatggtctcgatctcctgacctcatgatccgcccgtctcggcctcccaaagggctgggattacaggcatgagccatgtacaatgctgttttaaaagcagcgctcgtctttgctgcctttcaactttacatgctttggtttctcatagagaaaataaaaattgtttttaatccttaaagaacttctgacaggagagaaaaatgacttgtgtgtcccaaagcccccaatcccaaagacatcyaagcaaaaccaagttgggggtgggggtggagaatttaaatagcagtaattatcatatctcaatttgcaaga

SEQ ID NO: 842767 - DNA, 641 bp, Homo sapiens
aaagtattcataaaagacaaactcaaaattcccaatgacacagagagtataatcacaccacatatcaaatccaagccacatagcacagagtgtgctattgaaatgaaacgcaatataactattgctctgggaattacagatgggatccagtaaaagacactgtattaattatattgttttccatggaacttttctaaggttgcccaggacagcaacactgtagaacattcatgatgaaactgtcaaagaggactagacttgaggggccttagggagaaaagagatttgaaaataatgtactgcttgcccatggttcagacgtgcctttctctgcaagtatgatcacattattgattctcaaaggaagaaagaaaatatgactttgtcccttaactgacatcaaagttacagtgttatgcagtgatgcccaaaagcatttgcaaatattcagaaacaaagttttgagtgtcctaggagatgactatcataccaattgatccaaaacacaatggtcaagaggcatggaaaacctatggttggggagggagagggtcataaatatatacagtcatgcaccacgtaatgacattttagycaatttactggatatatgatggtggtcctataagattataatgtat

SEQ ID NO: 842768 - DNA, 625 bp, Homo sapiens
cagccaacttccttttgttggatcctttctagctccaagaggycatggtgggcaagtgctaggctctggagctacactcccaggtgcaacttctagggccaccacagagtagctgcacaactctgaacaagttatctgatctttccatatctgtttccttatatataaaatgggattgtgatgataaaaatagtaacccaactcatagggtagttgtgaggatgacgttagttaatgtatataaagtgcttaaaaacagtgcctggcttttagtaagccctcagtaagtgctagctattgtggtcattattttgctggagcatattcttaagtaatcttttcagacagagtaccaggaaggtaaaacttttagtctttttatgcatgaactgccattattttgtcttctcgtttgattgacagattgctagacataaagatccatggttaaatcacttaccttcagaactttgaaggcattatcccactgttttctagcatccagtgttactgatgaagaatccaatgcaaatctgatattcatccctttgtaggtgttggttttttgtatttgtgagtttttaggatcttctctttatgtctagtgttctgaaatctcacaaaa

SEQ ID NO: 842769 - DNA, 613 bp, Homo sapiens
tttatttctgtctttcatatgcagtgggatcttaacaaattgaggcctagagatggacagaaagactcccaggcaccagaaagctatttcttgcagccaccacgttgctgtgattaacraaatagttggatgcattttccactcaaaagtggctacagggggaactgagtgtgagttgttcactgtcaactaacagcaccattagaattatgttaaagctgagctaagagaagcaagagaaaggatgctactcaagaagaatcttctagtgaaagagtgaaaactttattggtctcaatggcagtggtgaatcaaggacttttttttttttttttttttttgagatggagtctctctctgtcgcccaggctggagtgcaatggtgagatcttggggctcactgcaacccctgcctcctgggttcaagcaattctcctgcctcagcctcctgagtagctgggattacaggcacccgccaccacgcccagctaattttttgtatttttagtaaagacgaggtttcaccatgttggccaggctggtctcgaactcctgacctcgggggatccatccgcctcagcctctcaaagtgctgggattacagccctgagcc

SEQ ID NO: 842770 - DNA, 608 bp, Homo sapiens
tttaagtaatagaagataattcaggatccatctgggtttaagatggaatgagctggctgctggttatctctatggatsagcttgctgggggtcatggtagcagtaactgtaccgctcaagtctgtgccaagacaccacctgtggagcttctcactcagctcctgggctttcggcctccatgagctctagttaattctccatgtgggctccagcaatgttgaaaaatggaatagcagctatcttagtccatgttgtactgctaaaacagagtgcccgagactgggcaatttatgaagaatggcaatttatttcctcacagttctagaggctgggaagtccgagatcaaggcactggtgggttggattgtctggtgagggctgcactctctgttggggagggaagttgtgtcctcacttggtggaaggtagaagagcaagttacaaacactgctgtgtgaagcctccggggccttaaactcattcatgaaaaaggggttcttatggcttaatcacctcttaaaggcccccacctccaaatatcattttactggctgttaactttcaacacctgaattttggagggaacacgttcaaaccatagtggcagc

SEQ ID NO: 842771 - DNA, 587 bp, Homo sapiens
ttttaatccgttgtagccaaattttaacatataatcactataaaaagttattaatgagttagttgacttttttggggtactaagtctttgaaatttggtgtgtattttacaacacatctaatttatttatttgtttattctgagccattcttcctgatgttctccctccccctacccccaacaggctccagtgtgtgttgttccccaccatgtgtttatgggttctcatcattcagctcacaataataagtgggaacttacagtgttttgttttctgttcctgcattacttcacttagaattatggcttccagctccatccatgtcccttcaaagggcatgatcctttttatgatatatatatataccgcatagtatatatatactgcatagtatattccatggtgtatatgtaccacattttctttatccagtttatcattactttatccagtttatcattaytttatccagtttatcattattatatacatggtgtatatgtaccacattttctatatccagtttatcattgatgggcatttgggttggttccatgtcttgctattgtgaatagtgccacagtga

SEQ ID NO: 842772 - DNA, 617 bp, Homo sapiens
taatgcacgcagacacaaccgctcaggctgtgaagcrtttgaacggctcagttttgccctttcactgggcatcagttacaagtactctagactgttgtacacctaagacaaagctggcgatggtaatgttaagtcattgaaagaagaaacagagaacagaggagctgttttaattagagaggtgctcttccctatactggcaatactgggaaaattttatagtcagcacattttaaaattagccagacacgaactttagccgttcgcctgaatactcatcgcacagagtgctagaaccctgcaagtattgtttgggttgatggtgcatttgctgaatggcttatctgtgataattgggaggcaggatcatctgttgttgaatagacagaacccactctgctaatgctgctttgtggtcaaactttgagccgtcaatgtaactgaaaagtcactgttggcctggttctctagagtgtctgtaatagtattccccctacgggtgtagacactgcctttagcaggaggataccttgctgaggaggcacggagagagaatgttttagaggttgggatcatggtaatctttattgtagtcacttctcttatccatgtgctgg

SEQ ID NO: 842773 - DNA, 605 bp, Homo sapiens
agggagagctcctggcagatcttgctgggctgcggtgcttcttggagttgactgaggtgctgcatttctcaggcttctgctaaatgtggttttggctyctcagagagcacccatgtaagctagtgtcattcactttcttttttttctttttttctttttagaggtggagtctcgctctgttgcccaggctggagtgcaatggcacggtcttggctcactgcaacctctgcctcttgggttcaagtgattcttctgcctcagcctcccgagcagctgggattacaggcatgcaccaccatgcctggctaatttttgtatttttagtagagacgggctttcaccatattggccaggctggtcttgaactcctcacctcatgatctgcctgccttggccttccaaagtgctgggattacaggcatgagccactacgcccagcctctttttttttttttttttccttttaccattttccttctcttattttactttaagttctggggtacatgtgcagaacgtgcaggtttgttacataggtatatgtgtgccatcgtggtttgctgtgcctatcaacgtgtcacctaggttataagccccacatgcat

SEQ ID NO: 842774 - DNA, 529 bp, Homo sapiens
ggtgacgtgtgcctatgcaatggggtggtaaggcaggcacgaagagtccaaaaaatctaggtggcctctcagctctgccacctctagctgcatgaccttgggcaagctatgtaaccccaattgcctgctccattaaagactgtgaaggtagaatgtttgtaaagctcttaacagtatgtaagccttcaataaatttcagttttccccttgttttcttgatcattctctgtcaccagtgaaatttgttctagtgtctctcatatttaagaaaactctttcaggactgggtatggtggctcacacctataatcctagcactttgggaggccgaagcaagaggatcgcctgagcctaggaattcaagaccagcctgggcaacatagtgagaccctgtctctacaaaaaacaaaaaattagccaggcatggtgggacacgcctgtagtcccaactactcaggtggctaaggtgagaggatcacttgagcttgggaagtccargctgcagtaagctgtgattgagccactgcac

SEQ ID NO: 842775 - DNA, 529 bp, Homo sapiens
ggtgacgtgtgcctatgcaatggggtggtaaggcaggcacgaagagtccaaaaaatctaggtggcctctcagctctgccacctctagctgcatgaccttgggcaagctatgtaaccccaattgcctgctccattaaagactgtgaaggtagaatgtttgtaaagctcttaacagtatgtaagccttcaataaatttcagttttccccttgttttcttgatcattctctgtcaccagtgaaatttgttctagtgtctctcatatttaagaaaactctttcaggactgggtatggtggctcacacctataatcctagcactttgggaggccgaagcaagaggatcgcctgagcctaggaattcaagaccagcctgggcaacatagtgagaccctgtctctacaaaaaacaaaaaattagccaggcatggtgggacacgcctgtagtcccaactactcaggtggctaaggtgagaggatcacttgagcttgggaagtccagkctgcagtaagctgtgattgagccactgcac

SEQ ID NO: 842776 - DNA, 422 bp, Homo sapiens
agttccgtccgcccagggcggtgctggtggccgcctgccttgcctctccaggagctcttggaattacattcagttgaattcatgtggtgcctgggtgggtgtgtctaggcccaagcaggtcacctctgtcactatctctcgtccacactgaatctagaaccagccatcaggaaggtggcaaggtgacctgtatgtccaggactgtagaggtgatttctggttcatgctaattaatcaactggttttttttttttttttaatttcctgagatggaatctcattctgtcacccaggctggagtgcagtggtgcratctcagttaactgcaacctccgcctcccgggttcaagcgattctcctgcctcagcctcccgagtagctaggattacagacacacaatgccacaaccgactcatttttat

SEQ ID NO: 842777 - DNA, 530 bp, Homo sapiens
attcattttcaagttgccctaaaaaaggtacttagcctgccgaaaggcagactttcggtgccagcgagaggaagaggaaggatgctgtctttcctatgaacgttctcgtgcctccackgcctgggtcttcagtttcacttcccagccctgcggggtacaggaaaccaccagctaacttaagtgcaaggcaattaagcggggagggaattgtggacaaatctatagaactctgaagccacaggtgagccaagcattgactttactggggaaaaaccaggtggaggaaggttgaaggagcttgggttggtcagaagatgccaggatttgggacctgagccagggaggtgggcccaggaagtgggattgggcttggggatggggaaggagaggaagctgagagcgataactagtatgcaatcagaaattttttttattcttagttttagcttctctgcctctgccaccaaagctttgttttggtttttgagacaggctctcactctgttgcccaggctgtagtgcagtggcac

SEQ ID NO: 842778 - DNA, 394 bp, Homo sapiens
tcaagggaactcatccagtccctaaagtctggtcagagcaagaactcattcactgccaggagaatggcaccaagccattcatgagggcatccactgccatgacccaaacacctccctctagaccccaccycccaatgcccccacactggggatcaaatttcagtagcagttttggtggagacaaaccatagcagggtgggtgggtactctcacttggacgtgcctccttgggaccatggagcaggtttcggaaggatagaactctcattgtcaggcctgtccagcaccctgggctgtccccaggagtagacttgcccgtcacagacaggatgggccacatccaggactctggcatccaacgtgacgtgcagccctgtgaatacaggacaaattc

SEQ ID NO: 842779 - DNA, 638 bp, Homo sapiens
aagaagtccatttgaaagtttctgaggaagatataagaatccactttggaaaaatatcttccrgcatctaggaggtgcttggttaatgctcacaaataactcatatattctttggtctgctacaattacaggttctagatatattcatccaaacaattacaacttggtatttaacgtcactcatttcaaaaaattgaatgacaaaagagcactattttttttttttttttttttgagacagagtctcactctgttgcccagcctggagtgcaatggtgtgatcatggctcactgcaaccttcacctcctgggttcaagtgattcttatgcctcagcctcccgtgggactacaggtgtacaccaccacgcccgactaatttttgtatttttggtagggacagggtttcaccattttggccaggctggtctcaaactcctgacttcaggtgatctgcctgcctctgcctcctaaagtgctgggattacaggtgtgagccaccacacccggccaacactaacatttttaaattagatttttttctcttatgttttaaattaagactccaaggtttcaaaatcatatctgaaaagttttattatatgatttaatatttcacttcactttctcaattttttgt

SEQ ID NO: 842780 - DNA, 638 bp, Homo sapiens
aagaagtccatttgaaagtttctgaggaagatataagaatccactttggaaaaatatcttccagcatctaggaggtgcttggttaatgctcacaaataactcatatattytttggtctgctacaattacaggttctagatatattcatccaaacaattacaacttggtatttaacgtcactcatttcaaaaaattgaatgacaaaagagcactattttttttttttttttttttgagacagagtctcactctgttgcccagcctggagtgcaatggtgtgatcatggctcactgcaaccttcacctcctgggttcaagtgattcttatgcctcagcctcccgtgggactacaggtgtacaccaccacgcccgactaatttttgtatttttggtagggacagggtttcaccattttggccaggctggtctcaaactcctgacttcaggtgatctgcctgcctctgcctcctaaagtgctgggattacaggtgtgagccaccacacccggccaacactaacatttttaaattagatttttttctcttatgttttaaattaagactccaaggtttcaaaatcatatctgaaaagttttattatatgatttaatatttcacttcactttctcaattttttgt

SEQ ID NO: 842781 - DNA, 642 bp, Homo sapiens
tgagaattttcaaggaaagatgtttttcaaatttcttgaaagatcaggaattagaacttctcaaagaggagagtaattttgtgttttagcttttactaaattacctataagaggaaagagtaggcattaaaatatattacaaaggttgtcatctttcaagtttttgaacacatatattcagctatgttccttcagttgtttgaagtttattgtttctaggagttatcttgatttttccctaagcatccaataatttcatcttaaatcacgacatcaactacatttctaaagaccggaatgctttcagaattactttatatgcatgaagaatggttctacctcttttcttagataaactcagtgataataaacactgaaaaagccttcagaataaaaactgaaaaaaaaaagatacagtaagcccttcttgtgaagtaaaagagcattaatatgagacatttaaaaacgggccagataaagtgggtaaaattgatatgtccctgaatttaaaaaaaactgaaagtaaactgaccctstaaaactcaagaaaactagaagacaacaaatataaatcaatttaaataagaagaaaaatgtgacaaatgtaaacaatcaggaaattagttaacaacaagaaaaata

SEQ ID NO: 842782 - DNA, 613 bp, Homo sapiens
acccatctttgctgttctccagtcttcttgagtgacagctcaggtgcaggagcaaaccagatgaatagggcctcaagtgaatccctagcaaaccacagcagccctacagaaaggggaccagaccattgaaagaaaaacaaacagaaagcaacaacagcatcatcaacaacaaaatgtccccacaaaagcccatccaagggtcagcagcctcaaatatcggaactagacaaactcatgaagatgagaaagaatcaacaaaaaaacacctgaaaacccaaaaggccagagtacctcttctcctccaaatgattgcaatgcctctccagcaagggcaaagaactggacagaggatgagatggatgaattgacagaagtaggcttcagaagatgggtaataaaaaactccactgagctaaaggagcatgttctaacccaattcaaagaaactaagaaacttgataaaaggttagaggagcttctaactagaagaaccagtttagagaggaacagaaatgaactgatagagctgaaaaacayagcacgagaacttcgtgaagcatacacaaatatcaatagccgaatctaccaagcagaagaaaggatgtcagagttt

SEQ ID NO: 842783 - DNA, 601 bp, Homo sapiens
agactgatataaacagttcaaaattactttctagggtttttactagaaattagggctactaagacttaaaattatagttaatctttgtaattaaaactattagacatgagagaaacaattctgtatacacagtgtataaacaaaagcaagggccaagcatggtggcttgctcttgtaatcctaccacttggggaaactgaggtgggcagattgcttgagcccatgagtgtgagaccagcctgggcaacatggtaaaactctctctacaagaaatacaaaaattagctgggcatggtggcatgagcctatagtcccagctacttggtgaactgaggtggaagaattgcttgagcctggggaggttgaggctgcagggagctgtaaacacactactgcactccagcctggatgacagagtgagaccctgtctccaaaacacaaaacaaaacaaaaacaaaaacacgacatgctttagatgggggaagttatgaaggcataaaaatgkgtgtttgctaaaaaaaattgtctagtttgaagttacttaaagatttcaaattgaaggagtaaaaaaaagataaaactagataaataaagaaagtta

SEQ ID NO: 842784 - DNA, 545 bp, Homo sapiens
aaaaaaaataacctgatgtccttgtacctaccttacaaaaccctctgttctgctrttattcagtggatttcaagaccaaatcagtacatttacattgatgatagtgacgtcaattactaatgttttgggcaatctctcaaaatcaaggggatgatcaaaagggggaatttgttaaattaagcttagcctaaagctgcctccttatatattttaagttcacccttaaggtttctatacacagtaaactgaaacctaactggatatataaacagactagcctatttttgtgccaatcaccaagttttggccaattaaagtgggccaactgttcaaattgtgttcaaataaggcaaactctaagctgtaatcaatctggctgttgctgtacttcacttctgttttctgtctgtcaccttccattttctgcccataaatcttcttctaccacatggctgtgctggagtctctctgagcctgctgtggtttgggaggctgcctgattcatgaatcattctttgcttaattaaattttgttaaattaaatt

SEQ ID NO: 842785 - DNA, 618 bp, Homo sapiens
tatctgtcatctatcatctacctgtccatcatctacctttcatctatccatctgtcaggtatctatcatcatgcgcctatcatctatcatccacctttcctctatcacctacctgtcatctattatctatgatctatccatctattatgtacctatcatctatcatttgcctatctttcatctgtaatttacctatctataacctgtcatctacctatttatcatctatcatctgctgtcatttatgatctatccatctatcatgtacctatcatctctgtatcatgtatcaatcagctatcatctacctatcatctctctgcgatctattacctatctattacctaccatctacctatttatcatctatcatctacctctctgtcatttatctatgatctgtcatgtacctatcatctattatcttcctatcgatcgtctatctgtaatctatcatctattatctgtcatctatcatctgcctatccatcatctgtgatccgkcatatctgtgatctacctggctgtcatctatcaatcacctatcatctgcctatctgtcatctggctggcatctatcaatcacctatcatctgcctatctgtcatctgcctgtca

SEQ ID NO: 842786 - DNA, 618 bp, Homo sapiens
tatctgtcatctatcatctacctgtccatcatctacctttcatctatccatctgtcaggtatctatcatcatgcgcctatcatctatcatccacctttcctctatcacctacctgtcatctattatctatgatctatccatctattatgtacctatcatctatcatttgcctatctttcatctgtaatttacctatctataacctgtcatctacctatttatcatctatcatctgctgtcatttatgatctatccatctatcatgtacctatcatctctgtatcatgtatcaatcagctatcatctacctatcatctctctgcgatctattacctatctattacctaccatctacctatttatcatctatcatctacctctctgtcatttatctatgatctgtcatgtacctatcatctattatcttcctatcgatcgtctatctgtaatctatcatctattatctgtcatctatcatctgcctatccatcatctgtgatccggcatatctgtgatctacctgsctgtcatctatcaatcacctatcatctgcctatctgtcatctggctggcatctatcaatcacctatcatctgcctatctgtcatctgcctgtca

SEQ ID NO: 842787 - DNA, 618 bp, Homo sapiens
tatctgtcatctatcatctacctgtccatcatctacctttcatctatccatctgtcaggtatctatcatcatgcgcctatcatctatcatccacctttcctctatcacctacctgtcatctattatctatgatctatccatctattatgtacctatcatctatcatttgcctatctttcatctgtaatttacctatctataacctgtcatctacctatttatcatctatcatctgctgtcatttatgatctatccatctatcatgtacctatcatctctgtatcatgtatcaatcagctatcatctacctatcatctctctgcgatctattacctatctattacctaccatctacctatttatcatctatcatctacctctctgtcatttatctatgatctgtcatgtacctatcatctattatcttcctatcgatcgtctatctgtaatctatcatctattatctgtcatctatcatctgcctatccatcatctgtgatccggcatatctgtgatctacctggctgtcatctatcaatcacctatcatctgcctatctgtcatctgsctggcatctatcaatcacctatcatctgcctatctgtcatctgcctgtca

SEQ ID NO: 842788 - DNA, 618 bp, Homo sapiens
tatctgtcatctatcatctacctgtccatcatctacctttcatctatccatctgtcaggtatctatcatcatgcgcctatcatctatcatccacctttcctctatcacctacctgtcatctattatctatgatctatccatctattatgtacctatcatctatcatttgcctatctttcatctgtaatttacctatctataacctgtcatctacctatttatcatctatcatctgctgtcatttatgatctatccatctatcatgtacctatcatctctgtatcatgtatcaatcagctatcatctacctatcatctctctgcgatctattacctatctattacctaccatctacctatttatcatctatcatctacctctctgtcatttatctatgatctgtcatgtacctatcatctattatcttcctatcgatcgtctatctgtaatctatcatctattatctgtcatctatcatctgcctatccatcatctgtgatccggcatatctgtgatctacctggctgtcatctatcaatcacctatcatctgcctatctgtcatctggctgkcatctatcaatcacctatcatctgcctatctgtcatctgcctgtca

SEQ ID NO: 842789 - DNA, 495 bp, Homo sapiens
ggagccgaccgtcgcagcagcttcgggtaaacgcttgygaatgagcagggaaggagcggctgatggtgcccagcctggcacctgcacccaacaggcctggtgctcccgcctgctgtggaggagtaggtcccccagactctgtgactccgagacccttcttatccctagaagaaaacatcagttaccggagacaactgttatacttgtaacaaaatgtcatttactcacttggagacaaagttcagcccagccactgctgcagatactatggacccattttttttttaatggaagaaaaggactatttaaaaaaaaatcattgattttattactgaagtgtacagaaacccaaaaggacaagccggtgtggagcaaacccctggtttcccaatggggcgtcgcagctgctgagcaggattccagactggagactggcggcgcccgttgaaacatgactggcggttctgcggcttcacagcctcacatgttgctttg

SEQ ID NO: 842790 - DNA, 533 bp, Homo sapiens
ttgcaggccctctgccgaccatgcttccagcagctgcaagaacccagggaggtctcagtggatcatgacgggatctgcagcacgggctaacaagccaggccccagagacacacactgttcccttcccttscacgaagttcagagccaggcgtagctagactactgcagcacgagtgttgggtgggtgggcacaggttctgcctggcaaacgtcacatgcctttaccaaggtggtgaccatgtgagtgagtgccttgtgtttacactttgggtattttcttatttgtgttaaacttcaaaaaatgtgaaaacattcgaaagaagacagtgtctcctgggatctgggcagcaggctgggtctgaactctcgcttacctcttgtggatgttaacacagcctggaatttcctggtttgttagtcaaggaatactttacccaggtgcaatccatctgctttcatttttttagtcagtaaattggactcctttctttttatctgcttgaaatgactaaagcaatgtgtgtgttgttttt

SEQ ID NO: 842791 - DNA, 637 bp, Homo sapiens
atgatggagtgctgtgtatgccaaattttatgacttggtggatcagataacagtcagttcatgatgggcagctcaggttgcatggtaacttggcagccaatggtcaaacattcagtctctactaaggcccagtagcagaccaagaattgtcttccaaaagacactcctgcaagaatggccataataaaaaaaacagtagtcgttggcatggatgcagtgaaccaggaacacttccgcactgctggtgggaatgtatactagtacaaccactatggaaaacagtgtggagattccttaaagaactaaaagtagaattatcatttgatctggcaatcccactactaggtatctacccagaggaaaagaagtcgttatttgaaaaagatacttgcacatgcatgtttatagcagcataatttacaactgcaaaattgtggaaccaactcaaatactgatcaatgagtggataaaaaaaactgtggttttttatacgtatacatatgtgcgtgtrtgtgtgtgtgtgtgtgtgtgtgtgtgtgtgtgtatgatggaatactacacagccatgaaaaggaatgaattaacagcatttgcagtgacctggatgagactggagattattattctagtgaagtaa

SEQ ID NO: 842792 - DNA, 628 bp, Homo sapiens
aaaacacttgacaacttctctttggcatattcaaactgccagcatcgytactttttcattttggagccattaggtaaaacaagggttatgtgaacacaagcactatgataccatgacagtcaacctgataatccagacagtttactaagtgactaatggttatgctggagaaagcgatgactcatatccagggtgggatggcatgaaatttccttatgctactcagaatggtgtgcaatttaaaatttctaaattatttgtttcttgaagttttgatttaatggttttggaccacagttgactgcaggtaactgaaactgcagaaagcaaatccatggataaggggagactactgcatatccaagagaaatgaaaacatctatacacacaaaaacatgcagttgttcacagcatcattattcataacaattcaaacgtccatctactaacaagtgaataaataaaatgtgacacatccacacaatggaatattatttggccataaaaaggaatgaagtagccgggcgtggtggcccacacctgtaatcccagcactttgggggccaaggcaggcagatcacgaggtcaccagttcgagatcagcctggccaatatggtgaaaccccat

SEQ ID NO: 842793 - DNA, 643 bp, Homo sapiens
aagtgtagtcctagatgtggaacatttgaacacactcatgaactgttggtgggatcatttatttggcttaatcactttggaaagcattttgttatgttatgaagttgacatgctgacttgaagactcagtctttacattgccaggtatggcaacaatcttccacctaggtaagcagagacatgttcaagaataccatactgtttgtagcagcacaaacacccagggaaaaattagtgtgtattaattcaagaatgaatcaattctagccaatgaatataacgtaatactagatagcaatggaagtaaattgtctagattatgtgtcaacatattatcacagacctaatgttgaatgaaaaaataacattacagaaaaatatataaactagctgattcctcttagacacatttcaaagacacacaaaattaaatactacataatttacagattcttgtgtaaatgcctacagacctataatgcaaaagcaaagtgaatgaccaaatttaaactcaagtttaacaatcctaccctgggcatgatggagaaaccaatgaggaaatcctaaaaagagtaacatrgactgagaaattttcagcaataatctaactcttaagctgattggttcaggcaaaggtattcat

SEQ ID NO: 842794 - DNA, 592 bp, Homo sapiens
catgcacccatctcccagctaaaggacctggagcccagagatcacagcaggctgggacataaacagcccagggagagcatctcctcgcccacctcccattctgtagagtccacagtgggactccgggagagaagtctgggctgtcccaggtcacgtggcaggctggttgcagggccagggaggcccaggtgtctgatgcatgtcaaagctgagtggctgcgaggagagctgcactgctgctgaactctggcctcaggagtgacttagggcccagccatctcttctttggtagctcatgtcacgtgtccaggtccgggccctcctgcagccagcctgcaccccggatggccccacccactccttgccacacccaccctgccatttgccttggccatgctgaaagggaatattccgtgcccattgtgcggaggcacctcctcatcgcttcctgtcacctgcagggtgccrctgagcaccgcctggagaagatcccagagcccatcaaagaggccactgccctattctacggtaaggagaggcctgacccatgggaggagggaggaggagggaagaggagacaggtgataccgcc

SEQ ID NO: 842795 - DNA, 602 bp, Homo sapiens
ggtgcagtggacggcgcctgtaatctcagctactcaggaggctgaggcgggagaactgcttgaacccgggagtcagaggttgcagtgagccgagatcatgccactgcactccagcctgggtracagagtgagattctgtctgaaaaaaacaaacaaaaaaaacaaacaaaaacccagactatattgtttagggatacttagttgacaaaataacagacacaaacaggacataattaccataaaaatcaggacctggggggcggttggggggggagatttaagtggaaagaatggagcggtgacaatgtgtgtcaacctgggaggtggtgaccctggggttcgctttgtaattcctcaaaatgagcatttatgtgctattcacttttcacagggcagaatctctgaactaacatgtttacgcagccatatgcaaaaaaaaaaaaatggataatttgtattctaattaaaatatttaaaaattggagacaaggcggccgggcgcggtggctcaggcctgtaatcccagcactttgggaggctgaggcgggtggatcacaaggtcaggagatcgagcccatcctggctaacacagtgaaaccctg

SEQ ID NO: 842796 - DNA, 610 bp, Homo sapiens
tccagtaaattctgcctctttaataagtctttatcttttttcttaatccttatagtcactaccttattttgawgcaccattatctctcagatggattactttaagtttctgaacccctctccctgcttttctaattcacattcaccaagtcaacagagtgttctttctaaactgcagatctaaacatatctctcctcttaaaccagggaagcatactctaaacctccagcttgatagtacactactttgacccactctgtacattaggcttattgaactgcctgcctatctctggtcctgcctggtatgtcccttaatattttttatttgtacaaatttaaggggtacgagtgcgattttgttatatggatatattgcatagtggcaaagtctgggcttttgcccctcgatttttaagagttcttcatatattagatagatctgtcctttctctgtgttatatgtcgtaaatattttctaccagtttgtcactcatgttttgattttgttatggtgcatttgttatgcacattcttaaaatgtaatcaaatttaatagacttttattgcctctggattttgagtcatggttagagagcctttccctacac

SEQ ID NO: 842797 - DNA, 432 bp, Homo sapiens
caagccagatagggactgagattctattactgaatgaaactcttataagggcttgggagtgcagatagggggagttctcaagaaattttacaagaaagtgttatgtattatgaagcatgggttattgtttgtttgtaagtaaaaaaaaataagagagagagagagattaagcaaaataaacattaagcaaggagaagctgctctaaccatttaaatgatacttttaaaatgaagattaacagcctttggcagactagaagaaaaaaaataaaagaaaaatgtcaagcagaaaacagttaccacagatttgatcagtatttactatcaactgtaagaccgttctaggcaggtggggtctatgggaaayacaaagataaatgagagagaatcccctaaaaccaataatattgctttatgtttaatttatcactt

SEQ ID NO: 842798 - DNA, 473 bp, Homo sapiens
gcaacaccgtgaagcaaaaagcaagtatttgccagacttatgggtgaaaaagtcttgttattttattctcttkccttgctagtgagactgaagtttttgtgatttattattcatttctattacttcttgtgtgattattctattccaaccttttattcactttcctcttgggaggtctgtgctgtccttattaacttgtgatactgttttatcttaaggatattattccttggtctgtaatgttggctgcaagtgcttactgccaattatatctctcaggttaggttcattactgggtattttatattgtgatgtgaaggggagcttttattttccattttgtgttcaaactaattattgccaaattatattatcagcaagctttggatttttgtgtattttagtctgtgcccagtcactttacagagctcttgcattgatgccaataattcttcaatgggctcttttaatgg

SEQ ID NO: 842799 - DNA, 600 bp, Homo sapiens
tttctctcagttgcctagtatgcaaaggctgggccttaaatgttttgctcctctaaagcatttaaatttaagagataaacctgctaatttgtcctaaaagttatatatgtcttttaatatagtcatggctgaaaaatggctaagacagttagcacctgactctagttttaaattaactgagaaaataatccttcagaaaatcattgatgttgtccacatacatgtgttcttacctctcgagaggaaaatgttaatgcttttgtcattggaactcagtttgggacttaccactataaattggaggttccagaatgtctgttcttcattccttattttgttcttgttttatgtggattttgtttctggaatctgaaattctatcattctgtgtctgtctctggaaagaactcaatctctgaatcattgaatttctattaatcagtttgtttaaatagaccatctttcttgagaacttgtgcaaaataggttaaacaaatcctttttttttttatagagcaggttaaaattagaggtaagcasaagcttttgctttttgtcctttccaactataactgaaaataggatgcttccctaagtttt

SEQ ID NO: 842800 - DNA, 608 bp, Homo sapiens
gggggtgcaggaagcaggggtggatttggcagtcagcacccagagcccttcaggctctggcagggtgggaacggtgtgagatggggccctggccacggtcccaccaccacgtgtgggaaaccaggtctcagcaggggaaggaggtacccagggaaccccatgcgcctggacggacaaggtttccatccctgcatctcagcaggccctagtaggcagcggggtcctggcatgagcagggccctctctcccctgcaggtggctcagtggcccaggccccgaggaacgtgctgaacttggggctgccgtggtgggcaggtgccacggccacacacacggtgctgtgggcagggctctgggcaggcctcacagtcagggtggcctgctccacctggacggggtgcccaaggcagtgtgcagactccaagggaggggctgctcctcccggcccaggccccaggccaagagcgcagcctgcaccgcrtgtcccaccttgagccttgccctgaggggcttcggtgtcgtggaggaggctgtgtcaaatggctcatccaaggccctttagccaagaggctgagaccagcattgctccagaatggtatctgtcacag

SEQ ID NO: 842801 - DNA, 517 bp, Homo sapiens
cccttctttgtgtgtggactcaacagtgccctcctggatccctcatccaggaggttgagggattaagaggccccgccatccatcctgagatagtgcagaccttgttgataaamgtctctatattcccggaggccagttgcttccctatccctacctattaccgctggggtccacacgatctttgttgggaccatggagagaacacaaaggtaacaatacttttccccaggcctcagagcctcgatttgtgtgaactaaggggagaagaaagtagagggcagagaaagtccccctgtcctccaacaccttcttggaatcagacacaagtgtgttggtgatgctccaccattgaccaagatcccagaaccatcactacattgatatattttcacactgaaaggcaatgattccaacatgaaaatatctattcccttatgggtttgataaagactttctacatataaatagcacttatttacgaactgctttacatgcattaactcttgcacgtccactt

SEQ ID NO: 842802 - DNA, 557 bp, Homo sapiens
ttccacacagagcccccagagctctgcaggatcagctgctgcctgtgcctcctgaccctcctcttgcttcccacactccagcagaccaggctcccagccattcctggtcactgcagcagccctccttgctgagggccttggcatgtgctttcttctctagcaatgctttcttcttccatcctccttcacccagtctaattctttactacctgttaatggctgaaatgtgtttctctaaaagatgttgaagttctaacccccagtacctgtgaatatgaccttattagagatgatcaagttaagatgcactcattatagtggtttctaatccaatatgcctgacgtccttataaaaaggagaagcctggacacggacaggtgcactgggagaatgctgtgtgaaccccaaggcagagaacgccatgagaacatgcagcagaagccgaggaacacccaagactgctagcaaatcactagacgctgagggtaggccaggaaatgatccctytctcagagcctcagaaggaaccaacagtgctgacacttgatcttgaact

SEQ ID NO: 842803 - DNA, 574 bp, Homo sapiens
ttcactgtagcaatcaccatctattattttacaaatcattgggatcaattttggttcctgttagyataaagctatttgggtttttagtaaccagaaaatgaagggttaagcacacctataaatatttatattttttgttatgtagtataacttggtatcacccaaatatccattttccctcattcatatcctgaaaaattttaagtttaaaaatgtgttccacgttgtgagttttgaaagccttaaacaagttgaattgagatttacaggattcaacttagtgtaactttgacctcaaaataatttacaattcatttcatatttcacatctgcagcctcactttttcgttgagcagcttaatggtttttttttatggtttatctgtttttggcctccttgtctgtcttcctttctctcctcatcttgcacacttattgacacacacacacacacacacacacaatgtatgtatgctaagattaagcattctttcttttttgggggggcggtgctggggggctggtgtctcgctttgtcaccctggctggagtgcagtggcacaatttcggctca

SEQ ID NO: 842804 - DNA, 561 bp, Homo sapiens
gagcttatttccaagcatctctttggatgggaggttttctgttcctttcagtcaccaatatctgtgcaaacattcagtttgtttttgtttagtgtgtccatttttatccaatagtatgtttggctctgtagggcttctagaatgttccatttggtgatgggtctgttacccacctctgatttcccggactcctgatttgtcttaaatatatcaggcatacgtgagtgcaggtggcctgaggtttcccatgcaatcccatgtctggcaaaggtatggactatggaatgtcccctgttaatggccaccactagcctggagccattccagacacatgtatcacctctcccaggaaggtcagcttctcctccgccctgcatctgtctcccctggggtggcctacagaggcaggtaaaggaaaccgctcttggtgcttggcccygccacccaaagttctgacccacgagtccttccctgcggtcctgctgctgctcaaagcacgcccagtcaacttcagacggaaggaaatcagacttcggactgcagcccagcatatttttggct

SEQ ID NO: 842805 - DNA, 476 bp, Homo sapiens
cgatgggtaaatctacttgcagacacaaagcatggtggacacggaggcaggrtcttggcaaggcacctggtaacccatgtgcagccagaaagacagagctaagcggtaacctcacaatttttagatgctttttttcttttttttttttttttggtggttgggggatactacagagccactggcatcaaaaatgcagcccataatttcttaatttctaaatggaattatttataccatacagatagcaaccaagcctaagcaacatgtaacttagggggcaacttgggaatttaaacctttgaaactagattttatgtttaaagacgctcagagacttcccaacggattatcccaacctagcaggcgaaggagaaacaaaaacttccaagcaaagaaaggcttcctggccctccccgactttagcatccccgatggcagagcagcacgcggctaggaagcggacctaacgtcactgc

SEQ ID NO: 842806 - DNA, 537 bp, Homo sapiens
acacgcccagcgtctggttgtccaggcccggccggaggttgtaacccaggatgtcggccttgccggactggtaggggcgcaggcgcgggtctctgatctgcgtgtggttcttgagcgcgccgccgtcctgcaggcacaggctcgcgagttcgcgcctccgggcgcgcagccgctccacctccccgcgcagccgccgcggccccagctcggcgcgcagctgcgcccagagggtgcggttgaaatgctcgtacaggcgccagtccagcgcgcaccagctccgcgcgcgctcccgggtctcgggcgacaggcgggccacggagcgcgcgctgcgggagttgagcctgaaggccaccatgttgtccagcgcccagcgcagccggcgccgcagcagcaccagggattcgtccaggtgctcggcgatgagcaccagccggaagcgccgytccacctcggcgatgcgcgcgcgcacgtagccctcctcgcactgcgcgttggggtcgaagccgaagtcgaaccacatgttgttcttggcgtaga

SEQ ID NO: 842807 - DNA, 262 bp, Homo sapiens
  misc_feature 199: n = A,T,C or G
acacggagcctgccctcatgatcacagactttgaccttggacttatagcctccagaaccgtgataaatacatttctgttgtttccaaggcccctggtctgtgtatttcattttggcagccccaagggactaagacacagaccccctaaaaccakcactgccagggcccgggcaacgggcccctcctatgaggggctgangctgcctgaggtggggaggggcccggggtgattgtgggaactcagggctgtcaggggccccgg

SEQ ID NO: 842808 - DNA, 262 bp, Homo sapiens
  misc_feature 199: n = A,T,C or G
acacggagcctgccctcatgatcacagactttgaccttggacttatagcctccagaaccgtgataaatacatttctgttgtttccaaggcccctggtctgtgtatttcattttggcagccccaagggactaagacacagaccccctaaaaccatcactgccagggcccgggcaacgggcccctcctatgaggggctgangctgcctgaggtggggaggsgcccggggtgattgtgggaactcagggctgtcaggggccccgg

SEQ ID NO: 842809 - DNA, 532 bp, Homo sapiens
catcctacatttccacctggatccatcatrgattgcatgtcagctgacattttgaagaaaaaacaaatacaagagattaaggttattttcttctttatttattcttagtagttaaattcagtctaatggcagtgcttccatttacacgctaaaggcaaagccaatctcccactcaacatcatttgttgaattttagtttttggcaaatctcgtttctgtttgttcttgagggaaacattatagctcacattttttggttatttttatgaattcagaaaataagtgttgaatttatagaatggggacattcaagctgacccagaacgatcattaactcctaggcagtaactgtaaatttcacatggacacatctctcatagctccctgtttcacaatcaaagaaatctaaaatcaccaactgttacatatcaactataaccagtataggatattctagctacaaatatgtgaaactgacttagatgtatgttaaagaatgttttagaatcttcttgctagataagataaatga

SEQ ID NO: 842810 - DNA, 633 bp, Homo sapiens
gattaagtttgtcatctcaattgcttctcggccttttggctaagatcaagagtgaagtttaccattgcatgtggtgtggtttayggtgcccccaaacaattatgatagtaacagtaaagatcatggatcaccataacagacatagtaataataaagtttgaaacatagcaagagttatcaaaatgtggcacagagacacaaagctagcacatgctgttagaaaaaatggtgccaatagacttgctcggagcaaagttgtcacaaacgtttaattagtaagaagtgcaggatctgaggcatgcaataaatacaataaaacaagatatgcctatatatactaaaatgattactacagtgaaacaaattacatcatttttctcacataattaccttgttgtgtgtatatgtgtggtaagaacacctgaaatttactcttttggtaaattttattacacaatacagtatttattaattacagtaatcatagtttacattagatttctagacttatttatccaacataactgtaactttggaccctttgaccaacatctccctatccccttccacttataaccaccattatactctactctatgtattcagcatttttagtttccacatataagtgac

SEQ ID NO: 842811 - DNA, 618 bp, Homo sapiens
taacttttatcccagattaagcactgcagggtaatcgaaaaagcacaggctttgcagttaggaaaacctacttaaaatcttgattttgctacttgctaattgtgtgaccttggtcaagagtagttctaaaatctgaaaaatggtggtttctacctcattttgttgtaagaattaaaaaagaaccatatgtaaagtgcttggtgggatgctagccagttcaagtagctggtgtttaatgcagttataataagcatctattaaggttaacatattaaagtgctcaatttagactcaagattcttatcttaagatgcatctaatcctgatacattataattgactagggcaaccattcccatgccctttatgttagaaaaattccatggtgattttactggtgcatgattattggatggttattgttaatttccattcatgggtcataattcattaaccacaggtgccattttgaatgaccttttgacttccacatcgcaaacaatgccagcatgaagcaaagtgwggtctgttgatcataagcgataagtacatttttgaggtactttgtgattgccaaagctgagtgcagtctcagtgactcttaggttatcaaaaccc

SEQ ID NO: 842812 - DNA, 624 bp, Homo sapiens
tagatcctactagatcaggttaatctgttttataattaataatttctgttgttccaacaygtgataccataagcactagctattgtctggagcagggaaaaaaatgaggtataaaataaacacattcctattagcaaatgagagctgcaggaaacttgaagccctcgttttgtatctggaaatggatctgggtcactgacataatattcagaactccgaatttcaaacataagctgtgaaattaaaaagggtgtttttaaatctatgtggctcagatagcagtaatttggaaaggaccaacaaatacaaatctgtgtgggtgtgtgtgtgtttgaaaacgaaaataaagaaaaagaacaagaacaaagcaaatctcagtggtatatcaactggtacaatgagtaactaaggaaggctataaaagttactaagcaagtcattcaatcatagactctgggagagagaagggctctcaagtggtcatataatctagttctttgccctggagaaataggatatttcagcctctttcaattctagccccccagcttctcttaaagattttaaaatggattatacattttttaggttgacaacaatttattgagttcctactatgtggca

SEQ ID NO: 842813 - DNA, 513 bp, Homo sapiens
tttgattggaattgtgtaaaatctagagatcaatttggggagaactgacatctttataatactgagtgttccagcccatgaatatgrcacatctttttattttattgatgttattatacattgtatttaaacttgtttttaatgcattttgctggaatatagaaatatagtttatttttatgtgttgaccttggatcctgggaccctgataaattcacttagttctagggtagcttatcagttgattttattgtatcttctaggtacataattgtatcattcacaaataatgaaggttttatttattgcttttcaatttttaaactttttattaccttttcttcatttattgctctggctagatcctgtagtgcaatgttgaagagcagtggtgacagcagccattgtttccttggtctaatctcacaggaaaattttttcactatttcacaattaagtgtggtatttgctgtggcttttttattttattggagatagaagttcttttctatt

SEQ ID NO: 842814 - DNA, 605 bp, Homo sapiens
ttttaagatgtcagttcttcacaaattgatttttagattcagcacaataattctagccgatttttgggatagaaattgacatgctcagaggactgatgtatctgacttctagacttcctgcatagtcctgacttaccattttttgactagatggtagtacaagagtgatagacattcagtagaaagcctactttgaattttgttcttttccctggctagtaatgtgcccatagaatactcaatcttgcaatgctgggcagcagcagcaagccgtagcttcccgtcagccacagcatcaagagggtaaaaactgattcttgctctttgtgaagaacactattcctgctaaaccatcaagtattgatgcccttagtgccttcaaccaatgcttctactcaagcctaatcagtagggaaattgataatcctgttgctgtagtattccccatcatgccgcaattttagttcaatgcttcaaacattyttcaggcccagtgcgctttcagctgtgtatgtttatagtgagtagctacacaatcattctgttttttgctttcagtttactattcaataaattagatgaaatattcagtactttacaataaa

SEQ ID NO: 842815 - DNA, 605 bp, Homo sapiens
tcctccacagacagcatactctccagttttggaaattctgtttggaactcaaaaatgctccctttaaggaatgtcttataatgattttttttttataaccaagccagrgataaagaagcagtgggttcagccatttatatcacaccctttgcacacatctttcccaccttagcttgcatgtacatatgtaaataatgtgagtcaagaaactgagaaaaatgtgcacatcttctactgaattccccaaatgggcaactcaggccattattggctcttcagttacctagcaaatatgctttctgctagaaagagtggaaaggcagaagctcctgaaattgctcagctatctgggtaaactcaagagccatgggactgggaatttcaatctggattctctaaaatctctttgtgagtattgaggttgcttgctggcttagaaaactgtcagtgctcacaagaaactcttcacaactattaacagatgactcagtttgcctctgtatgttctcccaatagcagaattgttggctggcacctgctccgctttttaagcaatcccagaaaatggatgttaaaaccttctggtgattcagcagcgtgtggaa

SEQ ID NO: 842816 - DNA, 601 bp, Homo sapiens
accaacttaaaagcaaagatcatcagattcaataaaaagcttcaaaaaggtttacaagagctttatccaaatataaagataccaatargttataagtaaaaatggaaaaagacataccatgaaaacattaataaaatacttcaagacaagtattagagatagatattttataacaatgtttagttaatggagaacttatcaattctaaatgtatatgcacctaattactgagttttaagatacataaaagacaatggagaactaaggtgagacaaagttacaatcatagttggagactgagtagacaaaatcagaaaggatgtaagggatattcaatggcattaccaaccactgatctgacatttatagaactactacacccctaaactgcagaatactcattctttttatgtgcaaccagaatattcaccaaaatgggccaacaatatgcttgcccataaaacaagtctcaaaaaatttaaaaagattaaaatatgactgaatatgatctctgacaacagtggaattttagaaatagtaacatatagaaataaatagcaattaactattgtatcttttggtagatggaaaaattatattt

SEQ ID NO: 842817 - DNA, 614 bp, Homo sapiens
taaatttcaagatatcctgaaccaactgatgacagcctatttagctacaggaatactctggaaggaaatggtagcttctggagttttaactggagtgttaatcttgccaccatgacctaatggaatatcacataacctccctggtgtgaccattaagcttagcaggatctcagagaatagacagaggaatatgcaagctggttatcagagaaggctctggagcctgtcagtcagtttgaaccttggttctgcaactttggcaatatatatattttttatcactctgagccctttctgtacaataggataaaactaatacctatttcatgtggttgtttggaagattaaatagtttgatatgtaatcctggcaggtggtaactacttaatgaatgttagctcctattgttcattatattagatacctaaagtttgttttatgattaaatgcgagagaatggcagtgatgttcgcatgtaatgtgagtacaagctgttaacatataaaatagggcaatacaaatattttttactccraaatggattgattttcctcccatttaaaataaataacagaaatattctgttttatgttttgtggccagaagctagcatg

SEQ ID NO: 842818 - DNA, 530 bp, Homo sapiens
  misc_feature 502, 515: n = A,T,C or G
ttccatctcccagcacaagaagggatccaggtggaacaatctcagctatctgcatctctggggatggctaggctaggggatgccatctcccaggacccaggaatgtcctccttgaggtgggctggattggatcaagcacagtttaggatgggaaaggaggctgtcatatgagtaaagggtaatgaaggggttacctgagtaacactggtgagaaaggacaggaacagaaagctggaagaggagagaagtgatggtgagtaccaatgtgtgctggagataggcgtgatctaattgcatccccaagataacaaatctgttataaatacagatgccgaaatctggaaagtctgggtaaagtccacagctagcaaaaggcagaattgggatgccaagccaggtgtgccttgctctgaagccccatagggcagggtccccatctcccaccactgtcccccatttcctcatcctgcacacagatgaagaggtctttaggatgcatggnrtgttctgattgnatcctccttctgctg

SEQ ID NO: 842819 - DNA, 634 bp, Homo sapiens
aaaacaacaacaacaacaacaaggaaatgggtgctgagtaggcaaaaccaacaggtgtccatttggtcagaaaaagttttttatttattttatttatttagtttttgagacggagtctcgctcttttacccaggctggagtgcagtggcgcgatgttggctcactgcaagctccacctcccgggttcacgccattctcctgcctcagcctcccgagtagctgggactacaggcgcccgccaccacgcccggctgattttttgtatttttagtagagacgggatttcaccatattagccaggatggtctcgatctcctgaccttgtgatctgcccacctcggcctcccaaagtgctgggattacaggtgtgagccacagcgcccgacccagaaaacattttaccacaattgacctaacatttgctgatcatcaaataaatgcacatttaaaaaattttggtgcatttctcatgagaatgctttggcgtatcaaggacatttttccctgtaccaaactagaaaccaaaagatgaaaaggattgtctaagccagacagactctycagtcaaaacaggactggttttgtgaggttgctttgggtcctgtctctccaaggactgcatatttccttcttc

SEQ ID NO: 842820 - DNA, 611 bp, Homo sapiens
attacctttttcatggaaaaagctttatgtcatgaaaactgtgtgctccaccctctcccctctcaacccagtatcttgctactggtacctcttcatcyggctgttcatgtacagcctttgtactatcctttataataaactggtaaacatagtgaagtatttccctgcattctatgagctgtcttaccaaattataaaacccaaggatgggagtcatgggaactactagtttatagctgttgggtcaaaagcacaggccacagcctggggcttgtgattggcgtatgaagtgggggcagttctgtgaggcagagctcttaagctctgggatctagcactatctccgggtggatagtgtgacactattcttacatacggtgtcagaagttgtgtgtgagagtgtagggaagcagtgtgcttttctcataatagtgaaagaatagagttgagagggtctactcaaccagaagaaaaaatagttttgcatttttagagatttttaatgtctaataaggaagatatggattctggaaaatgttaactaatgctatttttagcatcatttttattggtgtgtcattgacatcaaatgaccctgggcaagctcttgc

SEQ ID NO: 842821 - DNA, 573 bp, Homo sapiens
actaatatagaaagatttacagtgagataactattctcattaatttcttgtgyatcttttgctgtattattattttttttttgaaacggagtctcactctgtcacctggaccggagtgcagtagcatgatctcagctcactgcaacctctgcctcccgggttcaagaaattctcctgcctcagcctcccaagtagctaggactacaggcacacgctgctacacccagctaatttttttgtattttagtagagatggggtttcaccgtgttgcccaggctggtctcgaactcctgagctcaggtaatcagcctaccttggcctctcaaagtgctaggattacaggtgtgagccaccacacctggcgctgtatttcttttgtttgttttgacacagagtcttgctctgtgtcagaggctggagtgcagtggcatgatcacaactcactgcagcctcaaaatcctggctcaagcgatcctcccacttcagcctcctgagtagctgggcctacaggtgcttgccacctgtaatttttcggtttgttatctagggacagggtctcgttatattgcctg

SEQ ID NO: 842822 - DNA, 566 bp, Homo sapiens
aggagtgaggtggtgcaggagctgagatttgcagtccatggcagagagctgtcagggaggacggatggagctgtggatgtggctgagtctgggagtttgtgtgtgccaggcacacagaatgtgtgaggatgtgcctgccagctgtgatgaccatggggctcctttcctagacatggctcttccctcctcagataatcaaacagtccagttcagttttaggcatggctggatccagaatcttaaacaatgtttcttgtcttggctccaccctcccccatgtataggcatcatcctcaatctgtctcctattggtcagcaagctggcaccataatgatcaaccctcccaacatttcagaaatgaaacattcagagctccgtctcactgggcaagttttggtcatatgtcctcactggagccaaccacgtagcacagggaatgctctgccctgactggctaaggcctggaccacaggttccacccttctggtgtttacccactccatccgctggctttatgccctgctgtatgctgggcaccgggaacaragaagcagccaacctgtcc

SEQ ID NO: 842823 - DNA, 423 bp, Homo sapiens
tttcatttaaattgaggtaaaattcatataatataaaattaacctttaaatgtgtacaatttagkggcatttactacatttgcaatattgtgcaactatcacctccatctagttctagaacattcccatcaccccaaaaggaaatcccagacgcattaagcagtcactccccattagccctcccccagccccgggcaaccactaatctttctgtctttatggattttgcctattgtggacattttgtataaatggaaccatacactatgtggccttttgtgtctggcttcttttgctgagcgtaatgtttttgaggctcgttcatgttctactatgtatcagaatttcatgtcttttatggctgaatactattcaattgtataataataccacattttgttgatccattcatcagtagacaga

SEQ ID NO: 842824 - DNA, 550 bp, Homo sapiens
aacttgttgtgatcataagaaaccagccttccctcaaaatcgacatgttagatgtcaagtctctgcttacagagcccggctgaaaagaataatttttctgagagttattcattgagggttctctgcttattttccccttttctagccaagagttatgatctttagtaagaccacctggtggcagaccacctactactaccaaactcaaaaatatactttaagtactctaacagaaaaataaaaaggaaaaagagaaaagcaaaattctaggagtttaatgggaaaccagaatatctttggcatgaaaatattggaaatatattttatatactctagcacagtaacttccctccagctccttttcctatgtaaaattcagctatgatgtagatcagcctcgagatgcctggcctgcaaatgcacaactttggaatcagtacrtgcaaatttctccaaaatgctctcgtatttttcaagagaagatcttttcatatagaacagatcatgattaggacataatttgtcatatttcgattctatgtcatgaatt

SEQ ID NO: 842825 - DNA, 615 bp, Homo sapiens
ataatttatttttgaaatgttccttgggttctgaaatttcagcatgccaatgctaaactattccttgagggagaacgactctccctgaagagtctccaaggcctaatgttgctgagcttgactgataggcaaaacatcgacagccttaattttttcttttcaaaacatgtttaacttcagtaaaccttaagccaagcctcttgcagatggcagacagcttaattgctgtggtaaccttgtctgacgttttttggaaaactttgggtgttataataatccatcgaacccagagaaaatagatttcaacccacacaaagacatgcatatggctcagagtctcaacttggctgctgaggttttgtccaagggtgtttctttttttccctccctttccaggctttctggtacagcttgcaagtccagcatgtattgtttgggcagcaaatcaagagaggcccaagatgaaatgaatcagcgttactgtttcttccmctaccccatctgccttcccggaaagtttgagatgtggatggtaagaacagttgactgtatcaatatattatctttatttttttgcccatttttagcccattttgaaaagctttattgatatat

SEQ ID NO: 842826 - DNA, 611 bp, Homo sapiens
atcaataaagcttttcaaaatgggctaaaaatgggcaaaaaaataaagataatatattgatacagtcaactgttcttaccatccacatctcagactttccgggaaggcagatggggtagkggaagaaacagtaacgctgattcatttcatcttgggcctctcttgatttgctgcccaaacaatacatgctggacttgcaagctgtaccagaaagcctggaaagggagggaaaaaaagaaacacccttggacaaaacctcagcagccaagttgagactctgagccatatgcatgtctttgtgtgggttgaaatctattttctctgggttcgatggattattataacacccaaagttttccaaaaaacgtcagacaaggttaccacagcaattaagctgtctgccatctgcaagaggcttggcttaaggtttactgaagttaaacatgttttgaaaagaaaaaattaaggctgtcgatgttttgcctatcagtcaagctcagcaacattaggccttggagactcttcagggagagtcgttctccctcaaggaatagtttagcattggcatgctgaaatttcagaacccaaggaacatttcaaaaataaattat

SEQ ID NO: 842827 - DNA, 655 bp, Homo sapiens
aaatggattgtaagtcatgcagaggccgaaactgagtttcctccacttccaygaccccagcagtgcctagcccatagccagccacagaatggaccctcagtaaacgcatgctgagtggacagcacatggtctaggccgggaaggggtgaggtgtaggaagcagggaagtgcagaggtgcacaccctgaatgtgagggcctccttgagtttgcagcccaggtcccgggccctgcccgtgtggtctgcagggagaagtcattggtctacatgcaatgaccctgccggcctctgggactcacactccgcaagctcaagggcctggttggcaccacggaaaaatcttgaagcgctcacttggcgtgaacaaggtctggggttcatgagaatcagaaccttccagaaccctgggctgtgcactgttatgctgaaaggctggtgctcattttggaccgtcaagcgcagccatgagcagaaggaatccctccgagcatcgtgcccagatggcggctcagcctttcccttgtaacgcgtggcccagaggaaggggccggcgttgttctgccacagggctgttctgccacagggctgctcccccaggaagccctaaatgtgcagactgtgtgggaggaaacagcccccttggattactgggcta

SEQ ID NO: 842828 - DNA, 552 bp, Homo sapiens
aatccaaagttcttatgctggatcactcaaagggataaaaatacatttctactcattcttttcttccctaaaggcaatgtcttgtttatccttccttgtctctaaatagataatttaatcaaaatgaactarccagatgatctacaataatcaacattagctgtgaaaattgtttatggaactactcgctacccagcacagatgtattcacatttccttcatagtgcctggattctactagacatcacagaagcacattccctacaaattagtgattatatatattcattgttttttttttgttttgttttgttttttttgccaaatgctttctagattgttgccctatttgttgtttaagaaatgctgacccttttcacaagacagtgctgaaagcgaagaaagaagttcctgcccctcctaaagccaaagccaaagcaaaggctttaaaggccaagaaggcagtgttgaaaggtgttcacaaccacaaaaaaaagaagatccacacgtcccccaccttccggcggcccaagacactgcaactccggaggc

SEQ ID NO: 842829 - DNA, 518 bp, Homo sapiens
gctcagaagaagacaggaagatgtgggaaagtctagaacttcctagagacttgttgagtggttttgaccaaaatgctgayactgatattgacatggtttggctctgtgtccccacccaaatctcatctccaattgtagtccccacatgttgaggtggggggtcctggtgggagataactggatcatgggggcagatttgccccttgctggtctcatgatagtgagtgtgttctcatgagatctgattatttaaaagtgtgtggcacctccccattctctctctctcctgctccaccatggtaagacgtgcttgcttccccttcaccttctgccacgattctatgtttgaggcctcccagtcatgcttcctgtacagcctgtggaattgtgagtcaactaaacctcttttcttcataaattacccagtctcagctaattctttagagcagtgtgagaatggactcataccttggctggcagatggccatgcccttgctgtttccatgattatccctttg

SEQ ID NO: 842830 - DNA, 489 bp, Homo sapiens
aggtatttagagcgtatctggatgggaaaaaaaatttggtttgctatgatttgcccggccctatgaaataaaacacacctcaaactcaatcaatagcttttcaaacagattaagttttgaaaatacaatgtataagaatgctgagaagaggcaacctgcagtggctcatgtctgtaatcccagcactttgggaggccaaggtgggtggatcacaaggtcaggagttcgagatcagtctgaccaacatggtgaaaccccgtctctactaaaaatacaaaaattagccaggcgtggtggcacatgcctgtaatcgcagctactcaggaggctaagacaggagaatcgcttgaacccaggarggggaggttgcagtgcagtgagccgaggctgcaccactgcactccagcctaggcaacagagctagactccgtctcaaaaaaaaataattaaataagaatgccaagaagaaaaaaaaaacagaaaaaagtt

SEQ ID NO: 842831 - DNA, 594 bp, Homo sapiens
agcgttcgtgattgagtcgggtctcagaaagagcatgaggcattcttgacctatatatttaaagaaccctggaggtaaatgtctgtcccatttcctcaaatatacaaacaacatgataaaaataatattgaataaaaataatttaaaatttaaaataaataaataataaaattaacaatttgtttatcagattcttaggaataaagacataatcactttcaggagattgaatgtataaaactacaaatcgcaagactggtcaattaaggtgtattgattcacatacaaaaggatgttcacattacaaaagaattattcaattttttcttaatgacagctctgttaatgctttcatcactttttttgcaaataatccctggttagagaagactgaagaataactaccataaacgaacattagtaattttcaatgccatcaagtttcataaagttttaaaaactcaaattmtttcaggaacaaagctattctatatggcaagagattcctgaaccctccacattagtgtctataatgggtaggcctcatgccattatatttttctaagccaaagttcagatgcatcaagttaccaa

SEQ ID NO: 842832 - DNA, 540 bp, Homo sapiens
aatcgtaggtaaaacaatgatatgaaggataagtcttttcctttttcttttttttttttttttgrgacagagttttgctcttgtcgcccaggctggagtgcaatggtgcggtcttggctcactgcaacctccgcctcagaggttcaagcgattttcctgcctcagcctcccgaggagccacgattacaggcgcccgccaccatgcctggctgatttttgtatttttagtagagacagagtttcaccatgttggccaggctggtctcgaactcctgacctgaggcaattctcccgcctcagcctcccaaaatgctgggattacaggcatgagccaccacggaaggataactctaaaatacatttgttgtgactgatctgatgaatgttggtgccatctgccaagattaggaagatagaggcaggctatggacttttgatttttttggaaggtaggttgggaggaggtattgatgggaatgaaaagacctatttgggtcatgttgaatttgggattatttttaaggcatccagaggaaatgt

SEQ ID NO: 842833 - DNA, 548 bp, Homo sapiens
tttctgatttgaacacaaattagttttacctgttatgtaaatagaagcaagtggtatgtattcttaggtatctgatttcttcttttaaattataatacttctgaaattcacacatgttgttgctgatttcagaactttgtttcttttctaaacatttttcctattctgttgccagacttttgggctgtttccagggattgactaataggagaaaggctggtatgaatatttttgtagaagcctttttgtgaacatatgttaggatttctcttggggaaatactaagtgggatggcatgtttaactttataaaacttctaaaaggtaccacttaaactcttgccagaaatgtatgatagttcttgttgctccatattctctccaacttttcatcccaacagtattttaaattttaaccaatatagtgtgtatgaratggtattgtattattgtttaaatttgtctttatctaattactaatgatgctgttacatgtgctcattggacgtgatatgtcttcttctgggaagtgacaattcaggtcatttg

SEQ ID NO: 842834 - DNA, 632 bp, Homo sapiens
tgtaacaatactcaactacatggaaataactctatcctgttttcctttgtaaaactgcaacaacaaaaaaattgtcattttcaaactgtgctgaatctctggcagtttttgaacccagctgcctgtcayggtttgagtctctgtactgtgtgagtgatgataggctaaatccacttccactgatttttctaactcattctcaaagttgtcttaaggctttcccattatttccaattacctgtgaaaaatgggcaaccaggaggtgggacacagtaccacaaaaccaagtcattgataggctcttaccttccacctggtggtggcctcagtcttcctttgaatcttctgagtaacatagcaccagagaaccatataaacagcccttgatttccagcctcagaggcagacatgagagctggtatgacagtcaactcttactatatcttatctgtatactatacaaataagggaataaatacaaataaaaagatttttttctgataataaagtaatgcatgtttccactggatagtcttaaaactgcaaatagttactgagaaaataaataaaatgcacttgcagtttcacccccagagatccataatcaggtcctctgtattgaaccattcaag

SEQ ID NO: 842835 - DNA, 630 bp, Homo sapiens
tgacaagagtccttaaaagtagaaggaagagacrggagaacccgtgtcagagtgatgcaatgggaaactcgatgggccattgctggctttgaagatggaaggagaccatgaaccgaggggtttgggcagcctctagacattggaaaaaataagaaaatagattctccccttgagcctgtagaaagaagacggcctgccaaccccttgcttttagcccagcttgacccattttggatttatggcctacagaactatagataataccttggtattcttttatgtcatcaagtttgtggcgatttgttacagcagcaatagtaaactaatacagttatcaaattagataaaatccatgatgtatgatatgttcttcttgattaatttattaaatgacacactagatttgtgtccatagcaaattttaagaagttattagtgtcaataaaaatgtatagagagctatatctgaaatgtgattttgaaaatattagtaatttttattgatgatgaagtcacagtactaatactactgtggtttgttgcctatattaataattttaaaacatgataaatttcagttagaggttagtgaaaaatagaacaaatgttttcctatacccagcttcaggg

SEQ ID NO: 842836 - DNA, 630 bp, Homo sapiens
tgacaagagtccttaaaagtagaaggaagagacgggagaacccgtgtcagagtgatgcaatgggaaactygatgggccattgctggctttgaagatggaaggagaccatgaaccgaggggtttgggcagcctctagacattggaaaaaataagaaaatagattctccccttgagcctgtagaaagaagacggcctgccaaccccttgcttttagcccagcttgacccattttggatttatggcctacagaactatagataataccttggtattcttttatgtcatcaagtttgtggcgatttgttacagcagcaatagtaaactaatacagttatcaaattagataaaatccatgatgtatgatatgttcttcttgattaatttattaaatgacacactagatttgtgtccatagcaaattttaagaagttattagtgtcaataaaaatgtatagagagctatatctgaaatgtgattttgaaaatattagtaatttttattgatgatgaagtcacagtactaatactactgtggtttgttgcctatattaataattttaaaacatgataaatttcagttagaggttagtgaaaaatagaacaaatgttttcctatacccagcttcaggg

SEQ ID NO: 842837 - DNA, 596 bp, Homo sapiens
tgaggtccagtcttgaaaatggttgcttcagatattttgtctgcatttttcgttgttttttttcagttggttgtattagtccattctcacactgctatgaagaaatacccaagactgggcaatttataaagaaaagaggtttaattaactcacagtttcaactgcctggggaggcctcaggaaacgtacaatcatggcataaggcacctcttcacagggtggcaggagagagaatgaatgcaagcaacggaagtgccagatgcttataaaaccatcagatctcgtgagactcactcactctcacgagaacagaatgggggaaacttaccccatgattcaatgaccttccactgggtccctcccaggacccatggggattatggggattatcattcaagatgagatttgggtgcggacatagagttaaaccctatcagcctcaggacactggtttttggttgtttcarataaaagggtaaatgtggctcccacacctccatctcggccacaagcaaaagtcctagtcaaatgttagaaagcagtttgtggccggggtcgctcatgcctgtaatcccagcactttgggaggccgaggt

SEQ ID NO: 842838 - DNA, 649 bp, Homo sapiens
cagtcagggttaattcagatcgtttcctctgctcttgcattccctgatttcaagcacsgcgaggctggggctgtaattacggaatgggtagtactcactgttcaccagttgtgtgtaagctttaaactaataactcagcaattacgagaaaaatgagcggtaattacacccattttactcgcggctagacagatgggacattttctcctcgttattggcaaactgtcaccacatttatttcatttttactgtttactatttgttgtgctttgattaagagtaattataggctaggaaaatatgaaaaacatgaatgttgggtatttttaaaaatagaaggaggcccttctccctgttttatattgatagaattctcattttagatcctattaaaatgatatcaacattctcaagatatttccaggcaggcttcagttctgtgacagcttttcagcaggggattcccatgtttgctcattatttgggtcgtcatagacccataaatatcctgcattttttttttttttacagcagcctctgtgtccctcacactcgtccattttggtccattttggtccattttgtgtctgatgataaagcacaggagaaatccacccgtcgctgggatccacaggggagtaacgccaaa

SEQ ID NO: 842839 - DNA, 564 bp, Homo sapiens
cacagactacttcaaagtgatgtgcagcaaggcacaagagttccaaaagccactgtggctggttagttccccattaagttgcttccttgsttggctttattatttcatctgctccattagtgaacagcaagcgttttgcaaaaaaggcattgcacagcctcaccaagctcctagagaagcctttctagaagctgcttcatgtatccccacaaagcaacatgggcagcaggttggtgggatgccccactctcccgaagaagcagcagacttatccaggttaactccctcctctctcctttgtccccaacatgcactgatcaggaagatgaaaccaagtgaaagccacttcctgtgtgggtcttaaaattcaataaaaataatatctcagaaaaaagccagaacacactttctgttcagatggaaaaatgcatgtttccctccccaccttcacctacaagctgagttcatgttatttcaacagcacatcatggacccagatgcaaatggacagtatctgaaatgcagtcccgagcaggagaaatgtagtttcatcagcgagtcatt

SEQ ID NO: 842840 - DNA, 622 bp, Homo sapiens
ttttccagtttcaccatttttcttgaaaagaaagtaatcatccatatccttactagcaagaaaagctttgtttttaaaaatctcaatacaaaactaaaaacacttaaatattttgataaaacaagagagaaacattcatcttatgtcaacaagtcaaagccagtaaaaaaagcacaagaaattcaggaaaatacacatgttcaggaccatcaactaagcatgtgcagagtcctatcaaagtcatgcatcaggcctcgcggagcccagaggttctgcatgttttgcatctgaaatggacttcaggctttcatggaaaaggtttactggagaaccctgggaggcacggccagcaataggatgttcaggttttctctacttagcgatggaattgtgtcgaattcagtaaaagaggaaatgcttgagacttcgattgccgtattgttcttttgtttgcttgtttttttgttttgttttgttttttaatttttaaaaatttttttacttagaggcaaggaatagagtagattcagcatcagaggaattgacttgatggggacacagtgtgggacacagactgacatrgaaagttcgaacacagaatttactgaccttgaataaatcc

SEQ ID NO: 842841 - DNA, 625 bp, Homo sapiens
cttggtacatccttggctgcttttgaactgtatgtaaaataccatcracctttctgcattcatttgtgtctggcttctttccttccaccttatgtttgcagatatctaccatacatgtatagtacctgttgtttctttccttttatacacagagttattatacagccctgaaccagcatcacctgggaacatgctagaaatgcacactctggggtcccacaacctgtctgaatcatcccccacctgggggctgctttacatctgttctttgtggcatccctcccctacccgtcacccagagccttgttttctagtaccctgcgtgcatattgcagaagcagctcaggctttggaatcagcagagctaactttgaggttttttggctctgccaattgataagctataaaattaggtgggtatttatgttctgaatcatctatcaaatgggtgcaagggtgatgcccacctcaatagagagaagcaacacaattaaatacatgcaaagacctttgtagattataaagtgcttataaggttagttttttttctagttaatatttgtgttcatgacttggttttctaattacattgtacattcctgtacggctaaagagcttttcatat

SEQ ID NO: 842842 - DNA, 625 bp, Homo sapiens
cttggtacatccttggctgcttttgaactgtatgtaaaataccatcaacctttctgcattcatttgtgtctggcttctttccttccaccttatgtttgcagatatctaccatacaygtatagtacctgttgtttctttccttttatacacagagttattatacagccctgaaccagcatcacctgggaacatgctagaaatgcacactctggggtcccacaacctgtctgaatcatcccccacctgggggctgctttacatctgttctttgtggcatccctcccctacccgtcacccagagccttgttttctagtaccctgcgtgcatattgcagaagcagctcaggctttggaatcagcagagctaactttgaggttttttggctctgccaattgataagctataaaattaggtgggtatttatgttctgaatcatctatcaaatgggtgcaagggtgatgcccacctcaatagagagaagcaacacaattaaatacatgcaaagacctttgtagattataaagtgcttataaggttagttttttttctagttaatatttgtgttcatgacttggttttctaattacattgtacattcctgtacggctaaagagcttttcatat

SEQ ID NO: 842843 - DNA, 433 bp, Homo sapiens
aaataaatatacaactatatatttcttacttatttaagaacgttctcataaaggaaaaccttaaagttctcagatggtctctataaccttggcctattttataggtttgtggaagggacaactgacttagagaggctatggagatacaaaataacaccaatggttttgcagatagaaaagcacctcttctgaaagaataaggaatacacccagcctgtggaagccagaaccagcgcctttactttcataattcaaagtgggggcgagattcttctcatgtaactgaactgtagtattaatgatacaaagagatggaggtcgtatcctagctttcgagtaaatgccaacacaagcaagtgtgtctgcacatgcayacacacagtcacatgtgcaactaaaaccagtgctttttcctgctttgtgttatgggctt

SEQ ID NO: 842844 - DNA, 605 bp, Homo sapiens
accatctcaatggaaaatgatgatgggagtatgtggaaaggaaagaaactagtagtctaccattttatgtgggtctgtctctacccttctggactgtaaattctctgaggaggcagatgtgttggtttcctcactgctctatcccaatgcccatggcttttcttggcatagcatagacagatacatacatattaaatgactgaatgaatgaataaatgaatgaatgaacgacaggacaccgagtcttttcatcctgggagtcccattacatgccacatcccagaggttggcgggaagccatactgtggtaactgaaagatatgtacaagattaggatttaggcagcatacgaaagccttacttttatgctttatttattgaaagtactctctattttttgttaaaagtctgtactgctattctcctgataagtgtattggccagtgaggccttcctgcccttattttaggaaacttcaggagcaccttttccatggtgggaccacaaaggcagttttccatcagagtaattccacagtgagctcaaggaagggtacaaggatggattgaataayttctcttacagctcctgaagctctctacaag

SEQ ID NO: 842845 - DNA, 524 bp, Homo sapiens
caggcatggtggctcatgcctgtaatcccagcacattgggaggctgagatgggtggatcacctcaggttgggagtttgagaccagcctggccaacatggygaaactccatctctgctaaatatataaaaattagctgggtgtggtggcgggcacctgtaatcgcagctactcaggaggctgaggcaggagaatcacttgaacccaggaggtagaggatccagtgagctgagatcacaccactgcactccagcctgggtaacatgtctcaaaaaaggaaaaaaaaaaagaagaagaaagtggagccaatgaaggattagaggggagaggctacgtgggagaaataacaaggtttcagacagttacaggccgccctttatacattcctctgtaggtgcacatttaagtcagttccatctctcagcttctgtgaacagcgctgcagtaaacatggagtacagacatcccttcaacacactgatttcatttcctttagatctatatccagtaatgggactgctggctc

SEQ ID NO: 842846 - DNA, 590 bp, Homo sapiens
gccactctaaaaatcatgttttctggtttggttttttcaatttttgawcatagttttaattctggaagaagtatatgaaagtaggtcattaagattttatagaacacaacaaaaaaagaaacaggaaataaatgttataaccaaagacatgttagcagagttgtcttgtttttgtgtggctgtgacttaaagatctgattactgaacctcaatctatctaaatgttaagtgattacaaaggaacacgattcagtttataaggctttagatgagctccaaggactacacggcatacctagcccaagcacatcttattatgagaattttaaataatctgcagcaatgtttagatcaaaggtgttttaagtggggatttggacctttaaggagctggaaacagaactgtgtgtgtcctttttgttcatgacagagtgcagcactttcttctcattcttaaagggttctgagcccaaacacagtcactgcttaactgacaacctagcaccaaatcccagctctgttcctcacgacagagttcaaagtttatatggtttctcatctctgacataaaaatagcagcaatagcagcc

SEQ ID NO: 842847 - DNA, 619 bp, Homo sapiens
ctatggagacacaggacaccggccaccgtggccccacacccaggktggcaggtgcagctggccctgatgatgaagacgacacagatgtctcactccggaagcctttgaacctggtggaacgaggaggaatttcaagtgcccaggtttcacgtatgcagaaagttgtacatgagattttttaaaaaatgacaacccacatgtaccaaaaacaaacattaaacactttcagcaaaagcaggagatgtaaggaaaacggcttcagtgatgattcatgttgttaacaacagagggtctgaagccaactttgttttaaaagaagaaagtaggatgagaaaaaagatgagtacaattgttcttaatccaataataattaaatttatatggctacaccttaaagataaatacagtgcggaagtgcttctgatgaagtggcaggagagagaatgaaggaagatgatcgacaaaagcaagcagggtaatttatcgaaagctaagtaccccttgctacatgaacattttggggtcctgtacttgtaaatccatattttgtggatcatcatcaattataataaatgctaaacacccttcaatactgcacaggataagctgaaaaggcaca

SEQ ID NO: 842848 - DNA, 530 bp, Homo sapiens
catcctacatttccacctggatccatcatrgattgcatgtcagctgacattttgaagaaaaaacaaatacaagagattaaggttattttcttctttatttattcttagtagttaaattcagtctaatggcagtgcttccatttacacgctaaaggcaaagccaatctcccactcaacatcatttgttgaattttagtttttggcaaatctcgtttctgtttgttcttgagggaaacattatagctcacattttttggttatttttatgaattcagaaaataagtgttgaatttatagaatggggacattcaagctgacccagaacgatcattaactcctaggcagtaactgtaaatttcacatggacacatctctcatagctccctgtttcacaatcaaagaaatctaaaatcaccaactgttacatatcaactataaccagtataggatattctagctacaaatatgtgaaactgacttagatgtatgttaaagaatgttttagaatcttcttgctagataagataaat

SEQ ID NO: 842849 - DNA, 641 bp, Homo sapiens
tcttttaagctcactctgggtcgagagctctgctgccacttcaatcttgccactcaagataattataccattcggatggttaagtaccaccagctggcctctatcatktcaggattctattatccccagtcctatctgggaactcaattccataacagcatcttttatcatcaaccatgacctacagaggagacctaccactgagcttctcagtgatgctggtacccttctcaccagagaattccatgtctctttaataaatggcacatctgaactggaattttgacatctggggggtttccagccgtacataatatggccactgtagcatacccatttccctgagcagtttgatccctacttctaccatctgccatggcagctgtggcatttttacttctcttagcgtgggccaccacttttccacaaacttctaaaagccgtcatagaagcatgatagcaatgtttcccagagtccttgctggaatgttcgatcctctctccctggagactgctctcaaatcaataaactctctcatacaaatttactttccactctccttttgttcagcatcctcagaaggcagtcccatcagtactgtcttgttccagctgcttcatgttggcagggttctacagct

SEQ ID NO: 842850 - DNA, 633 bp, Homo sapiens
taaatttcaagatatcctgaaccaactgatgacagcctatttagctacaggaatactctggaaggaaatggtagcttctggagttttaactggagtgttaatcttgccaccatgacctaatggaatatcacataacctccctggtgtgaccattaagcttagcaggatctcagagaatagacagaggaatatgcaagctggttatcagagaaggctctggagcctgtcagtcagtttgaaccttggttctgcaactttggcaatatatatattttttatcactctgagccctttctgtacaataggataaaactaatacctatttcatgtggttgtttggaagattaaatagtttgatatgtaatcctggcaggtggtaactacttaatgaatgttagctcctattgttcattatattagatacctaaagtttgttttatgattaaatgcgagagaatggcagtgatgttcgcatgtaatgtgagtacaagctgttaacatataaaatagggcaatacaaatattttttactccraaatggattgattttcctcccatttaaaataaataacagaaatattctgttttatgttttgtggccagaagctagcatgggaagaggcatttgattta

SEQ ID NO: 842851 - DNA, 591 bp, Homo sapiens
aaatcttttgttactctggtatggtttcacagttaattgtgatcctcttttatcaagtgtttaaacattttgacatttttgacaactttctgaaatcaaatttttcttttcttttttcttttgagaaggagtctcgctctatcgcccaggctgaagtgcagtggcgcaatctcagctcactgcaacttctgcctcggggtttaaggattctcctgcctcagcctcccaagtagcagagattacaggtgtccaccaccacacccagctaatttttgtattttagtatagacggggtttcaccatgttggccagggtggtctcgaactcctgacctgaagtgatccacctgcctcagcctcccaaagtgctgggattacaggcgtgagccactgcacccagccagaagtgttcaaaatgggaccctgaaatgtctgaaaagcatttatcctctcaccttataaaaagagagatcctaaactaattagacttatttgggatgctraacgtacatgggatgcactgttaaataagagattatatttaacccttctttgagctatatttgttatgttattaatatgactatttcca

SEQ ID NO: 842852 - DNA, 564 bp, Homo sapiens
ttaaagggtagagtttttattagttttctttttgcttgcttgtttgtttatgcaatcagtgttaagttgtcataagttcaaaataatgggtaataagatgttatttgcaagcctcatggtaatctcaaatcaaaaaacatacaatggacacacaaaaaaacaaaaagcaagaaattaaaacataccactagagaaaatcaccttcactaaaaggaagacaggaaggaaggaaagaaggaagagaagaccacaaaggaaccagaaaacaataaaatggcaggagtgagaccttacttgacaatagtaacattgaatgtaaaaggactaaaatctccaatccaaagacatacagggctgaatggataaaaacaagacacaacaatctgttgcctactagaaacatacttcacttataaagaaatacatagactgaaaataaaaggattcaaaaagatattccrtgaaaatggaaaccagaaaagagcaggaatagatatacttatatcagccaaaatagatttgaagacaaaaactataaaaagagacaaaaaagctcattatata

SEQ ID NO: 842853 - DNA, 603 bp, Homo sapiens
accaacttaaaagcaaagatcatcagattcaataaaaagcttcaaaaaggtttacaagagctttatccaaatataaagataccaatargttataagtaaaaatggaaaaagacataccatgaaaacattaataaaatacttcaagacaagtattagagatagatattttataacaatgtttagttaatggagaacttatcaattctaaatgtatatgcacctaattactgagttttaagatacataaaagacaatggagaactaaggtgagacaaagttacaatcatagttggagactgagtagacaaaatcagaaaggatgtaagggatattcaatggcattaccaaccactgatctgacatttatagaactactacacccctaaactgcagaatactcattctttttatgtgcaaccagaatattcaccaaaatgggccaacaatatgcttgcccataaaacaagtctcaaaaaatttaaaaagattaaaatatgactgaatatgatctctgacaacagtggaattttagaaatagtaacatatagaaataaatagcaattaactattgtatcttttggtagatggaaaaattatatttgg

SEQ ID NO: 842854 - DNA, 590 bp, Homo sapiens
tcttcacaaattgatttttagattcagcacaataattctagccgatttttgggatagaaattgacatgctcagaggactgatgtatctgacttctagacttcctgcatagtcctgacttaccattttttgactagatggtagtacaagagtgatagacattcagtagaaagcctactttgaattttgttcttttccctggctagtaatgtgcccatagaatactcaatcttgcaatgctgggcagcagcagcaagccgtagcttcccgtcagccacagcatcaagagggtaaaaactgattcttgctctttgtgaagaacactattcctgctaaaccatcaagtattgatgcccttagtgccttcaaccaatgcttctactcaagcctaatcagtagggaaattgataatcctgttgctgtagtattccccatcatgccgcaattttagttcaatgcttcaaacattyttcaggcccagtgcgctttcagctgtgtatgtttatagtgagtagctacacaatcattctgttttttgctttcagtttactattcaataaattagatgaaatattcagtactttacaataaa

SEQ ID NO: 842855 - DNA, 624 bp, Homo sapiens
gattaagtttgtcatctcaattgcttctcggccttttggctaagatcaagagtgaagtttaccattgcatgtggtgtggtttayggtgcccccaaacaattatgatagtaacagtaaagatcatggatcaccataacagacatagtaataataaagtttgaaacatagcaagagttatcaaaatgtggcacagagacacaaagctagcacatgctgttagaaaaaatggtgccaatagacttgctcggagcaaagttgtcacaaacgtttaattagtaagaagtgcaggatctgaggcatgcaataaatacaataaaacaagatatgcctatatatactaaaatgattactacagtgaaacaaattacatcatttttctcacataattaccttgttgtgtgtatatgtgtggtaagaacacctgaaatttactcttttggtaaattttattacacaatacagtatttattaattacagtaatcatagtttacattagatttctagacttatttatccaacataactgtaactttggaccctttgaccaacatctccctatccccttccacttataaccaccattatactctactctatgtattcagcatttttagtttccacat

SEQ ID NO: 842856 - DNA, 622 bp, Homo sapiens
aacttttatcccagattaagcactgcagggtaatcgaaaaagcacaggctttgcagttaggaaaacctacttaaaatcttgattttgctacttgctaattgtgtgaccttggtcaagagtagttctaaaatctgaaaaatggtggtttctacctcattttgttgtaagaattaaaaaagaaccatatgtaaagtgcttggtgggatgctagccagttcaagtagctggtgtttaatgcagttataataagcatctattaaggttaacatattaaagtgctcaatttagactcaagattcttatcttaagatgcatctaatcctgatacattataattgactagggcaaccattcccatgccctttatgttagaaaaattccatggtgattttactggtgcatgattattggatggttattgttaatttccattcatgggtcataattcattaaccacaggtgccattttgaatgaccttttgacttccacatcgcaaacaatgccagcatgaagcaaagtgwggtctgttgatcataagcgataagtacatttttgaggtactttgtgattgccaaagctgagtgcagtctcagtgactcttaggttatcaaaacccctttc

SEQ ID NO: 842857 - DNA, 626 bp, Homo sapiens
attagatcctactagatcaggttaatctgttttataattaataatttctgttgttccaacaygtgataccataagcactagctattgtctggagcagggaaaaaaatgaggtataaaataaacacattcctattagcaaatgagagctgcaggaaacttgaagccctcgttttgtatctggaaatggatctgggtcactgacataatattcagaactccgaatttcaaacataagctgtgaaattaaaaagggtgtttttaaatctatgtggctcagatagcagtaatttggaaaggaccaacaaatacaaatctgtgtgggtgtgtgtgtgtttgaaaacgaaaataaagaaaaagaacaagaacaaagcaaatctcagtggtatatcaactggtacaatgagtaactaaggaaggctataaaagttactaagcaagtcattcaatcatagactctgggagagagaagggctctcaagtggtcatataatctagttctttgccctggagaaataggatatttcagcctctttcaattctagccccccagcttctcttaaagattttaaaatggattatacattttttaggttgacaacaatttattgagttcctactatgtggca

SEQ ID NO: 842858 - DNA, 511 bp, Homo sapiens
tttgattggaattgtgtaaaatctagagatcaatttggggagaactgacatctttataatactgagtgttccagcccatgaatatgrcacatctttttattttattgatgttattatacattgtatttaaacttgtttttaatgcattttgctggaatatagaaatatagtttatttttatgtgttgaccttggatcctgggaccctgataaattcacttagttctagggtagcttatcagttgattttattgtatcttctaggtacataattgtatcattcacaaataatgaaggttttatttattgcttttcaatttttaaactttttattaccttttcttcatttattgctctggctagatcctgtagtgcaatgttgaagagcagtggtgacagcagccattgtttccttggtctaatctcacaggaaaattttttcactatttcacaattaagtgtggtatttgctgtggcttttttattttattggagatagaagttcttttcta

SEQ ID NO: 842859 - DNA, 634 bp, Homo sapiens
gaagagtttttcctgggttttcttctggaacctttacagtttccggtcttacatttaagtctttaatccatgttgagttaatatttgcatacggctagagataggattcagtttcattcttctgcatgtggctatccaattttcccagcacaatttattgagcaagatgtcctttccctagtgtatgttttttgtcagctttgtcaaagattagttggctgtatgtatgtggctttatttctgagttctctattctgttctattgatctatatgtctatttttttacacaagtaccatgctgtttctgggtactatagccttgtagtataatttgaagtcagttaatgagatgtttccaggtttgttcttttgcttcagattgctgtcattctttgggatcttttttcggttccatatagattttaggattgtgttttctaattctgtaaaaaatgacatcggcattttgatagaagttgcattgaatctgtaaattaccttgggcagtatgatcattttaaagatattgattcttccaatccatgaacttgggctgtcttttcatttgtttgtgtcatctacaatctctttcattcatgttttgyagtgtttcttgtggacacctttcaccta

SEQ ID NO: 842860 - DNA, 486 bp, Homo sapiens
aaacaaaaagctctcatagctaaagaggaaaagtcaatgactgtcttgtgaggggctaatccagctggtgactaagttgaaaccagtgctcctttaccattccaaaaatcctaggtccgttaagaattatgcyaaatctactctcccttgtgcacaaatggatgacagcacatctgtttagagcatcgttgggtgaatattttaagcccactattgatatccactactcagaagaacagattcctttaaaaatattaatgctcattgacattgcacctggtcactcaagagccctgatggagacgtacaaggagattaacaatgttttcatgcctgctaacacaacacctattctgcagcccatggattaaggagtaatcttgacattcaagtattgttatttaagaaatacattttgtaaggctatagctgctacataccatggttcctctgatggacctgaacaaagtaaattgaaatgacctt

SEQ ID NO: 842861 - DNA, 526 bp, Homo sapiens
aaaagtcttatatacttttcagtgaggctgtaggctgtagagaagtgaccccttcatggtaaaagcccatatttcccatrtattctttcaattacttttgataagaattttcttaataatgacatttatcacacatcagatttttcttacaaataagtctgtgcttatgcatagatggtaatatgaatacccaaatctagactctatttgtatactatgataccacacttttctttaagtaagtggaagccttcttggaggtcttttgtcaaattaatattttaaattgtaatgggaattcaaaggtaaaacaaaagagataaaggatgataatatttagaaacaatgatcaaattcccaacttttggggattgaaatggaaaaaaaatcatgtttgggggaaagtggattatgttaacacaattttaggttaatttatccatcctttccttttgattgctctgggtttataatgtgcttccatcactttatacttatatcaagggcaggaacacaccctttcttg

SEQ ID NO: 842862 - DNA, 539 bp, Homo sapiens
aaaaaaaaaaaaaaaaaaaaaaaagcaaagtaaaacctcccgtgaaaaaagcaagagccagaatgggctagttcttgggctgctccttccctggtagcttaaattaaggagagaggctctcaaggaaggacaaagaaagggcttgatgcatgggaaatcacaattttgaaaataatagctatcacttattctcccatgtggctttcacaggttacctaatttctctatgccttggtttgcttctctataaaatggagatgataataacatctacaatgcaagtttgttgtgatggttaaattaattaatacatacatttaagctcatagaacaccacctggcacagaataaatgcttaataaaaatggtagtcatgccaggtttgtgctttacatacattatttctaatctcacaactaccctgccagagagaaarcatcaatctcctcttcacaggtgtggaaactcattcagagggtaaatgacacttgcagccaaacgagttagtaatgttggtgaagaagttaagtcttgggact

SEQ ID NO: 842863 - DNA, 539 bp, Homo sapiens
aaaaaaaaaaaaaaaaaaaaaaaagcaaagtaaaacctcccgtgaaaaaagcaagagccagaatgggctagttcttgggctgctccttccctggtagcttaaattaaggagagaggctctcaaggaaggacaaagaaagggcttgatgcatgggaaatcacaattttgaaaataatagctatcacttattctcccatgtggctttcacaggttacctaatttctctatgccttggtttgcttctctataaaatggagatgataataacatctacaatgcaagtttgttgtgatggttaaattaattaatacatacatttaagctcatagaacaccacctggcacagaataaatgcttaataaaaatggtagtcatgccaggtttgtgctttacatacattatttctaatctcacaactaccctgccagagagaaagcatcaatctcctcttcacaggtgtggaaactcattcagagggtaaatgacacttgcagccaaaygagttagtaatgttggtgaagaagttaagtcttgggact

SEQ ID NO: 842864 - DNA, 574 bp, Homo sapiens
aagccccctgtgttaaaatccccccttggcttttctctcccaactcagtggatcattcattccagaaatgtttgttgataactcgcgaygtaactcagcattgtatgcgaagccccacagaagtgtcagagatgaagaaacattttcatcgtacaggagctcaggactccttgaatagctgaagcaaacacacgaagcgctttccccaaggtgcagttgtgctagtggattttctctgtggctttccagggttcccctgagtgcccactgcagtgacagttacggacccaccttagtcaatacgaccccaagagctgggtgtggcagagaacgcgccggagtcagagacagaagacctgggttggaacacaagttccaccacgagctgcataaataggaacagaccacaggatcctctaacctcgaggtcctcaaatgcaacatgcagtccagttcacagcctcgaaccccgaagcccaacctcgacaccctaagcactgaacattctcactcattcggtgaatcctcttctgaactgacacggaactatttttagtctttatttattccactt

SEQ ID NO: 842865 - DNA, 592 bp, Homo sapiens
tgaggtcaaattctcccctggccagtgagtcagtgatggtctgaggttgcaaacacccaagaacacagggcaaaggcaacaggagtcagttccaaggagacgctgagagcgtgacacaacatgtcagattccaagtcagtgaaagggacgtagaactctccacgttctaagcaaatggacacagctcacaaatgaagatatggcagagtttgacttatgaacaacaggagagaagacatttaaaagatagttataaaatatgcactcagaagagattgatttaagaagttttagagaacctcttggtaaaattgatgctactcttgattttcttgttgtatgttaaaaaaaagattctctttagatgatgtcaggaaattcaaatgtgaagtatgggatactatataatgctaccttacaactttatccagaagattatgacatggctagtcaacacttcgttcatttattactttaaaaattagcacayaattacaatgatagcatgttttgttgactagaagaaaggaatatattttcatatttttagcttcctatttttcctagacaaatttccaatcgactctttttt

SEQ ID NO: 842866 - DNA, 567 bp, Homo sapiens
tgcatccaaaaacagtcacataactcaactctgggggtcccaagggaatttgggtcaggatcagaaccaggggcagaagatcagcatccttgactgytcagcgatgaatccatttcctgtccccgctgctgggttctcctcccacggctgcagaaggaagcccatttcagggacacctgcatgtggggtcctgcagcctctgcatgtggaatagagacatccagggctcccagaaggcgtccctgcggagcagaccccaggcaggtgtttggtttcagggacagctttgcatccttggtgcctcgatccatgctgagtgcatagaaggtgcccagcccacaccggtcaggaggaaggaggggtccgggtgacagacagacaggatgcaatgagtccatggtgatggtccctgaagaacgggcccagggaggggtgtgctcagttccacttcccctgtggaaggcatcagaccatcagcctcaaaccttccctgggtctgtcctcagagcaggctggatgctgcaagcacccctgtgcctctgcaggcagtcgagtcaacagaggtga

SEQ ID NO: 842867 - DNA, 596 bp, Homo sapiens
cctatgtccatcctggctgcctgtgggtgagggtccctgaatgtgctgatggaggagggaggaagggagcccctgagagtattgttgamggcagtggccccttcagttaagggaggagtacagtttatcacggggatagcttccatttagccaaatggaaattcacactcttacttgttactgctctagagtgataagaaattcatctgggcaaggtggtgcacaaacagtacaccaagttccagagcctttccagaagcctcggaggacatcacctgagtgcatctgacagtcatctgtccaaccagtgcacccctcctactgcaccccgtttgtaaattgagtacattttagttactgggatcattcgcttctactgttaacttcattttctgatggtgctgtttaaattagatgttgtgattggtatgacccaatttttccatttccaaaagttgttttgcattttgtgtacatagacatatggaattattgatgatttctatggtgcctccacattttcaagcagtctgagccgagggaggaattgcatgctgccttgatgctgatggacatgatctctgctctatcgactg

SEQ ID NO: 842868 - DNA, 596 bp, Homo sapiens
cctatgtccatcctggctgcctgtgggtgagggtccctgaatgtgctgatggaggagggaggaagggagcccctgagagtattgttgacggcagtggccccttcagttaagggaggwgtacagtttatcacggggatagcttccatttagccaaatggaaattcacactcttacttgttactgctctagagtgataagaaattcatctgggcaaggtggtgcacaaacagtacaccaagttccagagcctttccagaagcctcggaggacatcacctgagtgcatctgacagtcatctgtccaaccagtgcacccctcctactgcaccccgtttgtaaattgagtacattttagttactgggatcattcgcttctactgttaacttcattttctgatggtgctgtttaaattagatgttgtgattggtatgacccaatttttccatttccaaaagttgttttgcattttgtgtacatagacatatggaattattgatgatttctatggtgcctccacattttcaagcagtctgagccgagggaggaattgcatgctgccttgatgctgatggacatgatctctgctctatcgactg

SEQ ID NO: 842869 - DNA, 363 bp, Homo sapiens
ttttattattttaaatttyttgtgggtacatgataggtatatatttatagggtacatgagttgttttgatacaggcgtgcaaagtgaaataagcacatcatggaaaatagggtgtccatcacctcaagcacttatgtttcaagttacaaacaatccaattatattgttattttaaaatataccattaagttattattgactatagtcaccccactgtgctatcaaatagtggttcttattcatccattttttttttgtacccattaaccattcccagctccatggttatcagatgctgggaagggtatcacattgatttatttgcacattttgcaccatctttgcatccctgggataaatctc

SEQ ID NO: 842870 - DNA, 602 bp, Homo sapiens
ctgcctttgctgcatcatacatatcaccagggaagtggggaaaaccagcagtgacaggtgtcacccagcttccatgcagccagaaaggccagtctcactcccatcatgacccaccaatagcactgagtttatgtccaggcagcagggctgagatcttcccccaggctaccagcctccccactgagaaagcaagcagggctatcaggtcttgcctctccctgcctgccttattacagaggtcagctagaagcttccttcaccctttggcccctccccaattctgctggctgcctttcccaaggatccctgtgagataaggccagggatggcttccctgggcttggactggagaccaggggtgcctacagggctctttctattgcttcttctacttttatattttgctcggttccttaaatctgctttagctctaggtaaggttaaatccttctctcccatgatctgattttcaggttccctagtggggatgtrggtttggaggcagacttttctccctctcacacattgaaaactcagtttttcagctgccttgcagagtttgcagcggcaagctgcttctttcaaagggtatgtgaattctt

SEQ ID NO: 842871 - DNA, 602 bp, Homo sapiens
ctgcctttgctgcatcatacatatcaccagggaagtggggaaaaccagcagtgacaggtgtcacccagcttccatgcagccagaaaggccagtctcactcccatcatgacccaccaatagcactgagtttatgtccaggcagcagggctgagatcttcccccaggctaccagcctccccactgagaaagcaagcagggctatcaggtcttgcctctccctgcctgccttattacagaggtcagctagaagcttccttcaccctttggcccctccccaattctgctggctgcctttcccaaggatccctgtgagataaggccagggatggcttccctgggcttggactggagaccaggggtgcctacagggctctttctattgcttcttctacttttatattttgctcggttccttaaatctgctttagctctaggtaaggttaaatccttctctcccatgatctgattttcaggttccctagtggggatgtgggtttggaggcagacttttctccctctcacacattgaaaactcagtttttcagctgmcttgcagagtttgcagcggcaagctgcttctttcaaagggtatgtgaattctt

SEQ ID NO: 842872 - DNA, 611 bp, Homo sapiens
gctaagcccctcgcagattccccacccacgaaaatgctgagatgacacrtaagtattgctttaagcagctcagtttgggataatttataatatatcactaacatggatttcttaaaaaaaatatctaaaaacctattttcaacttccttaacattaaaattctctgcctactctcatgctcgttcacatttttgtcttacccagtctgtctagtctgctttattattcaccccagatgagttctatatacttgcctagccagaatacttttttttcatctgcttatgccttcatctccattaattttattcatattcttcgttctgggcaaaaatacctattcctttcattttaccgtactacttaaataatgtctattcattaaatcaacatacttcttgaattcttccaggagtaacccggagcactctaaccactttgttgtctcactccatagcagttaaaaattacagtatatagttagcctttcagaccgtattttatactggtccttaaacattcctcagaggcaattctataatacttgtcggctgactgcatgcttaacttaatcaggataaggaaagagcaattctagtttccattaaaat

SEQ ID NO: 842873 - DNA, 501 bp, Homo sapiens
tatagatatgtgcaaccatgactactcctagttttagaacattttcatcaccacatgaagaaatcttgtacttttaagttatcagcccctacattcccatcctttctccagccctaagcaactctaatctactttctatctctattctggactttcatatgaatgtaattatatactggactttcatattaatgtatataattaagtaatataatatgattatataatgtgtgatcttctgtaatcggctcctttcactttgcctggtttcaaggttcatccatattgtaccatgtatcagtactttcttttttatggaaaaattacattccattttatcatagtctacattttgattatccatttattcgttgatggacatttgagatgtttctacctattggctattaatactgaataatactgttataamcatatgtgtacgtgttttcatttgtacatataggtttcatttctcttgggtatgtacgaaggacgaga

SEQ ID NO: 842874 - DNA, 520 bp, Homo sapiens
tcttcttgccttcttacaatctcatcacaagaataagtgatgtttttaaataatatcacatagtgccccttaaattcctgtgatgaattcccagtaattttctttttaatctgcatttctyacttcggtgtaaaaaaagctccttgttccatctcttgcctacctgtgagtatctgaaaacttctcaattcactcttctactcacttgcatctcaccaagcttattcctgccttagaaacttgctctatattctgctttgaatgtttgacccatagattctcctggctagagaaggatcagctttaatagaacctcttctgaaaggctcttcatatcagtcaaaggttccaagccgtttgtaagattcatattcctttgagacttgaatgcatgctaggaactctttctgcccaaattgcacacattcattgacatggaattttctacaccatttcaaggagttcatgaaatctattaagtatatatatatatatatacttaatagattatatatacata

SEQ ID NO: 842875 - DNA, 657 bp, Homo sapiens
ggagggagcaggaaggagggagagtgttcagaccttgatgcacacctgactccrgtgaaaggagacagcaaggaaagattgagtaggaagagcctcctctgcagcccagctctgagaaagtctcagccaggctgatgggaagtccccaagcaagagttgattgttagaggaatcctgaattggatgggaatggattggcatgagtactccaatgtgcttggttgttggctggaagcagctttgggggagtggccgcaatgtgaatgcagtgatggatccaaaaggtggtagctgtgctgttgtcaactctgctctctgtggcatgtcctcttgaaagagatctcagtggtgcacttccatggctaccctcataggggagggccaggccacccagagagcaatgaggcatttgctgaaacacagcgagaggggagggagagcaaaacatatttttccagacccggggacagctatagtgaactgttgtctgtttattcgccagaaactcagtgtccaagcaagtgggatttgctcagctcatgtgagcatgttatctgagtttgctggcagcaggcccatagtagcagatccctcttcattacctaaggataccctgatgtgtctgttcctgtggtctcttctaccttacctccagct

SEQ ID NO: 842876 - DNA, 564 bp, Homo sapiens
gagattgactgcagtgttgttcagccaagcctccaagggagctgagagtatacagcatagcctggagaacctcccaggttcaaccgtgacttcccagggagaagcagggaggcacagaggcttaggttgccctcccttgctcaccaaatctgactgtttggggttagatctaagagaggtggctcaaactttaacttgacaaatacttaaaatccaaattcctggacttactcacggcttagatttgggtagcaggaactgctgacatgagaagctgagaaccaaccatacaggtatgtatgttgagaggttagggtgacaggaggcaaggaagtcacatttccttctatccttttaggattaagccctggtttctcttagacgggttttatgttgccatcccctactggtctcttcgtggaggtggtgtaaggtatagggcagaacagtggttctcaatttagctgcatgttaagattgtcttgggggaatttaaactccagaccacaccccaggctaattaaatcagaatmtcttggcatgggatccaagcatttgtatgtt

SEQ ID NO: 842877 - DNA, 624 bp, Homo sapiens
catgtgcatttttgttacaagggtatattgcttgatgctsaggtttgggcttcagttgatccccaaacggtgaagacagtacccaataggaagtttttcaatgcttgtttcccttcctctctcctcccttttggagtccccagtgtctattgttcctgtgaacgagataaattttctttttttctttttaatacaggctcttgctctgtcactcaggctggagtacggtagcactgtcgtagctcactgcagccttgaactcctgaactaaagcaactctctcgtgccagcctcccaaagtgctaggattacaggtatgagccaccacacccagctagttttaatttttttttttttttttgtagagacggggtttcactacgttgcccaggttggtctggaactccaggactcactcaatcttctagcctcggcctcccaaggtgctgggattacaggcgtgagccaccgtgcctactcgaatgaggtaattcttgacaaaataaatgtgtggctagtacatcttaacatgcttttcttgctgtacttgtctctgtagcaagtgctggctgtgcattagctttcttgtccccttcacccctttggtagtggagcctggagaga

SEQ ID NO: 842878 - DNA, 534 bp, Homo sapiens
gaatatcccaactatatcattatcttgcttacatcttgacctttgcctctgatatttattttgtctaatgcaaatttgtgaacccctaaaaaattccaccacagattgctcatgctgactcagatttaaktgggatgagtcaaataccagctccctcattcctatagctggtatttctcctgcagaaactggatgctcaataaatatctgttaattatgcactggtagcatggtcttcaaatgagttactaaatgaaattatcagaaatgatcacagccatatcaaatttgggcatatggaaatatcagaaagacatatgctgaaatataacagttatctaaggtggcaggaatatgggcaaacacaaagctattattctacagcaaatatttgttacacttagaaattaaaaagtaaaatatattttcttaaaaaaaatgccccagtaatgcatatggtaggtcctactggtgactttcttctgatagaagttaatcacttctctcagcttctgcgtctgcagattgaaaaca

SEQ ID NO: 842879 - DNA, 603 bp, Homo sapiens
tatggtaggtcctactggtractttcttctgatagaagttaatcacttctctcagcttctgcgtctgcagattgaaaacagagagcacaatatctgtctgacatactctaagatttgaacaggatgatgtatgtatcagtctgttttcatgcggctgataaagacatacctgagactaggcaatttacaaaagaaagaggtttaatggacttacagttccacatggctggggaggcctcacaatcatggcagaaagcaaggaggagcaagtcacatcttacatggatggcagcaggcaaagagagagcttgtgcagggaaactcccatttttaaaaccatcagatcttgtgagattcattcactatcatgagaacagtgcaggaaagatccacccccatatttcaattgcctcccactgggatccccccacaacatgtgggaattgtggcagttacaattcaagatgagatttgggtgggtacacagccaaaccatatcaatgtatctgaagctactttctaaactggagaaaaatatatgagttttaggtgttttagttattggcattgctgtggagatggatgttatattgccatacggat

SEQ ID NO: 842880 - DNA, 658 bp, Homo sapiens
ttttaaaaagaaggtaagtgccaagaactagttaggggactcttatagcagtttatataagaaattgtggtagtctagattagggaggtgaaagtagaaattgacagaagcagatagatcaaargatatttagggccaggcattggtggctcacatctgtaattccaacactttggaaggctgaggtgggaagatcacttgaggtcagaagttcaaggctgccgtgagccatgattatgccactgcactgtagcctgggcaacacagtgataccttgattaagataaaaatatatataaaagatatttaggctgtcaaattgacagaatatgggtcaagaatggttcttgcatttatggatacagtaagtaacaggattaatgatgatgccatttgttgagaaaaggaacactaacggtctggtaatacattaaaaaaaaaaatatgccattatcaagttggtttgtttcaggaattcaagaacatggtaacatcaaaaaatacattaatgtaattcattgcattaacattttatgcagtttaatgctctttcataataaacactttagcaaaattgatatagaaaataacttccttaatttggcaaaagatacccaataaaaacctagatgtatcgtctcttttttcagcatggtag

SEQ ID NO: 842881 - DNA, 616 bp, Homo sapiens
ccttcttgacaattctgtttaaaaattatacccccttcatctttatccccagtacyctctgtcttcttttcctgcctatttttcttcctggcatttattagacttctgtgattcaagctatatttaaaaaaatgggtatttggcaacatgtgtagaatggagtagatgtgaagggcatcaagagttcaactgggaaactttcagtagtccatgtgagagaagttaagactttggcttgggatagtcataatcaaaatggaaaagaaagtgtattcattcaacattatcaagacttactgtgtgccagatgtgttgctagtgctaaacatataaatataaataagatgatccttgtgtgaagaagctcactgcctcgtgtagtggagaaatcactgggaagagctttttcagaaatcacaaattgagatccattgttgctaagggcttgtcagaatatcagtgaaaggtgaggtggacgtgtgtgttttgaagaactctgcagtgatggaaatgttctgtatctgatggctattgagcacttgaaatatgactagtgcaactgagaaactcaaattttatttcattttaaatagatatatgtagccagtggctacca

SEQ ID NO: 842882 - DNA, 591 bp, Homo sapiens
taaatcaaccacatagagctgtgagggttaaatattatwatgtgtgtagtgctcttggtttccggcacaaagaaaattcctaacaaatgttagctcttttatgattatattgttcttcatttctaatatgattggtcacaaggaccttttttattatgaagcatctagcaggacagtgtttctcaggatatacactggaaaatattgatctagtttattgcctttgagaaatgttgggtcctgttttgaagggccttgaatgtcagaacaagtttagattttatcctgtaaaaaattggaaagtttccaactgaccatattaaaatctgcgttttaggacagtggtctcccgcctttttggcaccagggactagtttcgtggaagacaatttttccacggatggcagaggcttgtttcgggatgaaactgttccacctcagaccatcaggcattattaattagattctcgtgaggggcgcacaacccagatccctcacatgtccaattcacaatagggttccctctcctgtgagaatctaatgccgcagctgatctgagaggaggtggagctcaggcgatactgcgagtga

SEQ ID NO: 842883 - DNA, 591 bp, Homo sapiens
taaatcaaccacatagagctgtgagggttaaatattattatgtgtgtagtgctcttggtttccggcacaaagaaaattcctaacaaatgttagctcttttatgattatattgttcttcatttctaatatgattggtcacaaggaccttttttattatgaagcatctagcaggacagtgtttctcaggatatacactggaaaatattgatctagtttattgcctttgagaaatgttgggtcctgttttgaagggccttgaatgtcagaacaagtttagattttatcctgtaaaaaattggaaagtttccaactgaccatattaaaatctgcgttttaggacagtggtctcccgcctttttggcaccagggactagtttcgtggaagacaatttttccacggatggcagaggcttgtttcgggatgaaactgttccacctcagaccatcaggcattattaattagattctcgtgaggggcgcacaacccagatccctcacatgtccaattcacaatagggttccctctcctrtgagaatctaatgccgcagctgatctgagaggaggtggagctcaggcgatactgcgagtga

SEQ ID NO: 842884 - DNA, 594 bp, Homo sapiens
attgccctggctgaaaagggaaagggagaacttagggatgagaacatcagcatcaacatcaacatggaacaccatttatcatgtgccaggcactgttcttaatagttaactaacaggcattcacttatttcatcttcatggtaaccctaacaggtgaataccactatcattctcacattccaggtgggggatctgaggcatgaggtttaaattgcttgtcctggaatgtggtaaagtcatagcggccaccgcaaaacatcgctccagagagtcaatagagtggaagctcctttgggtgcctctttacatggagagatgggaggcaggtggaagagtgcaatcccgtagagcatggagcatccacaggagccctctgatatggaatgagaactggaggagagaaatcaaaaaataggaagagcttagggcaaggaatctgaaaacaggactattagataaaatgtcagtgtagggacaacgtcttggtcttctggtctccagaatttaactcagtgcctggaaagtagaatatatcccaaaaacctgtcatgaattgagtaaaaagrttcggataacattttaccaggagctggc

SEQ ID NO: 842885 - DNA, 622 bp, Homo sapiens
tgcaaatttatgtacaaaatgttttaaaaagacctcatgagaataaaaggactgtgttttcatagtccaacaacaaaaacctgattttacttcaaaaagtgaccccgattagtcatttaattttaccaaaaataggattttgtttgataagataattataacttgtttttcccctaatattccagacatttcataatgatcaaatgaaatgaccacatatgaaagcaatttctttaaaaacagcctgtaatttaattccctaacaatttagtgcatagaaatcatcaattattaaattaatggagaaaaacgtatatttttaaatatcgattttaaataactgactcagaagcacatctcactaaaatccagatctgtacatgtcactgtgttagagaaacattatctcacttttaaaagcccagcaaatattttcacaaccttaaaatactacttgaggaagttactttgggtttacagtcagctattatagttctataattgtcaagctatgaaacatcatcatcatggttaaaagtaaatggaagcaaaatgtacctcgttccttgtggatctgtgagttaaccagwacatgggacctgctttctgaatagtacctagg

SEQ ID NO: 842886 - DNA, 645 bp, Homo sapiens
ctgtaaaatggtgataatcatcacatccattttataagcttgttttgagtattaaatgagttaatgcatggaaataatgccttgttcccaataagtggccaatgcattttggctgtccactcttctggcttatctactcttaacttaagtactatgtaataataaagtcaatgcacttttttgcttctccacttttacatactattgtaaaaagagtacataagattattttgtatttccactggaggtagtgcagtgtctgagactcatggaagctctggagtcttatccagtcctttcctaactgcatgactttagggaagtcacctaacttctccaagtttcaactttctcatgtgtgtattagagatatttgtagtggatatctcataaagtattgctcaaataaggggtaagccccctgtaaagtgcttagcacagtgtctgtcaccttgtaagtactcagttgatgacggctgttttgattattcaaggaaactatgactagggaggtggcaggatactgggartggggtgaattagtctaataacattattcgctattctgcctgcagcatcatttttcttctagaataagatttcccactgactaaagaaagataatatataaatttttcctttctc

SEQ ID NO: 842887 - DNA, 555 bp, Homo sapiens
gattacaagtgtgagccaccgcacctggcctaaatggttattctttagaataatatctgtgtagattattgacatgtttgtccaaaggcataaatatcttacaaacataaaaaggacaagaaacagcattagcatcaattgtgagctagcttttcatcgggtgcaagctgctttctcaaagtaatcaaaggaatgataagtaaatttaatcctttcagacatactgatgaaatacaaattggtacaacctttcctgagagcaatttgggaatatatgttaaaaagttttgaagcagaagaataaagagatttctgatctggctattctactttgaggaaattattttaaggaaatgatccagcatatgtgaaaaggtatagataacatgatgtttatcacaacactattcttaaaaagcaaagtaaactggtaacaacctgaatgtgtgtgtgtatatatgcgtgtgtgtgtgtgcgtgcacaygtacatatggtatttcaaaatggaactataagattttgggggtgcttttctgtttgtgacacagagaaaaa

SEQ ID NO: 842888 - DNA, 592 bp, Homo sapiens
taaggagtgcaaaatgttatttcattgtgattttgattcccaatttcttaatggctaatgatgttgagcatctttttatgtgcttgttggccattgtcttctatagagaaatgtctattcagatcctttgaatattaaaaaagttgggttgtctttttattatttgatcttcatttttatttttgagatggagtttcactcttgtcgaccaggctggagtgcaatggcacgatctaaactcactgcaacctccacttcccaggttcaagcaattctcctacttcagcctcctgagcagctgggattacaggtgcatcccaccacacctagctaatttttgtattattagtagagacggggttgcactatgttgcccaggctggtctcgaactcctgacctcaggtgatccacctgcctcagcctcccaaagtgctgggattacaggcatgagccactgcacccagcctatttgatctttagagttctttgtatattctggatctaagtcccygctaagatacatgatttgcaaatattttttcccatagagcgaattgtcttcacatttttttttgagacagggtcttgctc

SEQ ID NO: 842889 - DNA, 613 bp, Homo sapiens
attagacacttgaaactttccaccctcccctccaacctctgggaaggggagattgagctgatgactaatactaatggtcagtgatttaatcaggcctgcataatgaaacttccatacaaacccctaartgacagattttggacagcttccaaattggtgaacacatccacatgtcgggatgtacacccccaactccatgggacagaggcttctatgctcaggacccttccagaccttgccttagtacctcttcatgtgaatggttatttgtatcctttgtaatgaactatattcataagtataccattttctggagttctgtgagttgttctagcaaatcatggaacctgaagggggtgcttgtgtgaaccctcgactttgtagctaagtcagacaaaagtatgggtaacctggggaccagatacttggtaactggtatctgaagttagggcttttttgtggactgagcccttaaacctgtggagtctaacgctaactctgggtagttagtgtcagaattgaatcgtaggacttccagttggtgtcagaattggctggtgacaggaggaagaaagaaatcctcactagttaggttttctagaaaattatagaa

SEQ ID NO: 842890 - DNA, 564 bp, Homo sapiens
agacagaaatgttggcgggggggttccttctggggactgtgagggagaatctgttttgtgcctcttccctatcttctagtggttttctatcactggtgttttttggcatctagatgcatcatcccaatctctgcctttatcttcatatggcgttctccctgtgtcatgtctgtttctgtgtccagatttcccctttgtataagaacaacagttatattggattacggttcaccataatgatcttattttaacttgattacctcagtaaagactttatttccaaataaggtcactttcccaggtcttggagattgggacttcagcatattttgtgggagacaaaattaagcccaataacagagtgaaaacctgaggtctgagattagggtgggtgagtagatgctcttgagaaacttcagcatccagcatctctcgtattgctcgtcctaaagaagtggcytattccatcttgctaaaagatggctccttgcttgaagattatgcagaggtttcaaaagagtcaagtttcttaaaagacaatgccttccccttcagggtgtttct

SEQ ID NO: 842891 - DNA, 475 bp, Homo sapiens
aaaatccattattagggacaatctaattaaactttggcccaagcaggtctgacgatatattgcygtggtataatatagtaatgttttgatcccactcatcaaatgtggttctgtgtcaggtgacagtcggtttagaatagatatcatcaggtggatttaaagcaagagagcttagcattgagcctaagcagttcttctttcttacaatgtctgtaaaaatgagacaacttccaaatagcaactgtttttctaactcttttagaaactttcttaccataaaagttctgttacaaaaggcatttcctgtgaaaggcacttgaaactgtttctgtggagatagaaaaccctcttagtatatacaatccgataggggatttttgatttctggctggctctgctgttgagtggctttcaacctaaaaaatgctttctactagagtctaattaccaaggaatccaactgacttgttaaaag

SEQ ID NO: 842892 - DNA, 643 bp, Homo sapiens
agaaacccccaaactcttatctcctccaaattgcaggcacagaaactctctaaattgtcactttccttaataatgggttaccttattcaatgtggtaaaatgtaatattacttctcctttaaaatggttcatagcttgttgttgttgttgttatttagaatgacacttgctcttcatcccttaatcaatgagtcaatatttattgagatgaagttctgccagaattgtactcattggggaataaaagaggtacaacaaggtttgtcctgaagagattaaaatatggctgaagaaaagttacttcatacttatttacatgtgaaaatgtggctaccaataaaagacagtataaaggaaaatgagtccttggtttctaccctgcttaggagggacaaagtaaataataaatttcctccctgcaaacaactgaaagaaaatacagaatccaggtgccttctcccaacagtgctctttttacaagcactgaaatgtgaatgacaggcgggaagaccagccttcctggttcccaggtgaggctcttcccacctgraagtctgcaaggtttctcttttatcattattattattattatttatcttactttaagttatgggatacatgtgtagaacgtgcaggtttgtta

SEQ ID NO: 842893 - DNA, 628 bp, Homo sapiens
ctccttccccaggcattgtcctgcctccacacagcctctcccgcatcccggtgccctttccgggatccgagtcagygtgggcctggtgtcactgaggggacatcccaggaattcctgttctttccctctggatggccttcttgtctgcaggaagggtgggaggagctattatatatttctgtctcagctttaagggtaaaactcccctccaaaggccaggtggcttatctcctgacagccacttgtcagacacactgagccctgaattcccactccagtggtctggcatggtgcttcaaagagctgacttggatatggcaacgcaatgggggaaggaaggttgaggtggcgtctggaagcacagcacggagtggagttttgaccctcgccttcccgccgttcccagcgtttgaatgactgtattaagggaaatgaatatatgtattggggggtggggagacgttagagaaataaatgcagcagcctctgatgtggagtatcttttttccttttggattcctagtgggctgtggcatcggttctatgacttttatcgtaaaaatgtttgaatactctgattgtaaaactcagcttagtctaaactgacacacacagcactagaatgcaa

SEQ ID NO: 842894 - DNA, 495 bp, Homo sapiens
tttaggtcatttcacctagttgctagaactggaaacccagagctctcaaccttcagtaggcattaaaattatttcattctgtccattcctgakacagtcattgagaggttggtatgtgtaaaatccatctcttatatttatggcataagtgtatccataaagaacatatttcatatatacatattaaatacacacacacacacacacacacacacacagagttatttgattagatccttggtatcatgctgtatgtaatctgcagtttggttttattacttttttttttttttttttggagacgggctggagtgcagtgatacagtcataggtcactgtaagctccaagtcctgggctcatgggatcttcccacatcagcctctggagtaggcaggactacaggcacgtgccaccatgcctcctggcctcaagcaggcctcctacctcggcttcttaaaatgttgggattagattttatcactcttaattaaata

SEQ ID NO: 842895 - DNA, 525 bp, Homo sapiens
ttggtgatttggggaaggcaactatgagttggatgaatctgtagtatttttaacaccacctaaaaatgttcctgctaaagcctaaccttgatgaaaaccaaatctgtcctacagtctttagtaagatgtttcctaaactgtgttctttcatttgaaggtcagccgaaactcgttaaaaaaaaatacattgggagaagaaagctcaaaatgtgcatttttcaataggaagcataaatgtattaaaataaaagattgaatagagaagtaaggagagcagtgacagattcacagagaaagcatgaatacaagaagatgaactctagatataaatgaattcctatagtagaaagaaaaatgtatagctagatgataataaaatgtttgctaaaacaaayctagaagatggtgataaagaaacttcttttcacaacatagtcaccagtcttcatcctaaaggttaggagacctgggctctgcccattcatttctctggatagccatatgactttgctgtgtgactttgaa
